United States Patent Application Publication US 2005/0244851 A1 - sequence listing, part 48

SEQ ID NO: 1860284 - DNA, 25 bp, Homo sapien
tgagcaagactgaaatccacacact

SEQ ID NO: 1860285 - DNA, 25 bp, Homo sapien
gacggacacaacaaactgagcaaga

SEQ ID NO: 1860286 - DNA, 25 bp, Homo sapien
agtaagaactcaagctcggacccaa

SEQ ID NO: 1860287 - DNA, 25 bp, Homo sapien
gccagtgggatccaagaggcttccg

SEQ ID NO: 1860288 - DNA, 25 bp, Homo sapien
ttccaacaaggcctgagacaaagag

SEQ ID NO: 1860289 - DNA, 25 bp, Homo sapien
ggcttccgggaacaggtcagctata

SEQ ID NO: 1860290 - DNA, 25 bp, Homo sapien
gaaagaggacgatcacgtggtccca

SEQ ID NO: 1860291 - DNA, 25 bp, Homo sapien
tgaggataatagcacccacaatgcc

SEQ ID NO: 1860292 - DNA, 25 bp, Homo sapien
gcttgatgggtaaatggccgagcca

SEQ ID NO: 1860293 - DNA, 25 bp, Homo sapien
tcaataaatgctaaggtcaggagac

SEQ ID NO: 1860294 - DNA, 25 bp, Homo sapien
tctagaggaattgtttcctcaaggg

SEQ ID NO: 1860295 - DNA, 25 bp, Homo sapien
caaaaacttgttctctagaggaatt

SEQ ID NO: 1860296 - DNA, 25 bp, Homo sapien
aaaaacttgttctctagaggaattg

SEQ ID NO: 1860297 - DNA, 25 bp, Homo sapien
gagataagccttcccggaagcctga

SEQ ID NO: 1860298 - DNA, 25 bp, Homo sapien
agcccttgaaggatgtctccgcgag

SEQ ID NO: 1860299 - DNA, 25 bp, Homo sapien
accagccctcatcccgtgggttcgg

SEQ ID NO: 1860300 - DNA, 25 bp, Homo sapien
gtgggttcgggccccacagagcctc

SEQ ID NO: 1860301 - DNA, 25 bp, Homo sapien
ccctcccgccactctgccgggttca

SEQ ID NO: 1860302 - DNA, 25 bp, Homo sapien
cactctgccgggttcacgttcctta

SEQ ID NO: 1860303 - DNA, 25 bp, Homo sapien
tctgccgggttcacgttccttaaga

SEQ ID NO: 1860304 - DNA, 25 bp, Homo sapien
ggggcggaagattttgcccaggctc

SEQ ID NO: 1860305 - DNA, 25 bp, Homo sapien
tcctgacccaggcacgggaactcct

SEQ ID NO: 1860306 - DNA, 25 bp, Homo sapien
gtagaagatgatggccgaggtgagc

SEQ ID NO: 1860307 - DNA, 25 bp, Homo sapien
gcagcttctgtgtgtagtagttttt

SEQ ID NO: 1860308 - DNA, 25 bp, Homo sapien
gctcctccagcacttcgaagatcgc

SEQ ID NO: 1860309 - DNA, 25 bp, Homo sapien
gagcggccgcctcctagagaaagcc

SEQ ID NO: 1860310 - DNA, 25 bp, Homo sapien
gaatttggagctccgcatgcgcagt

SEQ ID NO: 1860311 - DNA, 25 bp, Homo sapien
ttgactctgggcagacacgtgggcc

SEQ ID NO: 1860312 - DNA, 25 bp, Homo sapien
taaggagcgggaagaacacaggact

SEQ ID NO: 1860313 - DNA, 25 bp, Homo sapien
ggacaccaagatcccagagacaatt

SEQ ID NO: 1860314 - DNA, 25 bp, Homo sapien
ctgagggacaccaagatcccagaga

SEQ ID NO: 1860315 - DNA, 25 bp, Homo sapien
gagacaattggccacttgtccactg

SEQ ID NO: 1860316 - DNA, 25 bp, Homo sapien
caagatcccagagacaattggccac

SEQ ID NO: 1860317 - DNA, 25 bp, Homo sapien
aatttggagtacaccatttaggcag

SEQ ID NO: 1860318 - DNA, 25 bp, Homo sapien
ccagcgggcccctgtgattgttcag

SEQ ID NO: 1860319 - DNA, 25 bp, Homo sapien
tcatgcccctgaatgctgtcgctgc

SEQ ID NO: 1860320 - DNA, 25 bp, Homo sapien
tgacaaccaggtcttttgcagccct

SEQ ID NO: 1860321 - DNA, 25 bp, Homo sapien
aggcaatctgaagccccaggattag

SEQ ID NO: 1860322 - DNA, 25 bp, Homo sapien
aaggcaatctgaagccccaggatta

SEQ ID NO: 1860323 - DNA, 25 bp, Homo sapien
aaaggcaatctgaagccccaggatt

SEQ ID NO: 1860324 - DNA, 25 bp, Homo sapien
gcttaaacatttaccagagccctgg

SEQ ID NO: 1860325 - DNA, 25 bp, Homo sapien
cctggcggtcaaggtggttttccag

SEQ ID NO: 1860326 - DNA, 25 bp, Homo sapien
tgccatccccaatgcttaaacattt

SEQ ID NO: 1860327 - DNA, 25 bp, Homo sapien
taccagagccctggcggtcaaggtg

SEQ ID NO: 1860328 - DNA, 25 bp, Homo sapien
tgcaagagcccaaaccggatgtggt

SEQ ID NO: 1860329 - DNA, 25 bp, Homo sapien
gcattggcccctgcatggatctagg

SEQ ID NO: 1860330 - DNA, 25 bp, Homo sapien
gtgacagcaagtacccagaagggct

SEQ ID NO: 1860331 - DNA, 25 bp, Homo sapien
cagcaaatcactggccctgagatca

SEQ ID NO: 1860332 - DNA, 25 bp, Homo sapien
actcatcactctccctttcagtttt

SEQ ID NO: 1860333 - DNA, 25 bp, Homo sapien
ttctttccgggttcacttcaggagc

SEQ ID NO: 1860334 - DNA, 25 bp, Homo sapien
cgggttcacttcaggagctgtgatt

SEQ ID NO: 1860335 - DNA, 25 bp, Homo sapien
ggctgtggcagtagctgactctcac

SEQ ID NO: 1860336 - DNA, 25 bp, Homo sapien
tgctgggagcctagaccagctccag

SEQ ID NO: 1860337 - DNA, 25 bp, Homo sapien
tgacaggaacgacctgctgggagcc

SEQ ID NO: 1860338 - DNA, 25 bp, Homo sapien
ccatggcaggataggtgacaggaac

SEQ ID NO: 1860339 - DNA, 25 bp, Homo sapien
gtgaaagacactaccaacacttcca

SEQ ID NO: 1860340 - DNA, 25 bp, Homo sapien
tccacacactgctgttcgttcccag

SEQ ID NO: 1860341 - DNA, 25 bp, Homo sapien
gctgctccttgaggtgacacctgtg

SEQ ID NO: 1860342 - DNA, 25 bp, Homo sapien
tgctccttgaggtgacacctgtgtg

SEQ ID NO: 1860343 - DNA, 25 bp, Homo sapien
acacactgctgttcgttcccagcag

SEQ ID NO: 1860344 - DNA, 25 bp, Homo sapien
ggtgttaacgaagcctgtgatcttc

SEQ ID NO: 1860345 - DNA, 25 bp, Homo sapien
gactgcgggtgttaacgaagcctgt

SEQ ID NO: 1860346 - DNA, 25 bp, Homo sapien
cgggtgttaacgaagcctgtgatct

SEQ ID NO: 1860347 - DNA, 25 bp, Homo sapien
tcgggactgcgggtgttaacgaagc

SEQ ID NO: 1860348 - DNA, 25 bp, Homo sapien
cccaggggcccaggtaacttcagat

SEQ ID NO: 1860349 - DNA, 25 bp, Homo sapien
ggtggggcacattcatcctgtggct

SEQ ID NO: 1860350 - DNA, 25 bp, Homo sapien
tttggtcccaatgcagacgcatctc

SEQ ID NO: 1860351 - DNA, 25 bp, Homo sapien
gcaagaagcgtctctatccttcctg

SEQ ID NO: 1860352 - DNA, 25 bp, Homo sapien
tactcccgcatcattggctgagaag

SEQ ID NO: 1860353 - DNA, 25 bp, Homo sapien
tccctttgtcagaggctactgagct

SEQ ID NO: 1860354 - DNA, 25 bp, Homo sapien
ctactcccgcatcattggctgagaa

SEQ ID NO: 1860355 - DNA, 25 bp, Homo sapien
gagaagtccctttgtcagaggctac

SEQ ID NO: 1860356 - DNA, 25 bp, Homo sapien
ctcatataaagtttaactggtttgc

SEQ ID NO: 1860357 - DNA, 25 bp, Homo sapien
agtttaactggtttgccaatctcac

SEQ ID NO: 1860358 - DNA, 25 bp, Homo sapien
cagactcctcatataaagtttaact

SEQ ID NO: 1860359 - DNA, 25 bp, Homo sapien
catataaagtttaactggtttgcca

SEQ ID NO: 1860360 - DNA, 25 bp, Homo sapien
ctcagctctgtctcaatgctgactt

SEQ ID NO: 1860361 - DNA, 25 bp, Homo sapien
acgaagctcatgttcttgggctcac

SEQ ID NO: 1860362 - DNA, 25 bp, Homo sapien
cgaagctcatgttcttgggctcaca

SEQ ID NO: 1860363 - DNA, 25 bp, Homo sapien
tccactttgggtaggactcaggact

SEQ ID NO: 1860364 - DNA, 25 bp, Homo sapien
cctttgacctgtgtgatgccagact

SEQ ID NO: 1860365 - DNA, 25 bp, Homo sapien
tgagaacgcaatgccaccatgtcat

SEQ ID NO: 1860366 - DNA, 25 bp, Homo sapien
tgacctgtgtgatgccagactccat

SEQ ID NO: 1860367 - DNA, 25 bp, Homo sapien
gcgtgggccctgttgtttactctct

SEQ ID NO: 1860368 - DNA, 25 bp, Homo sapien
tcattcacaccgcagaaaagccagg

SEQ ID NO: 1860369 - DNA, 25 bp, Homo sapien
cgcaagggagatggtgtaacagcct

SEQ ID NO: 1860370 - DNA, 25 bp, Homo sapien
cttcgttggccaaagggctgaccct

SEQ ID NO: 1860371 - DNA, 25 bp, Homo sapien
gcaaaccgttgatggggccttcaaa

SEQ ID NO: 1860372 - DNA, 25 bp, Homo sapien
ctggctttgcaaaccgttgatgggg

SEQ ID NO: 1860373 - DNA, 25 bp, Homo sapien
tttgcaaaccgttgatggggccttc

SEQ ID NO: 1860374 - DNA, 25 bp, Homo sapien
ttgatggggccttcaaacgcagtgg

SEQ ID NO: 1860375 - DNA, 25 bp, Homo sapien
ctgtggtgtgaatgagccatagagt

SEQ ID NO: 1860376 - DNA, 25 bp, Homo sapien
ccatagagtaaggattcagcagctg

SEQ ID NO: 1860377 - DNA, 25 bp, Homo sapien
ctggactgagaccagccgcctgctg

SEQ ID NO: 1860378 - DNA, 25 bp, Homo sapien
agctggactgagaccagccgcctgc

SEQ ID NO: 1860379 - DNA, 25 bp, Homo sapien
ttctctctgtgtaggttccagtctc

SEQ ID NO: 1860380 - DNA, 25 bp, Homo sapien
ggctcgcagtccagcgttcaatccg

SEQ ID NO: 1860381 - DNA, 25 bp, Homo sapien
ctcacacggggagagggtagtttct

SEQ ID NO: 1860382 - DNA, 25 bp, Homo sapien
gttccagtctcagatgctgcctttg

SEQ ID NO: 1860383 - DNA, 25 bp, Homo sapien
tattgtgccgctcaaacattgccgc

SEQ ID NO: 1860384 - DNA, 25 bp, Homo sapien
tctctcacataaaggaggtcgggtg

SEQ ID NO: 1860385 - DNA, 25 bp, Homo sapien
gaattaatcatatagctgcacccag

SEQ ID NO: 1860386 - DNA, 25 bp, Homo sapien
ttgcagcccgctaaagtaaggaagt

SEQ ID NO: 1860387 - DNA, 25 bp, Homo sapien
gaggacgacgaccaaagaatggagt

SEQ ID NO: 1860388 - DNA, 25 bp, Homo sapien
ccgaggacgacgaccaaagaatgga

SEQ ID NO: 1860389 - DNA, 25 bp, Homo sapien
ctaccgaggacgacgaccaaagaat

SEQ ID NO: 1860390 - DNA, 25 bp, Homo sapien
gacgacgaccaaagaatggagtata

SEQ ID NO: 1860391 - DNA, 25 bp, Homo sapien
tggctcccggtcaggtccctgtctc

SEQ ID NO: 1860392 - DNA, 25 bp, Homo sapien
ccctctggatagcatccttgctgtg

SEQ ID NO: 1860393 - DNA, 25 bp, Homo sapien
tgctgtatgattcccatgggtccct

SEQ ID NO: 1860394 - DNA, 25 bp, Homo sapien
gtatgattcccatgggtccctctgg

SEQ ID NO: 1860395 - DNA, 25 bp, Homo sapien
agtttgatgatcaaggccagccatg

SEQ ID NO: 1860396 - DNA, 25 bp, Homo sapien
tgagtttgatgatcaaggccagcca

SEQ ID NO: 1860397 - DNA, 25 bp, Homo sapien
ggatgagtttgatgatcaaggccag

SEQ ID NO: 1860398 - DNA, 25 bp, Homo sapien
gtttgatgatcaaggccagccatgc

SEQ ID NO: 1860399 - DNA, 25 bp, Homo sapien
gtaccacagtgggtacctctgggag

SEQ ID NO: 1860400 - DNA, 25 bp, Homo sapien
taccacagtgggtacctctgggagg

SEQ ID NO: 1860401 - DNA, 25 bp, Homo sapien
tgtaccacagtgggtacctctggga

SEQ ID NO: 1860402 - DNA, 25 bp, Homo sapien
ttttctcgtatctgaaatgaggcag

SEQ ID NO: 1860403 - DNA, 25 bp, Homo sapien
ccgctctagtgtttgccagtctctg

SEQ ID NO: 1860404 - DNA, 25 bp, Homo sapien
tggttttctcgtatctgaaatgagg

SEQ ID NO: 1860405 - DNA, 25 bp, Homo sapien
agcccccagaggatttcgatgtccg

SEQ ID NO: 1860406 - DNA, 25 bp, Homo sapien
gatgtgaacacccagtagccaactg

SEQ ID NO: 1860407 - DNA, 25 bp, Homo sapien
tgaagacagcgcctcttgtggctgc

SEQ ID NO: 1860408 - DNA, 25 bp, Homo sapien
ctcagtatccccatccaagaaaggg

SEQ ID NO: 1860409 - DNA, 25 bp, Homo sapien
aactggtggacctcagtatccccat

SEQ ID NO: 1860410 - DNA, 25 bp, Homo sapien
aggagtctcccggaccctactgtct

SEQ ID NO: 1860411 - DNA, 25 bp, Homo sapien
gatccccgggtactgtgatctccag

SEQ ID NO: 1860412 - DNA, 25 bp, Homo sapien
gaatctgcctgccaactgttttccc

SEQ ID NO: 1860413 - DNA, 25 bp, Homo sapien
gcactcagaatctgcctgccaactg

SEQ ID NO: 1860414 - DNA, 25 bp, Homo sapien
taggtgggcccgcggacgtgttgga

SEQ ID NO: 1860415 - DNA, 25 bp, Homo sapien
ctaagcacaataggtgggcccgcgg

SEQ ID NO: 1860416 - DNA, 25 bp, Homo sapien
aataggtgggcccgcggacgtgttg

SEQ ID NO: 1860417 - DNA, 25 bp, Homo sapien
aagcacaataggtgggcccgcggac

SEQ ID NO: 1860418 - DNA, 25 bp, Homo sapien
ctctccgcgttggtcaagaagggcc

SEQ ID NO: 1860419 - DNA, 25 bp, Homo sapien
cagagtgacctcagacccgtcacac

SEQ ID NO: 1860420 - DNA, 25 bp, Homo sapien
caacaaaagcgggtaggacagtgtc

SEQ ID NO: 1860421 - DNA, 25 bp, Homo sapien
cagtgtctccggattttgggcccaa

SEQ ID NO: 1860422 - DNA, 25 bp, Homo sapien
gagaggtataggcagccgaatgtcc

SEQ ID NO: 1860423 - DNA, 25 bp, Homo sapien
gaggtataggcagccgaatgtcccc

SEQ ID NO: 1860424 - DNA, 25 bp, Homo sapien
ataggcagccgaatgtccccgccag

SEQ ID NO: 1860425 - DNA, 25 bp, Homo sapien
agtgagaggtataggcagccgaatg

SEQ ID NO: 1860426 - DNA, 25 bp, Homo sapien
gatgaaggcgaagtagaagccctct

SEQ ID NO: 1860427 - DNA, 25 bp, Homo sapien
ctgagggtgatgaaggcgaagtaga

SEQ ID NO: 1860428 - DNA, 25 bp, Homo sapien
ggcgaagtagaagccctctgtgtag

SEQ ID NO: 1860429 - DNA, 25 bp, Homo sapien
aagtagaagccctctgtgtagctcc

SEQ ID NO: 1860430 - DNA, 25 bp, Homo sapien
tgctgcatgagatgccccagtcggt

SEQ ID NO: 1860431 - DNA, 25 bp, Homo sapien
cagtggtttactccctgctgcatga

SEQ ID NO: 1860432 - DNA, 25 bp, Homo sapien
agcctgctggcccagtggtttactc

SEQ ID NO: 1860433 - DNA, 25 bp, Homo sapien
agatgccccagtcggttgagcacca

SEQ ID NO: 1860434 - DNA, 25 bp, Homo sapien
gtgttggggctcaggttgccatagc

SEQ ID NO: 1860435 - DNA, 25 bp, Homo sapien
cgtgttggggctcaggttgccatag

SEQ ID NO: 1860436 - DNA, 25 bp, Homo sapien
gttgaacgctgggtagccacagccc

SEQ ID NO: 1860437 - DNA, 25 bp, Homo sapien
catcttgttgggatctctgggcatc

SEQ ID NO: 1860438 - DNA, 25 bp, Homo sapien
tttgcatcttgttgggatctctggg

SEQ ID NO: 1860439 - DNA, 25 bp, Homo sapien
ctgttgaacgctgggtagccacagc

SEQ ID NO: 1860440 - DNA, 25 bp, Homo sapien
aaactctgaatttggtgggccaaag

SEQ ID NO: 1860441 - DNA, 25 bp, Homo sapien
taatccaagctaggggtggtagagc

SEQ ID NO: 1860442 - DNA, 25 bp, Homo sapien
cagaggcataatccaagctaggggt

SEQ ID NO: 1860443 - DNA, 25 bp, Homo sapien
tctgaatttggtgggccaaagtcac

SEQ ID NO: 1860444 - DNA, 25 bp, Homo sapien
ctcttccgcagaggagggttagtcc

SEQ ID NO: 1860445 - DNA, 25 bp, Homo sapien
cttccgcagaggagggttagtccag

SEQ ID NO: 1860446 - DNA, 25 bp, Homo sapien
ggaggatggcgatgaggagtggagg

SEQ ID NO: 1860447 - DNA, 25 bp, Homo sapien
tcagctcttccgcagaggagggtta

SEQ ID NO: 1860448 - DNA, 25 bp, Homo sapien
tgaagagaggactgtgggaatgggg

SEQ ID NO: 1860449 - DNA, 25 bp, Homo sapien
gatggtggacacagaaaagaagaag

SEQ ID NO: 1860450 - DNA, 25 bp, Homo sapien
aaagaagaaggagcccacgagctcc

SEQ ID NO: 1860451 - DNA, 25 bp, Homo sapien
gtgatggtggacacagaaaagaaga

SEQ ID NO: 1860452 - DNA, 25 bp, Homo sapien
aggagcccacgagctcccagcgccc

SEQ ID NO: 1860453 - DNA, 25 bp, Homo sapien
ggctggctccgtttttgtatgcttg

SEQ ID NO: 1860454 - DNA, 25 bp, Homo sapien
ctggctccgtttttgtatgcttgga

SEQ ID NO: 1860455 - DNA, 25 bp, Homo sapien
gctccgtttttgtatgcttggacga

SEQ ID NO: 1860456 - DNA, 25 bp, Homo sapien
cgtttttgtatgcttggacgacatc

SEQ ID NO: 1860457 - DNA, 25 bp, Homo sapien
gagggttcagaacaccacttccgct

SEQ ID NO: 1860458 - DNA, 25 bp, Homo sapien
tccgagggttcagaacaccacttcc

SEQ ID NO: 1860459 - DNA, 25 bp, Homo sapien
tagtccgagggttcagaacaccact

SEQ ID NO: 1860460 - DNA, 25 bp, Homo sapien
cctagtccgagggttcagaacacca

SEQ ID NO: 1860461 - DNA, 25 bp, Homo sapien
actctggacggataagccaccagga

SEQ ID NO: 1860462 - DNA, 25 bp, Homo sapien
tggagactctggacggataagccac

SEQ ID NO: 1860463 - DNA, 25 bp, Homo sapien
tccggggattggctttggactggag

SEQ ID NO: 1860464 - DNA, 25 bp, Homo sapien
agactctggacggataagccaccag

SEQ ID NO: 1860465 - DNA, 25 bp, Homo sapien
tccgccaaatcgagcagctgccagt

SEQ ID NO: 1860466 - DNA, 25 bp, Homo sapien
agctgccagtctggcgtcgcttcag

SEQ ID NO: 1860467 - DNA, 25 bp, Homo sapien
ctggcgcgcagctgtctggactctg

SEQ ID NO: 1860468 - DNA, 25 bp, Homo sapien
caggacatcaatgcctccgccaaat

SEQ ID NO: 1860469 - DNA, 25 bp, Homo sapien
ggcttctcgcagtcctctcgctagg

SEQ ID NO: 1860470 - DNA, 25 bp, Homo sapien
tcgctagggcgagggtcttttcctc

SEQ ID NO: 1860471 - DNA, 25 bp, Homo sapien
cagtcctctcgctagggcgagggtc

SEQ ID NO: 1860472 - DNA, 25 bp, Homo sapien
gttgtgcccgcgtctgcgttcccga

SEQ ID NO: 1860473 - DNA, 25 bp, Homo sapien
cagctcccacttgtcgcgctggaag

SEQ ID NO: 1860474 - DNA, 25 bp, Homo sapien
ctccagcgtccagaacacgccggtg

SEQ ID NO: 1860475 - DNA, 25 bp, Homo sapien
ccgggcggtccagacacgtgaagtt

SEQ ID NO: 1860476 - DNA, 25 bp, Homo sapien
ggtccagacacgtgaagttctgcaa

SEQ ID NO: 1860477 - DNA, 25 bp, Homo sapien
ccaggcgtccagctcgtatctcctc

SEQ ID NO: 1860478 - DNA, 25 bp, Homo sapien
tctcctctcgcaaacgcctgctggt

SEQ ID NO: 1860479 - DNA, 25 bp, Homo sapien
tctcgcaaacgcctgctggtgcccg

SEQ ID NO: 1860480 - DNA, 25 bp, Homo sapien
tccagctcgtatctcctctcgcaaa

SEQ ID NO: 1860481 - DNA, 25 bp, Homo sapien
tagagaccaactttattgtcttggg

SEQ ID NO: 1860482 - DNA, 25 bp, Homo sapien
gattgccacttgtccatgagcttgg

SEQ ID NO: 1860483 - DNA, 25 bp, Homo sapien
tctgtcaatctcaagaccaccttgg

SEQ ID NO: 1860484 - DNA, 25 bp, Homo sapien
aaggacttgctgtctgtcaatctca

SEQ ID NO: 1860485 - DNA, 25 bp, Homo sapien
aaccaagaggcttgtccactccttg

SEQ ID NO: 1860486 - DNA, 25 bp, Homo sapien
ttaaccaagaggcttgtccactcct

SEQ ID NO: 1860487 - DNA, 25 bp, Homo sapien
taaccaagaggcttgtccactcctt

SEQ ID NO: 1860488 - DNA, 25 bp, Homo sapien
cgtctaggctgtgtgaagagtccgt

SEQ ID NO: 1860489 - DNA, 25 bp, Homo sapien
gaagcgtctaggctgtgtgaagagt

SEQ ID NO: 1860490 - DNA, 25 bp, Homo sapien
ggctgtgtgaagagtccgtgggtcc

SEQ ID NO: 1860491 - DNA, 25 bp, Homo sapien
aggctgtgtgaagagtccgtgggtc

SEQ ID NO: 1860492 - DNA, 25 bp, Homo sapien
ctttcttggatatggggaagtcctg

SEQ ID NO: 1860493 - DNA, 25 bp, Homo sapien
cctggggtgtgacttggactcctct

SEQ ID NO: 1860494 - DNA, 25 bp, Homo sapien
tggactcctcttgctgctgtagagc

SEQ ID NO: 1860495 - DNA, 25 bp, Homo sapien
aagtcctggggtgtgacttggactc

SEQ ID NO: 1860496 - DNA, 25 bp, Homo sapien
ggatggagtggtctaaatctctcct

SEQ ID NO: 1860497 - DNA, 25 bp, Homo sapien
cgggatggagtggtctaaatctctc

SEQ ID NO: 1860498 - DNA, 25 bp, Homo sapien
ccccgggatggagtggtctaaatct

SEQ ID NO: 1860499 - DNA, 25 bp, Homo sapien
cccgggatggagtggtctaaatctc

SEQ ID NO: 1860500 - DNA, 25 bp, Homo sapien
agagaggccagacgttcatggagct

SEQ ID NO: 1860501 - DNA, 25 bp, Homo sapien
tgagagaggccagacgttcatggag

SEQ ID NO: 1860502 - DNA, 25 bp, Homo sapien
gagaggccagacgttcatggagctc

SEQ ID NO: 1860503 - DNA, 25 bp, Homo sapien
gaggccagacgttcatggagctcac

SEQ ID NO: 1860504 - DNA, 25 bp, Homo sapien
agcccagagggagtgatgaagttaa

SEQ ID NO: 1860505 - DNA, 25 bp, Homo sapien
tttggaaaggctcttgagaaggcag

SEQ ID NO: 1860506 - DNA, 25 bp, Homo sapien
gatcctgggatctgctggctctctg

SEQ ID NO: 1860507 - DNA, 25 bp, Homo sapien
tctggcttcccatggggtgtttgga

SEQ ID NO: 1860508 - DNA, 25 bp, Homo sapien
tgcccctcggctgagagcttcctga

SEQ ID NO: 1860509 - DNA, 25 bp, Homo sapien
tgttcaggaaagtgggtaggacacc

SEQ ID NO: 1860510 - DNA, 25 bp, Homo sapien
caagaggtcctaagctttgttcaca

SEQ ID NO: 1860511 - DNA, 25 bp, Homo sapien
gggcagagatcctcttttcactaag

SEQ ID NO: 1860512 - DNA, 25 bp, Homo sapien
agagatggggatcttctgaggcctg

SEQ ID NO: 1860513 - DNA, 25 bp, Homo sapien
cagagatggggatcttctgaggcct

SEQ ID NO: 1860514 - DNA, 25 bp, Homo sapien
tcatgcagagatggggatcttctga

SEQ ID NO: 1860515 - DNA, 25 bp, Homo sapien
tgcagagatggggatcttctgaggc

SEQ ID NO: 1860516 - DNA, 25 bp, Homo sapien
cagaggctgccccatccttgacgcc

SEQ ID NO: 1860517 - DNA, 25 bp, Homo sapien
aggctgccccatccttgacgccgag

SEQ ID NO: 1860518 - DNA, 25 bp, Homo sapien
ggctgccccatccttgacgccgagg

SEQ ID NO: 1860519 - DNA, 25 bp, Homo sapien
tgccccatccttgacgccgaggccc

SEQ ID NO: 1860520 - DNA, 25 bp, Homo sapien
ggcccagtgggaggatcagcgccag

SEQ ID NO: 1860521 - DNA, 25 bp, Homo sapien
gctggcagcatctgtgcagaagcag

SEQ ID NO: 1860522 - DNA, 25 bp, Homo sapien
gccagagctggcagcatctgtgcag

SEQ ID NO: 1860523 - DNA, 25 bp, Homo sapien
agagctggcagcatctgtgcagaag

SEQ ID NO: 1860524 - DNA, 25 bp, Homo sapien
ctgccaggctccgatacactgagat

SEQ ID NO: 1860525 - DNA, 25 bp, Homo sapien
atggctgccaggctccgatacactg

SEQ ID NO: 1860526 - DNA, 25 bp, Homo sapien
atataatgcttgctggggtctgtgc

SEQ ID NO: 1860527 - DNA, 25 bp, Homo sapien
gccaggctccgatacactgagatat

SEQ ID NO: 1860528 - DNA, 25 bp, Homo sapien
ctcttcctcataacaaggaacagca

SEQ ID NO: 1860529 - DNA, 25 bp, Homo sapien
ccctcttcctcataacaaggaacag

SEQ ID NO: 1860530 - DNA, 25 bp, Homo sapien
ggtaggtctctgcagggtggtgatg

SEQ ID NO: 1860531 - DNA, 25 bp, Homo sapien
aggaacagcagttgaggtaggtctc

SEQ ID NO: 1860532 - DNA, 25 bp, Homo sapien
aatagttgtcctcagctgacatctc

SEQ ID NO: 1860533 - DNA, 25 bp, Homo sapien
tcaatagttgtcctcagctgacatc

SEQ ID NO: 1860534 - DNA, 25 bp, Homo sapien
tagttgtcctcagctgacatctctc

SEQ ID NO: 1860535 - DNA, 25 bp, Homo sapien
ttgtcctcagctgacatctctccat

SEQ ID NO: 1860536 - DNA, 25 bp, Homo sapien
gagataatgtgactgttttgttctc

SEQ ID NO: 1860537 - DNA, 25 bp, Homo sapien
gataatgtgactgttttgttctcac

SEQ ID NO: 1860538 - DNA, 25 bp, Homo sapien
ctgagataatgtgactgttttgttc

SEQ ID NO: 1860539 - DNA, 25 bp, Homo sapien
cctgagataatgtgactgttttgtt

SEQ ID NO: 1860540 - DNA, 25 bp, Homo sapien
aagtagaagccctcgctgaagctcc

SEQ ID NO: 1860541 - DNA, 25 bp, Homo sapien
aaagtagaagccctcgctgaagctc

SEQ ID NO: 1860542 - DNA, 25 bp, Homo sapien
caacaacatagtccccaaagccaat

SEQ ID NO: 1860543 - DNA, 25 bp, Homo sapien
agtagaagccctcgctgaagctcca

SEQ ID NO: 1860544 - DNA, 25 bp, Homo sapien
tgggaagatgagaatgaccagcgtc

SEQ ID NO: 1860545 - DNA, 25 bp, Homo sapien
gggtgggaagatgagaatgaccagc

SEQ ID NO: 1860546 - DNA, 25 bp, Homo sapien
gaagatgagaatgaccagcgtcccc

SEQ ID NO: 1860547 - DNA, 25 bp, Homo sapien
agatgagaatgaccagcgtccccag

SEQ ID NO: 1860548 - DNA, 25 bp, Homo sapien
ttcaatggcggccagatgggcacgc

SEQ ID NO: 1860549 - DNA, 25 bp, Homo sapien
gccagatgggcacgcagccctgtgc

SEQ ID NO: 1860550 - DNA, 25 bp, Homo sapien
ggagcgcctgggacggtcctcccat

SEQ ID NO: 1860551 - DNA, 25 bp, Homo sapien
ggacggtcctcccatctttcaatgg

SEQ ID NO: 1860552 - DNA, 25 bp, Homo sapien
gcgggatgcccaacagggcatagaa

SEQ ID NO: 1860553 - DNA, 25 bp, Homo sapien
ggatgcccaacagggcatagaagac

SEQ ID NO: 1860554 - DNA, 25 bp, Homo sapien
cccaacagggcatagaagacacaga

SEQ ID NO: 1860555 - DNA, 25 bp, Homo sapien
gttaagcgggatgcccaacagggca

SEQ ID NO: 1860556 - DNA, 25 bp, Homo sapien
gaacacatgagataccacctgaagc

SEQ ID NO: 1860557 - DNA, 25 bp, Homo sapien
tacctgagagattcttctggccaaa

SEQ ID NO: 1860558 - DNA, 25 bp, Homo sapien
tcacctgagttcaaggaaagtatgt

SEQ ID NO: 1860559 - DNA, 25 bp, Homo sapien
caaaggagtatgcttggtctatggg

SEQ ID NO: 1860560 - DNA, 25 bp, Homo sapien
gcaaagaagaaactgctgccaaagt

SEQ ID NO: 1860561 - DNA, 25 bp, Homo sapien
ctgcaaagaagaaactgctgccaaa

SEQ ID NO: 1860562 - DNA, 25 bp, Homo sapien
tgacgactgtgcctgcaaagaagaa

SEQ ID NO: 1860563 - DNA, 25 bp, Homo sapien
ctatggtagtgacgactgtgcctgc

SEQ ID NO: 1860564 - DNA, 25 bp, Homo sapien
ctccaggtgcaaacaggccaggaaa

SEQ ID NO: 1860565 - DNA, 25 bp, Homo sapien
ccaactccaggtgcaaacaggccag

SEQ ID NO: 1860566 - DNA, 25 bp, Homo sapien
ggcatttatctgtgtctcccacccg

SEQ ID NO: 1860567 - DNA, 25 bp, Homo sapien
atttatctgtgtctcccacccgcag

SEQ ID NO: 1860568 - DNA, 25 bp, Homo sapien
gggagagggcagaaggagctgcagc

SEQ ID NO: 1860569 - DNA, 25 bp, Homo sapien
ggagagggcagaaggagctgcagcc

SEQ ID NO: 1860570 - DNA, 25 bp, Homo sapien
tgggagagggcagaaggagctgcag

SEQ ID NO: 1860571 - DNA, 25 bp, Homo sapien
ctgggagagggcagaaggagctgca

SEQ ID NO: 1860572 - DNA, 25 bp, Homo sapien
tccatcccaatcccacatcgctccc

SEQ ID NO: 1860573 - DNA, 25 bp, Homo sapien
ccatcccaatcccacatcgctcccc

SEQ ID NO: 1860574 - DNA, 25 bp, Homo sapien
gtccaggcaggtgtagttctccagg

SEQ ID NO: 1860575 - DNA, 25 bp, Homo sapien
gagcctccgcctgcctctctagcag

SEQ ID NO: 1860576 - DNA, 25 bp, Homo sapien
aaactggtccctggactgagcctcc

SEQ ID NO: 1860577 - DNA, 25 bp, Homo sapien
ggaagcgcagcttctccaactgaaa

SEQ ID NO: 1860578 - DNA, 25 bp, Homo sapien
atagtggcaccgagcagcaggtagc

SEQ ID NO: 1860579 - DNA, 25 bp, Homo sapien
agcaggtagcagacataggccagca

SEQ ID NO: 1860580 - DNA, 25 bp, Homo sapien
gcaggtagcagacataggccagcag

SEQ ID NO: 1860581 - DNA, 25 bp, Homo sapien
tggaagatagtggcaccgagcagca

SEQ ID NO: 1860582 - DNA, 25 bp, Homo sapien
ggccaggaccctgccagggccgtgg

SEQ ID NO: 1860583 - DNA, 25 bp, Homo sapien
ggaccctgccagggccgtggggctg

SEQ ID NO: 1860584 - DNA, 25 bp, Homo sapien
tggccaggaccctgccagggccgtg

SEQ ID NO: 1860585 - DNA, 25 bp, Homo sapien
gctgtggccaggaccctgccagggc

SEQ ID NO: 1860586 - DNA, 25 bp, Homo sapien
gatgtttctgggctaaatcggatag

SEQ ID NO: 1860587 - DNA, 25 bp, Homo sapien
taaatcggataggtgtgctcactct

SEQ ID NO: 1860588 - DNA, 25 bp, Homo sapien
aggttctcctgagtgcttcatgtct

SEQ ID NO: 1860589 - DNA, 25 bp, Homo sapien
tctccaagttggatagatgtttctg

SEQ ID NO: 1860590 - DNA, 25 bp, Homo sapien
gctgttcattaagaatgtcccgacg

SEQ ID NO: 1860591 - DNA, 25 bp, Homo sapien
gtgggctgttcattaagaatgtccc

SEQ ID NO: 1860592 - DNA, 25 bp, Homo sapien
ttcattaagaatgtcccgacgcagt

SEQ ID NO: 1860593 - DNA, 25 bp, Homo sapien
aggtggagcccacattgtgtgggct

SEQ ID NO: 1860594 - DNA, 25 bp, Homo sapien
tgtggcttaggcacggccctgtctg

SEQ ID NO: 1860595 - DNA, 25 bp, Homo sapien
ccctgtggcttaggcacggccctgt

SEQ ID NO: 1860596 - DNA, 25 bp, Homo sapien
caccctgtggcttaggcacggccct

SEQ ID NO: 1860597 - DNA, 25 bp, Homo sapien
tgtccaccctgtggcttaggcacgg

SEQ ID NO: 1860598 - DNA, 25 bp, Homo sapien
tctgaagtggttctgtgcaagcccc

SEQ ID NO: 1860599 - DNA, 25 bp, Homo sapien
cacatggtccgggagctttcccaga

SEQ ID NO: 1860600 - DNA, 25 bp, Homo sapien
gggatctctgaagtggttctgtgca

SEQ ID NO: 1860601 - DNA, 25 bp, Homo sapien
ccagacggcaccttgttgggatgtg

SEQ ID NO: 1860602 - DNA, 25 bp, Homo sapien
tattcgattgccctggagaaactca

SEQ ID NO: 1860603 - DNA, 25 bp, Homo sapien
ttaaatctgaaaggcagcgtgagag

SEQ ID NO: 1860604 - DNA, 25 bp, Homo sapien
actcaatacatggagagctctctcg

SEQ ID NO: 1860605 - DNA, 25 bp, Homo sapien
gagagtcaaaccctattcgattgcc

SEQ ID NO: 1860606 - DNA, 25 bp, Homo sapien
cagtctggacacagtccacaggtaa

SEQ ID NO: 1860607 - DNA, 25 bp, Homo sapien
catccgtggatgtctgcagggcttc

SEQ ID NO: 1860608 - DNA, 25 bp, Homo sapien
cagtccacaggtaatgacggttgtt

SEQ ID NO: 1860609 - DNA, 25 bp, Homo sapien
caggcaggactgagtaactctgtag

SEQ ID NO: 1860610 - DNA, 25 bp, Homo sapien
gaatggactatctgcatgggagaag

SEQ ID NO: 1860611 - DNA, 25 bp, Homo sapien
gggatgaacgtagtgggccacaggg

SEQ ID NO: 1860612 - DNA, 25 bp, Homo sapien
gaaaagagaatggactatctgcatg

SEQ ID NO: 1860613 - DNA, 25 bp, Homo sapien
gatgaacgtagtgggccacagggac

SEQ ID NO: 1860614 - DNA, 25 bp, Homo sapien
cgccgtggcagatacggtggccttt

SEQ ID NO: 1860615 - DNA, 25 bp, Homo sapien
ctggaaggcactcgccgtggcagat

SEQ ID NO: 1860616 - DNA, 25 bp, Homo sapien
cacatataggtaccacctggaaggc

SEQ ID NO: 1860617 - DNA, 25 bp, Homo sapien
gggcatcacacatataggtaccacc

SEQ ID NO: 1860618 - DNA, 25 bp, Homo sapien
tgacatccggaggtgataagggact

SEQ ID NO: 1860619 - DNA, 25 bp, Homo sapien
gggtggacaccaggcatgatttaca

SEQ ID NO: 1860620 - DNA, 25 bp, Homo sapien
tacgtgggcactactctgctgtgag

SEQ ID NO: 1860621 - DNA, 25 bp, Homo sapien
cctgatgacagagtgtggcctgaca

SEQ ID NO: 1860622 - DNA, 25 bp, Homo sapien
aaaaacccatagctttgagagtcat

SEQ ID NO: 1860623 - DNA, 25 bp, Homo sapien
aaacccatagctttgagagtcattg

SEQ ID NO: 1860624 - DNA, 25 bp, Homo sapien
agaaaaacccatagctttgagagtc

SEQ ID NO: 1860625 - DNA, 25 bp, Homo sapien
ttgagagtcattggagctgcagcag

SEQ ID NO: 1860626 - DNA, 25 bp, Homo sapien
gggaggagcagagcgtccccagggc

SEQ ID NO: 1860627 - DNA, 25 bp, Homo sapien
ctgagacagggaggagcagagcgtc

SEQ ID NO: 1860628 - DNA, 25 bp, Homo sapien
cagggaggagcagagcgtccccagg

SEQ ID NO: 1860629 - DNA, 25 bp, Homo sapien
gagacagggaggagcagagcgtccc

SEQ ID NO: 1860630 - DNA, 25 bp, Homo sapien
tgcattcagggctacactcagaggc

SEQ ID NO: 1860631 - DNA, 25 bp, Homo sapien
ggtcaaccctatgcatgcactggag

SEQ ID NO: 1860632 - DNA, 25 bp, Homo sapien
tcagaacttagcacaatggatggca

SEQ ID NO: 1860633 - DNA, 25 bp, Homo sapien
tcaaatcagcatgttagcgcaggtc

SEQ ID NO: 1860634 - DNA, 25 bp, Homo sapien
cttgttatccaatggctgaaaacca

SEQ ID NO: 1860635 - DNA, 25 bp, Homo sapien
tctcttgcggatcaatcatacccta

SEQ ID NO: 1860636 - DNA, 25 bp, Homo sapien
gaaaaccattggtttgtatagagga

SEQ ID NO: 1860637 - DNA, 25 bp, Homo sapien
taagttggagcaatcatagggctcc

SEQ ID NO: 1860638 - DNA, 25 bp, Homo sapien
gccccagatcccatgttgtgtgttt

SEQ ID NO: 1860639 - DNA, 25 bp, Homo sapien
aggaggctggttcacaccccgcatg

SEQ ID NO: 1860640 - DNA, 25 bp, Homo sapien
tgtctcagtgggagatctaatgttg

SEQ ID NO: 1860641 - DNA, 25 bp, Homo sapien
tgtcttagtgattgccccaggaggc

SEQ ID NO: 1860642 - DNA, 25 bp, Homo sapien
tcctctggttctacagactttacag

SEQ ID NO: 1860643 - DNA, 25 bp, Homo sapien
tagaatcagaatttggtcttcctct

SEQ ID NO: 1860644 - DNA, 25 bp, Homo sapien
ggttctacagactttacagagggct

SEQ ID NO: 1860645 - DNA, 25 bp, Homo sapien
ctcttggggaggcttctagaatcag

SEQ ID NO: 1860646 - DNA, 25 bp, Homo sapien
ccattgaactgtgagggccaggagt

SEQ ID NO: 1860647 - DNA, 25 bp, Homo sapien
ccctgtcccgatgggattcagtcag

SEQ ID NO: 1860648 - DNA, 25 bp, Homo sapien
tgtcccgatgggattcagtcagagc

SEQ ID NO: 1860649 - DNA, 25 bp, Homo sapien
actgtgagggccaggagtggaccag

SEQ ID NO: 1860650 - DNA, 25 bp, Homo sapien
cagcctgagaaacacatctgggttc

SEQ ID NO: 1860651 - DNA, 25 bp, Homo sapien
gatgggcctgcctagcttagaaatg

SEQ ID NO: 1860652 - DNA, 25 bp, Homo sapien
gaaggaccgtttactgaacagcgac

SEQ ID NO: 1860653 - DNA, 25 bp, Homo sapien
tgggttctggctcgtctactcatga

SEQ ID NO: 1860654 - DNA, 25 bp, Homo sapien
cagggggcagttcttcaagaacctc

SEQ ID NO: 1860655 - DNA, 25 bp, Homo sapien
ttcaagaacctccttgagggctgcc

SEQ ID NO: 1860656 - DNA, 25 bp, Homo sapien
ccagggggcagttcttcaagaacct

SEQ ID NO: 1860657 - DNA, 25 bp, Homo sapien
aagaacctccttgagggctgcccac

SEQ ID NO: 1860658 - DNA, 25 bp, Homo sapien
tgtcagcccaaatcctcccaagtgg

SEQ ID NO: 1860659 - DNA, 25 bp, Homo sapien
tatgatgtccttagaccctgcaggg

SEQ ID NO: 1860660 - DNA, 25 bp, Homo sapien
gagagggcccatggagacaagaccc

SEQ ID NO: 1860661 - DNA, 25 bp, Homo sapien
ttcccttggatctgtcatggagagg

SEQ ID NO: 1860662 - DNA, 25 bp, Homo sapien
cagcagcccatagttcacttctgaa

SEQ ID NO: 1860663 - DNA, 25 bp, Homo sapien
ccactggtgtgagcatcctctgaca

SEQ ID NO: 1860664 - DNA, 25 bp, Homo sapien
tcaaagtcactagttgctcccagca

SEQ ID NO: 1860665 - DNA, 25 bp, Homo sapien
cactacaacagtgagctgaagcctt

SEQ ID NO: 1860666 - DNA, 25 bp, Homo sapien
tgacgagtgttagcttggttggctt

SEQ ID NO: 1860667 - DNA, 25 bp, Homo sapien
acctggtactgggtgacgagtgtta

SEQ ID NO: 1860668 - DNA, 25 bp, Homo sapien
gtgacgagtgttagcttggttggct

SEQ ID NO: 1860669 - DNA, 25 bp, Homo sapien
ccacaggaacctggtactgggtgac

SEQ ID NO: 1860670 - DNA, 25 bp, Homo sapien
gaaagggtaattcttggtgatacat

SEQ ID NO: 1860671 - DNA, 25 bp, Homo sapien
tcttggtgatacattgaatggccag

SEQ ID NO: 1860672 - DNA, 25 bp, Homo sapien
gggtaattcttggtgatacattgaa

SEQ ID NO: 1860673 - DNA, 25 bp, Homo sapien
gaagaaagggtaattcttggtgata

SEQ ID NO: 1860674 - DNA, 25 bp, Homo sapien
agtgagactttaagccaggggttca

SEQ ID NO: 1860675 - DNA, 25 bp, Homo sapien
gtgagactttaagccaggggttcaa

SEQ ID NO: 1860676 - DNA, 25 bp, Homo sapien
ccttcctgtttgtagaagcctgagc

SEQ ID NO: 1860677 - DNA, 25 bp, Homo sapien
gccccttcctgtttgtagaagcctg

SEQ ID NO: 1860678 - DNA, 25 bp, Homo sapien
gagccaccgagggaggtgcacttac

SEQ ID NO: 1860679 - DNA, 25 bp, Homo sapien
ccccacaagtgttggtgacctgctg

SEQ ID NO: 1860680 - DNA, 25 bp, Homo sapien
ccacaagtgttggtgacctgctgcc

SEQ ID NO: 1860681 - DNA, 25 bp, Homo sapien
cccacaagtgttggtgacctgctgc

SEQ ID NO: 1860682 - DNA, 25 bp, Homo sapien
tccggtgagagggatggacgacact

SEQ ID NO: 1860683 - DNA, 25 bp, Homo sapien
tccgtctggctgtctccggtgagag

SEQ ID NO: 1860684 - DNA, 25 bp, Homo sapien
gatgatgtccgagtccgtctggctg

SEQ ID NO: 1860685 - DNA, 25 bp, Homo sapien
cttgatgaaggcgatgatgtccgag

SEQ ID NO: 1860686 - DNA, 25 bp, Homo sapien
taggtgactgatctcactcagaaag

SEQ ID NO: 1860687 - DNA, 25 bp, Homo sapien
gaaagctacatgacacggctggcct

SEQ ID NO: 1860688 - DNA, 25 bp, Homo sapien
catgcaaattgggtcaagtcattcc

SEQ ID NO: 1860689 - DNA, 25 bp, Homo sapien
tggaggcaaccacgtgtcacatttt

SEQ ID NO: 1860690 - DNA, 25 bp, Homo sapien
gccacttccttagaaggcagtaagg

SEQ ID NO: 1860691 - DNA, 25 bp, Homo sapien
cagtaaggacggtatgtaacaaggg

SEQ ID NO: 1860692 - DNA, 25 bp, Homo sapien
tggccattcccgcaggtagtttggg

SEQ ID NO: 1860693 - DNA, 25 bp, Homo sapien
ccattcccgcaggtagtttgggtgt

SEQ ID NO: 1860694 - DNA, 25 bp, Homo sapien
aggctgagcagccattctagccgga

SEQ ID NO: 1860695 - DNA, 25 bp, Homo sapien
tctagccggaggatacaaatgccca

SEQ ID NO: 1860696 - DNA, 25 bp, Homo sapien
attctagccggaggatacaaatgcc

SEQ ID NO: 1860697 - DNA, 25 bp, Homo sapien
gcagccattctagccggaggataca

SEQ ID NO: 1860698 - DNA, 25 bp, Homo sapien
gtgctggtgctgctctgtttctggc

SEQ ID NO: 1860699 - DNA, 25 bp, Homo sapien
tgtggactggggcaaggcgagggca

SEQ ID NO: 1860700 - DNA, 25 bp, Homo sapien
caggattttcctggcattcacatca

SEQ ID NO: 1860701 - DNA, 25 bp, Homo sapien
gcgagggcaggattttcctggcatt

SEQ ID NO: 1860702 - DNA, 25 bp, Homo sapien
aatctgccagtgccttgatcttgga

SEQ ID NO: 1860703 - DNA, 25 bp, Homo sapien
cagacatcgaatctgccagtgcctt

SEQ ID NO: 1860704 - DNA, 25 bp, Homo sapien
agacatcgaatctgccagtgccttg

SEQ ID NO: 1860705 - DNA, 25 bp, Homo sapien
tcgaatctgccagtgccttgatctt

SEQ ID NO: 1860706 - DNA, 25 bp, Homo sapien
ggagcagccgctctggagctcgggc

SEQ ID NO: 1860707 - DNA, 25 bp, Homo sapien
tcaccctggcggctctgaccgggca

SEQ ID NO: 1860708 - DNA, 25 bp, Homo sapien
cgctctggagctcgggcagcaacag

SEQ ID NO: 1860709 - DNA, 25 bp, Homo sapien
cagcaacagccgctgggccctcgct

SEQ ID NO: 1860710 - DNA, 25 bp, Homo sapien
ctgctcacagagtgaccgtgtcgga

SEQ ID NO: 1860711 - DNA, 25 bp, Homo sapien
ctcacagagtgaccgtgtcggaggg

SEQ ID NO: 1860712 - DNA, 25 bp, Homo sapien
tgctcacagagtgaccgtgtcggag

SEQ ID NO: 1860713 - DNA, 25 bp, Homo sapien
cacagagtgaccgtgtcggagggac

SEQ ID NO: 1860714 - DNA, 25 bp, Homo sapien
gcagagttctgtaggcccgttacta

SEQ ID NO: 1860715 - DNA, 25 bp, Homo sapien
tctgtaggcccgttactaccagcat

SEQ ID NO: 1860716 - DNA, 25 bp, Homo sapien
cgtggcagagttctgtaggcccgtt

SEQ ID NO: 1860717 - DNA, 25 bp, Homo sapien
ttctgtaggcccgttactaccagca

SEQ ID NO: 1860718 - DNA, 25 bp, Homo sapien
tgcctagtgtgaccgtcccatccag

SEQ ID NO: 1860719 - DNA, 25 bp, Homo sapien
tgtgaccgtcccatccaggaatgct

SEQ ID NO: 1860720 - DNA, 25 bp, Homo sapien
tagtgtgaccgtcccatccaggaat

SEQ ID NO: 1860721 - DNA, 25 bp, Homo sapien
accgtcccatccaggaatgctggca

SEQ ID NO: 1860722 - DNA, 25 bp, Homo sapien
tgttcaggacactcagtgatctctg

SEQ ID NO: 1860723 - DNA, 25 bp, Homo sapien
tgcccaggaattagagcatccaacc

SEQ ID NO: 1860724 - DNA, 25 bp, Homo sapien
cactcaagttgaggtgttttaacaa

SEQ ID NO: 1860725 - DNA, 25 bp, Homo sapien
gctgaacagcgctctagggctggct

SEQ ID NO: 1860726 - DNA, 25 bp, Homo sapien
cacgcccggctatggatttgtgggg

SEQ ID NO: 1860727 - DNA, 25 bp, Homo sapien
tgctaccagtagaagctacccaaga

SEQ ID NO: 1860728 - DNA, 25 bp, Homo sapien
taccttgcatctgtcgggccccttg

SEQ ID NO: 1860729 - DNA, 25 bp, Homo sapien
agggctttctactcgctgagcagga

SEQ ID NO: 1860730 - DNA, 25 bp, Homo sapien
ctgggcaagcatagtgtatttctac

SEQ ID NO: 1860731 - DNA, 25 bp, Homo sapien
ctacataaggctcctgagaacggtc

SEQ ID NO: 1860732 - DNA, 25 bp, Homo sapien
tgatagatgacgatggcaatgacca

SEQ ID NO: 1860733 - DNA, 25 bp, Homo sapien
gaacggtcacgtggacatttgctcc

SEQ ID NO: 1860734 - DNA, 25 bp, Homo sapien
ggtccaagcccagattgatagatga

SEQ ID NO: 1860735 - DNA, 25 bp, Homo sapien
cttgttcagcatccatactgcaggg

SEQ ID NO: 1860736 - DNA, 25 bp, Homo sapien
agacccagggagacccccagtctgg

SEQ ID NO: 1860737 - DNA, 25 bp, Homo sapien
gttcagcatccatactgcagggcag

SEQ ID NO: 1860738 - DNA, 25 bp, Homo sapien
tttttaagcccccatcttgttcagc

SEQ ID NO: 1860739 - DNA, 25 bp, Homo sapien
ggaccattcatgctgggagtcagat

SEQ ID NO: 1860740 - DNA, 25 bp, Homo sapien
cgagtgaattcactgctggagaatt

SEQ ID NO: 1860741 - DNA, 25 bp, Homo sapien
agtgaattcactgctggagaattta

SEQ ID NO: 1860742 - DNA, 25 bp, Homo sapien
gagtgaattcactgctggagaattt

SEQ ID NO: 1860743 - DNA, 25 bp, Homo sapien
tcgagtgaattcactgctggagaat

SEQ ID NO: 1860744 - DNA, 25 bp, Homo sapien
gttggccccagaaggagtttcacag

SEQ ID NO: 1860745 - DNA, 25 bp, Homo sapien
ctgttggccccagaaggagtttcac

SEQ ID NO: 1860746 - DNA, 25 bp, Homo sapien
tgttggccccagaaggagtttcaca

SEQ ID NO: 1860747 - DNA, 25 bp, Homo sapien
ttggccccagaaggagtttcacagt

SEQ ID NO: 1860748 - DNA, 25 bp, Homo sapien
tgtgtctcttgacagccccagtggg

SEQ ID NO: 1860749 - DNA, 25 bp, Homo sapien
ttgacagccccagtggggctgcatg

SEQ ID NO: 1860750 - DNA, 25 bp, Homo sapien
ctgtgggtcaaagcccccactgtgt

SEQ ID NO: 1860751 - DNA, 25 bp, Homo sapien
gcttcatgagcaggggctgagacca

SEQ ID NO: 1860752 - DNA, 25 bp, Homo sapien
caagtgctcgatctccaccttcagg

SEQ ID NO: 1860753 - DNA, 25 bp, Homo sapien
ccatgagcagctgcaagtgctcgat

SEQ ID NO: 1860754 - DNA, 25 bp, Homo sapien
gctttcaggcgagtgaacattgttt

SEQ ID NO: 1860755 - DNA, 25 bp, Homo sapien
caggcgagtgaacattgttttatac

SEQ ID NO: 1860756 - DNA, 25 bp, Homo sapien
tcctgctggtctggcatcagaggca

SEQ ID NO: 1860757 - DNA, 25 bp, Homo sapien
ggcacggccatgttttccgagattc

SEQ ID NO: 1860758 - DNA, 25 bp, Homo sapien
aggcacggccatgttttccgagatt

SEQ ID NO: 1860759 - DNA, 25 bp, Homo sapien
gaggcacggccatgttttccgagat

SEQ ID NO: 1860760 - DNA, 25 bp, Homo sapien
gccagaagaggcagtctccaggcct

SEQ ID NO: 1860761 - DNA, 25 bp, Homo sapien
gaacagacagcagaaggtagggggg

SEQ ID NO: 1860762 - DNA, 25 bp, Homo sapien
agacagcagaaggtaggggggacgg

SEQ ID NO: 1860763 - DNA, 25 bp, Homo sapien
cagacagcagaaggtaggggggacg

SEQ ID NO: 1860764 - DNA, 25 bp, Homo sapien
acaacagttaatgtggaggtggcgc

SEQ ID NO: 1860765 - DNA, 25 bp, Homo sapien
cagcacactccacgacacaaactac

SEQ ID NO: 1860766 - DNA, 25 bp, Homo sapien
caacagttaatgtggaggtggcgcc

SEQ ID NO: 1860767 - DNA, 25 bp, Homo sapien
aacagttaatgtggaggtggcgcca

SEQ ID NO: 1860768 - DNA, 25 bp, Homo sapien
tgcttctgatatgttctgaggcttg

SEQ ID NO: 1860769 - DNA, 25 bp, Homo sapien
ttgagttttgtaggtctccatcccc

SEQ ID NO: 1860770 - DNA, 25 bp, Homo sapien
tggtgaaatgcattgcagcctcacc

SEQ ID NO: 1860771 - DNA, 25 bp, Homo sapien
agagcctcccatcacctgacaggag

SEQ ID NO: 1860772 - DNA, 25 bp, Homo sapien
ggaattagccgtgcaaggaccagag

SEQ ID NO: 1860773 - DNA, 25 bp, Homo sapien
tggcctgcgaggtcacactgttcat

SEQ ID NO: 1860774 - DNA, 25 bp, Homo sapien
gaaggccagtcaagatgtggacccc

SEQ ID NO: 1860775 - DNA, 25 bp, Homo sapien
cttcaagttgggaggacgcacagac

SEQ ID NO: 1860776 - DNA, 25 bp, Homo sapien
gaataaccataaccatcgcacagct

SEQ ID NO: 1860777 - DNA, 25 bp, Homo sapien
gaaagcacactctctgtaaggttga

SEQ ID NO: 1860778 - DNA, 25 bp, Homo sapien
taaggttgaaactgcctgcatcggg

SEQ ID NO: 1860779 - DNA, 25 bp, Homo sapien
gcatcgggcccttgtaggtgcttga

SEQ ID NO: 1860780 - DNA, 25 bp, Homo sapien
acagtcgaatggcttgttcttgggg

SEQ ID NO: 1860781 - DNA, 25 bp, Homo sapien
gtcgaatggcttgttcttgggggct

SEQ ID NO: 1860782 - DNA, 25 bp, Homo sapien
cgaatggcttgttcttgggggctgc

SEQ ID NO: 1860783 - DNA, 25 bp, Homo sapien
tcacagtcgaatggcttgttcttgg

SEQ ID NO: 1860784 - DNA, 25 bp, Homo sapien
ctcttcctgcagattctctttgtac

SEQ ID NO: 1860785 - DNA, 25 bp, Homo sapien
gctacttgctgtatatgccgctggg

SEQ ID NO: 1860786 - DNA, 25 bp, Homo sapien
cttgctgtatatgccgctgggtgat

SEQ ID NO: 1860787 - DNA, 25 bp, Homo sapien
gtatatgccgctgggtgatttcttc

SEQ ID NO: 1860788 - DNA, 25 bp, Homo sapien
ctagggctacttgctgtatatgccg

SEQ ID NO: 1860789 - DNA, 25 bp, Homo sapien
acatcaggattgatgtaaatggcgt

SEQ ID NO: 1860790 - DNA, 25 bp, Homo sapien
tcaacttatttcaacatcaggattg

SEQ ID NO: 1860791 - DNA, 25 bp, Homo sapien
tcaacatcaggattgatgtaaatgg

SEQ ID NO: 1860792 - DNA, 25 bp, Homo sapien
tatttcaacatcaggattgatgtaa

SEQ ID NO: 1860793 - DNA, 25 bp, Homo sapien
ttgcttcatttatactttctcccag

SEQ ID NO: 1860794 - DNA, 25 bp, Homo sapien
catttatactttctcccagggcctt

SEQ ID NO: 1860795 - DNA, 25 bp, Homo sapien
gcttcatttatactttctcccaggg

SEQ ID NO: 1860796 - DNA, 25 bp, Homo sapien
ttcatttatactttctcccagggcc

SEQ ID NO: 1860797 - DNA, 25 bp, Homo sapien
gaagggctggactgccgtccatata

SEQ ID NO: 1860798 - DNA, 25 bp, Homo sapien
gactgccgtccatatacagagccat

SEQ ID NO: 1860799 - DNA, 25 bp, Homo sapien
catgtactcccactcccttcactgg

SEQ ID NO: 1860800 - DNA, 25 bp, Homo sapien
gccgtccatatacagagccatgtac

SEQ ID NO: 1860801 - DNA, 25 bp, Homo sapien
gacaggactgctctccagaacagct

SEQ ID NO: 1860802 - DNA, 25 bp, Homo sapien
taagaatataatttggtccatagac

SEQ ID NO: 1860803 - DNA, 25 bp, Homo sapien
tgacaacatgtcagcagataatcct

SEQ ID NO: 1860804 - DNA, 25 bp, Homo sapien
ggagtgcctgcagttctaagaatat

SEQ ID NO: 1860805 - DNA, 25 bp, Homo sapien
aaagcctcctggcatcctaatgaca

SEQ ID NO: 1860806 - DNA, 25 bp, Homo sapien
tcatcgatggtaacgctgtcagcgt

SEQ ID NO: 1860807 - DNA, 25 bp, Homo sapien
agaatctgtttgttgtcatcgatgg

SEQ ID NO: 1860808 - DNA, 25 bp, Homo sapien
tcagcgtggtccctcttgaagattt

SEQ ID NO: 1860809 - DNA, 25 bp, Homo sapien
agacacagggaaatggcctcagtca

SEQ ID NO: 1860810 - DNA, 25 bp, Homo sapien
acacagggaaatggcctcagtcaca

SEQ ID NO: 1860811 - DNA, 25 bp, Homo sapien
gaaatggcctcagtcacagcatcag

SEQ ID NO: 1860812 - DNA, 25 bp, Homo sapien
atggcctcagtcacagcatcaggat

SEQ ID NO: 1860813 - DNA, 25 bp, Homo sapien
ttaatttcattgtcacttcagtcag

SEQ ID NO: 1860814 - DNA, 25 bp, Homo sapien
aagaggcccacagcagagagactct

SEQ ID NO: 1860815 - DNA, 25 bp, Homo sapien
tggctgacaacctgctgaggaggcc

SEQ ID NO: 1860816 - DNA, 25 bp, Homo sapien
agaccacaaaaccagccctggctcc

SEQ ID NO: 1860817 - DNA, 25 bp, Homo sapien
tgggagcagaaaggacgtggagggc

SEQ ID NO: 1860818 - DNA, 25 bp, Homo sapien
gatcgttgtgtacggtcttgaaggt

SEQ ID NO: 1860819 - DNA, 25 bp, Homo sapien
caggcagtttgggatcgttgtgtac

SEQ ID NO: 1860820 - DNA, 25 bp, Homo sapien
cagaggagacaagcgcaggcagttt

SEQ ID NO: 1860821 - DNA, 25 bp, Homo sapien
cacggacaaagtattctggagttgg

SEQ ID NO: 1860822 - DNA, 25 bp, Homo sapien
gaatgatggctattatcttgtcagc

SEQ ID NO: 1860823 - DNA, 25 bp, Homo sapien
tttccttctgtcacggacaaagtat

SEQ ID NO: 1860824 - DNA, 25 bp, Homo sapien
gattgtggtgaccacaggtgaaggc

SEQ ID NO: 1860825 - DNA, 25 bp, Homo sapien
ctggcttgccaaaggagtggacagg

SEQ ID NO: 1860826 - DNA, 25 bp, Homo sapien
tggcttgccaaaggagtggacaggc

SEQ ID NO: 1860827 - DNA, 25 bp, Homo sapien
ggcttgccaaaggagtggacaggcc

SEQ ID NO: 1860828 - DNA, 25 bp, Homo sapien
tccaggacaaagtgcccacatgggc

SEQ ID NO: 1860829 - DNA, 25 bp, Homo sapien
agaaatccgtggacagacgcaggca

SEQ ID NO: 1860830 - DNA, 25 bp, Homo sapien
ctgagtttggaaagccgcctgggtc

SEQ ID NO: 1860831 - DNA, 25 bp, Homo sapien
ctgcattttggagccagcttaggca

SEQ ID NO: 1860832 - DNA, 25 bp, Homo sapien
gactatgagagatcagcacaacttg

SEQ ID NO: 1860833 - DNA, 25 bp, Homo sapien
gaatgctcataagcaccactgagtg

SEQ ID NO: 1860834 - DNA, 25 bp, Homo sapien
tgagtggagcaggattcacgctaac

SEQ ID NO: 1860835 - DNA, 25 bp, Homo sapien
acaggagcccactggactcttgact

SEQ ID NO: 1860836 - DNA, 25 bp, Homo sapien
atcttttatagtctccatggttcct

SEQ ID NO: 1860837 - DNA, 25 bp, Homo sapien
tatcttttatagtctccatggttcc

SEQ ID NO: 1860838 - DNA, 25 bp, Homo sapien
cttttatagtctccatggttccttc

SEQ ID NO: 1860839 - DNA, 25 bp, Homo sapien
tcttttatagtctccatggttcctt

SEQ ID NO: 1860840 - DNA, 25 bp, Homo sapien
cccaaagaaggttctactgaactca

SEQ ID NO: 1860841 - DNA, 25 bp, Homo sapien
tcttgtctggccacgagattgacca

SEQ ID NO: 1860842 - DNA, 25 bp, Homo sapien
tacggctgcatttgctgcgtgtctt

SEQ ID NO: 1860843 - DNA, 25 bp, Homo sapien
tgccttcttgtctggccacgagatt

SEQ ID NO: 1860844 - DNA, 25 bp, Homo sapien
gtgccctgggccagctacctacatg

SEQ ID NO: 1860845 - DNA, 25 bp, Homo sapien
cctgggccagctacctacatggatc

SEQ ID NO: 1860846 - DNA, 25 bp, Homo sapien
tgggccagctacctacatggatctt

SEQ ID NO: 1860847 - DNA, 25 bp, Homo sapien
gccctgggccagctacctacatgga

SEQ ID NO: 1860848 - DNA, 25 bp, Homo sapien
tggctttgagtcctctaaatcccct

SEQ ID NO: 1860849 - DNA, 25 bp, Homo sapien
tgagtcctctaaatcccctgctgct

SEQ ID NO: 1860850 - DNA, 25 bp, Homo sapien
ggctttgagtcctctaaatcccctg

SEQ ID NO: 1860851 - DNA, 25 bp, Homo sapien
tttgagtcctctaaatcccctgctg

SEQ ID NO: 1860852 - DNA, 25 bp, Homo sapien
tggtctctggaaaatccgatccccg

SEQ ID NO: 1860853 - DNA, 25 bp, Homo sapien
tttggtctctggaaaatccgatccc

SEQ ID NO: 1860854 - DNA, 25 bp, Homo sapien
tctctggaaaatccgatccccgaaa

SEQ ID NO: 1860855 - DNA, 25 bp, Homo sapien
tatttggtctctggaaaatccgatc

SEQ ID NO: 1860856 - DNA, 25 bp, Homo sapien
catcatttgcttctatcagggtggg

SEQ ID NO: 1860857 - DNA, 25 bp, Homo sapien
tctccaacaagcatcatttgcttct

SEQ ID NO: 1860858 - DNA, 25 bp, Homo sapien
tcagggtgggttcatcattgttctt

SEQ ID NO: 1860859 - DNA, 25 bp, Homo sapien
taatgtccacaattgagatctccaa

SEQ ID NO: 1860860 - DNA, 25 bp, Homo sapien
aggccgctcccttccctaaagtctg

SEQ ID NO: 1860861 - DNA, 25 bp, Homo sapien
tgaagttcactgtcttccaaggccg

SEQ ID NO: 1860862 - DNA, 25 bp, Homo sapien
agttcactgtcttccaaggccgctc

SEQ ID NO: 1860863 - DNA, 25 bp, Homo sapien
ctgactattctgaagttcactgtct

SEQ ID NO: 1860864 - DNA, 25 bp, Homo sapien
tgtgtgccacgtcatcataccaaag

SEQ ID NO: 1860865 - DNA, 25 bp, Homo sapien
gattgggctcagtgggaacttcctc

SEQ ID NO: 1860866 - DNA, 25 bp, Homo sapien
gactccgtctgagctctgtgtgcca

SEQ ID NO: 1860867 - DNA, 25 bp, Homo sapien
tatgtccgcgtgtccctggaagagg

SEQ ID NO: 1860868 - DNA, 25 bp, Homo sapien
gcaaaatagttagcccaagcctggg

SEQ ID NO: 1860869 - DNA, 25 bp, Homo sapien
gagaatatgggtaagcacatcctcc

SEQ ID NO: 1860870 - DNA, 25 bp, Homo sapien
caagtaggacatagtaccccagtat

SEQ ID NO: 1860871 - DNA, 25 bp, Homo sapien
tcccactgtaggagtatggcatatc

SEQ ID NO: 1860872 - DNA, 25 bp, Homo sapien
cctgtcttgaccatggtaggctgca

SEQ ID NO: 1860873 - DNA, 25 bp, Homo sapien
catgagccaggcacgtctatatgtg

SEQ ID NO: 1860874 - DNA, 25 bp, Homo sapien
taaattcccagcagtgagcctaggc

SEQ ID NO: 1860875 - DNA, 25 bp, Homo sapien
tgcagatcctttcaaccagaggcct

SEQ ID NO: 1860876 - DNA, 25 bp, Homo sapien
tcaattatgaggactggatttcatc

SEQ ID NO: 1860877 - DNA, 25 bp, Homo sapien
aattatgaggactggatttcatccc

SEQ ID NO: 1860878 - DNA, 25 bp, Homo sapien
tcacatttttatcaaacctgaatgt

SEQ ID NO: 1860879 - DNA, 25 bp, Homo sapien
caattatgaggactggatttcatcc

SEQ ID NO: 1860880 - DNA, 25 bp, Homo sapien
tccttgggcgcaatcatctttgcgt

SEQ ID NO: 1860881 - DNA, 25 bp, Homo sapien
cagatgtattcctcccggcttacag

SEQ ID NO: 1860882 - DNA, 25 bp, Homo sapien
tctttgcgtgctgttgtggtccaga

SEQ ID NO: 1860883 - DNA, 25 bp, Homo sapien
gatctgtacccacatgaacttggcc

SEQ ID NO: 1860884 - DNA, 25 bp, Homo sapien
tcttccactggttgatgctcctgct

SEQ ID NO: 1860885 - DNA, 25 bp, Homo sapien
cttcctccgacactgtggccctatc

SEQ ID NO: 1860886 - DNA, 25 bp, Homo sapien
tccaggcctctaggaaacgggcatc

SEQ ID NO: 1860887 - DNA, 25 bp, Homo sapien
tgctctccaggcctctaggaaacgg

SEQ ID NO: 1860888 - DNA, 25 bp, Homo sapien
tgctacatcgaaatccattacagac

SEQ ID NO: 1860889 - DNA, 25 bp, Homo sapien
ctaaagggtgctacatcgaaatcca

SEQ ID NO: 1860890 - DNA, 25 bp, Homo sapien
taaagggtgctacatcgaaatccat

SEQ ID NO: 1860891 - DNA, 25 bp, Homo sapien
agggtgctacatcgaaatccattac

SEQ ID NO: 1860892 - DNA, 25 bp, Homo sapien
gctgaggatagtcgcattctttgac

SEQ ID NO: 1860893 - DNA, 25 bp, Homo sapien
ggatagtcgcattctttgaccttct

SEQ ID NO: 1860894 - DNA, 25 bp, Homo sapien
gagctgaggatagtcgcattctttg

SEQ ID NO: 1860895 - DNA, 25 bp, Homo sapien
tgaggatagtcgcattctttgacct

SEQ ID NO: 1860896 - DNA, 25 bp, Homo sapien
tctatccatgccagccaagtggaga

SEQ ID NO: 1860897 - DNA, 25 bp, Homo sapien
tgtctgaattcacgtctatccatgc

SEQ ID NO: 1860898 - DNA, 25 bp, Homo sapien
gaattcacgtctatccatgccagcc

SEQ ID NO: 1860899 - DNA, 25 bp, Homo sapien
ctctgggactgtctgaattcacgtc

SEQ ID NO: 1860900 - DNA, 25 bp, Homo sapien
tgacaaaggttcagccagagcaccc

SEQ ID NO: 1860901 - DNA, 25 bp, Homo sapien
ggcagatcagccgtcttcatcctgg

SEQ ID NO: 1860902 - DNA, 25 bp, Homo sapien
aggatggtgaaacccacccggctgg

SEQ ID NO: 1860903 - DNA, 25 bp, Homo sapien
cgtcttcatcctggcggccggtgcg

SEQ ID NO: 1860904 - DNA, 25 bp, Homo sapien
gaactgaccgaaaggatttcttgtg

SEQ ID NO: 1860905 - DNA, 25 bp, Homo sapien
aagaactgaccgaaaggatttcttg

SEQ ID NO: 1860906 - DNA, 25 bp, Homo sapien
aactgaccgaaaggatttcttgtgc

SEQ ID NO: 1860907 - DNA, 25 bp, Homo sapien
ctgaccgaaaggatttcttgtgcat

SEQ ID NO: 1860908 - DNA, 25 bp, Homo sapien
tttttcactggttgcaatactttgc

SEQ ID NO: 1860909 - DNA, 25 bp, Homo sapien
aactaaaatgttccctgcaagagta

SEQ ID NO: 1860910 - DNA, 25 bp, Homo sapien
gagtaactatgtcaggataaaaaca

SEQ ID NO: 1860911 - DNA, 25 bp, Homo sapien
tggaaagaagcaatgtgaaatggaa

SEQ ID NO: 1860912 - DNA, 25 bp, Homo sapien
ttcttcatcacttcagaaaggatac

SEQ ID NO: 1860913 - DNA, 25 bp, Homo sapien
cagaatatctcgtagctttctatat

SEQ ID NO: 1860914 - DNA, 25 bp, Homo sapien
tgtttcagaatatctcgtagctttc

SEQ ID NO: 1860915 - DNA, 25 bp, Homo sapien
tatctcgtagctttctatattcttc

SEQ ID NO: 1860916 - DNA, 25 bp, Homo sapien
cttcttcttttaatggttcttgaca

SEQ ID NO: 1860917 - DNA, 25 bp, Homo sapien
tccaagaactggtcaactagaaaag

SEQ ID NO: 1860918 - DNA, 25 bp, Homo sapien
caaaagaattagaagtccatggcct

SEQ ID NO: 1860919 - DNA, 25 bp, Homo sapien
caaagatcgtaccattttctggaca

SEQ ID NO: 1860920 - DNA, 25 bp, Homo sapien
gacatgcaatgctggatcctaacct

SEQ ID NO: 1860921 - DNA, 25 bp, Homo sapien
tgatgaaaacagtgatgaactttac

SEQ ID NO: 1860922 - DNA, 25 bp, Homo sapien
gcgccaacctctaatctactgtctg

SEQ ID NO: 1860923 - DNA, 25 bp, Homo sapien
tgaactttacgcatatccgcgccaa

SEQ ID NO: 1860924 - DNA, 25 bp, Homo sapien
taatctactgtctgaatcctggtct

SEQ ID NO: 1860925 - DNA, 25 bp, Homo sapien
aaggctgaagtggactcctagctca

SEQ ID NO: 1860926 - DNA, 25 bp, Homo sapien
caagtacatattctaggaaacgttc

SEQ ID NO: 1860927 - DNA, 25 bp, Homo sapien
gcctgctgatgagctggaccactca

SEQ ID NO: 1860928 - DNA, 25 bp, Homo sapien
cctcgtaagatacaagcctgctgat

SEQ ID NO: 1860929 - DNA, 25 bp, Homo sapien
gcactgggctttggtattccatcaa

SEQ ID NO: 1860930 - DNA, 25 bp, Homo sapien
tgctcacgtgcactgggctttggta

SEQ ID NO: 1860931 - DNA, 25 bp, Homo sapien
tggtattccatcaaggctcctctcc

SEQ ID NO: 1860932 - DNA, 25 bp, Homo sapien
agattgctcacgtgcactgggcttt

SEQ ID NO: 1860933 - DNA, 25 bp, Homo sapien
tagaatacaaggaggaccagggaca

SEQ ID NO: 1860934 - DNA, 25 bp, Homo sapien
agaatacaaggaggaccagggacat

SEQ ID NO: 1860935 - DNA, 25 bp, Homo sapien
tgtagaatacaaggaggaccaggga

SEQ ID NO: 1860936 - DNA, 25 bp, Homo sapien
ctgtagaatacaaggaggaccaggg

SEQ ID NO: 1860937 - DNA, 25 bp, Homo sapien
cacaaagaaacatgcctggtctttc

SEQ ID NO: 1860938 - DNA, 25 bp, Homo sapien
tctgcctgagtaaaagaactgatcg

SEQ ID NO: 1860939 - DNA, 25 bp, Homo sapien
tgaagatcagccttttgacatgcta

SEQ ID NO: 1860940 - DNA, 25 bp, Homo sapien
actgatcgctttactctttctggga

SEQ ID NO: 1860941 - DNA, 25 bp, Homo sapien
gactatacagatctcagccaaattg

SEQ ID NO: 1860942 - DNA, 25 bp, Homo sapien
catgtgctttaccttcttgaggcca

SEQ ID NO: 1860943 - DNA, 25 bp, Homo sapien
gaacacatgacttcgctgatggtag

SEQ ID NO: 1860944 - DNA, 25 bp, Homo sapien
tgaaatacctctgacagcctgtgtc

SEQ ID NO: 1860945 - DNA, 25 bp, Homo sapien
attacttgggcctcccctcttcagg

SEQ ID NO: 1860946 - DNA, 25 bp, Homo sapien
tgtagtgtcaggaccaaaaacactt

SEQ ID NO: 1860947 - DNA, 25 bp, Homo sapien
ggagccattaatgacctctgggata

SEQ ID NO: 1860948 - DNA, 25 bp, Homo sapien
cctaggagtcaagggatatgaattc

SEQ ID NO: 1860949 - DNA, 25 bp, Homo sapien
gaaaggcctcaacaactgctcttag

SEQ ID NO: 1860950 - DNA, 25 bp, Homo sapien
aaacgtagtgcaagcattgcccaca

SEQ ID NO: 1860951 - DNA, 25 bp, Homo sapien
aaattgaagttaggcccagtgctgc

SEQ ID NO: 1860952 - DNA, 25 bp, Homo sapien
gccaccctaagctgaaagccagaaa

SEQ ID NO: 1860953 - DNA, 25 bp, Homo sapien
tcataataactggaggctgacatct

SEQ ID NO: 1860954 - DNA, 25 bp, Homo sapien
tatacattaacttggctatacagcc

SEQ ID NO: 1860955 - DNA, 25 bp, Homo sapien
tcttcaccgaagaagttctgtatac

SEQ ID NO: 1860956 - DNA, 25 bp, Homo sapien
gctgggaaatggctcaaaaaatctg

SEQ ID NO: 1860957 - DNA, 25 bp, Homo sapien
gatggtaatatccttatgccatgcc

SEQ ID NO: 1860958 - DNA, 25 bp, Homo sapien
gtctgatggtaatatccttatgcca

SEQ ID NO: 1860959 - DNA, 25 bp, Homo sapien
tcagagaatgtctgatggtaatatc

SEQ ID NO: 1860960 - DNA, 25 bp, Homo sapien
gaatgtctgatggtaatatccttat

SEQ ID NO: 1860961 - DNA, 25 bp, Homo sapien
cctagaacacagagcagtacagact

SEQ ID NO: 1860962 - DNA, 25 bp, Homo sapien
tgtctcctggagagtttgggcgcaa

SEQ ID NO: 1860963 - DNA, 25 bp, Homo sapien
actgtcagttgtgaacgagtgccaa

SEQ ID NO: 1860964 - DNA, 25 bp, Homo sapien
tgggcgcaataagaggactgaagct

SEQ ID NO: 1860965 - DNA, 25 bp, Homo sapien
cttccctgtctctccattcttaaca

SEQ ID NO: 1860966 - DNA, 25 bp, Homo sapien
gcccttccctgtctctccattctta

SEQ ID NO: 1860967 - DNA, 25 bp, Homo sapien
ccttccctgtctctccattcttaac

SEQ ID NO: 1860968 - DNA, 25 bp, Homo sapien
gggcccttccctgtctctccattct

SEQ ID NO: 1860969 - DNA, 25 bp, Homo sapien
tgaccatggccagttcatccttcag

SEQ ID NO: 1860970 - DNA, 25 bp, Homo sapien
cagttcctggatttccttttgtagg

SEQ ID NO: 1860971 - DNA, 25 bp, Homo sapien
ccttcagttcctggatttccttttg

SEQ ID NO: 1860972 - DNA, 25 bp, Homo sapien
tctgcttctgtgagtgcctctgtcc

SEQ ID NO: 1860973 - DNA, 25 bp, Homo sapien
acttctcattaaggtgaacttggtg

SEQ ID NO: 1860974 - DNA, 25 bp, Homo sapien
aatgtcaacttctcattaaggtgaa

SEQ ID NO: 1860975 - DNA, 25 bp, Homo sapien
tacagctcttaaaattatggacaat

SEQ ID NO: 1860976 - DNA, 25 bp, Homo sapien
gagaacatacagctcttaaaattat

SEQ ID NO: 1860977 - DNA, 25 bp, Homo sapien
ggtagggacagcaacaaaatccacc

SEQ ID NO: 1860978 - DNA, 25 bp, Homo sapien
actgtaatgctatagggcttctgga

SEQ ID NO: 1860979 - DNA, 25 bp, Homo sapien
aatccaccctagcagttcagttcca

SEQ ID NO: 1860980 - DNA, 25 bp, Homo sapien
tgtgatgctgatacctgaccagggc

SEQ ID NO: 1860981 - DNA, 25 bp, Homo sapien
gaagagaactccatcagaggagctt

SEQ ID NO: 1860982 - DNA, 25 bp, Homo sapien
ctccatcagaggagcttggtgcttt

SEQ ID NO: 1860983 - DNA, 25 bp, Homo sapien
tgcagaagagaactccatcagagga

SEQ ID NO: 1860984 - DNA, 25 bp, Homo sapien
gagaactccatcagaggagcttggt

SEQ ID NO: 1860985 - DNA, 25 bp, Homo sapien
tatgagtgccactcgctgtgcaaat

SEQ ID NO: 1860986 - DNA, 25 bp, Homo sapien
gaacagcttcattctttatgagtgc

SEQ ID NO: 1860987 - DNA, 25 bp, Homo sapien
caaatctgcaggttgatatagactc

SEQ ID NO: 1860988 - DNA, 25 bp, Homo sapien
cgctgtgcaaatctgcaggttgata

SEQ ID NO: 1860989 - DNA, 25 bp, Homo sapien
caatcatagttgtcatgcagttccc

SEQ ID NO: 1860990 - DNA, 25 bp, Homo sapien
tctccaaggagagtgttgcaatcat

SEQ ID NO: 1860991 - DNA, 25 bp, Homo sapien
gtctcttaggacactggtcatcatg

SEQ ID NO: 1860992 - DNA, 25 bp, Homo sapien
tctataaggaatgtgcgaacggtgc

SEQ ID NO: 1860993 - DNA, 25 bp, Homo sapien
cgtggcagccctcattctagtttga

SEQ ID NO: 1860994 - DNA, 25 bp, Homo sapien
taagatgtagctccaccaagcagac

SEQ ID NO: 1860995 - DNA, 25 bp, Homo sapien
aaagctgtctccctcagttctcgtg

SEQ ID NO: 1860996 - DNA, 25 bp, Homo sapien
tgcggagaacagtgctcagcacttg

SEQ ID NO: 1860997 - DNA, 25 bp, Homo sapien
cagatcctggttccttgcttgacaa

SEQ ID NO: 1860998 - DNA, 25 bp, Homo sapien
tacttggcctctgttagaagatggc

SEQ ID NO: 1860999 - DNA, 25 bp, Homo sapien
tggcatgtcgtacagttgcagatcc

SEQ ID NO: 1861000 - DNA, 25 bp, Homo sapien
tcaaccagatggagtttggcatgtc

SEQ ID NO: 1861001 - DNA, 25 bp, Homo sapien
actttcccaaagtcggcaccgagtg

SEQ ID NO: 1861002 - DNA, 25 bp, Homo sapien
tcggcaccgagtgttcctttctcac

SEQ ID NO: 1861003 - DNA, 25 bp, Homo sapien
gaagccaggcggaaagaaagcaagc

SEQ ID NO: 1861004 - DNA, 25 bp, Homo sapien
tgaccattcacgtgggaaaggaagc

SEQ ID NO: 1861005 - DNA, 25 bp, Homo sapien
gatcaggatcctccagtattgtcac

SEQ ID NO: 1861006 - DNA, 25 bp, Homo sapien
caggtgaatgttctgatcaggatcc

SEQ ID NO: 1861007 - DNA, 25 bp, Homo sapien
caatcattcggttggtgtctcctaa

SEQ ID NO: 1861008 - DNA, 25 bp, Homo sapien
gagagtcaagtttttcaggtgaatg

SEQ ID NO: 1861009 - DNA, 25 bp, Homo sapien
ggaggcttcatgtcttggatccaaa

SEQ ID NO: 1861010 - DNA, 25 bp, Homo sapien
catgtcttggatccaaaagatcata

SEQ ID NO: 1861011 - DNA, 25 bp, Homo sapien
gatccaaaagatcataaccacattc

SEQ ID NO: 1861012 - DNA, 25 bp, Homo sapien
tcttggatccaaaagatcataacca

SEQ ID NO: 1861013 - DNA, 25 bp, Homo sapien
gataatgcctctgtcactgtaacgc

SEQ ID NO: 1861014 - DNA, 25 bp, Homo sapien
ttcccgctgcctgtttgcccatatg

SEQ ID NO: 1861015 - DNA, 25 bp, Homo sapien
tgacagtgtccttgggataatgcct

SEQ ID NO: 1861016 - DNA, 25 bp, Homo sapien
cccctgtgatagtgaatgtcttccc

SEQ ID NO: 1861017 - DNA, 25 bp, Homo sapien
acactttcaatatcaacatggctaa

SEQ ID NO: 1861018 - DNA, 25 bp, Homo sapien
gcagtgcctagccatttgtgtaggc

SEQ ID NO: 1861019 - DNA, 25 bp, Homo sapien
gtgcagtgcctagccatttgtgtag

SEQ ID NO: 1861020 - DNA, 25 bp, Homo sapien
tgtgcagtgcctagccatttgtgta

SEQ ID NO: 1861021 - DNA, 25 bp, Homo sapien
ctttgtgcagtgcctagccatttgt

SEQ ID NO: 1861022 - DNA, 25 bp, Homo sapien
gagattaagtatactggcttcatgt

SEQ ID NO: 1861023 - DNA, 25 bp, Homo sapien
aacagttgtctcaaagttgctctcc

SEQ ID NO: 1861024 - DNA, 25 bp, Homo sapien
tagccttagagaagttaactatatc

SEQ ID NO: 1861025 - DNA, 25 bp, Homo sapien
cattctctaggcaatctattctgag

SEQ ID NO: 1861026 - DNA, 25 bp, Homo sapien
catttgcatggagaactcctatatt

SEQ ID NO: 1861027 - DNA, 25 bp, Homo sapien
catggagaactcctatatttccaca

SEQ ID NO: 1861028 - DNA, 25 bp, Homo sapien
tttgcatggagaactcctatatttc

SEQ ID NO: 1861029 - DNA, 25 bp, Homo sapien
tgcatggagaactcctatatttcca

SEQ ID NO: 1861030 - DNA, 25 bp, Homo sapien
agctctttctgaccacttgccccat

SEQ ID NO: 1861031 - DNA, 25 bp, Homo sapien
aagctctttctgaccacttgcccca

SEQ ID NO: 1861032 - DNA, 25 bp, Homo sapien
tgacaacgccctgagcagtccatga

SEQ ID NO: 1861033 - DNA, 25 bp, Homo sapien
cgtgacaacgccctgagcagtccat

SEQ ID NO: 1861034 - DNA, 25 bp, Homo sapien
aacgccctgagcagtccatgaagct

SEQ ID NO: 1861035 - DNA, 25 bp, Homo sapien
acaacgccctgagcagtccatgaag

SEQ ID NO: 1861036 - DNA, 25 bp, Homo sapien
gtcttatctgattagggtcccactc

SEQ ID NO: 1861037 - DNA, 25 bp, Homo sapien
tcaaggcttgacagggtttggtttc

SEQ ID NO: 1861038 - DNA, 25 bp, Homo sapien
ggaagtttaaagtgccagctcagaa

SEQ ID NO: 1861039 - DNA, 25 bp, Homo sapien
caaagatcctacctccagatatagt

SEQ ID NO: 1861040 - DNA, 25 bp, Homo sapien
tcgtgtagaagttgatcctgagcaa

SEQ ID NO: 1861041 - DNA, 25 bp, Homo sapien
ccataagctatagatcagtcgtgta

SEQ ID NO: 1861042 - DNA, 25 bp, Homo sapien
aacattttagcaccctttactgaca

SEQ ID NO: 1861043 - DNA, 25 bp, Homo sapien
tgtctatgacttagcaagaaaggaa

SEQ ID NO: 1861044 - DNA, 25 bp, Homo sapien
ctatgagcatcacgaaggaaggagc

SEQ ID NO: 1861045 - DNA, 25 bp, Homo sapien
ggaaggagctgtggctttttcttct

SEQ ID NO: 1861046 - DNA, 25 bp, Homo sapien
tgagcatcacgaaggaaggagctgt

SEQ ID NO: 1861047 - DNA, 25 bp, Homo sapien
aggaaggagctgtggctttttcttc

SEQ ID NO: 1861048 - DNA, 25 bp, Homo sapien
tcaaggtaacctaggagtgtcaagc

SEQ ID NO: 1861049 - DNA, 25 bp, Homo sapien
ggtgcctcatcctgaagaccttggg

SEQ ID NO: 1861050 - DNA, 25 bp, Homo sapien
caagtcagtgtcgaaaatgctcagt

SEQ ID NO: 1861051 - DNA, 25 bp, Homo sapien
aatactacataactgcactggtgcc

SEQ ID NO: 1861052 - DNA, 25 bp, Homo sapien
ggttgacaacatcaggtaagttgcc

SEQ ID NO: 1861053 - DNA, 25 bp, Homo sapien
ggtaagttgccaagtacttcctcaa

SEQ ID NO: 1861054 - DNA, 25 bp, Homo sapien
cttctaatcttaggttgacaacatc

SEQ ID NO: 1861055 - DNA, 25 bp, Homo sapien
catcaggtaagttgccaagtacttc

SEQ ID NO: 1861056 - DNA, 25 bp, Homo sapien
gctgcgctgcccagatcaatgtacg

SEQ ID NO: 1861057 - DNA, 25 bp, Homo sapien
tggtcacacatggaactggcgtaca

SEQ ID NO: 1861058 - DNA, 25 bp, Homo sapien
cccctgggaggttggtactatgaga

SEQ ID NO: 1861059 - DNA, 25 bp, Homo sapien
caatgtacgcatatgcccctgggag

SEQ ID NO: 1861060 - DNA, 25 bp, Homo sapien
cttctgttcctggtaatagcctgat

SEQ ID NO: 1861061 - DNA, 25 bp, Homo sapien
ttcccagttcacaccgccaagagtg

SEQ ID NO: 1861062 - DNA, 25 bp, Homo sapien
tttgtccagattttcccagttcaca

SEQ ID NO: 1861063 - DNA, 25 bp, Homo sapien
caagagtgatagtctgatggcccca

SEQ ID NO: 1861064 - DNA, 25 bp, Homo sapien
caaaaacggtctcttggtttgcatc

SEQ ID NO: 1861065 - DNA, 25 bp, Homo sapien
ttgcatcctgatcaaaaattctttg

SEQ ID NO: 1861066 - DNA, 25 bp, Homo sapien
tggtttgcatcctgatcaaaaattc

SEQ ID NO: 1861067 - DNA, 25 bp, Homo sapien
tggcaatgttttcaaaaacggtctc

SEQ ID NO: 1861068 - DNA, 25 bp, Homo sapien
tgtactcctgtatacaaatggtggg

SEQ ID NO: 1861069 - DNA, 25 bp, Homo sapien
tagcacaatgtttgccctgtagtct

SEQ ID NO: 1861070 - DNA, 25 bp, Homo sapien
cctgtagtctcaaccacactgtgct

SEQ ID NO: 1861071 - DNA, 25 bp, Homo sapien
ctgtgctgttgtactcctgtataca

SEQ ID NO: 1861072 - DNA, 25 bp, Homo sapien
gagggacagtgtctacaattggcaa

SEQ ID NO: 1861073 - DNA, 25 bp, Homo sapien
agccaaggaacttctaatatctgac

SEQ ID NO: 1861074 - DNA, 25 bp, Homo sapien
ccaagaacaggatgtaaacagccaa

SEQ ID NO: 1861075 - DNA, 25 bp, Homo sapien
gatagctgcatgaaatggaaatcca

SEQ ID NO: 1861076 - DNA, 25 bp, Homo sapien
cgcttattattcacaaacccatctg

SEQ ID NO: 1861077 - DNA, 25 bp, Homo sapien
catctgccaaatcacgtggtaagat

SEQ ID NO: 1861078 - DNA, 25 bp, Homo sapien
taaatttgtagctttctcgcttatt

SEQ ID NO: 1861079 - DNA, 25 bp, Homo sapien
tccaagctaggtattaatttttcat

SEQ ID NO: 1861080 - DNA, 25 bp, Homo sapien
ggtgaaattatggcttgaactatca

SEQ ID NO: 1861081 - DNA, 25 bp, Homo sapien
tgaaattatggcttgaactatcacc

SEQ ID NO: 1861082 - DNA, 25 bp, Homo sapien
aaattatggcttgaactatcaccat

SEQ ID NO: 1861083 - DNA, 25 bp, Homo sapien
gaaattatggcttgaactatcacca

SEQ ID NO: 1861084 - DNA, 25 bp, Homo sapien
cccttgttggtgcttccggacaggg

SEQ ID NO: 1861085 - DNA, 25 bp, Homo sapien
ccctcgcgaatatctggatagtctg

SEQ ID NO: 1861086 - DNA, 25 bp, Homo sapien
gggcttcaccctcgcgaatatctgg

SEQ ID NO: 1861087 - DNA, 25 bp, Homo sapien
gaatatctggatagtctgcttcacc

SEQ ID NO: 1861088 - DNA, 25 bp, Homo sapien
tctcaggcccgggctgccaaaacta

SEQ ID NO: 1861089 - DNA, 25 bp, Homo sapien
cctccggcgacccacagtcttagca

SEQ ID NO: 1861090 - DNA, 25 bp, Homo sapien
accacctccggcgacccacagtctt

SEQ ID NO: 1861091 - DNA, 25 bp, Homo sapien
caggcccgggctgccaaaactaact

SEQ ID NO: 1861092 - DNA, 25 bp, Homo sapien
tgttgagaggcctccaagatagaga

SEQ ID NO: 1861093 - DNA, 25 bp, Homo sapien
cattttcattgggatctggaccacg

SEQ ID NO: 1861094 - DNA, 25 bp, Homo sapien
gagaagcaatatggtaaacactgga

SEQ ID NO: 1861095 - DNA, 25 bp, Homo sapien
gatgttggtgtcataaagactccgc

SEQ ID NO: 1861096 - DNA, 25 bp, Homo sapien
gctgcagccatgctcagaaggtctg

SEQ ID NO: 1861097 - DNA, 25 bp, Homo sapien
tcacttcagtccatctggtccttgc

SEQ ID NO: 1861098 - DNA, 25 bp, Homo sapien
catctggtccttgcacagtgtggcc

SEQ ID NO: 1861099 - DNA, 25 bp, Homo sapien
cagccatgctcagaaggtctgccag

SEQ ID NO: 1861100 - DNA, 25 bp, Homo sapien
gaacttacttagctggtgcaccagg

SEQ ID NO: 1861101 - DNA, 25 bp, Homo sapien
cacgagagtgtgaccttagttgcct

SEQ ID NO: 1861102 - DNA, 25 bp, Homo sapien
gtatttgaacaagaagcactcgcct

SEQ ID NO: 1861103 - DNA, 25 bp, Homo sapien
ttacatgagggcagagtcacgtccc

SEQ ID NO: 1861104 - DNA, 25 bp, Homo sapien
caaattccaagcccaaacttggcat

SEQ ID NO: 1861105 - DNA, 25 bp, Homo sapien
gctttttcaatggtccacttcacac

SEQ ID NO: 1861106 - DNA, 25 bp, Homo sapien
gtccacttcacactaactctcaaca

SEQ ID NO: 1861107 - DNA, 25 bp, Homo sapien
ctggctttttcaatggtccacttca

SEQ ID NO: 1861108 - DNA, 25 bp, Homo sapien
acttcacactaactctcaacatcat

SEQ ID NO: 1861109 - DNA, 25 bp, Homo sapien
gggatagcgcggagcacgcagcagc

SEQ ID NO: 1861110 - DNA, 25 bp, Homo sapien
ggcttcccggggatagcgcggagca

SEQ ID NO: 1861111 - DNA, 25 bp, Homo sapien
cttgccataaatatcccgctccaag

SEQ ID NO: 1861112 - DNA, 25 bp, Homo sapien
tccaagacgcctgacgtcagagcgg

SEQ ID NO: 1861113 - DNA, 25 bp, Homo sapien
tgctttctttagcatgccccgcggg

SEQ ID NO: 1861114 - DNA, 25 bp, Homo sapien
ctccgctgggctcccacacttctct

SEQ ID NO: 1861115 - DNA, 25 bp, Homo sapien
gagccctctccgctgggctcccaca

SEQ ID NO: 1861116 - DNA, 25 bp, Homo sapien
cctcggagtaagtgcggccggccct

SEQ ID NO: 1861117 - DNA, 25 bp, Homo sapien
cagggcagccgtaaggttcttgttc

SEQ ID NO: 1861118 - DNA, 25 bp, Homo sapien
gcagggcagccgtaaggttcttgtt

SEQ ID NO: 1861119 - DNA, 25 bp, Homo sapien
ggcagggcagccgtaaggttcttgt

SEQ ID NO: 1861120 - DNA, 25 bp, Homo sapien
tgggcagggcagccgtaaggttctt

SEQ ID NO: 1861121 - DNA, 25 bp, Homo sapien
cacggtgaggtacgtgccaggttct

SEQ ID NO: 1861122 - DNA, 25 bp, Homo sapien
gatggttggttctgccacatggcca

SEQ ID NO: 1861123 - DNA, 25 bp, Homo sapien
cgtgtggtgccccaaacaagatgca

SEQ ID NO: 1861124 - DNA, 25 bp, Homo sapien
caggcgtcgggactctgacttaacc

SEQ ID NO: 1861125 - DNA, 25 bp, Homo sapien
tgcgtgacggatgtacacagcctgc

SEQ ID NO: 1861126 - DNA, 25 bp, Homo sapien
tgactacctggtgtgtgtggcctcc

SEQ ID NO: 1861127 - DNA, 25 bp, Homo sapien
tttgatggagcaaatcgggcagcat

SEQ ID NO: 1861128 - DNA, 25 bp, Homo sapien
cacattgttcctggtgaggtggtca

SEQ ID NO: 1861129 - DNA, 25 bp, Homo sapien
ctgtgcttctgcagtatgaaggggg

SEQ ID NO: 1861130 - DNA, 25 bp, Homo sapien
ctgcagtatgaagggggtggtccca

SEQ ID NO: 1861131 - DNA, 25 bp, Homo sapien
gtggtcccaagggaccctgctggcc

SEQ ID NO: 1861132 - DNA, 25 bp, Homo sapien
ctgctggcccactgggagccgccat

SEQ ID NO: 1861133 - DNA, 25 bp, Homo sapien
cttggtgtcaggacttaggtttgaa

SEQ ID NO: 1861134 - DNA, 25 bp, Homo sapien
acaaaagatgtggtatcatgggact

SEQ ID NO: 1861135 - DNA, 25 bp, Homo sapien
gtatcatgggacttggtgtcaggac

SEQ ID NO: 1861136 - DNA, 25 bp, Homo sapien
aaagatgtggtatcatgggacttgg

SEQ ID NO: 1861137 - DNA, 25 bp, Homo sapien
tgccttgtcgccatgaagtcctcct

SEQ ID NO: 1861138 - DNA, 25 bp, Homo sapien
gaccacaggctgtccttttgataag

SEQ ID NO: 1861139 - DNA, 25 bp, Homo sapien
catgggaccagataatgtcaagtgc

SEQ ID NO: 1861140 - DNA, 25 bp, Homo sapien
ccagcctgaggtgggaaagtaccca

SEQ ID NO: 1861141 - DNA, 25 bp, Homo sapien
ttcatgtctcattaaagtcacgtac

SEQ ID NO: 1861142 - DNA, 25 bp, Homo sapien
ttatagacctggctatctgctcggt

SEQ ID NO: 1861143 - DNA, 25 bp, Homo sapien
gggctgcttatagacctggctatct

SEQ ID NO: 1861144 - DNA, 25 bp, Homo sapien
tagacctggctatctgctcggtttc

SEQ ID NO: 1861145 - DNA, 25 bp, Homo sapien
gcttatagacctggctatctgctcg

SEQ ID NO: 1861146 - DNA, 25 bp, Homo sapien
gggagcttgccttcccagttcatct

SEQ ID NO: 1861147 - DNA, 25 bp, Homo sapien
ggcactaaccggatgacattttcct

SEQ ID NO: 1861148 - DNA, 25 bp, Homo sapien
tgagggcactaaccggatgacattt

SEQ ID NO: 1861149 - DNA, 25 bp, Homo sapien
acaaccggggagcttgccttcccag

SEQ ID NO: 1861150 - DNA, 25 bp, Homo sapien
agttttccaggttgaattccactgg

SEQ ID NO: 1861151 - DNA, 25 bp, Homo sapien
tccaggttgaattccactggatact

SEQ ID NO: 1861152 - DNA, 25 bp, Homo sapien
gaattccactggatactcatccctc

SEQ ID NO: 1861153 - DNA, 25 bp, Homo sapien
ggttgaattccactggatactcatc

SEQ ID NO: 1861154 - DNA, 25 bp, Homo sapien
tcacaggaactagggaatggccttt

SEQ ID NO: 1861155 - DNA, 25 bp, Homo sapien
aacattcttgttgccgtagtggaaa

SEQ ID NO: 1861156 - DNA, 25 bp, Homo sapien
tagtcctgttaacgctccccgtgtg

SEQ ID NO: 1861157 - DNA, 25 bp, Homo sapien
cacacttaacccatctgcagtggag

SEQ ID NO: 1861158 - DNA, 25 bp, Homo sapien
aaaaacaaagtgtggtcagtgagtg

SEQ ID NO: 1861159 - DNA, 25 bp, Homo sapien
caaagtgtggtcagtgagtgctgtt

SEQ ID NO: 1861160 - DNA, 25 bp, Homo sapien
gccagagaccagtgacatttgcagc

SEQ ID NO: 1861161 - DNA, 25 bp, Homo sapien
gatgccagagaccagtgacatttgc

SEQ ID NO: 1861162 - DNA, 25 bp, Homo sapien
tgtctccttggattgaggcagctgc

SEQ ID NO: 1861163 - DNA, 25 bp, Homo sapien
cctgggccccaagaaatctgcgttg

SEQ ID NO: 1861164 - DNA, 25 bp, Homo sapien
gagcagcagcggacagtgtcgtagt

SEQ ID NO: 1861165 - DNA, 25 bp, Homo sapien
aatggagggcctgttactgctgaag

SEQ ID NO: 1861166 - DNA, 25 bp, Homo sapien
tatgggtgtcccaagaggaaatggt

SEQ ID NO: 1861167 - DNA, 25 bp, Homo sapien
gagatgtgcagtatgggtgtcccaa

SEQ ID NO: 1861168 - DNA, 25 bp, Homo sapien
tattggcatgcgattttagtcccca

SEQ ID NO: 1861169 - DNA, 25 bp, Homo sapien
taagaaaggctacatcgacagattc

SEQ ID NO: 1861170 - DNA, 25 bp, Homo sapien
gttgctgtggcatcctgtagctaaa

SEQ ID NO: 1861171 - DNA, 25 bp, Homo sapien
ggttgctgtggcatcctgtagctaa

SEQ ID NO: 1861172 - DNA, 25 bp, Homo sapien
gttggttgctgtggcatcctgtagc

SEQ ID NO: 1861173 - DNA, 25 bp, Homo sapien
tggttgctgtggcatcctgtagcta

SEQ ID NO: 1861174 - DNA, 25 bp, Homo sapien
tgcatttatcatgggtgagggccat

SEQ ID NO: 1861175 - DNA, 25 bp, Homo sapien
caggttccgcggaagtcgcatggtt

SEQ ID NO: 1861176 - DNA, 25 bp, Homo sapien
agtcgcatggttgggaagccagctc

SEQ ID NO: 1861177 - DNA, 25 bp, Homo sapien
tgccttctcggcaagagcaggttcc

SEQ ID NO: 1861178 - DNA, 25 bp, Homo sapien
tgctcccaccgtggctgtgattggg

SEQ ID NO: 1861179 - DNA, 25 bp, Homo sapien
tctgcaccccgatatctgtactgag

SEQ ID NO: 1861180 - DNA, 25 bp, Homo sapien
ggataagatatgtccttcccctgct

SEQ ID NO: 1861181 - DNA, 25 bp, Homo sapien
gtactctttcccaggtgtacaagcc

SEQ ID NO: 1861182 - DNA, 25 bp, Homo sapien
tgtgtgtgggctcatggaggtgccc

SEQ ID NO: 1861183 - DNA, 25 bp, Homo sapien
gattctccctgactcttttccttgg

SEQ ID NO: 1861184 - DNA, 25 bp, Homo sapien
cccccgggcctggtaggatgcaggg

SEQ ID NO: 1861185 - DNA, 25 bp, Homo sapien
acagtggctggaggattctccctga

SEQ ID NO: 1861186 - DNA, 25 bp, Homo sapien
ctctgacatttagcctccacctgga

SEQ ID NO: 1861187 - DNA, 25 bp, Homo sapien
tctgacatttagcctccacctggat

SEQ ID NO: 1861188 - DNA, 25 bp, Homo sapien
accgagggggcagttgtactgaggg

SEQ ID NO: 1861189 - DNA, 25 bp, Homo sapien
ctggggggtaggcacgctgagggac

SEQ ID NO: 1861190 - DNA, 25 bp, Homo sapien
agggggcagttgtactgagggggca

SEQ ID NO: 1861191 - DNA, 25 bp, Homo sapien
ccgagggggcagttgtactgagggg

SEQ ID NO: 1861192 - DNA, 25 bp, Homo sapien
gcctctgtgctgaactccattgaag

SEQ ID NO: 1861193 - DNA, 25 bp, Homo sapien
gcttctgagggtagacttggcaccc

SEQ ID NO: 1861194 - DNA, 25 bp, Homo sapien
aactccattgaaggggccaggtctg

SEQ ID NO: 1861195 - DNA, 25 bp, Homo sapien
gagggtagacttggcacccactgct

SEQ ID NO: 1861196 - DNA, 25 bp, Homo sapien
cagaagattccctcattctcagttc

SEQ ID NO: 1861197 - DNA, 25 bp, Homo sapien
cccctgtgcagaagattccctcatt

SEQ ID NO: 1861198 - DNA, 25 bp, Homo sapien
gttctgtgcactggctttggctcca

SEQ ID NO: 1861199 - DNA, 25 bp, Homo sapien
ttctcagttctgtgcactggctttg

SEQ ID NO: 1861200 - DNA, 25 bp, Homo sapien
tattaggcgaattggctcacgcaac

SEQ ID NO: 1861201 - DNA, 25 bp, Homo sapien
gaaggatgtcctggctccaaaagag

SEQ ID NO: 1861202 - DNA, 25 bp, Homo sapien
tagtagggttctaggtggccccaca

SEQ ID NO: 1861203 - DNA, 25 bp, Homo sapien
ctgattggatggtgaggagcccaca

SEQ ID NO: 1861204 - DNA, 25 bp, Homo sapien
gagtctgaccatgtctccctgtgca

SEQ ID NO: 1861205 - DNA, 25 bp, Homo sapien
tcgactggcctgaaccttgacttgg

SEQ ID NO: 1861206 - DNA, 25 bp, Homo sapien
tagacaagactttgggacctccctg

SEQ ID NO: 1861207 - DNA, 25 bp, Homo sapien
gaagctgaagtacacggaggcctac

SEQ ID NO: 1861208 - DNA, 25 bp, Homo sapien
gaatattaggaacagacttaccgct

SEQ ID NO: 1861209 - DNA, 25 bp, Homo sapien
gacctcagttatacctcctcgaaga

SEQ ID NO: 1861210 - DNA, 25 bp, Homo sapien
tgaaggatatctccagcgggcagaa

SEQ ID NO: 1861211 - DNA, 25 bp, Homo sapien
gcgacgcggtgagtgtcaacatgta

SEQ ID NO: 1861212 - DNA, 25 bp, Homo sapien
gaatgagattgatgacatgcaggta

SEQ ID NO: 1861213 - DNA, 25 bp, Homo sapien
catgcaggtatttcggatcctggac

SEQ ID NO: 1861214 - DNA, 25 bp, Homo sapien
ccctggcaccgtatggaatgagatt

SEQ ID NO: 1861215 - DNA, 25 bp, Homo sapien
cctgaattttaggagcgtgtccctg

SEQ ID NO: 1861216 - DNA, 25 bp, Homo sapien
catcggaggtagagtcgcaaggcct

SEQ ID NO: 1861217 - DNA, 25 bp, Homo sapien
gctctcaaggctctatgtgcaggtg

SEQ ID NO: 1861218 - DNA, 25 bp, Homo sapien
ccaggatttagggactaggcttaga

SEQ ID NO: 1861219 - DNA, 25 bp, Homo sapien
tcaacacctctatgagaccgagcag

SEQ ID NO: 1861220 - DNA, 25 bp, Homo sapien
tctggaactgtctctcgggaacctg

SEQ ID NO: 1861221 - DNA, 25 bp, Homo sapien
taatcaaatagacccctggcagcag

SEQ ID NO: 1861222 - DNA, 25 bp, Homo sapien
cgataatcctgtcctcccgtggaga

SEQ ID NO: 1861223 - DNA, 25 bp, Homo sapien
tggcttcccgcaaggtcaaagagct

SEQ ID NO: 1861224 - DNA, 25 bp, Homo sapien
gtgtgacttgcgcctgctctttgca

SEQ ID NO: 1861225 - DNA, 25 bp, Homo sapien
cttgtgtgacttgcgcctgctcttt

SEQ ID NO: 1861226 - DNA, 25 bp, Homo sapien
gtgacttgcgcctgctctttgcagc

SEQ ID NO: 1861227 - DNA, 25 bp, Homo sapien
tgcttgtgtgacttgcgcctgctct

SEQ ID NO: 1861228 - DNA, 25 bp, Homo sapien
cttgtctacaggattgaccactacc

SEQ ID NO: 1861229 - DNA, 25 bp, Homo sapien
cgactgcaagccctcttcttcaaga

SEQ ID NO: 1861230 - DNA, 25 bp, Homo sapien
actaccagcagcgactgcaagccct

SEQ ID NO: 1861231 - DNA, 25 bp, Homo sapien
tctacaggattgaccactaccagca

SEQ ID NO: 1861232 - DNA, 25 bp, Homo sapien
taaacatgccttcagagctgcaaca

SEQ ID NO: 1861233 - DNA, 25 bp, Homo sapien
gtctactctgggcttgatgatggct

SEQ ID NO: 1861234 - DNA, 25 bp, Homo sapien
tgccaaagtcaagtgagggttctct

SEQ ID NO: 1861235 - DNA, 25 bp, Homo sapien
catgatgaccctcattcttgtctta

SEQ ID NO: 1861236 - DNA, 25 bp, Homo sapien
actgttcgtcactgcaccctaagct

SEQ ID NO: 1861237 - DNA, 25 bp, Homo sapien
agcaaacactgttcgtcactgcacc

SEQ ID NO: 1861238 - DNA, 25 bp, Homo sapien
tcagcaaacactgttcgtcactgca

SEQ ID NO: 1861239 - DNA, 25 bp, Homo sapien
aaacactgttcgtcactgcacccta

SEQ ID NO: 1861240 - DNA, 25 bp, Homo sapien
tgctactcaaagtgcggtacatgga

SEQ ID NO: 1861241 - DNA, 25 bp, Homo sapien
ctgaatcagctgggagctttagaaa

SEQ ID NO: 1861242 - DNA, 25 bp, Homo sapien
agaacgttttgttgccactacggtg

SEQ ID NO: 1861243 - DNA, 25 bp, Homo sapien
atgacaaagaacgttttgttgccac

SEQ ID NO: 1861244 - DNA, 25 bp, Homo sapien
agagtctgtatttctcataatttcc

SEQ ID NO: 1861245 - DNA, 25 bp, Homo sapien
ttctcataatttcctaggtgatgct

SEQ ID NO: 1861246 - DNA, 25 bp, Homo sapien
ctggagtcttgtaaagatgagtctt

SEQ ID NO: 1861247 - DNA, 25 bp, Homo sapien
ccaggtcacatgttgggtctcagtg

SEQ ID NO: 1861248 - DNA, 25 bp, Homo sapien
tagaactgggttagaatctgacacc

SEQ ID NO: 1861249 - DNA, 25 bp, Homo sapien
acaagtttgtccctgtcatgagcga

SEQ ID NO: 1861250 - DNA, 25 bp, Homo sapien
tcttggcaccagtctaagcagcact

SEQ ID NO: 1861251 - DNA, 25 bp, Homo sapien
gatttgtcaccacctaccttatggg

SEQ ID NO: 1861252 - DNA, 25 bp, Homo sapien
gtttcccatgtcacaagtcctctgg

SEQ ID NO: 1861253 - DNA, 25 bp, Homo sapien
ccaaagccatcaggacagagtagca

SEQ ID NO: 1861254 - DNA, 25 bp, Homo sapien
taatccacagtcctagaagactcac

SEQ ID NO: 1861255 - DNA, 25 bp, Homo sapien
aatctggtgagggaatccagactcc

SEQ ID NO: 1861256 - DNA, 25 bp, Homo sapien
gaaccatgtgtccactggcgttggg

SEQ ID NO: 1861257 - DNA, 25 bp, Homo sapien
tcctctcaggcgttcagatggtgcg

SEQ ID NO: 1861258 - DNA, 25 bp, Homo sapien
agagctgccctctacattaacatgc

SEQ ID NO: 1861259 - DNA, 25 bp, Homo sapien
taacatgctgtctctaagggtggcc

SEQ ID NO: 1861260 - DNA, 25 bp, Homo sapien
cagaatttggttcaactgttgacag

SEQ ID NO: 1861261 - DNA, 25 bp, Homo sapien
aaatacgttgttccagagctcagcc

SEQ ID NO: 1861262 - DNA, 25 bp, Homo sapien
cagaggacacaaatacgttgttcca

SEQ ID NO: 1861263 - DNA, 25 bp, Homo sapien
aaaggactatggaagctgttcaaga

SEQ ID NO: 1861264 - DNA, 25 bp, Homo sapien
tattttctacatctggccagtggct

SEQ ID NO: 1861265 - DNA, 25 bp, Homo sapien
gcttgtaccagctctgtgagaacca

SEQ ID NO: 1861266 - DNA, 25 bp, Homo sapien
aacagtgccttggaccatggactca

SEQ ID NO: 1861267 - DNA, 25 bp, Homo sapien
ggctctggtgctagatgccactgta

SEQ ID NO: 1861268 - DNA, 25 bp, Homo sapien
gcaatgagctttgaacacccctggc

SEQ ID NO: 1861269 - DNA, 25 bp, Homo sapien
caaaagatttcccttagatggtgca

SEQ ID NO: 1861270 - DNA, 25 bp, Homo sapien
tttgggatgtgagaaccaggagcct

SEQ ID NO: 1861271 - DNA, 25 bp, Homo sapien
gacatccaagttagagagcccagca

SEQ ID NO: 1861272 - DNA, 25 bp, Homo sapien
catagcggggctatacagagagtac

SEQ ID NO: 1861273 - DNA, 25 bp, Homo sapien
agagtacacccttaggcctttccag

SEQ ID NO: 1861274 - DNA, 25 bp, Homo sapien
ctttattttcccatagcggggctat

SEQ ID NO: 1861275 - DNA, 25 bp, Homo sapien
gggctatacagagagtacaccctta

SEQ ID NO: 1861276 - DNA, 25 bp, Homo sapien
cagtgccctacccacacagtgtctt

SEQ ID NO: 1861277 - DNA, 25 bp, Homo sapien
tcagtgccctacccacacagtgtct

SEQ ID NO: 1861278 - DNA, 25 bp, Homo sapien
agtgccctacccacacagtgtcttc

SEQ ID NO: 1861279 - DNA, 25 bp, Homo sapien
tgcaaagttggcatcgtagctttat

SEQ ID NO: 1861280 - DNA, 25 bp, Homo sapien
aaggcaatctatcatcaacttttct

SEQ ID NO: 1861281 - DNA, 25 bp, Homo sapien
ggtgggtggaacagccgtgaacagg

SEQ ID NO: 1861282 - DNA, 25 bp, Homo sapien
tttatttgtgcgctgtgagggtgaa

SEQ ID NO: 1861283 - DNA, 25 bp, Homo sapien
ctgaaaggctgcaagtctgatggga

SEQ ID NO: 1861284 - DNA, 25 bp, Homo sapien
ggctgcaagtctgatgggacacaga

SEQ ID NO: 1861285 - DNA, 25 bp, Homo sapien
gtctgatgggacacagacttgggca

SEQ ID NO: 1861286 - DNA, 25 bp, Homo sapien
gaaaggctgcaagtctgatgggaca

SEQ ID NO: 1861287 - DNA, 25 bp, Homo sapien
tgctggtatcctccctatagaaagg

SEQ ID NO: 1861288 - DNA, 25 bp, Homo sapien
tagagatcatctagcagcaggcctg

SEQ ID NO: 1861289 - DNA, 25 bp, Homo sapien
ggcttcacagacttagggaggcaga

SEQ ID NO: 1861290 - DNA, 25 bp, Homo sapien
tagagcaggctgacttcgggtttac

SEQ ID NO: 1861291 - DNA, 25 bp, Homo sapien
cttgctaatgagcttgatctcctcc

SEQ ID NO: 1861292 - DNA, 25 bp, Homo sapien
cagtcttgctaatgagcttgatctc

SEQ ID NO: 1861293 - DNA, 25 bp, Homo sapien
ccagtcttgctaatgagcttgatct

SEQ ID NO: 1861294 - DNA, 25 bp, Homo sapien
gtcttgctaatgagcttgatctcct

SEQ ID NO: 1861295 - DNA, 25 bp, Homo sapien
tgcagcagaggtcagggcctccatc

SEQ ID NO: 1861296 - DNA, 25 bp, Homo sapien
agggcggccactgcagcagaggtca

SEQ ID NO: 1861297 - DNA, 25 bp, Homo sapien
gccactgcagcagaggtcagggcct

SEQ ID NO: 1861298 - DNA, 25 bp, Homo sapien
ggtgagggcggccactgcagcagag

SEQ ID NO: 1861299 - DNA, 25 bp, Homo sapien
gcttgaaggctaccggtcccaggag

SEQ ID NO: 1861300 - DNA, 25 bp, Homo sapien
ggaggaccacggctgaagccacagc

SEQ ID NO: 1861301 - DNA, 25 bp, Homo sapien
gagcccggcaagatgcctggatctt

SEQ ID NO: 1861302 - DNA, 25 bp, Homo sapien
tcacggcatggcgtgtgctgtccag

SEQ ID NO: 1861303 - DNA, 25 bp, Homo sapien
cttagaccctgaacatggagcgggt

SEQ ID NO: 1861304 - DNA, 25 bp, Homo sapien
ggtcttagaccctgaacatggagcg

SEQ ID NO: 1861305 - DNA, 25 bp, Homo sapien
tagaccctgaacatggagcgggtcc

SEQ ID NO: 1861306 - DNA, 25 bp, Homo sapien
tcttagaccctgaacatggagcggg

SEQ ID NO: 1861307 - DNA, 25 bp, Homo sapien
atgggccggttcttcatctgggaaa

SEQ ID NO: 1861308 - DNA, 25 bp, Homo sapien
gatgaggatcatgggccggttcttc

SEQ ID NO: 1861309 - DNA, 25 bp, Homo sapien
cgatgaggatcatgggccggttctt

SEQ ID NO: 1861310 - DNA, 25 bp, Homo sapien
cggttcttcatctgggaaatactga

SEQ ID NO: 1861311 - DNA, 25 bp, Homo sapien
gcatgctgccgcttcttcctgccca

SEQ ID NO: 1861312 - DNA, 25 bp, Homo sapien
ttcctgcccacagcagccccaatga

SEQ ID NO: 1861313 - DNA, 25 bp, Homo sapien
ctgcccacagcagccccaatgattc

SEQ ID NO: 1861314 - DNA, 25 bp, Homo sapien
tgcatgctgccgcttcttcctgccc

SEQ ID NO: 1861315 - DNA, 25 bp, Homo sapien
ctcgcaggtgatcccgcagggatac

SEQ ID NO: 1861316 - DNA, 25 bp, Homo sapien
caggtgatcccgcagggatacctca

SEQ ID NO: 1861317 - DNA, 25 bp, Homo sapien
ccagctcgcaggtgatcccgcaggg

SEQ ID NO: 1861318 - DNA, 25 bp, Homo sapien
ggtgatcccgcagggatacctcaga

SEQ ID NO: 1861319 - DNA, 25 bp, Homo sapien
tcccatcagctgtgattcgcaggcg

SEQ ID NO: 1861320 - DNA, 25 bp, Homo sapien
catcagctgtgattcgcaggcggtt

SEQ ID NO: 1861321 - DNA, 25 bp, Homo sapien
ccatcagctgtgattcgcaggcggt

SEQ ID NO: 1861322 - DNA, 25 bp, Homo sapien
atcagctgtgattcgcaggcggttg

SEQ ID NO: 1861323 - DNA, 25 bp, Homo sapien
atgtgatgaagctgatctggccttg

SEQ ID NO: 1861324 - DNA, 25 bp, Homo sapien
atctggccttggaagccagggattt

SEQ ID NO: 1861325 - DNA, 25 bp, Homo sapien
tggatgtgatgaagctgatctggcc

SEQ ID NO: 1861326 - DNA, 25 bp, Homo sapien
atggatgtgatgaagctgatctggc

SEQ ID NO: 1861327 - DNA, 25 bp, Homo sapien
ctgctgccggacagtgtctagcatc

SEQ ID NO: 1861328 - DNA, 25 bp, Homo sapien
tgctgccggacagtgtctagcatct

SEQ ID NO: 1861329 - DNA, 25 bp, Homo sapien
catatactctatgaagcgcacatcc

SEQ ID NO: 1861330 - DNA, 25 bp, Homo sapien
atactctatgaagcgcacatccagg

SEQ ID NO: 1861331 - DNA, 25 bp, Homo sapien
agggcatatactctatgaagcgcac

SEQ ID NO: 1861332 - DNA, 25 bp, Homo sapien
ggcatatactctatgaagcgcacat

SEQ ID NO: 1861333 - DNA, 25 bp, Homo sapien
ggccttgtggatgccctccatgacc

SEQ ID NO: 1861334 - DNA, 25 bp, Homo sapien
tggccttgtggatgccctccatgac

SEQ ID NO: 1861335 - DNA, 25 bp, Homo sapien
ccattggtggtaacacctatggttc

SEQ ID NO: 1861336 - DNA, 25 bp, Homo sapien
attggtggtaacacctatggttctc

SEQ ID NO: 1861337 - DNA, 25 bp, Homo sapien
cattggtggtaacacctatggttct

SEQ ID NO: 1861338 - DNA, 25 bp, Homo sapien
aaaggctgacagagcttcagacatg

SEQ ID NO: 1861339 - DNA, 25 bp, Homo sapien
ctctcaaaggctgacagagcttcag

SEQ ID NO: 1861340 - DNA, 25 bp, Homo sapien
ggctgacagagcttcagacatggac

SEQ ID NO: 1861341 - DNA, 25 bp, Homo sapien
tctcaaaggctgacagagcttcaga

SEQ ID NO: 1861342 - DNA, 25 bp, Homo sapien
tcaggctcggcagaaactgtaacct

SEQ ID NO: 1861343 - DNA, 25 bp, Homo sapien
tgtaacctgcaatccttttgctctg

SEQ ID NO: 1861344 - DNA, 25 bp, Homo sapien
cctcacgtgagagggtaggcacaag

SEQ ID NO: 1861345 - DNA, 25 bp, Homo sapien
gtgttcgtgaacatcctggccctga

SEQ ID NO: 1861346 - DNA, 25 bp, Homo sapien
tcagctgccactgttaacatcggca

SEQ ID NO: 1861347 - DNA, 25 bp, Homo sapien
gagaagtggcgatgactttcgtcca

SEQ ID NO: 1861348 - DNA, 25 bp, Homo sapien
catcagtgtccagccggatgaggca

SEQ ID NO: 1861349 - DNA, 25 bp, Homo sapien
tggcgatgactttcgtccaactcac

SEQ ID NO: 1861350 - DNA, 25 bp, Homo sapien
gtccggccggataagcggctctcca

SEQ ID NO: 1861351 - DNA, 25 bp, Homo sapien
tgccttccttcacaaagagccgggc

SEQ ID NO: 1861352 - DNA, 25 bp, Homo sapien
ggataagcggctctccacctgtgag

SEQ ID NO: 1861353 - DNA, 25 bp, Homo sapien
cacgtccggccggataagcggctct

SEQ ID NO: 1861354 - DNA, 25 bp, Homo sapien
agggagatccgcaggtagctgtgct

SEQ ID NO: 1861355 - DNA, 25 bp, Homo sapien
gagggagatccgcaggtagctgtgc

SEQ ID NO: 1861356 - DNA, 25 bp, Homo sapien
aggaactgcctccgcctggacacct

SEQ ID NO: 1861357 - DNA, 25 bp, Homo sapien
ggaactgcctccgcctggacacctc

SEQ ID NO: 1861358 - DNA, 25 bp, Homo sapien
aggcacaaggagaaccgcctgcccc

SEQ ID NO: 1861359 - DNA, 25 bp, Homo sapien
gcacaaggagaaccgcctgccccct

SEQ ID NO: 1861360 - DNA, 25 bp, Homo sapien
gaggcacaaggagaaccgcctgccc

SEQ ID NO: 1861361 - DNA, 25 bp, Homo sapien
ggcacaaggagaaccgcctgccccc

SEQ ID NO: 1861362 - DNA, 25 bp, Homo sapien
tctgtgcggagcttccaactcttcc

SEQ ID NO: 1861363 - DNA, 25 bp, Homo sapien
gtgcggagcttccaactcttccaca

SEQ ID NO: 1861364 - DNA, 25 bp, Homo sapien
tctgacatctgtgcggagcttccaa

SEQ ID NO: 1861365 - DNA, 25 bp, Homo sapien
gacatctgtgcggagcttccaactc

SEQ ID NO: 1861366 - DNA, 25 bp, Homo sapien
gtttgggctctgcaatgttggggaa

SEQ ID NO: 1861367 - DNA, 25 bp, Homo sapien
ggtcgggggcggatggtgatctcta

SEQ ID NO: 1861368 - DNA, 25 bp, Homo sapien
gattgtccctctcgttgagaaatca

SEQ ID NO: 1861369 - DNA, 25 bp, Homo sapien
gcggatggtgatctctactgggaag

SEQ ID NO: 1861370 - DNA, 25 bp, Homo sapien
cttatgatgggctggcccagtcctc

SEQ ID NO: 1861371 - DNA, 25 bp, Homo sapien
ccccttagagtctcctcaagacaag

SEQ ID NO: 1861372 - DNA, 25 bp, Homo sapien
tcaagacaagtttctgtgccctccc

SEQ ID NO: 1861373 - DNA, 25 bp, Homo sapien
taaacatgaagcaaagggaagtgac

SEQ ID NO: 1861374 - DNA, 25 bp, Homo sapien
ctccgaggcagctcgcgcggactcc

SEQ ID NO: 1861375 - DNA, 25 bp, Homo sapien
tccgaggcagctcgcgcggactccc

SEQ ID NO: 1861376 - DNA, 25 bp, Homo sapien
ctgggtcaccggagcccctgagctg

SEQ ID NO: 1861377 - DNA, 25 bp, Homo sapien
gctgggtcaccggagcccctgagct

SEQ ID NO: 1861378 - DNA, 25 bp, Homo sapien
agctgtagtacgctccctgtgccca

SEQ ID NO: 1861379 - DNA, 25 bp, Homo sapien
cgcgcagccaataggcgaggacgca

SEQ ID NO: 1861380 - DNA, 25 bp, Homo sapien
gaagcctgatacgagcggaaccgca

SEQ ID NO: 1861381 - DNA, 25 bp, Homo sapien
gccttgtgggagctgtagtacgctc

SEQ ID NO: 1861382 - DNA, 25 bp, Homo sapien
gatgagattggtttgagggtcctca

SEQ ID NO: 1861383 - DNA, 25 bp, Homo sapien
ggaatcagctccacgtttcacatcc

SEQ ID NO: 1861384 - DNA, 25 bp, Homo sapien
gagggtcctcatcctgaggttcgat

SEQ ID NO: 1861385 - DNA, 25 bp, Homo sapien
gataggagccctacactgggaatca

SEQ ID NO: 1861386 - DNA, 25 bp, Homo sapien
ctgctgtgtcctggccgctggcttc

SEQ ID NO: 1861387 - DNA, 25 bp, Homo sapien
gataatgatgccagtaaatacaaca

SEQ ID NO: 1861388 - DNA, 25 bp, Homo sapien
tttgagaggaccagtagatgtttca

SEQ ID NO: 1861389 - DNA, 25 bp, Homo sapien
agatgataatgatgccagtaaatac

SEQ ID NO: 1861390 - DNA, 25 bp, Homo sapien
aaatacaacagatactatgttttcc

SEQ ID NO: 1861391 - DNA, 25 bp, Homo sapien
gccagcactggacgcaatccagggc

SEQ ID NO: 1861392 - DNA, 25 bp, Homo sapien
ctgccagcactggacgcaatccagg

SEQ ID NO: 1861393 - DNA, 25 bp, Homo sapien
tgccagcactggacgcaatccaggg

SEQ ID NO: 1861394 - DNA, 25 bp, Homo sapien
cagcactggacgcaatccagggcca

SEQ ID NO: 1861395 - DNA, 25 bp, Homo sapien
atgactttcgttgtcgaataaccac

SEQ ID NO: 1861396 - DNA, 25 bp, Homo sapien
gactttcgttgtcgaataaccactg

SEQ ID NO: 1861397 - DNA, 25 bp, Homo sapien
gttgtcgaataaccactgctggatg

SEQ ID NO: 1861398 - DNA, 25 bp, Homo sapien
tttcgttgtcgaataaccactgctg

SEQ ID NO: 1861399 - DNA, 25 bp, Homo sapien
ttgtcagcacaactgatcacactcc

SEQ ID NO: 1861400 - DNA, 25 bp, Homo sapien
tcagcacaactgatcacactcctac

SEQ ID NO: 1861401 - DNA, 25 bp, Homo sapien
tgtcagcacaactgatcacactcct

SEQ ID NO: 1861402 - DNA, 25 bp, Homo sapien
gtcagcacaactgatcacactccta

SEQ ID NO: 1861403 - DNA, 25 bp, Homo sapien
cccaaggaaatctggaatttcacac

SEQ ID NO: 1861404 - DNA, 25 bp, Homo sapien
ggaaatctggaatttcacaccagag

SEQ ID NO: 1861405 - DNA, 25 bp, Homo sapien
caaggaaatctggaatttcacacca

SEQ ID NO: 1861406 - DNA, 25 bp, Homo sapien
agacccaaggaaatctggaatttca

SEQ ID NO: 1861407 - DNA, 25 bp, Homo sapien
aggcacaggctctggaatgggcact

SEQ ID NO: 1861408 - DNA, 25 bp, Homo sapien
ctaggtgacccactcactgggcaga

SEQ ID NO: 1861409 - DNA, 25 bp, Homo sapien
cagaggcacaggctctggaatgggc

SEQ ID NO: 1861410 - DNA, 25 bp, Homo sapien
taggtgacccactcactgggcagag

SEQ ID NO: 1861411 - DNA, 25 bp, Homo sapien
agtgacaccaaggtcgagccctaca

SEQ ID NO: 1861412 - DNA, 25 bp, Homo sapien
acatcttcagtgtagtgccttcacc

SEQ ID NO: 1861413 - DNA, 25 bp, Homo sapien
gagtaccctgattgcattgtgaaca

SEQ ID NO: 1861414 - DNA, 25 bp, Homo sapien
gtgaacatcttcagtgtagtgcctt

SEQ ID NO: 1861415 - DNA, 25 bp, Homo sapien
tattccattgacaatgaagccctgt

SEQ ID NO: 1861416 - DNA, 25 bp, Homo sapien
gaagccctgtataacatctgctccc

SEQ ID NO: 1861417 - DNA, 25 bp, Homo sapien
tgctcccacactctgaagcggacca

SEQ ID NO: 1861418 - DNA, 25 bp, Homo sapien
gagaacactgatgagacgtattcca

SEQ ID NO: 1861419 - DNA, 25 bp, Homo sapien
agttggcagtcaacatggtcccctt

SEQ ID NO: 1861420 - DNA, 25 bp, Homo sapien
ttggcagtcaacatggtccccttcc

SEQ ID NO: 1861421 - DNA, 25 bp, Homo sapien
gttggcagtcaacatggtccccttc

SEQ ID NO: 1861422 - DNA, 25 bp, Homo sapien
tgcctggctcttcccctctcaccag

SEQ ID NO: 1861423 - DNA, 25 bp, Homo sapien
ttctttatgcctggctcttcccctc

SEQ ID NO: 1861424 - DNA, 25 bp, Homo sapien
tggctcttcccctctcaccagccat

SEQ ID NO: 1861425 - DNA, 25 bp, Homo sapien
tttatgcctggctcttcccctctca

SEQ ID NO: 1861426 - DNA, 25 bp, Homo sapien
ccagcagtatcaagctcacagtgtc

SEQ ID NO: 1861427 - DNA, 25 bp, Homo sapien
tgggcagcatcttccgagagactta

SEQ ID NO: 1861428 - DNA, 25 bp, Homo sapien
ctgcaggtagcctgggtaggacacc

SEQ ID NO: 1861429 - DNA, 25 bp, Homo sapien
ttccaagtccctccactgggcagca

SEQ ID NO: 1861430 - DNA, 25 bp, Homo sapien
cttaattgccccttaacctgcatct

SEQ ID NO: 1861431 - DNA, 25 bp, Homo sapien
tttactctagctacagctgtcatac

SEQ ID NO: 1861432 - DNA, 25 bp, Homo sapien
ctttactctagctacagctgtcata

SEQ ID NO: 1861433 - DNA, 25 bp, Homo sapien
gcactggaaccgcacatctcacatt

SEQ ID NO: 1861434 - DNA, 25 bp, Homo sapien
tccggcactggaaccgcacatctca

SEQ ID NO: 1861435 - DNA, 25 bp, Homo sapien
caactccggcactggaaccgcacat

SEQ ID NO: 1861436 - DNA, 25 bp, Homo sapien
tggaaccgcacatctcacattctgc

SEQ ID NO: 1861437 - DNA, 25 bp, Homo sapien
tttggtggactctgccacagctgta

SEQ ID NO: 1861438 - DNA, 25 bp, Homo sapien
catggactttggtgaactgatgctt

SEQ ID NO: 1861439 - DNA, 25 bp, Homo sapien
ccagcaagttaacttcatggacttt

SEQ ID NO: 1861440 - DNA, 25 bp, Homo sapien
cagctgtaactcctcctcaatcaag

SEQ ID NO: 1861441 - DNA, 25 bp, Homo sapien
gaaaaaatggtagctcgagtgcctt

SEQ ID NO: 1861442 - DNA, 25 bp, Homo sapien
cctggagctaggcaaagacagcttt

SEQ ID NO: 1861443 - DNA, 25 bp, Homo sapien
gagcttcctggagctaggcaaagac

SEQ ID NO: 1861444 - DNA, 25 bp, Homo sapien
ggtagctcgagtgccttgagcttcc

SEQ ID NO: 1861445 - DNA, 25 bp, Homo sapien
tctgttccttgaattcacccttctc

SEQ ID NO: 1861446 - DNA, 25 bp, Homo sapien
gaatgttctgttccttgaattcacc

SEQ ID NO: 1861447 - DNA, 25 bp, Homo sapien
tgttccttgaattcacccttctctt

SEQ ID NO: 1861448 - DNA, 25 bp, Homo sapien
tctcttccttcacaaacaaggcagc

SEQ ID NO: 1861449 - DNA, 25 bp, Homo sapien
cagctcagttccactgaactgccat

SEQ ID NO: 1861450 - DNA, 25 bp, Homo sapien
agctcagttccactgaactgccatg

SEQ ID NO: 1861451 - DNA, 25 bp, Homo sapien
ttatcagggattccggggttgtcat

SEQ ID NO: 1861452 - DNA, 25 bp, Homo sapien
tccggggttgtcattctttccatcc

SEQ ID NO: 1861453 - DNA, 25 bp, Homo sapien
cttatcagggattccggggttgtca

SEQ ID NO: 1861454 - DNA, 25 bp, Homo sapien
gtggcaggttctgtagcatgagatt

SEQ ID NO: 1861455 - DNA, 25 bp, Homo sapien
caggttctgtagcatgagattcagg

SEQ ID NO: 1861456 - DNA, 25 bp, Homo sapien
gcagcatagtttgaatatcaggttg

SEQ ID NO: 1861457 - DNA, 25 bp, Homo sapien
aggagtggcagcatagtttgaatat

SEQ ID NO: 1861458 - DNA, 25 bp, Homo sapien
tggtttaggactgctgatgtaggac

SEQ ID NO: 1861459 - DNA, 25 bp, Homo sapien
aaggcaaagttggtttaggactgct

SEQ ID NO: 1861460 - DNA, 25 bp, Homo sapien
agttggtttaggactgctgatgtag

SEQ ID NO: 1861461 - DNA, 25 bp, Homo sapien
caaagttggtttaggactgctgatg

SEQ ID NO: 1861462 - DNA, 25 bp, Homo sapien
cttcctttgagccatactgggacca

SEQ ID NO: 1861463 - DNA, 25 bp, Homo sapien
tcccatgtataaaccagaaagccca

SEQ ID NO: 1861464 - DNA, 25 bp, Homo sapien
ttctggaccctctgacattgctgca

SEQ ID NO: 1861465 - DNA, 25 bp, Homo sapien
cattgctgcatagatgcccgtggca

SEQ ID NO: 1861466 - DNA, 25 bp, Homo sapien
gcctgatgtaattgcaatgaacaca

SEQ ID NO: 1861467 - DNA, 25 bp, Homo sapien
agtttccagatctgagccagttgtc

SEQ ID NO: 1861468 - DNA, 25 bp, Homo sapien
aatgaacacaatctctgaagtttcc

SEQ ID NO: 1861469 - DNA, 25 bp, Homo sapien
tctgagccagttgtcttattgaggg

SEQ ID NO: 1861470 - DNA, 25 bp, Homo sapien
tgccaccattccaactttagaaggg

SEQ ID NO: 1861471 - DNA, 25 bp, Homo sapien
cctcaaactccttagaggcaggata

SEQ ID NO: 1861472 - DNA, 25 bp, Homo sapien
tcaagcctatcctccaacggcaagt

SEQ ID NO: 1861473 - DNA, 25 bp, Homo sapien
gagaagtcaagcctatcctccaacg

SEQ ID NO: 1861474 - DNA, 25 bp, Homo sapien
tacttctttaccatatacaccttta

SEQ ID NO: 1861475 - DNA, 25 bp, Homo sapien
tgtacttctttaccatatacacctt

SEQ ID NO: 1861476 - DNA, 25 bp, Homo sapien
cttctttaccatatacacctttaag

SEQ ID NO: 1861477 - DNA, 25 bp, Homo sapien
ttaccatatacacctttaagttctg

SEQ ID NO: 1861478 - DNA, 25 bp, Homo sapien
gtcagacctctctagtctaagatcc

SEQ ID NO: 1861479 - DNA, 25 bp, Homo sapien
ctctctagtctaagatcctgttcca

SEQ ID NO: 1861480 - DNA, 25 bp, Homo sapien
gacctctctagtctaagatcctgtt

SEQ ID NO: 1861481 - DNA, 25 bp, Homo sapien
ctctagtctaagatcctgttccagg

SEQ ID NO: 1861482 - DNA, 25 bp, Homo sapien
gccatggaatggcactctggtgtca

SEQ ID NO: 1861483 - DNA, 25 bp, Homo sapien
tggaatggcactctggtgtcagtga

SEQ ID NO: 1861484 - DNA, 25 bp, Homo sapien
ggccagagctgataggacatgctgc

SEQ ID NO: 1861485 - DNA, 25 bp, Homo sapien
gctgataggacatgctgccatggaa

SEQ ID NO: 1861486 - DNA, 25 bp, Homo sapien
gtgtcccaacactctcatgctccgt

SEQ ID NO: 1861487 - DNA, 25 bp, Homo sapien
tccgtcatacttccgatttctgcca

SEQ ID NO: 1861488 - DNA, 25 bp, Homo sapien
ctggtgtcccaacactctcatgctc

SEQ ID NO: 1861489 - DNA, 25 bp, Homo sapien
tctcatgctccgtcatacttccgat

SEQ ID NO: 1861490 - DNA, 25 bp, Homo sapien
tcttctggtagagcactgagcacat

SEQ ID NO: 1861491 - DNA, 25 bp, Homo sapien
catactcagggtgtcaaaaagtgaa

SEQ ID NO: 1861492 - DNA, 25 bp, Homo sapien
gcatgccaaaggctaagtccaaggc

SEQ ID NO: 1861493 - DNA, 25 bp, Homo sapien
caggattgagcttaaggcttgagca

SEQ ID NO: 1861494 - DNA, 25 bp, Homo sapien
tagttatttacgtagcagttggagc

SEQ ID NO: 1861495 - DNA, 25 bp, Homo sapien
ggacattcccttcaaataggcagtt

SEQ ID NO: 1861496 - DNA, 25 bp, Homo sapien
gcatggctaccttccctgttgcttg

SEQ ID NO: 1861497 - DNA, 25 bp, Homo sapien
taatctcaaacgtacctgcatggct

SEQ ID NO: 1861498 - DNA, 25 bp, Homo sapien
agtagccaagtgttcagccacttgg

SEQ ID NO: 1861499 - DNA, 25 bp, Homo sapien
gaaaggagtagccaagtgttcagcc

SEQ ID NO: 1861500 - DNA, 25 bp, Homo sapien
agccaagtgttcagccacttggcca

SEQ ID NO: 1861501 - DNA, 25 bp, Homo sapien
cagaaaggaaaggagtagccaagtg

SEQ ID NO: 1861502 - DNA, 25 bp, Homo sapien
caaccactatcacattacactgctg

SEQ ID NO: 1861503 - DNA, 25 bp, Homo sapien
caggtgaactcaagctcatatcccc

SEQ ID NO: 1861504 - DNA, 25 bp, Homo sapien
aatagctcccaggtgaactcaagct

SEQ ID NO: 1861505 - DNA, 25 bp, Homo sapien
tatttccacatacaggacccgagat

SEQ ID NO: 1861506 - DNA, 25 bp, Homo sapien
attctctgttagttgctcttttaga

SEQ ID NO: 1861507 - DNA, 25 bp, Homo sapien
ccaaatattctctgttagttgctct

SEQ ID NO: 1861508 - DNA, 25 bp, Homo sapien
caaatattctctgttagttgctctt

SEQ ID NO: 1861509 - DNA, 25 bp, Homo sapien
tctctgttagttgctcttttagagt

SEQ ID NO: 1861510 - DNA, 25 bp, Homo sapien
acagtttcctctaagtctcctccca

SEQ ID NO: 1861511 - DNA, 25 bp, Homo sapien
tgggtatccactgtcccctgcccct

SEQ ID NO: 1861512 - DNA, 25 bp, Homo sapien
cagtttcctctaagtctcctcccat

SEQ ID NO: 1861513 - DNA, 25 bp, Homo sapien
tctgggtatccactgtcccctgccc

SEQ ID NO: 1861514 - DNA, 25 bp, Homo sapien
cagtaactcttctcatgattgaagt

SEQ ID NO: 1861515 - DNA, 25 bp, Homo sapien
tcagtaactcttctcatgattgaag

SEQ ID NO: 1861516 - DNA, 25 bp, Homo sapien
gaagtgcaggattcctgtgttaaat

SEQ ID NO: 1861517 - DNA, 25 bp, Homo sapien
tgcaggattcctgtgttaaatgccc

SEQ ID NO: 1861518 - DNA, 25 bp, Homo sapien
caccagccagccatatccatacggg

SEQ ID NO: 1861519 - DNA, 25 bp, Homo sapien
cagccagccatatccatacgggacc

SEQ ID NO: 1861520 - DNA, 25 bp, Homo sapien
gccagccatatccatacgggaccat

SEQ ID NO: 1861521 - DNA, 25 bp, Homo sapien
tcacaccagccagccatatccatac

SEQ ID NO: 1861522 - DNA, 25 bp, Homo sapien
tcagtgcccagaagtgggcttgcag

SEQ ID NO: 1861523 - DNA, 25 bp, Homo sapien
agtgcccagaagtgggcttgcagcc

SEQ ID NO: 1861524 - DNA, 25 bp, Homo sapien
ccagaagtgggcttgcagcctccct

SEQ ID NO: 1861525 - DNA, 25 bp, Homo sapien
gaagtgggcttgcagcctccctcat

SEQ ID NO: 1861526 - DNA, 25 bp, Homo sapien
agaatctccatctcgtcccttcttc

SEQ ID NO: 1861527 - DNA, 25 bp, Homo sapien
tgagaatctccatctcgtcccttct

SEQ ID NO: 1861528 - DNA, 25 bp, Homo sapien
gaatctccatctcgtcccttcttcc

SEQ ID NO: 1861529 - DNA, 25 bp, Homo sapien
ctgagaatctccatctcgtcccttc

SEQ ID NO: 1861530 - DNA, 25 bp, Homo sapien
cccagggcataatttacagtgagct

SEQ ID NO: 1861531 - DNA, 25 bp, Homo sapien
cgtcccagggcataatttacagtga

SEQ ID NO: 1861532 - DNA, 25 bp, Homo sapien
ccgtcccagggcataatttacagtg

SEQ ID NO: 1861533 - DNA, 25 bp, Homo sapien
tcccagggcataatttacagtgagc

SEQ ID NO: 1861534 - DNA, 25 bp, Homo sapien
tcactgacgtttgttgtaggttgtc

SEQ ID NO: 1861535 - DNA, 25 bp, Homo sapien
tgggattaaggaggtcttttgctct

SEQ ID NO: 1861536 - DNA, 25 bp, Homo sapien
gcatgctttgcaggcacctgttgta

SEQ ID NO: 1861537 - DNA, 25 bp, Homo sapien
gctctttggcttcactaagattgtg

SEQ ID NO: 1861538 - DNA, 25 bp, Homo sapien
ctgcttttatttgcttcttagtact

SEQ ID NO: 1861539 - DNA, 25 bp, Homo sapien
gacgattatgctgcttttatttgct

SEQ ID NO: 1861540 - DNA, 25 bp, Homo sapien
gcttttatttgcttcttagtactta

SEQ ID NO: 1861541 - DNA, 25 bp, Homo sapien
tttatttgcttcttagtacttattg

SEQ ID NO: 1861542 - DNA, 25 bp, Homo sapien
tgcctggcacttaaaaggtcctcag

SEQ ID NO: 1861543 - DNA, 25 bp, Homo sapien
agtattctgaatctagaatagtgcc

SEQ ID NO: 1861544 - DNA, 25 bp, Homo sapien
tcatttgtcgcaactaacttgtaag

SEQ ID NO: 1861545 - DNA, 25 bp, Homo sapien
ggatatagacacagcatctgatcac

SEQ ID NO: 1861546 - DNA, 25 bp, Homo sapien
ttttatggccctctgaaggtacatc

SEQ ID NO: 1861547 - DNA, 25 bp, Homo sapien
tttatggccctctgaaggtacatcc

SEQ ID NO: 1861548 - DNA, 25 bp, Homo sapien
ttatggccctctgaaggtacatcca

SEQ ID NO: 1861549 - DNA, 25 bp, Homo sapien
atggccctctgaaggtacatccatg

SEQ ID NO: 1861550 - DNA, 25 bp, Homo sapien
cctggcagagtaaaaagtgcagatg

SEQ ID NO: 1861551 - DNA, 25 bp, Homo sapien
ctcttgagtagacattgcagctcca

SEQ ID NO: 1861552 - DNA, 25 bp, Homo sapien
cagatgtcagacactcttgagtaga

SEQ ID NO: 1861553 - DNA, 25 bp, Homo sapien
tcacattatgagcttgacctcaggc

SEQ ID NO: 1861554 - DNA, 25 bp, Homo sapien
atttagtgagaattaaatcatgtga

SEQ ID NO: 1861555 - DNA, 25 bp, Homo sapien
catcccagcttgcaatttagtgaga

SEQ ID NO: 1861556 - DNA, 25 bp, Homo sapien
gccccatcccagcttgcaatttagt

SEQ ID NO: 1861557 - DNA, 25 bp, Homo sapien
ccagcttgcaatttagtgagaatta

SEQ ID NO: 1861558 - DNA, 25 bp, Homo sapien
ttagcaccaggcacgcgggcccacg

SEQ ID NO: 1861559 - DNA, 25 bp, Homo sapien
agcttagcaccaggcacgcgggccc

SEQ ID NO: 1861560 - DNA, 25 bp, Homo sapien
accaggcacgcgggcccacgctgtg

SEQ ID NO: 1861561 - DNA, 25 bp, Homo sapien
ccagcttagcaccaggcacgcgggc

SEQ ID NO: 1861562 - DNA, 25 bp, Homo sapien
gaagcattagggagaccacagagac

SEQ ID NO: 1861563 - DNA, 25 bp, Homo sapien
gctgtctccaggaacactccagtga

SEQ ID NO: 1861564 - DNA, 25 bp, Homo sapien
ctgtctccaggaacactccagtgaa

SEQ ID NO: 1861565 - DNA, 25 bp, Homo sapien
cttccactacaatgtattggccaga

SEQ ID NO: 1861566 - DNA, 25 bp, Homo sapien
gggctgatttacagtgacagctaag

SEQ ID NO: 1861567 - DNA, 25 bp, Homo sapien
gctgggaccagatggcgaatgattg

SEQ ID NO: 1861568 - DNA, 25 bp, Homo sapien
gctgaggatgaggtgtggatgtcaa

SEQ ID NO: 1861569 - DNA, 25 bp, Homo sapien
tgacagctaagtcggctgaggatga

SEQ ID NO: 1861570 - DNA, 25 bp, Homo sapien
cttaaagacccttcagtcaccgaca

SEQ ID NO: 1861571 - DNA, 25 bp, Homo sapien
gagccgctctcttggtggccacgcc

SEQ ID NO: 1861572 - DNA, 25 bp, Homo sapien
gtcaccgacagaacaagcctggcct

SEQ ID NO: 1861573 - DNA, 25 bp, Homo sapien
tgcttcccgtagctgaaggcagaag

SEQ ID NO: 1861574 - DNA, 25 bp, Homo sapien
tcggagttgttgagaaactgatcaa

SEQ ID NO: 1861575 - DNA, 25 bp, Homo sapien
tttttctccacattgtaggtagacg

SEQ ID NO: 1861576 - DNA, 25 bp, Homo sapien
gttctgaacacacatccgtctggaa

SEQ ID NO: 1861577 - DNA, 25 bp, Homo sapien
ccacattgtaggtagacgggtcgga

SEQ ID NO: 1861578 - DNA, 25 bp, Homo sapien
gatggccacggatctgccctgctct

SEQ ID NO: 1861579 - DNA, 25 bp, Homo sapien
ggccacggatctgccctgctctatg

SEQ ID NO: 1861580 - DNA, 25 bp, Homo sapien
tggccacggatctgccctgctctat

SEQ ID NO: 1861581 - DNA, 25 bp, Homo sapien
aagatggccacggatctgccctgct

SEQ ID NO: 1861582 - DNA, 25 bp, Homo sapien
tcccaggaagaagcagcatgagtct

SEQ ID NO: 1861583 - DNA, 25 bp, Homo sapien
cagcatgagtctgggccctcggacc

SEQ ID NO: 1861584 - DNA, 25 bp, Homo sapien
tgaaaccttggatctcccaggaaga

SEQ ID NO: 1861585 - DNA, 25 bp, Homo sapien
ctgaaaccttggatctcccaggaag

SEQ ID NO: 1861586 - DNA, 25 bp, Homo sapien
cctgggctctatgctgtatgagctg

SEQ ID NO: 1861587 - DNA, 25 bp, Homo sapien
ccactcctgggctctatgctgtatg

SEQ ID NO: 1861588 - DNA, 25 bp, Homo sapien
ggctctatgctgtatgagctgaggc

SEQ ID NO: 1861589 - DNA, 25 bp, Homo sapien
ctatgctgtatgagctgaggcccat

SEQ ID NO: 1861590 - DNA, 25 bp, Homo sapien
ccaacagcttcagagtctgccaaca

SEQ ID NO: 1861591 - DNA, 25 bp, Homo sapien
ttcagagtctgccaacagccctcct

SEQ ID NO: 1861592 - DNA, 25 bp, Homo sapien
cagcttcagagtctgccaacagccc

SEQ ID NO: 1861593 - DNA, 25 bp, Homo sapien
gcttcagagtctgccaacagccctc

SEQ ID NO: 1861594 - DNA, 25 bp, Homo sapien
gacatggaagagattggatatatcc

SEQ ID NO: 1861595 - DNA, 25 bp, Homo sapien
gagattggatatatcctcagaggac

SEQ ID NO: 1861596 - DNA, 25 bp, Homo sapien
tgactgcaaggggaactgggtgcca

SEQ ID NO: 1861597 - DNA, 25 bp, Homo sapien
cttgaggacatggaagagattggat

SEQ ID NO: 1861598 - DNA, 25 bp, Homo sapien
gccccgttggtaagcaggtgagata

SEQ ID NO: 1861599 - DNA, 25 bp, Homo sapien
gcttctgtatccaggcagggtgaag

SEQ ID NO: 1861600 - DNA, 25 bp, Homo sapien
ccttttgccagggaactgtgcagaa

SEQ ID NO: 1861601 - DNA, 25 bp, Homo sapien
tgtggaggtgtctatatcactggca

SEQ ID NO: 1861602 - DNA, 25 bp, Homo sapien
cgagggtatttctgttcacccgctg

SEQ ID NO: 1861603 - DNA, 25 bp, Homo sapien
gggtatttctgttcacccgctgcct

SEQ ID NO: 1861604 - DNA, 25 bp, Homo sapien
gtatttctgttcacccgctgcctgt

SEQ ID NO: 1861605 - DNA, 25 bp, Homo sapien
gagggtatttctgttcacccgctgc

SEQ ID NO: 1861606 - DNA, 25 bp, Homo sapien
tggcttaaggttgcatccccacagc

SEQ ID NO: 1861607 - DNA, 25 bp, Homo sapien
tgcaaggaaggaccactagtgtggc

SEQ ID NO: 1861608 - DNA, 25 bp, Homo sapien
gaaatgtcacttttgtcctgctaga

SEQ ID NO: 1861609 - DNA, 25 bp, Homo sapien
aaatagcgacttacagagggatcag

SEQ ID NO: 1861610 - DNA, 25 bp, Homo sapien
ccacaggcctgagtacaatgtccat

SEQ ID NO: 1861611 - DNA, 25 bp, Homo sapien
aatgcctgggggcatgtccacaggc

SEQ ID NO: 1861612 - DNA, 25 bp, Homo sapien
atgtccacaggcctgagtacaatgt

SEQ ID NO: 1861613 - DNA, 25 bp, Homo sapien
tccacaggcctgagtacaatgtcca

SEQ ID NO: 1861614 - DNA, 25 bp, Homo sapien
tggtcatgaaggttccgcctgcctg

SEQ ID NO: 1861615 - DNA, 25 bp, Homo sapien
tggtgtggtcatgaaggttccgcct

SEQ ID NO: 1861616 - DNA, 25 bp, Homo sapien
ttctctgtgttgacctcgataatct

SEQ ID NO: 1861617 - DNA, 25 bp, Homo sapien
gacctcgataatcttgtgtgacttt

SEQ ID NO: 1861618 - DNA, 25 bp, Homo sapien
gaaaatagagcctctgtgtaggagc

SEQ ID NO: 1861619 - DNA, 25 bp, Homo sapien
ggtccaggccttttgtgttggttgc

SEQ ID NO: 1861620 - DNA, 25 bp, Homo sapien
aacagaaaatagagcctctgtgtag

SEQ ID NO: 1861621 - DNA, 25 bp, Homo sapien
atagagcctctgtgtaggagcccca

SEQ ID NO: 1861622 - DNA, 25 bp, Homo sapien
caaggtacagccaaactctagcaga

SEQ ID NO: 1861623 - DNA, 25 bp, Homo sapien
gactcttagccagaaagccttggaa

SEQ ID NO: 1861624 - DNA, 25 bp, Homo sapien
gattaaaaggtgtgagaaactggcc

SEQ ID NO: 1861625 - DNA, 25 bp, Homo sapien
gaaaagctctccatagcagagggcc

SEQ ID NO: 1861626 - DNA, 25 bp, Homo sapien
gccagccctgtcttgaagttgaccc

SEQ ID NO: 1861627 - DNA, 25 bp, Homo sapien
agccaagtgtcccagtactgccagc

SEQ ID NO: 1861628 - DNA, 25 bp, Homo sapien
ttctcagccaagtgtcccagtactg

SEQ ID NO: 1861629 - DNA, 25 bp, Homo sapien
gccctgtcttgaagttgaccccaga

SEQ ID NO: 1861630 - DNA, 25 bp, Homo sapien
gatgccaaatctgtcggttctcagg

SEQ ID NO: 1861631 - DNA, 25 bp, Homo sapien
atgccaaatctgtcggttctcaggg

SEQ ID NO: 1861632 - DNA, 25 bp, Homo sapien
tggcccatgtgttaggatccgtgac

SEQ ID NO: 1861633 - DNA, 25 bp, Homo sapien
tgtaagaactaccttggactgagtg

SEQ ID NO: 1861634 - DNA, 25 bp, Homo sapien
tgagaaccactaagagcacccgtga

SEQ ID NO: 1861635 - DNA, 25 bp, Homo sapien
tgttcctcagagtcacaggtacctg

SEQ ID NO: 1861636 - DNA, 25 bp, Homo sapien
ttgagatccagctttatcccagccc

SEQ ID NO: 1861637 - DNA, 25 bp, Homo sapien
tggtaaagccacatcttagagcatc

SEQ ID NO: 1861638 - DNA, 25 bp, Homo sapien
ggctgaacaaatctaactcccttga

SEQ ID NO: 1861639 - DNA, 25 bp, Homo sapien
tgcttggtccatccgtgtccttgaa

SEQ ID NO: 1861640 - DNA, 25 bp, Homo sapien
aagagcatgtgcacccccataccta

SEQ ID NO: 1861641 - DNA, 25 bp, Homo sapien
ggcagggccaagccatgggatattt

SEQ ID NO: 1861642 - DNA, 25 bp, Homo sapien
ccatgggatatttacagagggttct

SEQ ID NO: 1861643 - DNA, 25 bp, Homo sapien
gggttccctgatgtgacagctgctg

SEQ ID NO: 1861644 - DNA, 25 bp, Homo sapien
gagaggctgccatgtgtttacttca

SEQ ID NO: 1861645 - DNA, 25 bp, Homo sapien
ggtggtatatgacccctaggcagga

SEQ ID NO: 1861646 - DNA, 25 bp, Homo sapien
tgcttcagccagaaccagaggtttt

SEQ ID NO: 1861647 - DNA, 25 bp, Homo sapien
tatcaaggttgtatcgtcagtggga

SEQ ID NO: 1861648 - DNA, 25 bp, Homo sapien
gcaaggatcttcttcacatggtgac

SEQ ID NO: 1861649 - DNA, 25 bp, Homo sapien
agcaaggatcttcttcacatggtga

SEQ ID NO: 1861650 - DNA, 25 bp, Homo sapien
aagcaaggatcttcttcacatggtg

SEQ ID NO: 1861651 - DNA, 25 bp, Homo sapien
gaagcaaggatcttcttcacatggt

SEQ ID NO: 1861652 - DNA, 25 bp, Homo sapien
tggacctccactcacaacatgtaca

SEQ ID NO: 1861653 - DNA, 25 bp, Homo sapien
tcctaggaagacacgaactaccaac

SEQ ID NO: 1861654 - DNA, 25 bp, Homo sapien
cataaaagaccaaacgttaagtgct

SEQ ID NO: 1861655 - DNA, 25 bp, Homo sapien
catagaaacatagctcaatggaatc

SEQ ID NO: 1861656 - DNA, 25 bp, Homo sapien
ggcgatgggcgtggctaacgggata

SEQ ID NO: 1861657 - DNA, 25 bp, Homo sapien
tggaggaggcctgccagaagggtgg

SEQ ID NO: 1861658 - DNA, 25 bp, Homo sapien
gcagggcctctgattggaggaggcc

SEQ ID NO: 1861659 - DNA, 25 bp, Homo sapien
ccaatcagaggctgtggaactttct

SEQ ID NO: 1861660 - DNA, 25 bp, Homo sapien
ggaagccttcccagggccgctgctg

SEQ ID NO: 1861661 - DNA, 25 bp, Homo sapien
cggaagccttcccagggccgctgct

SEQ ID NO: 1861662 - DNA, 25 bp, Homo sapien
tccacggaagccttcccagggccgc

SEQ ID NO: 1861663 - DNA, 25 bp, Homo sapien
cacggaagccttcccagggccgctg

SEQ ID NO: 1861664 - DNA, 25 bp, Homo sapien
tgctcttcttcacctccgtattttc

SEQ ID NO: 1861665 - DNA, 25 bp, Homo sapien
tggtactcgcccattctgctcttct

SEQ ID NO: 1861666 - DNA, 25 bp, Homo sapien
cagtctggtactcgcccattctgct

SEQ ID NO: 1861667 - DNA, 25 bp, Homo sapien
cagctgcagtctggtactcgcccat

SEQ ID NO: 1861668 - DNA, 25 bp, Homo sapien
ccagaatactggatgttagattttg

SEQ ID NO: 1861669 - DNA, 25 bp, Homo sapien
cattccagaatactggatgttagat

SEQ ID NO: 1861670 - DNA, 25 bp, Homo sapien
aatactggatgttagattttggctg

SEQ ID NO: 1861671 - DNA, 25 bp, Homo sapien
tcattccagaatactggatgttaga

SEQ ID NO: 1861672 - DNA, 25 bp, Homo sapien
ggacagctagagatgcctccctcaa

SEQ ID NO: 1861673 - DNA, 25 bp, Homo sapien
cttgtccaggcacaggatcccagtc

SEQ ID NO: 1861674 - DNA, 25 bp, Homo sapien
gatcccagtccttaatgtgcccctg

SEQ ID NO: 1861675 - DNA, 25 bp, Homo sapien
tgttagacccaaagccagtcacttt

SEQ ID NO: 1861676 - DNA, 25 bp, Homo sapien
aaaatgggatatcttggatgtagcc

SEQ ID NO: 1861677 - DNA, 25 bp, Homo sapien
cagataggtcagctaacacaggtct

SEQ ID NO: 1861678 - DNA, 25 bp, Homo sapien
ggtcagctaacacaggtctccatgg

SEQ ID NO: 1861679 - DNA, 25 bp, Homo sapien
gcctaggagattcaagggaaagaaa

SEQ ID NO: 1861680 - DNA, 25 bp, Homo sapien
tggcaagaagcaggctcccaccagg

SEQ ID NO: 1861681 - DNA, 25 bp, Homo sapien
ttggcaagaagcaggctcccaccag

SEQ ID NO: 1861682 - DNA, 25 bp, Homo sapien
gacacgaggccattgacagggagac

SEQ ID NO: 1861683 - DNA, 25 bp, Homo sapien
tagacccataagcaatccaaagccg

SEQ ID NO: 1861684 - DNA, 25 bp, Homo sapien
tcagtccggcatttgagcgagtcca

SEQ ID NO: 1861685 - DNA, 25 bp, Homo sapien
ttccaaacactcagggctcagtccg

SEQ ID NO: 1861686 - DNA, 25 bp, Homo sapien
catcacccattcggagctgccaaaa

SEQ ID NO: 1861687 - DNA, 25 bp, Homo sapien
tccatcacccattcggagctgccaa

SEQ ID NO: 1861688 - DNA, 25 bp, Homo sapien
tcacccattcggagctgccaaaagt

SEQ ID NO: 1861689 - DNA, 25 bp, Homo sapien
acccattcggagctgccaaaagtcc

SEQ ID NO: 1861690 - DNA, 25 bp, Homo sapien
cagatgttcgagaccttccgaggag

SEQ ID NO: 1861691 - DNA, 25 bp, Homo sapien
tgcagaccttgtagcgcaccatgag

SEQ ID NO: 1861692 - DNA, 25 bp, Homo sapien
cttggtgaagaactgggcgcagccc

SEQ ID NO: 1861693 - DNA, 25 bp, Homo sapien
tgcgagtacacattgctcacggccg

SEQ ID NO: 1861694 - DNA, 25 bp, Homo sapien
aaacaccagctggtaactgtgcgcc

SEQ ID NO: 1861695 - DNA, 25 bp, Homo sapien
agcttagagcctgctgtgactcacg

SEQ ID NO: 1861696 - DNA, 25 bp, Homo sapien
tgtgcgccatgctctaagtgcccta

SEQ ID NO: 1861697 - DNA, 25 bp, Homo sapien
gaaaagttcgccctggcctgtggct

SEQ ID NO: 1861698 - DNA, 25 bp, Homo sapien
gtaattggcccatcagaaacaaggc

SEQ ID NO: 1861699 - DNA, 25 bp, Homo sapien
cactggaaccgggatgaaaggtcag

SEQ ID NO: 1861700 - DNA, 25 bp, Homo sapien
caaggctgattcttggcgggccact

SEQ ID NO: 1861701 - DNA, 25 bp, Homo sapien
caactttgtgaggaaccctgcctgg

SEQ ID NO: 1861702 - DNA, 25 bp, Homo sapien
ctggctggttctgaggacatctttc

SEQ ID NO: 1861703 - DNA, 25 bp, Homo sapien
tgttagggcctaaacatatgtgagg

SEQ ID NO: 1861704 - DNA, 25 bp, Homo sapien
gctgatcacgatgtctggcctagag

SEQ ID NO: 1861705 - DNA, 25 bp, Homo sapien
taatggtgactctcagacactggct

SEQ ID NO: 1861706 - DNA, 25 bp, Homo sapien
caatatcacgttctcagcgaggcca

SEQ ID NO: 1861707 - DNA, 25 bp, Homo sapien
gaagcccacctcatgtagtcaaagt

SEQ ID NO: 1861708 - DNA, 25 bp, Homo sapien
ttcaggtccctgttccaatatcacg

SEQ ID NO: 1861709 - DNA, 25 bp, Homo sapien
gatcacgttatcaacactgcgggct

SEQ ID NO: 1861710 - DNA, 25 bp, Homo sapien
tcttggttctattgtctatgggctt

SEQ ID NO: 1861711 - DNA, 25 bp, Homo sapien
ctatgggcttgggtggtcctgtcag

SEQ ID NO: 1861712 - DNA, 25 bp, Homo sapien
gggcttcttggttctattgtctatg

SEQ ID NO: 1861713 - DNA, 25 bp, Homo sapien
ggttctattgtctatgggcttgggt

SEQ ID NO: 1861714 - DNA, 25 bp, Homo sapien
tccactggccagcgtggaagcagcc

SEQ ID NO: 1861715 - DNA, 25 bp, Homo sapien
taggtacgtatgtgagtgtgactgt

SEQ ID NO: 1861716 - DNA, 25 bp, Homo sapien
ccagtgtgtgcgtgtaggtacgtat

SEQ ID NO: 1861717 - DNA, 25 bp, Homo sapien
gggctgtgtgagtgagtggccgttg

SEQ ID NO: 1861718 - DNA, 25 bp, Homo sapien
tgttcctccttatgtgcaggtgggt

SEQ ID NO: 1861719 - DNA, 25 bp, Homo sapien
gatgggtgggtctggttcagtctcc

SEQ ID NO: 1861720 - DNA, 25 bp, Homo sapien
ggtgggatgggtgggtctggttcag

SEQ ID NO: 1861721 - DNA, 25 bp, Homo sapien
tgggtgggtctggttcagtctcccc

SEQ ID NO: 1861722 - DNA, 25 bp, Homo sapien
ttcagcccactttggtccacacagg

SEQ ID NO: 1861723 - DNA, 25 bp, Homo sapien
gacacattcagtgtactgcccactg

SEQ ID NO: 1861724 - DNA, 25 bp, Homo sapien
gtactgcccactgccagaccccaca

SEQ ID NO: 1861725 - DNA, 25 bp, Homo sapien
cacacaggacacattcagtgtactg

SEQ ID NO: 1861726 - DNA, 25 bp, Homo sapien
tgtctccatgctcagtgcctcggca

SEQ ID NO: 1861727 - DNA, 25 bp, Homo sapien
acgcggtggcattttgacgggtggt

SEQ ID NO: 1861728 - DNA, 25 bp, Homo sapien
gggtggtaaaaatatctggtgttca

SEQ ID NO: 1861729 - DNA, 25 bp, Homo sapien
tgacgggtggtaaaaatatctggtg

SEQ ID NO: 1861730 - DNA, 25 bp, Homo sapien
ggtgacatgtaaaccagaaatcctc

SEQ ID NO: 1861731 - DNA, 25 bp, Homo sapien
ctggtgacatgtaaaccagaaatcc

SEQ ID NO: 1861732 - DNA, 25 bp, Homo sapien
gtgacatgtaaaccagaaatcctca

SEQ ID NO: 1861733 - DNA, 25 bp, Homo sapien
tggtgacatgtaaaccagaaatcct

SEQ ID NO: 1861734 - DNA, 25 bp, Homo sapien
cacccagccgggaggtgtggtcttt

SEQ ID NO: 1861735 - DNA, 25 bp, Homo sapien
tcttcttagccttgtagttgatgtt

SEQ ID NO: 1861736 - DNA, 25 bp, Homo sapien
aatggcacagtttgccccagaatcc

SEQ ID NO: 1861737 - DNA, 25 bp, Homo sapien
ttgaggagttccctaccaggcggtc

SEQ ID NO: 1861738 - DNA, 25 bp, Homo sapien
caattgcagtgaagtgggttacccc

SEQ ID NO: 1861739 - DNA, 25 bp, Homo sapien
ttgctgacagaccacttgaccaggg

SEQ ID NO: 1861740 - DNA, 25 bp, Homo sapien
catgccagaagtagcgacccttgag

SEQ ID NO: 1861741 - DNA, 25 bp, Homo sapien
atgaatggaggtgagtgaacgggtg

SEQ ID NO: 1861742 - DNA, 25 bp, Homo sapien
tgagtgaacgggtgtgtctcttgat

SEQ ID NO: 1861743 - DNA, 25 bp, Homo sapien
tgtctcttgatggagggctgtgtgg

SEQ ID NO: 1861744 - DNA, 25 bp, Homo sapien
gaggtgagtgaacgggtgtgtctct

SEQ ID NO: 1861745 - DNA, 25 bp, Homo sapien
tctctttgcgttgactttgatatcc

SEQ ID NO: 1861746 - DNA, 25 bp, Homo sapien
tctttgcgttgactttgatatccag

SEQ ID NO: 1861747 - DNA, 25 bp, Homo sapien
ctctttgcgttgactttgatatcca

SEQ ID NO: 1861748 - DNA, 25 bp, Homo sapien
ctctctttgcgttgactttgatatc

SEQ ID NO: 1861749 - DNA, 25 bp, Homo sapien
tgagggacgatgtgttcccctggtc

SEQ ID NO: 1861750 - DNA, 25 bp, Homo sapien
cagaggaacttcaattgtgagggac

SEQ ID NO: 1861751 - DNA, 25 bp, Homo sapien
gaacaaagtctatgatggagaagtc

SEQ ID NO: 1861752 - DNA, 25 bp, Homo sapien
cataagagtaataggccagaggaac

SEQ ID NO: 1861753 - DNA, 25 bp, Homo sapien
catgagcataggaggggcaaattct

SEQ ID NO: 1861754 - DNA, 25 bp, Homo sapien
ataggaggggcaaattctatggcct

SEQ ID NO: 1861755 - DNA, 25 bp, Homo sapien
atgagcataggaggggcaaattcta

SEQ ID NO: 1861756 - DNA, 25 bp, Homo sapien
agcataggaggggcaaattctatgg

SEQ ID NO: 1861757 - DNA, 25 bp, Homo sapien
agaacagcagtgacctctaacttgc

SEQ ID NO: 1861758 - DNA, 25 bp, Homo sapien
gaagaacagcagtgacctctaactt

SEQ ID NO: 1861759 - DNA, 25 bp, Homo sapien
agagaagaacagcagtgacctctaa

SEQ ID NO: 1861760 - DNA, 25 bp, Homo sapien
cagtgacctctaacttgccactgct

SEQ ID NO: 1861761 - DNA, 25 bp, Homo sapien
ctgaaagacagccattagcatccag

SEQ ID NO: 1861762 - DNA, 25 bp, Homo sapien
gccattagcatccagtaatgtctag

SEQ ID NO: 1861763 - DNA, 25 bp, Homo sapien
ccagtaatgtctagtataagcaggg

SEQ ID NO: 1861764 - DNA, 25 bp, Homo sapien
tagcatccagtaatgtctagtataa

SEQ ID NO: 1861765 - DNA, 25 bp, Homo sapien
tagagcatcacattgggtgatcatg

SEQ ID NO: 1861766 - DNA, 25 bp, Homo sapien
gggacagacttgtaacccggagcca

SEQ ID NO: 1861767 - DNA, 25 bp, Homo sapien
ttgggtgatcatgggccccttggca

SEQ ID NO: 1861768 - DNA, 25 bp, Homo sapien
cacagtgtccacttaggagcagagg

SEQ ID NO: 1861769 - DNA, 25 bp, Homo sapien
gctgttctgacaagacagtgctgtc

SEQ ID NO: 1861770 - DNA, 25 bp, Homo sapien
ctgttctgacaagacagtgctgtcc

SEQ ID NO: 1861771 - DNA, 25 bp, Homo sapien
tgttctgacaagacagtgctgtcct

SEQ ID NO: 1861772 - DNA, 25 bp, Homo sapien
aatacactggcttggatgtctccgc

SEQ ID NO: 1861773 - DNA, 25 bp, Homo sapien
tggattcagccacgtgccagcgtgc

SEQ ID NO: 1861774 - DNA, 25 bp, Homo sapien
tattccagggtatggattcagccac

SEQ ID NO: 1861775 - DNA, 25 bp, Homo sapien
ttagaaaatctagggcacttgaagc

SEQ ID NO: 1861776 - DNA, 25 bp, Homo sapien
tcatggaatcagagatctgagccca

SEQ ID NO: 1861777 - DNA, 25 bp, Homo sapien
catggaatcagagatctgagcccac

SEQ ID NO: 1861778 - DNA, 25 bp, Homo sapien
gagccacgcatcctcggtagcctga

SEQ ID NO: 1861779 - DNA, 25 bp, Homo sapien
tagcctgaacattccaccttgttga

SEQ ID NO: 1861780 - DNA, 25 bp, Homo sapien
tgaagcatgtcctgactccacacac

SEQ ID NO: 1861781 - DNA, 25 bp, Homo sapien
gtcattagtgacttcatgaagcatg

SEQ ID NO: 1861782 - DNA, 25 bp, Homo sapien
ccagggtggtgtaggtcatctccga

SEQ ID NO: 1861783 - DNA, 25 bp, Homo sapien
tggaagtcctttgggtgaaaatggc

SEQ ID NO: 1861784 - DNA, 25 bp, Homo sapien
gatttcagaggcagaatggaagtcc

SEQ ID NO: 1861785 - DNA, 25 bp, Homo sapien
tcagatgtgtgcgcccagccggcac

SEQ ID NO: 1861786 - DNA, 25 bp, Homo sapien
gacgggtcaccaagcagacttcaca

SEQ ID NO: 1861787 - DNA, 25 bp, Homo sapien
ccatgacatccacaaggaaacagga

SEQ ID NO: 1861788 - DNA, 25 bp, Homo sapien
tttataccaagtcaggtctggacgg

SEQ ID NO: 1861789 - DNA, 25 bp, Homo sapien
gcagacttcacagcagaccatgaca

SEQ ID NO: 1861790 - DNA, 25 bp, Homo sapien
aggtatgattcctaggtggagggcc

SEQ ID NO: 1861791 - DNA, 25 bp, Homo sapien
tatgattcctaggtggagggccagg

SEQ ID NO: 1861792 - DNA, 25 bp, Homo sapien
gggatgaaggtatgattcctaggtg

SEQ ID NO: 1861793 - DNA, 25 bp, Homo sapien
atgaaggtatgattcctaggtggag

SEQ ID NO: 1861794 - DNA, 25 bp, Homo sapien
agctgtagagtctttctctctgatg

SEQ ID NO: 1861795 - DNA, 25 bp, Homo sapien
catgctgctccatttaagctcgact

SEQ ID NO: 1861796 - DNA, 25 bp, Homo sapien
tcgactctgggcaagctgtagagtc

SEQ ID NO: 1861797 - DNA, 25 bp, Homo sapien
gcacaagatggggaagcaaatcctt

SEQ ID NO: 1861798 - DNA, 25 bp, Homo sapien
agcagcaaggcactcttgaggtgcc

SEQ ID NO: 1861799 - DNA, 25 bp, Homo sapien
tcacatggaacctgccagcagcaag

SEQ ID NO: 1861800 - DNA, 25 bp, Homo sapien
gccagcagcaaggcactcttgaggt

SEQ ID NO: 1861801 - DNA, 25 bp, Homo sapien
cacatggaacctgccagcagcaagg

SEQ ID NO: 1861802 - DNA, 25 bp, Homo sapien
ggcaatgtgggaccgaaggcctact

SEQ ID NO: 1861803 - DNA, 25 bp, Homo sapien
aatgtgggaccgaaggcctactgac

SEQ ID NO: 1861804 - DNA, 25 bp, Homo sapien
ctaaatggcaatgtgggaccgaagg

SEQ ID NO: 1861805 - DNA, 25 bp, Homo sapien
gaccgaaggcctactgactgccatt

SEQ ID NO: 1861806 - DNA, 25 bp, Homo sapien
catgggcatgtatgattgcaccaga

SEQ ID NO: 1861807 - DNA, 25 bp, Homo sapien
taatacctttgatccactgagcacc

SEQ ID NO: 1861808 - DNA, 25 bp, Homo sapien
taacaagactttaccacagaggcta

SEQ ID NO: 1861809 - DNA, 25 bp, Homo sapien
caaccccaggtctgtgcttgagctc

SEQ ID NO: 1861810 - DNA, 25 bp, Homo sapien
tctaacaggtgtcccataaccagga

SEQ ID NO: 1861811 - DNA, 25 bp, Homo sapien
gatgattagacacaacctgaggctc

SEQ ID NO: 1861812 - DNA, 25 bp, Homo sapien
cacgaacaggtgagttgactggccc

SEQ ID NO: 1861813 - DNA, 25 bp, Homo sapien
ccaactgtgtctgcatagaagggca

SEQ ID NO: 1861814 - DNA, 25 bp, Homo sapien
tccacacctgcatgacgttctctcc

SEQ ID NO: 1861815 - DNA, 25 bp, Homo sapien
ccacacctgcatgacgttctctccc

SEQ ID NO: 1861816 - DNA, 25 bp, Homo sapien
ctccacacctgcatgacgttctctc

SEQ ID NO: 1861817 - DNA, 25 bp, Homo sapien
ctgtctttagcacaccagttctcca

SEQ ID NO: 1861818 - DNA, 25 bp, Homo sapien
taaagctggatggacatcagagggc

SEQ ID NO: 1861819 - DNA, 25 bp, Homo sapien
ttaaagctggatggacatcagaggg

SEQ ID NO: 1861820 - DNA, 25 bp, Homo sapien
tgtaaccaagagaggataatcctcc

SEQ ID NO: 1861821 - DNA, 25 bp, Homo sapien
aggtcatcgatgtcatgattcctga

SEQ ID NO: 1861822 - DNA, 25 bp, Homo sapien
atctgtaaccaagagaggataatcc

SEQ ID NO: 1861823 - DNA, 25 bp, Homo sapien
ttgggtaggtcatcgatgtcatgat

SEQ ID NO: 1861824 - DNA, 25 bp, Homo sapien
caagtgaactgctgcttttggctgg

SEQ ID NO: 1861825 - DNA, 25 bp, Homo sapien
acacatactccatttccaagtgaac

SEQ ID NO: 1861826 - DNA, 25 bp, Homo sapien
tgctccaggtgtactggcatcaact

SEQ ID NO: 1861827 - DNA, 25 bp, Homo sapien
ttttggctggatgcttgctccaggt

SEQ ID NO: 1861828 - DNA, 25 bp, Homo sapien
tctgggcccctgggtgaattgcctt

SEQ ID NO: 1861829 - DNA, 25 bp, Homo sapien
cagggggtcattaaggatgcagcct

SEQ ID NO: 1861830 - DNA, 25 bp, Homo sapien
caattaggaaacctggcccggagag

SEQ ID NO: 1861831 - DNA, 25 bp, Homo sapien
gtgaattgcctttccatgggatgca

SEQ ID NO: 1861832 - DNA, 25 bp, Homo sapien
aattagccagtcctatccaagcctg

SEQ ID NO: 1861833 - DNA, 25 bp, Homo sapien
ggaaggaactatccaatctgcacag

SEQ ID NO: 1861834 - DNA, 25 bp, Homo sapien
gactggcatgtctggctgccaacca

SEQ ID NO: 1861835 - DNA, 25 bp, Homo sapien
gctacccaaggactttctcaccagg

SEQ ID NO: 1861836 - DNA, 25 bp, Homo sapien
gcacagccagtaagcaaacggcagt

SEQ ID NO: 1861837 - DNA, 25 bp, Homo sapien
attacttctgttgtgagggtgcagc

SEQ ID NO: 1861838 - DNA, 25 bp, Homo sapien
caaacggcagtggtaatgccctatc

SEQ ID NO: 1861839 - DNA, 25 bp, Homo sapien
acttctgttgtgagggtgcagctgc

SEQ ID NO: 1861840 - DNA, 25 bp, Homo sapien
ctgcagaagactttgccattagtca

SEQ ID NO: 1861841 - DNA, 25 bp, Homo sapien
tgcagaagactttgccattagtcat

SEQ ID NO: 1861842 - DNA, 25 bp, Homo sapien
agcacagggtctccaaaacaggggg

SEQ ID NO: 1861843 - DNA, 25 bp, Homo sapien
tgctccttgagttatgtctctctgg

SEQ ID NO: 1861844 - DNA, 25 bp, Homo sapien
tcaaatagaatattggagccaaagg

SEQ ID NO: 1861845 - DNA, 25 bp, Homo sapien
catagccgccccagtgatgactgag

SEQ ID NO: 1861846 - DNA, 25 bp, Homo sapien
gaaggatcggataatgacaactaca

SEQ ID NO: 1861847 - DNA, 25 bp, Homo sapien
aaggactgcacgagcccatgtcctg

SEQ ID NO: 1861848 - DNA, 25 bp, Homo sapien
tcctcaggctcaggacccttttccc

SEQ ID NO: 1861849 - DNA, 25 bp, Homo sapien
gctccttggagtcatgggactcaca

SEQ ID NO: 1861850 - DNA, 25 bp, Homo sapien
gtcatgggactcacaacatcctcag

SEQ ID NO: 1861851 - DNA, 25 bp, Homo sapien
tggagtcatgggactcacaacatcc

SEQ ID NO: 1861852 - DNA, 25 bp, Homo sapien
gcttctagcagactgagagccagga

SEQ ID NO: 1861853 - DNA, 25 bp, Homo sapien
gctggagtttagtgtgaataaaagc

SEQ ID NO: 1861854 - DNA, 25 bp, Homo sapien
aagacacgatcaccaagaagcggct

SEQ ID NO: 1861855 - DNA, 25 bp, Homo sapien
cgatcaccaagaagcggctggagta

SEQ ID NO: 1861856 - DNA, 25 bp, Homo sapien
tgttaggcatttttaggaggttcca

SEQ ID NO: 1861857 - DNA, 25 bp, Homo sapien
taggcatttttaggaggttccagga

SEQ ID NO: 1861858 - DNA, 25 bp, Homo sapien
ggcatttttaggaggttccaggagc

SEQ ID NO: 1861859 - DNA, 25 bp, Homo sapien
catttttaggaggttccaggagctc

SEQ ID NO: 1861860 - DNA, 25 bp, Homo sapien
ccactgaagactctcccagatctga

SEQ ID NO: 1861861 - DNA, 25 bp, Homo sapien
taacaatcagcttatgtctgatggc

SEQ ID NO: 1861862 - DNA, 25 bp, Homo sapien
ctgatggcatcaaaccctcctggca

SEQ ID NO: 1861863 - DNA, 25 bp, Homo sapien
gaagttggctgtactatcctccatg

SEQ ID NO: 1861864 - DNA, 25 bp, Homo sapien
ggaaagccctgagccgcttattcag

SEQ ID NO: 1861865 - DNA, 25 bp, Homo sapien
cttcaagttcagacgagcctgccgg

SEQ ID NO: 1861866 - DNA, 25 bp, Homo sapien
taataataatccctccctaggagga

SEQ ID NO: 1861867 - DNA, 25 bp, Homo sapien
gagacagactcgagctaaaccctcc

SEQ ID NO: 1861868 - DNA, 25 bp, Homo sapien
caaggctcgcttgcctgctggactc

SEQ ID NO: 1861869 - DNA, 25 bp, Homo sapien
acttttttccaaggctcgcttgcct

SEQ ID NO: 1861870 - DNA, 25 bp, Homo sapien
ttttccaaggctcgcttgcctgctg

SEQ ID NO: 1861871 - DNA, 25 bp, Homo sapien
ttccaaggctcgcttgcctgctgga

SEQ ID NO: 1861872 - DNA, 25 bp, Homo sapien
cctgaagttggataatgcgccgcgg

SEQ ID NO: 1861873 - DNA, 25 bp, Homo sapien
catttataaccaccctgaagttgga

SEQ ID NO: 1861874 - DNA, 25 bp, Homo sapien
ttgccagggaccgggtcaccatctc

SEQ ID NO: 1861875 - DNA, 25 bp, Homo sapien
tctccgcgctgtagtcatttataac

SEQ ID NO: 1861876 - DNA, 25 bp, Homo sapien
catccgttcctcagtatctgggaca

SEQ ID NO: 1861877 - DNA, 25 bp, Homo sapien
atccgttcctcagtatctgggacag

SEQ ID NO: 1861878 - DNA, 25 bp, Homo sapien
tccgttcctcagtatctgggacagt

SEQ ID NO: 1861879 - DNA, 25 bp, Homo sapien
ccacaagccaatgtattcaatttgt

SEQ ID NO: 1861880 - DNA, 25 bp, Homo sapien
caagccaatgtattcaatttgttga

SEQ ID NO: 1861881 - DNA, 25 bp, Homo sapien
cacaagccaatgtattcaatttgtt

SEQ ID NO: 1861882 - DNA, 25 bp, Homo sapien
cccacaagccaatgtattcaatttg

SEQ ID NO: 1861883 - DNA, 25 bp, Homo sapien
tcagagggatcgattcctgggcatc

SEQ ID NO: 1861884 - DNA, 25 bp, Homo sapien
caaattgacaaggagcggaggccct

SEQ ID NO: 1861885 - DNA, 25 bp, Homo sapien
gggttttctttgtgcatcttgccgt

SEQ ID NO: 1861886 - DNA, 25 bp, Homo sapien
gccgtgattcatcttcagagggatc

SEQ ID NO: 1861887 - DNA, 25 bp, Homo sapien
cctcatacacttcacagtccacaca

SEQ ID NO: 1861888 - DNA, 25 bp, Homo sapien
atcctcatacacttcacagtccaca

SEQ ID NO: 1861889 - DNA, 25 bp, Homo sapien
tcactcatcctcatacacttcacag

SEQ ID NO: 1861890 - DNA, 25 bp, Homo sapien
tcatcctcatacacttcacagtcca

SEQ ID NO: 1861891 - DNA, 25 bp, Homo sapien
gaaagctgagagtctggaagatgct

SEQ ID NO: 1861892 - DNA, 25 bp, Homo sapien
tagcaaaatttggagtattatttcc

SEQ ID NO: 1861893 - DNA, 25 bp, Homo sapien
tttaatattcatagcaaaatttgga

SEQ ID NO: 1861894 - DNA, 25 bp, Homo sapien
tccatttttcagaggggaaagctga

SEQ ID NO: 1861895 - DNA, 25 bp, Homo sapien
cagccacggagtgaaggaattctat

SEQ ID NO: 1861896 - DNA, 25 bp, Homo sapien
cacagccacggagtgaaggaattct

SEQ ID NO: 1861897 - DNA, 25 bp, Homo sapien
ggcacagccacggagtgaaggaatt

SEQ ID NO: 1861898 - DNA, 25 bp, Homo sapien
ctctggcacagccacggagtgaagg

SEQ ID NO: 1861899 - DNA, 25 bp, Homo sapien
ttcctggtctggtatgaccccagtc

SEQ ID NO: 1861900 - DNA, 25 bp, Homo sapien
ggtctggtatgaccccagtcgagct

SEQ ID NO: 1861901 - DNA, 25 bp, Homo sapien
cctggtctggtatgaccccagtcga

SEQ ID NO: 1861902 - DNA, 25 bp, Homo sapien
tggtctggtatgaccccagtcgagc

SEQ ID NO: 1861903 - DNA, 25 bp, Homo sapien
tcttctccagatgcaagcttgaaat

SEQ ID NO: 1861904 - DNA, 25 bp, Homo sapien
cttctccagatgcaagcttgaaata

SEQ ID NO: 1861905 - DNA, 25 bp, Homo sapien
ttctccagatgcaagcttgaaatat

SEQ ID NO: 1861906 - DNA, 25 bp, Homo sapien
tccttgccctgaattgctctggagg

SEQ ID NO: 1861907 - DNA, 25 bp, Homo sapien
cctttcgaggtgcataattcagagc

SEQ ID NO: 1861908 - DNA, 25 bp, Homo sapien
aggctatttgatgcaggctggcgtc

SEQ ID NO: 1861909 - DNA, 25 bp, Homo sapien
ggctggcgtcaaaacctcggtgaga

SEQ ID NO: 1861910 - DNA, 25 bp, Homo sapien
gccttctcctagccagttgtgtttt

SEQ ID NO: 1861911 - DNA, 25 bp, Homo sapien
cttctcctagccagttgtgttttct

SEQ ID NO: 1861912 - DNA, 25 bp, Homo sapien
ccttctcctagccagttgtgttttc

SEQ ID NO: 1861913 - DNA, 25 bp, Homo sapien
gtcacccgtaatagtaactcatcca

SEQ ID NO: 1861914 - DNA, 25 bp, Homo sapien
gcgagaggttacatatttcccacag

SEQ ID NO: 1861915 - DNA, 25 bp, Homo sapien
ctgaggaggcgagaggttacatatt

SEQ ID NO: 1861916 - DNA, 25 bp, Homo sapien
aaactgctttgctacgtcacccgta

SEQ ID NO: 1861917 - DNA, 25 bp, Homo sapien
tgctggacagcagcgcaggatttct

SEQ ID NO: 1861918 - DNA, 25 bp, Homo sapien
tgagagttgggcagacacgaatccc

SEQ ID NO: 1861919 - DNA, 25 bp, Homo sapien
gccctggcaggtgaattctcctctg

SEQ ID NO: 1861920 - DNA, 25 bp, Homo sapien
cagcagcgcaggatttctatggccc

SEQ ID NO: 1861921 - DNA, 25 bp, Homo sapien
aagcttgtcattgcctgtgtcacca

SEQ ID NO: 1861922 - DNA, 25 bp, Homo sapien
ggtgttatgatgtcgacagagccca

SEQ ID NO: 1861923 - DNA, 25 bp, Homo sapien
tgtcaccatttgtagaccgtggcac

SEQ ID NO: 1861924 - DNA, 25 bp, Homo sapien
cagagcttggccctgtgtgtcatta

SEQ ID NO: 1861925 - DNA, 25 bp, Homo sapien
tgacggagataagggccctgtcaca

SEQ ID NO: 1861926 - DNA, 25 bp, Homo sapien
cattgtgcagcgagtccccggtggt

SEQ ID NO: 1861927 - DNA, 25 bp, Homo sapien
gcagctggtgcaagtgataaagtgg

SEQ ID NO: 1861928 - DNA, 25 bp, Homo sapien
gcacgaggcttgctggttgcagcgt

SEQ ID NO: 1861929 - DNA, 25 bp, Homo sapien
aggggggaccatctttccaaggatg

SEQ ID NO: 1861930 - DNA, 25 bp, Homo sapien
tgtccagggaccagcgtactcatgt

SEQ ID NO: 1861931 - DNA, 25 bp, Homo sapien
ttccctgcagccttatgaactacag

SEQ ID NO: 1861932 - DNA, 25 bp, Homo sapien
ccaaggatggactccattcaagtcc

SEQ ID NO: 1861933 - DNA, 25 bp, Homo sapien
ctttgcctgctaaacctgtggagcc

SEQ ID NO: 1861934 - DNA, 25 bp, Homo sapien
tgaacttgacctttgcctgctaaac

SEQ ID NO: 1861935 - DNA, 25 bp, Homo sapien
ttttgaacttgacctttgcctgcta

SEQ ID NO: 1861936 - DNA, 25 bp, Homo sapien
gaacttgacctttgcctgctaaacc

SEQ ID NO: 1861937 - DNA, 25 bp, Homo sapien
aaagccgaagagtgggagccacact

SEQ ID NO: 1861938 - DNA, 25 bp, Homo sapien
aagccagtcgggaaagccgaagagt

SEQ ID NO: 1861939 - DNA, 25 bp, Homo sapien
gaggaaagccagtcgggaaagccga

SEQ ID NO: 1861940 - DNA, 25 bp, Homo sapien
cactggttgaagatgccgggcatcc

SEQ ID NO: 1861941 - DNA, 25 bp, Homo sapien
ccaatcctcgccgtttggggctgcg

SEQ ID NO: 1861942 - DNA, 25 bp, Homo sapien
gggctgcggcaaggagagctgtccc

SEQ ID NO: 1861943 - DNA, 25 bp, Homo sapien
cacccaatcctcgccgtttggggct

SEQ ID NO: 1861944 - DNA, 25 bp, Homo sapien
acccaatcctcgccgtttggggctg

SEQ ID NO: 1861945 - DNA, 25 bp, Homo sapien
aaaataatagactcttttgcttcca

SEQ ID NO: 1861946 - DNA, 25 bp, Homo sapien
tataatgtacatttccaggtttgtt

SEQ ID NO: 1861947 - DNA, 25 bp, Homo sapien
gtttgttttggagtacagctgtgaa

SEQ ID NO: 1861948 - DNA, 25 bp, Homo sapien
aaataatagactcttttgcttccag

SEQ ID NO: 1861949 - DNA, 25 bp, Homo sapien
catcaggcctgatactaccaaggca

SEQ ID NO: 1861950 - DNA, 25 bp, Homo sapien
gcctgatactaccaaggcaaccttc

SEQ ID NO: 1861951 - DNA, 25 bp, Homo sapien
tgatactaccaaggcaaccttcttc

SEQ ID NO: 1861952 - DNA, 25 bp, Homo sapien
agcacatcaggcctgatactaccaa

SEQ ID NO: 1861953 - DNA, 25 bp, Homo sapien
ctcttcgctccacttgggaatggta

SEQ ID NO: 1861954 - DNA, 25 bp, Homo sapien
cacttgggaatggtactggacaaaa

SEQ ID NO: 1861955 - DNA, 25 bp, Homo sapien
ttcgctccacttgggaatggtactg

SEQ ID NO: 1861956 - DNA, 25 bp, Homo sapien
gctccacttgggaatggtactggac

SEQ ID NO: 1861957 - DNA, 25 bp, Homo sapien
ggctagcaataattcctgatgcttt

SEQ ID NO: 1861958 - DNA, 25 bp, Homo sapien
tattttccgagagttatgaattctt

SEQ ID NO: 1861959 - DNA, 25 bp, Homo sapien
gagttatgaattcttgaagtgtctt

SEQ ID NO: 1861960 - DNA, 25 bp, Homo sapien
ccgagagttatgaattcttgaagtg

SEQ ID NO: 1861961 - DNA, 25 bp, Homo sapien
actggagtattttccgagagttatg

SEQ ID NO: 1861962 - DNA, 25 bp, Homo sapien
agatttaggaaaatctacctcatcc

SEQ ID NO: 1861963 - DNA, 25 bp, Homo sapien
tagatttaggaaaatctacctcatc

SEQ ID NO: 1861964 - DNA, 25 bp, Homo sapien
ttatagatttaggaaaatctacctc

SEQ ID NO: 1861965 - DNA, 25 bp, Homo sapien
tatagatttaggaaaatctacctca

SEQ ID NO: 1861966 - DNA, 25 bp, Homo sapien
ggttcatgtgctacaactgcctgga

SEQ ID NO: 1861967 - DNA, 25 bp, Homo sapien
ttcccagtcaataccggcaaaggtg

SEQ ID NO: 1861968 - DNA, 25 bp, Homo sapien
caataccactcttggggactcttcc

SEQ ID NO: 1861969 - DNA, 25 bp, Homo sapien
gtcaataccggcaaaggtggctgtt

SEQ ID NO: 1861970 - DNA, 25 bp, Homo sapien
tggattgaccagaggaacagcaaga

SEQ ID NO: 1861971 - DNA, 25 bp, Homo sapien
gatcttagtagggatgacacattcc

SEQ ID NO: 1861972 - DNA, 25 bp, Homo sapien
gcttcctgttcaagattgcagagca

SEQ ID NO: 1861973 - DNA, 25 bp, Homo sapien
ctagagtgcaagaaataagcatggc

SEQ ID NO: 1861974 - DNA, 25 bp, Homo sapien
cctatccacaaaggcatcttgcagc

SEQ ID NO: 1861975 - DNA, 25 bp, Homo sapien
ggtcctatccacaaaggcatcttgc

SEQ ID NO: 1861976 - DNA, 25 bp, Homo sapien
agctgtacgcttttcctgtctccat

SEQ ID NO: 1861977 - DNA, 25 bp, Homo sapien
cagaggtcctatccacaaaggcatc

SEQ ID NO: 1861978 - DNA, 25 bp, Homo sapien
ccaggtcagcctagcttcaagtgct

SEQ ID NO: 1861979 - DNA, 25 bp, Homo sapien
gactcatgcaagatcagggtctaag

SEQ ID NO: 1861980 - DNA, 25 bp, Homo sapien
tgtgtcatcctctcaggaagccgtg

SEQ ID NO: 1861981 - DNA, 25 bp, Homo sapien
tctaagtggtcaggactggaggcca

SEQ ID NO: 1861982 - DNA, 25 bp, Homo sapien
aagctcccgtgccttctcataggga

SEQ ID NO: 1861983 - DNA, 25 bp, Homo sapien
ttgactagggaacagaaacagtgct

SEQ ID NO: 1861984 - DNA, 25 bp, Homo sapien
tctgcccagagtctagaagctcccg

SEQ ID NO: 1861985 - DNA, 25 bp, Homo sapien
tccaaacacaggtagcgctagctgc

SEQ ID NO: 1861986 - DNA, 25 bp, Homo sapien
tatgaacagggatctcagtgctgat

SEQ ID NO: 1861987 - DNA, 25 bp, Homo sapien
attgtgtatgaacagggatctcagt

SEQ ID NO: 1861988 - DNA, 25 bp, Homo sapien
ccagatatcctggtactggtgattg

SEQ ID NO: 1861989 - DNA, 25 bp, Homo sapien
agatatcctggtactggtgattgtc

SEQ ID NO: 1861990 - DNA, 25 bp, Homo sapien
tgcacagggtccactgtaattgata

SEQ ID NO: 1861991 - DNA, 25 bp, Homo sapien
gggtccactgtaattgataccacag

SEQ ID NO: 1861992 - DNA, 25 bp, Homo sapien
ctggatggctgagggatgcacaggg

SEQ ID NO: 1861993 - DNA, 25 bp, Homo sapien
ctgtaattgataccacagtctgctt

SEQ ID NO: 1861994 - DNA, 25 bp, Homo sapien
tcagctgatggtagggggagcctgc

SEQ ID NO: 1861995 - DNA, 25 bp, Homo sapien
cagctgatggtagggggagcctgca

SEQ ID NO: 1861996 - DNA, 25 bp, Homo sapien
agctgatggtagggggagcctgcac

SEQ ID NO: 1861997 - DNA, 25 bp, Homo sapien
tctcttacaacttttgcacttaagt

SEQ ID NO: 1861998 - DNA, 25 bp, Homo sapien
tccactagtgtctggggtctcctga

SEQ ID NO: 1861999 - DNA, 25 bp, Homo sapien
tgctttctgttggtcccctcactga

SEQ ID NO: 1862000 - DNA, 25 bp, Homo sapien
tgagtcaggctgactggtggtggca

SEQ ID NO: 1862001 - DNA, 25 bp, Homo sapien
tttttcatgccttgatctctctagg

SEQ ID NO: 1862002 - DNA, 25 bp, Homo sapien
cgaagagtatgtcttggttatagaa

SEQ ID NO: 1862003 - DNA, 25 bp, Homo sapien
tcacgtcagagcagcgaagtggctt

SEQ ID NO: 1862004 - DNA, 25 bp, Homo sapien
tatagaaattcacgtcagagcagcg

SEQ ID NO: 1862005 - DNA, 25 bp, Homo sapien
cagccagatgccaggctcctgagct

SEQ ID NO: 1862006 - DNA, 25 bp, Homo sapien
ccaggctcctgagctcccgccacgc

SEQ ID NO: 1862007 - DNA, 25 bp, Homo sapien
gccaggctcctgagctcccgccacg

SEQ ID NO: 1862008 - DNA, 25 bp, Homo sapien
ggctcctgagctcccgccacgccct

SEQ ID NO: 1862009 - DNA, 25 bp, Homo sapien
tggccaaagatgcacgagagagaag

SEQ ID NO: 1862010 - DNA, 25 bp, Homo sapien
tggtggccaaagatgcacgagagag

SEQ ID NO: 1862011 - DNA, 25 bp, Homo sapien
caaagatgcacgagagagaaggagc

SEQ ID NO: 1862012 - DNA, 25 bp, Homo sapien
gccaaagatgcacgagagagaagga

SEQ ID NO: 1862013 - DNA, 25 bp, Homo sapien
caagctctttgcagtccatgttggt

SEQ ID NO: 1862014 - DNA, 25 bp, Homo sapien
gctgtagaacaatgttgacaagata

SEQ ID NO: 1862015 - DNA, 25 bp, Homo sapien
aaacaagtggcaaatggcccacaag

SEQ ID NO: 1862016 - DNA, 25 bp, Homo sapien
taagagataatgtcaatgctgtaga

SEQ ID NO: 1862017 - DNA, 25 bp, Homo sapien
tcaggtgcgtatgcgcaggttggag

SEQ ID NO: 1862018 - DNA, 25 bp, Homo sapien
ggtgcgtatgcgcaggttggagctg

SEQ ID NO: 1862019 - DNA, 25 bp, Homo sapien
gtgcgtatgcgcaggttggagctgg

SEQ ID NO: 1862020 - DNA, 25 bp, Homo sapien
ctgggtctgagcgggcaatggaaac

SEQ ID NO: 1862021 - DNA, 25 bp, Homo sapien
tttttggggcttcataactctcagc

SEQ ID NO: 1862022 - DNA, 25 bp, Homo sapien
ctttttggggcttcataactctcag

SEQ ID NO: 1862023 - DNA, 25 bp, Homo sapien
agctttttggggcttcataactctc

SEQ ID NO: 1862024 - DNA, 25 bp, Homo sapien
ttggggcttcataactctcagccat

SEQ ID NO: 1862025 - DNA, 25 bp, Homo sapien
ttcttggacaccataaatggcacat

SEQ ID NO: 1862026 - DNA, 25 bp, Homo sapien
tggaagaggggatcaaagggtcctc

SEQ ID NO: 1862027 - DNA, 25 bp, Homo sapien
agccagtggccctcagagtgaaagt

SEQ ID NO: 1862028 - DNA, 25 bp, Homo sapien
agtgaaagtggaagaggggatcaaa

SEQ ID NO: 1862029 - DNA, 25 bp, Homo sapien
gcctgggcacacatgggagggtagg

SEQ ID NO: 1862030 - DNA, 25 bp, Homo sapien
tatggccactttatgggcaatgaaa

SEQ ID NO: 1862031 - DNA, 25 bp, Homo sapien
tggccactttatgggcaatgaaacc

SEQ ID NO: 1862032 - DNA, 25 bp, Homo sapien
agagacctttatggccactttatgg

SEQ ID NO: 1862033 - DNA, 25 bp, Homo sapien
cctttatggccactttatgggcaat

SEQ ID NO: 1862034 - DNA, 25 bp, Homo sapien
tagtcctcatttatgtttgccagcg

SEQ ID NO: 1862035 - DNA, 25 bp, Homo sapien
atgtttgccagcgtgcggagcagcc

SEQ ID NO: 1862036 - DNA, 25 bp, Homo sapien
ggagcagcccttctgtgtttgtgag

SEQ ID NO: 1862037 - DNA, 25 bp, Homo sapien
ctcatttatgtttgccagcgtgcgg

SEQ ID NO: 1862038 - DNA, 25 bp, Homo sapien
tctgattgagtaggcacacttcata

SEQ ID NO: 1862039 - DNA, 25 bp, Homo sapien
tttcttagttaagcactcacaggtc

SEQ ID NO: 1862040 - DNA, 25 bp, Homo sapien
tcctgatgaggtagactgatgtcat

SEQ ID NO: 1862041 - DNA, 25 bp, Homo sapien
gaggtgtcattctgattgagtaggc

SEQ ID NO: 1862042 - DNA, 25 bp, Homo sapien
ctgtctatggcagatgcacgtgaac

SEQ ID NO: 1862043 - DNA, 25 bp, Homo sapien
ctagtgggcacagtcactgtctatg

SEQ ID NO: 1862044 - DNA, 25 bp, Homo sapien
gtcactgtctatggcagatgcacgt

SEQ ID NO: 1862045 - DNA, 25 bp, Homo sapien
cactgtctatggcagatgcacgtga

SEQ ID NO: 1862046 - DNA, 25 bp, Homo sapien
tctattgaagaagcatcttgctcca

SEQ ID NO: 1862047 - DNA, 25 bp, Homo sapien
agcatcttgctccaaaagtcaaaat

SEQ ID NO: 1862048 - DNA, 25 bp, Homo sapien
aaatctattgaagaagcatcttgct

SEQ ID NO: 1862049 - DNA, 25 bp, Homo sapien
atctattgaagaagcatcttgctcc

SEQ ID NO: 1862050 - DNA, 25 bp, Homo sapien
ttcttgtctggcatcacagttttcc

SEQ ID NO: 1862051 - DNA, 25 bp, Homo sapien
acagtctcagtcttgattccccttt

SEQ ID NO: 1862052 - DNA, 25 bp, Homo sapien
tgattccccttttggtcctacgtgc

SEQ ID NO: 1862053 - DNA, 25 bp, Homo sapien
ttggtcctacgtgcccagggttctg

SEQ ID NO: 1862054 - DNA, 25 bp, Homo sapien
ttcagcaggttctgttataaacttt

SEQ ID NO: 1862055 - DNA, 25 bp, Homo sapien
cagcaggttctgttataaactttgc

SEQ ID NO: 1862056 - DNA, 25 bp, Homo sapien
ggttctgttataaactttgcaactc

SEQ ID NO: 1862057 - DNA, 25 bp, Homo sapien
caggttctgttataaactttgcaac

SEQ ID NO: 1862058 - DNA, 25 bp, Homo sapien
ttgcagccctgagtcagtagcccag

SEQ ID NO: 1862059 - DNA, 25 bp, Homo sapien
ccttgcagccctgagtcagtagccc

SEQ ID NO: 1862060 - DNA, 25 bp, Homo sapien
gcccttgcagccctgagtcagtagc

SEQ ID NO: 1862061 - DNA, 25 bp, Homo sapien
tgcagccctgagtcagtagcccagg

SEQ ID NO: 1862062 - DNA, 25 bp, Homo sapien
aataggtcccggtggcatatgctgc

SEQ ID NO: 1862063 - DNA, 25 bp, Homo sapien
taatatttaactgaagtctgcggcc

SEQ ID NO: 1862064 - DNA, 25 bp, Homo sapien
gagtacaataaaggccagaaacctg

SEQ ID NO: 1862065 - DNA, 25 bp, Homo sapien
gagcagaatgagaggaataggtccc

SEQ ID NO: 1862066 - DNA, 25 bp, Homo sapien
ccagagagattgtttgcctgccttt

SEQ ID NO: 1862067 - DNA, 25 bp, Homo sapien
caacacctgtttgcaaacaaaagaa

SEQ ID NO: 1862068 - DNA, 25 bp, Homo sapien
aaattgtgttgccagagagattgtt

SEQ ID NO: 1862069 - DNA, 25 bp, Homo sapien
acaaattaacaacacctgtttgcaa

SEQ ID NO: 1862070 - DNA, 25 bp, Homo sapien
taaagatctccaaaccactcggcaa

SEQ ID NO: 1862071 - DNA, 25 bp, Homo sapien
cagtgaatactttagggcctgaccg

SEQ ID NO: 1862072 - DNA, 25 bp, Homo sapien
tgttcaggacccagcccattcatgt

SEQ ID NO: 1862073 - DNA, 25 bp, Homo sapien
taactgaaacacaggtgcagagcgg

SEQ ID NO: 1862074 - DNA, 25 bp, Homo sapien
aacaactccaggatggccgctgcgg

SEQ ID NO: 1862075 - DNA, 25 bp, Homo sapien
tccatgacggtcatgaggtagtgca

SEQ ID NO: 1862076 - DNA, 25 bp, Homo sapien
gaggcgcagtctagccgctccatga

SEQ ID NO: 1862077 - DNA, 25 bp, Homo sapien
tgtgtcccactcaggtagttctgga

SEQ ID NO: 1862078 - DNA, 25 bp, Homo sapien
tgtttggctccaataacatccgcag

SEQ ID NO: 1862079 - DNA, 25 bp, Homo sapien
gggaggccagtctgcgccagtcatt

SEQ ID NO: 1862080 - DNA, 25 bp, Homo sapien
cattgccggtgatgctgtttggctc

SEQ ID NO: 1862081 - DNA, 25 bp, Homo sapien
atcttcatgccgcaaagccccaggt

SEQ ID NO: 1862082 - DNA, 25 bp, Homo sapien
gcctggaatctgaggatttccatat

SEQ ID NO: 1862083 - DNA, 25 bp, Homo sapien
gcatgggggcggctgggaaacaggt

SEQ ID NO: 1862084 - DNA, 25 bp, Homo sapien
gatttccatatacttggtctccaag

SEQ ID NO: 1862085 - DNA, 25 bp, Homo sapien
gaggatttccatatacttggtctcc

SEQ ID NO: 1862086 - DNA, 25 bp, Homo sapien
agtgctgaacagtcctcattctcat

SEQ ID NO: 1862087 - DNA, 25 bp, Homo sapien
cattggttagtgctgaacagtcctc

SEQ ID NO: 1862088 - DNA, 25 bp, Homo sapien
gtgcatggtgacaatgatctcattg

SEQ ID NO: 1862089 - DNA, 25 bp, Homo sapien
caatgatctcattggttagtgctga

SEQ ID NO: 1862090 - DNA, 25 bp, Homo sapien
gagaaggtgacagcgtggccagtga

SEQ ID NO: 1862091 - DNA, 25 bp, Homo sapien
agcagaaggagcggaaggggcactt

SEQ ID NO: 1862092 - DNA, 25 bp, Homo sapien
ggcaactgctgtcatccacattctc

SEQ ID NO: 1862093 - DNA, 25 bp, Homo sapien
cactttccatgccagatgtggagat

SEQ ID NO: 1862094 - DNA, 25 bp, Homo sapien
cagaaggagcggaaggggcactttc

SEQ ID NO: 1862095 - DNA, 25 bp, Homo sapien
tgtcctggcaccagcggtgagcaga

SEQ ID NO: 1862096 - DNA, 25 bp, Homo sapien
cctagccccattgaagtcgaagagc

SEQ ID NO: 1862097 - DNA, 25 bp, Homo sapien
ggctgctcgttggtcagtgcccact

SEQ ID NO: 1862098 - DNA, 25 bp, Homo sapien
tgagatgtacgtgagcttcaggcac

SEQ ID NO: 1862099 - DNA, 25 bp, Homo sapien
tggatgcgacactcatcccgggagg

SEQ ID NO: 1862100 - DNA, 25 bp, Homo sapien
tgggctgctcggcacagtgtttgaa

SEQ ID NO: 1862101 - DNA, 25 bp, Homo sapien
ccagcagggtagtgttgctgctgta

SEQ ID NO: 1862102 - DNA, 25 bp, Homo sapien
aacgtgagagtgcaaggcttcagga

SEQ ID NO: 1862103 - DNA, 25 bp, Homo sapien
caggatcaaagacacccgctcctgg

SEQ ID NO: 1862104 - DNA, 25 bp, Homo sapien
aggtcccacaccaggatcaaagaca

SEQ ID NO: 1862105 - DNA, 25 bp, Homo sapien
ggatcaaagacacccgctcctggcg

SEQ ID NO: 1862106 - DNA, 25 bp, Homo sapien
gatggggcgtccgacaggtcccaca

SEQ ID NO: 1862107 - DNA, 25 bp, Homo sapien
tcgagccgaaaacaccaacagtttg

SEQ ID NO: 1862108 - DNA, 25 bp, Homo sapien
gtttgtgcatcaactggcggaccat

SEQ ID NO: 1862109 - DNA, 25 bp, Homo sapien
agcatcaggcaaccgccgcggtgat

SEQ ID NO: 1862110 - DNA, 25 bp, Homo sapien
gatgagcaaggagatgcctgtatcc

SEQ ID NO: 1862111 - DNA, 25 bp, Homo sapien
tcctggtagaaggcaaccatctctg

SEQ ID NO: 1862112 - DNA, 25 bp, Homo sapien
ctcctggtagaaggcaaccatctct

SEQ ID NO: 1862113 - DNA, 25 bp, Homo sapien
cctggtagaaggcaaccatctctgg

SEQ ID NO: 1862114 - DNA, 25 bp, Homo sapien
gctgggacactggttcctcttgacc

SEQ ID NO: 1862115 - DNA, 25 bp, Homo sapien
ggtaggctgggacactggttcctct

SEQ ID NO: 1862116 - DNA, 25 bp, Homo sapien
tggttcctcttgaccattcagtgtc

SEQ ID NO: 1862117 - DNA, 25 bp, Homo sapien
gcccccagcagccttctagggcagt

SEQ ID NO: 1862118 - DNA, 25 bp, Homo sapien
aggcattgggccagaaggaggacac

SEQ ID NO: 1862119 - DNA, 25 bp, Homo sapien
catcgaaggcattgggccagaagga

SEQ ID NO: 1862120 - DNA, 25 bp, Homo sapien
cgaaggcattgggccagaaggagga

SEQ ID NO: 1862121 - DNA, 25 bp, Homo sapien
ccatcgaaggcattgggccagaagg

SEQ ID NO: 1862122 - DNA, 25 bp, Homo sapien
gttggaatgaactctcctgggggca

SEQ ID NO: 1862123 - DNA, 25 bp, Homo sapien
cagcagtaggaactgggagggttgg

SEQ ID NO: 1862124 - DNA, 25 bp, Homo sapien
ctgggagggttggaatgaactctcc

SEQ ID NO: 1862125 - DNA, 25 bp, Homo sapien
taggaactgggagggttggaatgaa

SEQ ID NO: 1862126 - DNA, 25 bp, Homo sapien
tggttactcaatgccgctggctctc

SEQ ID NO: 1862127 - DNA, 25 bp, Homo sapien
actcaatgccgctggctctccttca

SEQ ID NO: 1862128 - DNA, 25 bp, Homo sapien
gttactcaatgccgctggctctcct

SEQ ID NO: 1862129 - DNA, 25 bp, Homo sapien
ctggttactcaatgccgctggctct

SEQ ID NO: 1862130 - DNA, 25 bp, Homo sapien
gcagacaatgcaccagcctttttca

SEQ ID NO: 1862131 - DNA, 25 bp, Homo sapien
ttctcccatgtcctcactgaaagtg

SEQ ID NO: 1862132 - DNA, 25 bp, Homo sapien
tttgcctaaagagccaacccagcag

SEQ ID NO: 1862133 - DNA, 25 bp, Homo sapien
tctctttgcctaaagagccaaccca

SEQ ID NO: 1862134 - DNA, 25 bp, Homo sapien
tacacaaggtgctttctacttcccc

SEQ ID NO: 1862135 - DNA, 25 bp, Homo sapien
aaagttggcagagacactgccggtt

SEQ ID NO: 1862136 - DNA, 25 bp, Homo sapien
ccttacacaaggtgctttctacttc

SEQ ID NO: 1862137 - DNA, 25 bp, Homo sapien
cggttgggagacaactgaactttgg

SEQ ID NO: 1862138 - DNA, 25 bp, Homo sapien
tagaacagttctcggtgagggccag

SEQ ID NO: 1862139 - DNA, 25 bp, Homo sapien
ggaatccacggtgtcaacaggccaa

SEQ ID NO: 1862140 - DNA, 25 bp, Homo sapien
tcgtgactagaaaagagtccccagg

SEQ ID NO: 1862141 - DNA, 25 bp, Homo sapien
gccccatgagtgtgccagtctgata

SEQ ID NO: 1862142 - DNA, 25 bp, Homo sapien
gctgtggagttagggttcaccccaa

SEQ ID NO: 1862143 - DNA, 25 bp, Homo sapien
tgactgaggccctagggcatgggag

SEQ ID NO: 1862144 - DNA, 25 bp, Homo sapien
cctcagcccacggagaagagtgact

SEQ ID NO: 1862145 - DNA, 25 bp, Homo sapien
tgttactgctgccctacctagcctg

SEQ ID NO: 1862146 - DNA, 25 bp, Homo sapien
aaagagatttttggccatgtgcaga

SEQ ID NO: 1862147 - DNA, 25 bp, Homo sapien
ggacttagccctagaagaaagctta

SEQ ID NO: 1862148 - DNA, 25 bp, Homo sapien
tttgggcagtgtcccaagccctggg

SEQ ID NO: 1862149 - DNA, 25 bp, Homo sapien
tagcacgaccgcctgatacagcatg

SEQ ID NO: 1862150 - DNA, 25 bp, Homo sapien
ccttatttgttgttcagttcctcaa

SEQ ID NO: 1862151 - DNA, 25 bp, Homo sapien
taccttatttgttgttcagttcctc

SEQ ID NO: 1862152 - DNA, 25 bp, Homo sapien
tatttgttgttcagttcctcaagct

SEQ ID NO: 1862153 - DNA, 25 bp, Homo sapien
ttcctcaagctccacaaatcatcac

SEQ ID NO: 1862154 - DNA, 25 bp, Homo sapien
cagagagatgagtgttacacttatc

SEQ ID NO: 1862155 - DNA, 25 bp, Homo sapien
tcttccttctatcagagagatgagt

SEQ ID NO: 1862156 - DNA, 25 bp, Homo sapien
cttccttctatcagagagatgagtg

SEQ ID NO: 1862157 - DNA, 25 bp, Homo sapien
ttgacctacagagaacggctgcctg

SEQ ID NO: 1862158 - DNA, 25 bp, Homo sapien
gaacctgcgtctgctcattctggtg

SEQ ID NO: 1862159 - DNA, 25 bp, Homo sapien
tctggtgggtcgactcttcatgtgg

SEQ ID NO: 1862160 - DNA, 25 bp, Homo sapien
tacctagaggatgagcatgcggctg

SEQ ID NO: 1862161 - DNA, 25 bp, Homo sapien
ctttcatgaggcaagatgacgttct

SEQ ID NO: 1862162 - DNA, 25 bp, Homo sapien
gaaatcctctgagtatgcccctgtg

SEQ ID NO: 1862163 - DNA, 25 bp, Homo sapien
taagatttagatggtgcaagcacct

SEQ ID NO: 1862164 - DNA, 25 bp, Homo sapien
tactcaaggttgacaggaatcctaa

SEQ ID NO: 1862165 - DNA, 25 bp, Homo sapien
aataatcttgagaaatgagcatttg

SEQ ID NO: 1862166 - DNA, 25 bp, Homo sapien
tctggacccattaacatgcttccct

SEQ ID NO: 1862167 - DNA, 25 bp, Homo sapien
aaaaaactggcatgagataagagtg

SEQ ID NO: 1862168 - DNA, 25 bp, Homo sapien
ctatttgaattgctcatgtttgtga

SEQ ID NO: 1862169 - DNA, 25 bp, Homo sapien
gaaggtcctaattgctcacccaagg

SEQ ID NO: 1862170 - DNA, 25 bp, Homo sapien
tgtacagccatctgggacatgcctg

SEQ ID NO: 1862171 - DNA, 25 bp, Homo sapien
ctctcgggaaggacgaaagtgacct

SEQ ID NO: 1862172 - DNA, 25 bp, Homo sapien
catgggctccagtcaactatgggac

SEQ ID NO: 1862173 - DNA, 25 bp, Homo sapien
tgtgttcactctgattaccagggca

SEQ ID NO: 1862174 - DNA, 25 bp, Homo sapien
taagtcgtcggaatttgacccaaga

SEQ ID NO: 1862175 - DNA, 25 bp, Homo sapien
tcaactgaactcaacttaagatggg

SEQ ID NO: 1862176 - DNA, 25 bp, Homo sapien
taaggtagccacatcccaaatgcca

SEQ ID NO: 1862177 - DNA, 25 bp, Homo sapien
tgcacatccaaatcttctatggagg

SEQ ID NO: 1862178 - DNA, 25 bp, Homo sapien
gactaatatttagaccccagctggc

SEQ ID NO: 1862179 - DNA, 25 bp, Homo sapien
taccatgaccacaatagacgactgg

SEQ ID NO: 1862180 - DNA, 25 bp, Homo sapien
ctggtctttgcagcttcggaagaaa

SEQ ID NO: 1862181 - DNA, 25 bp, Homo sapien
tcactgatttattgggtcactagtc

SEQ ID NO: 1862182 - DNA, 25 bp, Homo sapien
aattaagttgcaggtgaaccctcca

SEQ ID NO: 1862183 - DNA, 25 bp, Homo sapien
gaaaaagttcaccatgaggagattc

SEQ ID NO: 1862184 - DNA, 25 bp, Homo sapien
gaaaccatgcagtggacaaaagaga

SEQ ID NO: 1862185 - DNA, 25 bp, Homo sapien
ttatttttccatttttatcaccaca

SEQ ID NO: 1862186 - DNA, 25 bp, Homo sapien
tatttttccatttttatcaccacaa

SEQ ID NO: 1862187 - DNA, 25 bp, Homo sapien
tatggcccagtagagatgacacagg

SEQ ID NO: 1862188 - DNA, 25 bp, Homo sapien
tctcccctaggaggaatctgatgac

SEQ ID NO: 1862189 - DNA, 25 bp, Homo sapien
tgacacaggagaacacggaaacatc

SEQ ID NO: 1862190 - DNA, 25 bp, Homo sapien
taggtttgcccggtcctatggccca

SEQ ID NO: 1862191 - DNA, 25 bp, Homo sapien
tctgttgcctcaaatacctcctcga

SEQ ID NO: 1862192 - DNA, 25 bp, Homo sapien
cagagtgtgtacacagtaattttga

SEQ ID NO: 1862193 - DNA, 25 bp, Homo sapien
cagtaattttgatgtctgttgcctc

SEQ ID NO: 1862194 - DNA, 25 bp, Homo sapien
tttgatgtctgttgcctcaaatacc

SEQ ID NO: 1862195 - DNA, 25 bp, Homo sapien
ttgcagacgatcaagaccacatcca

SEQ ID NO: 1862196 - DNA, 25 bp, Homo sapien
cattgcagacgatcaagaccacatc

SEQ ID NO: 1862197 - DNA, 25 bp, Homo sapien
cccattgcagacgatcaagaccaca

SEQ ID NO: 1862198 - DNA, 25 bp, Homo sapien
tttcccattgcagacgatcaagacc

SEQ ID NO: 1862199 - DNA, 25 bp, Homo sapien
tcaacacgcctagggaaaaaagaga

SEQ ID NO: 1862200 - DNA, 25 bp, Homo sapien
ggtaagatagttgcaatccaggagt

SEQ ID NO: 1862201 - DNA, 25 bp, Homo sapien
ggcaccttccaagatgttactctag

SEQ ID NO: 1862202 - DNA, 25 bp, Homo sapien
gagtaaggtctttgcaacaccctgg

SEQ ID NO: 1862203 - DNA, 25 bp, Homo sapien
gttttcataagttggcttgtgcgaa

SEQ ID NO: 1862204 - DNA, 25 bp, Homo sapien
tgtgcgaagcccttttctttgtaat

SEQ ID NO: 1862205 - DNA, 25 bp, Homo sapien
tgagacttcattgcctctaaactct

SEQ ID NO: 1862206 - DNA, 25 bp, Homo sapien
cttcagacaatgagacttcattgcc

SEQ ID NO: 1862207 - DNA, 25 bp, Homo sapien
cactgttatgggagaccttcaagaa

SEQ ID NO: 1862208 - DNA, 25 bp, Homo sapien
taagctgcatatctctaacagggaa

SEQ ID NO: 1862209 - DNA, 25 bp, Homo sapien
tgtgccacttccaagagataagctg

SEQ ID NO: 1862210 - DNA, 25 bp, Homo sapien
taggaaacccatgagattagcagat

SEQ ID NO: 1862211 - DNA, 25 bp, Homo sapien
atatatatcgcccatctctcttcag

SEQ ID NO: 1862212 - DNA, 25 bp, Homo sapien
caagtaatatatatatcgcccatct

SEQ ID NO: 1862213 - DNA, 25 bp, Homo sapien
taatatatatatcgcccatctctct

SEQ ID NO: 1862214 - DNA, 25 bp, Homo sapien
tatatatcgcccatctctcttcaga

SEQ ID NO: 1862215 - DNA, 25 bp, Homo sapien
tatggtaaacgtctaaactagaggc

SEQ ID NO: 1862216 - DNA, 25 bp, Homo sapien
tgctgttaagcctggaatgtggtcg

SEQ ID NO: 1862217 - DNA, 25 bp, Homo sapien
aatgtggtcggagaaactgttgcag

SEQ ID NO: 1862218 - DNA, 25 bp, Homo sapien
ttgaatgccaacctatagactaagc

SEQ ID NO: 1862219 - DNA, 25 bp, Homo sapien
tgtaacagattaaaaggtgctctag

SEQ ID NO: 1862220 - DNA, 25 bp, Homo sapien
ctctagccagggcaaaccaggtaag

SEQ ID NO: 1862221 - DNA, 25 bp, Homo sapien
taaagtgtaacagattaaaaggtgc

SEQ ID NO: 1862222 - DNA, 25 bp, Homo sapien
aggtgctctagccagggcaaaccag

SEQ ID NO: 1862223 - DNA, 25 bp, Homo sapien
gcgacaatcctcactgatacagtgg

SEQ ID NO: 1862224 - DNA, 25 bp, Homo sapien
tttcgggcatgcaaaaaggtctcct

SEQ ID NO: 1862225 - DNA, 25 bp, Homo sapien
gatacagtgggctaaagagtctgtt

SEQ ID NO: 1862226 - DNA, 25 bp, Homo sapien
ttaaagaggacagctatcccagcgc

SEQ ID NO: 1862227 - DNA, 25 bp, Homo sapien
cctccattattacgaatttcagttc

SEQ ID NO: 1862228 - DNA, 25 bp, Homo sapien
tccattattacgaatttcagttcac

SEQ ID NO: 1862229 - DNA, 25 bp, Homo sapien
tgacctccattattacgaatttcag

SEQ ID NO: 1862230 - DNA, 25 bp, Homo sapien
gacctccattattacgaatttcagt

SEQ ID NO: 1862231 - DNA, 25 bp, Homo sapien
caataagtcaatagttgttacgcac

SEQ ID NO: 1862232 - DNA, 25 bp, Homo sapien
gatcttcattaaggctgctggccat

SEQ ID NO: 1862233 - DNA, 25 bp, Homo sapien
ttctggatcttcattaaggctgctg

SEQ ID NO: 1862234 - DNA, 25 bp, Homo sapien
tctggatcttcattaaggctgctgg

SEQ ID NO: 1862235 - DNA, 25 bp, Homo sapien
tggatcttcattaaggctgctggcc

SEQ ID NO: 1862236 - DNA, 25 bp, Homo sapien
tgagtcgctatttccagaatttaag

SEQ ID NO: 1862237 - DNA, 25 bp, Homo sapien
gatactgagtcgctatttccagaat

SEQ ID NO: 1862238 - DNA, 25 bp, Homo sapien
tactgagtcgctatttccagaattt

SEQ ID NO: 1862239 - DNA, 25 bp, Homo sapien
agtcgctatttccagaatttaagtg

SEQ ID NO: 1862240 - DNA, 25 bp, Homo sapien
tgcttaggcagccttagtatataat

SEQ ID NO: 1862241 - DNA, 25 bp, Homo sapien
aaggaagtaaaaatgcttaggcagc

SEQ ID NO: 1862242 - DNA, 25 bp, Homo sapien
tctgattgccctgtacaaccactta

SEQ ID NO: 1862243 - DNA, 25 bp, Homo sapien
ctgtacaaccacttaataggctttt

SEQ ID NO: 1862244 - DNA, 25 bp, Homo sapien
tcagcgaggacgcagtctgtcctgg

SEQ ID NO: 1862245 - DNA, 25 bp, Homo sapien
cctagggcgggtcagcgaggacgca

SEQ ID NO: 1862246 - DNA, 25 bp, Homo sapien
tcctggggtcctatgggagggtgcg

SEQ ID NO: 1862247 - DNA, 25 bp, Homo sapien
gaggctcgctcaaagccccaacgta

SEQ ID NO: 1862248 - DNA, 25 bp, Homo sapien
aaacgcggagccaatcccgccaaag

SEQ ID NO: 1862249 - DNA, 25 bp, Homo sapien
ctccggatccgaccctggtaggtgg

SEQ ID NO: 1862250 - DNA, 25 bp, Homo sapien
agcagcggaccagcccaaacgcgga

SEQ ID NO: 1862251 - DNA, 25 bp, Homo sapien
taattgcacgcatctaagatggccg

SEQ ID NO: 1862252 - DNA, 25 bp, Homo sapien
cgaacttccggcagtaaattccgtg

SEQ ID NO: 1862253 - DNA, 25 bp, Homo sapien
cgcgtctggaaagcgcctgcgtatt

SEQ ID NO: 1862254 - DNA, 25 bp, Homo sapien
tagcgcctgcgtagtactaagctca

SEQ ID NO: 1862255 - DNA, 25 bp, Homo sapien
ccacgagtcgggaaaagtggcgctt

SEQ ID NO: 1862256 - DNA, 25 bp, Homo sapien
tcagaggcgcctgcgcggaggcggt

SEQ ID NO: 1862257 - DNA, 25 bp, Homo sapien
cgtggcctcagaggcgcctgcgcgg

SEQ ID NO: 1862258 - DNA, 25 bp, Homo sapien
tggagttagtgggcgtggcctcaga

SEQ ID NO: 1862259 - DNA, 25 bp, Homo sapien
tgcgcggaggcggttggagggaggc

SEQ ID NO: 1862260 - DNA, 25 bp, Homo sapien
ttggagcccaaccaagcggtctccg

SEQ ID NO: 1862261 - DNA, 25 bp, Homo sapien
ttgtccgggctgtaagaccagtcca

SEQ ID NO: 1862262 - DNA, 25 bp, Homo sapien
gaccagtccattcggtgcctggaac

SEQ ID NO: 1862263 - DNA, 25 bp, Homo sapien
caagcggtctccgtttcttgtccgg

SEQ ID NO: 1862264 - DNA, 25 bp, Homo sapien
ttagaagattgatacccttgcgcat

SEQ ID NO: 1862265 - DNA, 25 bp, Homo sapien
tgcgcattctttccggaggctgcac

SEQ ID NO: 1862266 - DNA, 25 bp, Homo sapien
gatacccttgcgcattctttccgga

SEQ ID NO: 1862267 - DNA, 25 bp, Homo sapien
tttccggaggctgcacaacttgctg

SEQ ID NO: 1862268 - DNA, 25 bp, Homo sapien
gattgtcacgttatccgcattagca

SEQ ID NO: 1862269 - DNA, 25 bp, Homo sapien
tgtttttggatacagggctttcctc

SEQ ID NO: 1862270 - DNA, 25 bp, Homo sapien
tatccgcattagcagatgagatgat

SEQ ID NO: 1862271 - DNA, 25 bp, Homo sapien
ttcatttgattgtcacgttatccgc

SEQ ID NO: 1862272 - DNA, 25 bp, Homo sapien
gccatcctcccttcttgttctccca

SEQ ID NO: 1862273 - DNA, 25 bp, Homo sapien
tcaagccatcctcccttcttgttct

SEQ ID NO: 1862274 - DNA, 25 bp, Homo sapien
cccaaaacgttgggattacaggcat

SEQ ID NO: 1862275 - DNA, 25 bp, Homo sapien
aagccatcctcccttcttgttctcc

SEQ ID NO: 1862276 - DNA, 25 bp, Homo sapien
tatgttctggtcacttcaaaatcac

SEQ ID NO: 1862277 - DNA, 25 bp, Homo sapien
ggtcacttcaaaatcactaaatact

SEQ ID NO: 1862278 - DNA, 25 bp, Homo sapien
ggtatgttctggtcacttcaaaatc

SEQ ID NO: 1862279 - DNA, 25 bp, Homo sapien
gttctggtcacttcaaaatcactaa

SEQ ID NO: 1862280 - DNA, 25 bp, Homo sapien
tgatttgtagtacttcaccttcctc

SEQ ID NO: 1862281 - DNA, 25 bp, Homo sapien
ttacaagcttccaccagtctgcaga

SEQ ID NO: 1862282 - DNA, 25 bp, Homo sapien
cattttgagagaaagtagtgtggcc

SEQ ID NO: 1862283 - DNA, 25 bp, Homo sapien
tgtttagtccactgttcacatgctg

SEQ ID NO: 1862284 - DNA, 25 bp, Homo sapien
actggtgaagtcagccagccatctc

SEQ ID NO: 1862285 - DNA, 25 bp, Homo sapien
gactggtgaagtcagccagccatct

SEQ ID NO: 1862286 - DNA, 25 bp, Homo sapien
ccagaacgggttgtgcctcagaaat

SEQ ID NO: 1862287 - DNA, 25 bp, Homo sapien
tagagcacgattctccagtggatgg

SEQ ID NO: 1862288 - DNA, 25 bp, Homo sapien
tcatgtgtttcagcctagtgggaga

SEQ ID NO: 1862289 - DNA, 25 bp, Homo sapien
agtgaaatattcctagtcccaggga

SEQ ID NO: 1862290 - DNA, 25 bp, Homo sapien
tgtcgatgccactggaccaacagag

SEQ ID NO: 1862291 - DNA, 25 bp, Homo sapien
tacggtcgctgggaatctaagcaac

SEQ ID NO: 1862292 - DNA, 25 bp, Homo sapien
gacttgtctgcatggacggtgtctc

SEQ ID NO: 1862293 - DNA, 25 bp, Homo sapien
taactgcactggtacattgaacatg

SEQ ID NO: 1862294 - DNA, 25 bp, Homo sapien
ctaaggacgtgttgctctttcatgt

SEQ ID NO: 1862295 - DNA, 25 bp, Homo sapien
taaggacgtgttgctctttcatgtc

SEQ ID NO: 1862296 - DNA, 25 bp, Homo sapien
gacctgccctgtctatcaccagtgg

SEQ ID NO: 1862297 - DNA, 25 bp, Homo sapien
gaccttttgacacctgcttgaccag

SEQ ID NO: 1862298 - DNA, 25 bp, Homo sapien
gaattgatgtccctgactaacagca

SEQ ID NO: 1862299 - DNA, 25 bp, Homo sapien
ccagtgggtatctgagcttaaggcc

SEQ ID NO: 1862300 - DNA, 25 bp, Homo sapien
gtctcagattcttactcacaagcag

SEQ ID NO: 1862301 - DNA, 25 bp, Homo sapien
gaagccttgtgtgagagacataaag

SEQ ID NO: 1862302 - DNA, 25 bp, Homo sapien
gcagtcaaaggctgcacctctgaaa

SEQ ID NO: 1862303 - DNA, 25 bp, Homo sapien
cttcctggaagccttgtgtgagaga

SEQ ID NO: 1862304 - DNA, 25 bp, Homo sapien
gatgtcaaggagaacaaggatgcag

SEQ ID NO: 1862305 - DNA, 25 bp, Homo sapien
tactgctatctacatgtttatcaaa

SEQ ID NO: 1862306 - DNA, 25 bp, Homo sapien
aatgtacatattaagtatactagcc

SEQ ID NO: 1862307 - DNA, 25 bp, Homo sapien
gaacaataacctgaagggaccatga

SEQ ID NO: 1862308 - DNA, 25 bp, Homo sapien
cattcacaggccaagcaattagtca

SEQ ID NO: 1862309 - DNA, 25 bp, Homo sapien
caggccaagcaattagtcaaacttg

SEQ ID NO: 1862310 - DNA, 25 bp, Homo sapien
tcttttccattcacaggccaagcaa

SEQ ID NO: 1862311 - DNA, 25 bp, Homo sapien
caagcaattagtcaaacttgggcag

SEQ ID NO: 1862312 - DNA, 25 bp, Homo sapien
tgcacagaacccctagggatggtcc

SEQ ID NO: 1862313 - DNA, 25 bp, Homo sapien
ctaaggatcctagggcatgagctgg

SEQ ID NO: 1862314 - DNA, 25 bp, Homo sapien
tagatcttaaagtccctggttgctc

SEQ ID NO: 1862315 - DNA, 25 bp, Homo sapien
catgtctgagcgtcactttccctag

SEQ ID NO: 1862316 - DNA, 25 bp, Homo sapien
gggaagattactgtggcatatgtca

SEQ ID NO: 1862317 - DNA, 25 bp, Homo sapien
gtggcatatgtcacaggcttggagc

SEQ ID NO: 1862318 - DNA, 25 bp, Homo sapien
tccctcccgggaagattactgtggc

SEQ ID NO: 1862319 - DNA, 25 bp, Homo sapien
tagctggatggagtctgattgttag

SEQ ID NO: 1862320 - DNA, 25 bp, Homo sapien
tattgtcaaatgaaggtggtgagtc

SEQ ID NO: 1862321 - DNA, 25 bp, Homo sapien
tgagtcaagcctaatgtgtggtaca

SEQ ID NO: 1862322 - DNA, 25 bp, Homo sapien
agctgggagtgaaggttttcctgat

SEQ ID NO: 1862323 - DNA, 25 bp, Homo sapien
aaggcaattcagcagccggtccaga

SEQ ID NO: 1862324 - DNA, 25 bp, Homo sapien
cgtggtggaccactgaggagggatt

SEQ ID NO: 1862325 - DNA, 25 bp, Homo sapien
cactgacgtggtggaccactgagga

SEQ ID NO: 1862326 - DNA, 25 bp, Homo sapien
gacgtggtggaccactgaggaggga

SEQ ID NO: 1862327 - DNA, 25 bp, Homo sapien
ctgacgtggtggaccactgaggagg

SEQ ID NO: 1862328 - DNA, 25 bp, Homo sapien
ctatctcttgaatcctgagtatatc

SEQ ID NO: 1862329 - DNA, 25 bp, Homo sapien
tcctgagtatatcagtgggcaagag

SEQ ID NO: 1862330 - DNA, 25 bp, Homo sapien
tgggcaagagggcttcattgtgaag

SEQ ID NO: 1862331 - DNA, 25 bp, Homo sapien
tgtgaagattttcaagccccaagtt

SEQ ID NO: 1862332 - DNA, 25 bp, Homo sapien
ctgctgctcaggaatcggccacaga

SEQ ID NO: 1862333 - DNA, 25 bp, Homo sapien
ctgctcaggaatcggccacagacac

SEQ ID NO: 1862334 - DNA, 25 bp, Homo sapien
caggaatcggccacagacaccaagc

SEQ ID NO: 1862335 - DNA, 25 bp, Homo sapien
catgcctgaaactctgctgctcagg

SEQ ID NO: 1862336 - DNA, 25 bp, Homo sapien
cgctgccaccagcagacctaccagg

SEQ ID NO: 1862337 - DNA, 25 bp, Homo sapien
gacctaccaggagcacagcacccca

SEQ ID NO: 1862338 - DNA, 25 bp, Homo sapien
agcagacctaccaggagcacagcac

SEQ ID NO: 1862339 - DNA, 25 bp, Homo sapien
accagcagacctaccaggagcacag

SEQ ID NO: 1862340 - DNA, 25 bp, Homo sapien
aagggataggcaggcttagacctga

SEQ ID NO: 1862341 - DNA, 25 bp, Homo sapien
gaacagaaagggataggcaggctta

SEQ ID NO: 1862342 - DNA, 25 bp, Homo sapien
caggcttagacctgaagcctgtggg

SEQ ID NO: 1862343 - DNA, 25 bp, Homo sapien
gataggcaggcttagacctgaagcc

SEQ ID NO: 1862344 - DNA, 25 bp, Homo sapien
ctgagaatgcgttctcagccagact

SEQ ID NO: 1862345 - DNA, 25 bp, Homo sapien
gcgttctcagccagactgccaatct

SEQ ID NO: 1862346 - DNA, 25 bp, Homo sapien
gactgccaatcttatgggtctcttc

SEQ ID NO: 1862347 - DNA, 25 bp, Homo sapien
ctgggttccaaagggttggcactgc

SEQ ID NO: 1862348 - DNA, 25 bp, Homo sapien
ctgagggactggaggagtggagcca

SEQ ID NO: 1862349 - DNA, 25 bp, Homo sapien
tggcactggctctttatgtctttac

SEQ ID NO: 1862350 - DNA, 25 bp, Homo sapien
tgggatgttctttaggggcctgtca

SEQ ID NO: 1862351 - DNA, 25 bp, Homo sapien
aatatcctgttgaggtctgagggac

SEQ ID NO: 1862352 - DNA, 25 bp, Homo sapien
acctgcctgcctgaacatcatcctc

SEQ ID NO: 1862353 - DNA, 25 bp, Homo sapien
atctctggatgctacgcgccacctg

SEQ ID NO: 1862354 - DNA, 25 bp, Homo sapien
cacctgcctgcctgaacatcatcct

SEQ ID NO: 1862355 - DNA, 25 bp, Homo sapien
gccgcaagccacatcatctctggat

SEQ ID NO: 1862356 - DNA, 25 bp, Homo sapien
gagctctgcgatccacagctgagga

SEQ ID NO: 1862357 - DNA, 25 bp, Homo sapien
ggtctgtgagaaacgtacgcctgcc

SEQ ID NO: 1862358 - DNA, 25 bp, Homo sapien
gggaggctgccaactatgccctgac

SEQ ID NO: 1862359 - DNA, 25 bp, Homo sapien
tgacatcctggagcctgtagtggca

SEQ ID NO: 1862360 - DNA, 25 bp, Homo sapien
aggagcagcagcaagagcagggtga

SEQ ID NO: 1862361 - DNA, 25 bp, Homo sapien
gcagcaagagcagggtgaggcccat

SEQ ID NO: 1862362 - DNA, 25 bp, Homo sapien
cagcagcaagagcagggtgaggccc

SEQ ID NO: 1862363 - DNA, 25 bp, Homo sapien
agcagcagcaagagcagggtgaggc

SEQ ID NO: 1862364 - DNA, 25 bp, Homo sapien
gggcagagaaatgtcaactcctggg

SEQ ID NO: 1862365 - DNA, 25 bp, Homo sapien
ggcagagaaatgtcaactcctgggc

SEQ ID NO: 1862366 - DNA, 25 bp, Homo sapien
gcctgggcactgatgcagcattcgc

SEQ ID NO: 1862367 - DNA, 25 bp, Homo sapien
tgcctgggcactgatgcagcattcg

SEQ ID NO: 1862368 - DNA, 25 bp, Homo sapien
ggaggttccataatccaggggaagc

SEQ ID NO: 1862369 - DNA, 25 bp, Homo sapien
ggcagggaggttccataatccaggg

SEQ ID NO: 1862370 - DNA, 25 bp, Homo sapien
ggttccataatccaggggaagctga

SEQ ID NO: 1862371 - DNA, 25 bp, Homo sapien
cttggggcagggaggttccataatc

SEQ ID NO: 1862372 - DNA, 25 bp, Homo sapien
ctttttctcatccaaattcattttc

SEQ ID NO: 1862373 - DNA, 25 bp, Homo sapien
tcttgtctttttctcatccaaattc

SEQ ID NO: 1862374 - DNA, 25 bp, Homo sapien
tgtctttttctcatccaaattcatt

SEQ ID NO: 1862375 - DNA, 25 bp, Homo sapien
tcaaggagcaaaatctcttgtcttt

SEQ ID NO: 1862376 - DNA, 25 bp, Homo sapien
tgtccaatattcagaagttgtcagg

SEQ ID NO: 1862377 - DNA, 25 bp, Homo sapien
tatttgtaagtgtttaaaatgtcca

SEQ ID NO: 1862378 - DNA, 25 bp, Homo sapien
tgacagtcttggatttatttgtaag

SEQ ID NO: 1862379 - DNA, 25 bp, Homo sapien
ttgtcaggtgttcttaccacctccc

SEQ ID NO: 1862380 - DNA, 25 bp, Homo sapien
tggccaagtggcaagtatgcaggct

SEQ ID NO: 1862381 - DNA, 25 bp, Homo sapien
ggcagagtagtctcttgccagagca

SEQ ID NO: 1862382 - DNA, 25 bp, Homo sapien
cctggtggccaagtggcaagtatgc

SEQ ID NO: 1862383 - DNA, 25 bp, Homo sapien
agtgttcaggcagagtagtctcttg

SEQ ID NO: 1862384 - DNA, 25 bp, Homo sapien
aaggactcatgtggcccctctcggc

SEQ ID NO: 1862385 - DNA, 25 bp, Homo sapien
tagtccaaggactcatgtggcccct

SEQ ID NO: 1862386 - DNA, 25 bp, Homo sapien
cagtccacccttgatggctgtgctc

SEQ ID NO: 1862387 - DNA, 25 bp, Homo sapien
ctgcaatagtccaaggactcatgtg

SEQ ID NO: 1862388 - DNA, 25 bp, Homo sapien
gagctgataccctgggtcatggcca

SEQ ID NO: 1862389 - DNA, 25 bp, Homo sapien
agagtttggagctgataccctgggt

SEQ ID NO: 1862390 - DNA, 25 bp, Homo sapien
ttggagctgataccctgggtcatgg

SEQ ID NO: 1862391 - DNA, 25 bp, Homo sapien
agtttggagctgataccctgggtca

SEQ ID NO: 1862392 - DNA, 25 bp, Homo sapien
cccagagggcgctggctgctagaat

SEQ ID NO: 1862393 - DNA, 25 bp, Homo sapien
ccagagggcgctggctgctagaatc

SEQ ID NO: 1862394 - DNA, 25 bp, Homo sapien
aatcttgatgagaaagatgcaggcc

SEQ ID NO: 1862395 - DNA, 25 bp, Homo sapien
tgctagaatcttgatgagaaagatg

SEQ ID NO: 1862396 - DNA, 25 bp, Homo sapien
agaaggcagatgggagccttgagat

SEQ ID NO: 1862397 - DNA, 25 bp, Homo sapien
tggagagacaagaaggcagatggga

SEQ ID NO: 1862398 - DNA, 25 bp, Homo sapien
aaggcagatgggagccttgagatgg

SEQ ID NO: 1862399 - DNA, 25 bp, Homo sapien
cttggagagacaagaaggcagatgg

SEQ ID NO: 1862400 - DNA, 25 bp, Homo sapien
tgggcatcctcgaagctctcagact

SEQ ID NO: 1862401 - DNA, 25 bp, Homo sapien
acatgggcatcctcgaagctctcag

SEQ ID NO: 1862402 - DNA, 25 bp, Homo sapien
gactccccggggaaccagagatctc

SEQ ID NO: 1862403 - DNA, 25 bp, Homo sapien
gatctccagcatcccggtgatccag

SEQ ID NO: 1862404 - DNA, 25 bp, Homo sapien
gccacaagttgtgcgtgctgaccac

SEQ ID NO: 1862405 - DNA, 25 bp, Homo sapien
cagcgtaatggtgagagtgccaccc

SEQ ID NO: 1862406 - DNA, 25 bp, Homo sapien
cacccagggtatcgtctgtgatggc

SEQ ID NO: 1862407 - DNA, 25 bp, Homo sapien
gggttgtagattccgcagcgtaatg

SEQ ID NO: 1862408 - DNA, 25 bp, Homo sapien
tgacaaagagtaagatgagcagccg

SEQ ID NO: 1862409 - DNA, 25 bp, Homo sapien
ctgtgacaaagagtaagatgagcag

SEQ ID NO: 1862410 - DNA, 25 bp, Homo sapien
caaagagtaagatgagcagccggag

SEQ ID NO: 1862411 - DNA, 25 bp, Homo sapien
acaaagagtaagatgagcagccgga

SEQ ID NO: 1862412 - DNA, 25 bp, Homo sapien
gtgccttgtgcaagatctcgtcttt

SEQ ID NO: 1862413 - DNA, 25 bp, Homo sapien
tgtgcaagatctcgtctttcccttg

SEQ ID NO: 1862414 - DNA, 25 bp, Homo sapien
tgcaagatctcgtctttcccttgaa

SEQ ID NO: 1862415 - DNA, 25 bp, Homo sapien
gccttgtgcaagatctcgtctttcc

SEQ ID NO: 1862416 - DNA, 25 bp, Homo sapien
ctgcagaaaagagaggatcaggcat

SEQ ID NO: 1862417 - DNA, 25 bp, Homo sapien
tcaggcgctgcccacaggaactggg

SEQ ID NO: 1862418 - DNA, 25 bp, Homo sapien
ggcgctgcccacaggaactgggctc

SEQ ID NO: 1862419 - DNA, 25 bp, Homo sapien
aggcgctgcccacaggaactgggct

SEQ ID NO: 1862420 - DNA, 25 bp, Homo sapien
gtcaggcgctgcccacaggaactgg

SEQ ID NO: 1862421 - DNA, 25 bp, Homo sapien
ctggggattaagcaatagtcaggac

SEQ ID NO: 1862422 - DNA, 25 bp, Homo sapien
ggggattaagcaatagtcaggactg

SEQ ID NO: 1862423 - DNA, 25 bp, Homo sapien
tggggattaagcaatagtcaggact

SEQ ID NO: 1862424 - DNA, 25 bp, Homo sapien
caagtttagccttcttggaactgtt

SEQ ID NO: 1862425 - DNA, 25 bp, Homo sapien
tttctgcccaagtttagccttcttg

SEQ ID NO: 1862426 - DNA, 25 bp, Homo sapien
tgttgggtgtctcctgtgcacacat

SEQ ID NO: 1862427 - DNA, 25 bp, Homo sapien
ccttcttggaactgttgggtgtctc

SEQ ID NO: 1862428 - DNA, 25 bp, Homo sapien
cacactggtgtttattttgtgcaca

SEQ ID NO: 1862429 - DNA, 25 bp, Homo sapien
tggtgtttattttgtgcacacacat

SEQ ID NO: 1862430 - DNA, 25 bp, Homo sapien
actggtgtttattttgtgcacacac

SEQ ID NO: 1862431 - DNA, 25 bp, Homo sapien
cactggtgtttattttgtgcacaca

SEQ ID NO: 1862432 - DNA, 25 bp, Homo sapien
catatccctttaaggaggaggtgac

SEQ ID NO: 1862433 - DNA, 25 bp, Homo sapien
gctggttggtagctgtctttgccac

SEQ ID NO: 1862434 - DNA, 25 bp, Homo sapien
aggaggtgacccctgctggttggta

SEQ ID NO: 1862435 - DNA, 25 bp, Homo sapien
gagggcattcatcactggtaaagca

SEQ ID NO: 1862436 - DNA, 25 bp, Homo sapien
tctccttttggacgtcatcataaac

SEQ ID NO: 1862437 - DNA, 25 bp, Homo sapien
tggtcttctccttttggacgtcatc

SEQ ID NO: 1862438 - DNA, 25 bp, Homo sapien
ggacgtcatcataaacatggtaaga

SEQ ID NO: 1862439 - DNA, 25 bp, Homo sapien
tttggacgtcatcataaacatggta

SEQ ID NO: 1862440 - DNA, 25 bp, Homo sapien
tcaaggttaagcaaggaatctctcc

SEQ ID NO: 1862441 - DNA, 25 bp, Homo sapien
gacagtcaaggttaagcaaggaatc

SEQ ID NO: 1862442 - DNA, 25 bp, Homo sapien
aaacatgagggagatattggggtcc

SEQ ID NO: 1862443 - DNA, 25 bp, Homo sapien
agaagacagtcaaggttaagcaagg

SEQ ID NO: 1862444 - DNA, 25 bp, Homo sapien
gtctttttgtcaacagaaacatctt

SEQ ID NO: 1862445 - DNA, 25 bp, Homo sapien
agtctttttgtcaacagaaacatct

SEQ ID NO: 1862446 - DNA, 25 bp, Homo sapien
ctggcccactcccacgtttcagtct

SEQ ID NO: 1862447 - DNA, 25 bp, Homo sapien
cactcccacgtttcagtctttttgt

SEQ ID NO: 1862448 - DNA, 25 bp, Homo sapien
ctttctggaggtaccggttgatgag

SEQ ID NO: 1862449 - DNA, 25 bp, Homo sapien
gcagcacaacggtcactgccacacc

SEQ ID NO: 1862450 - DNA, 25 bp, Homo sapien
cagcagcagcacaacggtcactgcc

SEQ ID NO: 1862451 - DNA, 25 bp, Homo sapien
ggctttctggaggtaccggttgatg

SEQ ID NO: 1862452 - DNA, 25 bp, Homo sapien
ggagcaccagcagaactctcaacag

SEQ ID NO: 1862453 - DNA, 25 bp, Homo sapien
ggtcctcttcttgagccgggatggt

SEQ ID NO: 1862454 - DNA, 25 bp, Homo sapien
gtcctcttcttgagccgggatggtg

SEQ ID NO: 1862455 - DNA, 25 bp, Homo sapien
gggtcctcttcttgagccgggatgg

SEQ ID NO: 1862456 - DNA, 25 bp, Homo sapien
gaggaagtcaaagtctcccttgagg

SEQ ID NO: 1862457 - DNA, 25 bp, Homo sapien
ttgctgaggaagtcaaagtctccct

SEQ ID NO: 1862458 - DNA, 25 bp, Homo sapien
tccggccctggggatgaattgctga

SEQ ID NO: 1862459 - DNA, 25 bp, Homo sapien
agcgctggcaggatccggccctggg

SEQ ID NO: 1862460 - DNA, 25 bp, Homo sapien
cttttggaggtctgactagaacctg

SEQ ID NO: 1862461 - DNA, 25 bp, Homo sapien
agaacctgaagacccattggctccc

SEQ ID NO: 1862462 - DNA, 25 bp, Homo sapien
gagtgacagtgttagggagcctttt

SEQ ID NO: 1862463 - DNA, 25 bp, Homo sapien
gagccttttggaggtctgactagaa

SEQ ID NO: 1862464 - DNA, 25 bp, Homo sapien
gcaacatgggctgcttagctgctta

SEQ ID NO: 1862465 - DNA, 25 bp, Homo sapien
catctgggaaggcaacccggtaggt

SEQ ID NO: 1862466 - DNA, 25 bp, Homo sapien
tgcctaacatctgggaaggcaaccc

SEQ ID NO: 1862467 - DNA, 25 bp, Homo sapien
tactctataggcagagcagcaacat

SEQ ID NO: 1862468 - DNA, 25 bp, Homo sapien
cttctaatgtacatgtgggcccttg

SEQ ID NO: 1862469 - DNA, 25 bp, Homo sapien
tagtatacaacaggatggtggctac

SEQ ID NO: 1862470 - DNA, 25 bp, Homo sapien
cacacagtgacagagtggtatcctg

SEQ ID NO: 1862471 - DNA, 25 bp, Homo sapien
gggagaacagctatcttaggaggct

SEQ ID NO: 1862472 - DNA, 25 bp, Homo sapien
tcataagatcgatactggccccaat

SEQ ID NO: 1862473 - DNA, 25 bp, Homo sapien
agctttctaaggaggcagcggccag

SEQ ID NO: 1862474 - DNA, 25 bp, Homo sapien
tggacatagggaagaagtgcctcct

SEQ ID NO: 1862475 - DNA, 25 bp, Homo sapien
tgacccagggttcaatgcacagttg

SEQ ID NO: 1862476 - DNA, 25 bp, Homo sapien
ttccacatagggctctggtcttcca

SEQ ID NO: 1862477 - DNA, 25 bp, Homo sapien
gaaggatcgctgcacatgctgtagc

SEQ ID NO: 1862478 - DNA, 25 bp, Homo sapien
tcaagtagacttccacatagggctc

SEQ ID NO: 1862479 - DNA, 25 bp, Homo sapien
ggtcacgtgtagaaggatcgctgca

SEQ ID NO: 1862480 - DNA, 25 bp, Homo sapien
aacccatagaccatgatcagcatca

SEQ ID NO: 1862481 - DNA, 25 bp, Homo sapien
acccatagaccatgatcagcatcag

SEQ ID NO: 1862482 - DNA, 25 bp, Homo sapien
tcacattcagaagcaggccacattg

SEQ ID NO: 1862483 - DNA, 25 bp, Homo sapien
cattcagaagcaggccacattgggt

SEQ ID NO: 1862484 - DNA, 25 bp, Homo sapien
acattcagaagcaggccacattggg

SEQ ID NO: 1862485 - DNA, 25 bp, Homo sapien
ttcagaagcaggccacattgggttc

SEQ ID NO: 1862486 - DNA, 25 bp, Homo sapien
cattgctgggagacgcggtcactgt

SEQ ID NO: 1862487 - DNA, 25 bp, Homo sapien
cctgtggtgggcgatctggtgctga

SEQ ID NO: 1862488 - DNA, 25 bp, Homo sapien
tagtctgttgaggagagatctgctg

SEQ ID NO: 1862489 - DNA, 25 bp, Homo sapien
tgctggtagcagtgaagctgtagcc

SEQ ID NO: 1862490 - DNA, 25 bp, Homo sapien
gggcttggccagttgtgacagttcc

SEQ ID NO: 1862491 - DNA, 25 bp, Homo sapien
tgtgaaaggaatgttcctctcagtt

SEQ ID NO: 1862492 - DNA, 25 bp, Homo sapien
ttggccagttgtgacagttccactc

SEQ ID NO: 1862493 - DNA, 25 bp, Homo sapien
cttgaggatgttgtccagatgtgtg

SEQ ID NO: 1862494 - DNA, 25 bp, Homo sapien
cagactcgggcaaagccaggctcac

SEQ ID NO: 1862495 - DNA, 25 bp, Homo sapien
ttcacccagactcgggcaaagccag

SEQ ID NO: 1862496 - DNA, 25 bp, Homo sapien
cctttcacccagactcgggcaaagc

SEQ ID NO: 1862497 - DNA, 25 bp, Homo sapien
tttcacccagactcgggcaaagcca

SEQ ID NO: 1862498 - DNA, 25 bp, Homo sapien
ttcaaggagcctcacttttgtgtat

SEQ ID NO: 1862499 - DNA, 25 bp, Homo sapien
gcagcagcaggaaggctggggccat

SEQ ID NO: 1862500 - DNA, 25 bp, Homo sapien
tgagacgcaaccctgtggccacagc

SEQ ID NO: 1862501 - DNA, 25 bp, Homo sapien
ctgagacgcaaccctgtggccacag

SEQ ID NO: 1862502 - DNA, 25 bp, Homo sapien
gcagcagcagcaggaaggctggggc

SEQ ID NO: 1862503 - DNA, 25 bp, Homo sapien
agggcccacccgacacaggatgtgc

SEQ ID NO: 1862504 - DNA, 25 bp, Homo sapien
gggttctaaaagtgaagctgcccat

SEQ ID NO: 1862505 - DNA, 25 bp, Homo sapien
aaggtgagggcccacccgacacagg

SEQ ID NO: 1862506 - DNA, 25 bp, Homo sapien
gaagctgcccatttagggaagtgag

SEQ ID NO: 1862507 - DNA, 25 bp, Homo sapien
tgctcatttgtatacccttggaaaa

SEQ ID NO: 1862508 - DNA, 25 bp, Homo sapien
taaccaatagtagaactactgggtc

SEQ ID NO: 1862509 - DNA, 25 bp, Homo sapien
ttcatcttgagcatgcacaatttgc

SEQ ID NO: 1862510 - DNA, 25 bp, Homo sapien
tacaccctctccagcaatgtatgag

SEQ ID NO: 1862511 - DNA, 25 bp, Homo sapien
ctgctgattacagcctttcttagtt

SEQ ID NO: 1862512 - DNA, 25 bp, Homo sapien
caacgcttagggcagctcccaatag

SEQ ID NO: 1862513 - DNA, 25 bp, Homo sapien
tgataggactctcgggtagaccact

SEQ ID NO: 1862514 - DNA, 25 bp, Homo sapien
cctggatccatgctgtgactcatgc

SEQ ID NO: 1862515 - DNA, 25 bp, Homo sapien
gcaaggctgggctgatacaatcaga

SEQ ID NO: 1862516 - DNA, 25 bp, Homo sapien
tcaggaacacaaacaggactcacag

SEQ ID NO: 1862517 - DNA, 25 bp, Homo sapien
caggaggagtccacacaacacagag

SEQ ID NO: 1862518 - DNA, 25 bp, Homo sapien
cctgcaggtcaggaacacaaacagg

SEQ ID NO: 1862519 - DNA, 25 bp, Homo sapien
acacaaacaggactcacagcatcag

SEQ ID NO: 1862520 - DNA, 25 bp, Homo sapien
aacttcaaagtcttgaatggaggaa

SEQ ID NO: 1862521 - DNA, 25 bp, Homo sapien
ggaacttcaaagtcttgaatggagg

SEQ ID NO: 1862522 - DNA, 25 bp, Homo sapien
ctagtcagaaggaacttcaaagtct

SEQ ID NO: 1862523 - DNA, 25 bp, Homo sapien
ttcaaagtcttgaatggaggaaaaa

SEQ ID NO: 1862524 - DNA, 25 bp, Homo sapien
tgcagaatctgtggaatccctgagc

SEQ ID NO: 1862525 - DNA, 25 bp, Homo sapien
ataatgcagaatctgtggaatccct

SEQ ID NO: 1862526 - DNA, 25 bp, Homo sapien
cagaatctgtggaatccctgagctt

SEQ ID NO: 1862527 - DNA, 25 bp, Homo sapien
taatgcagaatctgtggaatccctg

SEQ ID NO: 1862528 - DNA, 25 bp, Homo sapien
aaggggaggccgtcatggcctcaaa

SEQ ID NO: 1862529 - DNA, 25 bp, Homo sapien
aggggaggccgtcatggcctcaaaa

SEQ ID NO: 1862530 - DNA, 25 bp, Homo sapien
ggggaggccgtcatggcctcaaaac

SEQ ID NO: 1862531 - DNA, 25 bp, Homo sapien
ggagccaggtgagggtccacgtagg

SEQ ID NO: 1862532 - DNA, 25 bp, Homo sapien
caggtgagggtccacgtaggagacg

SEQ ID NO: 1862533 - DNA, 25 bp, Homo sapien
tgtttgttgggagccaggtgagggt

SEQ ID NO: 1862534 - DNA, 25 bp, Homo sapien
tgagggtccacgtaggagacgtggt

SEQ ID NO: 1862535 - DNA, 25 bp, Homo sapien
atctttgctcccttcggaccagagc

SEQ ID NO: 1862536 - DNA, 25 bp, Homo sapien
ctttgctcccttcggaccagagcag

SEQ ID NO: 1862537 - DNA, 25 bp, Homo sapien
ttgctcccttcggaccagagcagaa

SEQ ID NO: 1862538 - DNA, 25 bp, Homo sapien
tgctcccttcggaccagagcagaag

SEQ ID NO: 1862539 - DNA, 25 bp, Homo sapien
tcacaccagtaggatcccgagtcct

SEQ ID NO: 1862540 - DNA, 25 bp, Homo sapien
cacaccagtaggatcccgagtcctc

SEQ ID NO: 1862541 - DNA, 25 bp, Homo sapien
ttcacaccagtaggatcccgagtcc

SEQ ID NO: 1862542 - DNA, 25 bp, Homo sapien
ctggcattgcaggaagagggtctgt

SEQ ID NO: 1862543 - DNA, 25 bp, Homo sapien
tggcattgcaggaagagggtctgtc

SEQ ID NO: 1862544 - DNA, 25 bp, Homo sapien
tgtgccgattcatcctgaacagagg

SEQ ID NO: 1862545 - DNA, 25 bp, Homo sapien
tcatcctgaacagaggcctggtgtt

SEQ ID NO: 1862546 - DNA, 25 bp, Homo sapien
gccactgttctgatgtgccgattca

SEQ ID NO: 1862547 - DNA, 25 bp, Homo sapien
gttctcggtcctgtttgtcattctt

SEQ ID NO: 1862548 - DNA, 25 bp, Homo sapien
acttccagcttcctgccatgcgtcc

SEQ ID NO: 1862549 - DNA, 25 bp, Homo sapien
tttgggtgggatctacaaccaccca

SEQ ID NO: 1862550 - DNA, 25 bp, Homo sapien
cctccaagcctttcgcagtccactt

SEQ ID NO: 1862551 - DNA, 25 bp, Homo sapien
catgtagccttggatctccttcctg

SEQ ID NO: 1862552 - DNA, 25 bp, Homo sapien
cacatctgtgcagcccaacatctgg

SEQ ID NO: 1862553 - DNA, 25 bp, Homo sapien
ccccaacaaagtcatggagcctggg

SEQ ID NO: 1862554 - DNA, 25 bp, Homo sapien
gcctcacatctgtgcagcccaacat

SEQ ID NO: 1862555 - DNA, 25 bp, Homo sapien
tcaccccaacaaagtcatggagcct

SEQ ID NO: 1862556 - DNA, 25 bp, Homo sapien
gcgtgcctcgggcactttcagggtg

SEQ ID NO: 1862557 - DNA, 25 bp, Homo sapien
gggcgtgcctcgggcactttcaggg

SEQ ID NO: 1862558 - DNA, 25 bp, Homo sapien
tggggcgtgcctcgggcactttcag

SEQ ID NO: 1862559 - DNA, 25 bp, Homo sapien
cctggggcgtgcctcgggcactttc

SEQ ID NO: 1862560 - DNA, 25 bp, Homo sapien
tattaagaagatgcctatgagggaa

SEQ ID NO: 1862561 - DNA, 25 bp, Homo sapien
tattttcaagaatctacatgcatgc

SEQ ID NO: 1862562 - DNA, 25 bp, Homo sapien
cagtgcagctcaggatgaaggtagt

SEQ ID NO: 1862563 - DNA, 25 bp, Homo sapien
cacacacattaagctaggagtggta

SEQ ID NO: 1862564 - DNA, 25 bp, Homo sapien
ttatccgaaagtgcccagtgtgcag

SEQ ID NO: 1862565 - DNA, 25 bp, Homo sapien
agaactgacttatccgaaagtgccc

SEQ ID NO: 1862566 - DNA, 25 bp, Homo sapien
tgccatctttcagggcgtaggtttt

SEQ ID NO: 1862567 - DNA, 25 bp, Homo sapien
gaatgcaaggattgagttccagcct

SEQ ID NO: 1862568 - DNA, 25 bp, Homo sapien
gacgtttcacttggcatcctttatg

SEQ ID NO: 1862569 - DNA, 25 bp, Homo sapien
ttcccttagacaagaacaatctgta

SEQ ID NO: 1862570 - DNA, 25 bp, Homo sapien
tcagggagcccatacaggagatagg

SEQ ID NO: 1862571 - DNA, 25 bp, Homo sapien
caatctgtacgggatgctgcttctc

SEQ ID NO: 1862572 - DNA, 25 bp, Homo sapien
tgggccaactttgctacatgtgaaa

SEQ ID NO: 1862573 - DNA, 25 bp, Homo sapien
tgatggattcataccagaaggacca

SEQ ID NO: 1862574 - DNA, 25 bp, Homo sapien
gaaggaccaagccatccactggtgc

SEQ ID NO: 1862575 - DNA, 25 bp, Homo sapien
gagaaggaatacgaagctgctatca

SEQ ID NO: 1862576 - DNA, 25 bp, Homo sapien
cttccatgacctgaatcctgcagct

SEQ ID NO: 1862577 - DNA, 25 bp, Homo sapien
ccttccatgacctgaatcctgcagc

SEQ ID NO: 1862578 - DNA, 25 bp, Homo sapien
ctaaggagacccttccatgacctga

SEQ ID NO: 1862579 - DNA, 25 bp, Homo sapien
gagacccttccatgacctgaatcct

SEQ ID NO: 1862580 - DNA, 25 bp, Homo sapien
tttgcaccaataccagccaaatccg

SEQ ID NO: 1862581 - DNA, 25 bp, Homo sapien
agccaaatccgatggtgcaggacaa

SEQ ID NO: 1862582 - DNA, 25 bp, Homo sapien
taccagccaaatccgatggtgcagg

SEQ ID NO: 1862583 - DNA, 25 bp, Homo sapien
caataccagccaaatccgatggtgc

SEQ ID NO: 1862584 - DNA, 25 bp, Homo sapien
catgcactaatacgcctcaagtcct

SEQ ID NO: 1862585 - DNA, 25 bp, Homo sapien
tgggtcatgcactaatacgcctcaa

SEQ ID NO: 1862586 - DNA, 25 bp, Homo sapien
caggtgggtcatgcactaatacgcc

SEQ ID NO: 1862587 - DNA, 25 bp, Homo sapien
gacaggtgggtcatgcactaatacg

SEQ ID NO: 1862588 - DNA, 25 bp, Homo sapien
attatagcttccgtgggataatcct

SEQ ID NO: 1862589 - DNA, 25 bp, Homo sapien
cctgattatagcttccgtgggataa

SEQ ID NO: 1862590 - DNA, 25 bp, Homo sapien
tgattatagcttccgtgggataatc

SEQ ID NO: 1862591 - DNA, 25 bp, Homo sapien
tatagcttccgtgggataatcctcc

SEQ ID NO: 1862592 - DNA, 25 bp, Homo sapien
gtaagaacaggccatggtcagattc

SEQ ID NO: 1862593 - DNA, 25 bp, Homo sapien
ctttgtttctagtctccatgagcac

SEQ ID NO: 1862594 - DNA, 25 bp, Homo sapien
ggtcagattctgtccttctagcagg

SEQ ID NO: 1862595 - DNA, 25 bp, Homo sapien
aggccttcaggctggaggcatattt

SEQ ID NO: 1862596 - DNA, 25 bp, Homo sapien
tcccagagggcagtcaacctgaaca

SEQ ID NO: 1862597 - DNA, 25 bp, Homo sapien
tatcacggatcaccctacacctggt

SEQ ID NO: 1862598 - DNA, 25 bp, Homo sapien
tattccacatatggtggcccaggca

SEQ ID NO: 1862599 - DNA, 25 bp, Homo sapien
tctttgtattagctcctggtgtccc

SEQ ID NO: 1862600 - DNA, 25 bp, Homo sapien
tggcaatagtggtgggtcattccca

SEQ ID NO: 1862601 - DNA, 25 bp, Homo sapien
gaaacaagcttgagatccactaaga

SEQ ID NO: 1862602 - DNA, 25 bp, Homo sapien
aatgggagagtatccagcacggcca

SEQ ID NO: 1862603 - DNA, 25 bp, Homo sapien
tgaatgtgtcatgggctttggtaag

SEQ ID NO: 1862604 - DNA, 25 bp, Homo sapien
gcactggagagagcatggaaactga

SEQ ID NO: 1862605 - DNA, 25 bp, Homo sapien
cggggagggcactggagagagcatg

SEQ ID NO: 1862606 - DNA, 25 bp, Homo sapien
cttcaccggggagggcactggagag

SEQ ID NO: 1862607 - DNA, 25 bp, Homo sapien
gagggcactggagagagcatggaaa

SEQ ID NO: 1862608 - DNA, 25 bp, Homo sapien
cataagcatgaaacccaagtgtctg

SEQ ID NO: 1862609 - DNA, 25 bp, Homo sapien
gaaaagaggcatttagacacaggcg

SEQ ID NO: 1862610 - DNA, 25 bp, Homo sapien
tctgggagtgttggaaagaaccaca

SEQ ID NO: 1862611 - DNA, 25 bp, Homo sapien
ggatccagcgataaatgcacacagg

SEQ ID NO: 1862612 - DNA, 25 bp, Homo sapien
gctggtggaatgaaggaccaagcat

SEQ ID NO: 1862613 - DNA, 25 bp, Homo sapien
ggggctgtaacttcttttctgaggc

SEQ ID NO: 1862614 - DNA, 25 bp, Homo sapien
gcccacccaagattattagaggaac

SEQ ID NO: 1862615 - DNA, 25 bp, Homo sapien
caagattattagaggaacgagggca

SEQ ID NO: 1862616 - DNA, 25 bp, Homo sapien
catgttattaactccctgcctttta

SEQ ID NO: 1862617 - DNA, 25 bp, Homo sapien
aattcatgttattaactccctgcct

SEQ ID NO: 1862618 - DNA, 25 bp, Homo sapien
ttaattcatgttattaactccctgc

SEQ ID NO: 1862619 - DNA, 25 bp, Homo sapien
gatttaattcatgttattaactccc

SEQ ID NO: 1862620 - DNA, 25 bp, Homo sapien
gcacaactgccagatggatgtggct

SEQ ID NO: 1862621 - DNA, 25 bp, Homo sapien
ctcccttggcacaactgccagatgg

SEQ ID NO: 1862622 - DNA, 25 bp, Homo sapien
tcagaggacattctcgtgggttcgt

SEQ ID NO: 1862623 - DNA, 25 bp, Homo sapien
cagaggacattctcgtgggttcgtg

SEQ ID NO: 1862624 - DNA, 25 bp, Homo sapien
cagcgtgacagcaaacaggacagag

SEQ ID NO: 1862625 - DNA, 25 bp, Homo sapien
ctcagcgtgacagcaaacaggacag

SEQ ID NO: 1862626 - DNA, 25 bp, Homo sapien
acaggacagagaagaccaggctctt

SEQ ID NO: 1862627 - DNA, 25 bp, Homo sapien
aggacagagaagaccaggctcttac

SEQ ID NO: 1862628 - DNA, 25 bp, Homo sapien
aatgacaatgttgaacaccggaacc

SEQ ID NO: 1862629 - DNA, 25 bp, Homo sapien
gaatgacaatgttgaacaccggaac

SEQ ID NO: 1862630 - DNA, 25 bp, Homo sapien
gtggtaggaggaatcttatacacat

SEQ ID NO: 1862631 - DNA, 25 bp, Homo sapien
acatttgtaaggttgatttcagagt

SEQ ID NO: 1862632 - DNA, 25 bp, Homo sapien
tctgggtagaattctcattggagcc

SEQ ID NO: 1862633 - DNA, 25 bp, Homo sapien
atgatatctgtcacatttgtaaggt

SEQ ID NO: 1862634 - DNA, 25 bp, Homo sapien
tggacagatggatgatgaatgggtg

SEQ ID NO: 1862635 - DNA, 25 bp, Homo sapien
caagaagacacattggatggatgga

SEQ ID NO: 1862636 - DNA, 25 bp, Homo sapien
aagaagacacattggatggatggat

SEQ ID NO: 1862637 - DNA, 25 bp, Homo sapien
ctgcaagaagacacattggatggat

SEQ ID NO: 1862638 - DNA, 25 bp, Homo sapien
tgggagccatggaccatcagcattg

SEQ ID NO: 1862639 - DNA, 25 bp, Homo sapien
cttaatgcaacatctcctgagggcc

SEQ ID NO: 1862640 - DNA, 25 bp, Homo sapien
tcaggcttagaattccccaggtgct

SEQ ID NO: 1862641 - DNA, 25 bp, Homo sapien
gatcaatagagatgcagacccctgt

SEQ ID NO: 1862642 - DNA, 25 bp, Homo sapien
gcggatgcgatcgaacagcatgtga

SEQ ID NO: 1862643 - DNA, 25 bp, Homo sapien
ggctggtagatcacacactgataca

SEQ ID NO: 1862644 - DNA, 25 bp, Homo sapien
ccttggtcaccaccaagcggatgcg

SEQ ID NO: 1862645 - DNA, 25 bp, Homo sapien
acactgatacagtccagaatcttcc

SEQ ID NO: 1862646 - DNA, 25 bp, Homo sapien
tcctccccacttggactggatggga

SEQ ID NO: 1862647 - DNA, 25 bp, Homo sapien
ggtagtcttctagtatgatcctccc

SEQ ID NO: 1862648 - DNA, 25 bp, Homo sapien
tgaaggttgaccattcggacgcgca

SEQ ID NO: 1862649 - DNA, 25 bp, Homo sapien
tgggaattctttgaaggcctctctg

SEQ ID NO: 1862650 - DNA, 25 bp, Homo sapien
agacaaagagcatccacagcagccc

SEQ ID NO: 1862651 - DNA, 25 bp, Homo sapien
cagcccccagagcctggtcttcctc

SEQ ID NO: 1862652 - DNA, 25 bp, Homo sapien
gcccccagagcctggtcttcctcat

SEQ ID NO: 1862653 - DNA, 25 bp, Homo sapien
ctgagacaaagagcatccacagcag

SEQ ID NO: 1862654 - DNA, 25 bp, Homo sapien
ggctcccgggacagctacaaggcac

SEQ ID NO: 1862655 - DNA, 25 bp, Homo sapien
atgtcatctttgcaaaggggcaatg

SEQ ID NO: 1862656 - DNA, 25 bp, Homo sapien
tacatatataaaatgcttcacgaat

SEQ ID NO: 1862657 - DNA, 25 bp, Homo sapien
acatatataaaatgcttcacgaatt

SEQ ID NO: 1862658 - DNA, 25 bp, Homo sapien
tttgcaaaggggcaatgctaatcct

SEQ ID NO: 1862659 - DNA, 25 bp, Homo sapien
cctccagctcaagatgtggttcttt

SEQ ID NO: 1862660 - DNA, 25 bp, Homo sapien
cacaaaacatgaactgtgtactcat

SEQ ID NO: 1862661 - DNA, 25 bp, Homo sapien
tgttgccccataaccaacgttgggc

SEQ ID NO: 1862662 - DNA, 25 bp, Homo sapien
gtaagatttgctgcgcatcagcagt

SEQ ID NO: 1862663 - DNA, 25 bp, Homo sapien
cttctacgaaccctgttgtcagtac

SEQ ID NO: 1862664 - DNA, 25 bp, Homo sapien
ttaggcttaatttgacgtatgggtc

SEQ ID NO: 1862665 - DNA, 25 bp, Homo sapien
agttaggcttaatttgacgtatggg

SEQ ID NO: 1862666 - DNA, 25 bp, Homo sapien
gcttaatttgacgtatgggtcagac

SEQ ID NO: 1862667 - DNA, 25 bp, Homo sapien
ttaatttgacgtatgggtcagactg

SEQ ID NO: 1862668 - DNA, 25 bp, Homo sapien
ataaaggatctgtcagtggtctcca

SEQ ID NO: 1862669 - DNA, 25 bp, Homo sapien
gatctgtcagtggtctccagggcct

SEQ ID NO: 1862670 - DNA, 25 bp, Homo sapien
aaggatctgtcagtggtctccaggg

SEQ ID NO: 1862671 - DNA, 25 bp, Homo sapien
taaaggatctgtcagtggtctccag

SEQ ID NO: 1862672 - DNA, 25 bp, Homo sapien
ccaagggcgcacagccgagttgagc

SEQ ID NO: 1862673 - DNA, 25 bp, Homo sapien
tctctgcagtgtcgccagaacacct

SEQ ID NO: 1862674 - DNA, 25 bp, Homo sapien
ttgagccgtctgattacgctccggg

SEQ ID NO: 1862675 - DNA, 25 bp, Homo sapien
tgctattgcagccagcgtgcacacg

SEQ ID NO: 1862676 - DNA, 25 bp, Homo sapien
ggaaagccatggttcatgacctgtc

SEQ ID NO: 1862677 - DNA, 25 bp, Homo sapien
cacaggaaagccatggttcatgacc

SEQ ID NO: 1862678 - DNA, 25 bp, Homo sapien
caggaaagccatggttcatgacctg

SEQ ID NO: 1862679 - DNA, 25 bp, Homo sapien
aaagccatggttcatgacctgtcct

SEQ ID NO: 1862680 - DNA, 25 bp, Homo sapien
gcaattgatgactgaaggatcctgc

SEQ ID NO: 1862681 - DNA, 25 bp, Homo sapien
tcagaggtataagcagacttgttgg

SEQ ID NO: 1862682 - DNA, 25 bp, Homo sapien
ttgtcatgggagcaggaataaccct

SEQ ID NO: 1862683 - DNA, 25 bp, Homo sapien
accctgtcagggcaattgatgactg

SEQ ID NO: 1862684 - DNA, 25 bp, Homo sapien
ggtttatgcggacacaattccagga

SEQ ID NO: 1862685 - DNA, 25 bp, Homo sapien
agccagatctttcccgaagtttcac

SEQ ID NO: 1862686 - DNA, 25 bp, Homo sapien
tgctgtctctagaaggagcatccct

SEQ ID NO: 1862687 - DNA, 25 bp, Homo sapien
aatgaccctgggtttatgcggacac

SEQ ID NO: 1862688 - DNA, 25 bp, Homo sapien
cagggtaggcatagcaaaggcaaca

SEQ ID NO: 1862689 - DNA, 25 bp, Homo sapien
tcagattccgattccggagaaggcc

SEQ ID NO: 1862690 - DNA, 25 bp, Homo sapien
ttcttgcgctggagttgcccacgct

SEQ ID NO: 1862691 - DNA, 25 bp, Homo sapien
tccatagcacgaaaaagaaccaggg

SEQ ID NO: 1862692 - DNA, 25 bp, Homo sapien
ccagagagcgatcgccccggacttg

SEQ ID NO: 1862693 - DNA, 25 bp, Homo sapien
tgtgcctgtgttccggcctagggca

SEQ ID NO: 1862694 - DNA, 25 bp, Homo sapien
tgggctctgggacgctggccctgct

SEQ ID NO: 1862695 - DNA, 25 bp, Homo sapien
ggaacctcccgatatccccagagga

SEQ ID NO: 1862696 - DNA, 25 bp, Homo sapien
gcggccggcggagggcgaagagcag

SEQ ID NO: 1862697 - DNA, 25 bp, Homo sapien
gggacgacggtagcagagtgttggg

SEQ ID NO: 1862698 - DNA, 25 bp, Homo sapien
agtactggcttggagctgcgtgttc

SEQ ID NO: 1862699 - DNA, 25 bp, Homo sapien
ctgcgtgttccttgggcggccggcg

SEQ ID NO: 1862700 - DNA, 25 bp, Homo sapien
ctgcgtggagaaagcacgcacccgg

SEQ ID NO: 1862701 - DNA, 25 bp, Homo sapien
agaaagcacgcacccgggccgcagt

SEQ ID NO: 1862702 - DNA, 25 bp, Homo sapien
ggcagggggacggcggaaagcagcc

SEQ ID NO: 1862703 - DNA, 25 bp, Homo sapien
cccgggccgcagtagccgggcaggg

SEQ ID NO: 1862704 - DNA, 25 bp, Homo sapien
tccttgatttatgctgcagagtgga

SEQ ID NO: 1862705 - DNA, 25 bp, Homo sapien
gagccggctacgcacattccggagg

SEQ ID NO: 1862706 - DNA, 25 bp, Homo sapien
acacacactcgagacactgcagggc

SEQ ID NO: 1862707 - DNA, 25 bp, Homo sapien
tcattttcatgtcggcgcgagcaca

SEQ ID NO: 1862708 - DNA, 25 bp, Homo sapien
aggaggcgcgcgctgacacgcacac

SEQ ID NO: 1862709 - DNA, 25 bp, Homo sapien
gggtcaataaatctcttaggccaca

SEQ ID NO: 1862710 - DNA, 25 bp, Homo sapien
tgtgcatgagattgcaggaggccct

SEQ ID NO: 1862711 - DNA, 25 bp, Homo sapien
tcagtcatcggaggagatggctgct

SEQ ID NO: 1862712 - DNA, 25 bp, Homo sapien
tataggtgtgcaggattcctctggc

SEQ ID NO: 1862713 - DNA, 25 bp, Homo sapien
ctcactctgcatctttccgaagaat

SEQ ID NO: 1862714 - DNA, 25 bp, Homo sapien
catctttccgaagaatggtcttttc

SEQ ID NO: 1862715 - DNA, 25 bp, Homo sapien
ctgcatctttccgaagaatggtctt

SEQ ID NO: 1862716 - DNA, 25 bp, Homo sapien
cactctgcatctttccgaagaatgg

SEQ ID NO: 1862717 - DNA, 25 bp, Homo sapien
ctcttgcagtatctcgttgagttca

SEQ ID NO: 1862718 - DNA, 25 bp, Homo sapien
ctcgttgagttcatgaaagtctact

SEQ ID NO: 1862719 - DNA, 25 bp, Homo sapien
tgcagtatctcgttgagttcatgaa

SEQ ID NO: 1862720 - DNA, 25 bp, Homo sapien
tatctcgttgagttcatgaaagtct

SEQ ID NO: 1862721 - DNA, 25 bp, Homo sapien
ttatttaacctcgcagttcagcctc

SEQ ID NO: 1862722 - DNA, 25 bp, Homo sapien
cctcgcagttcagcctcctgggggc

SEQ ID NO: 1862723 - DNA, 25 bp, Homo sapien
tttaacctcgcagttcagcctcctg

SEQ ID NO: 1862724 - DNA, 25 bp, Homo sapien
acctcgcagttcagcctcctggggg

SEQ ID NO: 1862725 - DNA, 25 bp, Homo sapien
actgtaccgctaccgctggtggtgg

SEQ ID NO: 1862726 - DNA, 25 bp, Homo sapien
tggcggtctcggagagagcaagaat

SEQ ID NO: 1862727 - DNA, 25 bp, Homo sapien
gcttaaccctgtgcgcgctggggca

SEQ ID NO: 1862728 - DNA, 25 bp, Homo sapien
gctccctagtggagatctgtcgagg

SEQ ID NO: 1862729 - DNA, 25 bp, Homo sapien
tgaaggatgtagatgggtacttctt

SEQ ID NO: 1862730 - DNA, 25 bp, Homo sapien
tgatgttacagtgggattgggaggt

SEQ ID NO: 1862731 - DNA, 25 bp, Homo sapien
tgtagatgggtacttcttccctcac

SEQ ID NO: 1862732 - DNA, 25 bp, Homo sapien
ggtgtggccagcacccttgagctca

SEQ ID NO: 1862733 - DNA, 25 bp, Homo sapien
caggaacaaggcactcctccaagtg

SEQ ID NO: 1862734 - DNA, 25 bp, Homo sapien
ggaacaaggcactcctccaagtgcc

SEQ ID NO: 1862735 - DNA, 25 bp, Homo sapien
ctcaggaacaaggcactcctccaag

SEQ ID NO: 1862736 - DNA, 25 bp, Homo sapien
cgaggtgggaagaatatttctccct

SEQ ID NO: 1862737 - DNA, 25 bp, Homo sapien
taattggagcgtcttgaaagtgcac

SEQ ID NO: 1862738 - DNA, 25 bp, Homo sapien
tatcacttcttgagctccagccaaa

SEQ ID NO: 1862739 - DNA, 25 bp, Homo sapien
caaggagacgtcttggcagcgaaat

SEQ ID NO: 1862740 - DNA, 25 bp, Homo sapien
aaagatttgtgcaagtgtggctgcc

SEQ ID NO: 1862741 - DNA, 25 bp, Homo sapien
tagcttccggtgctgagcttcagac

SEQ ID NO: 1862742 - DNA, 25 bp, Homo sapien
aatcgggcggtcaaccatcctagct

SEQ ID NO: 1862743 - DNA, 25 bp, Homo sapien
gacagttgttcaccctgcctggaag

SEQ ID NO: 1862744 - DNA, 25 bp, Homo sapien
caagctaggcacacactaaggagga

SEQ ID NO: 1862745 - DNA, 25 bp, Homo sapien
gcagaaatattcctgggtaataaaa

SEQ ID NO: 1862746 - DNA, 25 bp, Homo sapien
tcagtgtcgaagttaatgttccaag

SEQ ID NO: 1862747 - DNA, 25 bp, Homo sapien
gggccgagcaagatctctgaagaga

SEQ ID NO: 1862748 - DNA, 25 bp, Homo sapien
taaaacatccccttttcagtgtcga

SEQ ID NO: 1862749 - DNA, 25 bp, Homo sapien
ggctgtatcggtacctgtgtttgtg

SEQ ID NO: 1862750 - DNA, 25 bp, Homo sapien
gtggctgtatcggtacctgtgtttg

SEQ ID NO: 1862751 - DNA, 25 bp, Homo sapien
catgtggctgtatcggtacctgtgt

SEQ ID NO: 1862752 - DNA, 25 bp, Homo sapien
ctgcatgtggctgtatcggtacctg

SEQ ID NO: 1862753 - DNA, 25 bp, Homo sapien
ctctccacaagcaggcgtgggtagg

SEQ ID NO: 1862754 - DNA, 25 bp, Homo sapien
ccgggtgactctccacaagcaggcg

SEQ ID NO: 1862755 - DNA, 25 bp, Homo sapien
gtgactctccacaagcaggcgtggg

SEQ ID NO: 1862756 - DNA, 25 bp, Homo sapien
tgcacccctgcttcggcaccgggcc

SEQ ID NO: 1862757 - DNA, 25 bp, Homo sapien
cacaacacagtgactctgacaggcc

SEQ ID NO: 1862758 - DNA, 25 bp, Homo sapien
gcggcacaacacagtgactctgaca

SEQ ID NO: 1862759 - DNA, 25 bp, Homo sapien
acaacacagtgactctgacaggccg

SEQ ID NO: 1862760 - DNA, 25 bp, Homo sapien
ctggcggcacaacacagtgactctg

SEQ ID NO: 1862761 - DNA, 25 bp, Homo sapien
ggtggttgtgtttgagtgcgaggac

SEQ ID NO: 1862762 - DNA, 25 bp, Homo sapien
ttgtgtttgagtgcgaggacatttc

SEQ ID NO: 1862763 - DNA, 25 bp, Homo sapien
tctccgcggggctatggaactgcgc

SEQ ID NO: 1862764 - DNA, 25 bp, Homo sapien
aactgcgctgcgtggtggttgtgtt

SEQ ID NO: 1862765 - DNA, 25 bp, Homo sapien
ttaggaactgtgatgcctcgttggg

SEQ ID NO: 1862766 - DNA, 25 bp, Homo sapien
catctggcagtggttccgtttcgtt

SEQ ID NO: 1862767 - DNA, 25 bp, Homo sapien
ctggcagtggttccgtttcgttagg

SEQ ID NO: 1862768 - DNA, 25 bp, Homo sapien
tttcatctggcagtggttccgtttc

SEQ ID NO: 1862769 - DNA, 25 bp, Homo sapien
tgagggccaggcattgcattggtcc

SEQ ID NO: 1862770 - DNA, 25 bp, Homo sapien
cttccagaacgtgcaaagacactga

SEQ ID NO: 1862771 - DNA, 25 bp, Homo sapien
taggcacccggagcgagctgctaag

SEQ ID NO: 1862772 - DNA, 25 bp, Homo sapien
ctcgagctcgggaagaggagacacc

SEQ ID NO: 1862773 - DNA, 25 bp, Homo sapien
caatgccaggcttcaaagcctcaag

SEQ ID NO: 1862774 - DNA, 25 bp, Homo sapien
gacatctaggactttcacagctgga

SEQ ID NO: 1862775 - DNA, 25 bp, Homo sapien
gcttcaaagcctcaagggacaggat

SEQ ID NO: 1862776 - DNA, 25 bp, Homo sapien
ggtgcctggccaacaacagattttc

SEQ ID NO: 1862777 - DNA, 25 bp, Homo sapien
gcctcaggagggagtcaggtgtccg

SEQ ID NO: 1862778 - DNA, 25 bp, Homo sapien
tgctttattaaactcacgccgcggt

SEQ ID NO: 1862779 - DNA, 25 bp, Homo sapien
tggatttgcaaacggcttaataagc

SEQ ID NO: 1862780 - DNA, 25 bp, Homo sapien
acgccgcggttcagccctggatttg

SEQ ID NO: 1862781 - DNA, 25 bp, Homo sapien
ctagggctctggactgccagggctg

SEQ ID NO: 1862782 - DNA, 25 bp, Homo sapien
gctctggactgccagggctggcctg

SEQ ID NO: 1862783 - DNA, 25 bp, Homo sapien
gggctctggactgccagggctggcc

SEQ ID NO: 1862784 - DNA, 25 bp, Homo sapien
tagggctctggactgccagggctgg

SEQ ID NO: 1862785 - DNA, 25 bp, Homo sapien
caggctctggcaaggacgatgaggt

SEQ ID NO: 1862786 - DNA, 25 bp, Homo sapien
ggctctggcaaggacgatgaggttc

SEQ ID NO: 1862787 - DNA, 25 bp, Homo sapien
aggctctggcaaggacgatgaggtt

SEQ ID NO: 1862788 - DNA, 25 bp, Homo sapien
gcggcccaattagcgcgcggcgcga

SEQ ID NO: 1862789 - DNA, 25 bp, Homo sapien
cccgcggcccaattagcgcgcggcg

SEQ ID NO: 1862790 - DNA, 25 bp, Homo sapien
tcgcgcccgcggcccaattagcgcg

SEQ ID NO: 1862791 - DNA, 25 bp, Homo sapien
caattagcgcgcggcgcgagggacg

SEQ ID NO: 1862792 - DNA, 25 bp, Homo sapien
gagtggcttatgtgtacacgtatcc

SEQ ID NO: 1862793 - DNA, 25 bp, Homo sapien
ccccaggagcaagtagagactttgt

SEQ ID NO: 1862794 - DNA, 25 bp, Homo sapien
tgcagccaggcagacctaactgttt

SEQ ID NO: 1862795 - DNA, 25 bp, Homo sapien
actgtgtgacccagcaggtcgctta

SEQ ID NO: 1862796 - DNA, 25 bp, Homo sapien
tttggcaatgtttgtgctcacaaca

SEQ ID NO: 1862797 - DNA, 25 bp, Homo sapien
aaagctctgcagaccgtagggagga

SEQ ID NO: 1862798 - DNA, 25 bp, Homo sapien
cagtcattccccatttccaagtagt

SEQ ID NO: 1862799 - DNA, 25 bp, Homo sapien
ccatctgggcccttgtttggcaatg

SEQ ID NO: 1862800 - DNA, 25 bp, Homo sapien
ctaggccttggttgtccaggaaggc

SEQ ID NO: 1862801 - DNA, 25 bp, Homo sapien
gctgtggtgacagtaagaactaaat

SEQ ID NO: 1862802 - DNA, 25 bp, Homo sapien
gtggtgacagtaagaactaaattac

SEQ ID NO: 1862803 - DNA, 25 bp, Homo sapien
tatgctaatgtgtagggctgtggtg

SEQ ID NO: 1862804 - DNA, 25 bp, Homo sapien
tgctaatgtgtagggctgtggtgac

SEQ ID NO: 1862805 - DNA, 25 bp, Homo sapien
tggctttcgagctggtaattatccc

SEQ ID NO: 1862806 - DNA, 25 bp, Homo sapien
tcgagctggtaattatccctccatt

SEQ ID NO: 1862807 - DNA, 25 bp, Homo sapien
gtatattaatacagattcttgacat

SEQ ID NO: 1862808 - DNA, 25 bp, Homo sapien
acctggagctgtcatcgagcttttt

SEQ ID NO: 1862809 - DNA, 25 bp, Homo sapien
ggccacggacgccaatggcgctcac

SEQ ID NO: 1862810 - DNA, 25 bp, Homo sapien
aggccacggacgccaatggcgctca

SEQ ID NO: 1862811 - DNA, 25 bp, Homo sapien
acagaggccacggacgccaatggcg

SEQ ID NO: 1862812 - DNA, 25 bp, Homo sapien
agaggccacggacgccaatggcgct

SEQ ID NO: 1862813 - DNA, 25 bp, Homo sapien
ctggcggcgtcaggagtccggaatg

SEQ ID NO: 1862814 - DNA, 25 bp, Homo sapien
tcaccgcgggactggcggcgtcagg

SEQ ID NO: 1862815 - DNA, 25 bp, Homo sapien
ggcggcgtcaggagtccggaatgac

SEQ ID NO: 1862816 - DNA, 25 bp, Homo sapien
gtctcaccgcgggactggcggcgtc

SEQ ID NO: 1862817 - DNA, 25 bp, Homo sapien
tgtgacatgtcaatgatgaggcagg

SEQ ID NO: 1862818 - DNA, 25 bp, Homo sapien
gacaggtggaaacaggctcacctcc

SEQ ID NO: 1862819 - DNA, 25 bp, Homo sapien
cctctctggaggtagactgcatctg

SEQ ID NO: 1862820 - DNA, 25 bp, Homo sapien
tctcagggcaaggtcaattgtgttc

SEQ ID NO: 1862821 - DNA, 25 bp, Homo sapien
caccttagaatgagtgagggcaacc

SEQ ID NO: 1862822 - DNA, 25 bp, Homo sapien
cagaactttaccaagggaggcatcc

SEQ ID NO: 1862823 - DNA, 25 bp, Homo sapien
aggcctgagtgtgaagttctggctc

SEQ ID NO: 1862824 - DNA, 25 bp, Homo sapien
catcagccagttgcacagaccatgg

SEQ ID NO: 1862825 - DNA, 25 bp, Homo sapien
gattcctccatgttgttgctcgtgg

SEQ ID NO: 1862826 - DNA, 25 bp, Homo sapien
gcacatgcgagtagatggcctagca

SEQ ID NO: 1862827 - DNA, 25 bp, Homo sapien
gagaagaccgtggtttagtcaccta

SEQ ID NO: 1862828 - DNA, 25 bp, Homo sapien
caaggactagcccacggatgagaag

SEQ ID NO: 1862829 - DNA, 25 bp, Homo sapien
ttgcaagcgccccataggattagtc

SEQ ID NO: 1862830 - DNA, 25 bp, Homo sapien
ggtttgcaagcgccccataggatta

SEQ ID NO: 1862831 - DNA, 25 bp, Homo sapien
ggccggggtttgcaagcgccccata

SEQ ID NO: 1862832 - DNA, 25 bp, Homo sapien
caagcgccccataggattagtccga

SEQ ID NO: 1862833 - DNA, 25 bp, Homo sapien
aagtttggtgcacgtggttttctct

SEQ ID NO: 1862834 - DNA, 25 bp, Homo sapien
agatctgccgcctcacgtcttctcc

SEQ ID NO: 1862835 - DNA, 25 bp, Homo sapien
cctcccctaaagtttggtgcacgtg

SEQ ID NO: 1862836 - DNA, 25 bp, Homo sapien
ggtgcacgtggttttctctcgctct

SEQ ID NO: 1862837 - DNA, 25 bp, Homo sapien
acttgtcttgctgaggtcgcacctc

SEQ ID NO: 1862838 - DNA, 25 bp, Homo sapien
ggacttgtcttgctgaggtcgcacc

SEQ ID NO: 1862839 - DNA, 25 bp, Homo sapien
ccgccgtgtcgtctctggtgaagag

SEQ ID NO: 1862840 - DNA, 25 bp, Homo sapien
gtcgcacctcggaagtgccagggcc

SEQ ID NO: 1862841 - DNA, 25 bp, Homo sapien
tcagctcggggatagagcggaaaac

SEQ ID NO: 1862842 - DNA, 25 bp, Homo sapien
gatagagcggaaaacttcttgggga

SEQ ID NO: 1862843 - DNA, 25 bp, Homo sapien
acttgagagcgtctggaaatggccc

SEQ ID NO: 1862844 - DNA, 25 bp, Homo sapien
ccttttccatcgctcggtcagctcg

SEQ ID NO: 1862845 - DNA, 25 bp, Homo sapien
agacggcggcggattccctgtgtcc

SEQ ID NO: 1862846 - DNA, 25 bp, Homo sapien
gccagtggcgctagaatgcgacctg

SEQ ID NO: 1862847 - DNA, 25 bp, Homo sapien
cttgggctgcgtcagagcacagcca

SEQ ID NO: 1862848 - DNA, 25 bp, Homo sapien
tcgcggaatgcggattttgagacag

SEQ ID NO: 1862849 - DNA, 25 bp, Homo sapien
agacctgcctagattcgtcccagca

SEQ ID NO: 1862850 - DNA, 25 bp, Homo sapien
gtttcggagacctgcctagattcgt

SEQ ID NO: 1862851 - DNA, 25 bp, Homo sapien
tcagcatcttcaccccggtttcgga

SEQ ID NO: 1862852 - DNA, 25 bp, Homo sapien
ttcagcatcttcaccccggtttcgg

SEQ ID NO: 1862853 - DNA, 25 bp, Homo sapien
aattgttaggactggcccgagtgcc

SEQ ID NO: 1862854 - DNA, 25 bp, Homo sapien
tcgtatggcctgtagctgcgggaag

SEQ ID NO: 1862855 - DNA, 25 bp, Homo sapien
ccgagtgcccgcagaaagaaagagc

SEQ ID NO: 1862856 - DNA, 25 bp, Homo sapien
ggtcccactgtcgaacccagaagct

SEQ ID NO: 1862857 - DNA, 25 bp, Homo sapien
tacctggacagcttgttggctccca

SEQ ID NO: 1862858 - DNA, 25 bp, Homo sapien
ggctctgctcttggtacctggacag

SEQ ID NO: 1862859 - DNA, 25 bp, Homo sapien
tcttggtacctggacagcttgttgg

SEQ ID NO: 1862860 - DNA, 25 bp, Homo sapien
tggagggaggatactggggctctgc

SEQ ID NO: 1862861 - DNA, 25 bp, Homo sapien
tctgcctttagagccgaaaacttcc

SEQ ID NO: 1862862 - DNA, 25 bp, Homo sapien
gaatgtgcatatcctgctgggcccc

SEQ ID NO: 1862863 - DNA, 25 bp, Homo sapien
aaaacttccgttctggctgtaggca

SEQ ID NO: 1862864 - DNA, 25 bp, Homo sapien
tctgtgtagggatcttcctcacacc

SEQ ID NO: 1862865 - DNA, 25 bp, Homo sapien
ttgcagagcctggacgcagggcaca

SEQ ID NO: 1862866 - DNA, 25 bp, Homo sapien
actgccagttccaccaagccgggat

SEQ ID NO: 1862867 - DNA, 25 bp, Homo sapien
tcttgtgagatgttgctcctgggcc

SEQ ID NO: 1862868 - DNA, 25 bp, Homo sapien
tctgaattctgccactttggatgct

SEQ ID NO: 1862869 - DNA, 25 bp, Homo sapien
agaagttgcttcaaaagagggtggc

SEQ ID NO: 1862870 - DNA, 25 bp, Homo sapien
aaagaagttgcttcaaaagagggtg

SEQ ID NO: 1862871 - DNA, 25 bp, Homo sapien
cttcaaaagagggtggcggtgtact

SEQ ID NO: 1862872 - DNA, 25 bp, Homo sapien
agagggtggcggtgtacttcctcct

SEQ ID NO: 1862873 - DNA, 25 bp, Homo sapien
tgagcacagggatataacacaaggg

SEQ ID NO: 1862874 - DNA, 25 bp, Homo sapien
gagcgcatcagttccagttgctgga

SEQ ID NO: 1862875 - DNA, 25 bp, Homo sapien
cctgcatgtctgagacctgagcaca

SEQ ID NO: 1862876 - DNA, 25 bp, Homo sapien
gggttttcggcactcaccagacgca

SEQ ID NO: 1862877 - DNA, 25 bp, Homo sapien
gattcgacagggcctgtagtgttga

SEQ ID NO: 1862878 - DNA, 25 bp, Homo sapien
tgcaaatgccttattcaggctctga

SEQ ID NO: 1862879 - DNA, 25 bp, Homo sapien
tcgacagggcctgtagtgttgagtt

SEQ ID NO: 1862880 - DNA, 25 bp, Homo sapien
ccagattcgacagggcctgtagtgt

SEQ ID NO: 1862881 - DNA, 25 bp, Homo sapien
tcttcaagtgctgaaccaagggctg

SEQ ID NO: 1862882 - DNA, 25 bp, Homo sapien
ttgataccactgcaaccctggaagg

SEQ ID NO: 1862883 - DNA, 25 bp, Homo sapien
catctggcaaatgagtggctggcta

SEQ ID NO: 1862884 - DNA, 25 bp, Homo sapien
caatgtcacaaaggtagtaagaggc

SEQ ID NO: 1862885 - DNA, 25 bp, Homo sapien
ctggtccctgggactttggattggg

SEQ ID NO: 1862886 - DNA, 25 bp, Homo sapien
tggtccctgggactttggattggga

SEQ ID NO: 1862887 - DNA, 25 bp, Homo sapien
cctgggactttggattgggaagcat

SEQ ID NO: 1862888 - DNA, 25 bp, Homo sapien
tccctgggactttggattgggaagc

SEQ ID NO: 1862889 - DNA, 25 bp, Homo sapien
ttatatctcttgacacaagtaagat

SEQ ID NO: 1862890 - DNA, 25 bp, Homo sapien
gccagggctcgttgctctgaaaagc

SEQ ID NO: 1862891 - DNA, 25 bp, Homo sapien
gggccagggctcgttgctctgaaaa

SEQ ID NO: 1862892 - DNA, 25 bp, Homo sapien
acacaagtaagatatagcaggatag

SEQ ID NO: 1862893 - DNA, 25 bp, Homo sapien
tgctgtcgcggcgccctgtggagag

SEQ ID NO: 1862894 - DNA, 25 bp, Homo sapien
gtgctgtcgcggcgccctgtggaga

SEQ ID NO: 1862895 - DNA, 25 bp, Homo sapien
gctgtcgcggcgccctgtggagagg

SEQ ID NO: 1862896 - DNA, 25 bp, Homo sapien
atctccaggggcacgggctgcctgc

SEQ ID NO: 1862897 - DNA, 25 bp, Homo sapien
aaatcgggccagttgcaagtggcaa

SEQ ID NO: 1862898 - DNA, 25 bp, Homo sapien
gcaagtggcaagagttggaagggag

SEQ ID NO: 1862899 - DNA, 25 bp, Homo sapien
taaaattggtaatgaaatcgggcca

SEQ ID NO: 1862900 - DNA, 25 bp, Homo sapien
cttctccttcctccgttcgctcatc

SEQ ID NO: 1862901 - DNA, 25 bp, Homo sapien
gccctaggggagatcagccctcagg

SEQ ID NO: 1862902 - DNA, 25 bp, Homo sapien
gaggacagccgcctggtgcccatgc

SEQ ID NO: 1862903 - DNA, 25 bp, Homo sapien
ggctgtgggcaccccactgtgcccc

SEQ ID NO: 1862904 - DNA, 25 bp, Homo sapien
tgtgacctgacaaaaacacgtaggg

SEQ ID NO: 1862905 - DNA, 25 bp, Homo sapien
tagaggacacggagggttcagaccc

SEQ ID NO: 1862906 - DNA, 25 bp, Homo sapien
acccctggtcttggaccagtagagg

SEQ ID NO: 1862907 - DNA, 25 bp, Homo sapien
cagtgtgacctgacaaaaacacgta

SEQ ID NO: 1862908 - DNA, 25 bp, Homo sapien
gccccaccagttaaacggatgacca

SEQ ID NO: 1862909 - DNA, 25 bp, Homo sapien
cgccgccccaccagttaaacggatg

SEQ ID NO: 1862910 - DNA, 25 bp, Homo sapien
ccaccagttaaacggatgaccaaag

SEQ ID NO: 1862911 - DNA, 25 bp, Homo sapien
gccgccccaccagttaaacggatga

SEQ ID NO: 1862912 - DNA, 25 bp, Homo sapien
aaagtgtgattctggtacatgtccc

SEQ ID NO: 1862913 - DNA, 25 bp, Homo sapien
ctttgtccttatgaggctaaagtgt

SEQ ID NO: 1862914 - DNA, 25 bp, Homo sapien
tcccctcgcctgaggagtaaccagg

SEQ ID NO: 1862915 - DNA, 25 bp, Homo sapien
cagctgtttataggtggagctgttt

SEQ ID NO: 1862916 - DNA, 25 bp, Homo sapien
atcgctgggacgtggccgcgggtgc

SEQ ID NO: 1862917 - DNA, 25 bp, Homo sapien
gtggccgcgggtgccgagagcgctg

SEQ ID NO: 1862918 - DNA, 25 bp, Homo sapien
cgcaaccaccccagcccatcgctgg

SEQ ID NO: 1862919 - DNA, 25 bp, Homo sapien
ccgagagcgctgccggcgccgtggg

SEQ ID NO: 1862920 - DNA, 25 bp, Homo sapien
ttctgcgagttcctgacgctgtgca

SEQ ID NO: 1862921 - DNA, 25 bp, Homo sapien
tgcaacatcgtcctggactgcgcca

SEQ ID NO: 1862922 - DNA, 25 bp, Homo sapien
gagttcctgacgctgtgcaacatcg

SEQ ID NO: 1862923 - DNA, 25 bp, Homo sapien
atcctgtcctgcctgttctgcgagt

SEQ ID NO: 1862924 - DNA, 25 bp, Homo sapien
aaaatgtgaagagacgccccaccca

SEQ ID NO: 1862925 - DNA, 25 bp, Homo sapien
tcatacattgctgaggacctgacag

SEQ ID NO: 1862926 - DNA, 25 bp, Homo sapien
ctctttactgggttaccaggttcat

SEQ ID NO: 1862927 - DNA, 25 bp, Homo sapien
ccaccccaggcttagaggacagaaa

SEQ ID NO: 1862928 - DNA, 25 bp, Homo sapien
tcacttcaccagcttcaaggttttc

SEQ ID NO: 1862929 - DNA, 25 bp, Homo sapien
ttcaccagcttcaaggttttctgac

SEQ ID NO: 1862930 - DNA, 25 bp, Homo sapien
acttcaccagcttcaaggttttctg

SEQ ID NO: 1862931 - DNA, 25 bp, Homo sapien
tcaccagcttcaaggttttctgacc

SEQ ID NO: 1862932 - DNA, 25 bp, Homo sapien
tcagagcggggcaaactgagcttca

SEQ ID NO: 1862933 - DNA, 25 bp, Homo sapien
tggaaaacagcttagtcgtccttgg

SEQ ID NO: 1862934 - DNA, 25 bp, Homo sapien
tgaccgagctggaaaacagcttagt

SEQ ID NO: 1862935 - DNA, 25 bp, Homo sapien
ggactccacttgttgaccgagctgg

SEQ ID NO: 1862936 - DNA, 25 bp, Homo sapien
gggcagcgggactccacttgttgac

SEQ ID NO: 1862937 - DNA, 25 bp, Homo sapien
caggccgtagccaccgtccagttca

SEQ ID NO: 1862938 - DNA, 25 bp, Homo sapien
aatccctgccatctccgggtctgct

SEQ ID NO: 1862939 - DNA, 25 bp, Homo sapien
gccaccgtccagttcacaatccctg

SEQ ID NO: 1862940 - DNA, 25 bp, Homo sapien
ttctttctgggtgcggggcacattt

SEQ ID NO: 1862941 - DNA, 25 bp, Homo sapien
aggatcaccctgtagttctgtagtc

SEQ ID NO: 1862942 - DNA, 25 bp, Homo sapien
gttgctgccaaagccccagcatcca

SEQ ID NO: 1862943 - DNA, 25 bp, Homo sapien
caccctgtagttctgtagtctccag

SEQ ID NO: 1862944 - DNA, 25 bp, Homo sapien
ttctgtagtctccagatccagcctg

SEQ ID NO: 1862945 - DNA, 25 bp, Homo sapien
gaaataacaccactagtggccttat

SEQ ID NO: 1862946 - DNA, 25 bp, Homo sapien
aacaccactagtggccttatggttg

SEQ ID NO: 1862947 - DNA, 25 bp, Homo sapien
actagtggccttatggttgaagtgt

SEQ ID NO: 1862948 - DNA, 25 bp, Homo sapien
tgtctgcacaaccaatggtttccct

SEQ ID NO: 1862949 - DNA, 25 bp, Homo sapien
caaatgatcactgagcgccttggat

SEQ ID NO: 1862950 - DNA, 25 bp, Homo sapien
gctgcccttccataatcgtgacaca

SEQ ID NO: 1862951 - DNA, 25 bp, Homo sapien
tcgtgacacaaatgatcactgagcg

SEQ ID NO: 1862952 - DNA, 25 bp, Homo sapien
tcactgagcgccttggatcctggcc

SEQ ID NO: 1862953 - DNA, 25 bp, Homo sapien
ccagatgaggagtaaagcaggtgtt

SEQ ID NO: 1862954 - DNA, 25 bp, Homo sapien
cagatgaggagtaaagcaggtgttc

SEQ ID NO: 1862955 - DNA, 25 bp, Homo sapien
gtgttccagagcgctgagtttcttc

SEQ ID NO: 1862956 - DNA, 25 bp, Homo sapien
cccagatgaggagtaaagcaggtgt

SEQ ID NO: 1862957 - DNA, 25 bp, Homo sapien
caggtccctttccagggatccaggc

SEQ ID NO: 1862958 - DNA, 25 bp, Homo sapien
tccctttccagggatccaggcctgg

SEQ ID NO: 1862959 - DNA, 25 bp, Homo sapien
gtccaggtccctttccagggatcca

SEQ ID NO: 1862960 - DNA, 25 bp, Homo sapien
ctgtccaggtccctttccagggatc

SEQ ID NO: 1862961 - DNA, 25 bp, Homo sapien
tcttcccgaactgggtcaggccctg

SEQ ID NO: 1862962 - DNA, 25 bp, Homo sapien
ctcttcccgaactgggtcaggccct

SEQ ID NO: 1862963 - DNA, 25 bp, Homo sapien
tcccgaactgggtcaggccctggct

SEQ ID NO: 1862964 - DNA, 25 bp, Homo sapien
ttcccgaactgggtcaggccctggc

SEQ ID NO: 1862965 - DNA, 25 bp, Homo sapien
tcgctgcggcgcgtgacacacgacc

SEQ ID NO: 1862966 - DNA, 25 bp, Homo sapien
gcgcgtgacacacgacccgtcagct

SEQ ID NO: 1862967 - DNA, 25 bp, Homo sapien
acgacccgtcagctccgcgtttgca

SEQ ID NO: 1862968 - DNA, 25 bp, Homo sapien
agctccgcgtttgcaccattaaggg

SEQ ID NO: 1862969 - DNA, 25 bp, Homo sapien
ataatatcttcccagactcggctct

SEQ ID NO: 1862970 - DNA, 25 bp, Homo sapien
aataatatcttcccagactcggctc

SEQ ID NO: 1862971 - DNA, 25 bp, Homo sapien
taataatatcttcccagactcggct

SEQ ID NO: 1862972 - DNA, 25 bp, Homo sapien
ttaataatatcttcccagactcggc

SEQ ID NO: 1862973 - DNA, 25 bp, Homo sapien
gaagggctatccgtgatcttgaagg

SEQ ID NO: 1862974 - DNA, 25 bp, Homo sapien
ggcaggaagggctatccgtgatctt

SEQ ID NO: 1862975 - DNA, 25 bp, Homo sapien
actccactaggtcaatccccagggt

SEQ ID NO: 1862976 - DNA, 25 bp, Homo sapien
tccgtgatcttgaagggctgtgaga

SEQ ID NO: 1862977 - DNA, 25 bp, Homo sapien
cctggaactaggaggaggcgccagc

SEQ ID NO: 1862978 - DNA, 25 bp, Homo sapien
gaggaaattgccctattagccattt

SEQ ID NO: 1862979 - DNA, 25 bp, Homo sapien
cgttgatttgatctcccgttcggca

SEQ ID NO: 1862980 - DNA, 25 bp, Homo sapien
ctcgcacgctaattgctcaacgttg

SEQ ID NO: 1862981 - DNA, 25 bp, Homo sapien
tctctgcctgaagcggccgtggaga

SEQ ID NO: 1862982 - DNA, 25 bp, Homo sapien
gcccaaggactgcagctcggaggaa

SEQ ID NO: 1862983 - DNA, 25 bp, Homo sapien
cccctcctaggcgaggtcataaaca

SEQ ID NO: 1862984 - DNA, 25 bp, Homo sapien
taaacaccaacgtctccaagcagag

SEQ ID NO: 1862985 - DNA, 25 bp, Homo sapien
caccacctggtggagagctattagc

SEQ ID NO: 1862986 - DNA, 25 bp, Homo sapien
tgtgggagagccgaggaccaggctg

SEQ ID NO: 1862987 - DNA, 25 bp, Homo sapien
gaggaccaggctgcggggtggacct

SEQ ID NO: 1862988 - DNA, 25 bp, Homo sapien
cacaaagtgaggggtcggagggcag

SEQ ID NO: 1862989 - DNA, 25 bp, Homo sapien
tgcgccagtcaagagggctgccctg

SEQ ID NO: 1862990 - DNA, 25 bp, Homo sapien
ccagacaggcactaagtccaaacag

SEQ ID NO: 1862991 - DNA, 25 bp, Homo sapien
cctcagatgaggagcttcccgaacc

SEQ ID NO: 1862992 - DNA, 25 bp, Homo sapien
ggtggctacttcacacacagtgcag

SEQ ID NO: 1862993 - DNA, 25 bp, Homo sapien
gccagcggtagcagtgagtcgtcca

SEQ ID NO: 1862994 - DNA, 25 bp, Homo sapien
cagaagtggatcagaggccagcggt

SEQ ID NO: 1862995 - DNA, 25 bp, Homo sapien
ctgtggctgaagtccaggtgatgga

SEQ ID NO: 1862996 - DNA, 25 bp, Homo sapien
ggagcatgaggtccagatccttctt

SEQ ID NO: 1862997 - DNA, 25 bp, Homo sapien
ctcttcgctaggcagctcctgcttc

SEQ ID NO: 1862998 - DNA, 25 bp, Homo sapien
agctcagccatgttcatgccggacg

SEQ ID NO: 1862999 - DNA, 25 bp, Homo sapien
cctgggccctcttcgctaggcagct

SEQ ID NO: 1863000 - DNA, 25 bp, Homo sapien
ctcagccatgttcatgccggacggg

SEQ ID NO: 1863001 - DNA, 25 bp, Homo sapien
tccaggcggcgagagtggttctcca

SEQ ID NO: 1863002 - DNA, 25 bp, Homo sapien
aggcggcgagagtggttctccagct

SEQ ID NO: 1863003 - DNA, 25 bp, Homo sapien
gccagagctgcttgttggtcatctc

SEQ ID NO: 1863004 - DNA, 25 bp, Homo sapien
agccagagctgcttgttggtcatct

SEQ ID NO: 1863005 - DNA, 25 bp, Homo sapien
tcctccggatgtaatccacagaggc

SEQ ID NO: 1863006 - DNA, 25 bp, Homo sapien
cctccggatgtaatccacagaggcc

SEQ ID NO: 1863007 - DNA, 25 bp, Homo sapien
tcttgtctgccagcccaatggcctt

SEQ ID NO: 1863008 - DNA, 25 bp, Homo sapien
tctagaaggaattctcctcccatcc

SEQ ID NO: 1863009 - DNA, 25 bp, Homo sapien
ctcccatcctagtaactagcatggg

SEQ ID NO: 1863010 - DNA, 25 bp, Homo sapien
gataatacttgtcagctgctgccca

SEQ ID NO: 1863011 - DNA, 25 bp, Homo sapien
atgcggtcattgatgttgaaccttc

SEQ ID NO: 1863012 - DNA, 25 bp, Homo sapien
gcggtcattgatgttgaaccttcgt

SEQ ID NO: 1863013 - DNA, 25 bp, Homo sapien
tcccaactccttgatgcggtcattg

SEQ ID NO: 1863014 - DNA, 25 bp, Homo sapien
gggatcagcattcccaactccttga

SEQ ID NO: 1863015 - DNA, 25 bp, Homo sapien
taagttgtgattgtctttcttctgc

SEQ ID NO: 1863016 - DNA, 25 bp, Homo sapien
gtgattgtctttcttctgccgctcc

SEQ ID NO: 1863017 - DNA, 25 bp, Homo sapien
tgtgattgtctttcttctgccgctc

SEQ ID NO: 1863018 - DNA, 25 bp, Homo sapien
gttgtgattgtctttcttctgccgc

SEQ ID NO: 1863019 - DNA, 25 bp, Homo sapien
gaggagtcgggtattcaaaggcaca

SEQ ID NO: 1863020 - DNA, 25 bp, Homo sapien
acctgggggtcgctgctgtacacat

SEQ ID NO: 1863021 - DNA, 25 bp, Homo sapien
ggagctgctggtgacgcccaccagg

SEQ ID NO: 1863022 - DNA, 25 bp, Homo sapien
tgtacacattcaggtggctgctgga

SEQ ID NO: 1863023 - DNA, 25 bp, Homo sapien
tgtgagctctcgcttctgggtcagg

SEQ ID NO: 1863024 - DNA, 25 bp, Homo sapien
tcaaaattcaccttgggccctttca

SEQ ID NO: 1863025 - DNA, 25 bp, Homo sapien
gggacacctggagtgtcaaaattca

SEQ ID NO: 1863026 - DNA, 25 bp, Homo sapien
cctggagtgtcaaaattcaccttgg

SEQ ID NO: 1863027 - DNA, 25 bp, Homo sapien
gggagccccctctagggcctatcat

SEQ ID NO: 1863028 - DNA, 25 bp, Homo sapien
tctgcatttcaggattgatgtagcc

SEQ ID NO: 1863029 - DNA, 25 bp, Homo sapien
gacatcgtccagacgcataatgttg

SEQ ID NO: 1863030 - DNA, 25 bp, Homo sapien
gatgtagccaaggacatcgtccaga

SEQ ID NO: 1863031 - DNA, 25 bp, Homo sapien
ccagacgcataatgttgtcaatgac

SEQ ID NO: 1863032 - DNA, 25 bp, Homo sapien
aacttccgccttcccgattcaagtg

SEQ ID NO: 1863033 - DNA, 25 bp, Homo sapien
ctgcaacttccgccttcccgattca

SEQ ID NO: 1863034 - DNA, 25 bp, Homo sapien
tgcaacttccgccttcccgattcaa

SEQ ID NO: 1863035 - DNA, 25 bp, Homo sapien
gcaacttccgccttcccgattcaag

SEQ ID NO: 1863036 - DNA, 25 bp, Homo sapien
cataggtctcggacaggtactcccg

SEQ ID NO: 1863037 - DNA, 25 bp, Homo sapien
caccttctgatgctgcgactgctgc

SEQ ID NO: 1863038 - DNA, 25 bp, Homo sapien
tattgggagcactgttgccagcgga

SEQ ID NO: 1863039 - DNA, 25 bp, Homo sapien
tgggattctccaggtaggactgcac

SEQ ID NO: 1863040 - DNA, 25 bp, Homo sapien
aacacctccccaggcacaggtggtg

SEQ ID NO: 1863041 - DNA, 25 bp, Homo sapien
acctccccaggcacaggtggtggcg

SEQ ID NO: 1863042 - DNA, 25 bp, Homo sapien
cttcaacacctccccaggcacaggt

SEQ ID NO: 1863043 - DNA, 25 bp, Homo sapien
cctccccaggcacaggtggtggcga

SEQ ID NO: 1863044 - DNA, 25 bp, Homo sapien
aagtggacgggggtattgatggccg

SEQ ID NO: 1863045 - DNA, 25 bp, Homo sapien
gaagtggacgggggtattgatggcc

SEQ ID NO: 1863046 - DNA, 25 bp, Homo sapien
gggtgggcggccctccgagctgctg

SEQ ID NO: 1863047 - DNA, 25 bp, Homo sapien
agtggacgggggtattgatggccgg

SEQ ID NO: 1863048 - DNA, 25 bp, Homo sapien
tgcgcaaccctatgcgtgacgccat

SEQ ID NO: 1863049 - DNA, 25 bp, Homo sapien
gctgcatgcgcaaccctatgcgtga

SEQ ID NO: 1863050 - DNA, 25 bp, Homo sapien
gcatgcgcaaccctatgcgtgacgc

SEQ ID NO: 1863051 - DNA, 25 bp, Homo sapien
atgagctgcatgcgcaaccctatgc

SEQ ID NO: 1863052 - DNA, 25 bp, Homo sapien
ttttagaggagaagacaccgagccc

SEQ ID NO: 1863053 - DNA, 25 bp, Homo sapien
tcctggaccaaaactgaaggttctg

SEQ ID NO: 1863054 - DNA, 25 bp, Homo sapien
cagcaggtatatgaggcacgtgtcc

SEQ ID NO: 1863055 - DNA, 25 bp, Homo sapien
actgggaccgcatccattttagagg

SEQ ID NO: 1863056 - DNA, 25 bp, Homo sapien
tttcaccaccgcaggctggacctct

SEQ ID NO: 1863057 - DNA, 25 bp, Homo sapien
tcccaagcaggcctaggatgtccaa

SEQ ID NO: 1863058 - DNA, 25 bp, Homo sapien
aaaccctaaatcatggggccagaat

SEQ ID NO: 1863059 - DNA, 25 bp, Homo sapien
aatcatggggccagaatcccaagca

SEQ ID NO: 1863060 - DNA, 25 bp, Homo sapien
tggtgaccgtcatctcgccagggcc

SEQ ID NO: 1863061 - DNA, 25 bp, Homo sapien
gcctggtgaccgtcatctcgccagg

SEQ ID NO: 1863062 - DNA, 25 bp, Homo sapien
gagttcccaccaggagagggcgctc

SEQ ID NO: 1863063 - DNA, 25 bp, Homo sapien
tgcccacgagttcccaccaggagag

SEQ ID NO: 1863064 - DNA, 25 bp, Homo sapien
gcttctgctttcgatctgagtcacg

SEQ ID NO: 1863065 - DNA, 25 bp, Homo sapien
tcaccctgtgcagtgtctggcagct

SEQ ID NO: 1863066 - DNA, 25 bp, Homo sapien
gcagcttctgctttcgatctgagtc

SEQ ID NO: 1863067 - DNA, 25 bp, Homo sapien
cttctgctttcgatctgagtcacgc

SEQ ID NO: 1863068 - DNA, 25 bp, Homo sapien
ctcatggcaccgagctgggctgccc

SEQ ID NO: 1863069 - DNA, 25 bp, Homo sapien
agggccctcatggcaccgagctggg

SEQ ID NO: 1863070 - DNA, 25 bp, Homo sapien
ggccctcatggcaccgagctgggct

SEQ ID NO: 1863071 - DNA, 25 bp, Homo sapien
gccctcatggcaccgagctgggctg

SEQ ID NO: 1863072 - DNA, 25 bp, Homo sapien
gagattcaagtagtctagcacaggg

SEQ ID NO: 1863073 - DNA, 25 bp, Homo sapien
ggacctgcggttggctgcaaaccct

SEQ ID NO: 1863074 - DNA, 25 bp, Homo sapien
gccacagacccatactaatccatgg

SEQ ID NO: 1863075 - DNA, 25 bp, Homo sapien
catggccggttaggaaccagaccac

SEQ ID NO: 1863076 - DNA, 25 bp, Homo sapien
gattcagtcactgtttgaggaccca

SEQ ID NO: 1863077 - DNA, 25 bp, Homo sapien
caaccctattgagaggagcaaggaa

SEQ ID NO: 1863078 - DNA, 25 bp, Homo sapien
tagtatcccgaatccagaactcagg

SEQ ID NO: 1863079 - DNA, 25 bp, Homo sapien
acggcagttactggcatgcaggtca

SEQ ID NO: 1863080 - DNA, 25 bp, Homo sapien
ccagggccgggctcagtttcctcat

SEQ ID NO: 1863081 - DNA, 25 bp, Homo sapien
ggaggcccctggaatgctcagctcc

SEQ ID NO: 1863082 - DNA, 25 bp, Homo sapien
gaaggaggcccctggaatgctcagc

SEQ ID NO: 1863083 - DNA, 25 bp, Homo sapien
cttcgagagggcagccccctggaag

SEQ ID NO: 1863084 - DNA, 25 bp, Homo sapien
tctcagatgaggatccacactgtac

SEQ ID NO: 1863085 - DNA, 25 bp, Homo sapien
caggcactgccgcacccttagtcct

SEQ ID NO: 1863086 - DNA, 25 bp, Homo sapien
actgccgcacccttagtcctcacaa

SEQ ID NO: 1863087 - DNA, 25 bp, Homo sapien
tcagatgaggatccacactgtacat

SEQ ID NO: 1863088 - DNA, 25 bp, Homo sapien
tctggcagctctgggaaccctgaac

SEQ ID NO: 1863089 - DNA, 25 bp, Homo sapien
agctctgggaaccctgaactcccac

SEQ ID NO: 1863090 - DNA, 25 bp, Homo sapien
gggacgtgaacatttctggcagctc

SEQ ID NO: 1863091 - DNA, 25 bp, Homo sapien
ctgggacgtgaacatttctggcagc

SEQ ID NO: 1863092 - DNA, 25 bp, Homo sapien
gccccaagtgctgactgccctccat

SEQ ID NO: 1863093 - DNA, 25 bp, Homo sapien
ggccccaagtgctgactgccctcca

SEQ ID NO: 1863094 - DNA, 25 bp, Homo sapien
cagaggaggccaacccaatttccat

SEQ ID NO: 1863095 - DNA, 25 bp, Homo sapien
atcagaggaggccaacccaatttcc

SEQ ID NO: 1863096 - DNA, 25 bp, Homo sapien
cataccgtcaggttagcaggcaggg

SEQ ID NO: 1863097 - DNA, 25 bp, Homo sapien
cattagcccgtaaaagcccagttgg

SEQ ID NO: 1863098 - DNA, 25 bp, Homo sapien
gtcgtggcaccaagaactgcgttct

SEQ ID NO: 1863099 - DNA, 25 bp, Homo sapien
tgtgagtcaccaggccattagcccg

SEQ ID NO: 1863100 - DNA, 25 bp, Homo sapien
gcggcgcgaacctgctcgcgcagcc

SEQ ID NO: 1863101 - DNA, 25 bp, Homo sapien
tgcggcgcgaacctgctcgcgcagc

SEQ ID NO: 1863102 - DNA, 25 bp, Homo sapien
ctgcggcgcgaacctgctcgcgcag

SEQ ID NO: 1863103 - DNA, 25 bp, Homo sapien
gctgcggcgcgaacctgctcgcgca

SEQ ID NO: 1863104 - DNA, 25 bp, Homo sapien
cggccccagccgtgtccggtggagg

SEQ ID NO: 1863105 - DNA, 25 bp, Homo sapien
gcccgcgcgtccctcaaacttcttg

SEQ ID NO: 1863106 - DNA, 25 bp, Homo sapien
ctcaaacttcttgcgagttcaccat

SEQ ID NO: 1863107 - DNA, 25 bp, Homo sapien
ttcttgcgagttcaccatcacgcct

SEQ ID NO: 1863108 - DNA, 25 bp, Homo sapien
gcggctccggcaacttgtcgcaagt

SEQ ID NO: 1863109 - DNA, 25 bp, Homo sapien
cttgtcgcaagttcgggtgcctggc

SEQ ID NO: 1863110 - DNA, 25 bp, Homo sapien
tgcctggcccgcaagctgtgcccgc

SEQ ID NO: 1863111 - DNA, 25 bp, Homo sapien
tctgaaggtcaatctgtccgccgcc

SEQ ID NO: 1863112 - DNA, 25 bp, Homo sapien
tccgctgtcaccgagccccgcgccc

SEQ ID NO: 1863113 - DNA, 25 bp, Homo sapien
ctccgctgtcaccgagccccgcgcc

SEQ ID NO: 1863114 - DNA, 25 bp, Homo sapien
cctccgctgtcaccgagccccgcgc

SEQ ID NO: 1863115 - DNA, 25 bp, Homo sapien
gagcttgctgtcatgttgctggaca

SEQ ID NO: 1863116 - DNA, 25 bp, Homo sapien
ttgctggacagaaattgtctgagct

SEQ ID NO: 1863117 - DNA, 25 bp, Homo sapien
gcctgagcttgctgtcatgttgctg

SEQ ID NO: 1863118 - DNA, 25 bp, Homo sapien
gctggacagaaattgtctgagctcc

SEQ ID NO: 1863119 - DNA, 25 bp, Homo sapien
agtccagagtccagaaaaagaaggc

SEQ ID NO: 1863120 - DNA, 25 bp, Homo sapien
tccagagtccagaaaaagaaggctg

SEQ ID NO: 1863121 - DNA, 25 bp, Homo sapien
gtccagagtccagaaaaagaaggct

SEQ ID NO: 1863122 - DNA, 25 bp, Homo sapien
ggtgcagggtcaagaggaagagggg

SEQ ID NO: 1863123 - DNA, 25 bp, Homo sapien
agggtgcagggtcaagaggaagagg

SEQ ID NO: 1863124 - DNA, 25 bp, Homo sapien
gagggtgcagggtcaagaggaagag

SEQ ID NO: 1863125 - DNA, 25 bp, Homo sapien
gggtgcagggtcaagaggaagaggg

SEQ ID NO: 1863126 - DNA, 25 bp, Homo sapien
tgttgttgcccaagtcgtagacgga

SEQ ID NO: 1863127 - DNA, 25 bp, Homo sapien
ctaggcggcagtggcaaagcctact

SEQ ID NO: 1863128 - DNA, 25 bp, Homo sapien
gaggaagacatccccgaggatccac

SEQ ID NO: 1863129 - DNA, 25 bp, Homo sapien
cggaatagtaggacctgaggaagac

SEQ ID NO: 1863130 - DNA, 25 bp, Homo sapien
taggtgggctcgactcccacggtgc

SEQ ID NO: 1863131 - DNA, 25 bp, Homo sapien
aggtaggtgggctcgactcccacgg

SEQ ID NO: 1863132 - DNA, 25 bp, Homo sapien
ggctcgactcccacggtgcagtagc

SEQ ID NO: 1863133 - DNA, 25 bp, Homo sapien
gtgggctcgactcccacggtgcagt

SEQ ID NO: 1863134 - DNA, 25 bp, Homo sapien
cagattctgaatgctgttacagttc

SEQ ID NO: 1863135 - DNA, 25 bp, Homo sapien
ggaactccacaccattgatgatgaa

SEQ ID NO: 1863136 - DNA, 25 bp, Homo sapien
gaaggtcaagctgggcagattctga

SEQ ID NO: 1863137 - DNA, 25 bp, Homo sapien
gaatgctgttacagttcacgagaaa

SEQ ID NO: 1863138 - DNA, 25 bp, Homo sapien
ctcagaacaccagccggaggcctgg

SEQ ID NO: 1863139 - DNA, 25 bp, Homo sapien
agaagagcactcatgtactgctggg

SEQ ID NO: 1863140 - DNA, 25 bp, Homo sapien
ggcacagtgagcagagaggtgcctg

SEQ ID NO: 1863141 - DNA, 25 bp, Homo sapien
tgtgtccacgatggcctggcaaccc

SEQ ID NO: 1863142 - DNA, 25 bp, Homo sapien
tgccccgtgtacaggctgctatcca

SEQ ID NO: 1863143 - DNA, 25 bp, Homo sapien
tcttcaatgccaatctgccagtaga

SEQ ID NO: 1863144 - DNA, 25 bp, Homo sapien
aggcgcccagtagatctgccccgtg

SEQ ID NO: 1863145 - DNA, 25 bp, Homo sapien
caatgccaatctgccagtagagttc

SEQ ID NO: 1863146 - DNA, 25 bp, Homo sapien
ggaagtcagggagtgccatggaaaa

SEQ ID NO: 1863147 - DNA, 25 bp, Homo sapien
ggggaagtcagggagtgccatggaa

SEQ ID NO: 1863148 - DNA, 25 bp, Homo sapien
aaggggaagtcagggagtgccatgg

SEQ ID NO: 1863149 - DNA, 25 bp, Homo sapien
ggaaggggaagtcagggagtgccat

SEQ ID NO: 1863150 - DNA, 25 bp, Homo sapien
gatgccatcaaactgcgcatagacg

SEQ ID NO: 1863151 - DNA, 25 bp, Homo sapien
ggtggcctcatccacggacagagca

SEQ ID NO: 1863152 - DNA, 25 bp, Homo sapien
gaagttggtaccaggctcattctca

SEQ ID NO: 1863153 - DNA, 25 bp, Homo sapien
tcactcaagccgaactcctggttgg

SEQ ID NO: 1863154 - DNA, 25 bp, Homo sapien
catagccaaagaagccggtgaggct

SEQ ID NO: 1863155 - DNA, 25 bp, Homo sapien
ggacgactcgctggggttgaagcgg

SEQ ID NO: 1863156 - DNA, 25 bp, Homo sapien
ggtggagtaggtggacgactcgctg

SEQ ID NO: 1863157 - DNA, 25 bp, Homo sapien
gggagaaggtctgcccattggtgga

SEQ ID NO: 1863158 - DNA, 25 bp, Homo sapien
gcagtagacagagggcacccacaag

SEQ ID NO: 1863159 - DNA, 25 bp, Homo sapien
ctctggcagtagacagagggcaccc

SEQ ID NO: 1863160 - DNA, 25 bp, Homo sapien
gacagagggcacccacaagttggag

SEQ ID NO: 1863161 - DNA, 25 bp, Homo sapien
gcaggcctggctctggcagtagaca

SEQ ID NO: 1863162 - DNA, 25 bp, Homo sapien
gagccggtgtcaaaaaggaccagga

SEQ ID NO: 1863163 - DNA, 25 bp, Homo sapien
gccatgggctcgtaggtcacgctga

SEQ ID NO: 1863164 - DNA, 25 bp, Homo sapien
ccaaagcggtacttccaagcaggat

SEQ ID NO: 1863165 - DNA, 25 bp, Homo sapien
gtcacgctgaggtcaccaaagcggt

SEQ ID NO: 1863166 - DNA, 25 bp, Homo sapien
gatcatacttgtgggtcctcaggaa

SEQ ID NO: 1863167 - DNA, 25 bp, Homo sapien
gagctggaggcagaccaagaccacc

SEQ ID NO: 1863168 - DNA, 25 bp, Homo sapien
ggaagagcagctctgagttctgcag

SEQ ID NO: 1863169 - DNA, 25 bp, Homo sapien
tggtccccaactggccacagaggaa

SEQ ID NO: 1863170 - DNA, 25 bp, Homo sapien
tgctggtccccaactggccacagag

SEQ ID NO: 1863171 - DNA, 25 bp, Homo sapien
acagaggaagagcagctctgagttc

SEQ ID NO: 1863172 - DNA, 25 bp, Homo sapien
gcctcttgtaccgacctagatcaga

SEQ ID NO: 1863173 - DNA, 25 bp, Homo sapien
accagcttctggttgtgcctcttgt

SEQ ID NO: 1863174 - DNA, 25 bp, Homo sapien
tcttgtaccgacctagatcagaggc

SEQ ID NO: 1863175 - DNA, 25 bp, Homo sapien
ttgtgcctcttgtaccgacctagat

SEQ ID NO: 1863176 - DNA, 25 bp, Homo sapien
tggatgaaggcacatttcgcagggc

SEQ ID NO: 1863177 - DNA, 25 bp, Homo sapien
tgaaggcacatttcgcagggcagcc

SEQ ID NO: 1863178 - DNA, 25 bp, Homo sapien
gttggtggaaaggaggtgtactgga

SEQ ID NO: 1863179 - DNA, 25 bp, Homo sapien
tctgggttggtggaaaggaggtgta

SEQ ID NO: 1863180 - DNA, 25 bp, Homo sapien
ctgccaataactctggcattcacag

SEQ ID NO: 1863181 - DNA, 25 bp, Homo sapien
ctggcattcacagggctccagtcgg

SEQ ID NO: 1863182 - DNA, 25 bp, Homo sapien
tctggcattcacagggctccagtcg

SEQ ID NO: 1863183 - DNA, 25 bp, Homo sapien
caataactctggcattcacagggct

SEQ ID NO: 1863184 - DNA, 25 bp, Homo sapien
gacttctcccgaagtaacttcatcc

SEQ ID NO: 1863185 - DNA, 25 bp, Homo sapien
gttcatgttcccaaaggtgacttct

SEQ ID NO: 1863186 - DNA, 25 bp, Homo sapien
ggtgacttctcccgaagtaacttca

SEQ ID NO: 1863187 - DNA, 25 bp, Homo sapien
ctcccgaagtaacttcatcctgttg

SEQ ID NO: 1863188 - DNA, 25 bp, Homo sapien
catgactgcagtggccccaagtaca

SEQ ID NO: 1863189 - DNA, 25 bp, Homo sapien
cctggaatcagattccacttaacaa

SEQ ID NO: 1863190 - DNA, 25 bp, Homo sapien
attccacttaacaaggcagtccatg

SEQ ID NO: 1863191 - DNA, 25 bp, Homo sapien
gtccatgactgcagtggccccaagt

SEQ ID NO: 1863192 - DNA, 25 bp, Homo sapien
gaatgctttcgaaggtggtgccagc

SEQ ID NO: 1863193 - DNA, 25 bp, Homo sapien
gctccctctggcttaggccgtactc

SEQ ID NO: 1863194 - DNA, 25 bp, Homo sapien
tactcccggttggtgatggccaaac

SEQ ID NO: 1863195 - DNA, 25 bp, Homo sapien
atgctttcgaaggtggtgccagctc

SEQ ID NO: 1863196 - DNA, 25 bp, Homo sapien
atcgtcacaacatcaaagcccaggc

SEQ ID NO: 1863197 - DNA, 25 bp, Homo sapien
tcgtcacaacatcaaagcccaggcc

SEQ ID NO: 1863198 - DNA, 25 bp, Homo sapien
cgtcacaacatcaaagcccaggcct

SEQ ID NO: 1863199 - DNA, 25 bp, Homo sapien
attctggtggctcttcccaccttgc

SEQ ID NO: 1863200 - DNA, 25 bp, Homo sapien
ctgccacttccaattctggtggctc

SEQ ID NO: 1863201 - DNA, 25 bp, Homo sapien
gcctctgccacttccaattctggtg

SEQ ID NO: 1863202 - DNA, 25 bp, Homo sapien
ccacttccaattctggtggctcttc

SEQ ID NO: 1863203 - DNA, 25 bp, Homo sapien
gagcagcccttcagagaaatggaag

SEQ ID NO: 1863204 - DNA, 25 bp, Homo sapien
ggctgggctctacctcattagggca

SEQ ID NO: 1863205 - DNA, 25 bp, Homo sapien
tgggctctacctcattagggcagtc

SEQ ID NO: 1863206 - DNA, 25 bp, Homo sapien
ggctctacctcattagggcagtcct

SEQ ID NO: 1863207 - DNA, 25 bp, Homo sapien
ctgggctctacctcattagggcagt

SEQ ID NO: 1863208 - DNA, 25 bp, Homo sapien
aacgggagggcgctaaacgcaatca

SEQ ID NO: 1863209 - DNA, 25 bp, Homo sapien
caagacaaatggacagaacgggagg

SEQ ID NO: 1863210 - DNA, 25 bp, Homo sapien
cggacagtcggcagacaagacaaat

SEQ ID NO: 1863211 - DNA, 25 bp, Homo sapien
gaacccttcacagttgacgtctcgg

SEQ ID NO: 1863212 - DNA, 25 bp, Homo sapien
caatcacggcgtaggagtctgagct

SEQ ID NO: 1863213 - DNA, 25 bp, Homo sapien
catggccacggtctttttgaggtca

SEQ ID NO: 1863214 - DNA, 25 bp, Homo sapien
tccacctggatgtagttaagctgcc

SEQ ID NO: 1863215 - DNA, 25 bp, Homo sapien
caggttctcatagtgcagcagggcg

SEQ ID NO: 1863216 - DNA, 25 bp, Homo sapien
cagccattggaaaagctggagacag

SEQ ID NO: 1863217 - DNA, 25 bp, Homo sapien
tgccgcaggctgcttgtcgagagcc

SEQ ID NO: 1863218 - DNA, 25 bp, Homo sapien
cagggcagccattggaaaagctgga

SEQ ID NO: 1863219 - DNA, 25 bp, Homo sapien
tcttccccaagcgaggggtgccgca

SEQ ID NO: 1863220 - DNA, 25 bp, Homo sapien
caaaaaaagggactgcgcttctatt

SEQ ID NO: 1863221 - DNA, 25 bp, Homo sapien
tccagaatacggtcatggccagaga

SEQ ID NO: 1863222 - DNA, 25 bp, Homo sapien
ccagtccaaggagcgctgaatacca

SEQ ID NO: 1863223 - DNA, 25 bp, Homo sapien
gaataccaaacaggtacctgatctg

SEQ ID NO: 1863224 - DNA, 25 bp, Homo sapien
gcactgcatcagatcctgaaggagg

SEQ ID NO: 1863225 - DNA, 25 bp, Homo sapien
tgcgggtgatgatgacaggctcttc

SEQ ID NO: 1863226 - DNA, 25 bp, Homo sapien
tcagcccgggaacacttaaatgcaa

SEQ ID NO: 1863227 - DNA, 25 bp, Homo sapien
ctcgagggaggtcaagctcagcggg

SEQ ID NO: 1863228 - DNA, 25 bp, Homo sapien
catcggcggccactctcaaaggaga

SEQ ID NO: 1863229 - DNA, 25 bp, Homo sapien
aggttggagtcgtagccatagcgcc

SEQ ID NO: 1863230 - DNA, 25 bp, Homo sapien
ccatagcgccgcaagcagagataag

SEQ ID NO: 1863231 - DNA, 25 bp, Homo sapien
gcctcacgccgatgcaggtgcagca

SEQ ID NO: 1863232 - DNA, 25 bp, Homo sapien
gccactaagcactattttaaatact

SEQ ID NO: 1863233 - DNA, 25 bp, Homo sapien
ggccactaagcactattttaaatac

SEQ ID NO: 1863234 - DNA, 25 bp, Homo sapien
ctggccactaagcactattttaaat

SEQ ID NO: 1863235 - DNA, 25 bp, Homo sapien
tggccactaagcactattttaaata

SEQ ID NO: 1863236 - DNA, 25 bp, Homo sapien
ggtgtgagctcaagaagtctccata

SEQ ID NO: 1863237 - DNA, 25 bp, Homo sapien
ttttcctcaggctacttgagagggt

SEQ ID NO: 1863238 - DNA, 25 bp, Homo sapien
caacagttccaaaagcaccattatg

SEQ ID NO: 1863239 - DNA, 25 bp, Homo sapien
cttggtagtatcaagagccatgaaa

SEQ ID NO: 1863240 - DNA, 25 bp, Homo sapien
tggggtggttgtctggaacgctgtc

SEQ ID NO: 1863241 - DNA, 25 bp, Homo sapien
ggggtggttgtctggaacgctgtct

SEQ ID NO: 1863242 - DNA, 25 bp, Homo sapien
gtggggtggttgtctggaacgctgt

SEQ ID NO: 1863243 - DNA, 25 bp, Homo sapien
tatgtcacaatagtcaggactgtgc

SEQ ID NO: 1863244 - DNA, 25 bp, Homo sapien
ccaggattccagtacttggattata

SEQ ID NO: 1863245 - DNA, 25 bp, Homo sapien
taccatcccaacatccagtgcaaat

SEQ ID NO: 1863246 - DNA, 25 bp, Homo sapien
ctgtgcctagaatgaagaggacacc

SEQ ID NO: 1863247 - DNA, 25 bp, Homo sapien
aagtcacccggatccctctgggata

SEQ ID NO: 1863248 - DNA, 25 bp, Homo sapien
gtccttggtgggctgtcatggcaaa

SEQ ID NO: 1863249 - DNA, 25 bp, Homo sapien
gctgtcatggcaaacagtctgcaga

SEQ ID NO: 1863250 - DNA, 25 bp, Homo sapien
agaagtcacccggatccctctggga

SEQ ID NO: 1863251 - DNA, 25 bp, Homo sapien
cgcgggcactgaaacgaagaactct

SEQ ID NO: 1863252 - DNA, 25 bp, Homo sapien
ggtagacaagtcaacaagccaggac

SEQ ID NO: 1863253 - DNA, 25 bp, Homo sapien
gaggtgtgcacagactaaagatagg

SEQ ID NO: 1863254 - DNA, 25 bp, Homo sapien
caggatatctgagcccaaggtagac

SEQ ID NO: 1863255 - DNA, 25 bp, Homo sapien
acgctgcgggctggcggacccgagc

SEQ ID NO: 1863256 - DNA, 25 bp, Homo sapien
agcaccaacgagacgctgcgggctg

SEQ ID NO: 1863257 - DNA, 25 bp, Homo sapien
ccgctcccgggtcccgctgcagcag

SEQ ID NO: 1863258 - DNA, 25 bp, Homo sapien
accggcagcaccaacgagacgctgc

SEQ ID NO: 1863259 - DNA, 25 bp, Homo sapien
gctgcgggcccggcgaggcgtttcc

SEQ ID NO: 1863260 - DNA, 25 bp, Homo sapien
ctgcgggcccggcgaggcgtttcca

SEQ ID NO: 1863261 - DNA, 25 bp, Homo sapien
gggcccggcgaggcgtttccattca

SEQ ID NO: 1863262 - DNA, 25 bp, Homo sapien
tgcgggcccggcgaggcgtttccat

SEQ ID NO: 1863263 - DNA, 25 bp, Homo sapien
tgagaaggtatgtagcacccctccc

SEQ ID NO: 1863264 - DNA, 25 bp, Homo sapien
ctctgacagtgtagggagctgctga

SEQ ID NO: 1863265 - DNA, 25 bp, Homo sapien
taggatggtagtgcttactccgacc

SEQ ID NO: 1863266 - DNA, 25 bp, Homo sapien
tcccaagcttgaaggacacacctgt

SEQ ID NO: 1863267 - DNA, 25 bp, Homo sapien
taaagcgggagaacaaggctagcct

SEQ ID NO: 1863268 - DNA, 25 bp, Homo sapien
tgctggctcggctaatgaaactccc

SEQ ID NO: 1863269 - DNA, 25 bp, Homo sapien
gagactattcgtgatcccaaggaca

SEQ ID NO: 1863270 - DNA, 25 bp, Homo sapien
gaaggatttttcttaggcgagcgcc

SEQ ID NO: 1863271 - DNA, 25 bp, Homo sapien
taaatttgggactctttgctgcggg

SEQ ID NO: 1863272 - DNA, 25 bp, Homo sapien
cgtatcaacgcctcgggaaggtggt

SEQ ID NO: 1863273 - DNA, 25 bp, Homo sapien
ggtaagcactgaactacacccatgc

SEQ ID NO: 1863274 - DNA, 25 bp, Homo sapien
tcccacgtgggtcttgagcaacctg

SEQ ID NO: 1863275 - DNA, 25 bp, Homo sapien
tcttgtcctgagaaataacagtgct

SEQ ID NO: 1863276 - DNA, 25 bp, Homo sapien
ggtcagcagacaggcttaagctaaa

SEQ ID NO: 1863277 - DNA, 25 bp, Homo sapien
cttttgttccttgagtccacgcaga

SEQ ID NO: 1863278 - DNA, 25 bp, Homo sapien
gaccaccacaagatgtgccctgatg

SEQ ID NO: 1863279 - DNA, 25 bp, Homo sapien
taagaccctttgagtctacactggg

SEQ ID NO: 1863280 - DNA, 25 bp, Homo sapien
tgcaccagatgggttttccagacac

SEQ ID NO: 1863281 - DNA, 25 bp, Homo sapien
gaatgagtccacaaaaatgagtgcc

SEQ ID NO: 1863282 - DNA, 25 bp, Homo sapien
tcagtatataaggaccacagtggcc

SEQ ID NO: 1863283 - DNA, 25 bp, Homo sapien
taagcacagccagagtagcaaactc

SEQ ID NO: 1863284 - DNA, 25 bp, Homo sapien
tgcactactgtcgacctctctaggg

SEQ ID NO: 1863285 - DNA, 25 bp, Homo sapien
caaaccgtaattgagtacaaggcac

SEQ ID NO: 1863286 - DNA, 25 bp, Homo sapien
tacaatctaaggttcacatacaggg

SEQ ID NO: 1863287 - DNA, 25 bp, Homo sapien
taactacttgccctgggagagaagc

SEQ ID NO: 1863288 - DNA, 25 bp, Homo sapien
gctggatcaaagctggcaagagctc

SEQ ID NO: 1863289 - DNA, 25 bp, Homo sapien
tagcatggatgttcgtctcagaggc

SEQ ID NO: 1863290 - DNA, 25 bp, Homo sapien
ccacagatatgagggtcaggctaga

SEQ ID NO: 1863291 - DNA, 25 bp, Homo sapien
tagccattggcttatgcagcaggga

SEQ ID NO: 1863292 - DNA, 25 bp, Homo sapien
ttcacaaatgtgtagctcagtggag

SEQ ID NO: 1863293 - DNA, 25 bp, Homo sapien
gcagcagggaactcttctttaataa

SEQ ID NO: 1863294 - DNA, 25 bp, Homo sapien
aaatactaacgtcctaagtgtccag

SEQ ID NO: 1863295 - DNA, 25 bp, Homo sapien
cagcttcacatcagagcctctggca

SEQ ID NO: 1863296 - DNA, 25 bp, Homo sapien
taatcatgccgacttaaaaacgtgg

SEQ ID NO: 1863297 - DNA, 25 bp, Homo sapien
tggacagcggtgacactttaaaaca

SEQ ID NO: 1863298 - DNA, 25 bp, Homo sapien
cgtggatcttgagagtacagcttca

SEQ ID NO: 1863299 - DNA, 25 bp, Homo sapien
ttcagatatgtacgaggtggactcc

SEQ ID NO: 1863300 - DNA, 25 bp, Homo sapien
tgcatgccgcactgaagtgagaacg

SEQ ID NO: 1863301 - DNA, 25 bp, Homo sapien
tgagaacgggtgacaggccttcaat

SEQ ID NO: 1863302 - DNA, 25 bp, Homo sapien
cagggcctatgggagagttcatctc

SEQ ID NO: 1863303 - DNA, 25 bp, Homo sapien
catccggagggttcttctggtgctg

SEQ ID NO: 1863304 - DNA, 25 bp, Homo sapien
gactgctcacatccggagggttctt

SEQ ID NO: 1863305 - DNA, 25 bp, Homo sapien
cacatccggagggttcttctggtgc

SEQ ID NO: 1863306 - DNA, 25 bp, Homo sapien
tgctcacatccggagggttcttctg

SEQ ID NO: 1863307 - DNA, 25 bp, Homo sapien
gattagcaggggaatcacatcatgg

SEQ ID NO: 1863308 - DNA, 25 bp, Homo sapien
ttagcaggggaatcacatcatggag

SEQ ID NO: 1863309 - DNA, 25 bp, Homo sapien
attagcaggggaatcacatcatgga

SEQ ID NO: 1863310 - DNA, 25 bp, Homo sapien
ctgattagcaggggaatcacatcat

SEQ ID NO: 1863311 - DNA, 25 bp, Homo sapien
aatttacgacaggacacgaatcacc

SEQ ID NO: 1863312 - DNA, 25 bp, Homo sapien
cagaagcaactgatgaaaggatctt

SEQ ID NO: 1863313 - DNA, 25 bp, Homo sapien
ttctactctagacccagcaaggcaa

SEQ ID NO: 1863314 - DNA, 25 bp, Homo sapien
gagggaactcccaaactcattcaaa

SEQ ID NO: 1863315 - DNA, 25 bp, Homo sapien
gccttcatcattgttgctggactgc

SEQ ID NO: 1863316 - DNA, 25 bp, Homo sapien
tcaggaaaatgtctgtggtctgcct

SEQ ID NO: 1863317 - DNA, 25 bp, Homo sapien
gtaggcctgggttttgcacacttcc

SEQ ID NO: 1863318 - DNA, 25 bp, Homo sapien
aaggatgtaggcctgggttttgcac

SEQ ID NO: 1863319 - DNA, 25 bp, Homo sapien
ggttttgcacacttcctcgacactg

SEQ ID NO: 1863320 - DNA, 25 bp, Homo sapien
gcactgttctttgagtgtaaaaaag

SEQ ID NO: 1863321 - DNA, 25 bp, Homo sapien
tcagctttgagtcattgcagtggac

SEQ ID NO: 1863322 - DNA, 25 bp, Homo sapien
gctttgagtcattgcagtggaccca

SEQ ID NO: 1863323 - DNA, 25 bp, Homo sapien
gagtcattgcagtggacccaaaaac

SEQ ID NO: 1863324 - DNA, 25 bp, Homo sapien
tttgagtcattgcagtggacccaaa

SEQ ID NO: 1863325 - DNA, 25 bp, Homo sapien
tctgcataaccaagaaggaaactgg

SEQ ID NO: 1863326 - DNA, 25 bp, Homo sapien
tgagccattgcacagggcctaggtc

SEQ ID NO: 1863327 - DNA, 25 bp, Homo sapien
caatatctccttgaggttacacagg

SEQ ID NO: 1863328 - DNA, 25 bp, Homo sapien
aagctgcggctagtgagattcatac

SEQ ID NO: 1863329 - DNA, 25 bp, Homo sapien
ccaccccacagagtaaagcgcacgc

SEQ ID NO: 1863330 - DNA, 25 bp, Homo sapien
accccacagagtaaagcgcacgcac

SEQ ID NO: 1863331 - DNA, 25 bp, Homo sapien
caccccacagagtaaagcgcacgca

SEQ ID NO: 1863332 - DNA, 25 bp, Homo sapien
tgagccaaaccctttcccgtgatgc

SEQ ID NO: 1863333 - DNA, 25 bp, Homo sapien
cagcagtaaggttccatggttaata

SEQ ID NO: 1863334 - DNA, 25 bp, Homo sapien
gtccctgcagcagtaaggttccatg

SEQ ID NO: 1863335 - DNA, 25 bp, Homo sapien
atgaccactgcggagagatcatagg

SEQ ID NO: 1863336 - DNA, 25 bp, Homo sapien
aagacgacatggaccccaatcttct

SEQ ID NO: 1863337 - DNA, 25 bp, Homo sapien
cccaatcttctctcgatgattacgg

SEQ ID NO: 1863338 - DNA, 25 bp, Homo sapien
ctctcgatgattacggccagaccac

SEQ ID NO: 1863339 - DNA, 25 bp, Homo sapien
ctggtcaaagacgacatggacccca

SEQ ID NO: 1863340 - DNA, 25 bp, Homo sapien
tgtagatcattaactgctttctagc

SEQ ID NO: 1863341 - DNA, 25 bp, Homo sapien
gagaacctgaggtagtctgtagatc

SEQ ID NO: 1863342 - DNA, 25 bp, Homo sapien
gaatcttttaaggtgcagccggaga

SEQ ID NO: 1863343 - DNA, 25 bp, Homo sapien
ttttaaggtgcagccggagaacctg

SEQ ID NO: 1863344 - DNA, 25 bp, Homo sapien
tatgtggtttgggaaggtataagac

SEQ ID NO: 1863345 - DNA, 25 bp, Homo sapien
tgtggtttgggaaggtataagacat

SEQ ID NO: 1863346 - DNA, 25 bp, Homo sapien
ctatgtggtttgggaaggtataaga

SEQ ID NO: 1863347 - DNA, 25 bp, Homo sapien
atgtggtttgggaaggtataagaca

SEQ ID NO: 1863348 - DNA, 25 bp, Homo sapien
aatacttccgtatgaccctctctga

SEQ ID NO: 1863349 - DNA, 25 bp, Homo sapien
actgagcaatgcaccttaagacttg

SEQ ID NO: 1863350 - DNA, 25 bp, Homo sapien
gaaggaccctgataacatgcctctg

SEQ ID NO: 1863351 - DNA, 25 bp, Homo sapien
tgtccatactggattagcagaagca

SEQ ID NO: 1863352 - DNA, 25 bp, Homo sapien
gcagcaccttaaactgatattccaa

SEQ ID NO: 1863353 - DNA, 25 bp, Homo sapien
gaggtcaatcaactcctaggtcttt

SEQ ID NO: 1863354 - DNA, 25 bp, Homo sapien
tttgactaaagaggacaaagcagca

SEQ ID NO: 1863355 - DNA, 25 bp, Homo sapien
caactaatgtcaatcaggaggtcaa

SEQ ID NO: 1863356 - DNA, 25 bp, Homo sapien
taggtcccaaaagggctcaatggta

SEQ ID NO: 1863357 - DNA, 25 bp, Homo sapien
gccagcatctcagtgagcaagcact

SEQ ID NO: 1863358 - DNA, 25 bp, Homo sapien
gcaagcactctgtttgattcaaagg

SEQ ID NO: 1863359 - DNA, 25 bp, Homo sapien
cagtgatagcgttcagggaattcca

SEQ ID NO: 1863360 - DNA, 25 bp, Homo sapien
gaaacattctcggaacttctggagg

SEQ ID NO: 1863361 - DNA, 25 bp, Homo sapien
tgcagcagctcgcagagaaattcct

SEQ ID NO: 1863362 - DNA, 25 bp, Homo sapien
gaaatgtgctttgaactcggctcct

SEQ ID NO: 1863363 - DNA, 25 bp, Homo sapien
aaattcctgcgcgtcctgttggtcg

SEQ ID NO: 1863364 - DNA, 25 bp, Homo sapien
cactctgcgtgaggtagggagggcg

SEQ ID NO: 1863365 - DNA, 25 bp, Homo sapien
tgagtgtggcggcgggcactctgcg

SEQ ID NO: 1863366 - DNA, 25 bp, Homo sapien
cggcggggcgcgaggcagccgggcc

SEQ ID NO: 1863367 - DNA, 25 bp, Homo sapien
gcggggcgtgtgcaggagcagccgt

SEQ ID NO: 1863368 - DNA, 25 bp, Homo sapien
tcttgcgcggaggggtgctggccag

SEQ ID NO: 1863369 - DNA, 25 bp, Homo sapien
gggagctcttctcgaaccacagccg

SEQ ID NO: 1863370 - DNA, 25 bp, Homo sapien
gagcatctgcggctgtccctgagga

SEQ ID NO: 1863371 - DNA, 25 bp, Homo sapien
ggcaggaccacgtcctcacccgaag

SEQ ID NO: 1863372 - DNA, 25 bp, Homo sapien
tgacgccggtaccacagagccgtga

SEQ ID NO: 1863373 - DNA, 25 bp, Homo sapien
cggtggtggcacactctaagcagca

SEQ ID NO: 1863374 - DNA, 25 bp, Homo sapien
cagaacacgtagagatcccggactt

SEQ ID NO: 1863375 - DNA, 25 bp, Homo sapien
cgtggtcctcaatatagcggccgca

SEQ ID NO: 1863376 - DNA, 25 bp, Homo sapien
tccttgcacaggtaacagaacacgt

SEQ ID NO: 1863377 - DNA, 25 bp, Homo sapien
taaccgccctacatgtttgcatcta

SEQ ID NO: 1863378 - DNA, 25 bp, Homo sapien
ggatggagtggtcctgggcgagccg

SEQ ID NO: 1863379 - DNA, 25 bp, Homo sapien
tggtcctgggcgagccgtaaccgcc

SEQ ID NO: 1863380 - DNA, 25 bp, Homo sapien
tgggcgagccgtaaccgccctacat

SEQ ID NO: 1863381 - DNA, 25 bp, Homo sapien
tcttatagaagtcgccactttctca

SEQ ID NO: 1863382 - DNA, 25 bp, Homo sapien
cttatagaagtcgccactttctcaa

SEQ ID NO: 1863383 - DNA, 25 bp, Homo sapien
ttatagaagtcgccactttctcaac

SEQ ID NO: 1863384 - DNA, 25 bp, Homo sapien
gtcttatagaagtcgccactttctc

SEQ ID NO: 1863385 - DNA, 25 bp, Homo sapien
ctaagggtacaaattgggtacacat

SEQ ID NO: 1863386 - DNA, 25 bp, Homo sapien
caaattgggtacacattgatgctta

SEQ ID NO: 1863387 - DNA, 25 bp, Homo sapien
tacaaattgggtacacattgatgct

SEQ ID NO: 1863388 - DNA, 25 bp, Homo sapien
agggtacaaattgggtacacattga

SEQ ID NO: 1863389 - DNA, 25 bp, Homo sapien
tgccatatgggcagagtaaatccat

SEQ ID NO: 1863390 - DNA, 25 bp, Homo sapien
ctgatttaagctaggcagaccagct

SEQ ID NO: 1863391 - DNA, 25 bp, Homo sapien
ctcaccatactgatttaagctaggc

SEQ ID NO: 1863392 - DNA, 25 bp, Homo sapien
cagggctactttgcacctcaccata

SEQ ID NO: 1863393 - DNA, 25 bp, Homo sapien
tctgaatacttctacatcagcaagt

SEQ ID NO: 1863394 - DNA, 25 bp, Homo sapien
gaatacttctacatcagcaagtttt

SEQ ID NO: 1863395 - DNA, 25 bp, Homo sapien
gtgtctgaatacttctacatcagca

SEQ ID NO: 1863396 - DNA, 25 bp, Homo sapien
gttttaaatagatcagcagctttaa

SEQ ID NO: 1863397 - DNA, 25 bp, Homo sapien
aaatgggaacccgtcttcctgatgt

SEQ ID NO: 1863398 - DNA, 25 bp, Homo sapien
cttaaacgacagcagtccatttagt

SEQ ID NO: 1863399 - DNA, 25 bp, Homo sapien
atgggaacccgtcttcctgatgtcc

SEQ ID NO: 1863400 - DNA, 25 bp, Homo sapien
tgatgtcctgctgcttaaacgacag

SEQ ID NO: 1863401 - DNA, 25 bp, Homo sapien
tttcaaagacgtggactgtgcatga

SEQ ID NO: 1863402 - DNA, 25 bp, Homo sapien
aaataaggcatagaaggcatttcaa

SEQ ID NO: 1863403 - DNA, 25 bp, Homo sapien
aaagcagacgtacttctgggaactc

SEQ ID NO: 1863404 - DNA, 25 bp, Homo sapien
agcagacgtacttctgggaactcaa

SEQ ID NO: 1863405 - DNA, 25 bp, Homo sapien
ccaaaactaataagaactaagctgc

SEQ ID NO: 1863406 - DNA, 25 bp, Homo sapien
atataatcaccactaaagctaccac

SEQ ID NO: 1863407 - DNA, 25 bp, Homo sapien
taatcaccactaaagctaccactca

SEQ ID NO: 1863408 - DNA, 25 bp, Homo sapien
aataagaactaagctgcggctgggc

SEQ ID NO: 1863409 - DNA, 25 bp, Homo sapien
gctggtagacaggaatgtgattgat

SEQ ID NO: 1863410 - DNA, 25 bp, Homo sapien
ggtttaatcatatgaaactgcaaat

SEQ ID NO: 1863411 - DNA, 25 bp, Homo sapien
aatcaaaaggttgctgatctgaaac

SEQ ID NO: 1863412 - DNA, 25 bp, Homo sapien
gaaactcagcaactttgcagaacta

SEQ ID NO: 1863413 - DNA, 25 bp, Homo sapien
catcagtaagtgaggattcaatgga

SEQ ID NO: 1863414 - DNA, 25 bp, Homo sapien
aaatagcctcactatctatggtcac

SEQ ID NO: 1863415 - DNA, 25 bp, Homo sapien
taatctactccagagcaattcaaga

SEQ ID NO: 1863416 - DNA, 25 bp, Homo sapien
gatagaatagtccataataatctaa

SEQ ID NO: 1863417 - DNA, 25 bp, Homo sapien
atagcctcactatctatggtcacag

SEQ ID NO: 1863418 - DNA, 25 bp, Homo sapien
ctgggcaacagaggaagattatctc

SEQ ID NO: 1863419 - DNA, 25 bp, Homo sapien
gggcaacagaggaagattatctcaa

SEQ ID NO: 1863420 - DNA, 25 bp, Homo sapien
atctgggcaacagaggaagattatc

SEQ ID NO: 1863421 - DNA, 25 bp, Homo sapien
ctgcaccactgcacaccaatctggg

SEQ ID NO: 1863422 - DNA, 25 bp, Homo sapien
tcgtggtgggacaaacatcatagca

SEQ ID NO: 1863423 - DNA, 25 bp, Homo sapien
gacaggtcatgacagatacgatctc

SEQ ID NO: 1863424 - DNA, 25 bp, Homo sapien
tggctgtgtcccctcttagcttaag

SEQ ID NO: 1863425 - DNA, 25 bp, Homo sapien
tgctcaaatgaacgggatcctcgtg

SEQ ID NO: 1863426 - DNA, 25 bp, Homo sapien
cacagtcattggttaggtttcctct

SEQ ID NO: 1863427 - DNA, 25 bp, Homo sapien
tccacagtcattggttaggtttcct

SEQ ID NO: 1863428 - DNA, 25 bp, Homo sapien
acagtcattggttaggtttcctctt

SEQ ID NO: 1863429 - DNA, 25 bp, Homo sapien
attccacagtcattggttaggtttc

SEQ ID NO: 1863430 - DNA, 25 bp, Homo sapien
gtgcctctgcgcgactgctgtgcaa

SEQ ID NO: 1863431 - DNA, 25 bp, Homo sapien
cttgagatcggcaagctgggccacc

SEQ ID NO: 1863432 - DNA, 25 bp, Homo sapien
tatgacctatatgtaagcggcatgc

SEQ ID NO: 1863433 - DNA, 25 bp, Homo sapien
gacacattatcaggaagtaggactc

SEQ ID NO: 1863434 - DNA, 25 bp, Homo sapien
aattgctctgcattagacagggaag

SEQ ID NO: 1863435 - DNA, 25 bp, Homo sapien
ggtggtttgctgcagaatggctggc

SEQ ID NO: 1863436 - DNA, 25 bp, Homo sapien
ggctggctgtcaagatcctagaacg

SEQ ID NO: 1863437 - DNA, 25 bp, Homo sapien
tgtccagtccccttggagtaggtgg

SEQ ID NO: 1863438 - DNA, 25 bp, Homo sapien
ggctgccaacgtaggtgttgtagtt

SEQ ID NO: 1863439 - DNA, 25 bp, Homo sapien
gattaacgcattcagtgcagagtga

SEQ ID NO: 1863440 - DNA, 25 bp, Homo sapien
taatatactcattatgccatgctgc

SEQ ID NO: 1863441 - DNA, 25 bp, Homo sapien
tgcagagtgacatgtctattccata

SEQ ID NO: 1863442 - DNA, 25 bp, Homo sapien
aaatcttgttcctcaaccacccaag

SEQ ID NO: 1863443 - DNA, 25 bp, Homo sapien
gcaaatcttgttcctcaaccaccca

SEQ ID NO: 1863444 - DNA, 25 bp, Homo sapien
tcaagcaaatcttgttcctcaacca

SEQ ID NO: 1863445 - DNA, 25 bp, Homo sapien
aagcaaatcttgttcctcaaccacc

SEQ ID NO: 1863446 - DNA, 25 bp, Homo sapien
gaatgtctgagtataaccttgggca

SEQ ID NO: 1863447 - DNA, 25 bp, Homo sapien
gaggttaccacattactgctgaaga

SEQ ID NO: 1863448 - DNA, 25 bp, Homo sapien
gaacttcacaacaggcaagccagag

SEQ ID NO: 1863449 - DNA, 25 bp, Homo sapien
caagtccagggcagttttctagcta

SEQ ID NO: 1863450 - DNA, 25 bp, Homo sapien
gatattgactggagttgcaggataa

SEQ ID NO: 1863451 - DNA, 25 bp, Homo sapien
caggataaactagaggtcctttcaa

SEQ ID NO: 1863452 - DNA, 25 bp, Homo sapien
taagtgggatattgactggagttgc

SEQ ID NO: 1863453 - DNA, 25 bp, Homo sapien
ctggaatgatttaagtgggatattg

SEQ ID NO: 1863454 - DNA, 25 bp, Homo sapien
gagtacgtcctactactaacgccag

SEQ ID NO: 1863455 - DNA, 25 bp, Homo sapien
tggcaataccatacagagtacgtcc

SEQ ID NO: 1863456 - DNA, 25 bp, Homo sapien
tactatgccactaacacagtagctg

SEQ ID NO: 1863457 - DNA, 25 bp, Homo sapien
tggtttagcacactaaggccgttgc

SEQ ID NO: 1863458 - DNA, 25 bp, Homo sapien
gacccttgcagaccttctggagcaa

SEQ ID NO: 1863459 - DNA, 25 bp, Homo sapien
ccaaaggctctcttacacttgatct

SEQ ID NO: 1863460 - DNA, 25 bp, Homo sapien
gcagtctaccccagttctacatcca

SEQ ID NO: 1863461 - DNA, 25 bp, Homo sapien
tctggagcaactccccataacacgc

SEQ ID NO: 1863462 - DNA, 25 bp, Homo sapien
aattacccagttatccttgtcccag

SEQ ID NO: 1863463 - DNA, 25 bp, Homo sapien
taattacccagttatccttgtccca

SEQ ID NO: 1863464 - DNA, 25 bp, Homo sapien
ctcttcaattaacgtaattacccag

SEQ ID NO: 1863465 - DNA, 25 bp, Homo sapien
gccatcatcagcacgcgcgagctgt

SEQ ID NO: 1863466 - DNA, 25 bp, Homo sapien
cgccatcatcagcacgcgcgagctg

SEQ ID NO: 1863467 - DNA, 25 bp, Homo sapien
atcagcacgcgcgagctgtcaccag

SEQ ID NO: 1863468 - DNA, 25 bp, Homo sapien
agcacgcgcgagctgtcaccagggc

SEQ ID NO: 1863469 - DNA, 25 bp, Homo sapien
aaagttactattggctcccaggcgg

SEQ ID NO: 1863470 - DNA, 25 bp, Homo sapien
tgtgttgttcctaaagcagcagccc

SEQ ID NO: 1863471 - DNA, 25 bp, Homo sapien
tccccactgcgaaggacaaaggctt

SEQ ID NO: 1863472 - DNA, 25 bp, Homo sapien
tttgccacagatgacccaagagaga

SEQ ID NO: 1863473 - DNA, 25 bp, Homo sapien
ctgctttttagcttttagggaacag

SEQ ID NO: 1863474 - DNA, 25 bp, Homo sapien
tgctttttagcttttagggaacaga

SEQ ID NO: 1863475 - DNA, 25 bp, Homo sapien
gagtctatatttaccacgatcaact

SEQ ID NO: 1863476 - DNA, 25 bp, Homo sapien
agtctatatttaccacgatcaactt

SEQ ID NO: 1863477 - DNA, 25 bp, Homo sapien
gagagtctatatttaccacgatcaa

SEQ ID NO: 1863478 - DNA, 25 bp, Homo sapien
agagtctatatttaccacgatcaac

SEQ ID NO: 1863479 - DNA, 25 bp, Homo sapien
aaatgtaaatcaggaggccaaaaag

SEQ ID NO: 1863480 - DNA, 25 bp, Homo sapien
gagcaaatgtaaatcaggaggccaa

SEQ ID NO: 1863481 - DNA, 25 bp, Homo sapien
ctggacgagagcaaatgtaaatcag

SEQ ID NO: 1863482 - DNA, 25 bp, Homo sapien
gctgcctatgcattgtttcattcca

SEQ ID NO: 1863483 - DNA, 25 bp, Homo sapien
taattaccattcttgaggacaggcc

SEQ ID NO: 1863484 - DNA, 25 bp, Homo sapien
caaaagcattcctgggcacgtccat

SEQ ID NO: 1863485 - DNA, 25 bp, Homo sapien
gatttcaaaggactcaggcaacacc

SEQ ID NO: 1863486 - DNA, 25 bp, Homo sapien
gataagaggttctatgtcccagcat

SEQ ID NO: 1863487 - DNA, 25 bp, Homo sapien
tgtgtggctgcctagaaaactctgt

SEQ ID NO: 1863488 - DNA, 25 bp, Homo sapien
gaccatggtatctgctgggccgtag

SEQ ID NO: 1863489 - DNA, 25 bp, Homo sapien
tgtaggaactcgagcagcagactcc

SEQ ID NO: 1863490 - DNA, 25 bp, Homo sapien
gaagagttccatgtactggaccatg

SEQ ID NO: 1863491 - DNA, 25 bp, Homo sapien
cctgctcctattttcaccaaggtct

SEQ ID NO: 1863492 - DNA, 25 bp, Homo sapien
ttcagagccctttgctaagcagccc

SEQ ID NO: 1863493 - DNA, 25 bp, Homo sapien
aagaactggaaaatcttcagagccc

SEQ ID NO: 1863494 - DNA, 25 bp, Homo sapien
ccctcagaacatcctgctcctattt

SEQ ID NO: 1863495 - DNA, 25 bp, Homo sapien
tggtgtcagcaataaggcaagggcc

SEQ ID NO: 1863496 - DNA, 25 bp, Homo sapien
gcatcacatacatcagcttcccggt

SEQ ID NO: 1863497 - DNA, 25 bp, Homo sapien
tcaaagagggcgaaacagctcaatg

SEQ ID NO: 1863498 - DNA, 25 bp, Homo sapien
ggtgccccgggtctcaatcttgctg

SEQ ID NO: 1863499 - DNA, 25 bp, Homo sapien
cccggcaggtcgaggcaatagtgag

SEQ ID NO: 1863500 - DNA, 25 bp, Homo sapien
tgagcccggcaggtcgaggcaatag

SEQ ID NO: 1863501 - DNA, 25 bp, Homo sapien
gcccggcaggtcgaggcaatagtga

SEQ ID NO: 1863502 - DNA, 25 bp, Homo sapien
gagcccggcaggtcgaggcaatagt

SEQ ID NO: 1863503 - DNA, 25 bp, Homo sapien
caagcatctccaatttccgggtaag

SEQ ID NO: 1863504 - DNA, 25 bp, Homo sapien
tagaggcggccgtatggtaagtctc

SEQ ID NO: 1863505 - DNA, 25 bp, Homo sapien
caatttccgggtaaggagctctacg

SEQ ID NO: 1863506 - DNA, 25 bp, Homo sapien
ctacggtttgctgaacactcttgcc

SEQ ID NO: 1863507 - DNA, 25 bp, Homo sapien
agtgcagtagttagagtggggaaga

SEQ ID NO: 1863508 - DNA, 25 bp, Homo sapien
taagataactcattacacttggacc

SEQ ID NO: 1863509 - DNA, 25 bp, Homo sapien
tcaattaagataactcattacactt

SEQ ID NO: 1863510 - DNA, 25 bp, Homo sapien
aattaagataactcattacacttgg

SEQ ID NO: 1863511 - DNA, 25 bp, Homo sapien
aggtggctgggactagtgtattgga

SEQ ID NO: 1863512 - DNA, 25 bp, Homo sapien
tggacactgttgttagagaacattt

SEQ ID NO: 1863513 - DNA, 25 bp, Homo sapien
acactgttgttagagaacatttcca

SEQ ID NO: 1863514 - DNA, 25 bp, Homo sapien
gctgggactagtgtattggacactg

SEQ ID NO: 1863515 - DNA, 25 bp, Homo sapien
tgctttcccgccttccaagaggaag

SEQ ID NO: 1863516 - DNA, 25 bp, Homo sapien
gaaggggcgcatctctgaggaaaca

SEQ ID NO: 1863517 - DNA, 25 bp, Homo sapien
tcatctacacaacccgaggacatct

SEQ ID NO: 1863518 - DNA, 25 bp, Homo sapien
agcccggacggcatcctctcatcta

SEQ ID NO: 1863519 - DNA, 25 bp, Homo sapien
tctaaatccagacattcccgtttgg

SEQ ID NO: 1863520 - DNA, 25 bp, Homo sapien
tcacacagtagaaacgcagggttcc

SEQ ID NO: 1863521 - DNA, 25 bp, Homo sapien
tcccgtttggctgagcactctaggc

SEQ ID NO: 1863522 - DNA, 25 bp, Homo sapien
ccatgaagctaggagagcgacactc

SEQ ID NO: 1863523 - DNA, 25 bp, Homo sapien
tttattacagtaggatgatggtcct

SEQ ID NO: 1863524 - DNA, 25 bp, Homo sapien
ctttattacagtaggatgatggtcc

SEQ ID NO: 1863525 - DNA, 25 bp, Homo sapien
ttattacagtaggatgatggtcctg

SEQ ID NO: 1863526 - DNA, 25 bp, Homo sapien
tggcagttgaaaacatgagagcccc

SEQ ID NO: 1863527 - DNA, 25 bp, Homo sapien
tagagggaccccaatccaaatgcaa

SEQ ID NO: 1863528 - DNA, 25 bp, Homo sapien
gcttgactagccaccgaaatgcaga

SEQ ID NO: 1863529 - DNA, 25 bp, Homo sapien
tgggtaggaccagatcccttgggct

SEQ ID NO: 1863530 - DNA, 25 bp, Homo sapien
ctacaggtgtatggctgtgacatct

SEQ ID NO: 1863531 - DNA, 25 bp, Homo sapien
ggctctccctgagtgcagcttcgat

SEQ ID NO: 1863532 - DNA, 25 bp, Homo sapien
tgacatctgtaggagtgctggtctg

SEQ ID NO: 1863533 - DNA, 25 bp, Homo sapien
cctgagtgcagcttcgatctgctcc

SEQ ID NO: 1863534 - DNA, 25 bp, Homo sapien
aagatacttgctcttccccagacca

SEQ ID NO: 1863535 - DNA, 25 bp, Homo sapien
tactttatgaatggagaggctgctg

SEQ ID NO: 1863536 - DNA, 25 bp, Homo sapien
cccaagatacttgctcttccccaga

SEQ ID NO: 1863537 - DNA, 25 bp, Homo sapien
ctcagggcatagcactactttatga

SEQ ID NO: 1863538 - DNA, 25 bp, Homo sapien
caatgctgcccgtggcgatcatgga

SEQ ID NO: 1863539 - DNA, 25 bp, Homo sapien
tggcgggtacatggcaaaggtataa

SEQ ID NO: 1863540 - DNA, 25 bp, Homo sapien
acttcagtgccagtgatccctgcca

SEQ ID NO: 1863541 - DNA, 25 bp, Homo sapien
agctcatccccggacatggagcagg

SEQ ID NO: 1863542 - DNA, 25 bp, Homo sapien
agccaggtcccacttgagcttccct

SEQ ID NO: 1863543 - DNA, 25 bp, Homo sapien
acttgagcttccctaggaccagcac

SEQ ID NO: 1863544 - DNA, 25 bp, Homo sapien
gccaggaaatcatgtgcaatcacag

SEQ ID NO: 1863545 - DNA, 25 bp, Homo sapien
gagccggtgcagaatgaaggccagg

SEQ ID NO: 1863546 - DNA, 25 bp, Homo sapien
gtccactcgtcatgggttcccagac

SEQ ID NO: 1863547 - DNA, 25 bp, Homo sapien
ctgccagtactaggtctcgggagaa

SEQ ID NO: 1863548 - DNA, 25 bp, Homo sapien
caccccagtccactcgtcatgggtt

SEQ ID NO: 1863549 - DNA, 25 bp, Homo sapien
cagtactaggtctcgggagaaggct

SEQ ID NO: 1863550 - DNA, 25 bp, Homo sapien
agcagcatgcagaccgcacccagga

SEQ ID NO: 1863551 - DNA, 25 bp, Homo sapien
ggacgcaagacaggtagcgatccag

SEQ ID NO: 1863552 - DNA, 25 bp, Homo sapien
ggtgtagatgcacagtttttcgatg

SEQ ID NO: 1863553 - DNA, 25 bp, Homo sapien
gatgcacagtttttcgatggtcagg

SEQ ID NO: 1863554 - DNA, 25 bp, Homo sapien
aggctcctgccgctgcctcctgcac

SEQ ID NO: 1863555 - DNA, 25 bp, Homo sapien
gaggaggctcctgccgctgcctcct

SEQ ID NO: 1863556 - DNA, 25 bp, Homo sapien
tgccgctgcctcctgcacttttcat

SEQ ID NO: 1863557 - DNA, 25 bp, Homo sapien
tcctgccgctgcctcctgcactttt

SEQ ID NO: 1863558 - DNA, 25 bp, Homo sapien
tcttagcctcggagcatcctgcaga

SEQ ID NO: 1863559 - DNA, 25 bp, Homo sapien
gtcccgtttgctcggcccgaagaga

SEQ ID NO: 1863560 - DNA, 25 bp, Homo sapien
agtcactgtcgggaggagccgatta

SEQ ID NO: 1863561 - DNA, 25 bp, Homo sapien
cacagttagggtgccaagtgactgg

SEQ ID NO: 1863562 - DNA, 25 bp, Homo sapien
cgcatgtgcggcttgatctcccgct

SEQ ID NO: 1863563 - DNA, 25 bp, Homo sapien
gcatgtgcggcttgatctcccgctg

SEQ ID NO: 1863564 - DNA, 25 bp, Homo sapien
gcgcggggtacgtagcgctcctcca

SEQ ID NO: 1863565 - DNA, 25 bp, Homo sapien
taggaggcgcggggtacgtagcgct

SEQ ID NO: 1863566 - DNA, 25 bp, Homo sapien
aggaggcgcggggtacgtagcgctc

SEQ ID NO: 1863567 - DNA, 25 bp, Homo sapien
gtaggaggcgcggggtacgtagcgc

SEQ ID NO: 1863568 - DNA, 25 bp, Homo sapien
cgggtgccttcgcaacacagcagct

SEQ ID NO: 1863569 - DNA, 25 bp, Homo sapien
gggtgccttcgcaacacagcagctc

SEQ ID NO: 1863570 - DNA, 25 bp, Homo sapien
cgtgccgggtgccttcgcaacacag

SEQ ID NO: 1863571 - DNA, 25 bp, Homo sapien
gccgggtgccttcgcaacacagcag

SEQ ID NO: 1863572 - DNA, 25 bp, Homo sapien
ctcgcgagtcccaaggcaggcgacg

SEQ ID NO: 1863573 - DNA, 25 bp, Homo sapien
cgggagtgcgggctcgcgagtccca

SEQ ID NO: 1863574 - DNA, 25 bp, Homo sapien
cgcgcgccgcttccctgacaggcgc

SEQ ID NO: 1863575 - DNA, 25 bp, Homo sapien
caaggcaggcgacgggccggagagc

SEQ ID NO: 1863576 - DNA, 25 bp, Homo sapien
cttcagacccattgagatgctgggg

SEQ ID NO: 1863577 - DNA, 25 bp, Homo sapien
acccattgagatgctggggagagcc

SEQ ID NO: 1863578 - DNA, 25 bp, Homo sapien
ctctgggccttatcacccaccgctg

SEQ ID NO: 1863579 - DNA, 25 bp, Homo sapien
tcccttaaggcctagctcctggccc

SEQ ID NO: 1863580 - DNA, 25 bp, Homo sapien
atcacccaccgctggcatcctgctt

SEQ ID NO: 1863581 - DNA, 25 bp, Homo sapien
ttaaggcctagctcctggcccatct

SEQ ID NO: 1863582 - DNA, 25 bp, Homo sapien
cagaagcgtctcagttcggaaacaa

SEQ ID NO: 1863583 - DNA, 25 bp, Homo sapien
caaaatgttcaatagagttaccacc

SEQ ID NO: 1863584 - DNA, 25 bp, Homo sapien
tctaggtagggtaagaatatgttcc

SEQ ID NO: 1863585 - DNA, 25 bp, Homo sapien
tacaaatgtcagaggatcggccggg

SEQ ID NO: 1863586 - DNA, 25 bp, Homo sapien
aaccttaaaaccagactaggcacag

SEQ ID NO: 1863587 - DNA, 25 bp, Homo sapien
aaaattacctaaatgtggtgtgcac

SEQ ID NO: 1863588 - DNA, 25 bp, Homo sapien
tcggactgcacaacctagcaagacc

SEQ ID NO: 1863589 - DNA, 25 bp, Homo sapien
agtttgagatcggactgcacaacct

SEQ ID NO: 1863590 - DNA, 25 bp, Homo sapien
ggtgattccgaaacacatccagggc

SEQ ID NO: 1863591 - DNA, 25 bp, Homo sapien
taagacgcccagctaggatgtgaac

SEQ ID NO: 1863592 - DNA, 25 bp, Homo sapien
taacttaggcctttagactgagagc

SEQ ID NO: 1863593 - DNA, 25 bp, Homo sapien
taagtgccggctaaccataggtcga

SEQ ID NO: 1863594 - DNA, 25 bp, Homo sapien
cctttgctgagtcatggagaacggc

SEQ ID NO: 1863595 - DNA, 25 bp, Homo sapien
caagcacttactgattccctctgaa

SEQ ID NO: 1863596 - DNA, 25 bp, Homo sapien
cagagtcaccaaggctagacagcca

SEQ ID NO: 1863597 - DNA, 25 bp, Homo sapien
tctggtttcagacccatggttcctt

SEQ ID NO: 1863598 - DNA, 25 bp, Homo sapien
cgttgaggaaggctcagaacaaata

SEQ ID NO: 1863599 - DNA, 25 bp, Homo sapien
gcctgaacaccaaaccgttgaggaa

SEQ ID NO: 1863600 - DNA, 25 bp, Homo sapien
gactcattggcataaggaatccagc

SEQ ID NO: 1863601 - DNA, 25 bp, Homo sapien
tgagaccaaaaagtaaggttgttgc

SEQ ID NO: 1863602 - DNA, 25 bp, Homo sapien
aggtgtccaccaccacacctggcta

SEQ ID NO: 1863603 - DNA, 25 bp, Homo sapien
cagccttccgagcagctggaattac

SEQ ID NO: 1863604 - DNA, 25 bp, Homo sapien
tggctaattttgtgtatttttaata

SEQ ID NO: 1863605 - DNA, 25 bp, Homo sapien
ccgggtccaagagattctcctacct

SEQ ID NO: 1863606 - DNA, 25 bp, Homo sapien
gagattgtcctatccccagtgtgca

SEQ ID NO: 1863607 - DNA, 25 bp, Homo sapien
taccttggaaggaccccgatattgc

SEQ ID NO: 1863608 - DNA, 25 bp, Homo sapien
tcctattgagaggtagcagcacttc

SEQ ID NO: 1863609 - DNA, 25 bp, Homo sapien
tgttctgtcgttcaggctaccagtg

SEQ ID NO: 1863610 - DNA, 25 bp, Homo sapien
gtgcagtggcaaagtggcaaaatct

SEQ ID NO: 1863611 - DNA, 25 bp, Homo sapien
agtgcagtggcaaagtggcaaaatc

SEQ ID NO: 1863612 - DNA, 25 bp, Homo sapien
gtgtgcgccactgccccggcttagc

SEQ ID NO: 1863613 - DNA, 25 bp, Homo sapien
tgccccggcttagccaactgatttt

SEQ ID NO: 1863614 - DNA, 25 bp, Homo sapien
agtatcctccacctagctgtttgaa

SEQ ID NO: 1863615 - DNA, 25 bp, Homo sapien
caacagtggcatagaacactggaac

SEQ ID NO: 1863616 - DNA, 25 bp, Homo sapien
taactgtagtcattccaacagtggc

SEQ ID NO: 1863617 - DNA, 25 bp, Homo sapien
tcagtttcatccacggtgacataaa

SEQ ID NO: 1863618 - DNA, 25 bp, Homo sapien
tatctatcttgggacagggtctcgc

SEQ ID NO: 1863619 - DNA, 25 bp, Homo sapien
gagtatggttccactatcatggctc

SEQ ID NO: 1863620 - DNA, 25 bp, Homo sapien
tgcaatctcgtcctccctcaagcaa

SEQ ID NO: 1863621 - DNA, 25 bp, Homo sapien
cagcaatattttatctatcttggga

SEQ ID NO: 1863622 - DNA, 25 bp, Homo sapien
ctaataactgggtgaaacgaatctt

SEQ ID NO: 1863623 - DNA, 25 bp, Homo sapien
catactttctaataactgggtgaaa

SEQ ID NO: 1863624 - DNA, 25 bp, Homo sapien
aaacatactttctaataactgggtg

SEQ ID NO: 1863625 - DNA, 25 bp, Homo sapien
tctaataactgggtgaaacgaatct

SEQ ID NO: 1863626 - DNA, 25 bp, Homo sapien
tctatattgtacacttattggttgt

SEQ ID NO: 1863627 - DNA, 25 bp, Homo sapien
ttctatattgtacacttattggttg

SEQ ID NO: 1863628 - DNA, 25 bp, Homo sapien
tatattgtacacttattggttgttt

SEQ ID NO: 1863629 - DNA, 25 bp, Homo sapien
gtatatatgcttcataagtcaattt

SEQ ID NO: 1863630 - DNA, 25 bp, Homo sapien
gacaaattcaaacagtccagagtgt

SEQ ID NO: 1863631 - DNA, 25 bp, Homo sapien
caacagcttagtgtgcagctttcca

SEQ ID NO: 1863632 - DNA, 25 bp, Homo sapien
gcctagtccccattgtcaacagctt

SEQ ID NO: 1863633 - DNA, 25 bp, Homo sapien
gtgtatgtataaagtgacagaaccc

SEQ ID NO: 1863634 - DNA, 25 bp, Homo sapien
catagaaacacttcaggagttcatc

SEQ ID NO: 1863635 - DNA, 25 bp, Homo sapien
gtcctccatagaaacacttcaggag

SEQ ID NO: 1863636 - DNA, 25 bp, Homo sapien
caaggatccaatgaaggctttcaaa

SEQ ID NO: 1863637 - DNA, 25 bp, Homo sapien
tccaagcagtcaatcggtcatttca

SEQ ID NO: 1863638 - DNA, 25 bp, Homo sapien
tataccatcatctggatcactcagc

SEQ ID NO: 1863639 - DNA, 25 bp, Homo sapien
tcagccatacatatcttcactaagg

SEQ ID NO: 1863640 - DNA, 25 bp, Homo sapien
tgtaaactcaaagtagcgccaccca

SEQ ID NO: 1863641 - DNA, 25 bp, Homo sapien
gtcatacatctagcatgaatctggg

SEQ ID NO: 1863642 - DNA, 25 bp, Homo sapien
tgcactaagtggaaactggtcaggt

SEQ ID NO: 1863643 - DNA, 25 bp, Homo sapien
tgggagggcccctgataaacagctg

SEQ ID NO: 1863644 - DNA, 25 bp, Homo sapien
aaggcaggcattgtgtctcatggac

SEQ ID NO: 1863645 - DNA, 25 bp, Homo sapien
gggccttgatacagcagcatctcac

SEQ ID NO: 1863646 - DNA, 25 bp, Homo sapien
ttccaattgccacgccaccttcttt

SEQ ID NO: 1863647 - DNA, 25 bp, Homo sapien
gagatttccaattgccacgccacct

SEQ ID NO: 1863648 - DNA, 25 bp, Homo sapien
acagaggaagtgtctccacagagat

SEQ ID NO: 1863649 - DNA, 25 bp, Homo sapien
aagtgtctccacagagatttccaat

SEQ ID NO: 1863650 - DNA, 25 bp, Homo sapien
aaggagagatcccatccaacctgga

SEQ ID NO: 1863651 - DNA, 25 bp, Homo sapien
ggagagatcccatccaacctggaac

SEQ ID NO: 1863652 - DNA, 25 bp, Homo sapien
agcaaagaggtgcagttggtgaact

SEQ ID NO: 1863653 - DNA, 25 bp, Homo sapien
tgaactagggccacgggtaatggga

SEQ ID NO: 1863654 - DNA, 25 bp, Homo sapien
cagctcagacaattcctgtgcccat

SEQ ID NO: 1863655 - DNA, 25 bp, Homo sapien
catgggaatacggaggacacagctg

SEQ ID NO: 1863656 - DNA, 25 bp, Homo sapien
gagcacagctgtgctatctatcagc

SEQ ID NO: 1863657 - DNA, 25 bp, Homo sapien
gcctctgccgggttggacaccctta

SEQ ID NO: 1863658 - DNA, 25 bp, Homo sapien
cctgccactgaaggctgaagctgtc

SEQ ID NO: 1863659 - DNA, 25 bp, Homo sapien
tgtcggctgctatttcttgcctcat

SEQ ID NO: 1863660 - DNA, 25 bp, Homo sapien
actgaaggctgaagctgtccacagg

SEQ ID NO: 1863661 - DNA, 25 bp, Homo sapien
acggtcaccgttgccacactgtcgg

SEQ ID NO: 1863662 - DNA, 25 bp, Homo sapien
gattatgcgtggtaagcacccagcc

SEQ ID NO: 1863663 - DNA, 25 bp, Homo sapien
gacagatgagctgggttccgttccc

SEQ ID NO: 1863664 - DNA, 25 bp, Homo sapien
cctcagcaagggagatgactcagct

SEQ ID NO: 1863665 - DNA, 25 bp, Homo sapien
tgctcaggacgggtcccaaacttgg

SEQ ID NO: 1863666 - DNA, 25 bp, Homo sapien
cttgggagcctcaaaggagggattt

SEQ ID NO: 1863667 - DNA, 25 bp, Homo sapien
agatgtgggacattagacggccttg

SEQ ID NO: 1863668 - DNA, 25 bp, Homo sapien
caagggctctgcaaactatgtagct

SEQ ID NO: 1863669 - DNA, 25 bp, Homo sapien
atatatttattgagtctgctggctg

SEQ ID NO: 1863670 - DNA, 25 bp, Homo sapien
gaaatgtgtgctccacttcagaccc

SEQ ID NO: 1863671 - DNA, 25 bp, Homo sapien
tagtgcaggcttattggaaacgtgg

SEQ ID NO: 1863672 - DNA, 25 bp, Homo sapien
gaggcagactctatgggagacttcc

SEQ ID NO: 1863673 - DNA, 25 bp, Homo sapien
gcttgaagctgagtcatctgcccct

SEQ ID NO: 1863674 - DNA, 25 bp, Homo sapien
agtcgctgcacctggccgactcttt

SEQ ID NO: 1863675 - DNA, 25 bp, Homo sapien
acgcatcatcacaccggtctaattt

SEQ ID NO: 1863676 - DNA, 25 bp, Homo sapien
tgagtcgctgcacctggccgactct

SEQ ID NO: 1863677 - DNA, 25 bp, Homo sapien
gtgagtcgctgcacctggccgactc

SEQ ID NO: 1863678 - DNA, 25 bp, Homo sapien
catttccacgatgtgcagactggca

SEQ ID NO: 1863679 - DNA, 25 bp, Homo sapien
gcagctttcctagtgagtctatgag

SEQ ID NO: 1863680 - DNA, 25 bp, Homo sapien
gcaagtcgttttactgttcatgaag

SEQ ID NO: 1863681 - DNA, 25 bp, Homo sapien
gagagtgatgcctccccaacttagt

SEQ ID NO: 1863682 - DNA, 25 bp, Homo sapien
tgtaaaacaaggctatacttctcat

SEQ ID NO: 1863683 - DNA, 25 bp, Homo sapien
tctcttttctaatgagatacctgcc

SEQ ID NO: 1863684 - DNA, 25 bp, Homo sapien
aaatacaatgcttatggattttttg

SEQ ID NO: 1863685 - DNA, 25 bp, Homo sapien
ttttctaatgagatacctgcctgag

SEQ ID NO: 1863686 - DNA, 25 bp, Homo sapien
tctcaaagacagatgcacgaagtgc

SEQ ID NO: 1863687 - DNA, 25 bp, Homo sapien
tgtctgttgccacccctagaaaggg

SEQ ID NO: 1863688 - DNA, 25 bp, Homo sapien
tgtgagcatcttaagcctggaccca

SEQ ID NO: 1863689 - DNA, 25 bp, Homo sapien
cacgaagtgctttgactgcaggcag

SEQ ID NO: 1863690 - DNA, 25 bp, Homo sapien
gctgtgtcagtcatttcccgaagga

SEQ ID NO: 1863691 - DNA, 25 bp, Homo sapien
gagtatggccatagcaaataggtgc

SEQ ID NO: 1863692 - DNA, 25 bp, Homo sapien
gaattgaacggccagaagaatctgt

SEQ ID NO: 1863693 - DNA, 25 bp, Homo sapien
tgtaaacagtaccagccctatggct

SEQ ID NO: 1863694 - DNA, 25 bp, Homo sapien
tgtatcaatcagacaccactgaggg

SEQ ID NO: 1863695 - DNA, 25 bp, Homo sapien
catgagaagaccaacagcccggtaa

SEQ ID NO: 1863696 - DNA, 25 bp, Homo sapien
aaagtgagccaagctttcggtgcca

SEQ ID NO: 1863697 - DNA, 25 bp, Homo sapien
gtttcatcccggtgcacttgccaga

SEQ ID NO: 1863698 - DNA, 25 bp, Homo sapien
gggtggtcgcaaccaccagccgcga

SEQ ID NO: 1863699 - DNA, 25 bp, Homo sapien
tctccacccctgcagtggcgaagtg

SEQ ID NO: 1863700 - DNA, 25 bp, Homo sapien
gccggcatccgaacagagccagtct

SEQ ID NO: 1863701 - DNA, 25 bp, Homo sapien
cgaggagaggattgcacctctcccc

SEQ ID NO: 1863702 - DNA, 25 bp, Homo sapien
tcaaaaggtcacgtgaggctggcgc

SEQ ID NO: 1863703 - DNA, 25 bp, Homo sapien
caggatgcagcgatagacttggact

SEQ ID NO: 1863704 - DNA, 25 bp, Homo sapien
gaaaaccctgcgagtgtagatgatc

SEQ ID NO: 1863705 - DNA, 25 bp, Homo sapien
taatgagaaagattcccaagcccct

SEQ ID NO: 1863706 - DNA, 25 bp, Homo sapien
cagtctcagcaaccctgggtccaag

SEQ ID NO: 1863707 - DNA, 25 bp, Homo sapien
tgcagtctcagcaaccctgggtcca

SEQ ID NO: 1863708 - DNA, 25 bp, Homo sapien
gtctcagcaaccctgggtccaagtg

SEQ ID NO: 1863709 - DNA, 25 bp, Homo sapien
gcagtctcagcaaccctgggtccaa

SEQ ID NO: 1863710 - DNA, 25 bp, Homo sapien
gcattgatgcaacaagcagctttct

SEQ ID NO: 1863711 - DNA, 25 bp, Homo sapien
cagttggctatcctgcacgagtgcc

SEQ ID NO: 1863712 - DNA, 25 bp, Homo sapien
gctactctgatagatagaacactgt

SEQ ID NO: 1863713 - DNA, 25 bp, Homo sapien
cagccctcagaatgtgtaccagttg

SEQ ID NO: 1863714 - DNA, 25 bp, Homo sapien
tctcagctcactcagttgccctggc

SEQ ID NO: 1863715 - DNA, 25 bp, Homo sapien
gaggaggaagggcattgccatttat

SEQ ID NO: 1863716 - DNA, 25 bp, Homo sapien
aggaggaagggcattgccatttatt

SEQ ID NO: 1863717 - DNA, 25 bp, Homo sapien
gttgccctggctcaatcagtcttcc

SEQ ID NO: 1863718 - DNA, 25 bp, Homo sapien
tatctcatagaggtggaattggcca

SEQ ID NO: 1863719 - DNA, 25 bp, Homo sapien
agcaaagtgactgggttctctgaac

SEQ ID NO: 1863720 - DNA, 25 bp, Homo sapien
taagcgcttagggaggaggatcccc

SEQ ID NO: 1863721 - DNA, 25 bp, Homo sapien
tctctgaaccctccttatctcatag

SEQ ID NO: 1863722 - DNA, 25 bp, Homo sapien
tcatcacactgggactccttcaggg

SEQ ID NO: 1863723 - DNA, 25 bp, Homo sapien
caggcttccagctagagcacagggt

SEQ ID NO: 1863724 - DNA, 25 bp, Homo sapien
tgatcttcccttgaactaacttggg

SEQ ID NO: 1863725 - DNA, 25 bp, Homo sapien
tcatgaaatccttggaggtttgccc

SEQ ID NO: 1863726 - DNA, 25 bp, Homo sapien
agcaagtttgctgggagtgccctca

SEQ ID NO: 1863727 - DNA, 25 bp, Homo sapien
tgttgtaacatttcagagccccgga

SEQ ID NO: 1863728 - DNA, 25 bp, Homo sapien
gacttagtgaatgtgagctgcctct

SEQ ID NO: 1863729 - DNA, 25 bp, Homo sapien
tgcgtaaagtgcctaggatcgtgcc

SEQ ID NO: 1863730 - DNA, 25 bp, Homo sapien
ttatggccacccaaggaatgactgt

SEQ ID NO: 1863731 - DNA, 25 bp, Homo sapien
tctttggtaagctgggagtggcact

SEQ ID NO: 1863732 - DNA, 25 bp, Homo sapien
gaggtgatgacacatgacactgcac

SEQ ID NO: 1863733 - DNA, 25 bp, Homo sapien
gcagcaggtgcagtttggctcccta

SEQ ID NO: 1863734 - DNA, 25 bp, Homo sapien
gcggcctcttgagaagcatgcatca

SEQ ID NO: 1863735 - DNA, 25 bp, Homo sapien
tgtgtaaaatgcacttgcggcctct

SEQ ID NO: 1863736 - DNA, 25 bp, Homo sapien
gtttaatatccagacacggcccaag

SEQ ID NO: 1863737 - DNA, 25 bp, Homo sapien
tgagtcagctgatacccaaggtcac

SEQ ID NO: 1863738 - DNA, 25 bp, Homo sapien
tattagcttgccatgaacaggagtc

SEQ ID NO: 1863739 - DNA, 25 bp, Homo sapien
aaaggacacgtggtcaccctactga

SEQ ID NO: 1863740 - DNA, 25 bp, Homo sapien
cgtgctggacgctttgcctaaatca

SEQ ID NO: 1863741 - DNA, 25 bp, Homo sapien
taaaagtatgacgtcaagatggcct

SEQ ID NO: 1863742 - DNA, 25 bp, Homo sapien
gatgggttccagttcagtcagtgcc

SEQ ID NO: 1863743 - DNA, 25 bp, Homo sapien
taagactcatggctccttgggccca

SEQ ID NO: 1863744 - DNA, 25 bp, Homo sapien
aaagggcttccattccacatgtggg

SEQ ID NO: 1863745 - DNA, 25 bp, Homo sapien
ggcaatcacagctatctcgatgggt

SEQ ID NO: 1863746 - DNA, 25 bp, Homo sapien
ggtcccaggcctcacggtgaacgtg

SEQ ID NO: 1863747 - DNA, 25 bp, Homo sapien
ccctgagcagacataggagatggga

SEQ ID NO: 1863748 - DNA, 25 bp, Homo sapien
ggctttccgatgggcccctgagcag

SEQ ID NO: 1863749 - DNA, 25 bp, Homo sapien
gaacgtgttgatggggcttccatag

SEQ ID NO: 1863750 - DNA, 25 bp, Homo sapien
tctgcagctggttagccaacacgtc

SEQ ID NO: 1863751 - DNA, 25 bp, Homo sapien
tacttctgtatttgccccgacaagc

SEQ ID NO: 1863752 - DNA, 25 bp, Homo sapien
gatgtgaggtgaatatctgcagctg

SEQ ID NO: 1863753 - DNA, 25 bp, Homo sapien
ggaaaagatgctgctcatacttctg

SEQ ID NO: 1863754 - DNA, 25 bp, Homo sapien
agccgtagtcggcgctgccgggcgc

SEQ ID NO: 1863755 - DNA, 25 bp, Homo sapien
tggggcgaagccgtagtcggcgctg

SEQ ID NO: 1863756 - DNA, 25 bp, Homo sapien
gaagccgtagtcggcgctgccgggc

SEQ ID NO: 1863757 - DNA, 25 bp, Homo sapien
gcagctggggcgaagccgtagtcgg

SEQ ID NO: 1863758 - DNA, 25 bp, Homo sapien
cggcgccccgggcggcgccctccag

SEQ ID NO: 1863759 - DNA, 25 bp, Homo sapien
gcggcgccccgggcggcgccctcca

SEQ ID NO: 1863760 - DNA, 25 bp, Homo sapien
tcggcgcgtgcaggcctccgggggg

SEQ ID NO: 1863761 - DNA, 25 bp, Homo sapien
agcctcggcgcgtgcaggcctccgg

SEQ ID NO: 1863762 - DNA, 25 bp, Homo sapien
ggcgcgtgcaggcctccggggggcg

SEQ ID NO: 1863763 - DNA, 25 bp, Homo sapien
ctcggcgcgtgcaggcctccggggg

SEQ ID NO: 1863764 - DNA, 25 bp, Homo sapien
ggcctcggtgcggctccccgacgta

SEQ ID NO: 1863765 - DNA, 25 bp, Homo sapien
ccctgggcctcggtgcggctccccg

SEQ ID NO: 1863766 - DNA, 25 bp, Homo sapien
ctgggcctcggtgcggctccccgac

SEQ ID NO: 1863767 - DNA, 25 bp, Homo sapien
gcctcggtgcggctccccgacgtac

SEQ ID NO: 1863768 - DNA, 25 bp, Homo sapien
gtgggatgacctcgaagttgaactc

SEQ ID NO: 1863769 - DNA, 25 bp, Homo sapien
ccagcgttcgggagctgcctcaagt

SEQ ID NO: 1863770 - DNA, 25 bp, Homo sapien
tctggcggcccagatactggagggc

SEQ ID NO: 1863771 - DNA, 25 bp, Homo sapien
cgcttctttatgagcgagcggcccc

SEQ ID NO: 1863772 - DNA, 25 bp, Homo sapien
tggctttgtccagttgtgcctgcgg

SEQ ID NO: 1863773 - DNA, 25 bp, Homo sapien
gaggagaaggacttgggcagcgggt

SEQ ID NO: 1863774 - DNA, 25 bp, Homo sapien
ggctttgtccagttgtgcctgcggc

SEQ ID NO: 1863775 - DNA, 25 bp, Homo sapien
aaggacttgggcagcgggtggccct

SEQ ID NO: 1863776 - DNA, 25 bp, Homo sapien
tcacggagacttcctggcagagagg

SEQ ID NO: 1863777 - DNA, 25 bp, Homo sapien
tattgggtatttcggtcgtcagcgg

SEQ ID NO: 1863778 - DNA, 25 bp, Homo sapien
cagtcaccgggtgcctgaggagttc

SEQ ID NO: 1863779 - DNA, 25 bp, Homo sapien
ccttgggtaacttgggcaccacagt

SEQ ID NO: 1863780 - DNA, 25 bp, Homo sapien
tttgctggcaggctcaggagagtct

SEQ ID NO: 1863781 - DNA, 25 bp, Homo sapien
agagatcctatgctgggcttagcct

SEQ ID NO: 1863782 - DNA, 25 bp, Homo sapien
ctgtagatgctatggcagggccaga

SEQ ID NO: 1863783 - DNA, 25 bp, Homo sapien
gatctgccgcacactgggagttgga

SEQ ID NO: 1863784 - DNA, 25 bp, Homo sapien
ctgaggaatcggtcctctctcctgg

SEQ ID NO: 1863785 - DNA, 25 bp, Homo sapien
actgaggaatcggtcctctctcctg

SEQ ID NO: 1863786 - DNA, 25 bp, Homo sapien
gctgccagctcgttccgcagctttt

SEQ ID NO: 1863787 - DNA, 25 bp, Homo sapien
gagataggctgccagctcgttccgc

SEQ ID NO: 1863788 - DNA, 25 bp, Homo sapien
gtttgggtttgagagcaggagagct

SEQ ID NO: 1863789 - DNA, 25 bp, Homo sapien
tctgggttaggtcccagggcgctcc

SEQ ID NO: 1863790 - DNA, 25 bp, Homo sapien
cctgaactgggatggacgaagtcct

SEQ ID NO: 1863791 - DNA, 25 bp, Homo sapien
ctgcctgccattcagtgctacatct

SEQ ID NO: 1863792 - DNA, 25 bp, Homo sapien
ggaaagagacgagtccccactgtgt

SEQ ID NO: 1863793 - DNA, 25 bp, Homo sapien
ggtggggggatgagtagatcctggc

SEQ ID NO: 1863794 - DNA, 25 bp, Homo sapien
tggggggatgagtagatcctggcca

SEQ ID NO: 1863795 - DNA, 25 bp, Homo sapien
ggggatgagtagatcctggccatat

SEQ ID NO: 1863796 - DNA, 25 bp, Homo sapien
gggggatgagtagatcctggccata

SEQ ID NO: 1863797 - DNA, 25 bp, Homo sapien
tgtacagtcggaggttgccattgac

SEQ ID NO: 1863798 - DNA, 25 bp, Homo sapien
gctgtacagtcggaggttgccattg

SEQ ID NO: 1863799 - DNA, 25 bp, Homo sapien
agagctgtacagtcggaggttgcca

SEQ ID NO: 1863800 - DNA, 25 bp, Homo sapien
cagtcggaggttgccattgactagt

SEQ ID NO: 1863801 - DNA, 25 bp, Homo sapien
ctgtcacttctttgtctgcaaaatc

SEQ ID NO: 1863802 - DNA, 25 bp, Homo sapien
aaaatcatctggaaccgagggggtg

SEQ ID NO: 1863803 - DNA, 25 bp, Homo sapien
ctgcaaaatcatctggaaccgaggg

SEQ ID NO: 1863804 - DNA, 25 bp, Homo sapien
gtcacttctttgtctgcaaaatcat

SEQ ID NO: 1863805 - DNA, 25 bp, Homo sapien
tgacagggtgttgggacagacaact

SEQ ID NO: 1863806 - DNA, 25 bp, Homo sapien
gcgtcgtgtgggcagtgacctggac

SEQ ID NO: 1863807 - DNA, 25 bp, Homo sapien
acagacaactgtattgcctcgaggt

SEQ ID NO: 1863808 - DNA, 25 bp, Homo sapien
tcagggtcacccctcgatgacaggg

SEQ ID NO: 1863809 - DNA, 25 bp, Homo sapien
cctgaggttcttaacaatgaacttt

SEQ ID NO: 1863810 - DNA, 25 bp, Homo sapien
gcccggcctgaggttcttaacaatg

SEQ ID NO: 1863811 - DNA, 25 bp, Homo sapien
ccggcctgaggttcttaacaatgaa

SEQ ID NO: 1863812 - DNA, 25 bp, Homo sapien
ggcctgaggttcttaacaatgaact

SEQ ID NO: 1863813 - DNA, 25 bp, Homo sapien
gatggccccagtccaccccactggc

SEQ ID NO: 1863814 - DNA, 25 bp, Homo sapien
ccactgatggccccagtccacccca

SEQ ID NO: 1863815 - DNA, 25 bp, Homo sapien
actgatggccccagtccaccccact

SEQ ID NO: 1863816 - DNA, 25 bp, Homo sapien
tgatggccccagtccaccccactgg

SEQ ID NO: 1863817 - DNA, 25 bp, Homo sapien
cagactcctcctggagcctggtctg

SEQ ID NO: 1863818 - DNA, 25 bp, Homo sapien
ctcctggagcctggtctggggcact

SEQ ID NO: 1863819 - DNA, 25 bp, Homo sapien
tcctcctggagcctggtctggggca

SEQ ID NO: 1863820 - DNA, 25 bp, Homo sapien
gactcctcctggagcctggtctggg

SEQ ID NO: 1863821 - DNA, 25 bp, Homo sapien
ttttcccatacttgccacactggca

SEQ ID NO: 1863822 - DNA, 25 bp, Homo sapien
caccctggcgatggcttgattcaga

SEQ ID NO: 1863823 - DNA, 25 bp, Homo sapien
ggccagttttcccatacttgccaca

SEQ ID NO: 1863824 - DNA, 25 bp, Homo sapien
taattcctcatatgcatcaccctgg

SEQ ID NO: 1863825 - DNA, 25 bp, Homo sapien
cctcccaatatagagtatttcaggc

SEQ ID NO: 1863826 - DNA, 25 bp, Homo sapien
ccacactgctatgaatctgggtatg

SEQ ID NO: 1863827 - DNA, 25 bp, Homo sapien
gtgataggagagaatctaattaacc

SEQ ID NO: 1863828 - DNA, 25 bp, Homo sapien
gaggtgtgtcaactctgggcccaca

SEQ ID NO: 1863829 - DNA, 25 bp, Homo sapien
tcgctcactgtgttaaaccgattgt

SEQ ID NO: 1863830 - DNA, 25 bp, Homo sapien
gctgttcctgactcgctcactgtgt

SEQ ID NO: 1863831 - DNA, 25 bp, Homo sapien
tgtgttaaaccgattgtctccataa

SEQ ID NO: 1863832 - DNA, 25 bp, Homo sapien
ccgattgtctccataatagatgcca

SEQ ID NO: 1863833 - DNA, 25 bp, Homo sapien
gccaaggccctagacctgacgtgat

SEQ ID NO: 1863834 - DNA, 25 bp, Homo sapien
gatgtggctacctggacccttaaca

SEQ ID NO: 1863835 - DNA, 25 bp, Homo sapien
caccgatgttgggatctagggagcc

SEQ ID NO: 1863836 - DNA, 25 bp, Homo sapien
gcgtgttgacactaggatctcctgg

SEQ ID NO: 1863837 - DNA, 25 bp, Homo sapien
aaagccttgtctcgcctctttatgt

SEQ ID NO: 1863838 - DNA, 25 bp, Homo sapien
gccttgtctcgcctctttatgtgcc

SEQ ID NO: 1863839 - DNA, 25 bp, Homo sapien
ttgtctcgcctctttatgtgccaag

SEQ ID NO: 1863840 - DNA, 25 bp, Homo sapien
ctcaaaagccttgtctcgcctcttt

SEQ ID NO: 1863841 - DNA, 25 bp, Homo sapien
ctgtgtcacttgcaaatcatggtga

SEQ ID NO: 1863842 - DNA, 25 bp, Homo sapien
taataatgataattgggagggctgg

SEQ ID NO: 1863843 - DNA, 25 bp, Homo sapien
tctgctccaccttacttccttccac

SEQ ID NO: 1863844 - DNA, 25 bp, Homo sapien
gggctggttattgttgtgatcgtca

SEQ ID NO: 1863845 - DNA, 25 bp, Homo sapien
gggagatatcgcaaacctccggaag

SEQ ID NO: 1863846 - DNA, 25 bp, Homo sapien
tatcgcaaacctccggaagcctttc

SEQ ID NO: 1863847 - DNA, 25 bp, Homo sapien
gaacacttttgcttcagccagaatg

SEQ ID NO: 1863848 - DNA, 25 bp, Homo sapien
ggtcgggggagatatcgcaaacctc

SEQ ID NO: 1863849 - DNA, 25 bp, Homo sapien
tcctgggtgaagatccagggcggat

SEQ ID NO: 1863850 - DNA, 25 bp, Homo sapien
gattggtggcgtagagggaggtgct

SEQ ID NO: 1863851 - DNA, 25 bp, Homo sapien
agtttgctgaaggtgccctgcaccg

SEQ ID NO: 1863852 - DNA, 25 bp, Homo sapien
tgccctgcaccgtctgcttcttttt

SEQ ID NO: 1863853 - DNA, 25 bp, Homo sapien
tcaaggcgattcgtgaccaggtcag

SEQ ID NO: 1863854 - DNA, 25 bp, Homo sapien
gaaatgcgagctacctggccaggta

SEQ ID NO: 1863855 - DNA, 25 bp, Homo sapien
tggccaggtaaaaggcagccgcttg

SEQ ID NO: 1863856 - DNA, 25 bp, Homo sapien
caacacgagggacatggatggccaa

SEQ ID NO: 1863857 - DNA, 25 bp, Homo sapien
gctgtaggcctcaccagctgcgtga

SEQ ID NO: 1863858 - DNA, 25 bp, Homo sapien
tgcattgaccgcgatgagctgctca

SEQ ID NO: 1863859 - DNA, 25 bp, Homo sapien
ggtggaacagaagctccgctggtac

SEQ ID NO: 1863860 - DNA, 25 bp, Homo sapien
taggataaggatgggcccctctcac

SEQ ID NO: 1863861 - DNA, 25 bp, Homo sapien
cataggctaatggtgagacacacag

SEQ ID NO: 1863862 - DNA, 25 bp, Homo sapien
aacagtgaaggatggttcctggccc

SEQ ID NO: 1863863 - DNA, 25 bp, Homo sapien
catgctcttctggacgtggactctc

SEQ ID NO: 1863864 - DNA, 25 bp, Homo sapien
ggaccctggagcctacttgtgcgct

SEQ ID NO: 1863865 - DNA, 25 bp, Homo sapien
tgagacccctcttcaaaaagataaa

SEQ ID NO: 1863866 - DNA, 25 bp, Homo sapien
tccagttccagagggtactcagctc

SEQ ID NO: 1863867 - DNA, 25 bp, Homo sapien
ttgggtcacacagcagttagaagcc

SEQ ID NO: 1863868 - DNA, 25 bp, Homo sapien
caaaatggactatgccctgttggcc

SEQ ID NO: 1863869 - DNA, 25 bp, Homo sapien
tgtgctgccaagacataaccaaggt

SEQ ID NO: 1863870 - DNA, 25 bp, Homo sapien
cgggcaccttcaacaaactcgttca

SEQ ID NO: 1863871 - DNA, 25 bp, Homo sapien
cgtctctgctgagcgagccagctgc

SEQ ID NO: 1863872 - DNA, 25 bp, Homo sapien
gcatcttcatcacccacttgtcccg

SEQ ID NO: 1863873 - DNA, 25 bp, Homo sapien
gaacatggcacttttccgtctctgc

SEQ ID NO: 1863874 - DNA, 25 bp, Homo sapien
catgtagaagaaggggagacctggg

SEQ ID NO: 1863875 - DNA, 25 bp, Homo sapien
atgtagaagaaggggagacctgggt

SEQ ID NO: 1863876 - DNA, 25 bp, Homo sapien
ggagaggtggtcatgtagaagaagg

SEQ ID NO: 1863877 - DNA, 25 bp, Homo sapien
tcttatgccaactatcctgcagtct

SEQ ID NO: 1863878 - DNA, 25 bp, Homo sapien
tacacgtcttatgccaactatcctg

SEQ ID NO: 1863879 - DNA, 25 bp, Homo sapien
cccaggatgcgcctacacgtcttat

SEQ ID NO: 1863880 - DNA, 25 bp, Homo sapien
agacctcgctcccaggatgcgccta

SEQ ID NO: 1863881 - DNA, 25 bp, Homo sapien
caggaggaagatcctgtccacgacc

SEQ ID NO: 1863882 - DNA, 25 bp, Homo sapien
gaagatcctgtccacgacctcctcg

SEQ ID NO: 1863883 - DNA, 25 bp, Homo sapien
ggaggaagatcctgtccacgacctc

SEQ ID NO: 1863884 - DNA, 25 bp, Homo sapien
aggaagatcctgtccacgacctcct

SEQ ID NO: 1863885 - DNA, 25 bp, Homo sapien
gtttgtagctctcgccggcaggctt

SEQ ID NO: 1863886 - DNA, 25 bp, Homo sapien
tcagtttgtagctctcgccggcagg

SEQ ID NO: 1863887 - DNA, 25 bp, Homo sapien
tggccttgctcagtttgtagctctc

SEQ ID NO: 1863888 - DNA, 25 bp, Homo sapien
ttgctcagtttgtagctctcgccgg

SEQ ID NO: 1863889 - DNA, 25 bp, Homo sapien
tactccaggaagtcgatggtgttgt

SEQ ID NO: 1863890 - DNA, 25 bp, Homo sapien
ggtgcccctcagcacgagattcaga

SEQ ID NO: 1863891 - DNA, 25 bp, Homo sapien
gagattcagagctgccacgtactcc

SEQ ID NO: 1863892 - DNA, 25 bp, Homo sapien
cacaatgttgagtagctccaggcgg

SEQ ID NO: 1863893 - DNA, 25 bp, Homo sapien
catcacgtcggaagaacttgcagtc

SEQ ID NO: 1863894 - DNA, 25 bp, Homo sapien
tcttccattccaggcggtcataggg

SEQ ID NO: 1863895 - DNA, 25 bp, Homo sapien
tcatctgagaggttactggaaaccc

SEQ ID NO: 1863896 - DNA, 25 bp, Homo sapien
tggccatatttgtgcaccagccctg

SEQ ID NO: 1863897 - DNA, 25 bp, Homo sapien
catatgggagttacttgtatcattc

SEQ ID NO: 1863898 - DNA, 25 bp, Homo sapien
gaggccgcaaagagctgaaatcatg

SEQ ID NO: 1863899 - DNA, 25 bp, Homo sapien
tcatatgccgatttataagaagaga

SEQ ID NO: 1863900 - DNA, 25 bp, Homo sapien
tacttagggataaacgggcatgata

SEQ ID NO: 1863901 - DNA, 25 bp, Homo sapien
gaagtccgaaactggctctgtgccc

SEQ ID NO: 1863902 - DNA, 25 bp, Homo sapien
gaccttgggcaaatcgattcattcc

SEQ ID NO: 1863903 - DNA, 25 bp, Homo sapien
gattcagaggagacctaagagaggc

SEQ ID NO: 1863904 - DNA, 25 bp, Homo sapien
ttggaataacaaaagtctgcccctc

SEQ ID NO: 1863905 - DNA, 25 bp, Homo sapien
tgcactgactggtaccagcgacagg

SEQ ID NO: 1863906 - DNA, 25 bp, Homo sapien
tgactggtaccagcgacaggatgag

SEQ ID NO: 1863907 - DNA, 25 bp, Homo sapien
tggggacgtgcactgactggtacca

SEQ ID NO: 1863908 - DNA, 25 bp, Homo sapien
actggtaccagcgacaggatgagac

SEQ ID NO: 1863909 - DNA, 25 bp, Homo sapien
ccagggcatttgaggtatttgaggt

SEQ ID NO: 1863910 - DNA, 25 bp, Homo sapien
gctaagttctccacgcactgaggaa

SEQ ID NO: 1863911 - DNA, 25 bp, Homo sapien
tatttgaggcaaataccagggcatt

SEQ ID NO: 1863912 - DNA, 25 bp, Homo sapien
cccagtgattcagcttagaaagcta

SEQ ID NO: 1863913 - DNA, 25 bp, Homo sapien
tcagccgacagctaagagatggagg

SEQ ID NO: 1863914 - DNA, 25 bp, Homo sapien
tgtggaggaaggcgccaggtggact

SEQ ID NO: 1863915 - DNA, 25 bp, Homo sapien
acagggagcatcagccgacagctaa

SEQ ID NO: 1863916 - DNA, 25 bp, Homo sapien
agaggacacagggagcatcagccga

SEQ ID NO: 1863917 - DNA, 25 bp, Homo sapien
cattcttgtcgaaggctcggaacat

SEQ ID NO: 1863918 - DNA, 25 bp, Homo sapien
catgcataaagagtgtgccgctggg

SEQ ID NO: 1863919 - DNA, 25 bp, Homo sapien
gaagaagcgcttaaactcatgcata

SEQ ID NO: 1863920 - DNA, 25 bp, Homo sapien
tgccctctacatactgggaggcctc

SEQ ID NO: 1863921 - DNA, 25 bp, Homo sapien
tgaggagcatcagggagcaagggtc

SEQ ID NO: 1863922 - DNA, 25 bp, Homo sapien
ctgaggagcatcagggagcaagggt

SEQ ID NO: 1863923 - DNA, 25 bp, Homo sapien
gatggatctctccaactagggccct

SEQ ID NO: 1863924 - DNA, 25 bp, Homo sapien
ggatctctccaactagggccctctt

SEQ ID NO: 1863925 - DNA, 25 bp, Homo sapien
cagacgtcactgagctctgaaagct

SEQ ID NO: 1863926 - DNA, 25 bp, Homo sapien
tgaattgttttgcacatctccaggc

SEQ ID NO: 1863927 - DNA, 25 bp, Homo sapien
tgttggtttgatgcacccagcagcc

SEQ ID NO: 1863928 - DNA, 25 bp, Homo sapien
gtgaatctatccttaacctacccat

SEQ ID NO: 1863929 - DNA, 25 bp, Homo sapien
ctgctcgccttggcctcccaaagtg

SEQ ID NO: 1863930 - DNA, 25 bp, Homo sapien
tcactgtgaactccgccacccgggt

SEQ ID NO: 1863931 - DNA, 25 bp, Homo sapien
tcggctcactgtgaactccgccacc

SEQ ID NO: 1863932 - DNA, 25 bp, Homo sapien
tgctcgccttggcctcccaaagtgc

SEQ ID NO: 1863933 - DNA, 25 bp, Homo sapien
gaagtttgaggatcaccaccctagg

SEQ ID NO: 1863934 - DNA, 25 bp, Homo sapien
gcctggacatcattggaggacatca

SEQ ID NO: 1863935 - DNA, 25 bp, Homo sapien
tgaaacattcaaacgctgccgtctg

SEQ ID NO: 1863936 - DNA, 25 bp, Homo sapien
tcatgctggctgtacgcacttcaga

SEQ ID NO: 1863937 - DNA, 25 bp, Homo sapien
ttatcactggtataaaaaagaacat

SEQ ID NO: 1863938 - DNA, 25 bp, Homo sapien
aaagaacataatctagactcggtgt

SEQ ID NO: 1863939 - DNA, 25 bp, Homo sapien
ccacattcagggctacattatgaca

SEQ ID NO: 1863940 - DNA, 25 bp, Homo sapien
ttcatgggtcataatacaaatactg

SEQ ID NO: 1863941 - DNA, 25 bp, Homo sapien
tcttcagaaaatggcaggacgatca

SEQ ID NO: 1863942 - DNA, 25 bp, Homo sapien
aactgcagaaatgacacaatgtgac

SEQ ID NO: 1863943 - DNA, 25 bp, Homo sapien
cactggtgctatcagggctcgctac

SEQ ID NO: 1863944 - DNA, 25 bp, Homo sapien
tactgggtaaactgacctgcccaca

SEQ ID NO: 1863945 - DNA, 25 bp, Homo sapien
acacttgctccctagatgatctcat

SEQ ID NO: 1863946 - DNA, 25 bp, Homo sapien
tattcaactgcctactggacatcta

SEQ ID NO: 1863947 - DNA, 25 bp, Homo sapien
acacaccatttacaggctggcaggt

SEQ ID NO: 1863948 - DNA, 25 bp, Homo sapien
tcagattgcaaacttagcaaggcca

SEQ ID NO: 1863949 - DNA, 25 bp, Homo sapien
catctgtaagctgaaagggtgactg

SEQ ID NO: 1863950 - DNA, 25 bp, Homo sapien
gactgagtgggcaaataacaactct

SEQ ID NO: 1863951 - DNA, 25 bp, Homo sapien
aaattagcttctagggctgaccctg

SEQ ID NO: 1863952 - DNA, 25 bp, Homo sapien
cgtgagaggtgaacaaacctggaat

SEQ ID NO: 1863953 - DNA, 25 bp, Homo sapien
taatgagtacactgaggccctgaca

SEQ ID NO: 1863954 - DNA, 25 bp, Homo sapien
taagacagggatggttgcagacaac

SEQ ID NO: 1863955 - DNA, 25 bp, Homo sapien
tacggcagtcagtgggtttgaactc

SEQ ID NO: 1863956 - DNA, 25 bp, Homo sapien
tagggccaggaacatatgccattct

SEQ ID NO: 1863957 - DNA, 25 bp, Homo sapien
tggcctgctttgtgcgattttcaaa

SEQ ID NO: 1863958 - DNA, 25 bp, Homo sapien
caattttgggtacttaactacagtg

SEQ ID NO: 1863959 - DNA, 25 bp, Homo sapien
taactacagtgctggatgtaaagtt

SEQ ID NO: 1863960 - DNA, 25 bp, Homo sapien
gggtacgaacactccaagcacttat

SEQ ID NO: 1863961 - DNA, 25 bp, Homo sapien
gagcagttagggcagactcaaatca

SEQ ID NO: 1863962 - DNA, 25 bp, Homo sapien
ctcagctgatgagggcacgagaact

SEQ ID NO: 1863963 - DNA, 25 bp, Homo sapien
gctgatgagggcacgagaactcaat

SEQ ID NO: 1863964 - DNA, 25 bp, Homo sapien
cagactcaaatcatctcagctggaa

SEQ ID NO: 1863965 - DNA, 25 bp, Homo sapien
tcttctgatagtgtttcccagattg

SEQ ID NO: 1863966 - DNA, 25 bp, Homo sapien
tgtgttctggtaactgttctaattg

SEQ ID NO: 1863967 - DNA, 25 bp, Homo sapien
gatagtgtttcccagattggctcct

SEQ ID NO: 1863968 - DNA, 25 bp, Homo sapien
gatgtgttctggtaactgttctaat

SEQ ID NO: 1863969 - DNA, 25 bp, Homo sapien
tccatggcaaccccttcaggtaagt

SEQ ID NO: 1863970 - DNA, 25 bp, Homo sapien
ctttgttacttccatggcaacccct

SEQ ID NO: 1863971 - DNA, 25 bp, Homo sapien
ttacttccatggcaaccccttcagg

SEQ ID NO: 1863972 - DNA, 25 bp, Homo sapien
catggcaaccccttcaggtaagttt

SEQ ID NO: 1863973 - DNA, 25 bp, Homo sapien
tctgctgtgcttccagttagatgtt

SEQ ID NO: 1863974 - DNA, 25 bp, Homo sapien
agagtaaatcgctctattttccttg

SEQ ID NO: 1863975 - DNA, 25 bp, Homo sapien
agaagagtaaatcgctctattttcc

SEQ ID NO: 1863976 - DNA, 25 bp, Homo sapien
gagaagagtaaatcgctctattttc

SEQ ID NO: 1863977 - DNA, 25 bp, Homo sapien
aagagtaaatcgctctattttcctt

SEQ ID NO: 1863978 - DNA, 25 bp, Homo sapien
gccttatcgtgacctttcaccaaaa

SEQ ID NO: 1863979 - DNA, 25 bp, Homo sapien
ttatataatatgtctggttcatcag

SEQ ID NO: 1863980 - DNA, 25 bp, Homo sapien
ccaatacagccttatcgtgaccttt

SEQ ID NO: 1863981 - DNA, 25 bp, Homo sapien
ggcgcttatataatatgtctggttc

SEQ ID NO: 1863982 - DNA, 25 bp, Homo sapien
aaataaatatccaatatctattaag

SEQ ID NO: 1863983 - DNA, 25 bp, Homo sapien
tttggaacatcaacgtgtaggtttg

SEQ ID NO: 1863984 - DNA, 25 bp, Homo sapien
cctttggaacatcaacgtgtaggtt

SEQ ID NO: 1863985 - DNA, 25 bp, Homo sapien
ctttggaacatcaacgtgtaggttt

SEQ ID NO: 1863986 - DNA, 25 bp, Homo sapien
tgcccttagaagtgtttacagaaaa

SEQ ID NO: 1863987 - DNA, 25 bp, Homo sapien
attgcccttagaagtgtttacagaa

SEQ ID NO: 1863988 - DNA, 25 bp, Homo sapien
caccatttttggctgtattgccctt

SEQ ID NO: 1863989 - DNA, 25 bp, Homo sapien
ccatttttggctgtattgcccttag

SEQ ID NO: 1863990 - DNA, 25 bp, Homo sapien
cagaggcgccggcacacagcaccga

SEQ ID NO: 1863991 - DNA, 25 bp, Homo sapien
gccggcacacagcaccgaacgctgt

SEQ ID NO: 1863992 - DNA, 25 bp, Homo sapien
acacagcaccgaacgctgtccgcgc

SEQ ID NO: 1863993 - DNA, 25 bp, Homo sapien
agaggcgccggcacacagcaccgaa

SEQ ID NO: 1863994 - DNA, 25 bp, Homo sapien
ttgccggtcccgacctctcaggatt

SEQ ID NO: 1863995 - DNA, 25 bp, Homo sapien
gcccatctataggaactgtaataac

SEQ ID NO: 1863996 - DNA, 25 bp, Homo sapien
tcacttggaggggaaacaacctaga

SEQ ID NO: 1863997 - DNA, 25 bp, Homo sapien
ctttctgagaggctaatgattagaa

SEQ ID NO: 1863998 - DNA, 25 bp, Homo sapien
catctccatttgatgaatgcccatc

SEQ ID NO: 1863999 - DNA, 25 bp, Homo sapien
tatggaaggcatgcaattcatctgc

SEQ ID NO: 1864000 - DNA, 25 bp, Homo sapien
tagaacataacgaagccagaacagg

SEQ ID NO: 1864001 - DNA, 25 bp, Homo sapien
gaccaagggacttgcattccgggaa

SEQ ID NO: 1864002 - DNA, 25 bp, Homo sapien
tccgggaaaatacagttaagcacac

SEQ ID NO: 1864003 - DNA, 25 bp, Homo sapien
gtgcaacattgtactaggaagtcca

SEQ ID NO: 1864004 - DNA, 25 bp, Homo sapien
ccgagttgagacattaaccattagg

SEQ ID NO: 1864005 - DNA, 25 bp, Homo sapien
gatagataagcttccatagacccaa

SEQ ID NO: 1864006 - DNA, 25 bp, Homo sapien
gatagtaaacagtaaccgagttgag

SEQ ID NO: 1864007 - DNA, 25 bp, Homo sapien
tatgacagctgtaatggttcggcca

SEQ ID NO: 1864008 - DNA, 25 bp, Homo sapien
caaagttgatgcacactgcccaggc

SEQ ID NO: 1864009 - DNA, 25 bp, Homo sapien
taggcacacctacgtggagctggga

SEQ ID NO: 1864010 - DNA, 25 bp, Homo sapien
tgttgtcagcaaagtggcccagcgt

SEQ ID NO: 1864011 - DNA, 25 bp, Homo sapien
actgtctctaagtgacacacagggc

SEQ ID NO: 1864012 - DNA, 25 bp, Homo sapien
gatggaggccgtgggttttcactgt

SEQ ID NO: 1864013 - DNA, 25 bp, Homo sapien
ggtttcctgattaatgaagatggag

SEQ ID NO: 1864014 - DNA, 25 bp, Homo sapien
tctaaacctgaataaaatgaccact

SEQ ID NO: 1864015 - DNA, 25 bp, Homo sapien
gacgtcgtcgtcgaggatgtccaca

SEQ ID NO: 1864016 - DNA, 25 bp, Homo sapien
tagttctgcgtcaccctgaagcaag

SEQ ID NO: 1864017 - DNA, 25 bp, Homo sapien
ggccccgtagtcctctcaatcgtgg

SEQ ID NO: 1864018 - DNA, 25 bp, Homo sapien
catccaagagaagatcggtgtccac

SEQ ID NO: 1864019 - DNA, 25 bp, Homo sapien
tgggcttaatcagacgcagcatggc

SEQ ID NO: 1864020 - DNA, 25 bp, Homo sapien
taggctgctcgctgtgaactgcaac

SEQ ID NO: 1864021 - DNA, 25 bp, Homo sapien
cagttcactttggtgggtgccatca

SEQ ID NO: 1864022 - DNA, 25 bp, Homo sapien
ctttttcagaagaagcgtgcccagg

SEQ ID NO: 1864023 - DNA, 25 bp, Homo sapien
aactagggatgttttcgtggtagag

SEQ ID NO: 1864024 - DNA, 25 bp, Homo sapien
tgctgatgtaactagggatgttttc

SEQ ID NO: 1864025 - DNA, 25 bp, Homo sapien
ggatgttttcgtggtagagtttcag

SEQ ID NO: 1864026 - DNA, 25 bp, Homo sapien
gcatctctcccaggtaatactcctt

SEQ ID NO: 1864027 - DNA, 25 bp, Homo sapien
gaagatatccatccttacaaggctc

SEQ ID NO: 1864028 - DNA, 25 bp, Homo sapien
gatgtctgccttagtcacagaagta

SEQ ID NO: 1864029 - DNA, 25 bp, Homo sapien
agagccattctcaaatcattcagcg

SEQ ID NO: 1864030 - DNA, 25 bp, Homo sapien
ggtaggattaccctgtatgagccat

SEQ ID NO: 1864031 - DNA, 25 bp, Homo sapien
atagagcgactacccatcatgaact

SEQ ID NO: 1864032 - DNA, 25 bp, Homo sapien
tggcccagctcccatagagcgacta

SEQ ID NO: 1864033 - DNA, 25 bp, Homo sapien
gaactcagattcagtccccggtccc

SEQ ID NO: 1864034 - DNA, 25 bp, Homo sapien
tcccatagagcgactacccatcatg

SEQ ID NO: 1864035 - DNA, 25 bp, Homo sapien
tggggtctgtctcgccgctggtggt

SEQ ID NO: 1864036 - DNA, 25 bp, Homo sapien
ggtggtggggtctgtctcgccgctg

SEQ ID NO: 1864037 - DNA, 25 bp, Homo sapien
atggtggtggggtctgtctcgccgc

SEQ ID NO: 1864038 - DNA, 25 bp, Homo sapien
tggtggggtctgtctcgccgctggt

SEQ ID NO: 1864039 - DNA, 25 bp, Homo sapien
ttggtgcccccgtggatgcgggcat

SEQ ID NO: 1864040 - DNA, 25 bp, Homo sapien
ggatgcgggcatggccattcagtgc

SEQ ID NO: 1864041 - DNA, 25 bp, Homo sapien
cctcgggccttggtcacctggttgg

SEQ ID NO: 1864042 - DNA, 25 bp, Homo sapien
gccttggtcacctggttggtgcccc

SEQ ID NO: 1864043 - DNA, 25 bp, Homo sapien
gaaagggagtgacatgacatctaca

SEQ ID NO: 1864044 - DNA, 25 bp, Homo sapien
aagggagtgacatgacatctacagt

SEQ ID NO: 1864045 - DNA, 25 bp, Homo sapien
aaagggagtgacatgacatctacag

SEQ ID NO: 1864046 - DNA, 25 bp, Homo sapien
catagagctatgatttgaggaggca

SEQ ID NO: 1864047 - DNA, 25 bp, Homo sapien
agttcagaaccaccgctataaaggg

SEQ ID NO: 1864048 - DNA, 25 bp, Homo sapien
caaagcctccatcgttaggcaagga

SEQ ID NO: 1864049 - DNA, 25 bp, Homo sapien
tatccctgaatccaatgagtcctgg

SEQ ID NO: 1864050 - DNA, 25 bp, Homo sapien
ggaaaagctcaccaattcagactag

SEQ ID NO: 1864051 - DNA, 25 bp, Homo sapien
aatattcttgaaaagtagtagcctc

SEQ ID NO: 1864052 - DNA, 25 bp, Homo sapien
caaggccagcacagataccgtaagg

SEQ ID NO: 1864053 - DNA, 25 bp, Homo sapien
cagaccagcgggagattgagaaata

SEQ ID NO: 1864054 - DNA, 25 bp, Homo sapien
gcaggctctcctagtacatttaaat

SEQ ID NO: 1864055 - DNA, 25 bp, Homo sapien
gacagggcacaagcttgtgtgacac

SEQ ID NO: 1864056 - DNA, 25 bp, Homo sapien
caggaggtagggcaagtaattatgt

SEQ ID NO: 1864057 - DNA, 25 bp, Homo sapien
aatgtatgttttggaggccacgctc

SEQ ID NO: 1864058 - DNA, 25 bp, Homo sapien
tcacagatgaaggagcctgagggct

SEQ ID NO: 1864059 - DNA, 25 bp, Homo sapien
tttcacagatgaaggagcctgaggg

SEQ ID NO: 1864060 - DNA, 25 bp, Homo sapien
catttcacagatgaaggagcctgag

SEQ ID NO: 1864061 - DNA, 25 bp, Homo sapien
agccccacagttgggcatttcacag

SEQ ID NO: 1864062 - DNA, 25 bp, Homo sapien
gctccggggacttcggcacctcact

SEQ ID NO: 1864063 - DNA, 25 bp, Homo sapien
ggtggtggctccggggacttcggca

SEQ ID NO: 1864064 - DNA, 25 bp, Homo sapien
ggggacttcggcacctcactctctt

SEQ ID NO: 1864065 - DNA, 25 bp, Homo sapien
acttcggcacctcactctcttcttc

SEQ ID NO: 1864066 - DNA, 25 bp, Homo sapien
taaattttgatcacagccagcccca

SEQ ID NO: 1864067 - DNA, 25 bp, Homo sapien
caatggactgtgctgtaggtaactg

SEQ ID NO: 1864068 - DNA, 25 bp, Homo sapien
tacatgatcaggagagctatcccag

SEQ ID NO: 1864069 - DNA, 25 bp, Homo sapien
gccccatatatttgtcctgagtcgg

SEQ ID NO: 1864070 - DNA, 25 bp, Homo sapien
ttataaagtccctaacacaatgcct

SEQ ID NO: 1864071 - DNA, 25 bp, Homo sapien
tcttaactacacaagggaatcaggc

SEQ ID NO: 1864072 - DNA, 25 bp, Homo sapien
gaatcaggcttaacaacacgctcag

SEQ ID NO: 1864073 - DNA, 25 bp, Homo sapien
agctgtgtgactatggccaatttgc

SEQ ID NO: 1864074 - DNA, 25 bp, Homo sapien
gcacaagcaacaacttagcagcttc

SEQ ID NO: 1864075 - DNA, 25 bp, Homo sapien
acaagcaacaacttagcagcttcac

SEQ ID NO: 1864076 - DNA, 25 bp, Homo sapien
cagcacaagcaacaacttagcagct

SEQ ID NO: 1864077 - DNA, 25 bp, Homo sapien
cccagcacaagcaacaacttagcag

SEQ ID NO: 1864078 - DNA, 25 bp, Homo sapien
cgcactgagccaccgtcttggactt

SEQ ID NO: 1864079 - DNA, 25 bp, Homo sapien
cacacaatcgtcgatgatttctgcc

SEQ ID NO: 1864080 - DNA, 25 bp, Homo sapien
tgccaggcgtgtccggtgtttccgc

SEQ ID NO: 1864081 - DNA, 25 bp, Homo sapien
cagccgcatgatctttttccacgtg

SEQ ID NO: 1864082 - DNA, 25 bp, Homo sapien
aaaataaagtctttgctgtaagtgg

SEQ ID NO: 1864083 - DNA, 25 bp, Homo sapien
taagtggctagtgctttgttaaaca

SEQ ID NO: 1864084 - DNA, 25 bp, Homo sapien
ataaagtctttgctgtaagtggcta

SEQ ID NO: 1864085 - DNA, 25 bp, Homo sapien
gctgtaagtggctagtgctttgtta

SEQ ID NO: 1864086 - DNA, 25 bp, Homo sapien
ttggctccagactcagaatatgctc

SEQ ID NO: 1864087 - DNA, 25 bp, Homo sapien
aagggagtcatcttccatgggttcc

SEQ ID NO: 1864088 - DNA, 25 bp, Homo sapien
ggtcagacatctacaaaagcagggc

SEQ ID NO: 1864089 - DNA, 25 bp, Homo sapien
gaatatgctctccacagctgggcgg

SEQ ID NO: 1864090 - DNA, 25 bp, Homo sapien
tttctggccccaaaagcagtgttca

SEQ ID NO: 1864091 - DNA, 25 bp, Homo sapien
cactggtgatgtaacttcctggccc

SEQ ID NO: 1864092 - DNA, 25 bp, Homo sapien
cgatttctgagaagcatgtcccttc

SEQ ID NO: 1864093 - DNA, 25 bp, Homo sapien
tgcttgccagatgcaactccactgg

SEQ ID NO: 1864094 - DNA, 25 bp, Homo sapien
gcattctgtacaactcatcctgaga

SEQ ID NO: 1864095 - DNA, 25 bp, Homo sapien
tcttaagacagtaagaggtggctct

SEQ ID NO: 1864096 - DNA, 25 bp, Homo sapien
tcctggtggtttttaagactgctgc

SEQ ID NO: 1864097 - DNA, 25 bp, Homo sapien
tggcttcctgattccggagtgtgca

SEQ ID NO: 1864098 - DNA, 25 bp, Homo sapien
tgctaattgggaaccactgcacaca

SEQ ID NO: 1864099 - DNA, 25 bp, Homo sapien
gctcagggccaataagtagtctcag

SEQ ID NO: 1864100 - DNA, 25 bp, Homo sapien
tattaactcagtactgcccttgagg

SEQ ID NO: 1864101 - DNA, 25 bp, Homo sapien
ttcatgtggccttggcaagcagcca

SEQ ID NO: 1864102 - DNA, 25 bp, Homo sapien
aatgaacggcttggagtgggtggga

SEQ ID NO: 1864103 - DNA, 25 bp, Homo sapien
gtgattttcgtaggcctgtgtcttt

SEQ ID NO: 1864104 - DNA, 25 bp, Homo sapien
gaagtgattttcgtaggcctgtgtc

SEQ ID NO: 1864105 - DNA, 25 bp, Homo sapien
cccaaacttacagcctcccgccctg

SEQ ID NO: 1864106 - DNA, 25 bp, Homo sapien
tggaaaacgtatagctaggtcccca

SEQ ID NO: 1864107 - DNA, 25 bp, Homo sapien
tattggcctagttccaggagtgacc

SEQ ID NO: 1864108 - DNA, 25 bp, Homo sapien
caaatgttggtggagaaagcaagcc

SEQ ID NO: 1864109 - DNA, 25 bp, Homo sapien
tgggctgcccggactaaagattgga

SEQ ID NO: 1864110 - DNA, 25 bp, Homo sapien
gggcaggagcttatgccaacagaca

SEQ ID NO: 1864111 - DNA, 25 bp, Homo sapien
aacccatggctactgattccaaaag

SEQ ID NO: 1864112 - DNA, 25 bp, Homo sapien
tggtctcatgcactcgtctccttgc

SEQ ID NO: 1864113 - DNA, 25 bp, Homo sapien
ggtgcggtagaatctaaacccatgg

SEQ ID NO: 1864114 - DNA, 25 bp, Homo sapien
tgcaagcagcccgtcgtcaggaggc

SEQ ID NO: 1864115 - DNA, 25 bp, Homo sapien
ccggtgttatccattgctagaaagt

SEQ ID NO: 1864116 - DNA, 25 bp, Homo sapien
tgacacaaccgaacatgcaagcagc

SEQ ID NO: 1864117 - DNA, 25 bp, Homo sapien
tagaaagtgacacaaccgaacatgc

SEQ ID NO: 1864118 - DNA, 25 bp, Homo sapien
catagtggtaatttgctaaaggatg

SEQ ID NO: 1864119 - DNA, 25 bp, Homo sapien
ggtaatttgctaaaggatgacattt

SEQ ID NO: 1864120 - DNA, 25 bp, Homo sapien
attttaacctgacaggcttccgcag

SEQ ID NO: 1864121 - DNA, 25 bp, Homo sapien
gcttccgcagtagcagcatttccag

SEQ ID NO: 1864122 - DNA, 25 bp, Homo sapien
tactaccatgtatttatataaaggg

SEQ ID NO: 1864123 - DNA, 25 bp, Homo sapien
tgcaggaagctagatatactaccat

SEQ ID NO: 1864124 - DNA, 25 bp, Homo sapien
aaaatgcaggaagctagatatacta

SEQ ID NO: 1864125 - DNA, 25 bp, Homo sapien
ggaagctagatatactaccatgtat

SEQ ID NO: 1864126 - DNA, 25 bp, Homo sapien
tgagcaggtcaactgttagctctga

SEQ ID NO: 1864127 - DNA, 25 bp, Homo sapien
aggtcaactgttagctctgattttg

SEQ ID NO: 1864128 - DNA, 25 bp, Homo sapien
gcaggtcaactgttagctctgattt

SEQ ID NO: 1864129 - DNA, 25 bp, Homo sapien
aggttgagcaggtcaactgttagct

SEQ ID NO: 1864130 - DNA, 25 bp, Homo sapien
ggctgatttccatagtagggaagaa

SEQ ID NO: 1864131 - DNA, 25 bp, Homo sapien
aacatcaaactttggctgatttcca

SEQ ID NO: 1864132 - DNA, 25 bp, Homo sapien
ttctataaacatcaaactttggctg

SEQ ID NO: 1864133 - DNA, 25 bp, Homo sapien
aaagagttctataaacatcaaactt

SEQ ID NO: 1864134 - DNA, 25 bp, Homo sapien
taactttaggaacagatgtggaaac

SEQ ID NO: 1864135 - DNA, 25 bp, Homo sapien
gctgattggtcatcatgcgccgatt

SEQ ID NO: 1864136 - DNA, 25 bp, Homo sapien
tcctaggacagatgtacccacagtt

SEQ ID NO: 1864137 - DNA, 25 bp, Homo sapien
ctacccaccgagagaaggaataggg

SEQ ID NO: 1864138 - DNA, 25 bp, Homo sapien
tcacctttggcctcaaacagagagt

SEQ ID NO: 1864139 - DNA, 25 bp, Homo sapien
atcacctttggcctcaaacagagag

SEQ ID NO: 1864140 - DNA, 25 bp, Homo sapien
cacatcacctttggcctcaaacaga

SEQ ID NO: 1864141 - DNA, 25 bp, Homo sapien
catcacatcacctttggcctcaaac

SEQ ID NO: 1864142 - DNA, 25 bp, Homo sapien
ggaacagcacaaattcagaagattc

SEQ ID NO: 1864143 - DNA, 25 bp, Homo sapien
ctctttgctggaggtcatggttttc

SEQ ID NO: 1864144 - DNA, 25 bp, Homo sapien
tttgctggaggtcatggttttctag

SEQ ID NO: 1864145 - DNA, 25 bp, Homo sapien
ggtcatggttttctagttctggcca

SEQ ID NO: 1864146 - DNA, 25 bp, Homo sapien
tcatggttttctagttctggccagg

SEQ ID NO: 1864147 - DNA, 25 bp, Homo sapien
gaatctcaagccaatgttgatgcgt

SEQ ID NO: 1864148 - DNA, 25 bp, Homo sapien
gatttctgcttggaatctcaagcca

SEQ ID NO: 1864149 - DNA, 25 bp, Homo sapien
cttggaatctcaagccaatgttgat

SEQ ID NO: 1864150 - DNA, 25 bp, Homo sapien
cagggatttctgcttggaatctcaa

SEQ ID NO: 1864151 - DNA, 25 bp, Homo sapien
cgtcacgttgctgccatcgatgctg

SEQ ID NO: 1864152 - DNA, 25 bp, Homo sapien
cctggggtgaccgtcacgttgctgc

SEQ ID NO: 1864153 - DNA, 25 bp, Homo sapien
gggtgaccgtcacgttgctgccatc

SEQ ID NO: 1864154 - DNA, 25 bp, Homo sapien
tgaccgtcacgttgctgccatcgat

SEQ ID NO: 1864155 - DNA, 25 bp, Homo sapien
cagcagcacccgtggtgtgggcgtc

SEQ ID NO: 1864156 - DNA, 25 bp, Homo sapien
gcgcagctggctctggtacagggtg

SEQ ID NO: 1864157 - DNA, 25 bp, Homo sapien
ttcttctcctgcacggtcttgaggg

SEQ ID NO: 1864158 - DNA, 25 bp, Homo sapien
gggctcctcggctttgggcacactc

SEQ ID NO: 1864159 - DNA, 25 bp, Homo sapien
ctgggtcactttcagcaggggggga

SEQ ID NO: 1864160 - DNA, 25 bp, Homo sapien
ccttcgatgacctctaagggccctt

SEQ ID NO: 1864161 - DNA, 25 bp, Homo sapien
tctaagggcccttccatgtgctcac

SEQ ID NO: 1864162 - DNA, 25 bp, Homo sapien
cagggggggagagccttcgatgacc

SEQ ID NO: 1864163 - DNA, 25 bp, Homo sapien
gggtgccctctcaggccctgcaggc

SEQ ID NO: 1864164 - DNA, 25 bp, Homo sapien
ttctgggcagtctggggtgccctct

SEQ ID NO: 1864165 - DNA, 25 bp, Homo sapien
gtctggggtgccctctcaggccctg

SEQ ID NO: 1864166 - DNA, 25 bp, Homo sapien
tctgggcagtctggggtgccctctc

SEQ ID NO: 1864167 - DNA, 25 bp, Homo sapien
ccatcctggcctctaggagaggagt

SEQ ID NO: 1864168 - DNA, 25 bp, Homo sapien
tgccatcctggcctctaggagagga

SEQ ID NO: 1864169 - DNA, 25 bp, Homo sapien
gccatcctggcctctaggagaggag

SEQ ID NO: 1864170 - DNA, 25 bp, Homo sapien
gcaggcgtgcggggggcagcccctt

SEQ ID NO: 1864171 - DNA, 25 bp, Homo sapien
agcaggcgtgcggggggcagcccct

SEQ ID NO: 1864172 - DNA, 25 bp, Homo sapien
aggcgtgcggggggcagccccttgg

SEQ ID NO: 1864173 - DNA, 25 bp, Homo sapien
caggcgtgcggggggcagccccttg

SEQ ID NO: 1864174 - DNA, 25 bp, Homo sapien
gagcacaggcatctcgtcgtccgac

SEQ ID NO: 1864175 - DNA, 25 bp, Homo sapien
tgctgttggtgaacccctgagagct

SEQ ID NO: 1864176 - DNA, 25 bp, Homo sapien
tccgacatcgagctggctggcttgt

SEQ ID NO: 1864177 - DNA, 25 bp, Homo sapien
gggcggcaacggtgctgttggtgaa

SEQ ID NO: 1864178 - DNA, 25 bp, Homo sapien
acacgggcatgaccataggcgtgag

SEQ ID NO: 1864179 - DNA, 25 bp, Homo sapien
acagacacgggcatgaccataggcg

SEQ ID NO: 1864180 - DNA, 25 bp, Homo sapien
ggcatgaccataggcgtgaggcttt

SEQ ID NO: 1864181 - DNA, 25 bp, Homo sapien
cagacacgggcatgaccataggcgt

SEQ ID NO: 1864182 - DNA, 25 bp, Homo sapien
gaggcggcaggaccttctctccttc

SEQ ID NO: 1864183 - DNA, 25 bp, Homo sapien
gctgaggcggcaggaccttctctcc

SEQ ID NO: 1864184 - DNA, 25 bp, Homo sapien
tcgggagggagctgtggtggcggcg

SEQ ID NO: 1864185 - DNA, 25 bp, Homo sapien
gcctcgggagggagctgtggtggcg

SEQ ID NO: 1864186 - DNA, 25 bp, Homo sapien
ccagagggtatttaaggatctttgg

SEQ ID NO: 1864187 - DNA, 25 bp, Homo sapien
gatctttggatgttgagctgaacac

SEQ ID NO: 1864188 - DNA, 25 bp, Homo sapien
tctttggatgttgagctgaacacca

SEQ ID NO: 1864189 - DNA, 25 bp, Homo sapien
ataatccagagggtatttaaggatc

SEQ ID NO: 1864190 - DNA, 25 bp, Homo sapien
tcattcccccgtgggaccgcatgtg

SEQ ID NO: 1864191 - DNA, 25 bp, Homo sapien
ccccgtgggaccgcatgtggccatt

SEQ ID NO: 1864192 - DNA, 25 bp, Homo sapien
cgtgggaccgcatgtggccattcag

SEQ ID NO: 1864193 - DNA, 25 bp, Homo sapien
attcccccgtgggaccgcatgtggc

SEQ ID NO: 1864194 - DNA, 25 bp, Homo sapien
ctgctccccaaacgctcctttgggt

SEQ ID NO: 1864195 - DNA, 25 bp, Homo sapien
caaaagcctccccacttagagacat

SEQ ID NO: 1864196 - DNA, 25 bp, Homo sapien
gcagccgccgtactgcacgcttcag

SEQ ID NO: 1864197 - DNA, 25 bp, Homo sapien
agtttatcaggtttggctaaatctt

SEQ ID NO: 1864198 - DNA, 25 bp, Homo sapien
acttagagacatttgtgcaagttcc

SEQ ID NO: 1864199 - DNA, 25 bp, Homo sapien
tggctgggctctcccatcaggtagg

SEQ ID NO: 1864200 - DNA, 25 bp, Homo sapien
gggctctcccatcaggtaggtgcat

SEQ ID NO: 1864201 - DNA, 25 bp, Homo sapien
cctggctgggctctcccatcaggta

SEQ ID NO: 1864202 - DNA, 25 bp, Homo sapien
ctgggctctcccatcaggtaggtgc

SEQ ID NO: 1864203 - DNA, 25 bp, Homo sapien
aaggctctcagttaccactggttct

SEQ ID NO: 1864204 - DNA, 25 bp, Homo sapien
tgactgtatgccttggaataagcca

SEQ ID NO: 1864205 - DNA, 25 bp, Homo sapien
taaaaagccttagccaaatcatctc

SEQ ID NO: 1864206 - DNA, 25 bp, Homo sapien
gaagttcatctctggccttcaacct

SEQ ID NO: 1864207 - DNA, 25 bp, Homo sapien
agcacactgggtattgagagaaact

SEQ ID NO: 1864208 - DNA, 25 bp, Homo sapien
gcacactgggtattgagagaaactt

SEQ ID NO: 1864209 - DNA, 25 bp, Homo sapien
cacactgggtattgagagaaacttc

SEQ ID NO: 1864210 - DNA, 25 bp, Homo sapien
tgctgatgctgaggccccatgttgt

SEQ ID NO: 1864211 - DNA, 25 bp, Homo sapien
ccccatgttgttgaggtggatccca

SEQ ID NO: 1864212 - DNA, 25 bp, Homo sapien
tgaggccccatgttgttgaggtgga

SEQ ID NO: 1864213 - DNA, 25 bp, Homo sapien
gctgatgctgaggccccatgttgtt

SEQ ID NO: 1864214 - DNA, 25 bp, Homo sapien
ggcgatgggggagggtgctgctgac

SEQ ID NO: 1864215 - DNA, 25 bp, Homo sapien
ggggcgatgggggagggtgctgctg

SEQ ID NO: 1864216 - DNA, 25 bp, Homo sapien
ctgggggataggagggggcgatggg

SEQ ID NO: 1864217 - DNA, 25 bp, Homo sapien
agggggcgatgggggagggtgctgc

SEQ ID NO: 1864218 - DNA, 25 bp, Homo sapien
tagtagtactgggacatggagccca

SEQ ID NO: 1864219 - DNA, 25 bp, Homo sapien
tctgtcactagagtaggtcttcagc

SEQ ID NO: 1864220 - DNA, 25 bp, Homo sapien
ggtcagatctgagctcgctgggtct

SEQ ID NO: 1864221 - DNA, 25 bp, Homo sapien
gggtccctgtgataagaaggaggct

SEQ ID NO: 1864222 - DNA, 25 bp, Homo sapien
catgggttggggctgataatactga

SEQ ID NO: 1864223 - DNA, 25 bp, Homo sapien
ctgcatcatgggttggggctgataa

SEQ ID NO: 1864224 - DNA, 25 bp, Homo sapien
gttggggctgataatactgaggtat

SEQ ID NO: 1864225 - DNA, 25 bp, Homo sapien
gcatcatgggttggggctgataata

SEQ ID NO: 1864226 - DNA, 25 bp, Homo sapien
agatacgctgttgcccggcttgctg

SEQ ID NO: 1864227 - DNA, 25 bp, Homo sapien
ctgtgatgggcgaatttgttgcggc

SEQ ID NO: 1864228 - DNA, 25 bp, Homo sapien
gctgcgtctgtatttcttgcatgga

SEQ ID NO: 1864229 - DNA, 25 bp, Homo sapien
tcttgcatggagatacgctgttgcc

SEQ ID NO: 1864230 - DNA, 25 bp, Homo sapien
catgtgctgtgacagcatctgtggg

SEQ ID NO: 1864231 - DNA, 25 bp, Homo sapien
tgacagcatctgtggggcctgcagt

SEQ ID NO: 1864232 - DNA, 25 bp, Homo sapien
catctgttgcatgtgctgtgacagc

SEQ ID NO: 1864233 - DNA, 25 bp, Homo sapien
agtggctgtcctccctgcactggca

SEQ ID NO: 1864234 - DNA, 25 bp, Homo sapien
cataatacaggtgcccttgggtagg

SEQ ID NO: 1864235 - DNA, 25 bp, Homo sapien
tggtagtcataatacaggtgccctt

SEQ ID NO: 1864236 - DNA, 25 bp, Homo sapien
gctggtagtcataatacaggtgccc

SEQ ID NO: 1864237 - DNA, 25 bp, Homo sapien
tagtcataatacaggtgcccttggg

SEQ ID NO: 1864238 - DNA, 25 bp, Homo sapien
gagctggtttggacagcccaccagt

SEQ ID NO: 1864239 - DNA, 25 bp, Homo sapien
tgaagagctggtttggacagcccac

SEQ ID NO: 1864240 - DNA, 25 bp, Homo sapien
ctgaagagctggtttggacagccca

SEQ ID NO: 1864241 - DNA, 25 bp, Homo sapien
gctggtttggacagcccaccagtga

SEQ ID NO: 1864242 - DNA, 25 bp, Homo sapien
gctggtagcgggaagggatagccgg

SEQ ID NO: 1864243 - DNA, 25 bp, Homo sapien
ggcggagagcactgtcaggggctcc

SEQ ID NO: 1864244 - DNA, 25 bp, Homo sapien
ctgctggtagcgggaagggatagcc

SEQ ID NO: 1864245 - DNA, 25 bp, Homo sapien
cgggaagggatagccggtgctgggg

SEQ ID NO: 1864246 - DNA, 25 bp, Homo sapien
ggagtaggtgtattggtagccatca

SEQ ID NO: 1864247 - DNA, 25 bp, Homo sapien
taagacaccgctggtaagcttctgg

SEQ ID NO: 1864248 - DNA, 25 bp, Homo sapien
gaaagagtccagcttgtgtaagaca

SEQ ID NO: 1864249 - DNA, 25 bp, Homo sapien
tttggttggcaaacacctgggtgaa

SEQ ID NO: 1864250 - DNA, 25 bp, Homo sapien
ggtttccacgtagctggacatggtt

SEQ ID NO: 1864251 - DNA, 25 bp, Homo sapien
ccacatcatgtttgagttggccagg

SEQ ID NO: 1864252 - DNA, 25 bp, Homo sapien
gtttttggagccaacaggcaagccc

SEQ ID NO: 1864253 - DNA, 25 bp, Homo sapien
cagaccatcccgtgtatcttgaggg

SEQ ID NO: 1864254 - DNA, 25 bp, Homo sapien
taccatgggccacatggttggtctt

SEQ ID NO: 1864255 - DNA, 25 bp, Homo sapien
ccacatggttggtcttgtacagttg

SEQ ID NO: 1864256 - DNA, 25 bp, Homo sapien
aaaaggttctcactaccatgggcca

SEQ ID NO: 1864257 - DNA, 25 bp, Homo sapien
gtggctgttggtagaaaaggttctc

SEQ ID NO: 1864258 - DNA, 25 bp, Homo sapien
tgccttggttgtgaacgtccagcca

SEQ ID NO: 1864259 - DNA, 25 bp, Homo sapien
tgaggtatagaccacacagcactgt

SEQ ID NO: 1864260 - DNA, 25 bp, Homo sapien
tgttggcctgtaccactcatgtgca

SEQ ID NO: 1864261 - DNA, 25 bp, Homo sapien
catgtctgtgaacgtggctggagcc

SEQ ID NO: 1864262 - DNA, 25 bp, Homo sapien
gatttcatgtctctctcctatggcc

SEQ ID NO: 1864263 - DNA, 25 bp, Homo sapien
ccgactttgagcactattgatttca

SEQ ID NO: 1864264 - DNA, 25 bp, Homo sapien
actttgagcactattgatttcatgt

SEQ ID NO: 1864265 - DNA, 25 bp, Homo sapien
ttgagcactattgatttcatgtctc

SEQ ID NO: 1864266 - DNA, 25 bp, Homo sapien
taaagacagttccacctgcgtgtga

SEQ ID NO: 1864267 - DNA, 25 bp, Homo sapien
tgtgtacaggtcaggcacatgctcc

SEQ ID NO: 1864268 - DNA, 25 bp, Homo sapien
gatgtctctgaactatgccgtctga

SEQ ID NO: 1864269 - DNA, 25 bp, Homo sapien
acagcccgtgactacatttgtggga

SEQ ID NO: 1864270 - DNA, 25 bp, Homo sapien
tcaaactaggactgcttctaaggag

SEQ ID NO: 1864271 - DNA, 25 bp, Homo sapien
tgcctcatggtcagcagaatacctg

SEQ ID NO: 1864272 - DNA, 25 bp, Homo sapien
tgcttctaaggagtgcctcatggtc

SEQ ID NO: 1864273 - DNA, 25 bp, Homo sapien
gcctcatggtcagcagaatacctgg

SEQ ID NO: 1864274 - DNA, 25 bp, Homo sapien
tcatggaaacaccaagagcactgct

SEQ ID NO: 1864275 - DNA, 25 bp, Homo sapien
gactcgagcagtctcattgcctggg

SEQ ID NO: 1864276 - DNA, 25 bp, Homo sapien
ggttcaaatctcaacgttccactgg

SEQ ID NO: 1864277 - DNA, 25 bp, Homo sapien
tggcatagtgagtccctccagcagg

SEQ ID NO: 1864278 - DNA, 25 bp, Homo sapien
tgctactagaacgaggccagagcct

SEQ ID NO: 1864279 - DNA, 25 bp, Homo sapien
gataagctatggaagctccgaggga

SEQ ID NO: 1864280 - DNA, 25 bp, Homo sapien
ccacatggcttgagtgttgtccaaa

SEQ ID NO: 1864281 - DNA, 25 bp, Homo sapien
tggtagaagccaactcaagggagat

SEQ ID NO: 1864282 - DNA, 25 bp, Homo sapien
atttaactccatgcaaacaggcttg

SEQ ID NO: 1864283 - DNA, 25 bp, Homo sapien
caggacagaggctgttaatagactt

SEQ ID NO: 1864284 - DNA, 25 bp, Homo sapien
taactccatgcaaacaggcttggcc

SEQ ID NO: 1864285 - DNA, 25 bp, Homo sapien
gcatttaactccatgcaaacaggct

SEQ ID NO: 1864286 - DNA, 25 bp, Homo sapien
cctgcaagaacttcagatttgggaa

SEQ ID NO: 1864287 - DNA, 25 bp, Homo sapien
agtggcagaaccagacctgcaagaa

SEQ ID NO: 1864288 - DNA, 25 bp, Homo sapien
gaaacaaggcattatgaataccagc

SEQ ID NO: 1864289 - DNA, 25 bp, Homo sapien
gataattccctaagataaagtgcca

SEQ ID NO: 1864290 - DNA, 25 bp, Homo sapien
tgacctccgcagatggctgagttgg

SEQ ID NO: 1864291 - DNA, 25 bp, Homo sapien
tgcggtcggccaatcatgctgcttt

SEQ ID NO: 1864292 - DNA, 25 bp, Homo sapien
cttgacctccgcagatggctgagtt

SEQ ID NO: 1864293 - DNA, 25 bp, Homo sapien
gcttctcctgcggtcggccaatcat

SEQ ID NO: 1864294 - DNA, 25 bp, Homo sapien
ttccgaagattcaaggcagcactgg

SEQ ID NO: 1864295 - DNA, 25 bp, Homo sapien
gcttacaaaacgcacaacaggcatg

SEQ ID NO: 1864296 - DNA, 25 bp, Homo sapien
tgtccaaaagagagctacggagtct

SEQ ID NO: 1864297 - DNA, 25 bp, Homo sapien
tgggagacagacacgaaataggttc

SEQ ID NO: 1864298 - DNA, 25 bp, Homo sapien
gacctcttgtggctcataactgaag

SEQ ID NO: 1864299 - DNA, 25 bp, Homo sapien
tactggccgagtgcctcaatgctag

SEQ ID NO: 1864300 - DNA, 25 bp, Homo sapien
gagtatgagtctaccctgatcgaac

SEQ ID NO: 1864301 - DNA, 25 bp, Homo sapien
gttttacaacaagaagccaagctca

SEQ ID NO: 1864302 - DNA, 25 bp, Homo sapien
gagagaaatttaccagcatccaccc

SEQ ID NO: 1864303 - DNA, 25 bp, Homo sapien
ctgagagaaatttaccagcatccac

SEQ ID NO: 1864304 - DNA, 25 bp, Homo sapien
agagaaatttaccagcatccacccc

SEQ ID NO: 1864305 - DNA, 25 bp, Homo sapien
gaaatttaccagcatccaccccagt

SEQ ID NO: 1864306 - DNA, 25 bp, Homo sapien
ggtggtccaactcgtcttgtcctca

SEQ ID NO: 1864307 - DNA, 25 bp, Homo sapien
tcaggtggtccaactcgtcttgtcc

SEQ ID NO: 1864308 - DNA, 25 bp, Homo sapien
caggtggtccaactcgtcttgtcct

SEQ ID NO: 1864309 - DNA, 25 bp, Homo sapien
gtggtccaactcgtcttgtcctcac

SEQ ID NO: 1864310 - DNA, 25 bp, Homo sapien
gcttgctgagatgacagccatgctc

SEQ ID NO: 1864311 - DNA, 25 bp, Homo sapien
tcccacttaggctcaattggtcaga

SEQ ID NO: 1864312 - DNA, 25 bp, Homo sapien
gtcagaacggacttggacaggaaca

SEQ ID NO: 1864313 - DNA, 25 bp, Homo sapien
gcttggttcccatggtcctagtggc

SEQ ID NO: 1864314 - DNA, 25 bp, Homo sapien
aacaatctaagtgtgcaaaacacga

SEQ ID NO: 1864315 - DNA, 25 bp, Homo sapien
ggaagctgtagggaggaacaatcta

SEQ ID NO: 1864316 - DNA, 25 bp, Homo sapien
acacgagactgggtaaatagaaggc

SEQ ID NO: 1864317 - DNA, 25 bp, Homo sapien
gaatggaattcgacaaagctcctcc

SEQ ID NO: 1864318 - DNA, 25 bp, Homo sapien
tgccttctgggttcaaacgattccc

SEQ ID NO: 1864319 - DNA, 25 bp, Homo sapien
tctgccttctgggttcaaacgattc

SEQ ID NO: 1864320 - DNA, 25 bp, Homo sapien
ctctgccttctgggttcaaacgatt

SEQ ID NO: 1864321 - DNA, 25 bp, Homo sapien
cttctgggttcaaacgattcccctg

SEQ ID NO: 1864322 - DNA, 25 bp, Homo sapien
cagatgctgggggatagcatgaggt

SEQ ID NO: 1864323 - DNA, 25 bp, Homo sapien
ttttaccaatagctcgaggtagggc

SEQ ID NO: 1864324 - DNA, 25 bp, Homo sapien
gctgggggatagcatgaggtattcc

SEQ ID NO: 1864325 - DNA, 25 bp, Homo sapien
ttaccaatagctcgaggtagggcat

SEQ ID NO: 1864326 - DNA, 25 bp, Homo sapien
gaagaacactccataactcagagaa

SEQ ID NO: 1864327 - DNA, 25 bp, Homo sapien
tacaggtctaccctcaagctaaaca

SEQ ID NO: 1864328 - DNA, 25 bp, Homo sapien
tggctcctctttacaggtctaccct

SEQ ID NO: 1864329 - DNA, 25 bp, Homo sapien
aatttcatccttctgttagaagaac

SEQ ID NO: 1864330 - DNA, 25 bp, Homo sapien
gaaacctgtggctccataagctacc

SEQ ID NO: 1864331 - DNA, 25 bp, Homo sapien
cagtgaaccatttcctacctggtgt

SEQ ID NO: 1864332 - DNA, 25 bp, Homo sapien
tgaggccggaatctacccctagatt

SEQ ID NO: 1864333 - DNA, 25 bp, Homo sapien
tagattgttcaaccacataggccaa

SEQ ID NO: 1864334 - DNA, 25 bp, Homo sapien
gactggtatagatcctccctctggg

SEQ ID NO: 1864335 - DNA, 25 bp, Homo sapien
tatgaagctattcctgcattccagg

SEQ ID NO: 1864336 - DNA, 25 bp, Homo sapien
tcttttttctcaatcccgcaacagt

SEQ ID NO: 1864337 - DNA, 25 bp, Homo sapien
gcttgcttgaaagaaggatctggaa

SEQ ID NO: 1864338 - DNA, 25 bp, Homo sapien
gggtgtatttccctacagttgcaca

SEQ ID NO: 1864339 - DNA, 25 bp, Homo sapien
tactagcacttaccggcaacatttc

SEQ ID NO: 1864340 - DNA, 25 bp, Homo sapien
taagttaatgactgcagggtaaacg

SEQ ID NO: 1864341 - DNA, 25 bp, Homo sapien
tacaagtactaacaccagcaagtga

SEQ ID NO: 1864342 - DNA, 25 bp, Homo sapien
gaatgtagtcttcaaagctcctggc

SEQ ID NO: 1864343 - DNA, 25 bp, Homo sapien
gctcctggccactatggaacactgt

SEQ ID NO: 1864344 - DNA, 25 bp, Homo sapien
gaaattctactgaagtggatgccca

SEQ ID NO: 1864345 - DNA, 25 bp, Homo sapien
taacaacctacagaagacggaagtc

SEQ ID NO: 1864346 - DNA, 25 bp, Homo sapien
catgaattaatgagtggccttgggc

SEQ ID NO: 1864347 - DNA, 25 bp, Homo sapien
tcacagccggcacatctacgtagct

SEQ ID NO: 1864348 - DNA, 25 bp, Homo sapien
tacgtagctgacctcacaatgcaaa

SEQ ID NO: 1864349 - DNA, 25 bp, Homo sapien
aaaggactgggatctccgttgctcc

SEQ ID NO: 1864350 - DNA, 25 bp, Homo sapien
cttgaaacagcttgtgggaggcccg

SEQ ID NO: 1864351 - DNA, 25 bp, Homo sapien
gaggcccggcagaggaatcatagct

SEQ ID NO: 1864352 - DNA, 25 bp, Homo sapien
gaaattaatggatgtccaggcccag

SEQ ID NO: 1864353 - DNA, 25 bp, Homo sapien
tgataaaaacgcgaggaatgcccca

SEQ ID NO: 1864354 - DNA, 25 bp, Homo sapien
gctttgctgtaaaatattccaacac

SEQ ID NO: 1864355 - DNA, 25 bp, Homo sapien
tgctttgctgtaaaatattccaaca

SEQ ID NO: 1864356 - DNA, 25 bp, Homo sapien
acaccaagaactcccgagaagcgac

SEQ ID NO: 1864357 - DNA, 25 bp, Homo sapien
ttccaacaccaagaactcccgagaa

SEQ ID NO: 1864358 - DNA, 25 bp, Homo sapien
ggatgaagaggctgaatctttcagg

SEQ ID NO: 1864359 - DNA, 25 bp, Homo sapien
aggatgaagaggctgaatctttcag

SEQ ID NO: 1864360 - DNA, 25 bp, Homo sapien
ctgaatctttcagggtcgtcctgct

SEQ ID NO: 1864361 - DNA, 25 bp, Homo sapien
atctttcagggtcgtcctgcttctg

SEQ ID NO: 1864362 - DNA, 25 bp, Homo sapien
taggaaaaatacgagctcagcacac

SEQ ID NO: 1864363 - DNA, 25 bp, Homo sapien
gatggtgcccaaccttcaaaaccag

SEQ ID NO: 1864364 - DNA, 25 bp, Homo sapien
tacacagtctcaactcagtgctggc

SEQ ID NO: 1864365 - DNA, 25 bp, Homo sapien
ggcctggcatcaagtccgcacagtt

SEQ ID NO: 1864366 - DNA, 25 bp, Homo sapien
ggcaagattccaacccctgagagta

SEQ ID NO: 1864367 - DNA, 25 bp, Homo sapien
tatcaggcacgttagcagaacagga

SEQ ID NO: 1864368 - DNA, 25 bp, Homo sapien
gactcagagaaggaaacgggacaca

SEQ ID NO: 1864369 - DNA, 25 bp, Homo sapien
gacatgactataagacctgagggca

SEQ ID NO: 1864370 - DNA, 25 bp, Homo sapien
attttctggtgctctacatgttcag

SEQ ID NO: 1864371 - DNA, 25 bp, Homo sapien
gttcagagaaatttctctagtaatg

SEQ ID NO: 1864372 - DNA, 25 bp, Homo sapien
ctagtaatgaactatagaaatgatt

SEQ ID NO: 1864373 - DNA, 25 bp, Homo sapien
aatgaactatagaaatgattcctga

SEQ ID NO: 1864374 - DNA, 25 bp, Homo sapien
tgagtgtttctctaggacagatacc

SEQ ID NO: 1864375 - DNA, 25 bp, Homo sapien
gatacctattagtggaactgctggg

SEQ ID NO: 1864376 - DNA, 25 bp, Homo sapien
gacgcactaaaggtctgaacaaccc

SEQ ID NO: 1864377 - DNA, 25 bp, Homo sapien
ccactaaggtattttattgacgcac

SEQ ID NO: 1864378 - DNA, 25 bp, Homo sapien
gttactcttatgaagtggatctcat

SEQ ID NO: 1864379 - DNA, 25 bp, Homo sapien
tatttttctcagattatcatgtatc

SEQ ID NO: 1864380 - DNA, 25 bp, Homo sapien
tgtgaatttctatccatgtcctttt

SEQ ID NO: 1864381 - DNA, 25 bp, Homo sapien
tttgactttgtttacagtgttactc

SEQ ID NO: 1864382 - DNA, 25 bp, Homo sapien
gtataaagaggaggaacgactggcc

SEQ ID NO: 1864383 - DNA, 25 bp, Homo sapien
cattcaaagaaatggctagctgcgc

SEQ ID NO: 1864384 - DNA, 25 bp, Homo sapien
gtgaataaaccacaaccctgcgctg

SEQ ID NO: 1864385 - DNA, 25 bp, Homo sapien
ctagctgcgccaagaactcggtgag

SEQ ID NO: 1864386 - DNA, 25 bp, Homo sapien
ttgtagccccagctagagttcaatg

SEQ ID NO: 1864387 - DNA, 25 bp, Homo sapien
tgcggcagagcacccaaactaatca

SEQ ID NO: 1864388 - DNA, 25 bp, Homo sapien
tatactaaggctctagtgggctcgt

SEQ ID NO: 1864389 - DNA, 25 bp, Homo sapien
tgattaagggcactaaccacaggca

SEQ ID NO: 1864390 - DNA, 25 bp, Homo sapien
tagattgcaaatcacagtttgagaa

SEQ ID NO: 1864391 - DNA, 25 bp, Homo sapien
gcacaactgacaaatagattgcaaa

SEQ ID NO: 1864392 - DNA, 25 bp, Homo sapien
ttgagaaacactggccgcgtgtggt

SEQ ID NO: 1864393 - DNA, 25 bp, Homo sapien
gatcactaacttgattgcacaactg

SEQ ID NO: 1864394 - DNA, 25 bp, Homo sapien
gaaaggctgatgagcctgatccaga

SEQ ID NO: 1864395 - DNA, 25 bp, Homo sapien
actgtggtgtaaatgtgaggcagaa

SEQ ID NO: 1864396 - DNA, 25 bp, Homo sapien
cagagcccatgacttccattccata

SEQ ID NO: 1864397 - DNA, 25 bp, Homo sapien
gaattatttgcaatctccctctaca

SEQ ID NO: 1864398 - DNA, 25 bp, Homo sapien
caagcagctactctgagaacttaaa

SEQ ID NO: 1864399 - DNA, 25 bp, Homo sapien
tgccagctcatcgtcttccatgatg

SEQ ID NO: 1864400 - DNA, 25 bp, Homo sapien
tgtggcaacgcacgccagtaactgg

SEQ ID NO: 1864401 - DNA, 25 bp, Homo sapien
aaagatttattaagagagccctggg

SEQ ID NO: 1864402 - DNA, 25 bp, Homo sapien
cttgccaaagctgcgtctagtctgg

SEQ ID NO: 1864403 - DNA, 25 bp, Homo sapien
taacaggccggtagaagacacacgg

SEQ ID NO: 1864404 - DNA, 25 bp, Homo sapien
gaagacacacggaggaaccagaaag

SEQ ID NO: 1864405 - DNA, 25 bp, Homo sapien
acaaagctggctctaacaggccggt

SEQ ID NO: 1864406 - DNA, 25 bp, Homo sapien
tgcatgggcaatccgacgagaagac

SEQ ID NO: 1864407 - DNA, 25 bp, Homo sapien
gggcaatccgacgagaagaccagta

SEQ ID NO: 1864408 - DNA, 25 bp, Homo sapien
aatccgacgagaagaccagtatccg

SEQ ID NO: 1864409 - DNA, 25 bp, Homo sapien
caagtgcatgggcaatccgacgaga

SEQ ID NO: 1864410 - DNA, 25 bp, Homo sapien
gggggtgagatggggggcgagcaga

SEQ ID NO: 1864411 - DNA, 25 bp, Homo sapien
ggggtgagatggggggcgagcagag

SEQ ID NO: 1864412 - DNA, 25 bp, Homo sapien
ggggggtgagatggggggcgagcag

SEQ ID NO: 1864413 - DNA, 25 bp, Homo sapien
cagtggaaatttgcagcgccgggct

SEQ ID NO: 1864414 - DNA, 25 bp, Homo sapien
gatgctggaaacttactcccagata

SEQ ID NO: 1864415 - DNA, 25 bp, Homo sapien
tccccggccagaaacttactagtga

SEQ ID NO: 1864416 - DNA, 25 bp, Homo sapien
tactagtgagcaagcgtgcaggctc

SEQ ID NO: 1864417 - DNA, 25 bp, Homo sapien
ctcagccatcgcttagagggaaggg

SEQ ID NO: 1864418 - DNA, 25 bp, Homo sapien
aatacatatgtatctctcgcccctc

SEQ ID NO: 1864419 - DNA, 25 bp, Homo sapien
ccatctgcatgcaccgcctctcagc

SEQ ID NO: 1864420 - DNA, 25 bp, Homo sapien
gcctctcagccatcgcttagaggga

SEQ ID NO: 1864421 - DNA, 25 bp, Homo sapien
ttttaaatccaggatgcaaattcct

SEQ ID NO: 1864422 - DNA, 25 bp, Homo sapien
cctagcaaccgttcccaagctcctc

SEQ ID NO: 1864423 - DNA, 25 bp, Homo sapien
ccctagcaaccgttcccaagctcct

SEQ ID NO: 1864424 - DNA, 25 bp, Homo sapien
tttaaatccaggatgcaaattcctc

SEQ ID NO: 1864425 - DNA, 25 bp, Homo sapien
cagttgcggccctgcgcgagcggga

SEQ ID NO: 1864426 - DNA, 25 bp, Homo sapien
cgggacctgtcagccctgaggtgca

SEQ ID NO: 1864427 - DNA, 25 bp, Homo sapien
ctggcgagtctctggacgaggatgg

SEQ ID NO: 1864428 - DNA, 25 bp, Homo sapien
gagtctctggacgaggatgggacgg

SEQ ID NO: 1864429 - DNA, 25 bp, Homo sapien
tcataacaaggaagtttgaaggagt

SEQ ID NO: 1864430 - DNA, 25 bp, Homo sapien
cataacaaggaagtttgaaggagtc

SEQ ID NO: 1864431 - DNA, 25 bp, Homo sapien
tgctgatgaccggagccttctggga

SEQ ID NO: 1864432 - DNA, 25 bp, Homo sapien
cagaatttgcatgcggtccgaacca

SEQ ID NO: 1864433 - DNA, 25 bp, Homo sapien
tgagaaaattcaggcgccctccaag

SEQ ID NO: 1864434 - DNA, 25 bp, Homo sapien
gaggaattcaccctggaccagatag

SEQ ID NO: 1864435 - DNA, 25 bp, Homo sapien
taaaatttgtgtacggagatggcag

SEQ ID NO: 1864436 - DNA, 25 bp, Homo sapien
gaggttgttttgatgactgcagcct

SEQ ID NO: 1864437 - DNA, 25 bp, Homo sapien
aactgatttatgctatgaaaagggc

SEQ ID NO: 1864438 - DNA, 25 bp, Homo sapien
cataacattcgtagacttgtacagc

SEQ ID NO: 1864439 - DNA, 25 bp, Homo sapien
gaagagatgcaaagactgggaatac

SEQ ID NO: 1864440 - DNA, 25 bp, Homo sapien
tgttaaagctttacctcacctagga

SEQ ID NO: 1864441 - DNA, 25 bp, Homo sapien
ctacagcatttagggaaaacagtct

SEQ ID NO: 1864442 - DNA, 25 bp, Homo sapien
gaaaatctagctggtcaatatacat

SEQ ID NO: 1864443 - DNA, 25 bp, Homo sapien
tctatttaaagatggccttcgccgg

SEQ ID NO: 1864444 - DNA, 25 bp, Homo sapien
tgaaaactcttctctagtggacaga

SEQ ID NO: 1864445 - DNA, 25 bp, Homo sapien
tcaagttggtttacaagaagggcca

SEQ ID NO: 1864446 - DNA, 25 bp, Homo sapien
gacagactgatgcttagtgattcca

SEQ ID NO: 1864447 - DNA, 25 bp, Homo sapien
catgatccaacttaaatggacttta

SEQ ID NO: 1864448 - DNA, 25 bp, Homo sapien
gggtccatgatccaacttaaatgga

SEQ ID NO: 1864449 - DNA, 25 bp, Homo sapien
tttgttacagaattatgtttagaaa

SEQ ID NO: 1864450 - DNA, 25 bp, Homo sapien
gatccaacttaaatggactttatat

SEQ ID NO: 1864451 - DNA, 25 bp, Homo sapien
cttgagctaggagtttgagttcagc

SEQ ID NO: 1864452 - DNA, 25 bp, Homo sapien
tcacttgagctaggagtttgagttc

SEQ ID NO: 1864453 - DNA, 25 bp, Homo sapien
cacttgagctaggagtttgagttca

SEQ ID NO: 1864454 - DNA, 25 bp, Homo sapien
tgagctaggagtttgagttcagcct

SEQ ID NO: 1864455 - DNA, 25 bp, Homo sapien
gcctatttgggctggtaaactgcca

SEQ ID NO: 1864456 - DNA, 25 bp, Homo sapien
cagcatacaatgacatcttgggagc

SEQ ID NO: 1864457 - DNA, 25 bp, Homo sapien
gcagcatgtgcataagctaaccact

SEQ ID NO: 1864458 - DNA, 25 bp, Homo sapien
aacagattcaccaagaatggcggcc

SEQ ID NO: 1864459 - DNA, 25 bp, Homo sapien
tgtgaatccctgttaaagttgtcct

SEQ ID NO: 1864460 - DNA, 25 bp, Homo sapien
tctagtgggacatagtggtttctca

SEQ ID NO: 1864461 - DNA, 25 bp, Homo sapien
gattaaataggttctaccagactct

SEQ ID NO: 1864462 - DNA, 25 bp, Homo sapien
tggttaaaccaattcatgcttctgt

SEQ ID NO: 1864463 - DNA, 25 bp, Homo sapien
tggctgcaattctgaccaggaagct

SEQ ID NO: 1864464 - DNA, 25 bp, Homo sapien
caaaagatcaatttggatggctgca

SEQ ID NO: 1864465 - DNA, 25 bp, Homo sapien
acattccggcatctactgctcttgg

SEQ ID NO: 1864466 - DNA, 25 bp, Homo sapien
tggctagtcatagacacaaccatag

SEQ ID NO: 1864467 - DNA, 25 bp, Homo sapien
cacattatgcatgcccattgttggc

SEQ ID NO: 1864468 - DNA, 25 bp, Homo sapien
cacactagtagctgtgggcacatta

SEQ ID NO: 1864469 - DNA, 25 bp, Homo sapien
gagaagtttatctaagggctcaata

SEQ ID NO: 1864470 - DNA, 25 bp, Homo sapien
tgttgaaaaaatccgtatcattgcc

SEQ ID NO: 1864471 - DNA, 25 bp, Homo sapien
taacaactagccaccacattgtagt

SEQ ID NO: 1864472 - DNA, 25 bp, Homo sapien
caaaattgtaatggctccctgtgat

SEQ ID NO: 1864473 - DNA, 25 bp, Homo sapien
gaactatgctcacccagttatcatg

SEQ ID NO: 1864474 - DNA, 25 bp, Homo sapien
tccctgtgatgagatgtcctgaatt

SEQ ID NO: 1864475 - DNA, 25 bp, Homo sapien
tatggccttgtatagaggaagccca

SEQ ID NO: 1864476 - DNA, 25 bp, Homo sapien
gctaagttacttctactctggtagc

SEQ ID NO: 1864477 - DNA, 25 bp, Homo sapien
gtttgaattgccatatagcatccca

SEQ ID NO: 1864478 - DNA, 25 bp, Homo sapien
taggacagagtgcaactttattcca

SEQ ID NO: 1864479 - DNA, 25 bp, Homo sapien
tttaagatcgagcaaggagcttctc

SEQ ID NO: 1864480 - DNA, 25 bp, Homo sapien
tactcctaggagcaaagtggttgat

SEQ ID NO: 1864481 - DNA, 25 bp, Homo sapien
tccgaagctgactcaacggaggcag

SEQ ID NO: 1864482 - DNA, 25 bp, Homo sapien
tattgatgatagtgaaccgtgggtc

SEQ ID NO: 1864483 - DNA, 25 bp, Homo sapien
caaggtagtgtgtgaaagaaccgcc

SEQ ID NO: 1864484 - DNA, 25 bp, Homo sapien
tgaggtgccttcctagaacaagagc

SEQ ID NO: 1864485 - DNA, 25 bp, Homo sapien
ggcatgctccacagtatcacaggaa

SEQ ID NO: 1864486 - DNA, 25 bp, Homo sapien
ccattcttgcgtgggactgactcac

SEQ ID NO: 1864487 - DNA, 25 bp, Homo sapien
gaaaggcagctacactgtcttccta

SEQ ID NO: 1864488 - DNA, 25 bp, Homo sapien
tgtcaccttgctacaaatatagtgg

SEQ ID NO: 1864489 - DNA, 25 bp, Homo sapien
tattcattagccatgacagcgtgtg

SEQ ID NO: 1864490 - DNA, 25 bp, Homo sapien
gggaaacagggcactccaagacctg

SEQ ID NO: 1864491 - DNA, 25 bp, Homo sapien
tgagagccatctttttagccagtcg

SEQ ID NO: 1864492 - DNA, 25 bp, Homo sapien
gaactttaaaagctagctgggccag

SEQ ID NO: 1864493 - DNA, 25 bp, Homo sapien
cctagtgtaacaggtgcccggacga

SEQ ID NO: 1864494 - DNA, 25 bp, Homo sapien
tagccagtcgtggatgaaaagccct

SEQ ID NO: 1864495 - DNA, 25 bp, Homo sapien
tagtcaccgttcttacaggtaagag

SEQ ID NO: 1864496 - DNA, 25 bp, Homo sapien
tacccaagccatgtttataacaacg

SEQ ID NO: 1864497 - DNA, 25 bp, Homo sapien
taacctggccccatagagactcata

SEQ ID NO: 1864498 - DNA, 25 bp, Homo sapien
gagactcatatttccctgtttgagg

SEQ ID NO: 1864499 - DNA, 25 bp, Homo sapien
aacttgggaccaacgtctgacaggg

SEQ ID NO: 1864500 - DNA, 25 bp, Homo sapien
tccagactcagtgaccgagggcatg

SEQ ID NO: 1864501 - DNA, 25 bp, Homo sapien
tccagccaggtaggaacgagctctc

SEQ ID NO: 1864502 - DNA, 25 bp, Homo sapien
caactggaggaattatgctgggccc

SEQ ID NO: 1864503 - DNA, 25 bp, Homo sapien
gacacaccatccagcgacgtctgta

SEQ ID NO: 1864504 - DNA, 25 bp, Homo sapien
tagcgcagcccaattgtaatggtca

SEQ ID NO: 1864505 - DNA, 25 bp, Homo sapien
cgtctgtaggtagcgcagcccaatt

SEQ ID NO: 1864506 - DNA, 25 bp, Homo sapien
gattcctcggggttggacacaccat

SEQ ID NO: 1864507 - DNA, 25 bp, Homo sapien
gaatagctaacgttgcaggtgcctg

SEQ ID NO: 1864508 - DNA, 25 bp, Homo sapien
tacctagtgcacagtaaggaccaac

SEQ ID NO: 1864509 - DNA, 25 bp, Homo sapien
tgtgtaaaacacacaggccaagtgc

SEQ ID NO: 1864510 - DNA, 25 bp, Homo sapien
ttttcagatgaagtggtgcccaccc

SEQ ID NO: 1864511 - DNA, 25 bp, Homo sapien
cgaattcagcacactcaccgaggat

SEQ ID NO: 1864512 - DNA, 25 bp, Homo sapien
agaaatatctctgaccacgtgtggt

SEQ ID NO: 1864513 - DNA, 25 bp, Homo sapien
tagtccccaaagctaagtgctgtca

SEQ ID NO: 1864514 - DNA, 25 bp, Homo sapien
aaaaacaattgtcggtcgggtgcag

SEQ ID NO: 1864515 - DNA, 25 bp, Homo sapien
agccaaatgaggagcgtgacgacac

SEQ ID NO: 1864516 - DNA, 25 bp, Homo sapien
gacgacacccatggagttcatgagg

SEQ ID NO: 1864517 - DNA, 25 bp, Homo sapien
gatctgatactggatgcagggccgt

SEQ ID NO: 1864518 - DNA, 25 bp, Homo sapien
gagctcctccgtctggtggtcgtaa

SEQ ID NO: 1864519 - DNA, 25 bp, Homo sapien
ggtatatatttgctgtgcgcccgct

SEQ ID NO: 1864520 - DNA, 25 bp, Homo sapien
ttacaggtcactggtggccaaggcc

SEQ ID NO: 1864521 - DNA, 25 bp, Homo sapien
caatagggagtatagaaattcaccc

SEQ ID NO: 1864522 - DNA, 25 bp, Homo sapien
tgaggtagacggtaatccaagaccc

SEQ ID NO: 1864523 - DNA, 25 bp, Homo sapien
caaaagggatctttacagtgaaaag

SEQ ID NO: 1864524 - DNA, 25 bp, Homo sapien
ttttatggtcaaaactccctgagct

SEQ ID NO: 1864525 - DNA, 25 bp, Homo sapien
ttagcgcttaccatacattcacaca

SEQ ID NO: 1864526 - DNA, 25 bp, Homo sapien
cacttaagatccgtgcatttggctg

SEQ ID NO: 1864527 - DNA, 25 bp, Homo sapien
tgttaatgagctgcatggtattccc

SEQ ID NO: 1864528 - DNA, 25 bp, Homo sapien
tattcccattgcgtggatggcacat

SEQ ID NO: 1864529 - DNA, 25 bp, Homo sapien
actgcgctcggctgagatattttcg

SEQ ID NO: 1864530 - DNA, 25 bp, Homo sapien
gatggcacatgggtcctagccagtt

SEQ ID NO: 1864531 - DNA, 25 bp, Homo sapien
taatccctgccctctacttcgtggg

SEQ ID NO: 1864532 - DNA, 25 bp, Homo sapien
cgtcttttggtgtgctcaagggcca

SEQ ID NO: 1864533 - DNA, 25 bp, Homo sapien
cacagatcggtgacaagagccggac

SEQ ID NO: 1864534 - DNA, 25 bp, Homo sapien
catgaaccatgttgacttccgccta

SEQ ID NO: 1864535 - DNA, 25 bp, Homo sapien
tgggagtgatagcagctgcctctca

SEQ ID NO: 1864536 - DNA, 25 bp, Homo sapien
gagtcacgcatttgacacaggctgg

SEQ ID NO: 1864537 - DNA, 25 bp, Homo sapien
catcggattgtcctacagaggagca

SEQ ID NO: 1864538 - DNA, 25 bp, Homo sapien
taaatgagacaattcgagtcacgca

SEQ ID NO: 1864539 - DNA, 25 bp, Homo sapien
aaagccagccatagggcaatgagca

SEQ ID NO: 1864540 - DNA, 25 bp, Homo sapien
tgggtcatgccaagcagaacgctgg

SEQ ID NO: 1864541 - DNA, 25 bp, Homo sapien
catacacgtggagcatttggtacac

SEQ ID NO: 1864542 - DNA, 25 bp, Homo sapien
cacctgtgagaccttgagaactggc

SEQ ID NO: 1864543 - DNA, 25 bp, Homo sapien
tggatcctgaattgaccaactgtaa

SEQ ID NO: 1864544 - DNA, 25 bp, Homo sapien
aaaagcattctgagactatcaggga

SEQ ID NO: 1864545 - DNA, 25 bp, Homo sapien
acctggctaggtgatggctacatga

SEQ ID NO: 1864546 - DNA, 25 bp, Homo sapien
gactggtcttgtgcttatgttcagc

SEQ ID NO: 1864547 - DNA, 25 bp, Homo sapien
ggatcttaaagattcccctgagaaa

SEQ ID NO: 1864548 - DNA, 25 bp, Homo sapien
tctctagcccagtccggtgaagtgc

SEQ ID NO: 1864549 - DNA, 25 bp, Homo sapien
tcaggaatcttcaggagccagtcct

SEQ ID NO: 1864550 - DNA, 25 bp, Homo sapien
agggaggccagaatgcaagcaccca

SEQ ID NO: 1864551 - DNA, 25 bp, Homo sapien
gtctcaggcactggtcctcaggcaa

SEQ ID NO: 1864552 - DNA, 25 bp, Homo sapien
tctaccaacagataagggctgtgct

SEQ ID NO: 1864553 - DNA, 25 bp, Homo sapien
acagataagggctgtgctctggtct

SEQ ID NO: 1864554 - DNA, 25 bp, Homo sapien
tctgaacataatcccaggagcctca

SEQ ID NO: 1864555 - DNA, 25 bp, Homo sapien
gatcccagccctaattgtgtcttta

SEQ ID NO: 1864556 - DNA, 25 bp, Homo sapien
taaaaatctgaatgcttgcctaagc

SEQ ID NO: 1864557 - DNA, 25 bp, Homo sapien
gaagcaaaatgctcaaagatgccca

SEQ ID NO: 1864558 - DNA, 25 bp, Homo sapien
tctcagggaaatttagcctaaggga

SEQ ID NO: 1864559 - DNA, 25 bp, Homo sapien
cggccctaaattgtctttatactat

SEQ ID NO: 1864560 - DNA, 25 bp, Homo sapien
tcaagttatgggtgagaagctagct

SEQ ID NO: 1864561 - DNA, 25 bp, Homo sapien
gtgcgtgtaatagaagaatttttcc

SEQ ID NO: 1864562 - DNA, 25 bp, Homo sapien
ccaacaagttggtatgggacattga

SEQ ID NO: 1864563 - DNA, 25 bp, Homo sapien
cgacacagtggtcgagagtctctct

SEQ ID NO: 1864564 - DNA, 25 bp, Homo sapien
cagccaggtagggtcgagtcagaca

SEQ ID NO: 1864565 - DNA, 25 bp, Homo sapien
tgcatgccagctaccaggcagggct

SEQ ID NO: 1864566 - DNA, 25 bp, Homo sapien
ccaaagcgcagagtgactagtgacc

SEQ ID NO: 1864567 - DNA, 25 bp, Homo sapien
cagcatttgaactcgatctgcagca

SEQ ID NO: 1864568 - DNA, 25 bp, Homo sapien
tgtgtcccggtagtacttcatgccg

SEQ ID NO: 1864569 - DNA, 25 bp, Homo sapien
cgaaaaccgttgttgccgcagcatt

SEQ ID NO: 1864570 - DNA, 25 bp, Homo sapien
gaaaagtccaggtagcgattgctga

SEQ ID NO: 1864571 - DNA, 25 bp, Homo sapien
tccagggcgtcgtagcagatcttcc

SEQ ID NO: 1864572 - DNA, 25 bp, Homo sapien
cagccagcgagttgaagacacagga

SEQ ID NO: 1864573 - DNA, 25 bp, Homo sapien
gagaacacagatagccaggtacggc

SEQ ID NO: 1864574 - DNA, 25 bp, Homo sapien
catctggcatacttggctgggtcca

SEQ ID NO: 1864575 - DNA, 25 bp, Homo sapien
caaaccttaacgagcccagaggcgg

SEQ ID NO: 1864576 - DNA, 25 bp, Homo sapien
catgtcgagtcccactagcctggga

SEQ ID NO: 1864577 - DNA, 25 bp, Homo sapien
tgggatccccgtgaatgcagtagtg

SEQ ID NO: 1864578 - DNA, 25 bp, Homo sapien
gcttgccaagtgtagtccgggttgc

SEQ ID NO: 1864579 - DNA, 25 bp, Homo sapien
tggtcacggctggcatcatcgccat

SEQ ID NO: 1864580 - DNA, 25 bp, Homo sapien
accggtgccggcatcgcggccatgt

SEQ ID NO: 1864581 - DNA, 25 bp, Homo sapien
tatggcacggtcaagaccggtgccg

SEQ ID NO: 1864582 - DNA, 25 bp, Homo sapien
gaagtccatcatcccggtggtcacg

SEQ ID NO: 1864583 - DNA, 25 bp, Homo sapien
caaaggacacggcagcatctgtcat

SEQ ID NO: 1864584 - DNA, 25 bp, Homo sapien
tatgcaccgtgatgtttcaagtatc

SEQ ID NO: 1864585 - DNA, 25 bp, Homo sapien
taaaaatacaagttcgcgtggtggc

SEQ ID NO: 1864586 - DNA, 25 bp, Homo sapien
ataaataaagccctggcgtggtggc

SEQ ID NO: 1864587 - DNA, 25 bp, Homo sapien
tctcaaaggcatgacgaaaatagca

SEQ ID NO: 1864588 - DNA, 25 bp, Homo sapien
tgacaataagtaaacttcgagaccc

SEQ ID NO: 1864589 - DNA, 25 bp, Homo sapien
caagtaggagcccattacaatctct

SEQ ID NO: 1864590 - DNA, 25 bp, Homo sapien
caatctctagccttaaaatgctgaa

SEQ ID NO: 1864591 - DNA, 25 bp, Homo sapien
taggagtgaagaacagagtgacaac

SEQ ID NO: 1864592 - DNA, 25 bp, Homo sapien
ccgggccagccagttaaaatcgtca

SEQ ID NO: 1864593 - DNA, 25 bp, Homo sapien
tagccgcagggtgttgggatttcca

SEQ ID NO: 1864594 - DNA, 25 bp, Homo sapien
tcggtcaaaagaacgtcgcgctggt

SEQ ID NO: 1864595 - DNA, 25 bp, Homo sapien
gaagtccttgtcgatctccgggtag

SEQ ID NO: 1864596 - DNA, 25 bp, Homo sapien
gagtcctgtatgctttcaactgccg

SEQ ID NO: 1864597 - DNA, 25 bp, Homo sapien
gtcctgtatgctttcaactgccggg

SEQ ID NO: 1864598 - DNA, 25 bp, Homo sapien
cagcggggagtcctgtatgctttca

SEQ ID NO: 1864599 - DNA, 25 bp, Homo sapien
gggagtcctgtatgctttcaactgc

SEQ ID NO: 1864600 - DNA, 25 bp, Homo sapien
aaagcgaaacgcttcttgggctgca

SEQ ID NO: 1864601 - DNA, 25 bp, Homo sapien
cgcaggtcgtaagcggctaggaaaa

SEQ ID NO: 1864602 - DNA, 25 bp, Homo sapien
gttgattagtttctgcagcccctgg

SEQ ID NO: 1864603 - DNA, 25 bp, Homo sapien
gtagacgaagcagcatcctttcccc

SEQ ID NO: 1864604 - DNA, 25 bp, Homo sapien
cgctcgctcccgaacaaaggtggcg

SEQ ID NO: 1864605 - DNA, 25 bp, Homo sapien
caaaggtggcgacgaaaaagtggct

SEQ ID NO: 1864606 - DNA, 25 bp, Homo sapien
gactccgcgcgctccagaagctctt

SEQ ID NO: 1864607 - DNA, 25 bp, Homo sapien
tggcgacgaaaaagtggctgttctc

SEQ ID NO: 1864608 - DNA, 25 bp, Homo sapien
gtttccgcctttcaacttccagctg

SEQ ID NO: 1864609 - DNA, 25 bp, Homo sapien
gttcgcgtctctgaagccgctcagg

SEQ ID NO: 1864610 - DNA, 25 bp, Homo sapien
tgccgcttttgtttccgcctttcaa

SEQ ID NO: 1864611 - DNA, 25 bp, Homo sapien
gctgccgttcttgttcgcgtctctg

SEQ ID NO: 1864612 - DNA, 25 bp, Homo sapien
agcagcggagcaactgacggactcc

SEQ ID NO: 1864613 - DNA, 25 bp, Homo sapien
gcagcggagcaactgacggactcca

SEQ ID NO: 1864614 - DNA, 25 bp, Homo sapien
cagcggagcaactgacggactccat

SEQ ID NO: 1864615 - DNA, 25 bp, Homo sapien
gcagcagcggagcaactgacggact

SEQ ID NO: 1864616 - DNA, 25 bp, Homo sapien
ttcctccgggcgcgctgtccgtgag

SEQ ID NO: 1864617 - DNA, 25 bp, Homo sapien
ggcgcgctgtccgtgaggcctccca

SEQ ID NO: 1864618 - DNA, 25 bp, Homo sapien
aggcctcccaccaacgcgtccggtg

SEQ ID NO: 1864619 - DNA, 25 bp, Homo sapien
tcccaccaacgcgtccggtgattgg

SEQ ID NO: 1864620 - DNA, 25 bp, Homo sapien
tacaggccggagatccgctactagg

SEQ ID NO: 1864621 - DNA, 25 bp, Homo sapien
gaacaaggttagaaactcgcaggcc

SEQ ID NO: 1864622 - DNA, 25 bp, Homo sapien
gggcaggacttatatccgggattgt

SEQ ID NO: 1864623 - DNA, 25 bp, Homo sapien
tccccgcaggcagttactagggcag

SEQ ID NO: 1864624 - DNA, 25 bp, Homo sapien
gcgagaacccgagacgcagccgctg

SEQ ID NO: 1864625 - DNA, 25 bp, Homo sapien
ggcagggcgagaacccgagacgcag

SEQ ID NO: 1864626 - DNA, 25 bp, Homo sapien
cagggcgagaacccgagacgcagcc

SEQ ID NO: 1864627 - DNA, 25 bp, Homo sapien
gggcgagaacccgagacgcagccgc

SEQ ID NO: 1864628 - DNA, 25 bp, Homo sapien
cataagaccaggcttggggctccca

SEQ ID NO: 1864629 - DNA, 25 bp, Homo sapien
gtcaaaaggtacataagaccaggct

SEQ ID NO: 1864630 - DNA, 25 bp, Homo sapien
aaaggtacataagaccaggcttggg

SEQ ID NO: 1864631 - DNA, 25 bp, Homo sapien
caaaaggtacataagaccaggcttg

SEQ ID NO: 1864632 - DNA, 25 bp, Homo sapien
tctttcatctgttgcatgagataat

SEQ ID NO: 1864633 - DNA, 25 bp, Homo sapien
ggtttctttcaactacaaagtgcag

SEQ ID NO: 1864634 - DNA, 25 bp, Homo sapien
aaatagcgagacatggtggcacagg

SEQ ID NO: 1864635 - DNA, 25 bp, Homo sapien
tagctacacagaaggctgagatcgg

SEQ ID NO: 1864636 - DNA, 25 bp, Homo sapien
gaacatcattaggtccagggaacac

SEQ ID NO: 1864637 - DNA, 25 bp, Homo sapien
ggaacacttgtccatgccaccctga

SEQ ID NO: 1864638 - DNA, 25 bp, Homo sapien
tcattcattgcctcaccatggatgc

SEQ ID NO: 1864639 - DNA, 25 bp, Homo sapien
gatgcaagctactgtagttggccct

SEQ ID NO: 1864640 - DNA, 25 bp, Homo sapien
tgtgttttagaagaaggtgaagaga

SEQ ID NO: 1864641 - DNA, 25 bp, Homo sapien
tgagaaacttgggaataacaccgca

SEQ ID NO: 1864642 - DNA, 25 bp, Homo sapien
tgggtggacaccaattgagaaactt

SEQ ID NO: 1864643 - DNA, 25 bp, Homo sapien
aagtgccattgggaggctattgtaa

SEQ ID NO: 1864644 - DNA, 25 bp, Homo sapien
gctgtggaactgtcacaagatatgc

SEQ ID NO: 1864645 - DNA, 25 bp, Homo sapien
tattctccaatattcgcatttctgc

SEQ ID NO: 1864646 - DNA, 25 bp, Homo sapien
tccaatattcgcatttctgcatttg

SEQ ID NO: 1864647 - DNA, 25 bp, Homo sapien
gctgatttggttgtggtatgtgcct

SEQ ID NO: 1864648 - DNA, 25 bp, Homo sapien
gattgagtctcaagcaaagatgttt

SEQ ID NO: 1864649 - DNA, 25 bp, Homo sapien
aaagccactgagttaggcgacggga

SEQ ID NO: 1864650 - DNA, 25 bp, Homo sapien
tgtttcttgggattgagtctcaagc

SEQ ID NO: 1864651 - DNA, 25 bp, Homo sapien
ttaggcgacgggagaaggcttccca

SEQ ID NO: 1864652 - DNA, 25 bp, Homo sapien
aaataatgtaggcaaggtattgaaa

SEQ ID NO: 1864653 - DNA, 25 bp, Homo sapien
ataatgtaggcaaggtattgaaaac

SEQ ID NO: 1864654 - DNA, 25 bp, Homo sapien
attcaatactatatatgggacactg

SEQ ID NO: 1864655 - DNA, 25 bp, Homo sapien
tactatatatgggacactgaagcaa

SEQ ID NO: 1864656 - DNA, 25 bp, Homo sapien
tgtttcttgaataaaccaatacatt

SEQ ID NO: 1864657 - DNA, 25 bp, Homo sapien
ctcgtggatcttagtaattgtttta

SEQ ID NO: 1864658 - DNA, 25 bp, Homo sapien
tcgtggatcttagtaattgttttaa

SEQ ID NO: 1864659 - DNA, 25 bp, Homo sapien
gccaaataaaactgtttcttgaata

SEQ ID NO: 1864660 - DNA, 25 bp, Homo sapien
tcctggcttccccattcccgccgca

SEQ ID NO: 1864661 - DNA, 25 bp, Homo sapien
atcctggcttccccattcccgccgc

SEQ ID NO: 1864662 - DNA, 25 bp, Homo sapien
tcatcctggcttccccattcccgcc

SEQ ID NO: 1864663 - DNA, 25 bp, Homo sapien
cctggcttccccattcccgccgcat

SEQ ID NO: 1864664 - DNA, 25 bp, Homo sapien
cttttcgaagcaccgccgaggatcc

SEQ ID NO: 1864665 - DNA, 25 bp, Homo sapien
gcctcgctgccttttcgaagcaccg

SEQ ID NO: 1864666 - DNA, 25 bp, Homo sapien
gttcgccgcgccggccagaagagat

SEQ ID NO: 1864667 - DNA, 25 bp, Homo sapien
cagaagagatgtgcggctgggacgg

SEQ ID NO: 1864668 - DNA, 25 bp, Homo sapien
atctcgatgaccagggcgccgcgag

SEQ ID NO: 1864669 - DNA, 25 bp, Homo sapien
tcctcccagtcgaaattggaggtga

SEQ ID NO: 1864670 - DNA, 25 bp, Homo sapien
gcgccctccgaggacatctcgatga

SEQ ID NO: 1864671 - DNA, 25 bp, Homo sapien
gagtcgccccaaatgcgggatattg

SEQ ID NO: 1864672 - DNA, 25 bp, Homo sapien
gggaaaggtctataaagctctgatc

SEQ ID NO: 1864673 - DNA, 25 bp, Homo sapien
tgtagaaaaataacaccgtggtgcc

SEQ ID NO: 1864674 - DNA, 25 bp, Homo sapien
cacctatggtttccaaatgtgagca

SEQ ID NO: 1864675 - DNA, 25 bp, Homo sapien
ccgtggtgccagtaggtgtgtcctt

SEQ ID NO: 1864676 - DNA, 25 bp, Homo sapien
tagtgggagcaagacaacgcagtgt

SEQ ID NO: 1864677 - DNA, 25 bp, Homo sapien
cacaggaagaacacttgcctttagt

SEQ ID NO: 1864678 - DNA, 25 bp, Homo sapien
tggccgggagcagcattcttaagga

SEQ ID NO: 1864679 - DNA, 25 bp, Homo sapien
cagcattcttaaggaattcaagaca

SEQ ID NO: 1864680 - DNA, 25 bp, Homo sapien
ataatgtcaaatggaagtatgtagc

SEQ ID NO: 1864681 - DNA, 25 bp, Homo sapien
ctgcatcctgccgagaaaatcattt

SEQ ID NO: 1864682 - DNA, 25 bp, Homo sapien
gctaaacaataaccgtaaagtgaga

SEQ ID NO: 1864683 - DNA, 25 bp, Homo sapien
ctttcctctttgagtctgctgtcat

SEQ ID NO: 1864684 - DNA, 25 bp, Homo sapien
taatgttctgtatagtagaagagga

SEQ ID NO: 1864685 - DNA, 25 bp, Homo sapien
tctgcatggcatggctcttgcttga

SEQ ID NO: 1864686 - DNA, 25 bp, Homo sapien
gaataatgttctgtatagtagaaga

SEQ ID NO: 1864687 - DNA, 25 bp, Homo sapien
tgaataatgttctgtatagtagaag

SEQ ID NO: 1864688 - DNA, 25 bp, Homo sapien
aggtggaaatcactaacatggtgcc

SEQ ID NO: 1864689 - DNA, 25 bp, Homo sapien
gccctgaggtggaaatcactaacat

SEQ ID NO: 1864690 - DNA, 25 bp, Homo sapien
ggaaagccctgaggtggaaatcact

SEQ ID NO: 1864691 - DNA, 25 bp, Homo sapien
tggtgcctggctacaagcagaggga

SEQ ID NO: 1864692 - DNA, 25 bp, Homo sapien
ggatgtcttgattttcacggatttc

SEQ ID NO: 1864693 - DNA, 25 bp, Homo sapien
gattttcacggatttctgtttccat

SEQ ID NO: 1864694 - DNA, 25 bp, Homo sapien
tcttgattttcacggatttctgttt

SEQ ID NO: 1864695 - DNA, 25 bp, Homo sapien
atcatggatgtcttgattttcacgg

SEQ ID NO: 1864696 - DNA, 25 bp, Homo sapien
aagactgcaactattccgtagttca

SEQ ID NO: 1864697 - DNA, 25 bp, Homo sapien
tgaagactgcaactattccgtagtt

SEQ ID NO: 1864698 - DNA, 25 bp, Homo sapien
agactgcaactattccgtagttcat

SEQ ID NO: 1864699 - DNA, 25 bp, Homo sapien
gaagactgcaactattccgtagttc

SEQ ID NO: 1864700 - DNA, 25 bp, Homo sapien
gctagcccaccactgaaaggaaaga

SEQ ID NO: 1864701 - DNA, 25 bp, Homo sapien
tatttcttgtcagggagtattctcc

SEQ ID NO: 1864702 - DNA, 25 bp, Homo sapien
catgggattcccatttgagagccaa

SEQ ID NO: 1864703 - DNA, 25 bp, Homo sapien
tgagaacagtagtgacccctggcag

SEQ ID NO: 1864704 - DNA, 25 bp, Homo sapien
ttagggaggccttacagactgactt

SEQ ID NO: 1864705 - DNA, 25 bp, Homo sapien
gctctgaaggatttagtagattctg

SEQ ID NO: 1864706 - DNA, 25 bp, Homo sapien
ctttacttaaagaggacgcgtcact

SEQ ID NO: 1864707 - DNA, 25 bp, Homo sapien
tatagtacgtctcacttgaaattgc

SEQ ID NO: 1864708 - DNA, 25 bp, Homo sapien
aaaaaactattgctgcagtcattca

SEQ ID NO: 1864709 - DNA, 25 bp, Homo sapien
tcagtgaagtggaagcatgtgtttt

SEQ ID NO: 1864710 - DNA, 25 bp, Homo sapien
ggacttgaagatgtgaatcatctat

SEQ ID NO: 1864711 - DNA, 25 bp, Homo sapien
gaaaagacagtagctggccggtcgt

SEQ ID NO: 1864712 - DNA, 25 bp, Homo sapien
tagatttttcccttcatagtggcag

SEQ ID NO: 1864713 - DNA, 25 bp, Homo sapien
gcactgtttggctcgttaggcccca

SEQ ID NO: 1864714 - DNA, 25 bp, Homo sapien
gcccagctcttgtgtaccttatgtg

SEQ ID NO: 1864715 - DNA, 25 bp, Homo sapien
gctcaatcaggatcggtcacgcagg

SEQ ID NO: 1864716 - DNA, 25 bp, Homo sapien
gccaggtggcctgcttaacataaaa

SEQ ID NO: 1864717 - DNA, 25 bp, Homo sapien
tagggtcatgtcagcacgtaccagg

SEQ ID NO: 1864718 - DNA, 25 bp, Homo sapien
tacatcgtctgtgggttagggtcat

SEQ ID NO: 1864719 - DNA, 25 bp, Homo sapien
aagcagttgtgactatggaagccca

SEQ ID NO: 1864720 - DNA, 25 bp, Homo sapien
tatcttcaaaatcattctggggcca

SEQ ID NO: 1864721 - DNA, 25 bp, Homo sapien
tcttcaaaatcattctggggccaag

SEQ ID NO: 1864722 - DNA, 25 bp, Homo sapien
gctttcctttaatgtatcttcaaaa

SEQ ID NO: 1864723 - DNA, 25 bp, Homo sapien
gggctttcctttaatgtatcttcaa

SEQ ID NO: 1864724 - DNA, 25 bp, Homo sapien
caggtcaggacgaaagcataaaaga

SEQ ID NO: 1864725 - DNA, 25 bp, Homo sapien
tatgccatgaagaaggcgcagtcgc

SEQ ID NO: 1864726 - DNA, 25 bp, Homo sapien
caagtctagttgagacaggtcagga

SEQ ID NO: 1864727 - DNA, 25 bp, Homo sapien
ggccgttcctatcctgagggtcgga

SEQ ID NO: 1864728 - DNA, 25 bp, Homo sapien
ggttcgccgtggatcgccgcgatgt

SEQ ID NO: 1864729 - DNA, 25 bp, Homo sapien
tggatcgccgcgatgtggcgtttct

SEQ ID NO: 1864730 - DNA, 25 bp, Homo sapien
ccgcgatgtggcgtttctccaggcc

SEQ ID NO: 1864731 - DNA, 25 bp, Homo sapien
gccgggacgctgtgggttcgccgtg

SEQ ID NO: 1864732 - DNA, 25 bp, Homo sapien
gggacgctccatgtcgggtcgcgaa

SEQ ID NO: 1864733 - DNA, 25 bp, Homo sapien
gctccatgtcgggtcgcgaatcctg

SEQ ID NO: 1864734 - DNA, 25 bp, Homo sapien
ctgcgccagggtaaccgaagctgag

SEQ ID NO: 1864735 - DNA, 25 bp, Homo sapien
gcattggggactgcggggacgctcc

SEQ ID NO: 1864736 - DNA, 25 bp, Homo sapien
gaataacacagcagtattgccacca

SEQ ID NO: 1864737 - DNA, 25 bp, Homo sapien
cactgtctcagcaaggggaatgcag

SEQ ID NO: 1864738 - DNA, 25 bp, Homo sapien
gtgtagtaaagaataacacagcagt

SEQ ID NO: 1864739 - DNA, 25 bp, Homo sapien
gcacataggccagatatatgcttct

SEQ ID NO: 1864740 - DNA, 25 bp, Homo sapien
cctgagccaggtactaaagaggttt

SEQ ID NO: 1864741 - DNA, 25 bp, Homo sapien
tagagcataacgtgtgcgtcccctg

SEQ ID NO: 1864742 - DNA, 25 bp, Homo sapien
tattgatcaagtatgaggcttccac

SEQ ID NO: 1864743 - DNA, 25 bp, Homo sapien
cccaagggttctctgctagtaatca

SEQ ID NO: 1864744 - DNA, 25 bp, Homo sapien
aggcgtgagccattaagtgttcccc

SEQ ID NO: 1864745 - DNA, 25 bp, Homo sapien
ggcccagacgcaggcttcttctcgg

SEQ ID NO: 1864746 - DNA, 25 bp, Homo sapien
ccagacgcaggcttcttctcgggtc

SEQ ID NO: 1864747 - DNA, 25 bp, Homo sapien
gcgcctgaatccgtcccacccaggc

SEQ ID NO: 1864748 - DNA, 25 bp, Homo sapien
caggcccagacgcaggcttcttctc

SEQ ID NO: 1864749 - DNA, 25 bp, Homo sapien
tggccaagggcgtaaaaagatagtc

SEQ ID NO: 1864750 - DNA, 25 bp, Homo sapien
gactttgccataggtcgctgaggcc

SEQ ID NO: 1864751 - DNA, 25 bp, Homo sapien
gatagtcttcccattagctagagag

SEQ ID NO: 1864752 - DNA, 25 bp, Homo sapien
gagcaaaccccagaaagcctattgg

SEQ ID NO: 1864753 - DNA, 25 bp, Homo sapien
gcagaatggctccatctctgttgaa

SEQ ID NO: 1864754 - DNA, 25 bp, Homo sapien
acagcagaatggctccatctctgtt

SEQ ID NO: 1864755 - DNA, 25 bp, Homo sapien
gaatggctccatctctgttgaagac

SEQ ID NO: 1864756 - DNA, 25 bp, Homo sapien
gctccatctctgttgaagacttcca

SEQ ID NO: 1864757 - DNA, 25 bp, Homo sapien
tagtgagaacaggtagtgtttattt

SEQ ID NO: 1864758 - DNA, 25 bp, Homo sapien
tgtagtgagaacaggtagtgtttat

SEQ ID NO: 1864759 - DNA, 25 bp, Homo sapien
gtagtgagaacaggtagtgtttatt

SEQ ID NO: 1864760 - DNA, 25 bp, Homo sapien
agtgagaacaggtagtgtttatttc

SEQ ID NO: 1864761 - DNA, 25 bp, Homo sapien
cagtctttttagatgcttgcttagc

SEQ ID NO: 1864762 - DNA, 25 bp, Homo sapien
agtctttttagatgcttgcttagcc

SEQ ID NO: 1864763 - DNA, 25 bp, Homo sapien
gcagtctttttagatgcttgcttag

SEQ ID NO: 1864764 - DNA, 25 bp, Homo sapien
ttgcagtctttttagatgcttgctt

SEQ ID NO: 1864765 - DNA, 25 bp, Homo sapien
gccgttatatcagcaagagatgcac

SEQ ID NO: 1864766 - DNA, 25 bp, Homo sapien
ttggccgttatatcagcaagagatg

SEQ ID NO: 1864767 - DNA, 25 bp, Homo sapien
tctgattcctcttggccgttatatc

SEQ ID NO: 1864768 - DNA, 25 bp, Homo sapien
tcctcttggccgttatatcagcaag

SEQ ID NO: 1864769 - DNA, 25 bp, Homo sapien
gccaactcgcatttcgcattaagaa

SEQ ID NO: 1864770 - DNA, 25 bp, Homo sapien
taaaactgcacagctcgaccttcat

SEQ ID NO: 1864771 - DNA, 25 bp, Homo sapien
aaaggaacgccaactcgcatttcgc

SEQ ID NO: 1864772 - DNA, 25 bp, Homo sapien
ttgtacccgctaaaactgcacagct

SEQ ID NO: 1864773 - DNA, 25 bp, Homo sapien
tccacagaaagacaaaagatggcga

SEQ ID NO: 1864774 - DNA, 25 bp, Homo sapien
ctccacagaaagacaaaagatggcg

SEQ ID NO: 1864775 - DNA, 25 bp, Homo sapien
ggcgacagctccacagaaagacaaa

SEQ ID NO: 1864776 - DNA, 25 bp, Homo sapien
acagaaagacaaaagatggcgaaaa

SEQ ID NO: 1864777 - DNA, 25 bp, Homo sapien
gcttgtctgtctctcaaatgggaat

SEQ ID NO: 1864778 - DNA, 25 bp, Homo sapien
taaaccaccatgttctactgccttt

SEQ ID NO: 1864779 - DNA, 25 bp, Homo sapien
gtgcacacgtattttaacttcaagg

SEQ ID NO: 1864780 - DNA, 25 bp, Homo sapien
gcgcccggctttgtcctgtgctcta

SEQ ID NO: 1864781 - DNA, 25 bp, Homo sapien
ttcagtgtgacgagtgtggatgcca

SEQ ID NO: 1864782 - DNA, 25 bp, Homo sapien
tatgcacttaaggagcgctggaacc

SEQ ID NO: 1864783 - DNA, 25 bp, Homo sapien
ctcgctggccgtactcagggtggac

SEQ ID NO: 1864784 - DNA, 25 bp, Homo sapien
gggtatgcaggtctagccaggctcc

SEQ ID NO: 1864785 - DNA, 25 bp, Homo sapien
tttctcactccaacctttcatgcca

SEQ ID NO: 1864786 - DNA, 25 bp, Homo sapien
tcccagggcttactcctcccacaac

SEQ ID NO: 1864787 - DNA, 25 bp, Homo sapien
agaaggatcaggctcccatgctgcc

SEQ ID NO: 1864788 - DNA, 25 bp, Homo sapien
ccaacctttcatgccacaacaccag

SEQ ID NO: 1864789 - DNA, 25 bp, Homo sapien
ttttcagccacagaactagccctct

SEQ ID NO: 1864790 - DNA, 25 bp, Homo sapien
gggcaagtaggcaggagatatctct

SEQ ID NO: 1864791 - DNA, 25 bp, Homo sapien
tttgcaccctgggatctcctggagg

SEQ ID NO: 1864792 - DNA, 25 bp, Homo sapien
gcctttctcttagagccggcctgga

SEQ ID NO: 1864793 - DNA, 25 bp, Homo sapien
cagccatgctgagcggggtcccaga

SEQ ID NO: 1864794 - DNA, 25 bp, Homo sapien
tgcagccatgctgagcggggtccca

SEQ ID NO: 1864795 - DNA, 25 bp, Homo sapien
ctgcagccatgctgagcggggtccc

SEQ ID NO: 1864796 - DNA, 25 bp, Homo sapien
ctgagcggggtcccagaccctgggg

SEQ ID NO: 1864797 - DNA, 25 bp, Homo sapien
tgcagcaagtcctccatggtgagca

SEQ ID NO: 1864798 - DNA, 25 bp, Homo sapien
ctcactgactgagggttgcagccgg

SEQ ID NO: 1864799 - DNA, 25 bp, Homo sapien
tgagcatcagtgctgagctacctgg

SEQ ID NO: 1864800 - DNA, 25 bp, Homo sapien
cgctggatgcgcttgtaccggagca

SEQ ID NO: 1864801 - DNA, 25 bp, Homo sapien
gcagctgtcatagcatcagagcaga

SEQ ID NO: 1864802 - DNA, 25 bp, Homo sapien
catgaaccctgcgtttgagggcagc

SEQ ID NO: 1864803 - DNA, 25 bp, Homo sapien
tctagcacgtttaccaggctcacag

SEQ ID NO: 1864804 - DNA, 25 bp, Homo sapien
gctcacagatggctctagcttgaat

SEQ ID NO: 1864805 - DNA, 25 bp, Homo sapien
atcacctcctccctcgaaagccagt

SEQ ID NO: 1864806 - DNA, 25 bp, Homo sapien
tgttgtgggatacaggaagaaacag

SEQ ID NO: 1864807 - DNA, 25 bp, Homo sapien
cctcctccctcgaaagccagtgctg

SEQ ID NO: 1864808 - DNA, 25 bp, Homo sapien
tgtgggatacaggaagaaacagagt

SEQ ID NO: 1864809 - DNA, 25 bp, Homo sapien
cttagaacgcgtagctgggaggccc

SEQ ID NO: 1864810 - DNA, 25 bp, Homo sapien
gatggcacttagaacgcgtagctgg

SEQ ID NO: 1864811 - DNA, 25 bp, Homo sapien
tgggaggcccggtcctcatttgccc

SEQ ID NO: 1864812 - DNA, 25 bp, Homo sapien
cacttagaacgcgtagctgggaggc

SEQ ID NO: 1864813 - DNA, 25 bp, Homo sapien
aatcacaaacacatcctgagtgctg

SEQ ID NO: 1864814 - DNA, 25 bp, Homo sapien
gagtgctgtgcagcccatctagctc

SEQ ID NO: 1864815 - DNA, 25 bp, Homo sapien
ggtggctccaatcacaaacacatcc

SEQ ID NO: 1864816 - DNA, 25 bp, Homo sapien
ggtccaggagatctggtctgttggt

SEQ ID NO: 1864817 - DNA, 25 bp, Homo sapien
agaagataatgcatggagctgcagc

SEQ ID NO: 1864818 - DNA, 25 bp, Homo sapien
ccggcttggggccaaagagtccagt

SEQ ID NO: 1864819 - DNA, 25 bp, Homo sapien
ggccaaagagtccagttcatcaaag

SEQ ID NO: 1864820 - DNA, 25 bp, Homo sapien
catcaaagaagataatgcatggagc

SEQ ID NO: 1864821 - DNA, 25 bp, Homo sapien
ctgacttgtagaaaggaggattagg

SEQ ID NO: 1864822 - DNA, 25 bp, Homo sapien
gaatgatcatgagtagcctgggagt

SEQ ID NO: 1864823 - DNA, 25 bp, Homo sapien
gggttgaagttaggtgagagcaggg

SEQ ID NO: 1864824 - DNA, 25 bp, Homo sapien
ggaaactggggcctgacaatacagc

SEQ ID NO: 1864825 - DNA, 25 bp, Homo sapien
catacatgttaatgagctctggccc

SEQ ID NO: 1864826 - DNA, 25 bp, Homo sapien
acatacatgttaatgagctctggcc

SEQ ID NO: 1864827 - DNA, 25 bp, Homo sapien
gaaggtaaggctgcactcagtggct

SEQ ID NO: 1864828 - DNA, 25 bp, Homo sapien
ggctgcactcagtggctactgcctt

SEQ ID NO: 1864829 - DNA, 25 bp, Homo sapien
agcagaaggcctgagcgtctcaggc

SEQ ID NO: 1864830 - DNA, 25 bp, Homo sapien
aaggcctgagcgtctcaggcccagg

SEQ ID NO: 1864831 - DNA, 25 bp, Homo sapien
agcccacccacatcatgccaggaca

SEQ ID NO: 1864832 - DNA, 25 bp, Homo sapien
cccacatcatgccaggacactgagg

SEQ ID NO: 1864833 - DNA, 25 bp, Homo sapien
catcatgccaggacactgaggggat

SEQ ID NO: 1864834 - DNA, 25 bp, Homo sapien
tgcagcccacccacatcatgccagg

SEQ ID NO: 1864835 - DNA, 25 bp, Homo sapien
gaaagtgcgtggttgggatatgctc

SEQ ID NO: 1864836 - DNA, 25 bp, Homo sapien
gatggaaagtgcgtggttgggatat

SEQ ID NO: 1864837 - DNA, 25 bp, Homo sapien
aagtgcgtggttgggatatgctctt

SEQ ID NO: 1864838 - DNA, 25 bp, Homo sapien
ctaggagatggaaagtgcgtggttg

SEQ ID NO: 1864839 - DNA, 25 bp, Homo sapien
caggagaggaaagccggcagcacac

SEQ ID NO: 1864840 - DNA, 25 bp, Homo sapien
cttgggggctccaacggcctgggag

SEQ ID NO: 1864841 - DNA, 25 bp, Homo sapien
ctccaacggcctgggagtgagctgt

SEQ ID NO: 1864842 - DNA, 25 bp, Homo sapien
atcctcctcagtcaagccacctgcc

SEQ ID NO: 1864843 - DNA, 25 bp, Homo sapien
cctgagttcttgatcctggtgcagg

SEQ ID NO: 1864844 - DNA, 25 bp, Homo sapien
gagttcttgatcctggtgcaggctg

SEQ ID NO: 1864845 - DNA, 25 bp, Homo sapien
gggcatagagatcccctaccacaaa

SEQ ID NO: 1864846 - DNA, 25 bp, Homo sapien
agggcatagagatcccctaccacaa

SEQ ID NO: 1864847 - DNA, 25 bp, Homo sapien
gaggccctctgttgatgccttaggt

SEQ ID NO: 1864848 - DNA, 25 bp, Homo sapien
cggcgcccgcgctgggttttctact

SEQ ID NO: 1864849 - DNA, 25 bp, Homo sapien
cacaaggcaacaggactgagttctt

SEQ ID NO: 1864850 - DNA, 25 bp, Homo sapien
gagttcttgtaacaaaagccaggga

SEQ ID NO: 1864851 - DNA, 25 bp, Homo sapien
cacaccgccgtgctagctgtgccaa

SEQ ID NO: 1864852 - DNA, 25 bp, Homo sapien
gcacaccgccgtgctagctgtgcca

SEQ ID NO: 1864853 - DNA, 25 bp, Homo sapien
tgcacaccgccgtgctagctgtgcc

SEQ ID NO: 1864854 - DNA, 25 bp, Homo sapien
agtgagggcccgcaggatgctgagc

SEQ ID NO: 1864855 - DNA, 25 bp, Homo sapien
agagcaggcacctcgagctcatgag

SEQ ID NO: 1864856 - DNA, 25 bp, Homo sapien
gcacctcgagctcatgaggaaatgc

SEQ ID NO: 1864857 - DNA, 25 bp, Homo sapien
gcttgtggtggccacaaccatgagg

SEQ ID NO: 1864858 - DNA, 25 bp, Homo sapien
cgggcccgggagaagatggcctgca

SEQ ID NO: 1864859 - DNA, 25 bp, Homo sapien
gagcaacaggactgcaggccggcaa

SEQ ID NO: 1864860 - DNA, 25 bp, Homo sapien
acagccccactactttctgcacaga

SEQ ID NO: 1864861 - DNA, 25 bp, Homo sapien
agcacagccatcacacgggcatcct

SEQ ID NO: 1864862 - DNA, 25 bp, Homo sapien
ctgtgagcaaggggaaagcatgaca

SEQ ID NO: 1864863 - DNA, 25 bp, Homo sapien
ggtggaagatgtgggccatcttttt

SEQ ID NO: 1864864 - DNA, 25 bp, Homo sapien
aagcatgacaagggcaggagaatca

SEQ ID NO: 1864865 - DNA, 25 bp, Homo sapien
ggaagatgtgggccatctttttctc

SEQ ID NO: 1864866 - DNA, 25 bp, Homo sapien
cattccctggactgtccaccaatat

SEQ ID NO: 1864867 - DNA, 25 bp, Homo sapien
ccctggactgtccaccaatatcttg

SEQ ID NO: 1864868 - DNA, 25 bp, Homo sapien
atatcttgcaactccctcctccttg

SEQ ID NO: 1864869 - DNA, 25 bp, Homo sapien
gactgtccaccaatatcttgcaact

SEQ ID NO: 1864870 - DNA, 25 bp, Homo sapien
ctctccatagctcagcatcatggga

SEQ ID NO: 1864871 - DNA, 25 bp, Homo sapien
agcagcaactactgtggtcttccca

SEQ ID NO: 1864872 - DNA, 25 bp, Homo sapien
gctagttcctgtcagcagggcaccc

SEQ ID NO: 1864873 - DNA, 25 bp, Homo sapien
ttcagtaagtggagcccaaggtgac

SEQ ID NO: 1864874 - DNA, 25 bp, Homo sapien
gagcccaaggtgactacaggcagca

SEQ ID NO: 1864875 - DNA, 25 bp, Homo sapien
gggccagggcagtaaagtgcaggat

SEQ ID NO: 1864876 - DNA, 25 bp, Homo sapien
ccagggcagtaaagtgcaggatggc

SEQ ID NO: 1864877 - DNA, 25 bp, Homo sapien
ggccagggcagtaaagtgcaggatg

SEQ ID NO: 1864878 - DNA, 25 bp, Homo sapien
gccagggcagtaaagtgcaggatgg

SEQ ID NO: 1864879 - DNA, 25 bp, Homo sapien
ggcgaggcttcaggacagcacagag

SEQ ID NO: 1864880 - DNA, 25 bp, Homo sapien
gattcctctgaagggagccatggaa

SEQ ID NO: 1864881 - DNA, 25 bp, Homo sapien
tgctccagagagtggattcctctga

SEQ ID NO: 1864882 - DNA, 25 bp, Homo sapien
ctggaggagacaaactgctccagag

SEQ ID NO: 1864883 - DNA, 25 bp, Homo sapien
gaacagggctcagggtagaacccac

SEQ ID NO: 1864884 - DNA, 25 bp, Homo sapien
ctggagcttccccaactgttttctt

SEQ ID NO: 1864885 - DNA, 25 bp, Homo sapien
cggccaagtaggcactggctggtcc

SEQ ID NO: 1864886 - DNA, 25 bp, Homo sapien
tggagcttccccaactgttttcttc

SEQ ID NO: 1864887 - DNA, 25 bp, Homo sapien
gaggtatgggtggtgtcggccaagt

SEQ ID NO: 1864888 - DNA, 25 bp, Homo sapien
agtctcaaagctgctctctctagca

SEQ ID NO: 1864889 - DNA, 25 bp, Homo sapien
acagtctcaaagctgctctctctag

SEQ ID NO: 1864890 - DNA, 25 bp, Homo sapien
attcctctgctcacactgccccaca

SEQ ID NO: 1864891 - DNA, 25 bp, Homo sapien
cactgccccacagtctcaaagctgc

SEQ ID NO: 1864892 - DNA, 25 bp, Homo sapien
aaccaagcactggatattgaccagg

SEQ ID NO: 1864893 - DNA, 25 bp, Homo sapien
tgagcactggccagaaccaagcact

SEQ ID NO: 1864894 - DNA, 25 bp, Homo sapien
tattgaccagggatgaacatcaggc

SEQ ID NO: 1864895 - DNA, 25 bp, Homo sapien
gaacatcaggcactccaaacaagga

SEQ ID NO: 1864896 - DNA, 25 bp, Homo sapien
tctacttgcccaattgttggcacac

SEQ ID NO: 1864897 - DNA, 25 bp, Homo sapien
cttccaggatctctacttgcccaat

SEQ ID NO: 1864898 - DNA, 25 bp, Homo sapien
ggatctctacttgcccaattgttgg

SEQ ID NO: 1864899 - DNA, 25 bp, Homo sapien
tggacttccttccaggatctctact

SEQ ID NO: 1864900 - DNA, 25 bp, Homo sapien
gggagaagacacaatttcgatgtgt

SEQ ID NO: 1864901 - DNA, 25 bp, Homo sapien
ttcgatgtgtaactctctggcaaat

SEQ ID NO: 1864902 - DNA, 25 bp, Homo sapien
ctgaaagtgccggtaaagaacaccg

SEQ ID NO: 1864903 - DNA, 25 bp, Homo sapien
ctgggtatctgaaagtgccggtaaa

SEQ ID NO: 1864904 - DNA, 25 bp, Homo sapien
ggacagcaccatctaaaccatatat

SEQ ID NO: 1864905 - DNA, 25 bp, Homo sapien
tggaaatggaacaactattatctgt

SEQ ID NO: 1864906 - DNA, 25 bp, Homo sapien
tctgttatggcgaactggtgagtct

SEQ ID NO: 1864907 - DNA, 25 bp, Homo sapien
tttactcagtaacccatggaaatgg

SEQ ID NO: 1864908 - DNA, 25 bp, Homo sapien
cacctgaatggatgaaagccttttg

SEQ ID NO: 1864909 - DNA, 25 bp, Homo sapien
gaatatggatcaataggccgggtga

SEQ ID NO: 1864910 - DNA, 25 bp, Homo sapien
tgtatgccccactacattatggagg

SEQ ID NO: 1864911 - DNA, 25 bp, Homo sapien
tattaaaactaaacaccaggcacca

SEQ ID NO: 1864912 - DNA, 25 bp, Homo sapien
caccctagccaagtgcggctgtgaa

SEQ ID NO: 1864913 - DNA, 25 bp, Homo sapien
agggacaagcgccagtccgtcagcg

SEQ ID NO: 1864914 - DNA, 25 bp, Homo sapien
tcccagtctatcagagaggtcccag

SEQ ID NO: 1864915 - DNA, 25 bp, Homo sapien
tgaagtgttcgatgactctctggcc

SEQ ID NO: 1864916 - DNA, 25 bp, Homo sapien
gccaaggccacggagacagctccgg

SEQ ID NO: 1864917 - DNA, 25 bp, Homo sapien
aggccacggagacagctccggctca

SEQ ID NO: 1864918 - DNA, 25 bp, Homo sapien
caaggccacggagacagctccggct

SEQ ID NO: 1864919 - DNA, 25 bp, Homo sapien
agaggccaaggccacggagacagct

SEQ ID NO: 1864920 - DNA, 25 bp, Homo sapien
aggtgccaagcagtgcccaacctag

SEQ ID NO: 1864921 - DNA, 25 bp, Homo sapien
agtgaatctccagtccctcccagaa

SEQ ID NO: 1864922 - DNA, 25 bp, Homo sapien
tgccagaaaccgcaaaggaggacac

SEQ ID NO: 1864923 - DNA, 25 bp, Homo sapien
tggagtcgccgcactgtgccagaaa

SEQ ID NO: 1864924 - DNA, 25 bp, Homo sapien
ggagccgcagcagcgcgcggctaac

SEQ ID NO: 1864925 - DNA, 25 bp, Homo sapien
agcccagtgccaggagccgcagcag

SEQ ID NO: 1864926 - DNA, 25 bp, Homo sapien
cccggagcccagtgccaggagccgc

SEQ ID NO: 1864927 - DNA, 25 bp, Homo sapien
aggagccgcagcagcgcgcggctaa

SEQ ID NO: 1864928 - DNA, 25 bp, Homo sapien
ccgggaccctgctcttcggtgcccg

SEQ ID NO: 1864929 - DNA, 25 bp, Homo sapien
cagcactgccaacgggggtgtctcg

SEQ ID NO: 1864930 - DNA, 25 bp, Homo sapien
agggctccaggacccgcaagacagc

SEQ ID NO: 1864931 - DNA, 25 bp, Homo sapien
gtgtctcggtcggaaagggctccag

SEQ ID NO: 1864932 - DNA, 25 bp, Homo sapien
agccagagagccagacgactagtgt

SEQ ID NO: 1864933 - DNA, 25 bp, Homo sapien
ccaacgaggagggtgaaggagcgca

SEQ ID NO: 1864934 - DNA, 25 bp, Homo sapien
aaggagcgcagcttccggagccaga

SEQ ID NO: 1864935 - DNA, 25 bp, Homo sapien
acaggacaccaacgaggagggtgaa

SEQ ID NO: 1864936 - DNA, 25 bp, Homo sapien
taaacataatattaactcctgatat

SEQ ID NO: 1864937 - DNA, 25 bp, Homo sapien
tcatcgaatcccacaggggctgagt

SEQ ID NO: 1864938 - DNA, 25 bp, Homo sapien
ggctgagtttgacccagaggaagat

SEQ ID NO: 1864939 - DNA, 25 bp, Homo sapien
gccaccttcatcgaatcccacaggg

SEQ ID NO: 1864940 - DNA, 25 bp, Homo sapien
ctgcaagtccttgggaacatcccct

SEQ ID NO: 1864941 - DNA, 25 bp, Homo sapien
gcagcgcctctctagctactcaagg

SEQ ID NO: 1864942 - DNA, 25 bp, Homo sapien
caggacgtgtacaccatcaaggcac

SEQ ID NO: 1864943 - DNA, 25 bp, Homo sapien
cacaagcgggcggaagagttcctaa

SEQ ID NO: 1864944 - DNA, 25 bp, Homo sapien
gagttcctaactgccagccaggagg

SEQ ID NO: 1864945 - DNA, 25 bp, Homo sapien
catttgaacgccaggtatctcccct

SEQ ID NO: 1864946 - DNA, 25 bp, Homo sapien
cacaggaatacatacgctcctctat

SEQ ID NO: 1864947 - DNA, 25 bp, Homo sapien
caccaaagttatgtcaagccccatt

SEQ ID NO: 1864948 - DNA, 25 bp, Homo sapien
cagaggcatgtagggaacagcagga

SEQ ID NO: 1864949 - DNA, 25 bp, Homo sapien
ccatgcctgaccaagggaggtcaaa

SEQ ID NO: 1864950 - DNA, 25 bp, Homo sapien
taccccgtgccctgtctttggtgag

SEQ ID NO: 1864951 - DNA, 25 bp, Homo sapien
gatgaataaacaccctaccccgtgc

SEQ ID NO: 1864952 - DNA, 25 bp, Homo sapien
aggagaaaagtataggctgtggaca

SEQ ID NO: 1864953 - DNA, 25 bp, Homo sapien
agcggtgccccaagcatggctcctg

SEQ ID NO: 1864954 - DNA, 25 bp, Homo sapien
aagcagggagcggtgccccaagcat

SEQ ID NO: 1864955 - DNA, 25 bp, Homo sapien
gcaggccttctcttgtcccttatag

SEQ ID NO: 1864956 - DNA, 25 bp, Homo sapien
tttccttgtttgtgctatgctgggc

SEQ ID NO: 1864957 - DNA, 25 bp, Homo sapien
gctgaggaaggccggacccaggttc

SEQ ID NO: 1864958 - DNA, 25 bp, Homo sapien
tgaggaaggccggacccaggttcca

SEQ ID NO: 1864959 - DNA, 25 bp, Homo sapien
tccacagagtgatacatgctaaggt

SEQ ID NO: 1864960 - DNA, 25 bp, Homo sapien
tgtaggaatataaggcagctctcac

SEQ ID NO: 1864961 - DNA, 25 bp, Homo sapien
gaccgatgtccccatatgtacagaa

SEQ ID NO: 1864962 - DNA, 25 bp, Homo sapien
gaaatggacattacaaccagggatg

SEQ ID NO: 1864963 - DNA, 25 bp, Homo sapien
ttactccagccattgtccttttcac

SEQ ID NO: 1864964 - DNA, 25 bp, Homo sapien
catccgatatctcccgagcccaggc

SEQ ID NO: 1864965 - DNA, 25 bp, Homo sapien
actgggcatccgatatctcccgagc

SEQ ID NO: 1864966 - DNA, 25 bp, Homo sapien
cccactgggcatccgatatctcccg

SEQ ID NO: 1864967 - DNA, 25 bp, Homo sapien
gaatagagctgtggttgttcaacgc

SEQ ID NO: 1864968 - DNA, 25 bp, Homo sapien
tcatcttcactctctaatggtgggt

SEQ ID NO: 1864969 - DNA, 25 bp, Homo sapien
ggttgttcaacgctgtagctccctc

SEQ ID NO: 1864970 - DNA, 25 bp, Homo sapien
gtgggtctggcaaatgaagccccag

SEQ ID NO: 1864971 - DNA, 25 bp, Homo sapien
cccatggtgtctcctcctagaacta

SEQ ID NO: 1864972 - DNA, 25 bp, Homo sapien
attggggaagatacgctcagggccc

SEQ ID NO: 1864973 - DNA, 25 bp, Homo sapien
ggccctgatgtcccagttcctcagt

SEQ ID NO: 1864974 - DNA, 25 bp, Homo sapien
ctggattcgatcctggatgtcagca

SEQ ID NO: 1864975 - DNA, 25 bp, Homo sapien
gtaggacagggatcggatgaaacca

SEQ ID NO: 1864976 - DNA, 25 bp, Homo sapien
tgcaagaacagggaggcggtaggac

SEQ ID NO: 1864977 - DNA, 25 bp, Homo sapien
tctcctgcgtgcaaaaaaccagctc

SEQ ID NO: 1864978 - DNA, 25 bp, Homo sapien
ggatcggatgaaaccaggcccatct

SEQ ID NO: 1864979 - DNA, 25 bp, Homo sapien
ctgacagatgcctttcaggccccat

SEQ ID NO: 1864980 - DNA, 25 bp, Homo sapien
cctgacagatgcctttcaggcccca

SEQ ID NO: 1864981 - DNA, 25 bp, Homo sapien
cgcctgacagatgcctttcaggccc

SEQ ID NO: 1864982 - DNA, 25 bp, Homo sapien
gcctgacagatgcctttcaggcccc

SEQ ID NO: 1864983 - DNA, 25 bp, Homo sapien
gcgccggtgttcccgcgcgcctcac

SEQ ID NO: 1864984 - DNA, 25 bp, Homo sapien
cgcccccatccgaatcccggcgccg

SEQ ID NO: 1864985 - DNA, 25 bp, Homo sapien
catccgaatcccggcgccggtgttc

SEQ ID NO: 1864986 - DNA, 25 bp, Homo sapien
gggctcccctcaaatggccccagct

SEQ ID NO: 1864987 - DNA, 25 bp, Homo sapien
ccgctcagagcccgcggcctccact

SEQ ID NO: 1864988 - DNA, 25 bp, Homo sapien
cagatctcaggtgcctggacactgc

SEQ ID NO: 1864989 - DNA, 25 bp, Homo sapien
taaaccggaaatccatatgagcttg

SEQ ID NO: 1864990 - DNA, 25 bp, Homo sapien
aaacatcccttagcttgggctgagg

SEQ ID NO: 1864991 - DNA, 25 bp, Homo sapien
agtgctgagtcagagccttaaaagg

SEQ ID NO: 1864992 - DNA, 25 bp, Homo sapien
tcctcaggctgataacttagtttaa

SEQ ID NO: 1864993 - DNA, 25 bp, Homo sapien
atggtaatatacaagcacagctggc

SEQ ID NO: 1864994 - DNA, 25 bp, Homo sapien
gagtttataacccatgtggtctgga

SEQ ID NO: 1864995 - DNA, 25 bp, Homo sapien
tcatttagtgggtgaaccaatccca

SEQ ID NO: 1864996 - DNA, 25 bp, Homo sapien
aagcaaatgtaatcctttcttgagg

SEQ ID NO: 1864997 - DNA, 25 bp, Homo sapien
caagtagatagtgtctccagggtcc

SEQ ID NO: 1864998 - DNA, 25 bp, Homo sapien
gaagcaaatgtaatcctttcttgag

SEQ ID NO: 1864999 - DNA, 25 bp, Homo sapien
aagtagatagtgtctccagggtcct

SEQ ID NO: 1865000 - DNA, 25 bp, Homo sapien
tgacaaatgaatatcaaaaggtact

SEQ ID NO: 1865001 - DNA, 25 bp, Homo sapien
gacaaatgaatatcaaaaggtacta

SEQ ID NO: 1865002 - DNA, 25 bp, Homo sapien
gtgacaaatgaatatcaaaaggtac

SEQ ID NO: 1865003 - DNA, 25 bp, Homo sapien
acaaatgaatatcaaaaggtactaa

SEQ ID NO: 1865004 - DNA, 25 bp, Homo sapien
gaaagaatgcctaccttaaaagcag

SEQ ID NO: 1865005 - DNA, 25 bp, Homo sapien
tctacaaagaatactcaggcggctg

SEQ ID NO: 1865006 - DNA, 25 bp, Homo sapien
ctagataaatcataagccaggaaca

SEQ ID NO: 1865007 - DNA, 25 bp, Homo sapien
tatgcagtgattgcgcttgtgaaca

SEQ ID NO: 1865008 - DNA, 25 bp, Homo sapien
tgtcccctaagttatctcagaaatg

SEQ ID NO: 1865009 - DNA, 25 bp, Homo sapien
tagaaatataaggagtcacggctgt

SEQ ID NO: 1865010 - DNA, 25 bp, Homo sapien
tgccctctagaatggatggccctga

SEQ ID NO: 1865011 - DNA, 25 bp, Homo sapien
cacaatgggctcagggtagtgaact

SEQ ID NO: 1865012 - DNA, 25 bp, Homo sapien
ggtctatgtcacctaggcaggagtg

SEQ ID NO: 1865013 - DNA, 25 bp, Homo sapien
tagagagagggtctatgtcacctag

SEQ ID NO: 1865014 - DNA, 25 bp, Homo sapien
tgggccagttcactcatttatttat

SEQ ID NO: 1865015 - DNA, 25 bp, Homo sapien
agggtctatgtcacctaggcaggag

SEQ ID NO: 1865016 - DNA, 25 bp, Homo sapien
actaaaggtgcatatagcgccgtgc

SEQ ID NO: 1865017 - DNA, 25 bp, Homo sapien
atacccgaatggcagagcacactgc

SEQ ID NO: 1865018 - DNA, 25 bp, Homo sapien
acttggtgcagatacccgaatggca

SEQ ID NO: 1865019 - DNA, 25 bp, Homo sapien
taaaggtgcatatagcgccgtgccc

SEQ ID NO: 1865020 - DNA, 25 bp, Homo sapien
cagtcttacttagggaaggcaccaa

SEQ ID NO: 1865021 - DNA, 25 bp, Homo sapien
tgggccagttccacaaacgaggaga

SEQ ID NO: 1865022 - DNA, 25 bp, Homo sapien
gatgacagcgtgtgcagctctgcaa

SEQ ID NO: 1865023 - DNA, 25 bp, Homo sapien
tacaaaccatctggtgagtggccaa

SEQ ID NO: 1865024 - DNA, 25 bp, Homo sapien
ttctgtaaaagctccagctctacct

SEQ ID NO: 1865025 - DNA, 25 bp, Homo sapien
tttctgtaaaagctccagctctacc

SEQ ID NO: 1865026 - DNA, 25 bp, Homo sapien
tctgtaaaagctccagctctacctt

SEQ ID NO: 1865027 - DNA, 25 bp, Homo sapien
atttctgtaaaagctccagctctac

SEQ ID NO: 1865028 - DNA, 25 bp, Homo sapien
ccccgggagcgaatctgtagggtat

SEQ ID NO: 1865029 - DNA, 25 bp, Homo sapien
tcacagggactgcataggacagcac

SEQ ID NO: 1865030 - DNA, 25 bp, Homo sapien
ctaccggaaggtagagaagctctgg

SEQ ID NO: 1865031 - DNA, 25 bp, Homo sapien
gccggtcgtcatggcgtctcagcgt

SEQ ID NO: 1865032 - DNA, 25 bp, Homo sapien
gagaagcggtagtttagaggcagct

SEQ ID NO: 1865033 - DNA, 25 bp, Homo sapien
ggagaagcggtagtttagaggcagc

SEQ ID NO: 1865034 - DNA, 25 bp, Homo sapien
agggagaagcggtagtttagaggca

SEQ ID NO: 1865035 - DNA, 25 bp, Homo sapien
gggagaagcggtagtttagaggcag

SEQ ID NO: 1865036 - DNA, 25 bp, Homo sapien
aaagatctgtcacccattgtgccca

SEQ ID NO: 1865037 - DNA, 25 bp, Homo sapien
tgcacccaccttgtcctgtagactg

SEQ ID NO: 1865038 - DNA, 25 bp, Homo sapien
aaggacacgaggtacatcccgacct

SEQ ID NO: 1865039 - DNA, 25 bp, Homo sapien
gctacacagtgaaccaggtgcctca

SEQ ID NO: 1865040 - DNA, 25 bp, Homo sapien
catgggccttgaggattcggacgat

SEQ ID NO: 1865041 - DNA, 25 bp, Homo sapien
gcagttcagaagattccgtctcttc

SEQ ID NO: 1865042 - DNA, 25 bp, Homo sapien
cagacagacaagctggtcaatgtgc

SEQ ID NO: 1865043 - DNA, 25 bp, Homo sapien
aagttctggccgtcttcaccctcag

SEQ ID NO: 1865044 - DNA, 25 bp, Homo sapien
gctgccatctcgaatcttgaggacc

SEQ ID NO: 1865045 - DNA, 25 bp, Homo sapien
caatgtcccatctcgacctgggttc

SEQ ID NO: 1865046 - DNA, 25 bp, Homo sapien
tccttgctgccatctcgaatcttga

SEQ ID NO: 1865047 - DNA, 25 bp, Homo sapien
ctgaggtgggatgagccgcacaatg

SEQ ID NO: 1865048 - DNA, 25 bp, Homo sapien
tatatccttttgctcgtgaaggtcc

SEQ ID NO: 1865049 - DNA, 25 bp, Homo sapien
gggcccaatcgcctgattgagcatg

SEQ ID NO: 1865050 - DNA, 25 bp, Homo sapien
gattgagcatgtctgcggagagccc

SEQ ID NO: 1865051 - DNA, 25 bp, Homo sapien
agagccctgagaacgccagcagact

SEQ ID NO: 1865052 - DNA, 25 bp, Homo sapien
ggaagagaggcaagggacaaagtgg

SEQ ID NO: 1865053 - DNA, 25 bp, Homo sapien
gacacatgcagggtctggttcccaa

SEQ ID NO: 1865054 - DNA, 25 bp, Homo sapien
tggacacatgcagggtctggttccc

SEQ ID NO: 1865055 - DNA, 25 bp, Homo sapien
gtggacacatgcagggtctggttcc

SEQ ID NO: 1865056 - DNA, 25 bp, Homo sapien
cttcaggtcgttgagatacagcagt

SEQ ID NO: 1865057 - DNA, 25 bp, Homo sapien
agtcgcctctgtgagcctcgctcaa

SEQ ID NO: 1865058 - DNA, 25 bp, Homo sapien
agcctcgctcaagggcagggtggct

SEQ ID NO: 1865059 - DNA, 25 bp, Homo sapien
tgcagtcgcctctgtgagcctcgct

SEQ ID NO: 1865060 - DNA, 25 bp, Homo sapien
cctctgtgagcctcgctcaagggca

SEQ ID NO: 1865061 - DNA, 25 bp, Homo sapien
cgtcacccacaaagagattcccagg

SEQ ID NO: 1865062 - DNA, 25 bp, Homo sapien
cactgtttttcccatggcctaggga

SEQ ID NO: 1865063 - DNA, 25 bp, Homo sapien
gggatcaggtatctgacagcacctg

SEQ ID NO: 1865064 - DNA, 25 bp, Homo sapien
ggaaacaatgtctcccctattagga

SEQ ID NO: 1865065 - DNA, 25 bp, Homo sapien
aagttggagtatctgttcaaagtgc

SEQ ID NO: 1865066 - DNA, 25 bp, Homo sapien
aaagtgcccctcaggtaggagggca

SEQ ID NO: 1865067 - DNA, 25 bp, Homo sapien
gtagaagttggagtatctgttcaaa

SEQ ID NO: 1865068 - DNA, 25 bp, Homo sapien
caggagtgtcgggacaggacaagca

SEQ ID NO: 1865069 - DNA, 25 bp, Homo sapien
tgccccttcatagtagaggtcctca

SEQ ID NO: 1865070 - DNA, 25 bp, Homo sapien
ctccttgccactggccccaaggccc

SEQ ID NO: 1865071 - DNA, 25 bp, Homo sapien
ttccttctcgctcttgtgctccttg

SEQ ID NO: 1865072 - DNA, 25 bp, Homo sapien
cttcatagtagaggtcctcattctc

SEQ ID NO: 1865073 - DNA, 25 bp, Homo sapien
ctaccctcttatttgcttatccctt

SEQ ID NO: 1865074 - DNA, 25 bp, Homo sapien
ttgcttatcccttccaaggcactca

SEQ ID NO: 1865075 - DNA, 25 bp, Homo sapien
ctccagtctgctccacgcccctctt

SEQ ID NO: 1865076 - DNA, 25 bp, Homo sapien
tgaaggagcacagggttcccagatg

SEQ ID NO: 1865077 - DNA, 25 bp, Homo sapien
agctcgagaccacgcccaggagacg

SEQ ID NO: 1865078 - DNA, 25 bp, Homo sapien
gttggggaagcagggaccgatctgc

SEQ ID NO: 1865079 - DNA, 25 bp, Homo sapien
gagaccacgcccaggagacggtccg

SEQ ID NO: 1865080 - DNA, 25 bp, Homo sapien
gaagcagggaccgatctgctccagc

SEQ ID NO: 1865081 - DNA, 25 bp, Homo sapien
ccaccgatccggctgccctggatct

SEQ ID NO: 1865082 - DNA, 25 bp, Homo sapien
atctgctggtcaatgtgccgggcga

SEQ ID NO: 1865083 - DNA, 25 bp, Homo sapien
tggtggctatctccaagccggagaa

SEQ ID NO: 1865084 - DNA, 25 bp, Homo sapien
atgtgccgggcgaactgctcactca

SEQ ID NO: 1865085 - DNA, 25 bp, Homo sapien
ttaaagtgctcacagtagcgtggca

SEQ ID NO: 1865086 - DNA, 25 bp, Homo sapien
aaacagttcagagcttgagttctgc

SEQ ID NO: 1865087 - DNA, 25 bp, Homo sapien
cccgcacagccattttgcagcgcca

SEQ ID NO: 1865088 - DNA, 25 bp, Homo sapien
tgagaaaagggagcttcagcaaggc

SEQ ID NO: 1865089 - DNA, 25 bp, Homo sapien
gccccgggtagccaaggagctccag

SEQ ID NO: 1865090 - DNA, 25 bp, Homo sapien
gagctccagtcgtggcttctgtttc

SEQ ID NO: 1865091 - DNA, 25 bp, Homo sapien
ggcccgccaacagcgcgtcaggttt

SEQ ID NO: 1865092 - DNA, 25 bp, Homo sapien
ccaacagcgcgtcaggtttctcatg

SEQ ID NO: 1865093 - DNA, 25 bp, Homo sapien
agcaggtgagtgagacggcgcaccc

SEQ ID NO: 1865094 - DNA, 25 bp, Homo sapien
acccgcgagaagaaagctgggccgc

SEQ ID NO: 1865095 - DNA, 25 bp, Homo sapien
acactccaggtactggtccagcagc

SEQ ID NO: 1865096 - DNA, 25 bp, Homo sapien
acagggctcgacatgcaccagcagg

SEQ ID NO: 1865097 - DNA, 25 bp, Homo sapien
aatgatacaaggaaggggggccagg

SEQ ID NO: 1865098 - DNA, 25 bp, Homo sapien
gaatgatacaaggaaggggggccag

SEQ ID NO: 1865099 - DNA, 25 bp, Homo sapien
tgatacaaggaaggggggccaggta

SEQ ID NO: 1865100 - DNA, 25 bp, Homo sapien
ggaatgatacaaggaaggggggcca

SEQ ID NO: 1865101 - DNA, 25 bp, Homo sapien
cgtgggtaacgagcgaaaatctgtc

SEQ ID NO: 1865102 - DNA, 25 bp, Homo sapien
gggtaacaaggcacctccagcactt

SEQ ID NO: 1865103 - DNA, 25 bp, Homo sapien
cctgacacttgagagacatgggaaa

SEQ ID NO: 1865104 - DNA, 25 bp, Homo sapien
tacaaatgcaggtgccaaaagggcc

SEQ ID NO: 1865105 - DNA, 25 bp, Homo sapien
agcttgggcagcctcgtcatcaggg

SEQ ID NO: 1865106 - DNA, 25 bp, Homo sapien
ttgggcagcctcgtcatcagggagg

SEQ ID NO: 1865107 - DNA, 25 bp, Homo sapien
gcaaaattctgctcctggcgcagag

SEQ ID NO: 1865108 - DNA, 25 bp, Homo sapien
caaaattctgctcctggcgcagagc

SEQ ID NO: 1865109 - DNA, 25 bp, Homo sapien
aacactggccagaacgtgggcttgg

SEQ ID NO: 1865110 - DNA, 25 bp, Homo sapien
aggcctgtgcccgaaccatgtagaa

SEQ ID NO: 1865111 - DNA, 25 bp, Homo sapien
ggcttggggcctaggatctctaacc

SEQ ID NO: 1865112 - DNA, 25 bp, Homo sapien
accatgtagaagaggcgtgtgtgac

SEQ ID NO: 1865113 - DNA, 25 bp, Homo sapien
cacacacaggactatcttcactcgc

SEQ ID NO: 1865114 - DNA, 25 bp, Homo sapien
acacacaggactatcttcactcgct

SEQ ID NO: 1865115 - DNA, 25 bp, Homo sapien
cacacaggactatcttcactcgctc

SEQ ID NO: 1865116 - DNA, 25 bp, Homo sapien
ggccacaccccacatccctggcccc

SEQ ID NO: 1865117 - DNA, 25 bp, Homo sapien
ccagggccacaccccacatccctgg

SEQ ID NO: 1865118 - DNA, 25 bp, Homo sapien
gggccacaccccacatccctggccc

SEQ ID NO: 1865119 - DNA, 25 bp, Homo sapien
ccacaccccacatccctggccccac

SEQ ID NO: 1865120 - DNA, 25 bp, Homo sapien
gcagcgctttatgcggatctggatg

SEQ ID NO: 1865121 - DNA, 25 bp, Homo sapien
ctgctggcagcgctttatgcggatc

SEQ ID NO: 1865122 - DNA, 25 bp, Homo sapien
gctggcagcgctttatgcggatctg

SEQ ID NO: 1865123 - DNA, 25 bp, Homo sapien
cgctttatgcggatctggatgatgg

SEQ ID NO: 1865124 - DNA, 25 bp, Homo sapien
ggcagggggcagagaaagctgtcac

SEQ ID NO: 1865125 - DNA, 25 bp, Homo sapien
tggcagggggcagagaaagctgtca

SEQ ID NO: 1865126 - DNA, 25 bp, Homo sapien
ctggcagggggcagagaaagctgtc

SEQ ID NO: 1865127 - DNA, 25 bp, Homo sapien
aaaaaagtaggatagggccagatag

SEQ ID NO: 1865128 - DNA, 25 bp, Homo sapien
gcctggtggcacaagcacagggata

SEQ ID NO: 1865129 - DNA, 25 bp, Homo sapien
gctcaagacaggtgggagttagaaa

SEQ ID NO: 1865130 - DNA, 25 bp, Homo sapien
ccaagttggctctaggctccagtcc

SEQ ID NO: 1865131 - DNA, 25 bp, Homo sapien
aagagagctagtgctatcacccccg

SEQ ID NO: 1865132 - DNA, 25 bp, Homo sapien
ggccggcatgtaactcgagtcctca

SEQ ID NO: 1865133 - DNA, 25 bp, Homo sapien
agttgagttccgtgtgaagagagct

SEQ ID NO: 1865134 - DNA, 25 bp, Homo sapien
cactcgggccggcatgtaactcgag

SEQ ID NO: 1865135 - DNA, 25 bp, Homo sapien
tgtgcagggtgatgtagtgggagcc

SEQ ID NO: 1865136 - DNA, 25 bp, Homo sapien
tcttggggttgtggtccgtcagctt

SEQ ID NO: 1865137 - DNA, 25 bp, Homo sapien
gcatgtgcagggtgatgtagtggga

SEQ ID NO: 1865138 - DNA, 25 bp, Homo sapien
ggttgtggtccgtcagcttgctggc

SEQ ID NO: 1865139 - DNA, 25 bp, Homo sapien
tggtggtcacggtcaggtagggtgt

SEQ ID NO: 1865140 - DNA, 25 bp, Homo sapien
gagcaacacggcaacaggcacgaac

SEQ ID NO: 1865141 - DNA, 25 bp, Homo sapien
tcacggtcaggtagggtgtagaggg

SEQ ID NO: 1865142 - DNA, 25 bp, Homo sapien
gggaggtggagcaacacggcaacag

SEQ ID NO: 1865143 - DNA, 25 bp, Homo sapien
cctggcacaggtatctgaggaacac

SEQ ID NO: 1865144 - DNA, 25 bp, Homo sapien
gaacacggagacacacacggaaaca

SEQ ID NO: 1865145 - DNA, 25 bp, Homo sapien
gggtcactagagtcacctgctgttc

SEQ ID NO: 1865146 - DNA, 25 bp, Homo sapien
tattctgatgccactctaagcccac

SEQ ID NO: 1865147 - DNA, 25 bp, Homo sapien
aacacggatgaaggagagaccatgc

SEQ ID NO: 1865148 - DNA, 25 bp, Homo sapien
agtttgcggtagaggtgggcatgct

SEQ ID NO: 1865149 - DNA, 25 bp, Homo sapien
ggtgatgagtttgcggtagaggtgg

SEQ ID NO: 1865150 - DNA, 25 bp, Homo sapien
ttggtgatgagtttgcggtagaggt

SEQ ID NO: 1865151 - DNA, 25 bp, Homo sapien
gatgagtttgcggtagaggtgggca

SEQ ID NO: 1865152 - DNA, 25 bp, Homo sapien
gcatagtccctgctcactgaggtca

SEQ ID NO: 1865153 - DNA, 25 bp, Homo sapien
ccagctgattcagcaccacggcata

SEQ ID NO: 1865154 - DNA, 25 bp, Homo sapien
agggccttggagatagcgtctcttg

SEQ ID NO: 1865155 - DNA, 25 bp, Homo sapien
gccttggagatagcgtctcttgctc

SEQ ID NO: 1865156 - DNA, 25 bp, Homo sapien
ttgttagagcgttttgatttgtgaa

SEQ ID NO: 1865157 - DNA, 25 bp, Homo sapien
cttgttagagcgttttgatttgtga

SEQ ID NO: 1865158 - DNA, 25 bp, Homo sapien
agcagcagtgcctcggggaagtcca

SEQ ID NO: 1865159 - DNA, 25 bp, Homo sapien
gcatccacggcctcgtgccagggga

SEQ ID NO: 1865160 - DNA, 25 bp, Homo sapien
ctctcgatcagtgtttggggaccgc

SEQ ID NO: 1865161 - DNA, 25 bp, Homo sapien
ccgcaggcaggccatgcaggcatcc

SEQ ID NO: 1865162 - DNA, 25 bp, Homo sapien
gtgcagggtcctgttagtctccgga

SEQ ID NO: 1865163 - DNA, 25 bp, Homo sapien
tgagctgagggcttgctctagatcc

SEQ ID NO: 1865164 - DNA, 25 bp, Homo sapien
tagatccaggaggattttcccagct

SEQ ID NO: 1865165 - DNA, 25 bp, Homo sapien
cagggtcctgttagtctccggagtg

SEQ ID NO: 1865166 - DNA, 25 bp, Homo sapien
ttcttaaaatagcaaagtagcttca

SEQ ID NO: 1865167 - DNA, 25 bp, Homo sapien
taaaatagcaaagtagcttcatctg

SEQ ID NO: 1865168 - DNA, 25 bp, Homo sapien
gcctttatattcttaaaatagcaaa

SEQ ID NO: 1865169 - DNA, 25 bp, Homo sapien
cggcctttatattcttaaaatagca

SEQ ID NO: 1865170 - DNA, 25 bp, Homo sapien
tccagaaaggattgcataaaaatca

SEQ ID NO: 1865171 - DNA, 25 bp, Homo sapien
tctaagttgcagcttctaaggtggc

SEQ ID NO: 1865172 - DNA, 25 bp, Homo sapien
aaaacaggagagcacttccctttat

SEQ ID NO: 1865173 - DNA, 25 bp, Homo sapien
tctcctgtgctactgccctgaaggt

SEQ ID NO: 1865174 - DNA, 25 bp, Homo sapien
cgtctagcaggaggacatcttcttg

SEQ ID NO: 1865175 - DNA, 25 bp, Homo sapien
ttagcctgggcctgcgcgtctagca

SEQ ID NO: 1865176 - DNA, 25 bp, Homo sapien
cttcttgggcttctagaagggatgg

SEQ ID NO: 1865177 - DNA, 25 bp, Homo sapien
gatgggtaggcttggttccctgcta

SEQ ID NO: 1865178 - DNA, 25 bp, Homo sapien
tgagggcactgtcattgagtcgctg

SEQ ID NO: 1865179 - DNA, 25 bp, Homo sapien
catggcagttgatcaggtccctgag

SEQ ID NO: 1865180 - DNA, 25 bp, Homo sapien
gtagacatggcagttgatcaggtcc

SEQ ID NO: 1865181 - DNA, 25 bp, Homo sapien
ggcactgtcattgagtcgctgtggc

SEQ ID NO: 1865182 - DNA, 25 bp, Homo sapien
cacggccagttcagctaggatctca

SEQ ID NO: 1865183 - DNA, 25 bp, Homo sapien
ctgggccaattctatgggcacggcc

SEQ ID NO: 1865184 - DNA, 25 bp, Homo sapien
aattctatgggcacggccagttcag

SEQ ID NO: 1865185 - DNA, 25 bp, Homo sapien
tatgggcacggccagttcagctagg

SEQ ID NO: 1865186 - DNA, 25 bp, Homo sapien
gtccagcccttgcaatagagccctc

SEQ ID NO: 1865187 - DNA, 25 bp, Homo sapien
tctctgcacacataccctccatcct

SEQ ID NO: 1865188 - DNA, 25 bp, Homo sapien
gccttccaaatgctctatacagtcc

SEQ ID NO: 1865189 - DNA, 25 bp, Homo sapien
ctgccatcaaggagaagctctcact

SEQ ID NO: 1865190 - DNA, 25 bp, Homo sapien
ctgagtgtctccaggctggctctac

SEQ ID NO: 1865191 - DNA, 25 bp, Homo sapien
tctgagtgtctccaggctggctcta

SEQ ID NO: 1865192 - DNA, 25 bp, Homo sapien
ctctgagtgtctccaggctggctct

SEQ ID NO: 1865193 - DNA, 25 bp, Homo sapien
gcatagagttctgtcatgggcctcc

SEQ ID NO: 1865194 - DNA, 25 bp, Homo sapien
gatctggagaacctcctgatggtca

SEQ ID NO: 1865195 - DNA, 25 bp, Homo sapien
tgaagaagaggagttcccaccactc

SEQ ID NO: 1865196 - DNA, 25 bp, Homo sapien
taaggcacagcatagagttctgtca

SEQ ID NO: 1865197 - DNA, 25 bp, Homo sapien
aaggggcacaaggatgtcactagca

SEQ ID NO: 1865198 - DNA, 25 bp, Homo sapien
caaggatgtcactagcaactcagca

SEQ ID NO: 1865199 - DNA, 25 bp, Homo sapien
gtcactagcaactcagcaggaccac

SEQ ID NO: 1865200 - DNA, 25 bp, Homo sapien
gggcacaaggatgtcactagcaact

SEQ ID NO: 1865201 - DNA, 25 bp, Homo sapien
tgcggcctgttgactcccaaaatac

SEQ ID NO: 1865202 - DNA, 25 bp, Homo sapien
tgccccttggtactcatcagcctca

SEQ ID NO: 1865203 - DNA, 25 bp, Homo sapien
ccactgccccttggtactcatcagc

SEQ ID NO: 1865204 - DNA, 25 bp, Homo sapien
aggtgcggcctgttgactcccaaaa

SEQ ID NO: 1865205 - DNA, 25 bp, Homo sapien
gcccagtactgaggactatagccct

SEQ ID NO: 1865206 - DNA, 25 bp, Homo sapien
ccagtactgaggactatagccctca

SEQ ID NO: 1865207 - DNA, 25 bp, Homo sapien
tgtggcccagtactgaggactatag

SEQ ID NO: 1865208 - DNA, 25 bp, Homo sapien
ctgaggactatagccctcagggtga

SEQ ID NO: 1865209 - DNA, 25 bp, Homo sapien
acacacacacacaggatgccttctc

SEQ ID NO: 1865210 - DNA, 25 bp, Homo sapien
cagcatatggagaatacacacacac

SEQ ID NO: 1865211 - DNA, 25 bp, Homo sapien
cacacacacaggatgccttctcctt

SEQ ID NO: 1865212 - DNA, 25 bp, Homo sapien
acacacacaggatgccttctccttt

SEQ ID NO: 1865213 - DNA, 25 bp, Homo sapien
ttcttgacttcacagcctcctaaac

SEQ ID NO: 1865214 - DNA, 25 bp, Homo sapien
ttcacagcctcctaaacccagattt

SEQ ID NO: 1865215 - DNA, 25 bp, Homo sapien
gagtcttcttgacttcacagcctcc

SEQ ID NO: 1865216 - DNA, 25 bp, Homo sapien
tcacagcctcctaaacccagatttt

SEQ ID NO: 1865217 - DNA, 25 bp, Homo sapien
gctctgccctaccccaaatagaccc

SEQ ID NO: 1865218 - DNA, 25 bp, Homo sapien
acccccaacagtatcccaccaccat

SEQ ID NO: 1865219 - DNA, 25 bp, Homo sapien
cccccaacagtatcccaccaccatg

SEQ ID NO: 1865220 - DNA, 25 bp, Homo sapien
aatcatccagcatccgcactcgcat

SEQ ID NO: 1865221 - DNA, 25 bp, Homo sapien
atcatccagcatccgcactcgcatc

SEQ ID NO: 1865222 - DNA, 25 bp, Homo sapien
cataatcatccagcatccgcactcg

SEQ ID NO: 1865223 - DNA, 25 bp, Homo sapien
ataatcatccagcatccgcactcgc

SEQ ID NO: 1865224 - DNA, 25 bp, Homo sapien
cacttgcgaactcagaacgagggcg

SEQ ID NO: 1865225 - DNA, 25 bp, Homo sapien
cagaacgagggcgaaaacgtcttga

SEQ ID NO: 1865226 - DNA, 25 bp, Homo sapien
tgtgtcccgcacatacaaagcatag

SEQ ID NO: 1865227 - DNA, 25 bp, Homo sapien
caaagcataggtattgccacttgcg

SEQ ID NO: 1865228 - DNA, 25 bp, Homo sapien
ggaaccgggggaccgtgctgagctc

SEQ ID NO: 1865229 - DNA, 25 bp, Homo sapien
gaggctggaagatggaaccggggga

SEQ ID NO: 1865230 - DNA, 25 bp, Homo sapien
gagctccttggtctgtctgaggcct

SEQ ID NO: 1865231 - DNA, 25 bp, Homo sapien
aaccgggggaccgtgctgagctcct

SEQ ID NO: 1865232 - DNA, 25 bp, Homo sapien
tgcaaataccgcttcaccagggaga

SEQ ID NO: 1865233 - DNA, 25 bp, Homo sapien
ccatggccatactgaactccagctc

SEQ ID NO: 1865234 - DNA, 25 bp, Homo sapien
agctccgagatcagggtgcccatgg

SEQ ID NO: 1865235 - DNA, 25 bp, Homo sapien
agcactgtcgttcagctgatccagg

SEQ ID NO: 1865236 - DNA, 25 bp, Homo sapien
ctccataccatcctctgcagatagg

SEQ ID NO: 1865237 - DNA, 25 bp, Homo sapien
ctatatccaccttgtcccagtttaa

SEQ ID NO: 1865238 - DNA, 25 bp, Homo sapien
cataccatcctctgcagataggtgc

SEQ ID NO: 1865239 - DNA, 25 bp, Homo sapien
cttgtcccagtttaagcccctctct

SEQ ID NO: 1865240 - DNA, 25 bp, Homo sapien
cagcggctgtcaaaatccaggtgtt

SEQ ID NO: 1865241 - DNA, 25 bp, Homo sapien
tgttcagagagcgtggcctgtgcaa

SEQ ID NO: 1865242 - DNA, 25 bp, Homo sapien
gctgaatgccctcgaaagacatggg

SEQ ID NO: 1865243 - DNA, 25 bp, Homo sapien
cctgtgcaaacagtgctagcagagc

SEQ ID NO: 1865244 - DNA, 25 bp, Homo sapien
caatgagaaagaactgatttgcttc

SEQ ID NO: 1865245 - DNA, 25 bp, Homo sapien
aatccttttgccaccacacaatgag

SEQ ID NO: 1865246 - DNA, 25 bp, Homo sapien
gcacataaacacgatctacaatagt

SEQ ID NO: 1865247 - DNA, 25 bp, Homo sapien
tcacccttcctagaaatcttagacc

SEQ ID NO: 1865248 - DNA, 25 bp, Homo sapien
gccacagtgtcctgtgagtccctga

SEQ ID NO: 1865249 - DNA, 25 bp, Homo sapien
ctgtgagtccctgagccgacccagc

SEQ ID NO: 1865250 - DNA, 25 bp, Homo sapien
acagtgtcctgtgagtccctgagcc

SEQ ID NO: 1865251 - DNA, 25 bp, Homo sapien
gtgtcctgtgagtccctgagccgac

SEQ ID NO: 1865252 - DNA, 25 bp, Homo sapien
tctgaatgagggacttcacgtcggt

SEQ ID NO: 1865253 - DNA, 25 bp, Homo sapien
gataatcaggactactcaacatgtg

SEQ ID NO: 1865254 - DNA, 25 bp, Homo sapien
ccagcatcttgtggcagttggcata

SEQ ID NO: 1865255 - DNA, 25 bp, Homo sapien
agcaggagggatagtgcccacacac

SEQ ID NO: 1865256 - DNA, 25 bp, Homo sapien
gtccccctcatcgccacgccgcagg

SEQ ID NO: 1865257 - DNA, 25 bp, Homo sapien
ccctcatcgccacgccgcaggatga

SEQ ID NO: 1865258 - DNA, 25 bp, Homo sapien
cgtccccctcatcgccacgccgcag

SEQ ID NO: 1865259 - DNA, 25 bp, Homo sapien
ccccctcatcgccacgccgcaggat

SEQ ID NO: 1865260 - DNA, 25 bp, Homo sapien
gatctggtactcaggatgcccatca

SEQ ID NO: 1865261 - DNA, 25 bp, Homo sapien
catcatggcccacgcgctggcggat

SEQ ID NO: 1865262 - DNA, 25 bp, Homo sapien
caggataggcatgtaagccgggccc

SEQ ID NO: 1865263 - DNA, 25 bp, Homo sapien
gaattccctgtagcggagttctccc

SEQ ID NO: 1865264 - DNA, 25 bp, Homo sapien
cccaggagttgcatgctgcacgctg

SEQ ID NO: 1865265 - DNA, 25 bp, Homo sapien
gcagccttggagttacaagtgaatc

SEQ ID NO: 1865266 - DNA, 25 bp, Homo sapien
gagtgcgagacccaagttaagagtc

SEQ ID NO: 1865267 - DNA, 25 bp, Homo sapien
ttgatatggaacagtgggcggacta

SEQ ID NO: 1865268 - DNA, 25 bp, Homo sapien
ttggaggcgcctccgactggagcaa

SEQ ID NO: 1865269 - DNA, 25 bp, Homo sapien
gcgaggctcgatgggctagtgggca

SEQ ID NO: 1865270 - DNA, 25 bp, Homo sapien
ctagaaccccgaggcacggtaggat

SEQ ID NO: 1865271 - DNA, 25 bp, Homo sapien
gattaggccccataagctagaaccc

SEQ ID NO: 1865272 - DNA, 25 bp, Homo sapien
acgcggcacagacgctggcggcgac

SEQ ID NO: 1865273 - DNA, 25 bp, Homo sapien
ggtcctggcgcgaggcctgtccttc

SEQ ID NO: 1865274 - DNA, 25 bp, Homo sapien
ttcacagagcaagggacgcggcaca

SEQ ID NO: 1865275 - DNA, 25 bp, Homo sapien
cgcgaggcctgtccttcacagagca

SEQ ID NO: 1865276 - DNA, 25 bp, Homo sapien
tcatttccgcccgacccagcggaaa

SEQ ID NO: 1865277 - DNA, 25 bp, Homo sapien
gtgcctccgcggaacagagctgcac

SEQ ID NO: 1865278 - DNA, 25 bp, Homo sapien
agctgcacccgcgtgagtcggcagc

SEQ ID NO: 1865279 - DNA, 25 bp, Homo sapien
agccaaaagccacggctcatttccg

SEQ ID NO: 1865280 - DNA, 25 bp, Homo sapien
ccggctccattacttgtaagggaat

SEQ ID NO: 1865281 - DNA, 25 bp, Homo sapien
atccccggctccattacttgtaagg

SEQ ID NO: 1865282 - DNA, 25 bp, Homo sapien
ctccattacttgtaagggaattggg

SEQ ID NO: 1865283 - DNA, 25 bp, Homo sapien
catccccggctccattacttgtaag

SEQ ID NO: 1865284 - DNA, 25 bp, Homo sapien
ccacgtttagtctgtaccatcccct

SEQ ID NO: 1865285 - DNA, 25 bp, Homo sapien
cacgtttagtctgtaccatcccctc

SEQ ID NO: 1865286 - DNA, 25 bp, Homo sapien
tccccacgtttagtctgtaccatcc

SEQ ID NO: 1865287 - DNA, 25 bp, Homo sapien
ttccccacgtttagtctgtaccatc

SEQ ID NO: 1865288 - DNA, 25 bp, Homo sapien
ggggcattttattagagtacaggga

SEQ ID NO: 1865289 - DNA, 25 bp, Homo sapien
gggcattttattagagtacagggat

SEQ ID NO: 1865290 - DNA, 25 bp, Homo sapien
ggcattttattagagtacagggata

SEQ ID NO: 1865291 - DNA, 25 bp, Homo sapien
ggcagaagcagaaggcagcttcacg

SEQ ID NO: 1865292 - DNA, 25 bp, Homo sapien
tcagctttgggcagaagcagaaggc

SEQ ID NO: 1865293 - DNA, 25 bp, Homo sapien
gcagaagcagaaggcagcttcacgt

SEQ ID NO: 1865294 - DNA, 25 bp, Homo sapien
gaagcagaaggcagcttcacgtaac

SEQ ID NO: 1865295 - DNA, 25 bp, Homo sapien
gcccagccccccttgcggtgccacc

SEQ ID NO: 1865296 - DNA, 25 bp, Homo sapien
gccccccttgcggtgccaccgccca

SEQ ID NO: 1865297 - DNA, 25 bp, Homo sapien
agcccagccccccttgcggtgccac

SEQ ID NO: 1865298 - DNA, 25 bp, Homo sapien
ccagccccccttgcggtgccaccgc

SEQ ID NO: 1865299 - DNA, 25 bp, Homo sapien
tatgatcaacgttggatactcggcc

SEQ ID NO: 1865300 - DNA, 25 bp, Homo sapien
gttgcgacctgccttgccaatgacc

SEQ ID NO: 1865301 - DNA, 25 bp, Homo sapien
ggcctactgttgctacgcacgtttc

SEQ ID NO: 1865302 - DNA, 25 bp, Homo sapien
caatgacccgtttgttatgatcaac

SEQ ID NO: 1865303 - DNA, 25 bp, Homo sapien
tctgcctcttagagggcagctggat

SEQ ID NO: 1865304 - DNA, 25 bp, Homo sapien
tggctgtgccattcaccttccgcag

SEQ ID NO: 1865305 - DNA, 25 bp, Homo sapien
tgtgccattcaccttccgcagtagc

SEQ ID NO: 1865306 - DNA, 25 bp, Homo sapien
taatggctgtgccattcaccttccg

SEQ ID NO: 1865307 - DNA, 25 bp, Homo sapien
taccagatgtggaaccatgggttca

SEQ ID NO: 1865308 - DNA, 25 bp, Homo sapien
cagatacacaaagaaggacgcatgc

SEQ ID NO: 1865309 - DNA, 25 bp, Homo sapien
ggaaagaagctgatttgccaccctc

SEQ ID NO: 1865310 - DNA, 25 bp, Homo sapien
ggacgcatgctatgttttaggtaaa

SEQ ID NO: 1865311 - DNA, 25 bp, Homo sapien
agaggatgcgcatccccttcccgag

SEQ ID NO: 1865312 - DNA, 25 bp, Homo sapien
ctttccacgttgttgatgagggtcc

SEQ ID NO: 1865313 - DNA, 25 bp, Homo sapien
actttccacgttgttgatgagggtc

SEQ ID NO: 1865314 - DNA, 25 bp, Homo sapien
caagaggatgcgcatccccttcccg

SEQ ID NO: 1865315 - DNA, 25 bp, Homo sapien
ttagctctagaacttttgctgcctc

SEQ ID NO: 1865316 - DNA, 25 bp, Homo sapien
cattagctctagaacttttgctgcc

SEQ ID NO: 1865317 - DNA, 25 bp, Homo sapien
tcattagctctagaacttttgctgc

SEQ ID NO: 1865318 - DNA, 25 bp, Homo sapien
tttcattagctctagaacttttgct

SEQ ID NO: 1865319 - DNA, 25 bp, Homo sapien
gtggcgatgatccagcgtttccggc

SEQ ID NO: 1865320 - DNA, 25 bp, Homo sapien
ggcgatgatccagcgtttccggctg

SEQ ID NO: 1865321 - DNA, 25 bp, Homo sapien
cgatgatccagcgtttccggctgcc

SEQ ID NO: 1865322 - DNA, 25 bp, Homo sapien
gatgatccagcgtttccggctgccc

SEQ ID NO: 1865323 - DNA, 25 bp, Homo sapien
agggtgagggacaggtaagcagacc

SEQ ID NO: 1865324 - DNA, 25 bp, Homo sapien
ggacaggtaagcagaccgtctaggc

SEQ ID NO: 1865325 - DNA, 25 bp, Homo sapien
tgagggacaggtaagcagaccgtct

SEQ ID NO: 1865326 - DNA, 25 bp, Homo sapien
ggtaagcagaccgtctaggcagccc

SEQ ID NO: 1865327 - DNA, 25 bp, Homo sapien
gggatcatagcggacttggataacc

SEQ ID NO: 1865328 - DNA, 25 bp, Homo sapien
gcggacttggataaccttctcctca

SEQ ID NO: 1865329 - DNA, 25 bp, Homo sapien
catagcggacttggataaccttctc

SEQ ID NO: 1865330 - DNA, 25 bp, Homo sapien
ggacttggataaccttctcctcaaa

SEQ ID NO: 1865331 - DNA, 25 bp, Homo sapien
attcgataacgttgcttgtggcccc

SEQ ID NO: 1865332 - DNA, 25 bp, Homo sapien
gccaataccatgcacccggattcgg

SEQ ID NO: 1865333 - DNA, 25 bp, Homo sapien
aggccggaaacgcagaaagtcaatc

SEQ ID NO: 1865334 - DNA, 25 bp, Homo sapien
gcagaaagtcaatcattcgataacg

SEQ ID NO: 1865335 - DNA, 25 bp, Homo sapien
tctctgactcctgtacacatactac

SEQ ID NO: 1865336 - DNA, 25 bp, Homo sapien
aaattgtctttagaagcatagacca

SEQ ID NO: 1865337 - DNA, 25 bp, Homo sapien
attgctttgtattctactctctgac

SEQ ID NO: 1865338 - DNA, 25 bp, Homo sapien
catggcacttcctgtgtatggccca

SEQ ID NO: 1865339 - DNA, 25 bp, Homo sapien
cttttgactgcttaaatccccctgt

SEQ ID NO: 1865340 - DNA, 25 bp, Homo sapien
gccttacaaggtacaagtgtgtcaa

SEQ ID NO: 1865341 - DNA, 25 bp, Homo sapien
gctttttaattacattcctctgcct

SEQ ID NO: 1865342 - DNA, 25 bp, Homo sapien
aagtgtgtcaatatacaagtctagg

SEQ ID NO: 1865343 - DNA, 25 bp, Homo sapien
cttcactggtgtaatggtgtacttg

SEQ ID NO: 1865344 - DNA, 25 bp, Homo sapien
cttggtacgactcttccaggacaca

SEQ ID NO: 1865345 - DNA, 25 bp, Homo sapien
tgtaatggtgtacttggtacgactc

SEQ ID NO: 1865346 - DNA, 25 bp, Homo sapien
cgactcttccaggacacaaagttgg

SEQ ID NO: 1865347 - DNA, 25 bp, Homo sapien
tgggcggcaggggagcaacatcaag

SEQ ID NO: 1865348 - DNA, 25 bp, Homo sapien
gctgttggaggaggccattgttcat

SEQ ID NO: 1865349 - DNA, 25 bp, Homo sapien
gttggaggaggccattgttcatcat

SEQ ID NO: 1865350 - DNA, 25 bp, Homo sapien
aacatcaaggcagagggctgttgga

SEQ ID NO: 1865351 - DNA, 25 bp, Homo sapien
agactcgcaactcccgcctcgcatg

SEQ ID NO: 1865352 - DNA, 25 bp, Homo sapien
atgactcctgaccagactcgcaact

SEQ ID NO: 1865353 - DNA, 25 bp, Homo sapien
ctgcatgactcctgaccagactcgc

SEQ ID NO: 1865354 - DNA, 25 bp, Homo sapien
gcatgcccgcagaccccatctccgg

SEQ ID NO: 1865355 - DNA, 25 bp, Homo sapien
gtcgggggcgccaggttcagagagc

SEQ ID NO: 1865356 - DNA, 25 bp, Homo sapien
gcagagcgcgggtcagtgcgcacag

SEQ ID NO: 1865357 - DNA, 25 bp, Homo sapien
gcgcgggtcagtgcgcacagggcca

SEQ ID NO: 1865358 - DNA, 25 bp, Homo sapien
caggttcagagagcgcagagcgcgg

SEQ ID NO: 1865359 - DNA, 25 bp, Homo sapien
agcacgacacccttacttttagcca

SEQ ID NO: 1865360 - DNA, 25 bp, Homo sapien
gccgtcgctccgcaataacgtaaaa

SEQ ID NO: 1865361 - DNA, 25 bp, Homo sapien
tagatgacgttgactgtccggcgcc

SEQ ID NO: 1865362 - DNA, 25 bp, Homo sapien
gctgctcggtgctcctagatgacgt

SEQ ID NO: 1865363 - DNA, 25 bp, Homo sapien
tgggcagggcagatcctctgactct

SEQ ID NO: 1865364 - DNA, 25 bp, Homo sapien
cagtttcttccgtgctctggcctga

SEQ ID NO: 1865365 - DNA, 25 bp, Homo sapien
gaccctgtaatgtggatcctgcaag

SEQ ID NO: 1865366 - DNA, 25 bp, Homo sapien
tgggcttagttctgcaggtgatgca

SEQ ID NO: 1865367 - DNA, 25 bp, Homo sapien
gaaatttaaccctcgctcaacagaa

SEQ ID NO: 1865368 - DNA, 25 bp, Homo sapien
taccatgcccggtccaaaatgtgtg

SEQ ID NO: 1865369 - DNA, 25 bp, Homo sapien
tctctgagggctggaatggtctaag

SEQ ID NO: 1865370 - DNA, 25 bp, Homo sapien
ggtcgtgtgcacctatagcctcagc

SEQ ID NO: 1865371 - DNA, 25 bp, Homo sapien
tggactctaggagccagtctttggg

SEQ ID NO: 1865372 - DNA, 25 bp, Homo sapien
gacagatgtgatcctaggtccagag

SEQ ID NO: 1865373 - DNA, 25 bp, Homo sapien
tcccaggtccagagatagactggtc

SEQ ID NO: 1865374 - DNA, 25 bp, Homo sapien
ttctggaaaaccctagcagaggcta

SEQ ID NO: 1865375 - DNA, 25 bp, Homo sapien
gggagacaaggcactatccatcccc

SEQ ID NO: 1865376 - DNA, 25 bp, Homo sapien
ggagacaaggcactatccatcccct

SEQ ID NO: 1865377 - DNA, 25 bp, Homo sapien
ctcagcatatcttggaggcctgagc

SEQ ID NO: 1865378 - DNA, 25 bp, Homo sapien
catcccctctcagcatatcttggag

SEQ ID NO: 1865379 - DNA, 25 bp, Homo sapien
taagcatcactgtacacttacggat

SEQ ID NO: 1865380 - DNA, 25 bp, Homo sapien
tggccagtgagagactttcagtgtt

SEQ ID NO: 1865381 - DNA, 25 bp, Homo sapien
tcagtaggtacaatatctggttgtc

SEQ ID NO: 1865382 - DNA, 25 bp, Homo sapien
tgtttggttacccacagatatagct

SEQ ID NO: 1865383 - DNA, 25 bp, Homo sapien
tccagttaaacgggccaggcagaat

SEQ ID NO: 1865384 - DNA, 25 bp, Homo sapien
gcaggactctggcaccttccagtgt

SEQ ID NO: 1865385 - DNA, 25 bp, Homo sapien
agaccctcaatgactgaggcctggg

SEQ ID NO: 1865386 - DNA, 25 bp, Homo sapien
tttttgctcatgtggataagaggaa

SEQ ID NO: 1865387 - DNA, 25 bp, Homo sapien
tatagcccttgatgtgagttgccaa

SEQ ID NO: 1865388 - DNA, 25 bp, Homo sapien
gattctgaggaggaagtaggctccc

SEQ ID NO: 1865389 - DNA, 25 bp, Homo sapien
aaacagagtccggtttggcagacgt

SEQ ID NO: 1865390 - DNA, 25 bp, Homo sapien
cctagagtgagagagtacagttgta

SEQ ID NO: 1865391 - DNA, 25 bp, Homo sapien
gctttgcccaataggaggccccatg

SEQ ID NO: 1865392 - DNA, 25 bp, Homo sapien
tatttaacatccaacggtcggtgtg

SEQ ID NO: 1865393 - DNA, 25 bp, Homo sapien
gacttcttcattggagccccttgga

SEQ ID NO: 1865394 - DNA, 25 bp, Homo sapien
tgttctactgcaagaagcgctgcaa

SEQ ID NO: 1865395 - DNA, 25 bp, Homo sapien
tttgggaagctgaaccacgccaacg

SEQ ID NO: 1865396 - DNA, 25 bp, Homo sapien
ccctggtacttgtgaagagcctgca

SEQ ID NO: 1865397 - DNA, 25 bp, Homo sapien
taacaagtacttacgcggctgggca

SEQ ID NO: 1865398 - DNA, 25 bp, Homo sapien
aaaaccttgtctcgtgcagtctcag

SEQ ID NO: 1865399 - DNA, 25 bp, Homo sapien
caggccctatggtaagaacttcaca

SEQ ID NO: 1865400 - DNA, 25 bp, Homo sapien
agcagcaagcagtcctagtgcaggg

SEQ ID NO: 1865401 - DNA, 25 bp, Homo sapien
gagcttgcattggagcaggacgcct

SEQ ID NO: 1865402 - DNA, 25 bp, Homo sapien
ttcacggagaagagctaccctcgga

SEQ ID NO: 1865403 - DNA, 25 bp, Homo sapien
tgcctggggcttgctgtggcccggc

SEQ ID NO: 1865404 - DNA, 25 bp, Homo sapien
tccttccctcaggttcttcttgccc

SEQ ID NO: 1865405 - DNA, 25 bp, Homo sapien
ctttccagtgcctggggcttgctgt

SEQ ID NO: 1865406 - DNA, 25 bp, Homo sapien
cagtgcctggggcttgctgtggccc

SEQ ID NO: 1865407 - DNA, 25 bp, Homo sapien
taaaccgccctttttgtatgcacca

SEQ ID NO: 1865408 - DNA, 25 bp, Homo sapien
tttcctcatcctaagtgcctggcag

SEQ ID NO: 1865409 - DNA, 25 bp, Homo sapien
tgggcacacagggttaatgagtctc

SEQ ID NO: 1865410 - DNA, 25 bp, Homo sapien
caccacgggcggcttttatatgtaa

SEQ ID NO: 1865411 - DNA, 25 bp, Homo sapien
cgcggcagcgatagcggcactagca

SEQ ID NO: 1865412 - DNA, 25 bp, Homo sapien
gggttgagccgggaagccgatggcg

SEQ ID NO: 1865413 - DNA, 25 bp, Homo sapien
agcagcgggagtgccgggttgagcc

SEQ ID NO: 1865414 - DNA, 25 bp, Homo sapien
gcgccgccctagcagacggacaggg

SEQ ID NO: 1865415 - DNA, 25 bp, Homo sapien
aagctgcggcgctacacgaccttca

SEQ ID NO: 1865416 - DNA, 25 bp, Homo sapien
tgcatcgagcgccatgttaccgacc

SEQ ID NO: 1865417 - DNA, 25 bp, Homo sapien
ccgcgtgaagatcaagatggagttc

SEQ ID NO: 1865418 - DNA, 25 bp, Homo sapien
gagttcatcgacaacaagctgcggc

SEQ ID NO: 1865419 - DNA, 25 bp, Homo sapien
gccagtgagacaggccatgtgtata

SEQ ID NO: 1865420 - DNA, 25 bp, Homo sapien
attcagacctgcctcaactcgccag

SEQ ID NO: 1865421 - DNA, 25 bp, Homo sapien
gaccggcaaggcactgattcagacc

SEQ ID NO: 1865422 - DNA, 25 bp, Homo sapien
catgtgtatacctttgccacccgaa

SEQ ID NO: 1865423 - DNA, 25 bp, Homo sapien
cttgggactcaggtctgtaactgcc

SEQ ID NO: 1865424 - DNA, 25 bp, Homo sapien
aagatggaagtcacctttctgggct

SEQ ID NO: 1865425 - DNA, 25 bp, Homo sapien
cagacccagtgagtgaatcaggcaa

SEQ ID NO: 1865426 - DNA, 25 bp, Homo sapien
gatttgccgacatgtttgagaaccc

SEQ ID NO: 1865427 - DNA, 25 bp, Homo sapien
gctgagagaggagcaacgtgacctc

SEQ ID NO: 1865428 - DNA, 25 bp, Homo sapien
acgcatgctccactcgcgcgctgtt

SEQ ID NO: 1865429 - DNA, 25 bp, Homo sapien
gctgttccgccacgctcggcgtggg

SEQ ID NO: 1865430 - DNA, 25 bp, Homo sapien
cactcgccgtgtgacccggaaggga

SEQ ID NO: 1865431 - DNA, 25 bp, Homo sapien
gccaggacggcgggaccggccgctg

SEQ ID NO: 1865432 - DNA, 25 bp, Homo sapien
gggaccggccgctgggtcccagcga

SEQ ID NO: 1865433 - DNA, 25 bp, Homo sapien
accggccgctgggtcccagcgaggg

SEQ ID NO: 1865434 - DNA, 25 bp, Homo sapien
ctgaggaggcggggccaggacggcg

SEQ ID NO: 1865435 - DNA, 25 bp, Homo sapien
ccctcctcttcacctctactctcat

SEQ ID NO: 1865436 - DNA, 25 bp, Homo sapien
tccctcctcttcacctctactctca

SEQ ID NO: 1865437 - DNA, 25 bp, Homo sapien
tctccctcctcttcacctctactct

SEQ ID NO: 1865438 - DNA, 25 bp, Homo sapien
tttctccctcctcttcacctctact

SEQ ID NO: 1865439 - DNA, 25 bp, Homo sapien
acatgcagtataagggcagggtggg

SEQ ID NO: 1865440 - DNA, 25 bp, Homo sapien
catgcagtataagggcagggtggga

SEQ ID NO: 1865441 - DNA, 25 bp, Homo sapien
agtataagggcagggtgggacctgg

SEQ ID NO: 1865442 - DNA, 25 bp, Homo sapien
gcagtataagggcagggtgggacct

SEQ ID NO: 1865443 - DNA, 25 bp, Homo sapien
gctgctgcacctgactaccactatt

SEQ ID NO: 1865444 - DNA, 25 bp, Homo sapien
caggcacaggtcactatgccagata

SEQ ID NO: 1865445 - DNA, 25 bp, Homo sapien
tagctaccctatgtcagttccaggg

SEQ ID NO: 1865446 - DNA, 25 bp, Homo sapien
tttgctggcttatacaccaccctta

SEQ ID NO: 1865447 - DNA, 25 bp, Homo sapien
tgctacctgtaccatcccagaaagt

SEQ ID NO: 1865448 - DNA, 25 bp, Homo sapien
atgcccttgaccgtttctccagttt

SEQ ID NO: 1865449 - DNA, 25 bp, Homo sapien
tccagtttctacagccagagtgagg

SEQ ID NO: 1865450 - DNA, 25 bp, Homo sapien
aggagaggacctttggacaggatat

SEQ ID NO: 1865451 - DNA, 25 bp, Homo sapien
ttttttgtccaggacaggatcagtc

SEQ ID NO: 1865452 - DNA, 25 bp, Homo sapien
ggatcagtctaggatcacctgttaa

SEQ ID NO: 1865453 - DNA, 25 bp, Homo sapien
cacctgttaacatttagttggcatg

SEQ ID NO: 1865454 - DNA, 25 bp, Homo sapien
tttcaactgacccataatgttttct

SEQ ID NO: 1865455 - DNA, 25 bp, Homo sapien
ggcaggctcctagtccctttaatac

SEQ ID NO: 1865456 - DNA, 25 bp, Homo sapien
gaagcttgacaaggtatctctctgt

SEQ ID NO: 1865457 - DNA, 25 bp, Homo sapien
ctagatacccgtggctcatcaggga

SEQ ID NO: 1865458 - DNA, 25 bp, Homo sapien
tttgcatggaacctgcctggctcag

SEQ ID NO: 1865459 - DNA, 25 bp, Homo sapien
tacgatgagtctgagaacctggacc

SEQ ID NO: 1865460 - DNA, 25 bp, Homo sapien
tttgatgaggagctggacaatgaca

SEQ ID NO: 1865461 - DNA, 25 bp, Homo sapien
gatgcaggaaacacctagagcagcc

SEQ ID NO: 1865462 - DNA, 25 bp, Homo sapien
aatgacagcttctcctacgatgagt

SEQ ID NO: 1865463 - DNA, 25 bp, Homo sapien
aagaatttaagaaagtgagattaag

SEQ ID NO: 1865464 - DNA, 25 bp, Homo sapien
aggaatggtactagagcagtgtctg

SEQ ID NO: 1865465 - DNA, 25 bp, Homo sapien
aaggaatggtactagagcagtgtct

SEQ ID NO: 1865466 - DNA, 25 bp, Homo sapien
gcagtgtctgagaatagaagaattt

SEQ ID NO: 1865467 - DNA, 25 bp, Homo sapien
gcctcgaagtatcgatccagcaggg

SEQ ID NO: 1865468 - DNA, 25 bp, Homo sapien
cagcctcgaagtatcgatccagcag

SEQ ID NO: 1865469 - DNA, 25 bp, Homo sapien
ggatcagcctcgaagtatcgatcca

SEQ ID NO: 1865470 - DNA, 25 bp, Homo sapien
tcgaagtatcgatccagcagggcct

SEQ ID NO: 1865471 - DNA, 25 bp, Homo sapien
cacctggaaccgagagccatctgct

SEQ ID NO: 1865472 - DNA, 25 bp, Homo sapien
ccatctgctgctccccggatcatgg

SEQ ID NO: 1865473 - DNA, 25 bp, Homo sapien
tcatagtcccacacctggaaccgag

SEQ ID NO: 1865474 - DNA, 25 bp, Homo sapien
gctccccggatcatggccgaaagca

SEQ ID NO: 1865475 - DNA, 25 bp, Homo sapien
cacagctcccttaccccttgggaga

SEQ ID NO: 1865476 - DNA, 25 bp, Homo sapien
caccctcacagctcccttacccctt

SEQ ID NO: 1865477 - DNA, 25 bp, Homo sapien
aagggcagggaaaggtgaagctgcc

SEQ ID NO: 1865478 - DNA, 25 bp, Homo sapien
cagctcccttaccccttgggagagg

SEQ ID NO: 1865479 - DNA, 25 bp, Homo sapien
gggctgggtccatagaaagccagga

SEQ ID NO: 1865480 - DNA, 25 bp, Homo sapien
ggctgggtccatagaaagccaggag

SEQ ID NO: 1865481 - DNA, 25 bp, Homo sapien
gatccgcttgttaaaggccacggcc

SEQ ID NO: 1865482 - DNA, 25 bp, Homo sapien
ctgcgggcggaacaggcacaggatc

SEQ ID NO: 1865483 - DNA, 25 bp, Homo sapien
aggatggctgtgtcacttctgccac

SEQ ID NO: 1865484 - DNA, 25 bp, Homo sapien
cgcggccagactgcgggcggaacag

SEQ ID NO: 1865485 - DNA, 25 bp, Homo sapien
tgctcatggatgagcctgtcacccc

SEQ ID NO: 1865486 - DNA, 25 bp, Homo sapien
tccaggtcctgctcatggatgagcc

SEQ ID NO: 1865487 - DNA, 25 bp, Homo sapien
tcctgctcatggatgagcctgtcac

SEQ ID NO: 1865488 - DNA, 25 bp, Homo sapien
aggtcctgctcatggatgagcctgt

SEQ ID NO: 1865489 - DNA, 25 bp, Homo sapien
agggtgggagccttgtgccagatga

SEQ ID NO: 1865490 - DNA, 25 bp, Homo sapien
catcaaagcagcgaggaaatggaat

SEQ ID NO: 1865491 - DNA, 25 bp, Homo sapien
tgctggctcccagtaactcctatgc

SEQ ID NO: 1865492 - DNA, 25 bp, Homo sapien
tatgcccttgtatgtccatacccac

SEQ ID NO: 1865493 - DNA, 25 bp, Homo sapien
gatggagcaccggggtaggagggcg

SEQ ID NO: 1865494 - DNA, 25 bp, Homo sapien
ttgctgggacccacgcagcccgagc

SEQ ID NO: 1865495 - DNA, 25 bp, Homo sapien
cgctggatggagcaccggggtagga

SEQ ID NO: 1865496 - DNA, 25 bp, Homo sapien
ccgcaggcttgctgggacccacgca

SEQ ID NO: 1865497 - DNA, 25 bp, Homo sapien
acgatccgctcgtacagcgtcctgt

SEQ ID NO: 1865498 - DNA, 25 bp, Homo sapien
ggccgccacgtgctcggtgagcact

SEQ ID NO: 1865499 - DNA, 25 bp, Homo sapien
gcagccgagacacgatccgctcgta

SEQ ID NO: 1865500 - DNA, 25 bp, Homo sapien
tcggtgagcactgtcccgaatcgcc

SEQ ID NO: 1865501 - DNA, 25 bp, Homo sapien
agctctcgctgcgccccggcaccat

SEQ ID NO: 1865502 - DNA, 25 bp, Homo sapien
cagctctcgctgcgccccggcacca

SEQ ID NO: 1865503 - DNA, 25 bp, Homo sapien
tcccgcagaagtacagggccgggcg

SEQ ID NO: 1865504 - DNA, 25 bp, Homo sapien
cccggcccagcgcagagcccggctg

SEQ ID NO: 1865505 - DNA, 25 bp, Homo sapien
ccggcccagcgcagagcccggctgc

SEQ ID NO: 1865506 - DNA, 25 bp, Homo sapien
cactgcaattgattttgtcattgcc

SEQ ID NO: 1865507 - DNA, 25 bp, Homo sapien
ttgccaccatcaacagtgtaggaaa

SEQ ID NO: 1865508 - DNA, 25 bp, Homo sapien
tgccaccatcaacagtgtaggaaat

SEQ ID NO: 1865509 - DNA, 25 bp, Homo sapien
cattgccaccatcaacagtgtagga

SEQ ID NO: 1865510 - DNA, 25 bp, Homo sapien
tcagccatcatggtcactgtcacca

SEQ ID NO: 1865511 - DNA, 25 bp, Homo sapien
tcatcagccatcatggtcactgtca

SEQ ID NO: 1865512 - DNA, 25 bp, Homo sapien
catcagccatcatggtcactgtcac

SEQ ID NO: 1865513 - DNA, 25 bp, Homo sapien
cagccatcatggtcactgtcaccat

SEQ ID NO: 1865514 - DNA, 25 bp, Homo sapien
tggctggttttaccatcatcgtgat

SEQ ID NO: 1865515 - DNA, 25 bp, Homo sapien
accatcatcgtgatgccactgggtg

SEQ ID NO: 1865516 - DNA, 25 bp, Homo sapien
cgcacccttactggctcagccctgg

SEQ ID NO: 1865517 - DNA, 25 bp, Homo sapien
atgtttgccatcacccgcaccctta

SEQ ID NO: 1865518 - DNA, 25 bp, Homo sapien
taagagctcatcaagtgtggagggc

SEQ ID NO: 1865519 - DNA, 25 bp, Homo sapien
atgaataagagctcatcaagtgtgg

SEQ ID NO: 1865520 - DNA, 25 bp, Homo sapien
agagctcatcaagtgtggagggctt

SEQ ID NO: 1865521 - DNA, 25 bp, Homo sapien
gaataagagctcatcaagtgtggag

SEQ ID NO: 1865522 - DNA, 25 bp, Homo sapien
tagggtgaccttttttgtgagcgtc

SEQ ID NO: 1865523 - DNA, 25 bp, Homo sapien
tctagactctctggcctaccatgga

SEQ ID NO: 1865524 - DNA, 25 bp, Homo sapien
caggaggaggatacccttcaaaacg

SEQ ID NO: 1865525 - DNA, 25 bp, Homo sapien
acgggctgttccctaaccagataga

SEQ ID NO: 1865526 - DNA, 25 bp, Homo sapien
tgggtcatagatgtagcagcccaca

SEQ ID NO: 1865527 - DNA, 25 bp, Homo sapien
atgtagcagcccacatcgccaatgt

SEQ ID NO: 1865528 - DNA, 25 bp, Homo sapien
atagatgtagcagcccacatcgcca

SEQ ID NO: 1865529 - DNA, 25 bp, Homo sapien
tcatagatgtagcagcccacatcgc

SEQ ID NO: 1865530 - DNA, 25 bp, Homo sapien
ggaagttgtccacacatacccacag

SEQ ID NO: 1865531 - DNA, 25 bp, Homo sapien
gggaagttgtccacacatacccaca

SEQ ID NO: 1865532 - DNA, 25 bp, Homo sapien
aggggaagttgtccacacataccca

SEQ ID NO: 1865533 - DNA, 25 bp, Homo sapien
ggggaagttgtccacacatacccac

SEQ ID NO: 1865534 - DNA, 25 bp, Homo sapien
tacttcaggcatgtacatgccatcc

SEQ ID NO: 1865535 - DNA, 25 bp, Homo sapien
caggcatgtacatgccatcccagtg

SEQ ID NO: 1865536 - DNA, 25 bp, Homo sapien
tacatgccatacttcaggcatgtac

SEQ ID NO: 1865537 - DNA, 25 bp, Homo sapien
tgccatacttcaggcatgtacatgc

SEQ ID NO: 1865538 - DNA, 25 bp, Homo sapien
ttggggccaaacaggtagccgtagc

SEQ ID NO: 1865539 - DNA, 25 bp, Homo sapien
cgtggcagtaggggactccatcatg

SEQ ID NO: 1865540 - DNA, 25 bp, Homo sapien
gtagccgtagcaggggacgtggcag

SEQ ID NO: 1865541 - DNA, 25 bp, Homo sapien
ggccaaacaggtagccgtagcaggg

SEQ ID NO: 1865542 - DNA, 25 bp, Homo sapien
gtcttgtggcaacgctggcacctca

SEQ ID NO: 1865543 - DNA, 25 bp, Homo sapien
acctcagacacggtcggtgccaatt

SEQ ID NO: 1865544 - DNA, 25 bp, Homo sapien
ctcagcatgactcccagcagtcagg

SEQ ID NO: 1865545 - DNA, 25 bp, Homo sapien
gcagtcagggtcttgtggcaacgct

SEQ ID NO: 1865546 - DNA, 25 bp, Homo sapien
tggtggaaagaagtggtaatgcttc

SEQ ID NO: 1865547 - DNA, 25 bp, Homo sapien
ctggtggtggaaagaagtggtaatg

SEQ ID NO: 1865548 - DNA, 25 bp, Homo sapien
ggtggaaagaagtggtaatgcttcc

SEQ ID NO: 1865549 - DNA, 25 bp, Homo sapien
ggaaagaagtggtaatgcttccatt

SEQ ID NO: 1865550 - DNA, 25 bp, Homo sapien
cagccagggcacagcgaggtctccc

SEQ ID NO: 1865551 - DNA, 25 bp, Homo sapien
caaaatagacgggctccccacagcc

SEQ ID NO: 1865552 - DNA, 25 bp, Homo sapien
acagcgaggtctccccagtgaatgt

SEQ ID NO: 1865553 - DNA, 25 bp, Homo sapien
cagggcacagcgaggtctccccagt

SEQ ID NO: 1865554 - DNA, 25 bp, Homo sapien
tggcctgggacagacctaagttcct

SEQ ID NO: 1865555 - DNA, 25 bp, Homo sapien
tcacctgtaacacacgaggagaggg

SEQ ID NO: 1865556 - DNA, 25 bp, Homo sapien
tgagaggctggccttatcccaatga

SEQ ID NO: 1865557 - DNA, 25 bp, Homo sapien
tgttagcaactcaatcctcaggaaa

SEQ ID NO: 1865558 - DNA, 25 bp, Homo sapien
gggattgtacaagtaggagcctaca

SEQ ID NO: 1865559 - DNA, 25 bp, Homo sapien
tgtacaagtaggagcctacaccacc

SEQ ID NO: 1865560 - DNA, 25 bp, Homo sapien
taggagcctacaccaccaatgttca

SEQ ID NO: 1865561 - DNA, 25 bp, Homo sapien
caagtaggagcctacaccaccaatg

SEQ ID NO: 1865562 - DNA, 25 bp, Homo sapien
aagagagccccatagcatggcttgt

SEQ ID NO: 1865563 - DNA, 25 bp, Homo sapien
caaagagagccccatagcatggctt

SEQ ID NO: 1865564 - DNA, 25 bp, Homo sapien
ccaaagagagccccatagcatggct

SEQ ID NO: 1865565 - DNA, 25 bp, Homo sapien
gagagccccatagcatggcttgtgg

SEQ ID NO: 1865566 - DNA, 25 bp, Homo sapien
gttcccaaattcctggctggtgtgg

SEQ ID NO: 1865567 - DNA, 25 bp, Homo sapien
aaccatgggatccacagtcacgacc

SEQ ID NO: 1865568 - DNA, 25 bp, Homo sapien
tccccaaaaccatgggatccacagt

SEQ ID NO: 1865569 - DNA, 25 bp, Homo sapien
acagtcacgacccaggttcccaaat

SEQ ID NO: 1865570 - DNA, 25 bp, Homo sapien
cagaagcggtgccagttcttgccca

SEQ ID NO: 1865571 - DNA, 25 bp, Homo sapien
ggcagaagcggtgccagttcttgcc

SEQ ID NO: 1865572 - DNA, 25 bp, Homo sapien
aagcggtgccagttcttgcccaggg

SEQ ID NO: 1865573 - DNA, 25 bp, Homo sapien
agaagcggtgccagttcttgcccag

SEQ ID NO: 1865574 - DNA, 25 bp, Homo sapien
ctgtggaggacaaagtggaaccgag

SEQ ID NO: 1865575 - DNA, 25 bp, Homo sapien
ttgctggcaacgcggacaggtccag

SEQ ID NO: 1865576 - DNA, 25 bp, Homo sapien
ggttgctggcaacgcggacaggtcc

SEQ ID NO: 1865577 - DNA, 25 bp, Homo sapien
aaacaggttgctggcaacgcggaca

SEQ ID NO: 1865578 - DNA, 25 bp, Homo sapien
gaaaacaggttgctggcaacgcgga

SEQ ID NO: 1865579 - DNA, 25 bp, Homo sapien
gaggatcttgaagccgtggactcca

SEQ ID NO: 1865580 - DNA, 25 bp, Homo sapien
tgtaacgaagacacctggacaggga

SEQ ID NO: 1865581 - DNA, 25 bp, Homo sapien
gactccagactaggaaggcacatgt

SEQ ID NO: 1865582 - DNA, 25 bp, Homo sapien
aaagcaacaaaatctggagcccgtc

SEQ ID NO: 1865583 - DNA, 25 bp, Homo sapien
atcatagatgatatcaacagtggtt

SEQ ID NO: 1865584 - DNA, 25 bp, Homo sapien
atatttcaataaaggatcatttgac

SEQ ID NO: 1865585 - DNA, 25 bp, Homo sapien
aatgcccagccagttaagcacaaag

SEQ ID NO: 1865586 - DNA, 25 bp, Homo sapien
tgtggaatgcccagccagttaagca

SEQ ID NO: 1865587 - DNA, 25 bp, Homo sapien
cccagccagttaagcacaaaggaaa

SEQ ID NO: 1865588 - DNA, 25 bp, Homo sapien
tactgatgcatgttacaacacaggt

SEQ ID NO: 1865589 - DNA, 25 bp, Homo sapien
gtccactaatgggttcgaagcttct

SEQ ID NO: 1865590 - DNA, 25 bp, Homo sapien
agattagtggttggccagtcaagga

SEQ ID NO: 1865591 - DNA, 25 bp, Homo sapien
tatctgtatgatagaatattgctca

SEQ ID NO: 1865592 - DNA, 25 bp, Homo sapien
gtatatgcgtaatgtcttaacaaca

SEQ ID NO: 1865593 - DNA, 25 bp, Homo sapien
attttatggtatatgcgtaatgtct

SEQ ID NO: 1865594 - DNA, 25 bp, Homo sapien
tagatagcagtaatgtttgtacaac

SEQ ID NO: 1865595 - DNA, 25 bp, Homo sapien
gatagcagtaatgtttgtacaacct

SEQ ID NO: 1865596 - DNA, 25 bp, Homo sapien
tttaacttgggtgagatgttatctg

SEQ ID NO: 1865597 - DNA, 25 bp, Homo sapien
tgccagcatttcttattgcctctct

SEQ ID NO: 1865598 - DNA, 25 bp, Homo sapien
tgggtgagatgttatctgttttgat

SEQ ID NO: 1865599 - DNA, 25 bp, Homo sapien
agattttgaggaacctctaaactct

SEQ ID NO: 1865600 - DNA, 25 bp, Homo sapien
aatgtatccatatgctggaaactga

SEQ ID NO: 1865601 - DNA, 25 bp, Homo sapien
gaaacttggtagtcagcttgcttat

SEQ ID NO: 1865602 - DNA, 25 bp, Homo sapien
tggagttggcgtaaagtcctagtaa

SEQ ID NO: 1865603 - DNA, 25 bp, Homo sapien
tatacaaaaatagtccttacaggtc

SEQ ID NO: 1865604 - DNA, 25 bp, Homo sapien
cacagaatcaggagtcaaattccac

SEQ ID NO: 1865605 - DNA, 25 bp, Homo sapien
tccaaaatgattgggcttttcctct

SEQ ID NO: 1865606 - DNA, 25 bp, Homo sapien
ttcctctatgaagctcaaggtcaca

SEQ ID NO: 1865607 - DNA, 25 bp, Homo sapien
tggaacaggcagagctataaagcgc

SEQ ID NO: 1865608 - DNA, 25 bp, Homo sapien
cactgtaaaccattacaagcatgag

SEQ ID NO: 1865609 - DNA, 25 bp, Homo sapien
acactgtaaaccattacaagcatga

SEQ ID NO: 1865610 - DNA, 25 bp, Homo sapien
cagagattgttataacagtcagatt

SEQ ID NO: 1865611 - DNA, 25 bp, Homo sapien
agtcagattactggttacattttgg

SEQ ID NO: 1865612 - DNA, 25 bp, Homo sapien
ttgggtgatgaaaatttcacatatt

SEQ ID NO: 1865613 - DNA, 25 bp, Homo sapien
gactaactgcttaagggaaatagtg

SEQ ID NO: 1865614 - DNA, 25 bp, Homo sapien
gagtatctgctaatgggtatatgtt

SEQ ID NO: 1865615 - DNA, 25 bp, Homo sapien
gactgggagtatctgctaatgggta

SEQ ID NO: 1865616 - DNA, 25 bp, Homo sapien
tgggagtatctgctaatgggtatat

SEQ ID NO: 1865617 - DNA, 25 bp, Homo sapien
gggtgactgggagtatctgctaatg

SEQ ID NO: 1865618 - DNA, 25 bp, Homo sapien
ggtctagaggtatggcagacgttct

SEQ ID NO: 1865619 - DNA, 25 bp, Homo sapien
tcaggagcagtcctttgagcttgtg

SEQ ID NO: 1865620 - DNA, 25 bp, Homo sapien
tcggccaccatcgaaaagttgagga

SEQ ID NO: 1865621 - DNA, 25 bp, Homo sapien
ctctttcccctgtctatatttcctt

SEQ ID NO: 1865622 - DNA, 25 bp, Homo sapien
acagctcagacaccattggagaact

SEQ ID NO: 1865623 - DNA, 25 bp, Homo sapien
gcttgtgaccaacatctttgactgt

SEQ ID NO: 1865624 - DNA, 25 bp, Homo sapien
tagggctgtgagtcatagtttgtat

SEQ ID NO: 1865625 - DNA, 25 bp, Homo sapien
gagaactgaggtctaagcagcaaag

SEQ ID NO: 1865626 - DNA, 25 bp, Homo sapien
cataccctctatgtacattctaatc

SEQ ID NO: 1865627 - DNA, 25 bp, Homo sapien
gacaggatcttctctacaacttatc

SEQ ID NO: 1865628 - DNA, 25 bp, Homo sapien
gttcatcctctacaggtacaacaat

SEQ ID NO: 1865629 - DNA, 25 bp, Homo sapien
aataaggtgaggagtggcaagtcta

SEQ ID NO: 1865630 - DNA, 25 bp, Homo sapien
agtcagatccttcaggtgattgcct

SEQ ID NO: 1865631 - DNA, 25 bp, Homo sapien
tgattgcctactggccacaagggca

SEQ ID NO: 1865632 - DNA, 25 bp, Homo sapien
tcagatccttcaggtgattgcctac

SEQ ID NO: 1865633 - DNA, 25 bp, Homo sapien
ggtgattgcctactggccacaaggg

SEQ ID NO: 1865634 - DNA, 25 bp, Homo sapien
ttctgggggcagaaatgtctgctgc

SEQ ID NO: 1865635 - DNA, 25 bp, Homo sapien
aatctgaagacttttggaattgccc

SEQ ID NO: 1865636 - DNA, 25 bp, Homo sapien
cagaaatgtctgctgcagtccttcc

SEQ ID NO: 1865637 - DNA, 25 bp, Homo sapien
agtccttccttttggaaatctgaag

SEQ ID NO: 1865638 - DNA, 25 bp, Homo sapien
tgagagtctgtaacaatgtgaccat

SEQ ID NO: 1865639 - DNA, 25 bp, Homo sapien
gacagagtgtcagagagacgaaata

SEQ ID NO: 1865640 - DNA, 25 bp, Homo sapien
tcttgcctaatcctccacaaatgga

SEQ ID NO: 1865641 - DNA, 25 bp, Homo sapien
tgaccatagtcatccttaggaaggt

SEQ ID NO: 1865642 - DNA, 25 bp, Homo sapien
tcattataaattcaacttcgtggct

SEQ ID NO: 1865643 - DNA, 25 bp, Homo sapien
ttacaaccacattaaatgctacaac

SEQ ID NO: 1865644 - DNA, 25 bp, Homo sapien
tatatgggttgagggcaaatcagga

SEQ ID NO: 1865645 - DNA, 25 bp, Homo sapien
gccagacaactgtgcactgtgaata

SEQ ID NO: 1865646 - DNA, 25 bp, Homo sapien
tcttctctggataggttccaaagct

SEQ ID NO: 1865647 - DNA, 25 bp, Homo sapien
tctggataggttccaaagctagatc

SEQ ID NO: 1865648 - DNA, 25 bp, Homo sapien
gataggttccaaagctagatcccac

SEQ ID NO: 1865649 - DNA, 25 bp, Homo sapien
ccaaagctagatcccactaaccaaa

SEQ ID NO: 1865650 - DNA, 25 bp, Homo sapien
tgcgctggggcagactatatatcct

SEQ ID NO: 1865651 - DNA, 25 bp, Homo sapien
gactatatatcctaacattctggca

SEQ ID NO: 1865652 - DNA, 25 bp, Homo sapien
gggcagactatatatcctaacattc

SEQ ID NO: 1865653 - DNA, 25 bp, Homo sapien
cagactatatatcctaacattctgg

SEQ ID NO: 1865654 - DNA, 25 bp, Homo sapien
tgcatttattccaagtaattaacac

SEQ ID NO: 1865655 - DNA, 25 bp, Homo sapien
catttattccaagtaattaacacat

SEQ ID NO: 1865656 - DNA, 25 bp, Homo sapien
tttattccaagtaattaacacatta

SEQ ID NO: 1865657 - DNA, 25 bp, Homo sapien
tattccaagtaattaacacattaaa

SEQ ID NO: 1865658 - DNA, 25 bp, Homo sapien
cgtcttctaaaagtaagcctgccag

SEQ ID NO: 1865659 - DNA, 25 bp, Homo sapien
aatgaaccatgaataagccttaccg

SEQ ID NO: 1865660 - DNA, 25 bp, Homo sapien
tcaaacaatgttaaggcaggcccat

SEQ ID NO: 1865661 - DNA, 25 bp, Homo sapien
gaagtacaggagttgacatgccaat

SEQ ID NO: 1865662 - DNA, 25 bp, Homo sapien
gattcactcacaagtagctctaggt

SEQ ID NO: 1865663 - DNA, 25 bp, Homo sapien
tctcttggtgtaggttccagatgag

SEQ ID NO: 1865664 - DNA, 25 bp, Homo sapien
agtcttggatcatctgggcatctga

SEQ ID NO: 1865665 - DNA, 25 bp, Homo sapien
catttactttaagatgctgactgca

SEQ ID NO: 1865666 - DNA, 25 bp, Homo sapien
ccctgagggaccatattgtcttcaa

SEQ ID NO: 1865667 - DNA, 25 bp, Homo sapien
cctctgtggtggatgcattcgatat

SEQ ID NO: 1865668 - DNA, 25 bp, Homo sapien
ggtcctggatggcaccaactgtagt

SEQ ID NO: 1865669 - DNA, 25 bp, Homo sapien
caaattcagagggtcgccactgtca

SEQ ID NO: 1865670 - DNA, 25 bp, Homo sapien
gagaagggatcctaacactcctggg

SEQ ID NO: 1865671 - DNA, 25 bp, Homo sapien
aactacatttagaagggtcacctgg

SEQ ID NO: 1865672 - DNA, 25 bp, Homo sapien
tcggaggaattacaccctataggtg

SEQ ID NO: 1865673 - DNA, 25 bp, Homo sapien
tctgtctcaaagtcaagcaccaagg

SEQ ID NO: 1865674 - DNA, 25 bp, Homo sapien
tcccaaacagccaactcatagatct

SEQ ID NO: 1865675 - DNA, 25 bp, Homo sapien
cactgttaactctggatggacatct

SEQ ID NO: 1865676 - DNA, 25 bp, Homo sapien
tcactaacaactgaaactccttgct

SEQ ID NO: 1865677 - DNA, 25 bp, Homo sapien
gcttcaaagtcttctagggccttgc

SEQ ID NO: 1865678 - DNA, 25 bp, Homo sapien
aaatgagtctaattttgcctttgtg

SEQ ID NO: 1865679 - DNA, 25 bp, Homo sapien
aagacctagcttctgataaaaatga

SEQ ID NO: 1865680 - DNA, 25 bp, Homo sapien
gggcagaaattttcacaggtgtatc

SEQ ID NO: 1865681 - DNA, 25 bp, Homo sapien
tatcttgtgggttgagtaaagacct

SEQ ID NO: 1865682 - DNA, 25 bp, Homo sapien
cataaggcctgctttggcacaacct

SEQ ID NO: 1865683 - DNA, 25 bp, Homo sapien
catcttgatgcaactcctcttggga

SEQ ID NO: 1865684 - DNA, 25 bp, Homo sapien
tagaggtccatatggccaaagtgtc

SEQ ID NO: 1865685 - DNA, 25 bp, Homo sapien
taactataggagcagcgaccaaacc

SEQ ID NO: 1865686 - DNA, 25 bp, Homo sapien
tggaggacgtactaacacagagaac

SEQ ID NO: 1865687 - DNA, 25 bp, Homo sapien
gagaacagggtctggtctcggtcac

SEQ ID NO: 1865688 - DNA, 25 bp, Homo sapien
ttggccaatggaccaccacttagct

SEQ ID NO: 1865689 - DNA, 25 bp, Homo sapien
gaatatgtcatacaggtccttagca

SEQ ID NO: 1865690 - DNA, 25 bp, Homo sapien
catgatggctacaggcaacactggg

SEQ ID NO: 1865691 - DNA, 25 bp, Homo sapien
tcaaaatgttaggacccacgaagcc

SEQ ID NO: 1865692 - DNA, 25 bp, Homo sapien
ttcaaaatgttaggacccacgaagc

SEQ ID NO: 1865693 - DNA, 25 bp, Homo sapien
tgatggctacaggcaacactgggtt

SEQ ID NO: 1865694 - DNA, 25 bp, Homo sapien
tgagatacaactgggtttgatttta

SEQ ID NO: 1865695 - DNA, 25 bp, Homo sapien
ctgagatacaactgggtttgatttt

SEQ ID NO: 1865696 - DNA, 25 bp, Homo sapien
tgttcaggtaaatgagatggctcac

SEQ ID NO: 1865697 - DNA, 25 bp, Homo sapien
gaggaggtggtagtatttgttcagg

SEQ ID NO: 1865698 - DNA, 25 bp, Homo sapien
cagctggatgaggtataacgggggg

SEQ ID NO: 1865699 - DNA, 25 bp, Homo sapien
gtagtatttgttcaggtaaatgaga

SEQ ID NO: 1865700 - DNA, 25 bp, Homo sapien
tcctctggagacccttttagaatca

SEQ ID NO: 1865701 - DNA, 25 bp, Homo sapien
ttcctctggagacccttttagaatc

SEQ ID NO: 1865702 - DNA, 25 bp, Homo sapien
cctctggagacccttttagaatcac

SEQ ID NO: 1865703 - DNA, 25 bp, Homo sapien
aataggcaggttgggtcggatctta

SEQ ID NO: 1865704 - DNA, 25 bp, Homo sapien
cagaggtttagcagtggttccagag

SEQ ID NO: 1865705 - DNA, 25 bp, Homo sapien
tgtggctgaacatgacttgcggagt

SEQ ID NO: 1865706 - DNA, 25 bp, Homo sapien
ggttccagaggacttaatagacaga

SEQ ID NO: 1865707 - DNA, 25 bp, Homo sapien
cctctttgtccttactactttctag

SEQ ID NO: 1865708 - DNA, 25 bp, Homo sapien
tggtatgtgcaacaacagttttccc

SEQ ID NO: 1865709 - DNA, 25 bp, Homo sapien
ggcatccaagggctggtatgtgcaa

SEQ ID NO: 1865710 - DNA, 25 bp, Homo sapien
actttctagaatctcttctttagag

SEQ ID NO: 1865711 - DNA, 25 bp, Homo sapien
caaaagaagatgatgttggtgattc

SEQ ID NO: 1865712 - DNA, 25 bp, Homo sapien
ttcccaaaagaagatgatgttggtg

SEQ ID NO: 1865713 - DNA, 25 bp, Homo sapien
agaagatgatgttggtgattccttc

SEQ ID NO: 1865714 - DNA, 25 bp, Homo sapien
cccaaaagaagatgatgttggtgat

SEQ ID NO: 1865715 - DNA, 25 bp, Homo sapien
ggagttcctaccctcagagagttgg

SEQ ID NO: 1865716 - DNA, 25 bp, Homo sapien
ccaagccagcttggcggtccagatt

SEQ ID NO: 1865717 - DNA, 25 bp, Homo sapien
gattccgccgctcctcatataatgg

SEQ ID NO: 1865718 - DNA, 25 bp, Homo sapien
tgccgtcgccgttctgtctctagga

SEQ ID NO: 1865719 - DNA, 25 bp, Homo sapien
tggtgacccttcacatgttgctccc

SEQ ID NO: 1865720 - DNA, 25 bp, Homo sapien
tctcattgtgttggtgacccttcac

SEQ ID NO: 1865721 - DNA, 25 bp, Homo sapien
ggatcccccaaaaattcctcacaga

SEQ ID NO: 1865722 - DNA, 25 bp, Homo sapien
cttgtatttctcattgtgttggtga

SEQ ID NO: 1865723 - DNA, 25 bp, Homo sapien
ggaacagttatcttgtcagtgcgct

SEQ ID NO: 1865724 - DNA, 25 bp, Homo sapien
tgtcagtgcgctttatggcatcttg

SEQ ID NO: 1865725 - DNA, 25 bp, Homo sapien
ccaaggtctgttgtagggatccagt

SEQ ID NO: 1865726 - DNA, 25 bp, Homo sapien
cttttgcaggaacagttatcttgtc

SEQ ID NO: 1865727 - DNA, 25 bp, Homo sapien
cacatgttagagcaagtaccagaaa

SEQ ID NO: 1865728 - DNA, 25 bp, Homo sapien
ggtactcaaggaatcaaaagaggca

SEQ ID NO: 1865729 - DNA, 25 bp, Homo sapien
gaaacctcacttacacttgtcatgg

SEQ ID NO: 1865730 - DNA, 25 bp, Homo sapien
tgtttagttacagccaagtcccctg

SEQ ID NO: 1865731 - DNA, 25 bp, Homo sapien
gggctcttagtacgaaacttctcat

SEQ ID NO: 1865732 - DNA, 25 bp, Homo sapien
gaaatcaaacatggtcccacagatg

SEQ ID NO: 1865733 - DNA, 25 bp, Homo sapien
cagtctttgcaccagtgattgccag

SEQ ID NO: 1865734 - DNA, 25 bp, Homo sapien
tccaactgcttagtggctgactggg

SEQ ID NO: 1865735 - DNA, 25 bp, Homo sapien
ctactgtcacttaaagacttctggg

SEQ ID NO: 1865736 - DNA, 25 bp, Homo sapien
gagaacgatgacactttttctgggc

SEQ ID NO: 1865737 - DNA, 25 bp, Homo sapien
tgcctcttgccgtagctctgcaatg

SEQ ID NO: 1865738 - DNA, 25 bp, Homo sapien
taatgttatcctgaagccgactcac

SEQ ID NO: 1865739 - DNA, 25 bp, Homo sapien
aaagaccagacactgtggttcatgc

SEQ ID NO: 1865740 - DNA, 25 bp, Homo sapien
aaatttaaggaaagaccagacactg

SEQ ID NO: 1865741 - DNA, 25 bp, Homo sapien
tgagtccagaaattcaaagctacag

SEQ ID NO: 1865742 - DNA, 25 bp, Homo sapien
agtccagaaattcaaagctacagtg

SEQ ID NO: 1865743 - DNA, 25 bp, Homo sapien
ggtcctaagatagtacatcttcttc

SEQ ID NO: 1865744 - DNA, 25 bp, Homo sapien
acatcttcttctggcgggcttcccg

SEQ ID NO: 1865745 - DNA, 25 bp, Homo sapien
gaagccgctctaactcggtcctaag

SEQ ID NO: 1865746 - DNA, 25 bp, Homo sapien
tgttgtttatgaagccgctctaact

SEQ ID NO: 1865747 - DNA, 25 bp, Homo sapien
gtaatatttcgttctaagttccaga

SEQ ID NO: 1865748 - DNA, 25 bp, Homo sapien
tgtcaaagtaatatttcgttctaag

SEQ ID NO: 1865749 - DNA, 25 bp, Homo sapien
gaaaactcaggcacaggatacccaa

SEQ ID NO: 1865750 - DNA, 25 bp, Homo sapien
cgacttcaagtgaaagagccttaca

SEQ ID NO: 1865751 - DNA, 25 bp, Homo sapien
tccagacgacttcaagtgaaagagc

SEQ ID NO: 1865752 - DNA, 25 bp, Homo sapien
aaaactcaggcacaggatacccaaa

SEQ ID NO: 1865753 - DNA, 25 bp, Homo sapien
ggtatccgagctgcagcaaactgag

SEQ ID NO: 1865754 - DNA, 25 bp, Homo sapien
caggaattgagcctcgcagagactc

SEQ ID NO: 1865755 - DNA, 25 bp, Homo sapien
tgcttaggcttatcaggagtcacag

SEQ ID NO: 1865756 - DNA, 25 bp, Homo sapien
tcacacgaagattgggacggctacg

SEQ ID NO: 1865757 - DNA, 25 bp, Homo sapien
cagtggtcagctgaaaagtatcggt

SEQ ID NO: 1865758 - DNA, 25 bp, Homo sapien
gctgaaaagtatcggtcaactgagg

SEQ ID NO: 1865759 - DNA, 25 bp, Homo sapien
gaaaagtatcggtcaactgaggaac

SEQ ID NO: 1865760 - DNA, 25 bp, Homo sapien
ggtcagctgaaaagtatcggtcaac

SEQ ID NO: 1865761 - DNA, 25 bp, Homo sapien
tcagaatgcgggaaaaaccactgcc

SEQ ID NO: 1865762 - DNA, 25 bp, Homo sapien
gaccccattggtagaggttgccctg

SEQ ID NO: 1865763 - DNA, 25 bp, Homo sapien
gaagtctgtgtgtcgctcaggtccc

SEQ ID NO: 1865764 - DNA, 25 bp, Homo sapien
ttcaatgtcgggaaagctacgtcgc

SEQ ID NO: 1865765 - DNA, 25 bp, Homo sapien
ctgatgcattaaaaggcctacagtt

SEQ ID NO: 1865766 - DNA, 25 bp, Homo sapien
gagagtcctagaaggtgtagctcac

SEQ ID NO: 1865767 - DNA, 25 bp, Homo sapien
tatacagcaatagaaccctctactg

SEQ ID NO: 1865768 - DNA, 25 bp, Homo sapien
tacagtttcgtttggagagtcctag

SEQ ID NO: 1865769 - DNA, 25 bp, Homo sapien
tattagggagactagcaagaggccc

SEQ ID NO: 1865770 - DNA, 25 bp, Homo sapien
tgtcggtccagcacatattacaaag

SEQ ID NO: 1865771 - DNA, 25 bp, Homo sapien
tattacaaagataccattaggaaca

SEQ ID NO: 1865772 - DNA, 25 bp, Homo sapien
acatagcccacaggaaagtaagcag

SEQ ID NO: 1865773 - DNA, 25 bp, Homo sapien
gaaatatatcgctcaagaccccgag

SEQ ID NO: 1865774 - DNA, 25 bp, Homo sapien
gatgtaaaacttgggtgatcccctc

SEQ ID NO: 1865775 - DNA, 25 bp, Homo sapien
tccgatgctgttaggacacctgaca

SEQ ID NO: 1865776 - DNA, 25 bp, Homo sapien
gatacttcctcaggccgatgcaaag

SEQ ID NO: 1865777 - DNA, 25 bp, Homo sapien
tttgaggtttcaatgcagtatgaaa

SEQ ID NO: 1865778 - DNA, 25 bp, Homo sapien
ttttgaggtttcaatgcagtatgaa

SEQ ID NO: 1865779 - DNA, 25 bp, Homo sapien
gtttcaatgcagtatgaaataggaa

SEQ ID NO: 1865780 - DNA, 25 bp, Homo sapien
gaggtttcaatgcagtatgaaatag

SEQ ID NO: 1865781 - DNA, 25 bp, Homo sapien
gtcgccgttctggtgtgctaacaca

SEQ ID NO: 1865782 - DNA, 25 bp, Homo sapien
tcagaacacagaccaggagagcgtc

SEQ ID NO: 1865783 - DNA, 25 bp, Homo sapien
cattgccaacagtgatccttaagct

SEQ ID NO: 1865784 - DNA, 25 bp, Homo sapien
tgctaacacagaagtggtcattgcc

SEQ ID NO: 1865785 - DNA, 25 bp, Homo sapien
tcgcctggatggtctccgcggccgt

SEQ ID NO: 1865786 - DNA, 25 bp, Homo sapien
tcccgggcatagtcggcgcgggact

SEQ ID NO: 1865787 - DNA, 25 bp, Homo sapien
ggccgtcccgggcatagtcggcgcg

SEQ ID NO: 1865788 - DNA, 25 bp, Homo sapien
tgccgctgtcgcctggatggtctcc

SEQ ID NO: 1865789 - DNA, 25 bp, Homo sapien
agtcgtcggccccgcggtggcgacg

SEQ ID NO: 1865790 - DNA, 25 bp, Homo sapien
cggcgagccggggtccgcgacgagg

SEQ ID NO: 1865791 - DNA, 25 bp, Homo sapien
gcgagccggggtccgcgacgaggag

SEQ ID NO: 1865792 - DNA, 25 bp, Homo sapien
gagccggggtccgcgacgaggagcc

SEQ ID NO: 1865793 - DNA, 25 bp, Homo sapien
gtcggcgagccggggtccgcgacga

SEQ ID NO: 1865794 - DNA, 25 bp, Homo sapien
tcgtctttaggccggtgggaagaga

SEQ ID NO: 1865795 - DNA, 25 bp, Homo sapien
gggcgccctagacgcaggctcggag

SEQ ID NO: 1865796 - DNA, 25 bp, Homo sapien
agctctgacccgggggcgccctaga

SEQ ID NO: 1865797 - DNA, 25 bp, Homo sapien
cacggcgacagctctgacccggggg

SEQ ID NO: 1865798 - DNA, 25 bp, Homo sapien
ctagacgcaggctcggagcgcgccg

SEQ ID NO: 1865799 - DNA, 25 bp, Homo sapien
gccctcatcaccttgattcgtgtct

SEQ ID NO: 1865800 - DNA, 25 bp, Homo sapien
cctcatcaccttgattcgtgtctct

SEQ ID NO: 1865801 - DNA, 25 bp, Homo sapien
catcaccttgattcgtgtctctgct

SEQ ID NO: 1865802 - DNA, 25 bp, Homo sapien
caccttgattcgtgtctctgcttca

SEQ ID NO: 1865803 - DNA, 25 bp, Homo sapien
aatccggtgcacagcagcttcttca

SEQ ID NO: 1865804 - DNA, 25 bp, Homo sapien
atcggaatccggtgcacagcagctt

SEQ ID NO: 1865805 - DNA, 25 bp, Homo sapien
ggatatcggaatccggtgcacagca

SEQ ID NO: 1865806 - DNA, 25 bp, Homo sapien
tcaggatatcggaatccggtgcaca

SEQ ID NO: 1865807 - DNA, 25 bp, Homo sapien
tcaggtgaggcgtccatggaacgac

SEQ ID NO: 1865808 - DNA, 25 bp, Homo sapien
tgcacagccgtcaccctcaactttc

SEQ ID NO: 1865809 - DNA, 25 bp, Homo sapien
caactttcccttcaggtgaggcgtc

SEQ ID NO: 1865810 - DNA, 25 bp, Homo sapien
ccatggaacgacttctggcccagct

SEQ ID NO: 1865811 - DNA, 25 bp, Homo sapien
cgtgctcagtgcctgttacttgggc

SEQ ID NO: 1865812 - DNA, 25 bp, Homo sapien
ccgaggtgggtagagacgggcgcaa

SEQ ID NO: 1865813 - DNA, 25 bp, Homo sapien
tcctcgccgtgctcagtgcctgtta

SEQ ID NO: 1865814 - DNA, 25 bp, Homo sapien
ctgttacttgggcaccccgaggtgg

SEQ ID NO: 1865815 - DNA, 25 bp, Homo sapien
tgtacccaagctgaagggtggtgag

SEQ ID NO: 1865816 - DNA, 25 bp, Homo sapien
gtgtgtgtacccaagctgaagggtg

SEQ ID NO: 1865817 - DNA, 25 bp, Homo sapien
tgagaacggaccactccagtctgag

SEQ ID NO: 1865818 - DNA, 25 bp, Homo sapien
taaaattccatcttacattctgtgt

SEQ ID NO: 1865819 - DNA, 25 bp, Homo sapien
gaagcggtttatgccgtcaaggcag

SEQ ID NO: 1865820 - DNA, 25 bp, Homo sapien
tggcaggtaccactacagctgaggt

SEQ ID NO: 1865821 - DNA, 25 bp, Homo sapien
tctgggacaggtaagacaagctcac

SEQ ID NO: 1865822 - DNA, 25 bp, Homo sapien
tccaggttgatggtgcagaagcgtc

SEQ ID NO: 1865823 - DNA, 25 bp, Homo sapien
acatttacctcacagcgggcaccca

SEQ ID NO: 1865824 - DNA, 25 bp, Homo sapien
agcggcacgtgaagttgagagcaaa

SEQ ID NO: 1865825 - DNA, 25 bp, Homo sapien
agcccaccaagcagcggcacgtgaa

SEQ ID NO: 1865826 - DNA, 25 bp, Homo sapien
ggcacgtgaagttgagagcaaagcc

SEQ ID NO: 1865827 - DNA, 25 bp, Homo sapien
cttgcgctcgcagtcacgcccatgg

SEQ ID NO: 1865828 - DNA, 25 bp, Homo sapien
agggtccagccttgcgctcgcagtc

SEQ ID NO: 1865829 - DNA, 25 bp, Homo sapien
gcgctcgcagtcacgcccatggaag

SEQ ID NO: 1865830 - DNA, 25 bp, Homo sapien
gggtccagccttgcgctcgcagtca

SEQ ID NO: 1865831 - DNA, 25 bp, Homo sapien
ctggtaagcacacacaatggtactc

SEQ ID NO: 1865832 - DNA, 25 bp, Homo sapien
tggtaagcacacacaatggtactca

SEQ ID NO: 1865833 - DNA, 25 bp, Homo sapien
ggtaagcacacacaatggtactcac

SEQ ID NO: 1865834 - DNA, 25 bp, Homo sapien
cagggggactgcgtggtacagatat

SEQ ID NO: 1865835 - DNA, 25 bp, Homo sapien
gactgcgtggtacagatatgttcat

SEQ ID NO: 1865836 - DNA, 25 bp, Homo sapien
ccgtcatacatgcactggcctccat

SEQ ID NO: 1865837 - DNA, 25 bp, Homo sapien
cgtcatacatgcactggcctccatt

SEQ ID NO: 1865838 - DNA, 25 bp, Homo sapien
actgtggcagatgcactgccatggc

SEQ ID NO: 1865839 - DNA, 25 bp, Homo sapien
tggtggcaggtaccgtgctggcagc

SEQ ID NO: 1865840 - DNA, 25 bp, Homo sapien
gcccagccactgtggcagatgcact

SEQ ID NO: 1865841 - DNA, 25 bp, Homo sapien
cagatgcactgccatggctggtggc

SEQ ID NO: 1865842 - DNA, 25 bp, Homo sapien
ctcacacagcgctcacagtgcagcc

SEQ ID NO: 1865843 - DNA, 25 bp, Homo sapien
acacagcgctcacagtgcagcccct

SEQ ID NO: 1865844 - DNA, 25 bp, Homo sapien
aggcatcctcacacagcgctcacag

SEQ ID NO: 1865845 - DNA, 25 bp, Homo sapien
catcctcacacagcgctcacagtgc

SEQ ID NO: 1865846 - DNA, 25 bp, Homo sapien
ctgcaggagccgtcaggtgcacagc

SEQ ID NO: 1865847 - DNA, 25 bp, Homo sapien
caggagccgtcaggtgcacagcagc

SEQ ID NO: 1865848 - DNA, 25 bp, Homo sapien
gcagccgtgggccaggtcacagtgg

SEQ ID NO: 1865849 - DNA, 25 bp, Homo sapien
tgggccaggtcacagtgggagctgc

SEQ ID NO: 1865850 - DNA, 25 bp, Homo sapien
acaacaggcacacgagatgcaggca

SEQ ID NO: 1865851 - DNA, 25 bp, Homo sapien
tgcacaacaggcacacgagatgcag

SEQ ID NO: 1865852 - DNA, 25 bp, Homo sapien
cccagaatgcacaacaggcacacga

SEQ ID NO: 1865853 - DNA, 25 bp, Homo sapien
gaatgcacaacaggcacacgagatg

SEQ ID NO: 1865854 - DNA, 25 bp, Homo sapien
cggacggatggacggccggacgcgt

SEQ ID NO: 1865855 - DNA, 25 bp, Homo sapien
gacggacggatggacggccggacgc

SEQ ID NO: 1865856 - DNA, 25 bp, Homo sapien
cggatggacggccggacgcgtggac

SEQ ID NO: 1865857 - DNA, 25 bp, Homo sapien
gatggacggccggacgcgtggacac

SEQ ID NO: 1865858 - DNA, 25 bp, Homo sapien
gctgccatgcgagccgagcgctcgg

SEQ ID NO: 1865859 - DNA, 25 bp, Homo sapien
gggcgcagagagaggccggatccga

SEQ ID NO: 1865860 - DNA, 25 bp, Homo sapien
catgcgagccgagcgctcgggaatc

SEQ ID NO: 1865861 - DNA, 25 bp, Homo sapien
ccgaagcggctgccatgcgagccga

SEQ ID NO: 1865862 - DNA, 25 bp, Homo sapien
ctgagaatcctttctggactgggaa

SEQ ID NO: 1865863 - DNA, 25 bp, Homo sapien
gacacatttcaagacaaggacccag

SEQ ID NO: 1865864 - DNA, 25 bp, Homo sapien
tctggctaatggctcagagacacat

SEQ ID NO: 1865865 - DNA, 25 bp, Homo sapien
gaatgcccctgactctgtaaatgtg

SEQ ID NO: 1865866 - DNA, 25 bp, Homo sapien
ggcacgcagagctggcccttgtcct

SEQ ID NO: 1865867 - DNA, 25 bp, Homo sapien
aagggataatcctgcccctgcttgt

SEQ ID NO: 1865868 - DNA, 25 bp, Homo sapien
gtcactgcctctccaagacagtgct

SEQ ID NO: 1865869 - DNA, 25 bp, Homo sapien
cttgtcctcaccaggtaagggataa

SEQ ID NO: 1865870 - DNA, 25 bp, Homo sapien
ccagggctgttgtgccaaagcgcag

SEQ ID NO: 1865871 - DNA, 25 bp, Homo sapien
acacttatcgtgtgcctccagggct

SEQ ID NO: 1865872 - DNA, 25 bp, Homo sapien
catgtctgtgttggcacacttatcg

SEQ ID NO: 1865873 - DNA, 25 bp, Homo sapien
gcgcaggccctgcataccttgctta

SEQ ID NO: 1865874 - DNA, 25 bp, Homo sapien
cattgaaaccacaagggtgtgcaga

SEQ ID NO: 1865875 - DNA, 25 bp, Homo sapien
tgaaaccacaagggtgtgcagatgc

SEQ ID NO: 1865876 - DNA, 25 bp, Homo sapien
ccattgaaaccacaagggtgtgcag

SEQ ID NO: 1865877 - DNA, 25 bp, Homo sapien
ttgaaaccacaagggtgtgcagatg

SEQ ID NO: 1865878 - DNA, 25 bp, Homo sapien
gggtgggtacatgagatcagcttca

SEQ ID NO: 1865879 - DNA, 25 bp, Homo sapien
gggaaatgggataccttgctgctct

SEQ ID NO: 1865880 - DNA, 25 bp, Homo sapien
gaaatgggataccttgctgctctga

SEQ ID NO: 1865881 - DNA, 25 bp, Homo sapien
gtgggtacatgagatcagcttcacc

SEQ ID NO: 1865882 - DNA, 25 bp, Homo sapien
gctgcagaattccacctgatcctca

SEQ ID NO: 1865883 - DNA, 25 bp, Homo sapien
tcactctctcctttgctgagtctgg

SEQ ID NO: 1865884 - DNA, 25 bp, Homo sapien
tctctcctttgctgagtctggggct

SEQ ID NO: 1865885 - DNA, 25 bp, Homo sapien
gtctggggcttgtctttgctaccat

SEQ ID NO: 1865886 - DNA, 25 bp, Homo sapien
gagtctggggcttgtctttgctacc

SEQ ID NO: 1865887 - DNA, 25 bp, Homo sapien
gagcccagtgtgtaggcaattattg

SEQ ID NO: 1865888 - DNA, 25 bp, Homo sapien
catcttcatagtcaggccttggcct

SEQ ID NO: 1865889 - DNA, 25 bp, Homo sapien
tgaatcttgatcctaggcttgggaa

SEQ ID NO: 1865890 - DNA, 25 bp, Homo sapien
gaagtgtttcctgtctgcgtgaatc

SEQ ID NO: 1865891 - DNA, 25 bp, Homo sapien
cacactggcatgctgtaagaacagg

SEQ ID NO: 1865892 - DNA, 25 bp, Homo sapien
gggagccattactttcgccatgagt

SEQ ID NO: 1865893 - DNA, 25 bp, Homo sapien
cacagaggtacttaaaggtgggagc

SEQ ID NO: 1865894 - DNA, 25 bp, Homo sapien
tatttctaaggctactggtctatgc

SEQ ID NO: 1865895 - DNA, 25 bp, Homo sapien
cccagtcctccgcatgagctgttgc

SEQ ID NO: 1865896 - DNA, 25 bp, Homo sapien
ttcatagtcacaagttttgttattt

SEQ ID NO: 1865897 - DNA, 25 bp, Homo sapien
agtcctccgcatgagctgttgccct

SEQ ID NO: 1865898 - DNA, 25 bp, Homo sapien
tttcatagtcacaagttttgttatt

SEQ ID NO: 1865899 - DNA, 25 bp, Homo sapien
cataaaatcttttccgagccagcgg

SEQ ID NO: 1865900 - DNA, 25 bp, Homo sapien
ccccaaggctgttgctcagtcacag

SEQ ID NO: 1865901 - DNA, 25 bp, Homo sapien
gccaagttcaaaggcattgccgtgg

SEQ ID NO: 1865902 - DNA, 25 bp, Homo sapien
taagtgaaatggtgtgcagaggccc

SEQ ID NO: 1865903 - DNA, 25 bp, Homo sapien
cctagtcctgacgtcattagcacca

SEQ ID NO: 1865904 - DNA, 25 bp, Homo sapien
tgtcccctagtcctgacgtcattag

SEQ ID NO: 1865905 - DNA, 25 bp, Homo sapien
acagactgtcccctagtcctgacgt

SEQ ID NO: 1865906 - DNA, 25 bp, Homo sapien
atctcggtctcagccaacagactgt

SEQ ID NO: 1865907 - DNA, 25 bp, Homo sapien
ggcagagaagtgttcagaccaccat

SEQ ID NO: 1865908 - DNA, 25 bp, Homo sapien
gggcagagaagtgttcagaccacca

SEQ ID NO: 1865909 - DNA, 25 bp, Homo sapien
gaagggcagagaagtgttcagacca

SEQ ID NO: 1865910 - DNA, 25 bp, Homo sapien
agggcagagaagtgttcagaccacc

SEQ ID NO: 1865911 - DNA, 25 bp, Homo sapien
agagaggaggtcacagatctgttgc

SEQ ID NO: 1865912 - DNA, 25 bp, Homo sapien
gagaggaggtcacagatctgttgct

SEQ ID NO: 1865913 - DNA, 25 bp, Homo sapien
taattttctaccatgtccagcaggg

SEQ ID NO: 1865914 - DNA, 25 bp, Homo sapien
ctgtggggtaattttctaccatgtc

SEQ ID NO: 1865915 - DNA, 25 bp, Homo sapien
tgtggggtaattttctaccatgtcc

SEQ ID NO: 1865916 - DNA, 25 bp, Homo sapien
gggtaattttctaccatgtccagca

SEQ ID NO: 1865917 - DNA, 25 bp, Homo sapien
cctggccgtgcccaaacatgacgac

SEQ ID NO: 1865918 - DNA, 25 bp, Homo sapien
ggccgtgcccaaacatgacgacttc

SEQ ID NO: 1865919 - DNA, 25 bp, Homo sapien
atcccctggccgtgcccaaacatga

SEQ ID NO: 1865920 - DNA, 25 bp, Homo sapien
catcccctggccgtgcccaaacatg

SEQ ID NO: 1865921 - DNA, 25 bp, Homo sapien
tgtgccctccaagtctaggacctct

SEQ ID NO: 1865922 - DNA, 25 bp, Homo sapien
gacctctagggtacgactagaggcc

SEQ ID NO: 1865923 - DNA, 25 bp, Homo sapien
tctaggacctctagggtacgactag

SEQ ID NO: 1865924 - DNA, 25 bp, Homo sapien
tccaagtctaggacctctagggtac

SEQ ID NO: 1865925 - DNA, 25 bp, Homo sapien
gttgtaatccagattgaggacgcgg

SEQ ID NO: 1865926 - DNA, 25 bp, Homo sapien
gggttgtaatccagattgaggacgc

SEQ ID NO: 1865927 - DNA, 25 bp, Homo sapien
tgtaatccagattgaggacgcggac

SEQ ID NO: 1865928 - DNA, 25 bp, Homo sapien
cagggggttgtaatccagattgagg

SEQ ID NO: 1865929 - DNA, 25 bp, Homo sapien
tgtgggccacggcaatggcaaggcg

SEQ ID NO: 1865930 - DNA, 25 bp, Homo sapien
ggttggcactcagcgttagctcctt

SEQ ID NO: 1865931 - DNA, 25 bp, Homo sapien
ggcactcagcgttagctccttcaag

SEQ ID NO: 1865932 - DNA, 25 bp, Homo sapien
agggttggcactcagcgttagctcc

SEQ ID NO: 1865933 - DNA, 25 bp, Homo sapien
ccatagaggtcaagagccattaagg

SEQ ID NO: 1865934 - DNA, 25 bp, Homo sapien
caccatagaggtcaagagccattaa

SEQ ID NO: 1865935 - DNA, 25 bp, Homo sapien
ccattaaggaggcccatgcttcctc

SEQ ID NO: 1865936 - DNA, 25 bp, Homo sapien
ccccaccatagaggtcaagagccat

SEQ ID NO: 1865937 - DNA, 25 bp, Homo sapien
gatggcttcatcacccagcatgcag

SEQ ID NO: 1865938 - DNA, 25 bp, Homo sapien
gatgaggttgatggcttcatcaccc

SEQ ID NO: 1865939 - DNA, 25 bp, Homo sapien
ccagggctgggttcagcaaggccag

SEQ ID NO: 1865940 - DNA, 25 bp, Homo sapien
aaggccagccccgcatctgtcaggg

SEQ ID NO: 1865941 - DNA, 25 bp, Homo sapien
gggttactgcagtcctccgcactat

SEQ ID NO: 1865942 - DNA, 25 bp, Homo sapien
tgcagtcctccgcactatctacatg

SEQ ID NO: 1865943 - DNA, 25 bp, Homo sapien
agtcctccgcactatctacatggga

SEQ ID NO: 1865944 - DNA, 25 bp, Homo sapien
ctccgcactatctacatgggaaagg

SEQ ID NO: 1865945 - DNA, 25 bp, Homo sapien
ctagggtcgcgcgtgcaaagtccaa

SEQ ID NO: 1865946 - DNA, 25 bp, Homo sapien
ggtatcccaacacggctagggtcgc

SEQ ID NO: 1865947 - DNA, 25 bp, Homo sapien
gccgaggcacggtgtatgtgcataa

SEQ ID NO: 1865948 - DNA, 25 bp, Homo sapien
tgtcaggaactggtgggtatcccaa

SEQ ID NO: 1865949 - DNA, 25 bp, Homo sapien
ccaggttaaggttgagctgcgccag

SEQ ID NO: 1865950 - DNA, 25 bp, Homo sapien
ggagcggttggtccgcagagcctca

SEQ ID NO: 1865951 - DNA, 25 bp, Homo sapien
agatgcggccaaagtcgcggtcgca

SEQ ID NO: 1865952 - DNA, 25 bp, Homo sapien
gggctggacacgacgcccaggttaa

SEQ ID NO: 1865953 - DNA, 25 bp, Homo sapien
cgagcggctcaagggcttcggctta

SEQ ID NO: 1865954 - DNA, 25 bp, Homo sapien
cccgcacggtccgtgtctgggcgtt

SEQ ID NO: 1865955 - DNA, 25 bp, Homo sapien
cggagaagagctaccgggactgagc

SEQ ID NO: 1865956 - DNA, 25 bp, Homo sapien
ggcgcttgtccttgtccctcgcggt

SEQ ID NO: 1865957 - DNA, 25 bp, Homo sapien
ctccagctccagagagcgagcgggc

SEQ ID NO: 1865958 - DNA, 25 bp, Homo sapien
gagcgagcgggcggcgagttcccat

SEQ ID NO: 1865959 - DNA, 25 bp, Homo sapien
ccgcacggctggcagagagagcctg

SEQ ID NO: 1865960 - DNA, 25 bp, Homo sapien
cgggcctggccgcacggctggcaga

SEQ ID NO: 1865961 - DNA, 25 bp, Homo sapien
cggcccgcgaggttcgcgtacactg

SEQ ID NO: 1865962 - DNA, 25 bp, Homo sapien
gataggccgctcttcccttgggagt

SEQ ID NO: 1865963 - DNA, 25 bp, Homo sapien
ggaatggaggcacgccccgtggaga

SEQ ID NO: 1865964 - DNA, 25 bp, Homo sapien
ggagatggcgttgggcacggttact

SEQ ID NO: 1865965 - DNA, 25 bp, Homo sapien
catacccccgccggaatccagggca

SEQ ID NO: 1865966 - DNA, 25 bp, Homo sapien
ataggaagcgggatgacagggagga

SEQ ID NO: 1865967 - DNA, 25 bp, Homo sapien
gggaggaccactggatcagccgctg

SEQ ID NO: 1865968 - DNA, 25 bp, Homo sapien
aggaccactggatcagccgctgcag

SEQ ID NO: 1865969 - DNA, 25 bp, Homo sapien
tataggaagcgggatgacagggagg

SEQ ID NO: 1865970 - DNA, 25 bp, Homo sapien
tatttagcaagacaatgtgggagag

SEQ ID NO: 1865971 - DNA, 25 bp, Homo sapien
ggttctcaaaggagctgacccattt

SEQ ID NO: 1865972 - DNA, 25 bp, Homo sapien
gcattggctgcagagccttgcagtc

SEQ ID NO: 1865973 - DNA, 25 bp, Homo sapien
aagacaatgtgggagagataaagag

SEQ ID NO: 1865974 - DNA, 25 bp, Homo sapien
caaggaggtacttacgcagctacag

SEQ ID NO: 1865975 - DNA, 25 bp, Homo sapien
agctgcaaaccccatctacgaaaca

SEQ ID NO: 1865976 - DNA, 25 bp, Homo sapien
tcagaagtgccgacaggcatcaagg

SEQ ID NO: 1865977 - DNA, 25 bp, Homo sapien
tacgcagctacagctcagtggcagc

SEQ ID NO: 1865978 - DNA, 25 bp, Homo sapien
aggactgtcctttaatagtcttcct

SEQ ID NO: 1865979 - DNA, 25 bp, Homo sapien
tcaggactgtcctttaatagtcttc

SEQ ID NO: 1865980 - DNA, 25 bp, Homo sapien
caggactgtcctttaatagtcttcc

SEQ ID NO: 1865981 - DNA, 25 bp, Homo sapien
cagctttggctgtggcgttgaggac

SEQ ID NO: 1865982 - DNA, 25 bp, Homo sapien
gttgaggacggtggtgggaagccga

SEQ ID NO: 1865983 - DNA, 25 bp, Homo sapien
acggtggtgggaagccgagcagcag

SEQ ID NO: 1865984 - DNA, 25 bp, Homo sapien
gtgggaagccgagcagcagggagca

SEQ ID NO: 1865985 - DNA, 25 bp, Homo sapien
ggatgggcgggatgttggggccctc

SEQ ID NO: 1865986 - DNA, 25 bp, Homo sapien
atgggcgggatgttggggccctcca

SEQ ID NO: 1865987 - DNA, 25 bp, Homo sapien
gatgggcgggatgttggggccctcc

SEQ ID NO: 1865988 - DNA, 25 bp, Homo sapien
gaagagcatgtgtagggcagccagg

SEQ ID NO: 1865989 - DNA, 25 bp, Homo sapien
tgtgtggggcccacggtccgagaca

SEQ ID NO: 1865990 - DNA, 25 bp, Homo sapien
agagcatgtgtagggcagccagggt

SEQ ID NO: 1865991 - DNA, 25 bp, Homo sapien
cccacggtccgagacaccaacactg

SEQ ID NO: 1865992 - DNA, 25 bp, Homo sapien
gaggtggatattataggtgatgaac

SEQ ID NO: 1865993 - DNA, 25 bp, Homo sapien
tagaagagggcgtggaggtggatat

SEQ ID NO: 1865994 - DNA, 25 bp, Homo sapien
gtgtggacagtccacccaccaacag

SEQ ID NO: 1865995 - DNA, 25 bp, Homo sapien
aggacaatgcaatgcccaaagaggc

SEQ ID NO: 1865996 - DNA, 25 bp, Homo sapien
tgggaaacacatggtccattggcct

SEQ ID NO: 1865997 - DNA, 25 bp, Homo sapien
acacatggtccattggcctactcct

SEQ ID NO: 1865998 - DNA, 25 bp, Homo sapien
aggacagatgccgaccaaggcctgg

SEQ ID NO: 1865999 - DNA, 25 bp, Homo sapien
aatcattcaggttgggctgctttct

SEQ ID NO: 1866000 - DNA, 25 bp, Homo sapien
cagcatggtgatctgggcgttgcac

SEQ ID NO: 1866001 - DNA, 25 bp, Homo sapien
agtaaatgaaggatgagactcccag

SEQ ID NO: 1866002 - DNA, 25 bp, Homo sapien
caaggaagtaaatgaaggatgagac

SEQ ID NO: 1866003 - DNA, 25 bp, Homo sapien
ctcccagccagtagccgaagcaggt

SEQ ID NO: 1866004 - DNA, 25 bp, Homo sapien
atttagtcctaggaggcctctgatc

SEQ ID NO: 1866005 - DNA, 25 bp, Homo sapien
ctatttagtcctaggaggcctctga

SEQ ID NO: 1866006 - DNA, 25 bp, Homo sapien
tatttagtcctaggaggcctctgat

SEQ ID NO: 1866007 - DNA, 25 bp, Homo sapien
caggcagctttcaacctagtgcagc

SEQ ID NO: 1866008 - DNA, 25 bp, Homo sapien
gcagctttcaacctagtgcagccac

SEQ ID NO: 1866009 - DNA, 25 bp, Homo sapien
cactccaccattgtatcctcaggca

SEQ ID NO: 1866010 - DNA, 25 bp, Homo sapien
ctcaggcagctttcaacctagtgca

SEQ ID NO: 1866011 - DNA, 25 bp, Homo sapien
tgtcagacgtcttcatcccatggag

SEQ ID NO: 1866012 - DNA, 25 bp, Homo sapien
gagtgaagaccagcatgagaggtcc

SEQ ID NO: 1866013 - DNA, 25 bp, Homo sapien
cagcatgagaggtccatagagttca

SEQ ID NO: 1866014 - DNA, 25 bp, Homo sapien
tcccatggagtaggatagcaaccag

SEQ ID NO: 1866015 - DNA, 25 bp, Homo sapien
attcaggctggagggtacaacagct

SEQ ID NO: 1866016 - DNA, 25 bp, Homo sapien
aggctggagggtacaacagctcatc

SEQ ID NO: 1866017 - DNA, 25 bp, Homo sapien
gctggagggtacaacagctcatctg

SEQ ID NO: 1866018 - DNA, 25 bp, Homo sapien
ttcaggctggagggtacaacagctc

SEQ ID NO: 1866019 - DNA, 25 bp, Homo sapien
tgggggaagttgaccatcttgatag

SEQ ID NO: 1866020 - DNA, 25 bp, Homo sapien
ctgggggaagttgaccatcttgata

SEQ ID NO: 1866021 - DNA, 25 bp, Homo sapien
catgaggttctggagggcaaggcct

SEQ ID NO: 1866022 - DNA, 25 bp, Homo sapien
tgaggttctggagggcaaggcctga

SEQ ID NO: 1866023 - DNA, 25 bp, Homo sapien
ccatgaggttctggagggcaaggcc

SEQ ID NO: 1866024 - DNA, 25 bp, Homo sapien
gccatgaggttctggagggcaaggc

SEQ ID NO: 1866025 - DNA, 25 bp, Homo sapien
tacgattagtttagcgtctggcaca

SEQ ID NO: 1866026 - DNA, 25 bp, Homo sapien
taaatacctgctgagtggtcctggg

SEQ ID NO: 1866027 - DNA, 25 bp, Homo sapien
tggctagctcctaatcatacctggg

SEQ ID NO: 1866028 - DNA, 25 bp, Homo sapien
cctgtgtgccccatcatagaatgag

SEQ ID NO: 1866029 - DNA, 25 bp, Homo sapien
accatgcccggctggcaagcacaga

SEQ ID NO: 1866030 - DNA, 25 bp, Homo sapien
atgcccggctggcaagcacagagtt

SEQ ID NO: 1866031 - DNA, 25 bp, Homo sapien
caccatgcccggctggcaagcacag

SEQ ID NO: 1866032 - DNA, 25 bp, Homo sapien
ccatgcccggctggcaagcacagag

SEQ ID NO: 1866033 - DNA, 25 bp, Homo sapien
gcccagggcttgaaatctgactgta

SEQ ID NO: 1866034 - DNA, 25 bp, Homo sapien
tacttgtttcagtgacaggtgcagt

SEQ ID NO: 1866035 - DNA, 25 bp, Homo sapien
tctgactgtagtgtgcatgaaggtc

SEQ ID NO: 1866036 - DNA, 25 bp, Homo sapien
tctaggtgttaggagggaagcttct

SEQ ID NO: 1866037 - DNA, 25 bp, Homo sapien
cgatgttggcgtacaagctgaaggc

SEQ ID NO: 1866038 - DNA, 25 bp, Homo sapien
tcgatgttggcgtacaagctgaagg

SEQ ID NO: 1866039 - DNA, 25 bp, Homo sapien
tgtcgatgttggcgtacaagctgaa

SEQ ID NO: 1866040 - DNA, 25 bp, Homo sapien
gatgtcgatgttggcgtacaagctg

SEQ ID NO: 1866041 - DNA, 25 bp, Homo sapien
aagtaaggaagatgggcataggtat

SEQ ID NO: 1866042 - DNA, 25 bp, Homo sapien
gtactgttggttctagatcctgttg

SEQ ID NO: 1866043 - DNA, 25 bp, Homo sapien
tgttgcctattttccgtttgatttc

SEQ ID NO: 1866044 - DNA, 25 bp, Homo sapien
tgggcataggtattgtggtactgtt

SEQ ID NO: 1866045 - DNA, 25 bp, Homo sapien
tgccggctcagctgtcccttaaagc

SEQ ID NO: 1866046 - DNA, 25 bp, Homo sapien
cccttaaagcccttcatgcccagga

SEQ ID NO: 1866047 - DNA, 25 bp, Homo sapien
ccttaaagcccttcatgcccaggaa

SEQ ID NO: 1866048 - DNA, 25 bp, Homo sapien
cacctgccggctcagctgtccctta

SEQ ID NO: 1866049 - DNA, 25 bp, Homo sapien
atcagctgcatcagcgtctacttct

SEQ ID NO: 1866050 - DNA, 25 bp, Homo sapien
agcgtctacttcttcctcgcgcagg

SEQ ID NO: 1866051 - DNA, 25 bp, Homo sapien
tgcatcagcgtctacttcttcctcg

SEQ ID NO: 1866052 - DNA, 25 bp, Homo sapien
agctgcatcagcgtctacttcttcc

SEQ ID NO: 1866053 - DNA, 25 bp, Homo sapien
ctgaggtatcatccatgttctccat

SEQ ID NO: 1866054 - DNA, 25 bp, Homo sapien
ctcatcccagggtttagggctttgt

SEQ ID NO: 1866055 - DNA, 25 bp, Homo sapien
ctgctcatcccagggtttagggctt

SEQ ID NO: 1866056 - DNA, 25 bp, Homo sapien
ctgtgaagacaatggctcctagagt

SEQ ID NO: 1866057 - DNA, 25 bp, Homo sapien
tggctcctagagtgcaggacttttc

SEQ ID NO: 1866058 - DNA, 25 bp, Homo sapien
tagtatgttttcagcgaatgccagt

SEQ ID NO: 1866059 - DNA, 25 bp, Homo sapien
gagtagtagtctggccctttcaggt

SEQ ID NO: 1866060 - DNA, 25 bp, Homo sapien
ctgaaacccgagatcctcaggctgg

SEQ ID NO: 1866061 - DNA, 25 bp, Homo sapien
ggatacggcttggaatcactacaga

SEQ ID NO: 1866062 - DNA, 25 bp, Homo sapien
aagacacttctggacatcgccggcc

SEQ ID NO: 1866063 - DNA, 25 bp, Homo sapien
gcagctggtgccttggggccattac

SEQ ID NO: 1866064 - DNA, 25 bp, Homo sapien
gagagttttgtaaatggagcggact

SEQ ID NO: 1866065 - DNA, 25 bp, Homo sapien
atggagcggacttccaggcccagag

SEQ ID NO: 1866066 - DNA, 25 bp, Homo sapien
cccgccggcgccgctgtagttgcca

SEQ ID NO: 1866067 - DNA, 25 bp, Homo sapien
ccgccggcgccgctgtagttgccat

SEQ ID NO: 1866068 - DNA, 25 bp, Homo sapien
ggccagctccatttcgggcgccgcc

SEQ ID NO: 1866069 - DNA, 25 bp, Homo sapien
gcccgccggcgccgctgtagttgcc

SEQ ID NO: 1866070 - DNA, 25 bp, Homo sapien
gaaggtagacgtccagggtcgagga

SEQ ID NO: 1866071 - DNA, 25 bp, Homo sapien
gaagcccggatgtttggacaaaagc

SEQ ID NO: 1866072 - DNA, 25 bp, Homo sapien
ggtcgaggagaggtgggatcggccg

SEQ ID NO: 1866073 - DNA, 25 bp, Homo sapien
gatcggccggaacacaaaaaggaga

SEQ ID NO: 1866074 - DNA, 25 bp, Homo sapien
gaatttccgtgtggatgtagtacac

SEQ ID NO: 1866075 - DNA, 25 bp, Homo sapien
gccattgccaatgcttttcgacgaa

SEQ ID NO: 1866076 - DNA, 25 bp, Homo sapien
tgacatggtgggaattgacgcagcc

SEQ ID NO: 1866077 - DNA, 25 bp, Homo sapien
gagatattacacagagagcagattt

SEQ ID NO: 1866078 - DNA, 25 bp, Homo sapien
gagtaagttttacaggcaagccctg

SEQ ID NO: 1866079 - DNA, 25 bp, Homo sapien
aagtgccggcgcttcttggatgaac

SEQ ID NO: 1866080 - DNA, 25 bp, Homo sapien
ggcttgcccgggttcgagatcatta

SEQ ID NO: 1866081 - DNA, 25 bp, Homo sapien
tagtcccgggtgctcatgaagtaac

SEQ ID NO: 1866082 - DNA, 25 bp, Homo sapien
cagtccacttcggctctcggggaaa

SEQ ID NO: 1866083 - DNA, 25 bp, Homo sapien
gaaaccctcttgtcagtggactgga

SEQ ID NO: 1866084 - DNA, 25 bp, Homo sapien
aaccctcttgtcagtggactggatg

SEQ ID NO: 1866085 - DNA, 25 bp, Homo sapien
ctcttgtcagtggactggatggaca

SEQ ID NO: 1866086 - DNA, 25 bp, Homo sapien
ccagggacctgaaagaccatgagat

SEQ ID NO: 1866087 - DNA, 25 bp, Homo sapien
tatggattaactctgccttacggcc

SEQ ID NO: 1866088 - DNA, 25 bp, Homo sapien
tgagattgtggaaggcacctggact

SEQ ID NO: 1866089 - DNA, 25 bp, Homo sapien
ttacggccagtaataacctcagggc

SEQ ID NO: 1866090 - DNA, 25 bp, Homo sapien
ctaggagaagaccagcggctttgct

SEQ ID NO: 1866091 - DNA, 25 bp, Homo sapien
gaagaccagcggctttgctagctgc

SEQ ID NO: 1866092 - DNA, 25 bp, Homo sapien
tgctcatcacagatgtagcctagtt

SEQ ID NO: 1866093 - DNA, 25 bp, Homo sapien
ctcatcacagatgtagcctagttgg

SEQ ID NO: 1866094 - DNA, 25 bp, Homo sapien
gcagtagcctgtaccatggatccca

SEQ ID NO: 1866095 - DNA, 25 bp, Homo sapien
cattctgtacaggtatgtggctgca

SEQ ID NO: 1866096 - DNA, 25 bp, Homo sapien
ccttgctagtcgcagggttgggcac

SEQ ID NO: 1866097 - DNA, 25 bp, Homo sapien
tgggaactatctgggacatctagac

SEQ ID NO: 1866098 - DNA, 25 bp, Homo sapien
ataattacttctggtcctgcacagg

SEQ ID NO: 1866099 - DNA, 25 bp, Homo sapien
acaagaaaggccgaggaaggatgcc

SEQ ID NO: 1866100 - DNA, 25 bp, Homo sapien
gaaaggccgaggaaggatgcccaaa

SEQ ID NO: 1866101 - DNA, 25 bp, Homo sapien
ccgaggaaggatgcccaaaagcttg

SEQ ID NO: 1866102 - DNA, 25 bp, Homo sapien
gatgacaagaaaggccgaggaagga

SEQ ID NO: 1866103 - DNA, 25 bp, Homo sapien
ctccgtctccagcattggctttgtt

SEQ ID NO: 1866104 - DNA, 25 bp, Homo sapien
catcattgtccagcacctccgtctc

SEQ ID NO: 1866105 - DNA, 25 bp, Homo sapien
cgtctccagcattggctttgttttt

SEQ ID NO: 1866106 - DNA, 25 bp, Homo sapien
agcacctccgtctccagcattggct

SEQ ID NO: 1866107 - DNA, 25 bp, Homo sapien
tgtgaacttcttttcggaactgctc

SEQ ID NO: 1866108 - DNA, 25 bp, Homo sapien
cttttcggaactgctctcccaaggg

SEQ ID NO: 1866109 - DNA, 25 bp, Homo sapien
tcttaatgtgaacttcttttcggaa

SEQ ID NO: 1866110 - DNA, 25 bp, Homo sapien
gaagattcttaatgtgaacttcttt

SEQ ID NO: 1866111 - DNA, 25 bp, Homo sapien
gcaatgaggcgtttgaattggtcct

SEQ ID NO: 1866112 - DNA, 25 bp, Homo sapien
ccaatgcaaccagcaatgaggcgtt

SEQ ID NO: 1866113 - DNA, 25 bp, Homo sapien
aaagcttgcagtcaaactggtccag

SEQ ID NO: 1866114 - DNA, 25 bp, Homo sapien
gggatttgctccattacagctctta

SEQ ID NO: 1866115 - DNA, 25 bp, Homo sapien
gaaaagccacgtaactgcatctgcg

SEQ ID NO: 1866116 - DNA, 25 bp, Homo sapien
gtcgtgctgcccgtgcatctgtaag

SEQ ID NO: 1866117 - DNA, 25 bp, Homo sapien
agggaagccatgcacccgtcgtgct

SEQ ID NO: 1866118 - DNA, 25 bp, Homo sapien
tctgcgagcagtgtccctgacagca

SEQ ID NO: 1866119 - DNA, 25 bp, Homo sapien
atgatttagtcagtctgcatgaccc

SEQ ID NO: 1866120 - DNA, 25 bp, Homo sapien
tgatttagtcagtctgcatgaccca

SEQ ID NO: 1866121 - DNA, 25 bp, Homo sapien
gatttagtcagtctgcatgacccaa

SEQ ID NO: 1866122 - DNA, 25 bp, Homo sapien
tttagtcagtctgcatgacccaaac

SEQ ID NO: 1866123 - DNA, 25 bp, Homo sapien
aattgaaggctgtaattaatagcgc

SEQ ID NO: 1866124 - DNA, 25 bp, Homo sapien
taattaatagcgctgtacaaacatc

SEQ ID NO: 1866125 - DNA, 25 bp, Homo sapien
tgtgaggttgtcctctggcaggaca

SEQ ID NO: 1866126 - DNA, 25 bp, Homo sapien
cagagctgtgaggttgtcctctggc

SEQ ID NO: 1866127 - DNA, 25 bp, Homo sapien
catgcctggcttaggagctggagtt

SEQ ID NO: 1866128 - DNA, 25 bp, Homo sapien
tatgggagacaccatggcattgcac

SEQ ID NO: 1866129 - DNA, 25 bp, Homo sapien
gattattacacatcaggagccggag

SEQ ID NO: 1866130 - DNA, 25 bp, Homo sapien
cctgggcaaggagtaaaggtatcac

SEQ ID NO: 1866131 - DNA, 25 bp, Homo sapien
tctgtaagctctgccatagctgagg

SEQ ID NO: 1866132 - DNA, 25 bp, Homo sapien
atagctgagggggtgacctctgtgg

SEQ ID NO: 1866133 - DNA, 25 bp, Homo sapien
caggtctgtaagctctgccatagct

SEQ ID NO: 1866134 - DNA, 25 bp, Homo sapien
tagctgagggggtgacctctgtggc

SEQ ID NO: 1866135 - DNA, 25 bp, Homo sapien
atcagagagtagaatgttaagctcc

SEQ ID NO: 1866136 - DNA, 25 bp, Homo sapien
ctgttatcagagagtagaatgttaa

SEQ ID NO: 1866137 - DNA, 25 bp, Homo sapien
tatcagagagtagaatgttaagctc

SEQ ID NO: 1866138 - DNA, 25 bp, Homo sapien
gttatcagagagtagaatgttaagc

SEQ ID NO: 1866139 - DNA, 25 bp, Homo sapien
tggtcatggacgatctctgggaaga

SEQ ID NO: 1866140 - DNA, 25 bp, Homo sapien
gggctggtccagagatgataactac

SEQ ID NO: 1866141 - DNA, 25 bp, Homo sapien
gatgcactcaagctgtacatgaggg

SEQ ID NO: 1866142 - DNA, 25 bp, Homo sapien
gaaatgggagcttctaggcagaaac

SEQ ID NO: 1866143 - DNA, 25 bp, Homo sapien
gggagcactactgtggtcagcaccc

SEQ ID NO: 1866144 - DNA, 25 bp, Homo sapien
cagcatctcttgagactctgggttt

SEQ ID NO: 1866145 - DNA, 25 bp, Homo sapien
gctcctttggttgataacttgccat

SEQ ID NO: 1866146 - DNA, 25 bp, Homo sapien
ggctcctttggttgataacttgcca

SEQ ID NO: 1866147 - DNA, 25 bp, Homo sapien
aggctcctttggttgataacttgcc

SEQ ID NO: 1866148 - DNA, 25 bp, Homo sapien
caggctcctttggttgataacttgc

SEQ ID NO: 1866149 - DNA, 25 bp, Homo sapien
caaaggaaataaatgctagaattgg

SEQ ID NO: 1866150 - DNA, 25 bp, Homo sapien
aaggaaataaatgctagaattgggg

SEQ ID NO: 1866151 - DNA, 25 bp, Homo sapien
ggaaataaatgctagaattggggaa

SEQ ID NO: 1866152 - DNA, 25 bp, Homo sapien
aaaggaaataaatgctagaattggg

SEQ ID NO: 1866153 - DNA, 25 bp, Homo sapien
aggtccgaggatgggggataccagg

SEQ ID NO: 1866154 - DNA, 25 bp, Homo sapien
gaggtccgaggatgggggataccag

SEQ ID NO: 1866155 - DNA, 25 bp, Homo sapien
gtccgaggatgggggataccagggc

SEQ ID NO: 1866156 - DNA, 25 bp, Homo sapien
ctgggggacagaagagcaccagagg

SEQ ID NO: 1866157 - DNA, 25 bp, Homo sapien
ttagctgcatttccgtcaggctgca

SEQ ID NO: 1866158 - DNA, 25 bp, Homo sapien
tcaggctgcacattatggtcactgg

SEQ ID NO: 1866159 - DNA, 25 bp, Homo sapien
taaatggcactgatattgaattcca

SEQ ID NO: 1866160 - DNA, 25 bp, Homo sapien
tggtcactggcccaaaaagtaggaa

SEQ ID NO: 1866161 - DNA, 25 bp, Homo sapien
aaagtttatggccatctggactgcc

SEQ ID NO: 1866162 - DNA, 25 bp, Homo sapien
ctgaccttttgggttatgtagagac

SEQ ID NO: 1866163 - DNA, 25 bp, Homo sapien
tttaatgacatgatacacttagata

SEQ ID NO: 1866164 - DNA, 25 bp, Homo sapien
tttatggccatctggactgccttca

SEQ ID NO: 1866165 - DNA, 25 bp, Homo sapien
tgagaagctgggtagcaaggtcctc

SEQ ID NO: 1866166 - DNA, 25 bp, Homo sapien
aagcatgggtctgagtcggtagtca

SEQ ID NO: 1866167 - DNA, 25 bp, Homo sapien
gagtcggtagtcaggaatattgttc

SEQ ID NO: 1866168 - DNA, 25 bp, Homo sapien
tagaagtcttgctgcatggaagggc

SEQ ID NO: 1866169 - DNA, 25 bp, Homo sapien
ggaaaaaaagagcattgaaaatgac

SEQ ID NO: 1866170 - DNA, 25 bp, Homo sapien
tgacaaatccaacatctgttactgc

SEQ ID NO: 1866171 - DNA, 25 bp, Homo sapien
aaatgacaaatccaacatctgttac

SEQ ID NO: 1866172 - DNA, 25 bp, Homo sapien
ttgaaaatgacaaatccaacatctg

SEQ ID NO: 1866173 - DNA, 25 bp, Homo sapien
ctgtacactagatgaaaagtccaac

SEQ ID NO: 1866174 - DNA, 25 bp, Homo sapien
gtacactagatgaaaagtccaaccc

SEQ ID NO: 1866175 - DNA, 25 bp, Homo sapien
tgtacactagatgaaaagtccaacc

SEQ ID NO: 1866176 - DNA, 25 bp, Homo sapien
cagttttcatagagggtagagaaga

SEQ ID NO: 1866177 - DNA, 25 bp, Homo sapien
ttccaagacggttttgaagacagga

SEQ ID NO: 1866178 - DNA, 25 bp, Homo sapien
tctttccaagacggttttgaagaca

SEQ ID NO: 1866179 - DNA, 25 bp, Homo sapien
gtagagaagaaacgctgcattcttt

SEQ ID NO: 1866180 - DNA, 25 bp, Homo sapien
gaagcacaagataggctgaagctgc

SEQ ID NO: 1866181 - DNA, 25 bp, Homo sapien
caaatagatggtcaaggcagtgcaa

SEQ ID NO: 1866182 - DNA, 25 bp, Homo sapien
gagcttataggaactccacattctg

SEQ ID NO: 1866183 - DNA, 25 bp, Homo sapien
tcaaggaacccataagaacgcctgt

SEQ ID NO: 1866184 - DNA, 25 bp, Homo sapien
tatccagagccttggtgaaaggctc

SEQ ID NO: 1866185 - DNA, 25 bp, Homo sapien
tccgcgtcaagcatatccagagcct

SEQ ID NO: 1866186 - DNA, 25 bp, Homo sapien
atagcagatttttccgcgtcaagca

SEQ ID NO: 1866187 - DNA, 25 bp, Homo sapien
gagccttggtgaaaggctctgccat

SEQ ID NO: 1866188 - DNA, 25 bp, Homo sapien
ttctggtgcatataatgtattgtgg

SEQ ID NO: 1866189 - DNA, 25 bp, Homo sapien
tggtgcatataatgtattgtgggtt

SEQ ID NO: 1866190 - DNA, 25 bp, Homo sapien
tctggtgcatataatgtattgtggg

SEQ ID NO: 1866191 - DNA, 25 bp, Homo sapien
ctggtgcatataatgtattgtgggt

SEQ ID NO: 1866192 - DNA, 25 bp, Homo sapien
acaagaatgctattgagcttttcca

SEQ ID NO: 1866193 - DNA, 25 bp, Homo sapien
aacaagaatgctattgagcttttcc

SEQ ID NO: 1866194 - DNA, 25 bp, Homo sapien
gaaagaaacaagaatgctattgagc

SEQ ID NO: 1866195 - DNA, 25 bp, Homo sapien
agaaacaagaatgctattgagcttt

SEQ ID NO: 1866196 - DNA, 25 bp, Homo sapien
tgcattgaagcgcaatagcagccat

SEQ ID NO: 1866197 - DNA, 25 bp, Homo sapien
tgtcctcgacaactcaactctgcat

SEQ ID NO: 1866198 - DNA, 25 bp, Homo sapien
ccggcaatatggtgtctgtcctcga

SEQ ID NO: 1866199 - DNA, 25 bp, Homo sapien
gaatggccaaggtatgttccaacgg

SEQ ID NO: 1866200 - DNA, 25 bp, Homo sapien
caaactcttagcctcaaggatccgc

SEQ ID NO: 1866201 - DNA, 25 bp, Homo sapien
aaactcttagcctcaaggatccgcc

SEQ ID NO: 1866202 - DNA, 25 bp, Homo sapien
ctcaaactcttagcctcaaggatcc

SEQ ID NO: 1866203 - DNA, 25 bp, Homo sapien
actcttagcctcaaggatccgcctg

SEQ ID NO: 1866204 - DNA, 25 bp, Homo sapien
cacgcttaattcactttatttttct

SEQ ID NO: 1866205 - DNA, 25 bp, Homo sapien
taattcactttatttttcttgtata

SEQ ID NO: 1866206 - DNA, 25 bp, Homo sapien
cgcttaattcactttatttttcttg

SEQ ID NO: 1866207 - DNA, 25 bp, Homo sapien
caccagcacagagccacggcggcct

SEQ ID NO: 1866208 - DNA, 25 bp, Homo sapien
agcacagagccacggcggcctgtca

SEQ ID NO: 1866209 - DNA, 25 bp, Homo sapien
gcacaggtgcggagacaatgccagt

SEQ ID NO: 1866210 - DNA, 25 bp, Homo sapien
gagcctgggtctgctgcacagagac

SEQ ID NO: 1866211 - DNA, 25 bp, Homo sapien
aggggacggtgtggggcttgccgat

SEQ ID NO: 1866212 - DNA, 25 bp, Homo sapien
cttgcaggggacggtgtggggcttg

SEQ ID NO: 1866213 - DNA, 25 bp, Homo sapien
gcaggggacggtgtggggcttgccg

SEQ ID NO: 1866214 - DNA, 25 bp, Homo sapien
tgcaggggacggtgtggggcttgcc

SEQ ID NO: 1866215 - DNA, 25 bp, Homo sapien
ggatgatggccccacgggtggcggt

SEQ ID NO: 1866216 - DNA, 25 bp, Homo sapien
gatgatggccccacgggtggcggtg

SEQ ID NO: 1866217 - DNA, 25 bp, Homo sapien
gccaggatgatggccccacgggtgg

SEQ ID NO: 1866218 - DNA, 25 bp, Homo sapien
caggatgatggccccacgggtggcg

SEQ ID NO: 1866219 - DNA, 25 bp, Homo sapien
ttggagcacttaacacccagaccga

SEQ ID NO: 1866220 - DNA, 25 bp, Homo sapien
tggagcacttaacacccagaccgac

SEQ ID NO: 1866221 - DNA, 25 bp, Homo sapien
cttggagcacttaacacccagaccg

SEQ ID NO: 1866222 - DNA, 25 bp, Homo sapien
ctgtagtccccgatagcaacaaacg

SEQ ID NO: 1866223 - DNA, 25 bp, Homo sapien
ccactgtagtccccgatagcaacaa

SEQ ID NO: 1866224 - DNA, 25 bp, Homo sapien
aaagtcaatgatctctgattcctta

SEQ ID NO: 1866225 - DNA, 25 bp, Homo sapien
gtggccactgtagtccccgatagca

SEQ ID NO: 1866226 - DNA, 25 bp, Homo sapien
gaccaagcggcccagcttggtgacg

SEQ ID NO: 1866227 - DNA, 25 bp, Homo sapien
cttgaccaagcggcccagcttggtg

SEQ ID NO: 1866228 - DNA, 25 bp, Homo sapien
agcggcccagcttggtgacgggcat

SEQ ID NO: 1866229 - DNA, 25 bp, Homo sapien
aagcggcccagcttggtgacgggca

SEQ ID NO: 1866230 - DNA, 25 bp, Homo sapien
cagccccggcccggtccacggctgc

SEQ ID NO: 1866231 - DNA, 25 bp, Homo sapien
tcagccccggcccggtccacggctg

SEQ ID NO: 1866232 - DNA, 25 bp, Homo sapien
ctattatcagattatttgacgcagg

SEQ ID NO: 1866233 - DNA, 25 bp, Homo sapien
gctcaatagtttcatgtggcaagtg

SEQ ID NO: 1866234 - DNA, 25 bp, Homo sapien
tctgaaagtactgtaacacttgact

SEQ ID NO: 1866235 - DNA, 25 bp, Homo sapien
ggtgctatgaataccttgctacatt

SEQ ID NO: 1866236 - DNA, 25 bp, Homo sapien
tccttaaagtcaagctgagtctgct

SEQ ID NO: 1866237 - DNA, 25 bp, Homo sapien
tactctatcattacatgctaggcat

SEQ ID NO: 1866238 - DNA, 25 bp, Homo sapien
gagtgctgattacatgaatgtgtcc

SEQ ID NO: 1866239 - DNA, 25 bp, Homo sapien
tagctccagctacacactattcaag

SEQ ID NO: 1866240 - DNA, 25 bp, Homo sapien
ctaaatgaaaggatagacagaacag

SEQ ID NO: 1866241 - DNA, 25 bp, Homo sapien
aaggatagacagaacaggtcttgtt

SEQ ID NO: 1866242 - DNA, 25 bp, Homo sapien
aatgaaaggatagacagaacaggtc

SEQ ID NO: 1866243 - DNA, 25 bp, Homo sapien
gaaaggatagacagaacaggtcttg

SEQ ID NO: 1866244 - DNA, 25 bp, Homo sapien
tatgaataccacctagacaagcatc

SEQ ID NO: 1866245 - DNA, 25 bp, Homo sapien
tcccaatgagcaattcctttactaa

SEQ ID NO: 1866246 - DNA, 25 bp, Homo sapien
gacaagcatcattatagaaggcaac

SEQ ID NO: 1866247 - DNA, 25 bp, Homo sapien
gaggaggctcaaaatgggaaaagcc

SEQ ID NO: 1866248 - DNA, 25 bp, Homo sapien
cactaagatatgaagacatgtaaac

SEQ ID NO: 1866249 - DNA, 25 bp, Homo sapien
ctgagacaccctctagaaagaaata

SEQ ID NO: 1866250 - DNA, 25 bp, Homo sapien
aaaactgagacaccctctagaaaga

SEQ ID NO: 1866251 - DNA, 25 bp, Homo sapien
taaatcaatccctcattaataccac

SEQ ID NO: 1866252 - DNA, 25 bp, Homo sapien
tacggaagattggatttccactgga

SEQ ID NO: 1866253 - DNA, 25 bp, Homo sapien
cactggatgtataacccaccacaaa

SEQ ID NO: 1866254 - DNA, 25 bp, Homo sapien
ggccagcaagttcgtttcaccacac

SEQ ID NO: 1866255 - DNA, 25 bp, Homo sapien
cttataagcgcaagcaaattgtcaa

SEQ ID NO: 1866256 - DNA, 25 bp, Homo sapien
gttagatatattcaaggttctggca

SEQ ID NO: 1866257 - DNA, 25 bp, Homo sapien
tgagaaggtggcttagatacgatcc

SEQ ID NO: 1866258 - DNA, 25 bp, Homo sapien
ttaaggtgaagtccaagagggatcc

SEQ ID NO: 1866259 - DNA, 25 bp, Homo sapien
gccagtggtaggctctggaaacttc

SEQ ID NO: 1866260 - DNA, 25 bp, Homo sapien
cttcagagctatttagagatcctta

SEQ ID NO: 1866261 - DNA, 25 bp, Homo sapien
ctatttagagatccttaaagccaaa

SEQ ID NO: 1866262 - DNA, 25 bp, Homo sapien
acttcctcattacaccttcagtctt

SEQ ID NO: 1866263 - DNA, 25 bp, Homo sapien
cctgctgaccaagttctgacctact

SEQ ID NO: 1866264 - DNA, 25 bp, Homo sapien
tcgtgcacggtttaagccacacgga

SEQ ID NO: 1866265 - DNA, 25 bp, Homo sapien
gatctgtacccacatacgcaatgaa

SEQ ID NO: 1866266 - DNA, 25 bp, Homo sapien
cacggtttaagccacacggatcctc

SEQ ID NO: 1866267 - DNA, 25 bp, Homo sapien
cccacatacgcaatgaaagcatcaa

SEQ ID NO: 1866268 - DNA, 25 bp, Homo sapien
taggaacaccttctgacgctcgtag

SEQ ID NO: 1866269 - DNA, 25 bp, Homo sapien
ccatttgtgtcaggagtagctcatt

SEQ ID NO: 1866270 - DNA, 25 bp, Homo sapien
ggttataaagcatgtcaaaattggg

SEQ ID NO: 1866271 - DNA, 25 bp, Homo sapien
cattggagaggagttgcttcacatg

SEQ ID NO: 1866272 - DNA, 25 bp, Homo sapien
acattcctcactgcccgggttctgg

SEQ ID NO: 1866273 - DNA, 25 bp, Homo sapien
cacgacacatcttgatgatggagga

SEQ ID NO: 1866274 - DNA, 25 bp, Homo sapien
gaggaacaagcatgcctcctcacat

SEQ ID NO: 1866275 - DNA, 25 bp, Homo sapien
cacaagctgggggtagtcacgacac

SEQ ID NO: 1866276 - DNA, 25 bp, Homo sapien
tcttcaacagtttcaaaagtgacag

SEQ ID NO: 1866277 - DNA, 25 bp, Homo sapien
actttcttcaacagtttcaaaagtg

SEQ ID NO: 1866278 - DNA, 25 bp, Homo sapien
aacagtttcaaaagtgacagatgaa

SEQ ID NO: 1866279 - DNA, 25 bp, Homo sapien
tcaacagtttcaaaagtgacagatg

SEQ ID NO: 1866280 - DNA, 25 bp, Homo sapien
ggaactctggtctgtaggtgacaaa

SEQ ID NO: 1866281 - DNA, 25 bp, Homo sapien
gaaccatctgcaatagctctattcc

SEQ ID NO: 1866282 - DNA, 25 bp, Homo sapien
gacattagtaaggacgcaggacagg

SEQ ID NO: 1866283 - DNA, 25 bp, Homo sapien
gggatccttggtatcaaagttcaga

SEQ ID NO: 1866284 - DNA, 25 bp, Homo sapien
tttagtgttcgaaacatctgggtga

SEQ ID NO: 1866285 - DNA, 25 bp, Homo sapien
ctatttagtgttcgaaacatctggg

SEQ ID NO: 1866286 - DNA, 25 bp, Homo sapien
ctctatttagtgttcgaaacatctg

SEQ ID NO: 1866287 - DNA, 25 bp, Homo sapien
ttctctatttagtgttcgaaacatc

SEQ ID NO: 1866288 - DNA, 25 bp, Homo sapien
ccactgcacgaatgaaggtgagaag

SEQ ID NO: 1866289 - DNA, 25 bp, Homo sapien
aatgaaggtgagaagacggaacaga

SEQ ID NO: 1866290 - DNA, 25 bp, Homo sapien
gcttcccactgcacgaatgaaggtg

SEQ ID NO: 1866291 - DNA, 25 bp, Homo sapien
ctgcacgaatgaaggtgagaagacg

SEQ ID NO: 1866292 - DNA, 25 bp, Homo sapien
actgcatccagcctttttgctttat

SEQ ID NO: 1866293 - DNA, 25 bp, Homo sapien
tttttgctttattaatactgtcaca

SEQ ID NO: 1866294 - DNA, 25 bp, Homo sapien
tcactgcatccagcctttttgcttt

SEQ ID NO: 1866295 - DNA, 25 bp, Homo sapien
ccatctcggctaaccgcaacctaca

SEQ ID NO: 1866296 - DNA, 25 bp, Homo sapien
tgtcagccaatgaaaacgctccctc

SEQ ID NO: 1866297 - DNA, 25 bp, Homo sapien
tgtgtgtatagctcaggctcatttc

SEQ ID NO: 1866298 - DNA, 25 bp, Homo sapien
gaatagtataagtatatcgttctga

SEQ ID NO: 1866299 - DNA, 25 bp, Homo sapien
tctccaggatgagcaaagctatttt

SEQ ID NO: 1866300 - DNA, 25 bp, Homo sapien
gatccaaacgacatgccaacctcat

SEQ ID NO: 1866301 - DNA, 25 bp, Homo sapien
acctctccttgttgtgctcgggagg

SEQ ID NO: 1866302 - DNA, 25 bp, Homo sapien
agccatctggaagctagttttggga

SEQ ID NO: 1866303 - DNA, 25 bp, Homo sapien
gatagttgatactttagccactccc

SEQ ID NO: 1866304 - DNA, 25 bp, Homo sapien
taccagctagatcctgtaagtggca

SEQ ID NO: 1866305 - DNA, 25 bp, Homo sapien
tattaacgaatccagaagtttttga

SEQ ID NO: 1866306 - DNA, 25 bp, Homo sapien
gaaatcaggattgggcacagtagct

SEQ ID NO: 1866307 - DNA, 25 bp, Homo sapien
ggacaggaatcaataactggtataa

SEQ ID NO: 1866308 - DNA, 25 bp, Homo sapien
gactcctagtggatataggatttat

SEQ ID NO: 1866309 - DNA, 25 bp, Homo sapien
tgggggatgactcctagtggatata

SEQ ID NO: 1866310 - DNA, 25 bp, Homo sapien
gggatgactcctagtggatatagga

SEQ ID NO: 1866311 - DNA, 25 bp, Homo sapien
gatgactcctagtggatataggatt

SEQ ID NO: 1866312 - DNA, 25 bp, Homo sapien
tgaagtcctcatcgctatcaaaatc

SEQ ID NO: 1866313 - DNA, 25 bp, Homo sapien
aaccgagaatattcacagctagggc

SEQ ID NO: 1866314 - DNA, 25 bp, Homo sapien
tcatcgctatcaaaatcaaaccgag

SEQ ID NO: 1866315 - DNA, 25 bp, Homo sapien
cgctatcaaaatcaaaccgagaata

SEQ ID NO: 1866316 - DNA, 25 bp, Homo sapien
ctgagagctacttgcctcaaatact

SEQ ID NO: 1866317 - DNA, 25 bp, Homo sapien
taagagttaagcgtttgcatgagat

SEQ ID NO: 1866318 - DNA, 25 bp, Homo sapien
agttccagtattcctcagtggtaga

SEQ ID NO: 1866319 - DNA, 25 bp, Homo sapien
ccacagtttgctcccagttccagta

SEQ ID NO: 1866320 - DNA, 25 bp, Homo sapien
attccacatgtttagattcccatta

SEQ ID NO: 1866321 - DNA, 25 bp, Homo sapien
gaccaagttagtcatggaagcacga

SEQ ID NO: 1866322 - DNA, 25 bp, Homo sapien
tgctaatagcaaaggatcacgggac

SEQ ID NO: 1866323 - DNA, 25 bp, Homo sapien
tggaagcacgaagatattttggtat

SEQ ID NO: 1866324 - DNA, 25 bp, Homo sapien
tttcatgcctgaagagggctcccca

SEQ ID NO: 1866325 - DNA, 25 bp, Homo sapien
cttggatgggttgtgaaagcaagaa

SEQ ID NO: 1866326 - DNA, 25 bp, Homo sapien
ctgacttggatgggttgtgaaagca

SEQ ID NO: 1866327 - DNA, 25 bp, Homo sapien
tgacttggatgggttgtgaaagcaa

SEQ ID NO: 1866328 - DNA, 25 bp, Homo sapien
acttggatgggttgtgaaagcaaga

SEQ ID NO: 1866329 - DNA, 25 bp, Homo sapien
ccagcgcacacaacacctgacagag

SEQ ID NO: 1866330 - DNA, 25 bp, Homo sapien
agctgattgcccagcgcacacaaca

SEQ ID NO: 1866331 - DNA, 25 bp, Homo sapien
cagcgcacacaacacctgacagagc

SEQ ID NO: 1866332 - DNA, 25 bp, Homo sapien
tgcacacagctgattgcccagcgca

SEQ ID NO: 1866333 - DNA, 25 bp, Homo sapien
ctcttcagaaagacgtagtgttttt

SEQ ID NO: 1866334 - DNA, 25 bp, Homo sapien
taccaaacctcctccatcagcagtc

SEQ ID NO: 1866335 - DNA, 25 bp, Homo sapien
ctaccaaacctcctccatcagcagt

SEQ ID NO: 1866336 - DNA, 25 bp, Homo sapien
taatatatagttctgcctgacttcc

SEQ ID NO: 1866337 - DNA, 25 bp, Homo sapien
tcaaaaagatggtgttgcaacagat

SEQ ID NO: 1866338 - DNA, 25 bp, Homo sapien
gacttcctggtaagaaacatgttat

SEQ ID NO: 1866339 - DNA, 25 bp, Homo sapien
acacgatctcgctgtcacacctagg

SEQ ID NO: 1866340 - DNA, 25 bp, Homo sapien
tatataatgcatggcaacatctcca

SEQ ID NO: 1866341 - DNA, 25 bp, Homo sapien
tgtgcggcggagagtatataatgca

SEQ ID NO: 1866342 - DNA, 25 bp, Homo sapien
tctccaaataagaccatcaagggct

SEQ ID NO: 1866343 - DNA, 25 bp, Homo sapien
taagaccatcaagggcttccggtct

SEQ ID NO: 1866344 - DNA, 25 bp, Homo sapien
agtgatgtgactcatagacacccag

SEQ ID NO: 1866345 - DNA, 25 bp, Homo sapien
agcaaacacagtatctccaggagtt

SEQ ID NO: 1866346 - DNA, 25 bp, Homo sapien
cagcggctcccaactgaagttcctg

SEQ ID NO: 1866347 - DNA, 25 bp, Homo sapien
tattcagtgctgcaactcctactcg

SEQ ID NO: 1866348 - DNA, 25 bp, Homo sapien
ctttgactcctgagaagtatctgtc

SEQ ID NO: 1866349 - DNA, 25 bp, Homo sapien
ttgactcctgagaagtatctgtctt

SEQ ID NO: 1866350 - DNA, 25 bp, Homo sapien
tttgactcctgagaagtatctgtct

SEQ ID NO: 1866351 - DNA, 25 bp, Homo sapien
tacatcctctgccagtcgcaaaagg

SEQ ID NO: 1866352 - DNA, 25 bp, Homo sapien
acatcaccaattctgtctgtgtttc

SEQ ID NO: 1866353 - DNA, 25 bp, Homo sapien
ctgaaaagtcactacatcctctgcc

SEQ ID NO: 1866354 - DNA, 25 bp, Homo sapien
aaaggataaacatcaccaattctgt

SEQ ID NO: 1866355 - DNA, 25 bp, Homo sapien
acagagcatctttaatatggttctc

SEQ ID NO: 1866356 - DNA, 25 bp, Homo sapien
tgtcaggccaatgctgtggccactc

SEQ ID NO: 1866357 - DNA, 25 bp, Homo sapien
gaaagagtgtccaattctattagca

SEQ ID NO: 1866358 - DNA, 25 bp, Homo sapien
tccactacaattcgagacagagcat

SEQ ID NO: 1866359 - DNA, 25 bp, Homo sapien
cttctccaatcgagacatgccgttc

SEQ ID NO: 1866360 - DNA, 25 bp, Homo sapien
caatcgagacatgccgttccaccga

SEQ ID NO: 1866361 - DNA, 25 bp, Homo sapien
tcgagacatgccgttccaccgaaac

SEQ ID NO: 1866362 - DNA, 25 bp, Homo sapien
atacaccttctccaatcgagacatg

SEQ ID NO: 1866363 - DNA, 25 bp, Homo sapien
ttgacaacgtgttccaggatctgaa

SEQ ID NO: 1866364 - DNA, 25 bp, Homo sapien
gttccaggatctgaaggccaaaatg

SEQ ID NO: 1866365 - DNA, 25 bp, Homo sapien
acaacgtgttccaggatctgaaggc

SEQ ID NO: 1866366 - DNA, 25 bp, Homo sapien
ttccaggatctgaaggccaaaatgt

SEQ ID NO: 1866367 - DNA, 25 bp, Homo sapien
caggggacacagataggacactttt

SEQ ID NO: 1866368 - DNA, 25 bp, Homo sapien
agccacaggggacacagataggaca

SEQ ID NO: 1866369 - DNA, 25 bp, Homo sapien
cacaggggacacagataggacactt

SEQ ID NO: 1866370 - DNA, 25 bp, Homo sapien
gggacacagataggacacttttctt

SEQ ID NO: 1866371 - DNA, 25 bp, Homo sapien
gctttcaccagctgctcgcacagcg

SEQ ID NO: 1866372 - DNA, 25 bp, Homo sapien
cgcacagcgcgtttacttgatccat

SEQ ID NO: 1866373 - DNA, 25 bp, Homo sapien
cttccagccggtagcgctgggtgga

SEQ ID NO: 1866374 - DNA, 25 bp, Homo sapien
gggtccatcatgaccgtcaccgctt

SEQ ID NO: 1866375 - DNA, 25 bp, Homo sapien
ttagcagcaactcgcgctgggaaga

SEQ ID NO: 1866376 - DNA, 25 bp, Homo sapien
aggaggagcgttagcagcaactcgc

SEQ ID NO: 1866377 - DNA, 25 bp, Homo sapien
aggcacgacagctccctcggcgaga

SEQ ID NO: 1866378 - DNA, 25 bp, Homo sapien
tgcagtcccgggaccacgaggcacg

SEQ ID NO: 1866379 - DNA, 25 bp, Homo sapien
tttatagtgattttcccactccctc

SEQ ID NO: 1866380 - DNA, 25 bp, Homo sapien
ggcatgtatccactacacgctgcta

SEQ ID NO: 1866381 - DNA, 25 bp, Homo sapien
cctcttgtacccacagatacatttg

SEQ ID NO: 1866382 - DNA, 25 bp, Homo sapien
gcacaaggcccctctcattgtattt

SEQ ID NO: 1866383 - DNA, 25 bp, Homo sapien
aagatgtgccacttatagaggaagc

SEQ ID NO: 1866384 - DNA, 25 bp, Homo sapien
ccagggaagcttgtgacttaaggaa

SEQ ID NO: 1866385 - DNA, 25 bp, Homo sapien
caaagtatgtcaagctagaggctgc

SEQ ID NO: 1866386 - DNA, 25 bp, Homo sapien
gttaactcagatggacgtgttcctc

SEQ ID NO: 1866387 - DNA, 25 bp, Homo sapien
aattatgtctacttcatattacaga

SEQ ID NO: 1866388 - DNA, 25 bp, Homo sapien
taaaacaattatgtctacttcatat

SEQ ID NO: 1866389 - DNA, 25 bp, Homo sapien
ctttaatgtggtactagaaagctag

SEQ ID NO: 1866390 - DNA, 25 bp, Homo sapien
aatgtggtactagaaagctagctag

SEQ ID NO: 1866391 - DNA, 25 bp, Homo sapien
tgcaatttacatatcagctgctctt

SEQ ID NO: 1866392 - DNA, 25 bp, Homo sapien
gcaatttacatatcagctgctcttt

SEQ ID NO: 1866393 - DNA, 25 bp, Homo sapien
aatttcttgctacttctctgacccc

SEQ ID NO: 1866394 - DNA, 25 bp, Homo sapien
tagcagatcctatcacttcactgtt

SEQ ID NO: 1866395 - DNA, 25 bp, Homo sapien
gcacagtaatacaaccttagctcac

SEQ ID NO: 1866396 - DNA, 25 bp, Homo sapien
tttcttccctctttgtatccagtgg

SEQ ID NO: 1866397 - DNA, 25 bp, Homo sapien
cacccagctggttgtgagcattcgt

SEQ ID NO: 1866398 - DNA, 25 bp, Homo sapien
tgtacaaggagacaaacgcctcagc

SEQ ID NO: 1866399 - DNA, 25 bp, Homo sapien
tacccgctatgatgctcacaagatg

SEQ ID NO: 1866400 - DNA, 25 bp, Homo sapien
tcagtacctagaattcagatgctcc

SEQ ID NO: 1866401 - DNA, 25 bp, Homo sapien
ctctgtattggcttggtcagggaaa

SEQ ID NO: 1866402 - DNA, 25 bp, Homo sapien
tcttgattataaaggtgacctgtgt

SEQ ID NO: 1866403 - DNA, 25 bp, Homo sapien
caggaggttagacccttactctgta

SEQ ID NO: 1866404 - DNA, 25 bp, Homo sapien
ctgttggtcatgaaatataagcctc

SEQ ID NO: 1866405 - DNA, 25 bp, Homo sapien
gtaactcggccgggtacaatggctc

SEQ ID NO: 1866406 - DNA, 25 bp, Homo sapien
aggcacgttccaggcacctgtgatc

SEQ ID NO: 1866407 - DNA, 25 bp, Homo sapien
tcaaattatgtaactcggccgggta

SEQ ID NO: 1866408 - DNA, 25 bp, Homo sapien
gtattcaaattatgtaactcggccg

SEQ ID NO: 1866409 - DNA, 25 bp, Homo sapien
tctatatttagtttgaagaggtggg

SEQ ID NO: 1866410 - DNA, 25 bp, Homo sapien
gcttttatgatacttgaatatctaa

SEQ ID NO: 1866411 - DNA, 25 bp, Homo sapien
tgaaaaccactagatttaccaggaa

SEQ ID NO: 1866412 - DNA, 25 bp, Homo sapien
caggccagccccaacttctactttt

SEQ ID NO: 1866413 - DNA, 25 bp, Homo sapien
gaccactagcaagtggccaactctt

SEQ ID NO: 1866414 - DNA, 25 bp, Homo sapien
tctactcttctttaagtagctggca

SEQ ID NO: 1866415 - DNA, 25 bp, Homo sapien
aagtgggctccttactattctgacc

SEQ ID NO: 1866416 - DNA, 25 bp, Homo sapien
actcttctttaagtagctggcactg

SEQ ID NO: 1866417 - DNA, 25 bp, Homo sapien
cggaaaataggccacaatacttggt

SEQ ID NO: 1866418 - DNA, 25 bp, Homo sapien
agtattctgctcacttgaactacgg

SEQ ID NO: 1866419 - DNA, 25 bp, Homo sapien
tggttacaatactggaactctgaac

SEQ ID NO: 1866420 - DNA, 25 bp, Homo sapien
cacgtgaaaggcctcagtattctgc

SEQ ID NO: 1866421 - DNA, 25 bp, Homo sapien
gaaaccttagccaacaaatccctga

SEQ ID NO: 1866422 - DNA, 25 bp, Homo sapien
aagaccagactgatgggcatgcagc

SEQ ID NO: 1866423 - DNA, 25 bp, Homo sapien
tgaaagccaacatgaccgcagagga

SEQ ID NO: 1866424 - DNA, 25 bp, Homo sapien
caagcctttgcttggtagccccacg

SEQ ID NO: 1866425 - DNA, 25 bp, Homo sapien
gccttgagaagaggtatagaaaaag

SEQ ID NO: 1866426 - DNA, 25 bp, Homo sapien
gatggccaagagcagataacctttt

SEQ ID NO: 1866427 - DNA, 25 bp, Homo sapien
gatgggcaacttacatggccttgag

SEQ ID NO: 1866428 - DNA, 25 bp, Homo sapien
agcacagggtggcaacactaccatt

SEQ ID NO: 1866429 - DNA, 25 bp, Homo sapien
ccacagggttgccaggtttgatgag

SEQ ID NO: 1866430 - DNA, 25 bp, Homo sapien
acagcttcggagcactgccctgaat

SEQ ID NO: 1866431 - DNA, 25 bp, Homo sapien
gtttgatgagccaaccaggtgagca

SEQ ID NO: 1866432 - DNA, 25 bp, Homo sapien
gacgaagaattgatgagtggatcca

SEQ ID NO: 1866433 - DNA, 25 bp, Homo sapien
gccacaccaagtttggcacctctcc

SEQ ID NO: 1866434 - DNA, 25 bp, Homo sapien
ggccacaccaagtttggcacctctc

SEQ ID NO: 1866435 - DNA, 25 bp, Homo sapien
ttaacacacagagccgccaatggca

SEQ ID NO: 1866436 - DNA, 25 bp, Homo sapien
tattgtagggacagcaatagaactg

SEQ ID NO: 1866437 - DNA, 25 bp, Homo sapien
caatagaactgtccctgcctgaagg

SEQ ID NO: 1866438 - DNA, 25 bp, Homo sapien
catggccagaagtcaccttatatat

SEQ ID NO: 1866439 - DNA, 25 bp, Homo sapien
gtaatggcttgtacatcagtgacat

SEQ ID NO: 1866440 - DNA, 25 bp, Homo sapien
accctcccggaacagcagtttggcg

SEQ ID NO: 1866441 - DNA, 25 bp, Homo sapien
gacatggccgatgcccttggtgaca

SEQ ID NO: 1866442 - DNA, 25 bp, Homo sapien
gggcttctcctgctgtaatggcttg

SEQ ID NO: 1866443 - DNA, 25 bp, Homo sapien
tactctgggtgtttcaggaagcgga

SEQ ID NO: 1866444 - DNA, 25 bp, Homo sapien
tctgggtgtttcaggaagcggaaac

SEQ ID NO: 1866445 - DNA, 25 bp, Homo sapien
cttcaggtactctgggtgtttcagg

SEQ ID NO: 1866446 - DNA, 25 bp, Homo sapien
ttcaggtactctgggtgtttcagga

SEQ ID NO: 1866447 - DNA, 25 bp, Homo sapien
tgccttctcgcctgtccgcagtttg

SEQ ID NO: 1866448 - DNA, 25 bp, Homo sapien
actgccttctcgcctgtccgcagtt

SEQ ID NO: 1866449 - DNA, 25 bp, Homo sapien
ccttctcgcctgtccgcagtttgtc

SEQ ID NO: 1866450 - DNA, 25 bp, Homo sapien
gccttctcgcctgtccgcagtttgt

SEQ ID NO: 1866451 - DNA, 25 bp, Homo sapien
agcaaataagtggtcactcccctgg

SEQ ID NO: 1866452 - DNA, 25 bp, Homo sapien
gcagcaaataagtggtcactcccct

SEQ ID NO: 1866453 - DNA, 25 bp, Homo sapien
aaataagtggtcactcccctggcca

SEQ ID NO: 1866454 - DNA, 25 bp, Homo sapien
caaataagtggtcactcccctggcc

SEQ ID NO: 1866455 - DNA, 25 bp, Homo sapien
ttttattcccattgtgggatcaagg

SEQ ID NO: 1866456 - DNA, 25 bp, Homo sapien
tccctcttttctgacctctggagaa

SEQ ID NO: 1866457 - DNA, 25 bp, Homo sapien
gtgggatcaaggagttctctgccag

SEQ ID NO: 1866458 - DNA, 25 bp, Homo sapien
caggccgctacccaccctaagtggg

SEQ ID NO: 1866459 - DNA, 25 bp, Homo sapien
tggtaggattcatctccgggctcac

SEQ ID NO: 1866460 - DNA, 25 bp, Homo sapien
ggtggcatggaacagtaagactatc

SEQ ID NO: 1866461 - DNA, 25 bp, Homo sapien
tactgtcacctggaatcctcgtcgg

SEQ ID NO: 1866462 - DNA, 25 bp, Homo sapien
ttttccaccactgccgtctgacgta

SEQ ID NO: 1866463 - DNA, 25 bp, Homo sapien
tacctcatgagtacgttaagctgtt

SEQ ID NO: 1866464 - DNA, 25 bp, Homo sapien
tctacgtagctagaccagaagcttc

SEQ ID NO: 1866465 - DNA, 25 bp, Homo sapien
tctctgaagcaccttagataggtgc

SEQ ID NO: 1866466 - DNA, 25 bp, Homo sapien
taggcacttctcttagcgttccctc

SEQ ID NO: 1866467 - DNA, 25 bp, Homo sapien
cccaagcgccagtgtagcagcctga

SEQ ID NO: 1866468 - DNA, 25 bp, Homo sapien
ccaagcgccagtgtagcagcctgac

SEQ ID NO: 1866469 - DNA, 25 bp, Homo sapien
agtgcacggtcaaagtccccaagcg

SEQ ID NO: 1866470 - DNA, 25 bp, Homo sapien
cttgcgaagcagtgcacggtcaaag

SEQ ID NO: 1866471 - DNA, 25 bp, Homo sapien
ttgcgctggatgctgcatactctca

SEQ ID NO: 1866472 - DNA, 25 bp, Homo sapien
aagcagccatcatccgtggggccca

SEQ ID NO: 1866473 - DNA, 25 bp, Homo sapien
gctggatgctgcatactctcagctc

SEQ ID NO: 1866474 - DNA, 25 bp, Homo sapien
agctggtccccctcacggcaaatcc

SEQ ID NO: 1866475 - DNA, 25 bp, Homo sapien
gactaatttcataaaaggccagcag

SEQ ID NO: 1866476 - DNA, 25 bp, Homo sapien
tctgacttggatgtaacagggctca

SEQ ID NO: 1866477 - DNA, 25 bp, Homo sapien
tgcagagtcttaggccagccgcgtt

SEQ ID NO: 1866478 - DNA, 25 bp, Homo sapien
gacacttgctggtttaacaacaccg

SEQ ID NO: 1866479 - DNA, 25 bp, Homo sapien
tccccacctctggtactgtgtagat

SEQ ID NO: 1866480 - DNA, 25 bp, Homo sapien
agtccccacctctggtactgtgtag

SEQ ID NO: 1866481 - DNA, 25 bp, Homo sapien
gtccccacctctggtactgtgtaga

SEQ ID NO: 1866482 - DNA, 25 bp, Homo sapien
ccccacctctggtactgtgtagatt

SEQ ID NO: 1866483 - DNA, 25 bp, Homo sapien
tccgtcagctgctgcatgagttcct

SEQ ID NO: 1866484 - DNA, 25 bp, Homo sapien
ttgaggaggtccagactctctccag

SEQ ID NO: 1866485 - DNA, 25 bp, Homo sapien
tcagaaagactttgaggaggtccag

SEQ ID NO: 1866486 - DNA, 25 bp, Homo sapien
tgagtggcggcagaatattcagaaa

SEQ ID NO: 1866487 - DNA, 25 bp, Homo sapien
ggacccgctccagctggcgtactgt

SEQ ID NO: 1866488 - DNA, 25 bp, Homo sapien
cacataggtcgatcttgctgaccac

SEQ ID NO: 1866489 - DNA, 25 bp, Homo sapien
cagcagtgacggcatcatcctcaga

SEQ ID NO: 1866490 - DNA, 25 bp, Homo sapien
tggtcttggcacataggtcgatctt

SEQ ID NO: 1866491 - DNA, 25 bp, Homo sapien
gaagaagaggagcattggtctgtct

SEQ ID NO: 1866492 - DNA, 25 bp, Homo sapien
gtaggagagtcagcaccccccttca

SEQ ID NO: 1866493 - DNA, 25 bp, Homo sapien
ctgtccctgccctaatgcctcgtac

SEQ ID NO: 1866494 - DNA, 25 bp, Homo sapien
tctccaagatttgaggcccagggta

SEQ ID NO: 1866495 - DNA, 25 bp, Homo sapien
ggcagtatgatgtgaggccaaagat

SEQ ID NO: 1866496 - DNA, 25 bp, Homo sapien
tctcttctgctgtccgtgagtcgct

SEQ ID NO: 1866497 - DNA, 25 bp, Homo sapien
ccagtgttggcactgacgaggagca

SEQ ID NO: 1866498 - DNA, 25 bp, Homo sapien
cctgccaggtcgatgaaggtgatca

SEQ ID NO: 1866499 - DNA, 25 bp, Homo sapien
cattgggtcccattgatcccatgca

SEQ ID NO: 1866500 - DNA, 25 bp, Homo sapien
caggacctaaaccattccctgggtg

SEQ ID NO: 1866501 - DNA, 25 bp, Homo sapien
gtgaccctgcctcttaatcttgacc

SEQ ID NO: 1866502 - DNA, 25 bp, Homo sapien
gagcttgttcacagtcccctcaggg

SEQ ID NO: 1866503 - DNA, 25 bp, Homo sapien
tctcccttgctgttaaagcccagga

SEQ ID NO: 1866504 - DNA, 25 bp, Homo sapien
ctgatgctggaggttcggccagact

SEQ ID NO: 1866505 - DNA, 25 bp, Homo sapien
gaatctcatgcaggtggcggaaaag

SEQ ID NO: 1866506 - DNA, 25 bp, Homo sapien
gactccaagcagagttgacttccca

SEQ ID NO: 1866507 - DNA, 25 bp, Homo sapien
actagcacctcggtgatcttccggg

SEQ ID NO: 1866508 - DNA, 25 bp, Homo sapien
tatcataatccacttctcgctctcg

SEQ ID NO: 1866509 - DNA, 25 bp, Homo sapien
tgtcagggacctttcgtactagcac

SEQ ID NO: 1866510 - DNA, 25 bp, Homo sapien
gaagaacggttatgtctgccccaac

SEQ ID NO: 1866511 - DNA, 25 bp, Homo sapien
ctaggtaactgggtatgcatgggtc

SEQ ID NO: 1866512 - DNA, 25 bp, Homo sapien
ggtaactgggtatgcatgggtcccc

SEQ ID NO: 1866513 - DNA, 25 bp, Homo sapien
cctcaggccctaggtaactgggtat

SEQ ID NO: 1866514 - DNA, 25 bp, Homo sapien
caggccctaggtaactgggtatgca

SEQ ID NO: 1866515 - DNA, 25 bp, Homo sapien
ctctgccatccggtgcagggtcttg

SEQ ID NO: 1866516 - DNA, 25 bp, Homo sapien
agcgaagctcgcatttcctcctcag

SEQ ID NO: 1866517 - DNA, 25 bp, Homo sapien
tgcagggtcttgagcgaagctcgca

SEQ ID NO: 1866518 - DNA, 25 bp, Homo sapien
cattgtcctctaccccaatctggta

SEQ ID NO: 1866519 - DNA, 25 bp, Homo sapien
acgtccctcctggagccgccacttc

SEQ ID NO: 1866520 - DNA, 25 bp, Homo sapien
gtccctcctggagccgccacttcat

SEQ ID NO: 1866521 - DNA, 25 bp, Homo sapien
cacgtccctcctggagccgccactt

SEQ ID NO: 1866522 - DNA, 25 bp, Homo sapien
cgtccctcctggagccgccacttca

SEQ ID NO: 1866523 - DNA, 25 bp, Homo sapien
tgtgtcaccaggtgctcaaagcggt

SEQ ID NO: 1866524 - DNA, 25 bp, Homo sapien
gtgtcaccaggtgctcaaagcggta

SEQ ID NO: 1866525 - DNA, 25 bp, Homo sapien
ttgtgtcaccaggtgctcaaagcgg

SEQ ID NO: 1866526 - DNA, 25 bp, Homo sapien
tttatattcaatgtttccatcttca

SEQ ID NO: 1866527 - DNA, 25 bp, Homo sapien
ttatattcaatgtttccatcttcag

SEQ ID NO: 1866528 - DNA, 25 bp, Homo sapien
tatattcaatgtttccatcttcagc

SEQ ID NO: 1866529 - DNA, 25 bp, Homo sapien
taccatacactgtacagacccaatc

SEQ ID NO: 1866530 - DNA, 25 bp, Homo sapien
agttaccatacactgtacagaccca

SEQ ID NO: 1866531 - DNA, 25 bp, Homo sapien
gttaccatacactgtacagacccaa

SEQ ID NO: 1866532 - DNA, 25 bp, Homo sapien
aaacagtgagcagttaccatacact

SEQ ID NO: 1866533 - DNA, 25 bp, Homo sapien
ttttcccagaagtctatgtctcctc

SEQ ID NO: 1866534 - DNA, 25 bp, Homo sapien
gcttttcccagaagtctatgtctcc

SEQ ID NO: 1866535 - DNA, 25 bp, Homo sapien
tgcttttcccagaagtctatgtctc

SEQ ID NO: 1866536 - DNA, 25 bp, Homo sapien
tcccagaagtctatgtctcctctgt

SEQ ID NO: 1866537 - DNA, 25 bp, Homo sapien
tgagagtccagtctctgcccttcct

SEQ ID NO: 1866538 - DNA, 25 bp, Homo sapien
gacctgaaagaggtgttctcctccc

SEQ ID NO: 1866539 - DNA, 25 bp, Homo sapien
cgggacctgaaagaggtgttctcct

SEQ ID NO: 1866540 - DNA, 25 bp, Homo sapien
cctgaaagaggtgttctcctcccgt

SEQ ID NO: 1866541 - DNA, 25 bp, Homo sapien
cgccgaacagctccgatacccgcga

SEQ ID NO: 1866542 - DNA, 25 bp, Homo sapien
acagctccgatacccgcgagtccat

SEQ ID NO: 1866543 - DNA, 25 bp, Homo sapien
agcagccgccgaacagctccgatac

SEQ ID NO: 1866544 - DNA, 25 bp, Homo sapien
cagcagccgccgaacagctccgata

SEQ ID NO: 1866545 - DNA, 25 bp, Homo sapien
cgtgagccagcacgcccggtcagga

SEQ ID NO: 1866546 - DNA, 25 bp, Homo sapien
gtgagccagcacgcccggtcaggag

SEQ ID NO: 1866547 - DNA, 25 bp, Homo sapien
ggcgtgagccagcacgcccggtcag

SEQ ID NO: 1866548 - DNA, 25 bp, Homo sapien
gcgtgagccagcacgcccggtcagg

SEQ ID NO: 1866549 - DNA, 25 bp, Homo sapien
taattagagtaagtacgccctagcc

SEQ ID NO: 1866550 - DNA, 25 bp, Homo sapien
gatgcatgaccaggaaagtaccagg

SEQ ID NO: 1866551 - DNA, 25 bp, Homo sapien
cctgagtaagggtgcatgagctgcc

SEQ ID NO: 1866552 - DNA, 25 bp, Homo sapien
cgttgagtctgtgtttcccgggcga

SEQ ID NO: 1866553 - DNA, 25 bp, Homo sapien
gacaatcagggagtaaagcatctgg

SEQ ID NO: 1866554 - DNA, 25 bp, Homo sapien
cagggagtaaagcatctggagaatt

SEQ ID NO: 1866555 - DNA, 25 bp, Homo sapien
aaagcatctggagaattaaatggtc

SEQ ID NO: 1866556 - DNA, 25 bp, Homo sapien
aaaagacaatcagggagtaaagcat

SEQ ID NO: 1866557 - DNA, 25 bp, Homo sapien
tgacactgcgttgggcaaaactcct

SEQ ID NO: 1866558 - DNA, 25 bp, Homo sapien
cagtgagcgcacacccaatgggtaa

SEQ ID NO: 1866559 - DNA, 25 bp, Homo sapien
tcttggattcacacgagagcggcaa

SEQ ID NO: 1866560 - DNA, 25 bp, Homo sapien
caagggcttgtgagtgggcctccta

SEQ ID NO: 1866561 - DNA, 25 bp, Homo sapien
agtgatacagcttccaaggtgttct

SEQ ID NO: 1866562 - DNA, 25 bp, Homo sapien
cagtgatacagcttccaaggtgttc

SEQ ID NO: 1866563 - DNA, 25 bp, Homo sapien
tccaaggtgttcttgagtagcagac

SEQ ID NO: 1866564 - DNA, 25 bp, Homo sapien
ggcatgcgcaccctgttccagcggg

SEQ ID NO: 1866565 - DNA, 25 bp, Homo sapien
ttgtagatgggcttgacggagccag

SEQ ID NO: 1866566 - DNA, 25 bp, Homo sapien
tgaccccacgggcatgcgcaccctg

SEQ ID NO: 1866567 - DNA, 25 bp, Homo sapien
atgggcttgacggagccaggagccc

SEQ ID NO: 1866568 - DNA, 25 bp, Homo sapien
ccccagaagggtgctcattgagatt

SEQ ID NO: 1866569 - DNA, 25 bp, Homo sapien
tccagagctactgccctaaagctgt

SEQ ID NO: 1866570 - DNA, 25 bp, Homo sapien
ccagctctagcaagaaccaagtctc

SEQ ID NO: 1866571 - DNA, 25 bp, Homo sapien
ctatggtcggtggttctaggtgaca

SEQ ID NO: 1866572 - DNA, 25 bp, Homo sapien
gacaaagcatggctccgccaggccc

SEQ ID NO: 1866573 - DNA, 25 bp, Homo sapien
agacaaagcatggctccgccaggcc

SEQ ID NO: 1866574 - DNA, 25 bp, Homo sapien
gcatggcagcattaaacgagactcc

SEQ ID NO: 1866575 - DNA, 25 bp, Homo sapien
catggcagcattaaacgagactccc

SEQ ID NO: 1866576 - DNA, 25 bp, Homo sapien
cccctcccgctcagcgtggcctttt

SEQ ID NO: 1866577 - DNA, 25 bp, Homo sapien
tccatttccttcgtagcctgaactc

SEQ ID NO: 1866578 - DNA, 25 bp, Homo sapien
gaatccatttccttcgtagcctgaa

SEQ ID NO: 1866579 - DNA, 25 bp, Homo sapien
agggaatccatttccttcgtagcct

SEQ ID NO: 1866580 - DNA, 25 bp, Homo sapien
cctccttgcgcctttgctaagggcc

SEQ ID NO: 1866581 - DNA, 25 bp, Homo sapien
tcggaacaactccttcaggaagccg

SEQ ID NO: 1866582 - DNA, 25 bp, Homo sapien
ggaacaactccttcaggaagccgag

SEQ ID NO: 1866583 - DNA, 25 bp, Homo sapien
gaacaactccttcaggaagccgagg

SEQ ID NO: 1866584 - DNA, 25 bp, Homo sapien
cttcggaacaactccttcaggaagc

SEQ ID NO: 1866585 - DNA, 25 bp, Homo sapien
gaggggatagtctttgcagctccct

SEQ ID NO: 1866586 - DNA, 25 bp, Homo sapien
agaggggatagtctttgcagctccc

SEQ ID NO: 1866587 - DNA, 25 bp, Homo sapien
aggggatagtctttgcagctccctc

SEQ ID NO: 1866588 - DNA, 25 bp, Homo sapien
actccggatatccacttttcttcca

SEQ ID NO: 1866589 - DNA, 25 bp, Homo sapien
gtataattaacactccggatatcca

SEQ ID NO: 1866590 - DNA, 25 bp, Homo sapien
tggcattgggtggtgagtataatta

SEQ ID NO: 1866591 - DNA, 25 bp, Homo sapien
gaaggttggcattgggtggtgagta

SEQ ID NO: 1866592 - DNA, 25 bp, Homo sapien
tgttcttcctggcataggcctgtga

SEQ ID NO: 1866593 - DNA, 25 bp, Homo sapien
ctcctcgatcttgcggtgttcttcc

SEQ ID NO: 1866594 - DNA, 25 bp, Homo sapien
ctcgatcttgcggtgttcttcctgg

SEQ ID NO: 1866595 - DNA, 25 bp, Homo sapien
cacactcctcgatcttgcggtgttc

SEQ ID NO: 1866596 - DNA, 25 bp, Homo sapien
tctccttgggagtcgctgtgatacg

SEQ ID NO: 1866597 - DNA, 25 bp, Homo sapien
gttaggaggatttggactctccttg

SEQ ID NO: 1866598 - DNA, 25 bp, Homo sapien
tgggagtcgctgtgatacggccttc

SEQ ID NO: 1866599 - DNA, 25 bp, Homo sapien
tggactctccttgggagtcgctgtg

SEQ ID NO: 1866600 - DNA, 25 bp, Homo sapien
tgtgtggctcagtgctaagaatggt

SEQ ID NO: 1866601 - DNA, 25 bp, Homo sapien
gaatggttcacatatattagttcac

SEQ ID NO: 1866602 - DNA, 25 bp, Homo sapien
tatattagttcacttaacctccaga

SEQ ID NO: 1866603 - DNA, 25 bp, Homo sapien
tattgactccccattatatgtgtgg

SEQ ID NO: 1866604 - DNA, 25 bp, Homo sapien
tagttgtcttcccttcttgggtctc

SEQ ID NO: 1866605 - DNA, 25 bp, Homo sapien
gttgtcttcccttcttgggtctcca

SEQ ID NO: 1866606 - DNA, 25 bp, Homo sapien
tatagttgtcttcccttcttgggtc

SEQ ID NO: 1866607 - DNA, 25 bp, Homo sapien
tgtcttcccttcttgggtctccacc

SEQ ID NO: 1866608 - DNA, 25 bp, Homo sapien
tcagaatcggacgaaggaaaggtag

SEQ ID NO: 1866609 - DNA, 25 bp, Homo sapien
caaagtttcagaatcggacgaagga

SEQ ID NO: 1866610 - DNA, 25 bp, Homo sapien
aggtaggaaggagcgcaccggggct

SEQ ID NO: 1866611 - DNA, 25 bp, Homo sapien
gtaggaaggagcgcaccggggctgg

SEQ ID NO: 1866612 - DNA, 25 bp, Homo sapien
tgaacccgcgagctggaagccgaga

SEQ ID NO: 1866613 - DNA, 25 bp, Homo sapien
cgggcccgctagtagcccacggaga

SEQ ID NO: 1866614 - DNA, 25 bp, Homo sapien
cacagccggacaccagagccttgag

SEQ ID NO: 1866615 - DNA, 25 bp, Homo sapien
gctagtagcccacggagaagccgcc

SEQ ID NO: 1866616 - DNA, 25 bp, Homo sapien
tagtctcagctactcaaaaggctga

SEQ ID NO: 1866617 - DNA, 25 bp, Homo sapien
tctactgaaaatacacagaaaaatt

SEQ ID NO: 1866618 - DNA, 25 bp, Homo sapien
gaatcacctgagcccgggaagtcaa

SEQ ID NO: 1866619 - DNA, 25 bp, Homo sapien
agccaggcacggtggtgcatgcctg

SEQ ID NO: 1866620 - DNA, 25 bp, Homo sapien
ttagtatccaactgcctacagaagt

SEQ ID NO: 1866621 - DNA, 25 bp, Homo sapien
agcaatcccctcaaagccaataagc

SEQ ID NO: 1866622 - DNA, 25 bp, Homo sapien
agctctagcctttagtatccaactg

SEQ ID NO: 1866623 - DNA, 25 bp, Homo sapien
tcagcaatcccctcaaagccaataa

SEQ ID NO: 1866624 - DNA, 25 bp, Homo sapien
ggatggcctctcattcttacaccag

SEQ ID NO: 1866625 - DNA, 25 bp, Homo sapien
ccctgagtctctgagatctgagggt

SEQ ID NO: 1866626 - DNA, 25 bp, Homo sapien
tcagggccattccatcaccttagat

SEQ ID NO: 1866627 - DNA, 25 bp, Homo sapien
cattccatcaccttagataccaggg

SEQ ID NO: 1866628 - DNA, 25 bp, Homo sapien
ccagaaatgaatttccgtcacctcc

SEQ ID NO: 1866629 - DNA, 25 bp, Homo sapien
agaaatgaatttccgtcacctccca

SEQ ID NO: 1866630 - DNA, 25 bp, Homo sapien
aatttccgtcacctcccaatgaggg

SEQ ID NO: 1866631 - DNA, 25 bp, Homo sapien
aatgaatttccgtcacctcccaatg

SEQ ID NO: 1866632 - DNA, 25 bp, Homo sapien
ggttcatctagtcctggagtctagc

SEQ ID NO: 1866633 - DNA, 25 bp, Homo sapien
cagctcggttcatctagtcctggag

SEQ ID NO: 1866634 - DNA, 25 bp, Homo sapien
gtgtcttgtaacagctcggttcatc

SEQ ID NO: 1866635 - DNA, 25 bp, Homo sapien
taacagctcggttcatctagtcctg

SEQ ID NO: 1866636 - DNA, 25 bp, Homo sapien
ttggtgaggacaccagagcctgctt

SEQ ID NO: 1866637 - DNA, 25 bp, Homo sapien
tattaagattccagttgccagatgt

SEQ ID NO: 1866638 - DNA, 25 bp, Homo sapien
agatgttcctcctctccagtcaggt

SEQ ID NO: 1866639 - DNA, 25 bp, Homo sapien
tactgttattaagattccagttgcc

SEQ ID NO: 1866640 - DNA, 25 bp, Homo sapien
agtgtcatcaaacacggcaaaggaa

SEQ ID NO: 1866641 - DNA, 25 bp, Homo sapien
tagaattcaagcacgctttcctgga

SEQ ID NO: 1866642 - DNA, 25 bp, Homo sapien
tctttctagcaacttcaggcaactg

SEQ ID NO: 1866643 - DNA, 25 bp, Homo sapien
tcagtgatctggctagtggcttgga

SEQ ID NO: 1866644 - DNA, 25 bp, Homo sapien
tctcagtggaacacaagggtggcag

SEQ ID NO: 1866645 - DNA, 25 bp, Homo sapien
gaaccgactgcagtactaattgaac

SEQ ID NO: 1866646 - DNA, 25 bp, Homo sapien
taaaggagaaccgactgcagtacta

SEQ ID NO: 1866647 - DNA, 25 bp, Homo sapien
gcttcactaaaggagaaccgactgc

SEQ ID NO: 1866648 - DNA, 25 bp, Homo sapien
tcccagcttcactaaaggagaaccg

SEQ ID NO: 1866649 - DNA, 25 bp, Homo sapien
agttgtggttctgaattcaccaagt

SEQ ID NO: 1866650 - DNA, 25 bp, Homo sapien
tgttgacagttgtggttctgaattc

SEQ ID NO: 1866651 - DNA, 25 bp, Homo sapien
tgacagttgtggttctgaattcacc

SEQ ID NO: 1866652 - DNA, 25 bp, Homo sapien
cagttgtggttctgaattcaccaag

SEQ ID NO: 1866653 - DNA, 25 bp, Homo sapien
ctgtaattaccagaggttccgtggt

SEQ ID NO: 1866654 - DNA, 25 bp, Homo sapien
agattggtgcccttcatgctgggtt

SEQ ID NO: 1866655 - DNA, 25 bp, Homo sapien
cctcttttctaccttggaatatctg

SEQ ID NO: 1866656 - DNA, 25 bp, Homo sapien
gcctttgttcaagccggtccttcca

SEQ ID NO: 1866657 - DNA, 25 bp, Homo sapien
ttcctgttccaacaagattggtgcc

SEQ ID NO: 1866658 - DNA, 25 bp, Homo sapien
ctttccctgggtgtgtttcttgctt

SEQ ID NO: 1866659 - DNA, 25 bp, Homo sapien
gatgggcccccgccaagccaaacag

SEQ ID NO: 1866660 - DNA, 25 bp, Homo sapien
agatgggcccccgccaagccaaaca

SEQ ID NO: 1866661 - DNA, 25 bp, Homo sapien
cagatgggcccccgccaagccaaac

SEQ ID NO: 1866662 - DNA, 25 bp, Homo sapien
cacataggcatgcacgcatggcact

SEQ ID NO: 1866663 - DNA, 25 bp, Homo sapien
gcacataggcatgcacgcatggcac

SEQ ID NO: 1866664 - DNA, 25 bp, Homo sapien
tgcacataggcatgcacgcatggca

SEQ ID NO: 1866665 - DNA, 25 bp, Homo sapien
ggtgggggtctggaagcaggcttgg

SEQ ID NO: 1866666 - DNA, 25 bp, Homo sapien
ggaagcaggcttgggcagggaccat

SEQ ID NO: 1866667 - DNA, 25 bp, Homo sapien
ggtctggaagcaggcttgggcaggg

SEQ ID NO: 1866668 - DNA, 25 bp, Homo sapien
gggtgggggtctggaagcaggcttg

SEQ ID NO: 1866669 - DNA, 25 bp, Homo sapien
cattgcaccaggccctccctttcac

SEQ ID NO: 1866670 - DNA, 25 bp, Homo sapien
tcattgcaccaggccctccctttca

SEQ ID NO: 1866671 - DNA, 25 bp, Homo sapien
aggggcggccatctgacctaaactc

SEQ ID NO: 1866672 - DNA, 25 bp, Homo sapien
ggggcggccatctgacctaaactca

SEQ ID NO: 1866673 - DNA, 25 bp, Homo sapien
gaggggcggccatctgacctaaact

SEQ ID NO: 1866674 - DNA, 25 bp, Homo sapien
tggcacagcccggacaatgtctgca

SEQ ID NO: 1866675 - DNA, 25 bp, Homo sapien
tgtgtgggcttccttctcgcgcatg

SEQ ID NO: 1866676 - DNA, 25 bp, Homo sapien
gcttatatcactgaagagtccaggg

SEQ ID NO: 1866677 - DNA, 25 bp, Homo sapien
gttctccttaggcagtactcctgga

SEQ ID NO: 1866678 - DNA, 25 bp, Homo sapien
ctgccttcgtaactgggatacaggt

SEQ ID NO: 1866679 - DNA, 25 bp, Homo sapien
taactgggatacaggtcttggacca

SEQ ID NO: 1866680 - DNA, 25 bp, Homo sapien
ctgggatacaggtcttggaccagtt

SEQ ID NO: 1866681 - DNA, 25 bp, Homo sapien
cttcgtaactgggatacaggtcttg

SEQ ID NO: 1866682 - DNA, 25 bp, Homo sapien
cgtagtaaatgtccacgtattcatt

SEQ ID NO: 1866683 - DNA, 25 bp, Homo sapien
tccaactttgtctccgtagtaaatg

SEQ ID NO: 1866684 - DNA, 25 bp, Homo sapien
actttgtctccgtagtaaatgtcca

SEQ ID NO: 1866685 - DNA, 25 bp, Homo sapien
tgtctccgtagtaaatgtccacgta

SEQ ID NO: 1866686 - DNA, 25 bp, Homo sapien
cagtctgacatttgacttttgccag

SEQ ID NO: 1866687 - DNA, 25 bp, Homo sapien
ccagcacctgattgttcaaggcaaa

SEQ ID NO: 1866688 - DNA, 25 bp, Homo sapien
cttaacgtgtgggaaggatgtgtaa

SEQ ID NO: 1866689 - DNA, 25 bp, Homo sapien
tgttcaaggcaaacttaacgtgtgg

SEQ ID NO: 1866690 - DNA, 25 bp, Homo sapien
ctgatcgacaccgcccatttggagg

SEQ ID NO: 1866691 - DNA, 25 bp, Homo sapien
taaatcctgtccgaaattctctctc

SEQ ID NO: 1866692 - DNA, 25 bp, Homo sapien
ccgcccatttggagggaaattccag

SEQ ID NO: 1866693 - DNA, 25 bp, Homo sapien
aattccaggcctaaatcctgtccga

SEQ ID NO: 1866694 - DNA, 25 bp, Homo sapien
cttgaatcccagcttcatccagtgg

SEQ ID NO: 1866695 - DNA, 25 bp, Homo sapien
agtggagacctgtggtgtgcctgtc

SEQ ID NO: 1866696 - DNA, 25 bp, Homo sapien
gcttcatccagtggagacctgtggt

SEQ ID NO: 1866697 - DNA, 25 bp, Homo sapien
ccttgaatcccagcttcatccagtg

SEQ ID NO: 1866698 - DNA, 25 bp, Homo sapien
agtgacatgcaaaggaatgccccaa

SEQ ID NO: 1866699 - DNA, 25 bp, Homo sapien
tgccatagctgtgaatatcagtgac

SEQ ID NO: 1866700 - DNA, 25 bp, Homo sapien
gggacagtatgaggagagggcttgg

SEQ ID NO: 1866701 - DNA, 25 bp, Homo sapien
acgaagaaggccgctcctttgtggg

SEQ ID NO: 1866702 - DNA, 25 bp, Homo sapien
ttctagagagccagacatccctgag

SEQ ID NO: 1866703 - DNA, 25 bp, Homo sapien
gccccgttctagagagccagacatc

SEQ ID NO: 1866704 - DNA, 25 bp, Homo sapien
tgtggccccgttctagagagccaga

SEQ ID NO: 1866705 - DNA, 25 bp, Homo sapien
gactgtggccccgttctagagagcc

SEQ ID NO: 1866706 - DNA, 25 bp, Homo sapien
ggaagagcaggggtggtctgggcag

SEQ ID NO: 1866707 - DNA, 25 bp, Homo sapien
ggggcttccacccagaggaagagca

SEQ ID NO: 1866708 - DNA, 25 bp, Homo sapien
tggggaggtctggggcttccaccca

SEQ ID NO: 1866709 - DNA, 25 bp, Homo sapien
gcttccacccagaggaagagcaggg

SEQ ID NO: 1866710 - DNA, 25 bp, Homo sapien
ccgacaggcaggagtatgtcccata

SEQ ID NO: 1866711 - DNA, 25 bp, Homo sapien
tggtgctccgcactgtatttgttgc

SEQ ID NO: 1866712 - DNA, 25 bp, Homo sapien
agttgctgtaccaactctcctggca

SEQ ID NO: 1866713 - DNA, 25 bp, Homo sapien
tgtcccatagccacagaaatgccct

SEQ ID NO: 1866714 - DNA, 25 bp, Homo sapien
caccatccagaaattgaggtttatg

SEQ ID NO: 1866715 - DNA, 25 bp, Homo sapien
gaaattgaggtttatgtctggcttg

SEQ ID NO: 1866716 - DNA, 25 bp, Homo sapien
cgtcagctctatgtgaactgtgcct

SEQ ID NO: 1866717 - DNA, 25 bp, Homo sapien
tgtctggcttggcatacgccgtcag

SEQ ID NO: 1866718 - DNA, 25 bp, Homo sapien
tccgcaggggccttgtgccccacag

SEQ ID NO: 1866719 - DNA, 25 bp, Homo sapien
ctccgcaggggccttgtgccccaca

SEQ ID NO: 1866720 - DNA, 25 bp, Homo sapien
gcaggggccttgtgccccacagctg

SEQ ID NO: 1866721 - DNA, 25 bp, Homo sapien
ctgagctccgcaggggccttgtgcc

SEQ ID NO: 1866722 - DNA, 25 bp, Homo sapien
agatgtaggcgggaccatctctcca

SEQ ID NO: 1866723 - DNA, 25 bp, Homo sapien
ggagatgggtctggataagcaggct

SEQ ID NO: 1866724 - DNA, 25 bp, Homo sapien
ccccagtagggaatggtttagctgt

SEQ ID NO: 1866725 - DNA, 25 bp, Homo sapien
taggcgggaccatctctccaggaga

SEQ ID NO: 1866726 - DNA, 25 bp, Homo sapien
tggagtaagggagtgctgagcccct

SEQ ID NO: 1866727 - DNA, 25 bp, Homo sapien
ctggagtaagggagtgctgagcccc

SEQ ID NO: 1866728 - DNA, 25 bp, Homo sapien
tgtacctcctataaaatcagcatgg

SEQ ID NO: 1866729 - DNA, 25 bp, Homo sapien
tacagctttgggaccttagttgcca

SEQ ID NO: 1866730 - DNA, 25 bp, Homo sapien
tgtgtgcagcaactctctaaggcag

SEQ ID NO: 1866731 - DNA, 25 bp, Homo sapien
gcttagctcagctctcaggcaaggc

SEQ ID NO: 1866732 - DNA, 25 bp, Homo sapien
ttcttcccagcagaaggactccctc

SEQ ID NO: 1866733 - DNA, 25 bp, Homo sapien
agcagaaggactccctccaagacag

SEQ ID NO: 1866734 - DNA, 25 bp, Homo sapien
cctccaagacagggtaggggtggag

SEQ ID NO: 1866735 - DNA, 25 bp, Homo sapien
aggatgtgaacaggggcagaaatgg

SEQ ID NO: 1866736 - DNA, 25 bp, Homo sapien
gggtaggtgagcttccccagacagt

SEQ ID NO: 1866737 - DNA, 25 bp, Homo sapien
ggggagatgcaattcatcagggaca

SEQ ID NO: 1866738 - DNA, 25 bp, Homo sapien
ggtgttggggagatgcaattcatca

SEQ ID NO: 1866739 - DNA, 25 bp, Homo sapien
gacagcttagtgtcaggggattaga

SEQ ID NO: 1866740 - DNA, 25 bp, Homo sapien
gggctcgcggcgtcgcactgaaact

SEQ ID NO: 1866741 - DNA, 25 bp, Homo sapien
actgaaacttttcgtccaacttctg

SEQ ID NO: 1866742 - DNA, 25 bp, Homo sapien
cttctgggctgttctcgcttcggag

SEQ ID NO: 1866743 - DNA, 25 bp, Homo sapien
gcggacagtggacgcggcggcgagc

SEQ ID NO: 1866744 - DNA, 25 bp, Homo sapien
gtccccgctcgcgtcccgctcggtg

SEQ ID NO: 1866745 - DNA, 25 bp, Homo sapien
cggcgcggagccgattacatcagcc

SEQ ID NO: 1866746 - DNA, 25 bp, Homo sapien
gcggagccgattacatcagcccggg

SEQ ID NO: 1866747 - DNA, 25 bp, Homo sapien
gccgattacatcagcccgggcctgg

SEQ ID NO: 1866748 - DNA, 25 bp, Homo sapien
gaacgatcgatacagaaaccacgct

SEQ ID NO: 1866749 - DNA, 25 bp, Homo sapien
catcaccatcgacagaacagtcctt

SEQ ID NO: 1866750 - DNA, 25 bp, Homo sapien
aaagactgatacagaacgatcgata

SEQ ID NO: 1866751 - DNA, 25 bp, Homo sapien
tacagaacgatcgatacagaaacca

SEQ ID NO: 1866752 - DNA, 25 bp, Homo sapien
gaaagacagatcacaggtacaggga

SEQ ID NO: 1866753 - DNA, 25 bp, Homo sapien
caccgagcccggaagattagagagt

SEQ ID NO: 1866754 - DNA, 25 bp, Homo sapien
ctgcgcagagcactttgggtccgga

SEQ ID NO: 1866755 - DNA, 25 bp, Homo sapien
gtacagggatgaggacaccggctct

SEQ ID NO: 1866756 - DNA, 25 bp, Homo sapien
gatgtcccggcgaagagaagagaca

SEQ ID NO: 1866757 - DNA, 25 bp, Homo sapien
gagacacattgttggaagaagcagc

SEQ ID NO: 1866758 - DNA, 25 bp, Homo sapien
agaagcagcccatgacagctcccct

SEQ ID NO: 1866759 - DNA, 25 bp, Homo sapien
ttctgagttgcccaggagaccactg

SEQ ID NO: 1866760 - DNA, 25 bp, Homo sapien
ggatccacgtgcccattgtggaggc

SEQ ID NO: 1866761 - DNA, 25 bp, Homo sapien
tatatacggtacttatttaatatcc

SEQ ID NO: 1866762 - DNA, 25 bp, Homo sapien
tcctcacaccattgaaaccactagt

SEQ ID NO: 1866763 - DNA, 25 bp, Homo sapien
tgagtggttgaccttcctccatccc

SEQ ID NO: 1866764 - DNA, 25 bp, Homo sapien
tggtgctactgtttatccgtaataa

SEQ ID NO: 1866765 - DNA, 25 bp, Homo sapien
aataaggtttcaatatacatctaca

SEQ ID NO: 1866766 - DNA, 25 bp, Homo sapien
tcttgctctcttatttgtaccggtt

SEQ ID NO: 1866767 - DNA, 25 bp, Homo sapien
tctccctgatcggtgacagtcacta

SEQ ID NO: 1866768 - DNA, 25 bp, Homo sapien
cttgttgtgctgggggcaaagtcct

SEQ ID NO: 1866769 - DNA, 25 bp, Homo sapien
tgttgtgctgggggcaaagtccttc

SEQ ID NO: 1866770 - DNA, 25 bp, Homo sapien
tgtgctgggggcaaagtccttccat

SEQ ID NO: 1866771 - DNA, 25 bp, Homo sapien
ttgtgctgggggcaaagtccttcca

SEQ ID NO: 1866772 - DNA, 25 bp, Homo sapien
gtcctgggggaacccatccatcctg

SEQ ID NO: 1866773 - DNA, 25 bp, Homo sapien
ctggtcctgggggaacccatccatc

SEQ ID NO: 1866774 - DNA, 25 bp, Homo sapien
ggggaacccatccatcctgtcttga

SEQ ID NO: 1866775 - DNA, 25 bp, Homo sapien
ctgggggaacccatccatcctgtct

SEQ ID NO: 1866776 - DNA, 25 bp, Homo sapien
gcaggacattgtccattaggacatg

SEQ ID NO: 1866777 - DNA, 25 bp, Homo sapien
ggacattgtccattaggacatggga

SEQ ID NO: 1866778 - DNA, 25 bp, Homo sapien
ctacatccgcaggacattgtccatt

SEQ ID NO: 1866779 - DNA, 25 bp, Homo sapien
catccgcaggacattgtccattagg

SEQ ID NO: 1866780 - DNA, 25 bp, Homo sapien
ctggctggttgagctgttacttcag

SEQ ID NO: 1866781 - DNA, 25 bp, Homo sapien
ctgtcccttggagctttgctccact

SEQ ID NO: 1866782 - DNA, 25 bp, Homo sapien
cccttggagctttgctccactggct

SEQ ID NO: 1866783 - DNA, 25 bp, Homo sapien
ccactggctggttgagctgttactt

SEQ ID NO: 1866784 - DNA, 25 bp, Homo sapien
cagtatatagaaggagagagcactg

SEQ ID NO: 1866785 - DNA, 25 bp, Homo sapien
tggcatcaggcttgaccactagggg

SEQ ID NO: 1866786 - DNA, 25 bp, Homo sapien
ggaaactgctgccaggttgatgatg

SEQ ID NO: 1866787 - DNA, 25 bp, Homo sapien
atgatggcatcaggcttgaccacta

SEQ ID NO: 1866788 - DNA, 25 bp, Homo sapien
ggtcaaaggtgaggtcaccaagaac

SEQ ID NO: 1866789 - DNA, 25 bp, Homo sapien
tagtgccaggaaattgttggtcaaa

SEQ ID NO: 1866790 - DNA, 25 bp, Homo sapien
cttggcagcctgagctagtgccagg

SEQ ID NO: 1866791 - DNA, 25 bp, Homo sapien
tgagctagtgccaggaaattgttgg

SEQ ID NO: 1866792 - DNA, 25 bp, Homo sapien
tcccctagtgagaatctattggccc

SEQ ID NO: 1866793 - DNA, 25 bp, Homo sapien
tgagaatctattggccctgagctca

SEQ ID NO: 1866794 - DNA, 25 bp, Homo sapien
tgcttcctcccctagtgagaatcta

SEQ ID NO: 1866795 - DNA, 25 bp, Homo sapien
tagtgagaatctattggccctgagc

SEQ ID NO: 1866796 - DNA, 25 bp, Homo sapien
ccagccccatgcagagaatggcaca

SEQ ID NO: 1866797 - DNA, 25 bp, Homo sapien
gtgggagagataaggaggccccagc

SEQ ID NO: 1866798 - DNA, 25 bp, Homo sapien
gtgggtgggagagataaggaggccc

SEQ ID NO: 1866799 - DNA, 25 bp, Homo sapien
cagccccatgcagagaatggcacat

SEQ ID NO: 1866800 - DNA, 25 bp, Homo sapien
ttcttggatgctctcgggcagtgtg

SEQ ID NO: 1866801 - DNA, 25 bp, Homo sapien
ggcagtgtggcaggtggtgtcaggt

SEQ ID NO: 1866802 - DNA, 25 bp, Homo sapien
ccttttcttggatgctctcgggcag

SEQ ID NO: 1866803 - DNA, 25 bp, Homo sapien
ggccttttcttggatgctctcgggc

SEQ ID NO: 1866804 - DNA, 25 bp, Homo sapien
ttgcagacgctgggctgtcacatac

SEQ ID NO: 1866805 - DNA, 25 bp, Homo sapien
tgagcgcttgcagacgctgggctgt

SEQ ID NO: 1866806 - DNA, 25 bp, Homo sapien
cttgcagacgctgggctgtcacata

SEQ ID NO: 1866807 - DNA, 25 bp, Homo sapien
gagcgcttgcagacgctgggctgtc

SEQ ID NO: 1866808 - DNA, 25 bp, Homo sapien
ggagagggacgtgagagccaaagga

SEQ ID NO: 1866809 - DNA, 25 bp, Homo sapien
gcccaggagagggacgtgagagcca

SEQ ID NO: 1866810 - DNA, 25 bp, Homo sapien
cctccttctcgcagcaagcagggct

SEQ ID NO: 1866811 - DNA, 25 bp, Homo sapien
acttcctccttctcgcagcaagcag

SEQ ID NO: 1866812 - DNA, 25 bp, Homo sapien
aatccttcttggagttcacaaagtc

SEQ ID NO: 1866813 - DNA, 25 bp, Homo sapien
tcttggagttcacaaagtcattgac

SEQ ID NO: 1866814 - DNA, 25 bp, Homo sapien
tccttcttggagttcacaaagtcat

SEQ ID NO: 1866815 - DNA, 25 bp, Homo sapien
tcaatccttcttggagttcacaaag

SEQ ID NO: 1866816 - DNA, 25 bp, Homo sapien
cagtcttcttgtctccattcttgac

SEQ ID NO: 1866817 - DNA, 25 bp, Homo sapien
cattcttgacctccttccaacctgg

SEQ ID NO: 1866818 - DNA, 25 bp, Homo sapien
ccacccgtcagtcttcttgtctcca

SEQ ID NO: 1866819 - DNA, 25 bp, Homo sapien
ctccattcttgacctccttccaacc

SEQ ID NO: 1866820 - DNA, 25 bp, Homo sapien
gggagaccccagctgcctgcagggt

SEQ ID NO: 1866821 - DNA, 25 bp, Homo sapien
ctgcgaaggtgacagggagacccca

SEQ ID NO: 1866822 - DNA, 25 bp, Homo sapien
gacagggagaccccagctgcctgca

SEQ ID NO: 1866823 - DNA, 25 bp, Homo sapien
cagggagaccccagctgcctgcagg

SEQ ID NO: 1866824 - DNA, 25 bp, Homo sapien
ctccatccagctggaggcaccctac

SEQ ID NO: 1866825 - DNA, 25 bp, Homo sapien
gtggctagagataggggaacagcga

SEQ ID NO: 1866826 - DNA, 25 bp, Homo sapien
gggtggctagagataggggaacagc

SEQ ID NO: 1866827 - DNA, 25 bp, Homo sapien
tggctagagataggggaacagcgag

SEQ ID NO: 1866828 - DNA, 25 bp, Homo sapien
tgagggtggctagagataggggaac

SEQ ID NO: 1866829 - DNA, 25 bp, Homo sapien
gactggtctacagccagcaaaaggc

SEQ ID NO: 1866830 - DNA, 25 bp, Homo sapien
ggcagaatgctctcgttcaagccag

SEQ ID NO: 1866831 - DNA, 25 bp, Homo sapien
cagaccctttttgagagagctgggc

SEQ ID NO: 1866832 - DNA, 25 bp, Homo sapien
ccttgtgggagtgcatcaacaggaa

SEQ ID NO: 1866833 - DNA, 25 bp, Homo sapien
taggtctctattagggaaatggccc

SEQ ID NO: 1866834 - DNA, 25 bp, Homo sapien
gctaaaatgacttcctcagacctgg

SEQ ID NO: 1866835 - DNA, 25 bp, Homo sapien
cttggtgccgaaccacagctgggaa

SEQ ID NO: 1866836 - DNA, 25 bp, Homo sapien
caaactctggccctctggttaggtc

SEQ ID NO: 1866837 - DNA, 25 bp, Homo sapien
caacagacagatgggtgctgatgtc

SEQ ID NO: 1866838 - DNA, 25 bp, Homo sapien
acaacagacagatgggtgctgatgt

SEQ ID NO: 1866839 - DNA, 25 bp, Homo sapien
taagtcagcactaatgggggtggta

SEQ ID NO: 1866840 - DNA, 25 bp, Homo sapien
agcagcagtgcaaagctgtaagtca

SEQ ID NO: 1866841 - DNA, 25 bp, Homo sapien
aaatgggagtgccaaaaagttgctc

SEQ ID NO: 1866842 - DNA, 25 bp, Homo sapien
tgtaagagcacctccatttgtgtac

SEQ ID NO: 1866843 - DNA, 25 bp, Homo sapien
cagacctaggcaggctgtttcctct

SEQ ID NO: 1866844 - DNA, 25 bp, Homo sapien
gagctcaccaggacaggaatcagca

SEQ ID NO: 1866845 - DNA, 25 bp, Homo sapien
gcatttgttggggagtccagccagg

SEQ ID NO: 1866846 - DNA, 25 bp, Homo sapien
agtgactcggagtaggtctttagga

SEQ ID NO: 1866847 - DNA, 25 bp, Homo sapien
tgggcatttgttggggagtccagcc

SEQ ID NO: 1866848 - DNA, 25 bp, Homo sapien
ccctgggcatttgttggggagtcca

SEQ ID NO: 1866849 - DNA, 25 bp, Homo sapien
ttattttgcttcacagcagtacctg

SEQ ID NO: 1866850 - DNA, 25 bp, Homo sapien
ttcgcacagtacccacagctttatt

SEQ ID NO: 1866851 - DNA, 25 bp, Homo sapien
attttgcttcacagcagtacctgac

SEQ ID NO: 1866852 - DNA, 25 bp, Homo sapien
cacagtacccacagctttattttgc

SEQ ID NO: 1866853 - DNA, 25 bp, Homo sapien
ctccataggggtgagaagtgtgctt

SEQ ID NO: 1866854 - DNA, 25 bp, Homo sapien
ccataggggtgagaagtgtgcttgt

SEQ ID NO: 1866855 - DNA, 25 bp, Homo sapien
tgcctgaccagaataaagctccata

SEQ ID NO: 1866856 - DNA, 25 bp, Homo sapien
ttctgcctgaccagaataaagctcc

SEQ ID NO: 1866857 - DNA, 25 bp, Homo sapien
cacatgcttcccatgccagaatggg

SEQ ID NO: 1866858 - DNA, 25 bp, Homo sapien
gaactggaacgacaagatgcagtct

SEQ ID NO: 1866859 - DNA, 25 bp, Homo sapien
tttttctacttgatgcagggcctct

SEQ ID NO: 1866860 - DNA, 25 bp, Homo sapien
taaggattgaggctatgaatctccc

SEQ ID NO: 1866861 - DNA, 25 bp, Homo sapien
atagcgttcggagggccagttgagt

SEQ ID NO: 1866862 - DNA, 25 bp, Homo sapien
tgggatagcgttcggagggccagtt

SEQ ID NO: 1866863 - DNA, 25 bp, Homo sapien
aagtgggatagcgttcggagggcca

SEQ ID NO: 1866864 - DNA, 25 bp, Homo sapien
ctggaaagtgggatagcgttcggag

SEQ ID NO: 1866865 - DNA, 25 bp, Homo sapien
ccagacagcggcctatgaacagcat

SEQ ID NO: 1866866 - DNA, 25 bp, Homo sapien
ctatgaacagcattggccctcccat

SEQ ID NO: 1866867 - DNA, 25 bp, Homo sapien
ctgtggaccagacagcggcctatga

SEQ ID NO: 1866868 - DNA, 25 bp, Homo sapien
gacagcggcctatgaacagcattgg

SEQ ID NO: 1866869 - DNA, 25 bp, Homo sapien
aggcccccgttacccatctggacag

SEQ ID NO: 1866870 - DNA, 25 bp, Homo sapien
aggcaggcccccgttacccatctgg

SEQ ID NO: 1866871 - DNA, 25 bp, Homo sapien
tctggacagtccacttggccctgct

SEQ ID NO: 1866872 - DNA, 25 bp, Homo sapien
ccatctggacagtccacttggccct

SEQ ID NO: 1866873 - DNA, 25 bp, Homo sapien
gcttgccccctctgtatgtggcctg

SEQ ID NO: 1866874 - DNA, 25 bp, Homo sapien
ggcttgccccctctgtatgtggcct

SEQ ID NO: 1866875 - DNA, 25 bp, Homo sapien
ggttgagagtggacaggccacagtg

SEQ ID NO: 1866876 - DNA, 25 bp, Homo sapien
ctgtctcagtgagccagtaggtgag

SEQ ID NO: 1866877 - DNA, 25 bp, Homo sapien
cctttcatgtttggctctgtctcag

SEQ ID NO: 1866878 - DNA, 25 bp, Homo sapien
ggccaggccgtcaccttccctttca

SEQ ID NO: 1866879 - DNA, 25 bp, Homo sapien
cagaaggaggcagatgattggtgcc

SEQ ID NO: 1866880 - DNA, 25 bp, Homo sapien
tcctggtgctgaagcgctcagtcat

SEQ ID NO: 1866881 - DNA, 25 bp, Homo sapien
taagaatcctggtgctgaagcgctc

SEQ ID NO: 1866882 - DNA, 25 bp, Homo sapien
tgctgaagcgctcagtcatcttgag

SEQ ID NO: 1866883 - DNA, 25 bp, Homo sapien
gcgctcagtcatcttgaggacctca

SEQ ID NO: 1866884 - DNA, 25 bp, Homo sapien
cttgcgtgaggtctgatgacagagc

SEQ ID NO: 1866885 - DNA, 25 bp, Homo sapien
tgcgtgaggtctgatgacagagcct

SEQ ID NO: 1866886 - DNA, 25 bp, Homo sapien
cccactataaacagtcaggccctga

SEQ ID NO: 1866887 - DNA, 25 bp, Homo sapien
gagcctggggagctatccccactat

SEQ ID NO: 1866888 - DNA, 25 bp, Homo sapien
ggcaattgcaagcattctggccagc

SEQ ID NO: 1866889 - DNA, 25 bp, Homo sapien
attgcaagcattctggccagcaggt

SEQ ID NO: 1866890 - DNA, 25 bp, Homo sapien
tccctggcaattgcaagcattctgg

SEQ ID NO: 1866891 - DNA, 25 bp, Homo sapien
cctggcaattgcaagcattctggcc

SEQ ID NO: 1866892 - DNA, 25 bp, Homo sapien
gtggtggcacaagccaagatgggag

SEQ ID NO: 1866893 - DNA, 25 bp, Homo sapien
gggtgtctgtgctgggcttccactt

SEQ ID NO: 1866894 - DNA, 25 bp, Homo sapien
ccagatgttcccagggtgtctgtgc

SEQ ID NO: 1866895 - DNA, 25 bp, Homo sapien
agtgaggtgagtcccagatgttccc

SEQ ID NO: 1866896 - DNA, 25 bp, Homo sapien
tccaagaacccagagacattagaca

SEQ ID NO: 1866897 - DNA, 25 bp, Homo sapien
tgtatatacaggcttcctcgttcca

SEQ ID NO: 1866898 - DNA, 25 bp, Homo sapien
catcccctgtatatacaggcttcct

SEQ ID NO: 1866899 - DNA, 25 bp, Homo sapien
aggcttcctcgttccaagaacccag

SEQ ID NO: 1866900 - DNA, 25 bp, Homo sapien
gcttgtccccacgtctcttcctgcc

SEQ ID NO: 1866901 - DNA, 25 bp, Homo sapien
ttcattcaaacccttgccctgatgg

SEQ ID NO: 1866902 - DNA, 25 bp, Homo sapien
gcagagcaaggatccccttctgcca

SEQ ID NO: 1866903 - DNA, 25 bp, Homo sapien
tccccacgtctcttcctgcccatgg

SEQ ID NO: 1866904 - DNA, 25 bp, Homo sapien
caaaagagccatctgcatttgtgtt

SEQ ID NO: 1866905 - DNA, 25 bp, Homo sapien
gcagccagatagctttgcactgagc

SEQ ID NO: 1866906 - DNA, 25 bp, Homo sapien
tttgcactgagctacccgctcaggg

SEQ ID NO: 1866907 - DNA, 25 bp, Homo sapien
attcagcagccagatagctttgcac

SEQ ID NO: 1866908 - DNA, 25 bp, Homo sapien
ctttgcactgagctacccgctcagg

SEQ ID NO: 1866909 - DNA, 25 bp, Homo sapien
cacctttggagaaagccagggtctg

SEQ ID NO: 1866910 - DNA, 25 bp, Homo sapien
ggtctggcacggtttagggcacaat

SEQ ID NO: 1866911 - DNA, 25 bp, Homo sapien
cacactccggcaaatagtagggctc

SEQ ID NO: 1866912 - DNA, 25 bp, Homo sapien
taatcatctcaacaatcctggcagg

SEQ ID NO: 1866913 - DNA, 25 bp, Homo sapien
gggaccgagaaagcccagattagaa

SEQ ID NO: 1866914 - DNA, 25 bp, Homo sapien
agaaagcccagattagaagagaaga

SEQ ID NO: 1866915 - DNA, 25 bp, Homo sapien
cttgagtctaccaagtgctcctggg

SEQ ID NO: 1866916 - DNA, 25 bp, Homo sapien
tgctcctggggaccgagaaagccca

SEQ ID NO: 1866917 - DNA, 25 bp, Homo sapien
ttagcttcagggctcagagatggtg

SEQ ID NO: 1866918 - DNA, 25 bp, Homo sapien
gagcattagcttcagggctcagaga

SEQ ID NO: 1866919 - DNA, 25 bp, Homo sapien
gcattagcttcagggctcagagatg

SEQ ID NO: 1866920 - DNA, 25 bp, Homo sapien
agcttcagggctcagagatggtgct

SEQ ID NO: 1866921 - DNA, 25 bp, Homo sapien
cacagcccatggtatttcttagggc

SEQ ID NO: 1866922 - DNA, 25 bp, Homo sapien
gcccatggtatttcttagggctccc

SEQ ID NO: 1866923 - DNA, 25 bp, Homo sapien
cagagctggatctgaagcaggctcg

SEQ ID NO: 1866924 - DNA, 25 bp, Homo sapien
cccacagcccatggtatttcttagg

SEQ ID NO: 1866925 - DNA, 25 bp, Homo sapien
tggcaaacgaggataacgcccatac

SEQ ID NO: 1866926 - DNA, 25 bp, Homo sapien
gtatgggcgttatcctcgtttgcca

SEQ ID NO: 1866927 - DNA, 25 bp, Homo sapien
gagcatactgcacttcctttccttg

SEQ ID NO: 1866928 - DNA, 25 bp, Homo sapien
catactgcacttcctttccttgacc

SEQ ID NO: 1866929 - DNA, 25 bp, Homo sapien
tactgcacttcctttccttgacccc

SEQ ID NO: 1866930 - DNA, 25 bp, Homo sapien
agcatactgcacttcctttccttga

SEQ ID NO: 1866931 - DNA, 25 bp, Homo sapien
tgcacacggatgctgtttgaggatg

SEQ ID NO: 1866932 - DNA, 25 bp, Homo sapien
tcagggatgattgagactcggcaaa

SEQ ID NO: 1866933 - DNA, 25 bp, Homo sapien
ggctcgaggtgtggcgacacagtca

SEQ ID NO: 1866934 - DNA, 25 bp, Homo sapien
ataagatctaaaagggttgctgggc

SEQ ID NO: 1866935 - DNA, 25 bp, Homo sapien
tcaagaggctgggtttgaccccaag

SEQ ID NO: 1866936 - DNA, 25 bp, Homo sapien
ggcgagatggaaatgaagcccacag

SEQ ID NO: 1866937 - DNA, 25 bp, Homo sapien
tgcagctgcgaatagcttgggccct

SEQ ID NO: 1866938 - DNA, 25 bp, Homo sapien
gatggatgctgattgtctctgaaga

SEQ ID NO: 1866939 - DNA, 25 bp, Homo sapien
gggccccggacagtcttgctgcaca

SEQ ID NO: 1866940 - DNA, 25 bp, Homo sapien
cccggacagtcttgctgcacaccag

SEQ ID NO: 1866941 - DNA, 25 bp, Homo sapien
cagagggccccggacagtcttgctg

SEQ ID NO: 1866942 - DNA, 25 bp, Homo sapien
gagggccccggacagtcttgctgca

SEQ ID NO: 1866943 - DNA, 25 bp, Homo sapien
cctcaaagcccttctgtggcaggta

SEQ ID NO: 1866944 - DNA, 25 bp, Homo sapien
gaaacttccggagccgatgccaaag

SEQ ID NO: 1866945 - DNA, 25 bp, Homo sapien
atgagcctcccctatcggcctcaaa

SEQ ID NO: 1866946 - DNA, 25 bp, Homo sapien
aagggagaaacttccggagccgatg

SEQ ID NO: 1866947 - DNA, 25 bp, Homo sapien
caggcagggcagcagctgtgctagc

SEQ ID NO: 1866948 - DNA, 25 bp, Homo sapien
ggcaggcagggcagcagctgtgcta

SEQ ID NO: 1866949 - DNA, 25 bp, Homo sapien
tgggcaggcagggcagcagctgtgc

SEQ ID NO: 1866950 - DNA, 25 bp, Homo sapien
ctgccatgagctgggcaggcagggc

SEQ ID NO: 1866951 - DNA, 25 bp, Homo sapien
gtgatagaagcccagcttagccccc

SEQ ID NO: 1866952 - DNA, 25 bp, Homo sapien
tagaagcccagcttagccccccagg

SEQ ID NO: 1866953 - DNA, 25 bp, Homo sapien
gatagaagcccagcttagcccccca

SEQ ID NO: 1866954 - DNA, 25 bp, Homo sapien
ctgtgatagaagcccagcttagccc

SEQ ID NO: 1866955 - DNA, 25 bp, Homo sapien
gctgacccgactgctcccatgtcat

SEQ ID NO: 1866956 - DNA, 25 bp, Homo sapien
ggatgttgccaaacactaggtcatt

SEQ ID NO: 1866957 - DNA, 25 bp, Homo sapien
cctgtttgactggagctgttccagg

SEQ ID NO: 1866958 - DNA, 25 bp, Homo sapien
agcaatccctgtttgactggagctg

SEQ ID NO: 1866959 - DNA, 25 bp, Homo sapien
tcaggctcagggatcctgcaaactg

SEQ ID NO: 1866960 - DNA, 25 bp, Homo sapien
ctcaggctcagggatcctgcaaact

SEQ ID NO: 1866961 - DNA, 25 bp, Homo sapien
tcagctgctttttcggcacctatgg

SEQ ID NO: 1866962 - DNA, 25 bp, Homo sapien
tttttcggcacctatggctcaggct

SEQ ID NO: 1866963 - DNA, 25 bp, Homo sapien
aagttgtaggtgagctaagcctgtg

SEQ ID NO: 1866964 - DNA, 25 bp, Homo sapien
agtaggaaaagttgtaggtgagcta

SEQ ID NO: 1866965 - DNA, 25 bp, Homo sapien
ggaaaagttgtaggtgagctaagcc

SEQ ID NO: 1866966 - DNA, 25 bp, Homo sapien
ttgtaggtgagctaagcctgtggta

SEQ ID NO: 1866967 - DNA, 25 bp, Homo sapien
ccaacaggtaggaaaagtaggtcat

SEQ ID NO: 1866968 - DNA, 25 bp, Homo sapien
ctgcaccaacaggtaggaaaagtag

SEQ ID NO: 1866969 - DNA, 25 bp, Homo sapien
tgcaccaacaggtaggaaaagtagg

SEQ ID NO: 1866970 - DNA, 25 bp, Homo sapien
tgagccccgagtagaacagtctctg

SEQ ID NO: 1866971 - DNA, 25 bp, Homo sapien
tcctgcatgagccccgagtagaaca

SEQ ID NO: 1866972 - DNA, 25 bp, Homo sapien
agccctgtctgtggcggtgtccaca

SEQ ID NO: 1866973 - DNA, 25 bp, Homo sapien
gaagccctgtctgtggcggtgtcca

SEQ ID NO: 1866974 - DNA, 25 bp, Homo sapien
cgcccttgttatgcctcctgcagcc

SEQ ID NO: 1866975 - DNA, 25 bp, Homo sapien
ggacacaagcatctgccgcccttgt

SEQ ID NO: 1866976 - DNA, 25 bp, Homo sapien
gctgccctgcatggccttgacatct

SEQ ID NO: 1866977 - DNA, 25 bp, Homo sapien
aaaaggctgaacaccagaacattcc

SEQ ID NO: 1866978 - DNA, 25 bp, Homo sapien
tcaagagcccgtggagggccccttg

SEQ ID NO: 1866979 - DNA, 25 bp, Homo sapien
ctaggagtgtctaggagcatcttac

SEQ ID NO: 1866980 - DNA, 25 bp, Homo sapien
tggctcctgagcctaggagtgtcta

SEQ ID NO: 1866981 - DNA, 25 bp, Homo sapien
cctgagcctaggagtgtctaggagc

SEQ ID NO: 1866982 - DNA, 25 bp, Homo sapien
tgggctgtttggtctggtgggccca

SEQ ID NO: 1866983 - DNA, 25 bp, Homo sapien
gggctgtttggtctggtgggcccat

SEQ ID NO: 1866984 - DNA, 25 bp, Homo sapien
ggtgggctgtttggtctggtgggcc

SEQ ID NO: 1866985 - DNA, 25 bp, Homo sapien
tggtgggctgtttggtctggtgggc

SEQ ID NO: 1866986 - DNA, 25 bp, Homo sapien
tctgggccccattctctttaaacac

SEQ ID NO: 1866987 - DNA, 25 bp, Homo sapien
ggtgcactagtacagtgcctcagac

SEQ ID NO: 1866988 - DNA, 25 bp, Homo sapien
gaataccaattcgacttctttgctg

SEQ ID NO: 1866989 - DNA, 25 bp, Homo sapien
tctttaaacaccactgttgtgatgt

SEQ ID NO: 1866990 - DNA, 25 bp, Homo sapien
gcaggccttgcctcatgaatctgga

SEQ ID NO: 1866991 - DNA, 25 bp, Homo sapien
agaatgttttcagcaccccaggagg

SEQ ID NO: 1866992 - DNA, 25 bp, Homo sapien
tgagagcagattttgagggcaacgc

SEQ ID NO: 1866993 - DNA, 25 bp, Homo sapien
cactggaccaatcactaaggaagga

SEQ ID NO: 1866994 - DNA, 25 bp, Homo sapien
cttatcctagccttggcgagaggat

SEQ ID NO: 1866995 - DNA, 25 bp, Homo sapien
tatcctagccttggcgagaggatca

SEQ ID NO: 1866996 - DNA, 25 bp, Homo sapien
gctacttatcctagccttggcgaga

SEQ ID NO: 1866997 - DNA, 25 bp, Homo sapien
tagctacttatcctagccttggcga

SEQ ID NO: 1866998 - DNA, 25 bp, Homo sapien
tgatgactggcggctgaggagtggg

SEQ ID NO: 1866999 - DNA, 25 bp, Homo sapien
gccactggcagaagcaggcgccctg

SEQ ID NO: 1867000 - DNA, 25 bp, Homo sapien
gaggaggcccttcagcaacggagtg

SEQ ID NO: 1867001 - DNA, 25 bp, Homo sapien
cagcaacggagtgggcctgcattct

SEQ ID NO: 1867002 - DNA, 25 bp, Homo sapien
ttactgatggtcagagcatccagaa

SEQ ID NO: 1867003 - DNA, 25 bp, Homo sapien
cttactgatggtcagagcatccaga

SEQ ID NO: 1867004 - DNA, 25 bp, Homo sapien
agaagtggcaagacttcagctgtcc

SEQ ID NO: 1867005 - DNA, 25 bp, Homo sapien
gaagaagtggcaagacttcagctgt

SEQ ID NO: 1867006 - DNA, 25 bp, Homo sapien
tcctgcgaagaaaggtgacatcccc

SEQ ID NO: 1867007 - DNA, 25 bp, Homo sapien
cttcctgcgaagaaaggtgacatcc

SEQ ID NO: 1867008 - DNA, 25 bp, Homo sapien
agaaaggtgacatccccgccacaga

SEQ ID NO: 1867009 - DNA, 25 bp, Homo sapien
tgcgaagaaaggtgacatccccgcc

SEQ ID NO: 1867010 - DNA, 25 bp, Homo sapien
taataaatcccatacggaccctgcc

SEQ ID NO: 1867011 - DNA, 25 bp, Homo sapien
catgggagaccatgctacgaaaggg

SEQ ID NO: 1867012 - DNA, 25 bp, Homo sapien
aggagcagcctgcacaaaggcctgg

SEQ ID NO: 1867013 - DNA, 25 bp, Homo sapien
gaagcccatgtctaaactgagcccg

SEQ ID NO: 1867014 - DNA, 25 bp, Homo sapien
caacagcgaggcctatcaggcaatt

SEQ ID NO: 1867015 - DNA, 25 bp, Homo sapien
catctgtattgataatgggctggga

SEQ ID NO: 1867016 - DNA, 25 bp, Homo sapien
ggctcacgcattgtacccacatgta

SEQ ID NO: 1867017 - DNA, 25 bp, Homo sapien
ggcagatgccattccatagctcggg

SEQ ID NO: 1867018 - DNA, 25 bp, Homo sapien
agttaaatggtgaactgttttcatg

SEQ ID NO: 1867019 - DNA, 25 bp, Homo sapien
gatttatacgatttattgactttaa

SEQ ID NO: 1867020 - DNA, 25 bp, Homo sapien
gaatcaggataatagacttaataag

SEQ ID NO: 1867021 - DNA, 25 bp, Homo sapien
ttgactttaataccaaagaggatga

SEQ ID NO: 1867022 - DNA, 25 bp, Homo sapien
gaaccagagaaattgacttgggagc

SEQ ID NO: 1867023 - DNA, 25 bp, Homo sapien
gagttcagcactaatggccttcatc

SEQ ID NO: 1867024 - DNA, 25 bp, Homo sapien
caacactggtgggagtttctaggaa

SEQ ID NO: 1867025 - DNA, 25 bp, Homo sapien
tctagctgggtcaactaatggacag

SEQ ID NO: 1867026 - DNA, 25 bp, Homo sapien
caacaaggtctctgtatcagtcagt

SEQ ID NO: 1867027 - DNA, 25 bp, Homo sapien
aaccacaagatacctgagcctctag

SEQ ID NO: 1867028 - DNA, 25 bp, Homo sapien
tcagttaagaacatgggagccactc

SEQ ID NO: 1867029 - DNA, 25 bp, Homo sapien
ggagccactctaggcattgcaagca

SEQ ID NO: 1867030 - DNA, 25 bp, Homo sapien
ctgttcttccagttcatcatctgtt

SEQ ID NO: 1867031 - DNA, 25 bp, Homo sapien
atctgttcttccagttcatcatctg

SEQ ID NO: 1867032 - DNA, 25 bp, Homo sapien
cacatctgttcttccagttcatcat

SEQ ID NO: 1867033 - DNA, 25 bp, Homo sapien
catcatctgtttctggcaggaactc

SEQ ID NO: 1867034 - DNA, 25 bp, Homo sapien
agagcaatgacctcacactcatgtt

SEQ ID NO: 1867035 - DNA, 25 bp, Homo sapien
gagaccagagcaatgacctcacact

SEQ ID NO: 1867036 - DNA, 25 bp, Homo sapien
ccctgagaccagagcaatgacctca

SEQ ID NO: 1867037 - DNA, 25 bp, Homo sapien
acccctgagaccagagcaatgacct

SEQ ID NO: 1867038 - DNA, 25 bp, Homo sapien
gactacctagcttcccttgcagcta

SEQ ID NO: 1867039 - DNA, 25 bp, Homo sapien
taagtgtgacttctaggaagcttcc

SEQ ID NO: 1867040 - DNA, 25 bp, Homo sapien
tatggctagatgactgagttctggc

SEQ ID NO: 1867041 - DNA, 25 bp, Homo sapien
ccccatggaataaagactagactac

SEQ ID NO: 1867042 - DNA, 25 bp, Homo sapien
cctgcaaggacttcctaagtgccca

SEQ ID NO: 1867043 - DNA, 25 bp, Homo sapien
aggacttcctaagtgcccaagcagt

SEQ ID NO: 1867044 - DNA, 25 bp, Homo sapien
ttcctaagtgcccaagcagtgcccc

SEQ ID NO: 1867045 - DNA, 25 bp, Homo sapien
gacttcctaagtgcccaagcagtgc

SEQ ID NO: 1867046 - DNA, 25 bp, Homo sapien
ggcagcgccatcatggctggaggcc

SEQ ID NO: 1867047 - DNA, 25 bp, Homo sapien
ccaggcgaagacgtgcaggccaggg

SEQ ID NO: 1867048 - DNA, 25 bp, Homo sapien
gaggcccaggcgaagacgtgcaggc

SEQ ID NO: 1867049 - DNA, 25 bp, Homo sapien
cgaagacgtgcaggccagggcgtgc

SEQ ID NO: 1867050 - DNA, 25 bp, Homo sapien
ttgctgagcttgtgctcgccagagg

SEQ ID NO: 1867051 - DNA, 25 bp, Homo sapien
gcccgctgccggctgttgctgagct

SEQ ID NO: 1867052 - DNA, 25 bp, Homo sapien
tatcaccgggtacgtgccagagttc

SEQ ID NO: 1867053 - DNA, 25 bp, Homo sapien
aacaggaccgagcttctgccaaggg

SEQ ID NO: 1867054 - DNA, 25 bp, Homo sapien
cacaggcactgggttctccctgtct

SEQ ID NO: 1867055 - DNA, 25 bp, Homo sapien
aggtctgctgcaagcccctagcatg

SEQ ID NO: 1867056 - DNA, 25 bp, Homo sapien
gcttgctcagcccacgcactgttta

SEQ ID NO: 1867057 - DNA, 25 bp, Homo sapien
aggtagccccggcacgcttgctcag

SEQ ID NO: 1867058 - DNA, 25 bp, Homo sapien
gtatctcccacacgtatgcgcggct

SEQ ID NO: 1867059 - DNA, 25 bp, Homo sapien
tgcgcggctccagcacatgggagag

SEQ ID NO: 1867060 - DNA, 25 bp, Homo sapien
gacgcggtacatggtatctcccaca

SEQ ID NO: 1867061 - DNA, 25 bp, Homo sapien
tgtccgctgagacgcggtacatggt

SEQ ID NO: 1867062 - DNA, 25 bp, Homo sapien
tctcactctggtcatggaaagccct

SEQ ID NO: 1867063 - DNA, 25 bp, Homo sapien
tctcaaacacgagtatgcatcagaa

SEQ ID NO: 1867064 - DNA, 25 bp, Homo sapien
cgtagttctacggtggcccaagatt

SEQ ID NO: 1867065 - DNA, 25 bp, Homo sapien
tattctcgtggcaaaaagtctgaac

SEQ ID NO: 1867066 - DNA, 25 bp, Homo sapien
aagccctctgctgacaggttaagtc

SEQ ID NO: 1867067 - DNA, 25 bp, Homo sapien
ggcgtccagtttcattacacacaca

SEQ ID NO: 1867068 - DNA, 25 bp, Homo sapien
ttaagtcaagatcgccgggaaggaa

SEQ ID NO: 1867069 - DNA, 25 bp, Homo sapien
cagcagccacctaggttcaacctgt

SEQ ID NO: 1867070 - DNA, 25 bp, Homo sapien
cacttcctgagcagcaggaggagcc

SEQ ID NO: 1867071 - DNA, 25 bp, Homo sapien
acttcctgagcagcaggaggagcca

SEQ ID NO: 1867072 - DNA, 25 bp, Homo sapien
tcacttcctgagcagcaggaggagc

SEQ ID NO: 1867073 - DNA, 25 bp, Homo sapien
cttcctgagcagcaggaggagccag

SEQ ID NO: 1867074 - DNA, 25 bp, Homo sapien
tggtcaggcccccttccagaccctg

SEQ ID NO: 1867075 - DNA, 25 bp, Homo sapien
ggtcaggcccccttccagaccctgc

SEQ ID NO: 1867076 - DNA, 25 bp, Homo sapien
gctggcggtgggccaggtcgcggcg

SEQ ID NO: 1867077 - DNA, 25 bp, Homo sapien
gaggcagcaacgtgcggcgcggcat

SEQ ID NO: 1867078 - DNA, 25 bp, Homo sapien
ctggaggcagcaacgtgcggcgcgg

SEQ ID NO: 1867079 - DNA, 25 bp, Homo sapien
ccgctggcggtgggccaggtcgcgg

SEQ ID NO: 1867080 - DNA, 25 bp, Homo sapien
gatgccttcacaagccattttgtct

SEQ ID NO: 1867081 - DNA, 25 bp, Homo sapien
agccatcatggctgcccccctggca

SEQ ID NO: 1867082 - DNA, 25 bp, Homo sapien
ctggagggcagacagatgccttcac

SEQ ID NO: 1867083 - DNA, 25 bp, Homo sapien
cagacagatgccttcacaagccatt

SEQ ID NO: 1867084 - DNA, 25 bp, Homo sapien
aaaacttcggaggtcactggcctag

SEQ ID NO: 1867085 - DNA, 25 bp, Homo sapien
cacctgtcttgagcttcttactgga

SEQ ID NO: 1867086 - DNA, 25 bp, Homo sapien
acatgggcaggttgagagagtctcc

SEQ ID NO: 1867087 - DNA, 25 bp, Homo sapien
gaagtccacccctagaactgacaga

SEQ ID NO: 1867088 - DNA, 25 bp, Homo sapien
atgacggcaatgctcaccacctcaa

SEQ ID NO: 1867089 - DNA, 25 bp, Homo sapien
tcaaagggctctgaagatgtcacaa

SEQ ID NO: 1867090 - DNA, 25 bp, Homo sapien
cctcaaaccgcccaaggagccatat

SEQ ID NO: 1867091 - DNA, 25 bp, Homo sapien
ggagccatatccagactagacaata

SEQ ID NO: 1867092 - DNA, 25 bp, Homo sapien
tgcagagcagccagaggacagcaac

SEQ ID NO: 1867093 - DNA, 25 bp, Homo sapien
gcagagcagccagaggacagcaacc

SEQ ID NO: 1867094 - DNA, 25 bp, Homo sapien
ctgcagagcagccagaggacagcaa

SEQ ID NO: 1867095 - DNA, 25 bp, Homo sapien
ttcaggccagtggacagcatgtctt

SEQ ID NO: 1867096 - DNA, 25 bp, Homo sapien
agtctgaggccgtgtccctgagacc

SEQ ID NO: 1867097 - DNA, 25 bp, Homo sapien
gtggacagcatgtcttctttcagag

SEQ ID NO: 1867098 - DNA, 25 bp, Homo sapien
cagccccaactcccattccaggagc

SEQ ID NO: 1867099 - DNA, 25 bp, Homo sapien
cgtgggccagatgcaagccaggaag

SEQ ID NO: 1867100 - DNA, 25 bp, Homo sapien
ccagatgcaagccaggaaggacagg

SEQ ID NO: 1867101 - DNA, 25 bp, Homo sapien
cagatgcaagccaggaaggacaggg

SEQ ID NO: 1867102 - DNA, 25 bp, Homo sapien
ctgcgtgggccagatgcaagccagg

SEQ ID NO: 1867103 - DNA, 25 bp, Homo sapien
cacagaggtatccaggtacatcagt

SEQ ID NO: 1867104 - DNA, 25 bp, Homo sapien
ctatcctgccctcccggaacacaga

SEQ ID NO: 1867105 - DNA, 25 bp, Homo sapien
gaacacagaggtatccaggtacatc

SEQ ID NO: 1867106 - DNA, 25 bp, Homo sapien
ccggaacacagaggtatccaggtac

SEQ ID NO: 1867107 - DNA, 25 bp, Homo sapien
caagtcaatcgagcttgcggctgac

SEQ ID NO: 1867108 - DNA, 25 bp, Homo sapien
ccttggcaatgcaggcacgagcacg

SEQ ID NO: 1867109 - DNA, 25 bp, Homo sapien
gcaatgcaggcacgagcacgcttcc

SEQ ID NO: 1867110 - DNA, 25 bp, Homo sapien
ttgtaggggcctggacagctttggg

SEQ ID NO: 1867111 - DNA, 25 bp, Homo sapien
gaggtccaccccattaagacatttg

SEQ ID NO: 1867112 - DNA, 25 bp, Homo sapien
acttgaggtccaccccattaagaca

SEQ ID NO: 1867113 - DNA, 25 bp, Homo sapien
cttcttggcaaggtgcatgctcctt

SEQ ID NO: 1867114 - DNA, 25 bp, Homo sapien
gttgtggttcttgacgttgccatgt

SEQ ID NO: 1867115 - DNA, 25 bp, Homo sapien
caaaaggccatatagtgtacaatcc

SEQ ID NO: 1867116 - DNA, 25 bp, Homo sapien
ccaagtagctaactacatgggcaca

SEQ ID NO: 1867117 - DNA, 25 bp, Homo sapien
tggcagttccaccttaagctaaaca

SEQ ID NO: 1867118 - DNA, 25 bp, Homo sapien
tgggcacaccatcacaagaactcat

SEQ ID NO: 1867119 - DNA, 25 bp, Homo sapien
cacagcattttcaatgtactaaatg

SEQ ID NO: 1867120 - DNA, 25 bp, Homo sapien
gcacagcattttcaatgtactaaat

SEQ ID NO: 1867121 - DNA, 25 bp, Homo sapien
aatgtactaaatgctgctaaattat

SEQ ID NO: 1867122 - DNA, 25 bp, Homo sapien
caacctctgcataccaacggactgg

SEQ ID NO: 1867123 - DNA, 25 bp, Homo sapien
gaaaacgagttaatccacaggaagc

SEQ ID NO: 1867124 - DNA, 25 bp, Homo sapien
gaacttgagttcacataggcctgaa

SEQ ID NO: 1867125 - DNA, 25 bp, Homo sapien
caacttttatgtgtactctgccaga

SEQ ID NO: 1867126 - DNA, 25 bp, Homo sapien
tttgctttcacaatgatcctgccag

SEQ ID NO: 1867127 - DNA, 25 bp, Homo sapien
cctctttgctttcacaatgatcctg

SEQ ID NO: 1867128 - DNA, 25 bp, Homo sapien
tctttgctttcacaatgatcctgcc

SEQ ID NO: 1867129 - DNA, 25 bp, Homo sapien
tcctctttgctttcacaatgatcct

SEQ ID NO: 1867130 - DNA, 25 bp, Homo sapien
tgcaacagaaatggctaccagcccc

SEQ ID NO: 1867131 - DNA, 25 bp, Homo sapien
ccatagcaggcggtgaagagccagc

SEQ ID NO: 1867132 - DNA, 25 bp, Homo sapien
aatgtgggttgaccgcttggccacc

SEQ ID NO: 1867133 - DNA, 25 bp, Homo sapien
tgcccaggatgtcatggtgccatag

SEQ ID NO: 1867134 - DNA, 25 bp, Homo sapien
gagcctttctgattacaaagcccat

SEQ ID NO: 1867135 - DNA, 25 bp, Homo sapien
taataggcacacaggcataatccct

SEQ ID NO: 1867136 - DNA, 25 bp, Homo sapien
ctatgattgatacgctgagcaccta

SEQ ID NO: 1867137 - DNA, 25 bp, Homo sapien
gaagtcatccctgattgaaccagat

SEQ ID NO: 1867138 - DNA, 25 bp, Homo sapien
agacccccagctgtgcattggctgc

SEQ ID NO: 1867139 - DNA, 25 bp, Homo sapien
gctgtgcattggctgctgcaggcat

SEQ ID NO: 1867140 - DNA, 25 bp, Homo sapien
cagacccccagctgtgcattggctg

SEQ ID NO: 1867141 - DNA, 25 bp, Homo sapien
ccagctgtgcattggctgctgcagg

SEQ ID NO: 1867142 - DNA, 25 bp, Homo sapien
cagtgacagggttaaagtcccagca

SEQ ID NO: 1867143 - DNA, 25 bp, Homo sapien
agatagtttcgccacgctggccaga

SEQ ID NO: 1867144 - DNA, 25 bp, Homo sapien
gggttctttgcacagcagctgagtg

SEQ ID NO: 1867145 - DNA, 25 bp, Homo sapien
tctaggtacctcaaacagctggcag

SEQ ID NO: 1867146 - DNA, 25 bp, Homo sapien
ggcagccagattgtcgcaagaagtt

SEQ ID NO: 1867147 - DNA, 25 bp, Homo sapien
atatttccaccacaggtcagtgcag

SEQ ID NO: 1867148 - DNA, 25 bp, Homo sapien
gctgagggaaggcacattaccaaga

SEQ ID NO: 1867149 - DNA, 25 bp, Homo sapien
tgctgacctaagaggcaactggaag

SEQ ID NO: 1867150 - DNA, 25 bp, Homo sapien
ctgcctctttgcagacatcagccat

SEQ ID NO: 1867151 - DNA, 25 bp, Homo sapien
tgcctacagtcattaagtggtagag

SEQ ID NO: 1867152 - DNA, 25 bp, Homo sapien
tctaagcacttacaggtacaaactc

SEQ ID NO: 1867153 - DNA, 25 bp, Homo sapien
ttgctaaggctggattcaactcttg

SEQ ID NO: 1867154 - DNA, 25 bp, Homo sapien
ccatgcccaacctgagtgcttatta

SEQ ID NO: 1867155 - DNA, 25 bp, Homo sapien
taaattggcatttggtgtgtacctc

SEQ ID NO: 1867156 - DNA, 25 bp, Homo sapien
cgtgtggccagactcgggtaagcca

SEQ ID NO: 1867157 - DNA, 25 bp, Homo sapien
tccaaaccagaaaagcaagggctca

SEQ ID NO: 1867158 - DNA, 25 bp, Homo sapien
taaagaatgctaccccgtgtggcca

SEQ ID NO: 1867159 - DNA, 25 bp, Homo sapien
tattttcccacatcccagaaagctc

SEQ ID NO: 1867160 - DNA, 25 bp, Homo sapien
tttcccacatcccagaaagctctgg

SEQ ID NO: 1867161 - DNA, 25 bp, Homo sapien
tgcttcagtgtaatttattttccca

SEQ ID NO: 1867162 - DNA, 25 bp, Homo sapien
cccacatcccagaaagctctggaaa

SEQ ID NO: 1867163 - DNA, 25 bp, Homo sapien
cattcacgagtcctgcaaccagagg

SEQ ID NO: 1867164 - DNA, 25 bp, Homo sapien
tgttacccagtgtgaagggagcagc

SEQ ID NO: 1867165 - DNA, 25 bp, Homo sapien
cacaggatactacactgttacccag

SEQ ID NO: 1867166 - DNA, 25 bp, Homo sapien
atgtggctcccaagctcccttagca

SEQ ID NO: 1867167 - DNA, 25 bp, Homo sapien
tatagacatggatgcagcgaggagc

SEQ ID NO: 1867168 - DNA, 25 bp, Homo sapien
ggtgtcttaattcgtgtccccacag

SEQ ID NO: 1867169 - DNA, 25 bp, Homo sapien
tgaggaccacgttgttggagtcgaa

SEQ ID NO: 1867170 - DNA, 25 bp, Homo sapien
cagtagtatctggtcgcccaccttg

SEQ ID NO: 1867171 - DNA, 25 bp, Homo sapien
tgaatcgcactcagactcccagtgg

SEQ ID NO: 1867172 - DNA, 25 bp, Homo sapien
aatcgcactcagactcccagtggtg

SEQ ID NO: 1867173 - DNA, 25 bp, Homo sapien
ttctgaatcgcactcagactcccag

SEQ ID NO: 1867174 - DNA, 25 bp, Homo sapien
ctgaatcgcactcagactcccagtg

SEQ ID NO: 1867175 - DNA, 25 bp, Homo sapien
cttctgctgttgtgtcaaggtctca

SEQ ID NO: 1867176 - DNA, 25 bp, Homo sapien
gtacatgtcagcaacacacacagag

SEQ ID NO: 1867177 - DNA, 25 bp, Homo sapien
ctcttatggtcagggtgcacaggcc

SEQ ID NO: 1867178 - DNA, 25 bp, Homo sapien
ggaatcccttatgggctaggcctca

SEQ ID NO: 1867179 - DNA, 25 bp, Homo sapien
aacagtgatggctcagcactctgct

SEQ ID NO: 1867180 - DNA, 25 bp, Homo sapien
ttacacaggtgaaggggccccagag

SEQ ID NO: 1867181 - DNA, 25 bp, Homo sapien
cttacacaggtgaaggggccccaga

SEQ ID NO: 1867182 - DNA, 25 bp, Homo sapien
tttctaagtcagagcccttaaagcc

SEQ ID NO: 1867183 - DNA, 25 bp, Homo sapien
taagtcagagcccttaaagccagtt

SEQ ID NO: 1867184 - DNA, 25 bp, Homo sapien
gtcagagcccttaaagccagttttc

SEQ ID NO: 1867185 - DNA, 25 bp, Homo sapien
ttctaagtcagagcccttaaagcca

SEQ ID NO: 1867186 - DNA, 25 bp, Homo sapien
ccccaaggtagttatgaggattcaa

SEQ ID NO: 1867187 - DNA, 25 bp, Homo sapien
tacttttactggtgagatgaccctg

SEQ ID NO: 1867188 - DNA, 25 bp, Homo sapien
tgaccctggacaagtaaccaaactg

SEQ ID NO: 1867189 - DNA, 25 bp, Homo sapien
tagagtcccacaattagtcaagggc

SEQ ID NO: 1867190 - DNA, 25 bp, Homo sapien
caaagcaactctgatggaccctgat

SEQ ID NO: 1867191 - DNA, 25 bp, Homo sapien
taatcatggaggattagcccgtgct

SEQ ID NO: 1867192 - DNA, 25 bp, Homo sapien
ccatggctctgacggaggtaaatcc

SEQ ID NO: 1867193 - DNA, 25 bp, Homo sapien
tttttggaatcaggacatgtcaggc

SEQ ID NO: 1867194 - DNA, 25 bp, Homo sapien
tcagtagcacgtacagtatttccag

SEQ ID NO: 1867195 - DNA, 25 bp, Homo sapien
ttcgtctcacacagtaacctccgtg

SEQ ID NO: 1867196 - DNA, 25 bp, Homo sapien
gcaagagggcaaatagaagggcaca

SEQ ID NO: 1867197 - DNA, 25 bp, Homo sapien
gtatattcctggcatgctaactgca

SEQ ID NO: 1867198 - DNA, 25 bp, Homo sapien
gtgggcctcccctactgcagagaaa

SEQ ID NO: 1867199 - DNA, 25 bp, Homo sapien
cggggagtgggcctcccctactgca

SEQ ID NO: 1867200 - DNA, 25 bp, Homo sapien
agtgggcctcccctactgcagagaa

SEQ ID NO: 1867201 - DNA, 25 bp, Homo sapien
ggagtgggcctcccctactgcagag

SEQ ID NO: 1867202 - DNA, 25 bp, Homo sapien
acgcggcctcttcctagcgcctgcg

SEQ ID NO: 1867203 - DNA, 25 bp, Homo sapien
gccccacgcggcctcttcctagcgc

SEQ ID NO: 1867204 - DNA, 25 bp, Homo sapien
ggcctcttcctagcgcctgcgcgcc

SEQ ID NO: 1867205 - DNA, 25 bp, Homo sapien
cgccttcgccccacgcggcctcttc

SEQ ID NO: 1867206 - DNA, 25 bp, Homo sapien
cagacctgatcagtgcccttgggaa

SEQ ID NO: 1867207 - DNA, 25 bp, Homo sapien
gagacctgagtgaaccctactagtc

SEQ ID NO: 1867208 - DNA, 25 bp, Homo sapien
tatagcagtaaacgacagaaggcct

SEQ ID NO: 1867209 - DNA, 25 bp, Homo sapien
gacagggaccggatgaactagtaat

SEQ ID NO: 1867210 - DNA, 25 bp, Homo sapien
taggtggtcttgagcactctctcca

SEQ ID NO: 1867211 - DNA, 25 bp, Homo sapien
ctttatcggcaacgccatggacctg

SEQ ID NO: 1867212 - DNA, 25 bp, Homo sapien
tcgtgaactacgtcattgcctcagc

SEQ ID NO: 1867213 - DNA, 25 bp, Homo sapien
gacaacggcgccttcttcgtgaact

SEQ ID NO: 1867214 - DNA, 25 bp, Homo sapien
cttgaaggcccctctccgtgcccca

SEQ ID NO: 1867215 - DNA, 25 bp, Homo sapien
cgacccttgaaggcccctctccgtg

SEQ ID NO: 1867216 - DNA, 25 bp, Homo sapien
ctgccaggccccgacccttgaaggc

SEQ ID NO: 1867217 - DNA, 25 bp, Homo sapien
gaaggcccctctccgtgccccatca

SEQ ID NO: 1867218 - DNA, 25 bp, Homo sapien
tccaatagtagaattcctgatgagg

SEQ ID NO: 1867219 - DNA, 25 bp, Homo sapien
gcacggggcactatcccgtcctggg

SEQ ID NO: 1867220 - DNA, 25 bp, Homo sapien
ttcagcactctcaggaccagaacaa

SEQ ID NO: 1867221 - DNA, 25 bp, Homo sapien
gaagctgaagttctgtgatcacgct

SEQ ID NO: 1867222 - DNA, 25 bp, Homo sapien
gctggacaagaagatccactcgggg

SEQ ID NO: 1867223 - DNA, 25 bp, Homo sapien
caccatgcgcacgggtgagggatcc

SEQ ID NO: 1867224 - DNA, 25 bp, Homo sapien
gcacgggtgagggatccctacccag

SEQ ID NO: 1867225 - DNA, 25 bp, Homo sapien
gacaagaagatccactcgggggctg

SEQ ID NO: 1867226 - DNA, 25 bp, Homo sapien
tcacggacacagacttccagtcttg

SEQ ID NO: 1867227 - DNA, 25 bp, Homo sapien
tcatcctcatcccaagatgaggagt

SEQ ID NO: 1867228 - DNA, 25 bp, Homo sapien
cccaagatgaggagttgctgatgcc

SEQ ID NO: 1867229 - DNA, 25 bp, Homo sapien
tcagaaatacatcgctcaggtgctg

SEQ ID NO: 1867230 - DNA, 25 bp, Homo sapien
gggatctggccctccagggaagtgg

SEQ ID NO: 1867231 - DNA, 25 bp, Homo sapien
tcaaattcaccttctcgccaggcgc

SEQ ID NO: 1867232 - DNA, 25 bp, Homo sapien
caaattcaccttctcgccaggcgcg

SEQ ID NO: 1867233 - DNA, 25 bp, Homo sapien
aaattcaccttctcgccaggcgcgg

SEQ ID NO: 1867234 - DNA, 25 bp, Homo sapien
tgaccgtgatacagtgaggacagcc

SEQ ID NO: 1867235 - DNA, 25 bp, Homo sapien
gaccgtgatacagtgaggacagcca

SEQ ID NO: 1867236 - DNA, 25 bp, Homo sapien
ggatgaccgtgatacagtgaggaca

SEQ ID NO: 1867237 - DNA, 25 bp, Homo sapien
cctgatgggatgaccgtgatacagt

SEQ ID NO: 1867238 - DNA, 25 bp, Homo sapien
ctgaccgttgtatggtttgacctga

SEQ ID NO: 1867239 - DNA, 25 bp, Homo sapien
tctgcgtccgtgtctgtcagactgt

SEQ ID NO: 1867240 - DNA, 25 bp, Homo sapien
catcatgcaccctgtacagttgcca

SEQ ID NO: 1867241 - DNA, 25 bp, Homo sapien
cttgggcttggagaacacgtgtgtc

SEQ ID NO: 1867242 - DNA, 25 bp, Homo sapien
gaagagagctttcggtctccagcac

SEQ ID NO: 1867243 - DNA, 25 bp, Homo sapien
cgcccttcctcgagagctgagattg

SEQ ID NO: 1867244 - DNA, 25 bp, Homo sapien
gatctttcttgcagtcccggtggag

SEQ ID NO: 1867245 - DNA, 25 bp, Homo sapien
tatcggacgcgttgttaaagccttc

SEQ ID NO: 1867246 - DNA, 25 bp, Homo sapien
tcttcttcttatccttaccgctgtc

SEQ ID NO: 1867247 - DNA, 25 bp, Homo sapien
tctgaacccacatcttcgatcttgg

SEQ ID NO: 1867248 - DNA, 25 bp, Homo sapien
atcttcgatcttgggtttttcttca

SEQ ID NO: 1867249 - DNA, 25 bp, Homo sapien
tcctctgcctcatcatcactaattt

SEQ ID NO: 1867250 - DNA, 25 bp, Homo sapien
gggtttttcttcatcatctttatct

SEQ ID NO: 1867251 - DNA, 25 bp, Homo sapien
ggtcttgtttagttcttcctgatca

SEQ ID NO: 1867252 - DNA, 25 bp, Homo sapien
tcaggaagaactaaacaagaccaag

SEQ ID NO: 1867253 - DNA, 25 bp, Homo sapien
tgacagcggtaaggataagaagaag

SEQ ID NO: 1867254 - DNA, 25 bp, Homo sapien
tgaagaaaaacccaagatcgaagat

SEQ ID NO: 1867255 - DNA, 25 bp, Homo sapien
gagaaatacattgatcaggaagaac

SEQ ID NO: 1867256 - DNA, 25 bp, Homo sapien
aattagtgatgatgaggcagaggaa

SEQ ID NO: 1867257 - DNA, 25 bp, Homo sapien
gataaagatgatgaagaaaaaccca

SEQ ID NO: 1867258 - DNA, 25 bp, Homo sapien
taatagatggacttctgtgtctcct

SEQ ID NO: 1867259 - DNA, 25 bp, Homo sapien
tactctgacagagatgtcatctcat

SEQ ID NO: 1867260 - DNA, 25 bp, Homo sapien
cttcatgcgagaaacatactctgac

SEQ ID NO: 1867261 - DNA, 25 bp, Homo sapien
tgtgtctccttcatgcgagaaacat

SEQ ID NO: 1867262 - DNA, 25 bp, Homo sapien
catgcgagaaacatactctgacaga

SEQ ID NO: 1867263 - DNA, 25 bp, Homo sapien
gatgtaatagatggacttctgtgtc

SEQ ID NO: 1867264 - DNA, 25 bp, Homo sapien
gtcagagtatgtttctcgcatgaag

SEQ ID NO: 1867265 - DNA, 25 bp, Homo sapien
tctgtcagagtatgtttctcgcatg

SEQ ID NO: 1867266 - DNA, 25 bp, Homo sapien
gacacagaagtccatctattacatc

SEQ ID NO: 1867267 - DNA, 25 bp, Homo sapien
aaggagacacagaagtccatctatt

SEQ ID NO: 1867268 - DNA, 25 bp, Homo sapien
gatgagatgacatctctgtcagagt

SEQ ID NO: 1867269 - DNA, 25 bp, Homo sapien
tatgtttctcgcatgaaggagacac

SEQ ID NO: 1867270 - DNA, 25 bp, Homo sapien
gtttccgcactcgctccacaaaagc

SEQ ID NO: 1867271 - DNA, 25 bp, Homo sapien
gcttttgtggagcgagtgcggaaac

SEQ ID NO: 1867272 - DNA, 25 bp, Homo sapien
caaaagctgagttggccacctgctc

SEQ ID NO: 1867273 - DNA, 25 bp, Homo sapien
tcgaagccccgtttccgcactcgct

SEQ ID NO: 1867274 - DNA, 25 bp, Homo sapien
tcgctccacaaaagctgagttggcc

SEQ ID NO: 1867275 - DNA, 25 bp, Homo sapien
tgagttggccacctgctctttgctc

SEQ ID NO: 1867276 - DNA, 25 bp, Homo sapien
gctccacaaaagctgagttggccac

SEQ ID NO: 1867277 - DNA, 25 bp, Homo sapien
cgcactcgctccacaaaagctgagt

SEQ ID NO: 1867278 - DNA, 25 bp, Homo sapien
gagcaggtggccaactcagcttttg

SEQ ID NO: 1867279 - DNA, 25 bp, Homo sapien
ggtggccaactcagcttttgtggag

SEQ ID NO: 1867280 - DNA, 25 bp, Homo sapien
actcagcttttgtggagcgagtgcg

SEQ ID NO: 1867281 - DNA, 25 bp, Homo sapien
ggccaactcagcttttgtggagcga

SEQ ID NO: 1867282 - DNA, 25 bp, Homo sapien
gagcaaagagcaggtggccaactca

SEQ ID NO: 1867283 - DNA, 25 bp, Homo sapien
tttgtggagcgagtgcggaaacggg

SEQ ID NO: 1867284 - DNA, 25 bp, Homo sapien
gcacaagttttccaactatgaactc

SEQ ID NO: 1867285 - DNA, 25 bp, Homo sapien
ggaaaaaaacactagacaccagcag

SEQ ID NO: 1867286 - DNA, 25 bp, Homo sapien
gggacactatacaagggcacaagtt

SEQ ID NO: 1867287 - DNA, 25 bp, Homo sapien
gcttgacacccttagtttactgcct

SEQ ID NO: 1867288 - DNA, 25 bp, Homo sapien
ttactgccttcaacacaaggacagg

SEQ ID NO: 1867289 - DNA, 25 bp, Homo sapien
tatgaactcctaacctaatcgactt

SEQ ID NO: 1867290 - DNA, 25 bp, Homo sapien
cctgtccttgtgttgaaggcagtaa

SEQ ID NO: 1867291 - DNA, 25 bp, Homo sapien
gagttcatagttggaaaacttgtgc

SEQ ID NO: 1867292 - DNA, 25 bp, Homo sapien
aaacttgtgcccttgtatagtgtcc

SEQ ID NO: 1867293 - DNA, 25 bp, Homo sapien
gaagtcgattaggttaggagttcat

SEQ ID NO: 1867294 - DNA, 25 bp, Homo sapien
gcagtaaactaagggtgtcaagccc

SEQ ID NO: 1867295 - DNA, 25 bp, Homo sapien
gtgcccttgtatagtgtccccatgg

SEQ ID NO: 1867296 - DNA, 25 bp, Homo sapien
cagctagggcaagacttaagggaac

SEQ ID NO: 1867297 - DNA, 25 bp, Homo sapien
cttgtgggaagagtaactggaacct

SEQ ID NO: 1867298 - DNA, 25 bp, Homo sapien
aactgcttactggaagatgggtgac

SEQ ID NO: 1867299 - DNA, 25 bp, Homo sapien
ggaaagcagcattggagcctacacc

SEQ ID NO: 1867300 - DNA, 25 bp, Homo sapien
cacttcacccctcaggccctttcca

SEQ ID NO: 1867301 - DNA, 25 bp, Homo sapien
agagctggccacatgcggagcagat

SEQ ID NO: 1867302 - DNA, 25 bp, Homo sapien
catgaagcgggttccctccagtagg

SEQ ID NO: 1867303 - DNA, 25 bp, Homo sapien
atgatggtgaagacggcagccccaa

SEQ ID NO: 1867304 - DNA, 25 bp, Homo sapien
cccaatggtgtaaaagatgaagagc

SEQ ID NO: 1867305 - DNA, 25 bp, Homo sapien
gaaattgaccccaaacatcatctgc

SEQ ID NO: 1867306 - DNA, 25 bp, Homo sapien
catcttataggcaaacagggcatcc

SEQ ID NO: 1867307 - DNA, 25 bp, Homo sapien
caaacatcatctgcaccgatgacat

SEQ ID NO: 1867308 - DNA, 25 bp, Homo sapien
gcatcctgccagtttgaggtgaagc

SEQ ID NO: 1867309 - DNA, 25 bp, Homo sapien
ttaagagcttcgtattggcaccagc

SEQ ID NO: 1867310 - DNA, 25 bp, Homo sapien
ggctggcaaaggagtaccggtacat

SEQ ID NO: 1867311 - DNA, 25 bp, Homo sapien
tactcccagtgttcgtagctgcgcc

SEQ ID NO: 1867312 - DNA, 25 bp, Homo sapien
catgacagggatcaccttagaggcc

SEQ ID NO: 1867313 - DNA, 25 bp, Homo sapien
atagctgcgggtcatcactctttcc

SEQ ID NO: 1867314 - DNA, 25 bp, Homo sapien
tggctgtggccccatagctgcgggt

SEQ ID NO: 1867315 - DNA, 25 bp, Homo sapien
ggccccatagctgcgggtcatcact

SEQ ID NO: 1867316 - DNA, 25 bp, Homo sapien
tgtggccccatagctgcgggtcatc

SEQ ID NO: 1867317 - DNA, 25 bp, Homo sapien
cttgggctcattgccaaacacacaa

SEQ ID NO: 1867318 - DNA, 25 bp, Homo sapien
ggcctgccacatcggggtggtctct

SEQ ID NO: 1867319 - DNA, 25 bp, Homo sapien
ctcatcagaggccttgggctcattg

SEQ ID NO: 1867320 - DNA, 25 bp, Homo sapien
catcggggtggtctctgccgcctct

SEQ ID NO: 1867321 - DNA, 25 bp, Homo sapien
gctggccaaataccctctttcccga

SEQ ID NO: 1867322 - DNA, 25 bp, Homo sapien
cctctccaagtcatatcccgtttgg

SEQ ID NO: 1867323 - DNA, 25 bp, Homo sapien
tatcccgtttggactgctggccaaa

SEQ ID NO: 1867324 - DNA, 25 bp, Homo sapien
tctttcccgacctagctcacttccc

SEQ ID NO: 1867325 - DNA, 25 bp, Homo sapien
agttcttccgcctgaagtactgcac

SEQ ID NO: 1867326 - DNA, 25 bp, Homo sapien
tagttcttccgcctgaagtactgca

SEQ ID NO: 1867327 - DNA, 25 bp, Homo sapien
gtagttcttccgcctgaagtactgc

SEQ ID NO: 1867328 - DNA, 25 bp, Homo sapien
acaaatcggaagaaccatagctggg

SEQ ID NO: 1867329 - DNA, 25 bp, Homo sapien
cagcattcaccacaaatcggaagaa

SEQ ID NO: 1867330 - DNA, 25 bp, Homo sapien
ggcttcgggagtctccccacctgcc

SEQ ID NO: 1867331 - DNA, 25 bp, Homo sapien
atagctgggtccatgactccggagg

SEQ ID NO: 1867332 - DNA, 25 bp, Homo sapien
gggaggggaacgcagccagcaccac

SEQ ID NO: 1867333 - DNA, 25 bp, Homo sapien
gaggggaacgcagccagcaccacca

SEQ ID NO: 1867334 - DNA, 25 bp, Homo sapien
ctagggaggggaacgcagccagcac

SEQ ID NO: 1867335 - DNA, 25 bp, Homo sapien
tagggaggggaacgcagccagcacc

SEQ ID NO: 1867336 - DNA, 25 bp, Homo sapien
gaccacactggagtagtgcccggag

SEQ ID NO: 1867337 - DNA, 25 bp, Homo sapien
tccgggcagcgatatgctggccgac

SEQ ID NO: 1867338 - DNA, 25 bp, Homo sapien
gacataaggattagggcgcagctcc

SEQ ID NO: 1867339 - DNA, 25 bp, Homo sapien
acgctagccggctgctcaggtcaga

SEQ ID NO: 1867340 - DNA, 25 bp, Homo sapien
cagcggccagcggaagtgccgcgct

SEQ ID NO: 1867341 - DNA, 25 bp, Homo sapien
ggccagcggaagtgccgcgctcttc

SEQ ID NO: 1867342 - DNA, 25 bp, Homo sapien
gcggccagcggaagtgccgcgctct

SEQ ID NO: 1867343 - DNA, 25 bp, Homo sapien
agccagcggccagcggaagtgccgc

SEQ ID NO: 1867344 - DNA, 25 bp, Homo sapien
gaaaaacgtggagtcagctccctcg

SEQ ID NO: 1867345 - DNA, 25 bp, Homo sapien
tgcttttaacggctgtctctctcac

SEQ ID NO: 1867346 - DNA, 25 bp, Homo sapien
gagactgtgctggtttattgcccca

SEQ ID NO: 1867347 - DNA, 25 bp, Homo sapien
tggatgagacgctccaagtggtcag

SEQ ID NO: 1867348 - DNA, 25 bp, Homo sapien
taagatgggacacctctcagggttc

SEQ ID NO: 1867349 - DNA, 25 bp, Homo sapien
catgcatgcgcgcaaaacagctcta

SEQ ID NO: 1867350 - DNA, 25 bp, Homo sapien
cccaacatgggtaaaacaagagcac

SEQ ID NO: 1867351 - DNA, 25 bp, Homo sapien
gggtcctcaacagcaataagatggg

SEQ ID NO: 1867352 - DNA, 25 bp, Homo sapien
ccctcctcctcggctcaggactgta

SEQ ID NO: 1867353 - DNA, 25 bp, Homo sapien
ctctcttccacttgcagtccctcct

SEQ ID NO: 1867354 - DNA, 25 bp, Homo sapien
tccaagaagccctgtccacctggaa

SEQ ID NO: 1867355 - DNA, 25 bp, Homo sapien
gaaagctcttccttccagactggct

SEQ ID NO: 1867356 - DNA, 25 bp, Homo sapien
ccccaggctctggccacagcagtcc

SEQ ID NO: 1867357 - DNA, 25 bp, Homo sapien
tggccccaggctctggccacagcag

SEQ ID NO: 1867358 - DNA, 25 bp, Homo sapien
tggctggccccaggctctggccaca

SEQ ID NO: 1867359 - DNA, 25 bp, Homo sapien
ctggctggccccaggctctggccac

SEQ ID NO: 1867360 - DNA, 25 bp, Homo sapien
cagcagttatggctccggcttccag

SEQ ID NO: 1867361 - DNA, 25 bp, Homo sapien
agagcacatagcctgggcccaaact

SEQ ID NO: 1867362 - DNA, 25 bp, Homo sapien
tgggcccaaactgcagcagttatgg

SEQ ID NO: 1867363 - DNA, 25 bp, Homo sapien
tagcctgggcccaaactgcagcagt

SEQ ID NO: 1867364 - DNA, 25 bp, Homo sapien
caggtcatcaaagggcaaaaggaca

SEQ ID NO: 1867365 - DNA, 25 bp, Homo sapien
tcagtcggtacacagcagcagtttc

SEQ ID NO: 1867366 - DNA, 25 bp, Homo sapien
cctgagatcttcaggtcatcaaagg

SEQ ID NO: 1867367 - DNA, 25 bp, Homo sapien
gagatcttcaggtcatcaaagggca

SEQ ID NO: 1867368 - DNA, 25 bp, Homo sapien
tgctgaagctgagtacagagaccct

SEQ ID NO: 1867369 - DNA, 25 bp, Homo sapien
gattcactttaactgcagggtccct

SEQ ID NO: 1867370 - DNA, 25 bp, Homo sapien
tgacagttgaagaccatcagggaac

SEQ ID NO: 1867371 - DNA, 25 bp, Homo sapien
cagaatatccgagttaggagggacc

SEQ ID NO: 1867372 - DNA, 25 bp, Homo sapien
cacattccgcagcagggagtcagca

SEQ ID NO: 1867373 - DNA, 25 bp, Homo sapien
atcctccacattccgcagcagggag

SEQ ID NO: 1867374 - DNA, 25 bp, Homo sapien
catcctccacattccgcagcaggga

SEQ ID NO: 1867375 - DNA, 25 bp, Homo sapien
ctccacattccgcagcagggagtca

SEQ ID NO: 1867376 - DNA, 25 bp, Homo sapien
tgagatgcccatgagaccccggcca

SEQ ID NO: 1867377 - DNA, 25 bp, Homo sapien
gtgtgcacccgttcagcatgcgggc

SEQ ID NO: 1867378 - DNA, 25 bp, Homo sapien
cacagagtggatgagatgcccatga

SEQ ID NO: 1867379 - DNA, 25 bp, Homo sapien
cacccgttcagcatgcgggcatcta

SEQ ID NO: 1867380 - DNA, 25 bp, Homo sapien
agcgctgtcttaccactggtgccct

SEQ ID NO: 1867381 - DNA, 25 bp, Homo sapien
ctcttgggtttccacagccaggtgc

SEQ ID NO: 1867382 - DNA, 25 bp, Homo sapien
ctggagcaggaactgtaccaggccc

SEQ ID NO: 1867383 - DNA, 25 bp, Homo sapien
ccaggtgcagcgctgtcttaccact

SEQ ID NO: 1867384 - DNA, 25 bp, Homo sapien
tgggccgggcagtgctttgctggct

SEQ ID NO: 1867385 - DNA, 25 bp, Homo sapien
aataaggatgtcagccaaggccctc

SEQ ID NO: 1867386 - DNA, 25 bp, Homo sapien
tgaatgccaccacttctgactgctg

SEQ ID NO: 1867387 - DNA, 25 bp, Homo sapien
cctgggctctggataaggaagtgaa

SEQ ID NO: 1867388 - DNA, 25 bp, Homo sapien
cattccgaagcagcaattccatgag

SEQ ID NO: 1867389 - DNA, 25 bp, Homo sapien
cagctccattccgaagcagcaattc

SEQ ID NO: 1867390 - DNA, 25 bp, Homo sapien
tgtcagctccattccgaagcagcaa

SEQ ID NO: 1867391 - DNA, 25 bp, Homo sapien
tccattccgaagcagcaattccatg

SEQ ID NO: 1867392 - DNA, 25 bp, Homo sapien
aaactttcatgcttcaggggtcagg

SEQ ID NO: 1867393 - DNA, 25 bp, Homo sapien
tctgggacctccctaccactcagcc

SEQ ID NO: 1867394 - DNA, 25 bp, Homo sapien
taatcacaagactgttaaaatgcaa

SEQ ID NO: 1867395 - DNA, 25 bp, Homo sapien
aagggactcacagcccactcaatgt

SEQ ID NO: 1867396 - DNA, 25 bp, Homo sapien
ggctgtgtcaccatgccggtcctgt

SEQ ID NO: 1867397 - DNA, 25 bp, Homo sapien
agtgcccgaactgcgcccggttggt

SEQ ID NO: 1867398 - DNA, 25 bp, Homo sapien
cgcccggttggtccagatgtacagc

SEQ ID NO: 1867399 - DNA, 25 bp, Homo sapien
gtcaccatgccggtcctgtagtgcc

SEQ ID NO: 1867400 - DNA, 25 bp, Homo sapien
gctggggcctcatgaatcactgcca

SEQ ID NO: 1867401 - DNA, 25 bp, Homo sapien
ggggcctcatgaatcactgccaggt

SEQ ID NO: 1867402 - DNA, 25 bp, Homo sapien
caccgctggggcctcatgaatcact

SEQ ID NO: 1867403 - DNA, 25 bp, Homo sapien
gagcagcaccgctggggcctcatga

SEQ ID NO: 1867404 - DNA, 25 bp, Homo sapien
tccgtcctcggagatgtaagtgagt

SEQ ID NO: 1867405 - DNA, 25 bp, Homo sapien
gactcaatgccagagtcgtactggc

SEQ ID NO: 1867406 - DNA, 25 bp, Homo sapien
gagccataggtggaatcagcccgct

SEQ ID NO: 1867407 - DNA, 25 bp, Homo sapien
cagagagcgcagagactcaatgcca

SEQ ID NO: 1867408 - DNA, 25 bp, Homo sapien
cagcggttactgtgggcagccgaac

SEQ ID NO: 1867409 - DNA, 25 bp, Homo sapien
gggccttgactcactccttcgttga

SEQ ID NO: 1867410 - DNA, 25 bp, Homo sapien
ttcccgggctctgcgtaggcttgga

SEQ ID NO: 1867411 - DNA, 25 bp, Homo sapien
tctgagcaggatccggctccaggct

SEQ ID NO: 1867412 - DNA, 25 bp, Homo sapien
taatcacgcctataaactttgagag

SEQ ID NO: 1867413 - DNA, 25 bp, Homo sapien
tgggttcaaaatttggccgagcgcg

SEQ ID NO: 1867414 - DNA, 25 bp, Homo sapien
gttcctctccggtcctcaaaggctg

SEQ ID NO: 1867415 - DNA, 25 bp, Homo sapien
tcccttgagtcagcatgatttcaga

SEQ ID NO: 1867416 - DNA, 25 bp, Homo sapien
cttggtagctttactgattgccagg

SEQ ID NO: 1867417 - DNA, 25 bp, Homo sapien
tggtagctttactgattgccaggga

SEQ ID NO: 1867418 - DNA, 25 bp, Homo sapien
tttcttggtagctttactgattgcc

SEQ ID NO: 1867419 - DNA, 25 bp, Homo sapien
ggtagctttactgattgccagggaa

SEQ ID NO: 1867420 - DNA, 25 bp, Homo sapien
caggtctctgtcaattgggtgcatc

SEQ ID NO: 1867421 - DNA, 25 bp, Homo sapien
tgtgattcctgtaggtgtggcccca

SEQ ID NO: 1867422 - DNA, 25 bp, Homo sapien
tggcgtggcctgtagaactggatca

SEQ ID NO: 1867423 - DNA, 25 bp, Homo sapien
gaaccagtgtgatactctgcagcag

SEQ ID NO: 1867424 - DNA, 25 bp, Homo sapien
cagttatggttgacatgaagtggct

SEQ ID NO: 1867425 - DNA, 25 bp, Homo sapien
tgacaggcgcaagtcaaattccagg

SEQ ID NO: 1867426 - DNA, 25 bp, Homo sapien
tgcttctcggtttgcgtagagggcc

SEQ ID NO: 1867427 - DNA, 25 bp, Homo sapien
caatgaggtactcgctttcctgggc

SEQ ID NO: 1867428 - DNA, 25 bp, Homo sapien
cgtgcaccacggtctccaatgaggt

SEQ ID NO: 1867429 - DNA, 25 bp, Homo sapien
tcagacagctcattgccaccgaggt

SEQ ID NO: 1867430 - DNA, 25 bp, Homo sapien
ccagaaggcttcgaattatgatgcg

SEQ ID NO: 1867431 - DNA, 25 bp, Homo sapien
tcatcctcgatgcagttgagacgta

SEQ ID NO: 1867432 - DNA, 25 bp, Homo sapien
acgtaattccggcagagcggcagca

SEQ ID NO: 1867433 - DNA, 25 bp, Homo sapien
gaaggaactgatcgacgtggaccct

SEQ ID NO: 1867434 - DNA, 25 bp, Homo sapien
cagatcgcccagttggtagtggtca

SEQ ID NO: 1867435 - DNA, 25 bp, Homo sapien
tctgtggtgcctgggataaagtgct

SEQ ID NO: 1867436 - DNA, 25 bp, Homo sapien
cagcagcggagccagtagttctcac

SEQ ID NO: 1867437 - DNA, 25 bp, Homo sapien
tgtctatcaggttggcggtcacagc

SEQ ID NO: 1867438 - DNA, 25 bp, Homo sapien
ggtgttccgggagcatctgcttcag

SEQ ID NO: 1867439 - DNA, 25 bp, Homo sapien
tggcacacgggccagcgatgcatgc

SEQ ID NO: 1867440 - DNA, 25 bp, Homo sapien
ccatcagagtagagggcggttcact

SEQ ID NO: 1867441 - DNA, 25 bp, Homo sapien
cggttcacttgggaaggctttctgg

SEQ ID NO: 1867442 - DNA, 25 bp, Homo sapien
tagatatggctcaggctgggttttg

SEQ ID NO: 1867443 - DNA, 25 bp, Homo sapien
aagtagatatggctcaggctgggtt

SEQ ID NO: 1867444 - DNA, 25 bp, Homo sapien
gggcacgatggccagtgaccactca

SEQ ID NO: 1867445 - DNA, 25 bp, Homo sapien
gatcctcagcaatgatccggcgcat

SEQ ID NO: 1867446 - DNA, 25 bp, Homo sapien
cagtgaccactcaggatcctcagca

SEQ ID NO: 1867447 - DNA, 25 bp, Homo sapien
agttcctgataatgtgctgaatgca

SEQ ID NO: 1867448 - DNA, 25 bp, Homo sapien
tgtcctccagtggaggaattgtcct

SEQ ID NO: 1867449 - DNA, 25 bp, Homo sapien
ccgacggatattggccctgggatgt

SEQ ID NO: 1867450 - DNA, 25 bp, Homo sapien
tgggcttgtgcttgaagtgtgtcct

SEQ ID NO: 1867451 - DNA, 25 bp, Homo sapien
gctgatgtcgttacggtatcctgca

SEQ ID NO: 1867452 - DNA, 25 bp, Homo sapien
tggccttatgacaagaagcttctca

SEQ ID NO: 1867453 - DNA, 25 bp, Homo sapien
gtgcgtggcccctggatggccttat

SEQ ID NO: 1867454 - DNA, 25 bp, Homo sapien
ggtaggggtgcgtggcccctggatg

SEQ ID NO: 1867455 - DNA, 25 bp, Homo sapien
tcagactggcaggtccttgaaacag

SEQ ID NO: 1867456 - DNA, 25 bp, Homo sapien
gaagatgctgtaggtttgcattctc

SEQ ID NO: 1867457 - DNA, 25 bp, Homo sapien
taatgggaacacgaggaagatgctg

SEQ ID NO: 1867458 - DNA, 25 bp, Homo sapien
cacctgccctaatgggaacacgagg

SEQ ID NO: 1867459 - DNA, 25 bp, Homo sapien
gatgctgtaggtttgcattctcacc

SEQ ID NO: 1867460 - DNA, 25 bp, Homo sapien
gcctcggcccgtgtgcttggacttg

SEQ ID NO: 1867461 - DNA, 25 bp, Homo sapien
tcaaaagtgactccagcggctctgg

SEQ ID NO: 1867462 - DNA, 25 bp, Homo sapien
ggctgggtgaaaccgccagttcact

SEQ ID NO: 1867463 - DNA, 25 bp, Homo sapien
tctttgggcagacagcgcctctgtg

SEQ ID NO: 1867464 - DNA, 25 bp, Homo sapien
ttccgcacccgcgggagggattaca

SEQ ID NO: 1867465 - DNA, 25 bp, Homo sapien
gattacagccctcgggtgatgggaa

SEQ ID NO: 1867466 - DNA, 25 bp, Homo sapien
aacccagggaaaccggcagtgcagt

SEQ ID NO: 1867467 - DNA, 25 bp, Homo sapien
cggacggcctttcggagaagcctag

SEQ ID NO: 1867468 - DNA, 25 bp, Homo sapien
gtcccgcgcgccggcgcaggtcttt

SEQ ID NO: 1867469 - DNA, 25 bp, Homo sapien
tcgcctcacgcagagtcccgcgcgc

SEQ ID NO: 1867470 - DNA, 25 bp, Homo sapien
ggagccccggcgctcgcctcacgca

SEQ ID NO: 1867471 - DNA, 25 bp, Homo sapien
cgcgccggcgcaggtctttgtcgtt

SEQ ID NO: 1867472 - DNA, 25 bp, Homo sapien
gctgcgcgccaggcacgcggcttac

SEQ ID NO: 1867473 - DNA, 25 bp, Homo sapien
cgctgcgcgccaggcacgcggctta

SEQ ID NO: 1867474 - DNA, 25 bp, Homo sapien
ccgctgcgcgccaggcacgcggctt

SEQ ID NO: 1867475 - DNA, 25 bp, Homo sapien
gccgctttgcgggtagtgggactgt

SEQ ID NO: 1867476 - DNA, 25 bp, Homo sapien
cggttccgtggaagcggccgctttg

SEQ ID NO: 1867477 - DNA, 25 bp, Homo sapien
cctgtgcttccgtgggacgtgtcta

SEQ ID NO: 1867478 - DNA, 25 bp, Homo sapien
tgtggccttgcgctatgccctgtgc

SEQ ID NO: 1867479 - DNA, 25 bp, Homo sapien
tccaaggcacctgtagaagtcactg

SEQ ID NO: 1867480 - DNA, 25 bp, Homo sapien
aagcatattgtttgtctgaccccgc

SEQ ID NO: 1867481 - DNA, 25 bp, Homo sapien
aaaactcatcttggcgctcgcggag

SEQ ID NO: 1867482 - DNA, 25 bp, Homo sapien
gacagaatttggtagccagggagcc

SEQ ID NO: 1867483 - DNA, 25 bp, Homo sapien
cagagcctgtccgaacactcatggc

SEQ ID NO: 1867484 - DNA, 25 bp, Homo sapien
ggaactgtcagtttagtgcccgcca

SEQ ID NO: 1867485 - DNA, 25 bp, Homo sapien
ttcctccacatgaagcaggctccat

SEQ ID NO: 1867486 - DNA, 25 bp, Homo sapien
ccagcagggcccaatttaaattaga

SEQ ID NO: 1867487 - DNA, 25 bp, Homo sapien
gcagtcacagccataattgtccatg

SEQ ID NO: 1867488 - DNA, 25 bp, Homo sapien
gtctccttgtgtcacgtaggccctg

SEQ ID NO: 1867489 - DNA, 25 bp, Homo sapien
tctccttgtgtcacgtaggccctgg

SEQ ID NO: 1867490 - DNA, 25 bp, Homo sapien
ggtgtgtgtctttgggcccagttct

SEQ ID NO: 1867491 - DNA, 25 bp, Homo sapien
agcctctagtcctcgcttcagcatg

SEQ ID NO: 1867492 - DNA, 25 bp, Homo sapien
tcctggcattgcctttagtccatgt

SEQ ID NO: 1867493 - DNA, 25 bp, Homo sapien
gcctttagtccatgtgggtccctgg

SEQ ID NO: 1867494 - DNA, 25 bp, Homo sapien
gcctctagtcctcgcttcagcatgt

SEQ ID NO: 1867495 - DNA, 25 bp, Homo sapien
ctgagggcataggtttgggctatac

SEQ ID NO: 1867496 - DNA, 25 bp, Homo sapien
agggcagcttccaggtcagtagtgc

SEQ ID NO: 1867497 - DNA, 25 bp, Homo sapien
ccaggtcagtagtgcttccggtgcc

SEQ ID NO: 1867498 - DNA, 25 bp, Homo sapien
tgggctatactgagggcagcttcca

SEQ ID NO: 1867499 - DNA, 25 bp, Homo sapien
aggcctctgctgtgaaggtgggcat

SEQ ID NO: 1867500 - DNA, 25 bp, Homo sapien
cacactgccagtgcccaggcctctg

SEQ ID NO: 1867501 - DNA, 25 bp, Homo sapien
ctgctgtgaaggtgggcatggcacc

SEQ ID NO: 1867502 - DNA, 25 bp, Homo sapien
ctgcacactgccagtgcccaggcct

SEQ ID NO: 1867503 - DNA, 25 bp, Homo sapien
cctgtcctggagtatcctcatagat

SEQ ID NO: 1867504 - DNA, 25 bp, Homo sapien
tatgaacgtgaacatctgctacttg

SEQ ID NO: 1867505 - DNA, 25 bp, Homo sapien
tcaaggtaccctcaagagtggagct

SEQ ID NO: 1867506 - DNA, 25 bp, Homo sapien
ggtgtaaaatcagagagctggacca

SEQ ID NO: 1867507 - DNA, 25 bp, Homo sapien
tcacacagctgccgtaccaccttca

SEQ ID NO: 1867508 - DNA, 25 bp, Homo sapien
tgctcacacagctgccgtaccacct

SEQ ID NO: 1867509 - DNA, 25 bp, Homo sapien
acacagctgccgtaccaccttcacc

SEQ ID NO: 1867510 - DNA, 25 bp, Homo sapien
gagtaggagcacagacgtgctgggg

SEQ ID NO: 1867511 - DNA, 25 bp, Homo sapien
cctggtcaggactttgccctcccca

SEQ ID NO: 1867512 - DNA, 25 bp, Homo sapien
ctggaccacgaaagacagatggtga

SEQ ID NO: 1867513 - DNA, 25 bp, Homo sapien
gatggtgagcccatcgcttcccaga

SEQ ID NO: 1867514 - DNA, 25 bp, Homo sapien
agacccctagctgtctcctggtcag

SEQ ID NO: 1867515 - DNA, 25 bp, Homo sapien
atcagaggccccttcgagtgccgct

SEQ ID NO: 1867516 - DNA, 25 bp, Homo sapien
actcagcagagactgtgtccacaat

SEQ ID NO: 1867517 - DNA, 25 bp, Homo sapien
gtccacaatcagaggccccttcgag

SEQ ID NO: 1867518 - DNA, 25 bp, Homo sapien
gcagagactgtgtccacaatcagag

SEQ ID NO: 1867519 - DNA, 25 bp, Homo sapien
ttgcagcttacggatggcagtgttg

SEQ ID NO: 1867520 - DNA, 25 bp, Homo sapien
gcagtgttggcacgccgctgcagca

SEQ ID NO: 1867521 - DNA, 25 bp, Homo sapien
ctgtcccatttgcagcttacggatg

SEQ ID NO: 1867522 - DNA, 25 bp, Homo sapien
catttgcagcttacggatggcagtg

SEQ ID NO: 1867523 - DNA, 25 bp, Homo sapien
tggggcatcacagcagtttccacag

SEQ ID NO: 1867524 - DNA, 25 bp, Homo sapien
ggggcatcacagcagtttccacagc

SEQ ID NO: 1867525 - DNA, 25 bp, Homo sapien
ctggggcatcacagcagtttccaca

SEQ ID NO: 1867526 - DNA, 25 bp, Homo sapien
agactcagccgctcagtggccgctt

SEQ ID NO: 1867527 - DNA, 25 bp, Homo sapien
ttcaatgagtcgtcctatgtccttg

SEQ ID NO: 1867528 - DNA, 25 bp, Homo sapien
cctatgtccttggacagcctcagtg

SEQ ID NO: 1867529 - DNA, 25 bp, Homo sapien
ggccgctttcacttcctgggccagg

SEQ ID NO: 1867530 - DNA, 25 bp, Homo sapien
tggcggtccccgatgataaccaggt

SEQ ID NO: 1867531 - DNA, 25 bp, Homo sapien
ccagcaggcgggtagtgcccttgga

SEQ ID NO: 1867532 - DNA, 25 bp, Homo sapien
tgcccttggaaagctggcggtcccc

SEQ ID NO: 1867533 - DNA, 25 bp, Homo sapien
tacagccccagtacgtaacaggtgc

SEQ ID NO: 1867534 - DNA, 25 bp, Homo sapien
aaggagtgaacagaaagtcggggca

SEQ ID NO: 1867535 - DNA, 25 bp, Homo sapien
ggagtgaacagaaagtcggggcatg

SEQ ID NO: 1867536 - DNA, 25 bp, Homo sapien
tgaacagaaagtcggggcatgacag

SEQ ID NO: 1867537 - DNA, 25 bp, Homo sapien
agtgaacagaaagtcggggcatgac

SEQ ID NO: 1867538 - DNA, 25 bp, Homo sapien
aggctgggtccaatgcatgggccac

SEQ ID NO: 1867539 - DNA, 25 bp, Homo sapien
tgggaggctgggtccaatgcatggg

SEQ ID NO: 1867540 - DNA, 25 bp, Homo sapien
cgggcacccccactgataccacccg

SEQ ID NO: 1867541 - DNA, 25 bp, Homo sapien
agaggtctgcagtgcggcttgggag

SEQ ID NO: 1867542 - DNA, 25 bp, Homo sapien
tgcccggagctgctctggggtcaat

SEQ ID NO: 1867543 - DNA, 25 bp, Homo sapien
atccagagagcgcaggccagggacc

SEQ ID NO: 1867544 - DNA, 25 bp, Homo sapien
tccagagagcgcaggccagggacct

SEQ ID NO: 1867545 - DNA, 25 bp, Homo sapien
ctcatccagagagcgcaggccaggg

SEQ ID NO: 1867546 - DNA, 25 bp, Homo sapien
ggtggtcacatccaagcgcagctgc

SEQ ID NO: 1867547 - DNA, 25 bp, Homo sapien
tccaagcgcagctgctcaggattga

SEQ ID NO: 1867548 - DNA, 25 bp, Homo sapien
ctgggtggtcacatccaagcgcagc

SEQ ID NO: 1867549 - DNA, 25 bp, Homo sapien
aagcgcagctgctcaggattgagat

SEQ ID NO: 1867550 - DNA, 25 bp, Homo sapien
ttcgccatgcagcctagacgccagg

SEQ ID NO: 1867551 - DNA, 25 bp, Homo sapien
tcgccatgcagcctagacgccaggc

SEQ ID NO: 1867552 - DNA, 25 bp, Homo sapien
cttcgccatgcagcctagacgccag

SEQ ID NO: 1867553 - DNA, 25 bp, Homo sapien
gctactgcctcatgcaggatgaaac

SEQ ID NO: 1867554 - DNA, 25 bp, Homo sapien
gcccgggctactgggaacagcacgt

SEQ ID NO: 1867555 - DNA, 25 bp, Homo sapien
actcaggggctactgcctcatgcag

SEQ ID NO: 1867556 - DNA, 25 bp, Homo sapien
atgcaggatgaaacctccacagacc

SEQ ID NO: 1867557 - DNA, 25 bp, Homo sapien
ccgcaccaggtagccacggtctgaa

SEQ ID NO: 1867558 - DNA, 25 bp, Homo sapien
cccctgttctgcgtagaagttggtc

SEQ ID NO: 1867559 - DNA, 25 bp, Homo sapien
tagaagttggtcctgtccaagagga

SEQ ID NO: 1867560 - DNA, 25 bp, Homo sapien
gaggccacagcgctggcctttcccc

SEQ ID NO: 1867561 - DNA, 25 bp, Homo sapien
acctgggcctcacaggtgccgaact

SEQ ID NO: 1867562 - DNA, 25 bp, Homo sapien
tgtatacagttgcaacacctgggcc

SEQ ID NO: 1867563 - DNA, 25 bp, Homo sapien
aacacctgggcctcacaggtgccga

SEQ ID NO: 1867564 - DNA, 25 bp, Homo sapien
ctgtatacagttgcaacacctgggc

SEQ ID NO: 1867565 - DNA, 25 bp, Homo sapien
gtcgcagggagtagttgtacttggg

SEQ ID NO: 1867566 - DNA, 25 bp, Homo sapien
gctccccaagcgcatggacatcaag

SEQ ID NO: 1867567 - DNA, 25 bp, Homo sapien
tcaagccacaatccctgcttctgaa

SEQ ID NO: 1867568 - DNA, 25 bp, Homo sapien
cataacttccgctgggtcgcaggga

SEQ ID NO: 1867569 - DNA, 25 bp, Homo sapien
tgggccaaccgctccagtccagcgg

SEQ ID NO: 1867570 - DNA, 25 bp, Homo sapien
gtccagcggagtctagctggacccc

SEQ ID NO: 1867571 - DNA, 25 bp, Homo sapien
tccagtccagcggagtctagctgga

SEQ ID NO: 1867572 - DNA, 25 bp, Homo sapien
cagtccagcggagtctagctggacc

SEQ ID NO: 1867573 - DNA, 25 bp, Homo sapien
gagggaagctcagtctatgcacgaa

SEQ ID NO: 1867574 - DNA, 25 bp, Homo sapien
tccatactgggtagcctcaggagag

SEQ ID NO: 1867575 - DNA, 25 bp, Homo sapien
ttcatgcctcaaggccagagctggg

SEQ ID NO: 1867576 - DNA, 25 bp, Homo sapien
agggcccttctaaccacgcagaagc

SEQ ID NO: 1867577 - DNA, 25 bp, Homo sapien
gggtcctcagagtccgatcaatgat

SEQ ID NO: 1867578 - DNA, 25 bp, Homo sapien
tcctcagagtccgatcaatgatccg

SEQ ID NO: 1867579 - DNA, 25 bp, Homo sapien
gagtccgatcaatgatccgcctacc

SEQ ID NO: 1867580 - DNA, 25 bp, Homo sapien
ccagggtcctcagagtccgatcaat

SEQ ID NO: 1867581 - DNA, 25 bp, Homo sapien
gggctgagttcctttgcagttctgg

SEQ ID NO: 1867582 - DNA, 25 bp, Homo sapien
tcctttgcagttctggataagcatc

SEQ ID NO: 1867583 - DNA, 25 bp, Homo sapien
tttgcagttctggataagcatctcc

SEQ ID NO: 1867584 - DNA, 25 bp, Homo sapien
ctgggctgagttcctttgcagttct

SEQ ID NO: 1867585 - DNA, 25 bp, Homo sapien
acagctcgacgcaggatccgacgaa

SEQ ID NO: 1867586 - DNA, 25 bp, Homo sapien
tccatggagaaacgcacagctcgac

SEQ ID NO: 1867587 - DNA, 25 bp, Homo sapien
taccaggctgcctaggaagccaggt

SEQ ID NO: 1867588 - DNA, 25 bp, Homo sapien
ggtgcctttaagatctccatggaga

SEQ ID NO: 1867589 - DNA, 25 bp, Homo sapien
tacgctgtgtctgtgcgcccctcgt

SEQ ID NO: 1867590 - DNA, 25 bp, Homo sapien
cacgcggtacgctgtgtctgtgcgc

SEQ ID NO: 1867591 - DNA, 25 bp, Homo sapien
tggtcagccaccacgcggtacgctg

SEQ ID NO: 1867592 - DNA, 25 bp, Homo sapien
actgagtgtgcggatgtggtcagcc

SEQ ID NO: 1867593 - DNA, 25 bp, Homo sapien
aaaagaggtcagtgtcataggtgga

SEQ ID NO: 1867594 - DNA, 25 bp, Homo sapien
gggaaaagaggtcagtgtcataggt

SEQ ID NO: 1867595 - DNA, 25 bp, Homo sapien
gagtgtttgccttgcagcacagcca

SEQ ID NO: 1867596 - DNA, 25 bp, Homo sapien
ctgctgtatggcgttgagcagcggg

SEQ ID NO: 1867597 - DNA, 25 bp, Homo sapien
aaggaaagcacacggctagcaggca

SEQ ID NO: 1867598 - DNA, 25 bp, Homo sapien
aggttccaaagctctaccagctggg

SEQ ID NO: 1867599 - DNA, 25 bp, Homo sapien
tggatctcagtacagggcccacaag

SEQ ID NO: 1867600 - DNA, 25 bp, Homo sapien
tgtgttgcatgaagaccaggttcca

SEQ ID NO: 1867601 - DNA, 25 bp, Homo sapien
gatcccatagacctgagtcagcagt

SEQ ID NO: 1867602 - DNA, 25 bp, Homo sapien
cccaggccatgttacaagcctcctc

SEQ ID NO: 1867603 - DNA, 25 bp, Homo sapien
gggtcaccatcaaagtaggagatcc

SEQ ID NO: 1867604 - DNA, 25 bp, Homo sapien
agtaggagatccagagcctttcctc

SEQ ID NO: 1867605 - DNA, 25 bp, Homo sapien
ctgttggccacacgtcggaagcctg

SEQ ID NO: 1867606 - DNA, 25 bp, Homo sapien
tccaggtcgttatggtgtcctccag

SEQ ID NO: 1867607 - DNA, 25 bp, Homo sapien
aggtctcgacccacatcttccaggt

SEQ ID NO: 1867608 - DNA, 25 bp, Homo sapien
gaagcctgccatctcgcttcgtgga

SEQ ID NO: 1867609 - DNA, 25 bp, Homo sapien
catgcgggcgaccttcgaatggccc

SEQ ID NO: 1867610 - DNA, 25 bp, Homo sapien
aagaagttcagaaaggcggccctca

SEQ ID NO: 1867611 - DNA, 25 bp, Homo sapien
ggttcatgcccgcattgacaaaaag

SEQ ID NO: 1867612 - DNA, 25 bp, Homo sapien
tggccatggcggtcccgaaagaagt

SEQ ID NO: 1867613 - DNA, 25 bp, Homo sapien
gatgatgttacccttgcccaagcag

SEQ ID NO: 1867614 - DNA, 25 bp, Homo sapien
ctgaagacgatgatgttacccttgc

SEQ ID NO: 1867615 - DNA, 25 bp, Homo sapien
gacgatgatgttacccttgcccaag

SEQ ID NO: 1867616 - DNA, 25 bp, Homo sapien
tgatgttacccttgcccaagcaggg

SEQ ID NO: 1867617 - DNA, 25 bp, Homo sapien
aatgtggaccacaagttcctctctg

SEQ ID NO: 1867618 - DNA, 25 bp, Homo sapien
agcgagcagtccagtcgtcataaat

SEQ ID NO: 1867619 - DNA, 25 bp, Homo sapien
gcagtccagtcgtcataaatgtgga

SEQ ID NO: 1867620 - DNA, 25 bp, Homo sapien
agcccacaacgaaccagcgagcagt

SEQ ID NO: 1867621 - DNA, 25 bp, Homo sapien
tccttcagcaccccaaataactggg

SEQ ID NO: 1867622 - DNA, 25 bp, Homo sapien
ccttcagcaccccaaataactggga

SEQ ID NO: 1867623 - DNA, 25 bp, Homo sapien
gttgcattgttacttatggcacacg

SEQ ID NO: 1867624 - DNA, 25 bp, Homo sapien
acacgattagggcttctcatgtctg

SEQ ID NO: 1867625 - DNA, 25 bp, Homo sapien
tacatgtataaaccccagaatacca

SEQ ID NO: 1867626 - DNA, 25 bp, Homo sapien
ttgtacattacctttcatatgcaaa

SEQ ID NO: 1867627 - DNA, 25 bp, Homo sapien
catcaggggaggaactaggtaagaa

SEQ ID NO: 1867628 - DNA, 25 bp, Homo sapien
gaagagggatcacagtttgcagaac

SEQ ID NO: 1867629 - DNA, 25 bp, Homo sapien
gggtgccttgggagataggacatca

SEQ ID NO: 1867630 - DNA, 25 bp, Homo sapien
gcagaacagtaagcgctggagctcc

SEQ ID NO: 1867631 - DNA, 25 bp, Homo sapien
tacagtgtactgttattcactataa

SEQ ID NO: 1867632 - DNA, 25 bp, Homo sapien
cccttagcaatgttcaaatgtacag

SEQ ID NO: 1867633 - DNA, 25 bp, Homo sapien
tttgacagatatctccctggttccc

SEQ ID NO: 1867634 - DNA, 25 bp, Homo sapien
ctaagtcaagctggttaacatgggc

SEQ ID NO: 1867635 - DNA, 25 bp, Homo sapien
gctgccatgaactttggaaccgtga

SEQ ID NO: 1867636 - DNA, 25 bp, Homo sapien
gaaccgtgaatctaaattatggccc

SEQ ID NO: 1867637 - DNA, 25 bp, Homo sapien
gatgaagtccagctttgtcgtggct

SEQ ID NO: 1867638 - DNA, 25 bp, Homo sapien
ctgcctatcaagcaagatgaagtcc

SEQ ID NO: 1867639 - DNA, 25 bp, Homo sapien
tatgagagcataccatgctgtgtcc

SEQ ID NO: 1867640 - DNA, 25 bp, Homo sapien
cttctgaattgtaaccaagtccatg

SEQ ID NO: 1867641 - DNA, 25 bp, Homo sapien
ccttgccagacttttgtgtgtaaaa

SEQ ID NO: 1867642 - DNA, 25 bp, Homo sapien
gaattgagtttagaaccttgccaga

SEQ ID NO: 1867643 - DNA, 25 bp, Homo sapien
tgcttaatgtgtggagaacctcgtt

SEQ ID NO: 1867644 - DNA, 25 bp, Homo sapien
tacttgtagctcttatgaggacccc

SEQ ID NO: 1867645 - DNA, 25 bp, Homo sapien
tactgcctatctaccacgtactgga

SEQ ID NO: 1867646 - DNA, 25 bp, Homo sapien
caaaattggctgcacagtagatctc

SEQ ID NO: 1867647 - DNA, 25 bp, Homo sapien
acttgtggtacaggagaggaattca

SEQ ID NO: 1867648 - DNA, 25 bp, Homo sapien
gaacagacatcctgatacaaccagg

SEQ ID NO: 1867649 - DNA, 25 bp, Homo sapien
tggacctgcgtctcatcagagtaga

SEQ ID NO: 1867650 - DNA, 25 bp, Homo sapien
gacccttataggcactgacagattt

SEQ ID NO: 1867651 - DNA, 25 bp, Homo sapien
gtggtgtgatctaggttcactgcaa

SEQ ID NO: 1867652 - DNA, 25 bp, Homo sapien
gctgtgttgtccaggctggagtgca

SEQ ID NO: 1867653 - DNA, 25 bp, Homo sapien
aggcgtgtgccaccttgcctagcta

SEQ ID NO: 1867654 - DNA, 25 bp, Homo sapien
ttttttgctatggagtcttgctgtg

SEQ ID NO: 1867655 - DNA, 25 bp, Homo sapien
agcctaattttaaagtgctgcctgt

SEQ ID NO: 1867656 - DNA, 25 bp, Homo sapien
aagcctaattttaaagtgctgcctg

SEQ ID NO: 1867657 - DNA, 25 bp, Homo sapien
tataccctgtgccagagtcttagag

SEQ ID NO: 1867658 - DNA, 25 bp, Homo sapien
gacatcaccaaaaacgtttgcccag

SEQ ID NO: 1867659 - DNA, 25 bp, Homo sapien
tagactggacgatcaaagagacctc

SEQ ID NO: 1867660 - DNA, 25 bp, Homo sapien
tacagtatcagttggctacaagctc

SEQ ID NO: 1867661 - DNA, 25 bp, Homo sapien
gctgtctaataaaaaacgacatcaa

SEQ ID NO: 1867662 - DNA, 25 bp, Homo sapien
gtgttaagcatgttaaagtctcagt

SEQ ID NO: 1867663 - DNA, 25 bp, Homo sapien
aagtctcagtaactttgggatagaa

SEQ ID NO: 1867664 - DNA, 25 bp, Homo sapien
tgcagacttaatgttggccaaccat

SEQ ID NO: 1867665 - DNA, 25 bp, Homo sapien
taagcagttataacatgggaatgat

SEQ ID NO: 1867666 - DNA, 25 bp, Homo sapien
tcatgaaaggttgaaagtctgtact

SEQ ID NO: 1867667 - DNA, 25 bp, Homo sapien
tgatattgggattttgctagctctc

SEQ ID NO: 1867668 - DNA, 25 bp, Homo sapien
gctctctaaagtaaataggataact

SEQ ID NO: 1867669 - DNA, 25 bp, Homo sapien
tcacccagactgatgcctcattctg

SEQ ID NO: 1867670 - DNA, 25 bp, Homo sapien
acccagactgatgcctcattctggt

SEQ ID NO: 1867671 - DNA, 25 bp, Homo sapien
cacccagactgatgcctcattctgg

SEQ ID NO: 1867672 - DNA, 25 bp, Homo sapien
atcgaggcctgcagcgtcactatgg

SEQ ID NO: 1867673 - DNA, 25 bp, Homo sapien
caggcagggtagactcgagagtcag

SEQ ID NO: 1867674 - DNA, 25 bp, Homo sapien
cagcgtcactatgggccatggtgtc

SEQ ID NO: 1867675 - DNA, 25 bp, Homo sapien
gacactgtgaacttcagggcatcga

SEQ ID NO: 1867676 - DNA, 25 bp, Homo sapien
tcgtctcagacgtccttggcattgg

SEQ ID NO: 1867677 - DNA, 25 bp, Homo sapien
gaaagataccatgggtgagcctcac

SEQ ID NO: 1867678 - DNA, 25 bp, Homo sapien
ggaaagctttaataccgcccatgcc

SEQ ID NO: 1867679 - DNA, 25 bp, Homo sapien
gcttggtgaaccagaagcgtaaccc

SEQ ID NO: 1867680 - DNA, 25 bp, Homo sapien
tgcccctacagacttgggcccgcat

SEQ ID NO: 1867681 - DNA, 25 bp, Homo sapien
ccctcaatgcccctacagacttggg

SEQ ID NO: 1867682 - DNA, 25 bp, Homo sapien
ggcccgcatccctccttctgtcgca

SEQ ID NO: 1867683 - DNA, 25 bp, Homo sapien
ggggacgtggccctcaatgccccta

SEQ ID NO: 1867684 - DNA, 25 bp, Homo sapien
cgatgccaggagagtgccggtttat

SEQ ID NO: 1867685 - DNA, 25 bp, Homo sapien
agtgccggtttatggggcagccaca

SEQ ID NO: 1867686 - DNA, 25 bp, Homo sapien
ccacacgtggccacgtgagggcgat

SEQ ID NO: 1867687 - DNA, 25 bp, Homo sapien
cacgtgagggcgatgccaggagagt

SEQ ID NO: 1867688 - DNA, 25 bp, Homo sapien
gggtcaggggatggctgcaccactg

SEQ ID NO: 1867689 - DNA, 25 bp, Homo sapien
ctgcaccactgccaaggagtgtcca

SEQ ID NO: 1867690 - DNA, 25 bp, Homo sapien
caccactgccaaggagtgtccaggc

SEQ ID NO: 1867691 - DNA, 25 bp, Homo sapien
actgccaaggagtgtccaggctgct

SEQ ID NO: 1867692 - DNA, 25 bp, Homo sapien
attcctgtcgctggctccctctgtg

SEQ ID NO: 1867693 - DNA, 25 bp, Homo sapien
atattcctgtcgctggctccctctg

SEQ ID NO: 1867694 - DNA, 25 bp, Homo sapien
ttcctgtcgctggctccctctgtgc

SEQ ID NO: 1867695 - DNA, 25 bp, Homo sapien
tattcctgtcgctggctccctctgt

SEQ ID NO: 1867696 - DNA, 25 bp, Homo sapien
gtggcaaactccgttgtcagaggga

SEQ ID NO: 1867697 - DNA, 25 bp, Homo sapien
tggcaaactccgttgtcagagggat

SEQ ID NO: 1867698 - DNA, 25 bp, Homo sapien
ggcaaactccgttgtcagagggatg

SEQ ID NO: 1867699 - DNA, 25 bp, Homo sapien
ggtcaggggactagtcgcagcagcc

SEQ ID NO: 1867700 - DNA, 25 bp, Homo sapien
ggggactagtcgcagcagccctcat

SEQ ID NO: 1867701 - DNA, 25 bp, Homo sapien
tcaggggactagtcgcagcagccct

SEQ ID NO: 1867702 - DNA, 25 bp, Homo sapien
caggggactagtcgcagcagccctc

SEQ ID NO: 1867703 - DNA, 25 bp, Homo sapien
ccaacctgttcacggtatgcctttt

SEQ ID NO: 1867704 - DNA, 25 bp, Homo sapien
ttccaacctgttcacggtatgcctt

SEQ ID NO: 1867705 - DNA, 25 bp, Homo sapien
agcttccaacctgttcacggtatgc

SEQ ID NO: 1867706 - DNA, 25 bp, Homo sapien
cctgttcacggtatgccttttcctg

SEQ ID NO: 1867707 - DNA, 25 bp, Homo sapien
ggtcgtgcatccagctgtggccagt

SEQ ID NO: 1867708 - DNA, 25 bp, Homo sapien
agtggcaggatcatgtagcagagac

SEQ ID NO: 1867709 - DNA, 25 bp, Homo sapien
cgtgcatccagctgtggccagtggc

SEQ ID NO: 1867710 - DNA, 25 bp, Homo sapien
tggcaggatcatgtagcagagacat

SEQ ID NO: 1867711 - DNA, 25 bp, Homo sapien
tccacttggccatatctgtagggga

SEQ ID NO: 1867712 - DNA, 25 bp, Homo sapien
tggccatatctgtaggggacactgc

SEQ ID NO: 1867713 - DNA, 25 bp, Homo sapien
ctccattcccgtgcacactggtggg

SEQ ID NO: 1867714 - DNA, 25 bp, Homo sapien
actggctgcccgaggacttggctgg

SEQ ID NO: 1867715 - DNA, 25 bp, Homo sapien
cctttctgggccttcgtgtccatgg

SEQ ID NO: 1867716 - DNA, 25 bp, Homo sapien
tgtggtcctcgtgggttcttgccct

SEQ ID NO: 1867717 - DNA, 25 bp, Homo sapien
tccatgggggttggactgtgaaatt

SEQ ID NO: 1867718 - DNA, 25 bp, Homo sapien
gccactgtggtcctcgtgggttctt

SEQ ID NO: 1867719 - DNA, 25 bp, Homo sapien
gatccgtggtactgttgcctgtgca

SEQ ID NO: 1867720 - DNA, 25 bp, Homo sapien
catgagcacgccttgatccgtggta

SEQ ID NO: 1867721 - DNA, 25 bp, Homo sapien
catccatactggtggcccatgagca

SEQ ID NO: 1867722 - DNA, 25 bp, Homo sapien
tcagcttttagagctaccttctcaa

SEQ ID NO: 1867723 - DNA, 25 bp, Homo sapien
gcactcgggtcttgtttcttgccag

SEQ ID NO: 1867724 - DNA, 25 bp, Homo sapien
tagtggccttgttgattcgtcttgg

SEQ ID NO: 1867725 - DNA, 25 bp, Homo sapien
tcagcgctgtgtggcttccaagttc

SEQ ID NO: 1867726 - DNA, 25 bp, Homo sapien
tggctgctgctgcaaactcggctgc

SEQ ID NO: 1867727 - DNA, 25 bp, Homo sapien
gaaacactgccttagaaacctccaa

SEQ ID NO: 1867728 - DNA, 25 bp, Homo sapien
tcttttgaaacgtgacatcttgaca

SEQ ID NO: 1867729 - DNA, 25 bp, Homo sapien
tacttttcctgagttcaacctgtgc

SEQ ID NO: 1867730 - DNA, 25 bp, Homo sapien
gcaacagttgcttgggttcctcatt

SEQ ID NO: 1867731 - DNA, 25 bp, Homo sapien
tgtgccaccgaagaatctggaacat

SEQ ID NO: 1867732 - DNA, 25 bp, Homo sapien
tggaacattctattagcaacaatag

SEQ ID NO: 1867733 - DNA, 25 bp, Homo sapien
gcaacaatagacaactgctgaatga

SEQ ID NO: 1867734 - DNA, 25 bp, Homo sapien
ctgctgaatgatacggttataaata

SEQ ID NO: 1867735 - DNA, 25 bp, Homo sapien
gaaggctgtcgtctcatctatagag

SEQ ID NO: 1867736 - DNA, 25 bp, Homo sapien
tatagtcccatggaccgagaagctg

SEQ ID NO: 1867737 - DNA, 25 bp, Homo sapien
ggactggagccctgcgttctacctt

SEQ ID NO: 1867738 - DNA, 25 bp, Homo sapien
ttgtgatgtgccaagcccaacattc

SEQ ID NO: 1867739 - DNA, 25 bp, Homo sapien
ttctgacaagcgcattggagcccct

SEQ ID NO: 1867740 - DNA, 25 bp, Homo sapien
gcgagaatcactgctaaccttcggg

SEQ ID NO: 1867741 - DNA, 25 bp, Homo sapien
tagaaacaggatcgtgctgcacaga

SEQ ID NO: 1867742 - DNA, 25 bp, Homo sapien
gatttatggccacacttcatgggac

SEQ ID NO: 1867743 - DNA, 25 bp, Homo sapien
ggtcccgttctgtgctgtcaaatca

SEQ ID NO: 1867744 - DNA, 25 bp, Homo sapien
ctaattgactgcttaccatgggcca

SEQ ID NO: 1867745 - DNA, 25 bp, Homo sapien
ttcatagatctgcttcgaagctgga

SEQ ID NO: 1867746 - DNA, 25 bp, Homo sapien
tgtcaaatcacccagagtgcaagct

SEQ ID NO: 1867747 - DNA, 25 bp, Homo sapien
aattccataattctcacccgagcca

SEQ ID NO: 1867748 - DNA, 25 bp, Homo sapien
gccatcagttgccaaggactttgtt

SEQ ID NO: 1867749 - DNA, 25 bp, Homo sapien
gccccagcatgcagacgagaggcca

SEQ ID NO: 1867750 - DNA, 25 bp, Homo sapien
ttagcaattccataattctcacccg

SEQ ID NO: 1867751 - DNA, 25 bp, Homo sapien
gctgagtttgacaaaccaccatggc

SEQ ID NO: 1867752 - DNA, 25 bp, Homo sapien
cagggccagccaagtgtgattggct

SEQ ID NO: 1867753 - DNA, 25 bp, Homo sapien
agggccagccaagtgtgattggctg

SEQ ID NO: 1867754 - DNA, 25 bp, Homo sapien
tctgtgctgggccttaaaacgtggg

SEQ ID NO: 1867755 - DNA, 25 bp, Homo sapien
tattaggggcaatatcaggctccag

SEQ ID NO: 1867756 - DNA, 25 bp, Homo sapien
acgtgggtaacattggagcacatgg

SEQ ID NO: 1867757 - DNA, 25 bp, Homo sapien
gggacagaatctgtgctgggcctta

SEQ ID NO: 1867758 - DNA, 25 bp, Homo sapien
aatctttgtggggtgctaagagctt

SEQ ID NO: 1867759 - DNA, 25 bp, Homo sapien
agagcttctgtagatcatctaccat

SEQ ID NO: 1867760 - DNA, 25 bp, Homo sapien
ctttgtggggtgctaagagcttctg

SEQ ID NO: 1867761 - DNA, 25 bp, Homo sapien
ctgtgaggaatctttgtggggtgct

SEQ ID NO: 1867762 - DNA, 25 bp, Homo sapien
tggtttctagaagaatcaacttcag

SEQ ID NO: 1867763 - DNA, 25 bp, Homo sapien
gaggtacagaggaccaatactttcc

SEQ ID NO: 1867764 - DNA, 25 bp, Homo sapien
gctgtccgggcaagtggtaaccatg

SEQ ID NO: 1867765 - DNA, 25 bp, Homo sapien
cagaaagacgtagtctctggatgca

SEQ ID NO: 1867766 - DNA, 25 bp, Homo sapien
gcaacatggaagtaacctggagaca

SEQ ID NO: 1867767 - DNA, 25 bp, Homo sapien
caggggcaacatggaagtaacctgg

SEQ ID NO: 1867768 - DNA, 25 bp, Homo sapien
caacatggaagtaacctggagacat

SEQ ID NO: 1867769 - DNA, 25 bp, Homo sapien
gggcaacatggaagtaacctggaga

SEQ ID NO: 1867770 - DNA, 25 bp, Homo sapien
agactacttctataggcccttctga

SEQ ID NO: 1867771 - DNA, 25 bp, Homo sapien
cttctgataccaacagcatctcaca

SEQ ID NO: 1867772 - DNA, 25 bp, Homo sapien
tcctctttgcagactacttctatag

SEQ ID NO: 1867773 - DNA, 25 bp, Homo sapien
cagatgttctgacgatcttgggttc

SEQ ID NO: 1867774 - DNA, 25 bp, Homo sapien
ttgatggtgtctctgttatctctga

SEQ ID NO: 1867775 - DNA, 25 bp, Homo sapien
gatggtgtctctgttatctctgagt

SEQ ID NO: 1867776 - DNA, 25 bp, Homo sapien
ggtgtctctgttatctctgagtttc

SEQ ID NO: 1867777 - DNA, 25 bp, Homo sapien
ctagttgatggtgtctctgttatct

SEQ ID NO: 1867778 - DNA, 25 bp, Homo sapien
ctatttctggatctgtattgaccca

SEQ ID NO: 1867779 - DNA, 25 bp, Homo sapien
gggcttgttactttgcacttgtaca

SEQ ID NO: 1867780 - DNA, 25 bp, Homo sapien
tcctgcaggtatgggcttgttactt

SEQ ID NO: 1867781 - DNA, 25 bp, Homo sapien
ctgtattgacccagtctgtggctcc

SEQ ID NO: 1867782 - DNA, 25 bp, Homo sapien
gagccccgggggatctacgctcctg

SEQ ID NO: 1867783 - DNA, 25 bp, Homo sapien
gggggatctacgctcctgcagggct

SEQ ID NO: 1867784 - DNA, 25 bp, Homo sapien
cctggagccccgggggatctacgct

SEQ ID NO: 1867785 - DNA, 25 bp, Homo sapien
cccgggggatctacgctcctgcagg

SEQ ID NO: 1867786 - DNA, 25 bp, Homo sapien
gggacagtcagaggggtgaagcctg

SEQ ID NO: 1867787 - DNA, 25 bp, Homo sapien
cagggacagtcagaggggtgaagcc

SEQ ID NO: 1867788 - DNA, 25 bp, Homo sapien
tcagggacagtcagaggggtgaagc

SEQ ID NO: 1867789 - DNA, 25 bp, Homo sapien
acagtcagaggggtgaagcctgcct

SEQ ID NO: 1867790 - DNA, 25 bp, Homo sapien
aagggagaggatggggttggagcct

SEQ ID NO: 1867791 - DNA, 25 bp, Homo sapien
gagaggatggggttggagcctgtcc

SEQ ID NO: 1867792 - DNA, 25 bp, Homo sapien
gggcagaccagaggggtgggtgagc

SEQ ID NO: 1867793 - DNA, 25 bp, Homo sapien
cagaccagaggggtgggtgagcagg

SEQ ID NO: 1867794 - DNA, 25 bp, Homo sapien
tcggccttgaggctgccgatttcag

SEQ ID NO: 1867795 - DNA, 25 bp, Homo sapien
ggagctgaaacctcggccttgaggc

SEQ ID NO: 1867796 - DNA, 25 bp, Homo sapien
ctggagctgaaacctcggccttgag

SEQ ID NO: 1867797 - DNA, 25 bp, Homo sapien
tgccgatttcagtccggagggagcc

SEQ ID NO: 1867798 - DNA, 25 bp, Homo sapien
ctccttctacaggtcttgtctgcag

SEQ ID NO: 1867799 - DNA, 25 bp, Homo sapien
tcacgaagataaggcagcacttcag

SEQ ID NO: 1867800 - DNA, 25 bp, Homo sapien
ttttcacgaagataaggcagcactt

SEQ ID NO: 1867801 - DNA, 25 bp, Homo sapien
ctctgaggccggcagcccaggagct

SEQ ID NO: 1867802 - DNA, 25 bp, Homo sapien
tggcaacagagctttgtatgagccc

SEQ ID NO: 1867803 - DNA, 25 bp, Homo sapien
ggcaacagagctttgtatgagcccc

SEQ ID NO: 1867804 - DNA, 25 bp, Homo sapien
gatggcaacagagctttgtatgagc

SEQ ID NO: 1867805 - DNA, 25 bp, Homo sapien
atggcaacagagctttgtatgagcc

SEQ ID NO: 1867806 - DNA, 25 bp, Homo sapien
ctgttttcagggttgggcagcttag

SEQ ID NO: 1867807 - DNA, 25 bp, Homo sapien
ctcttggggagcatagccttaggaa

SEQ ID NO: 1867808 - DNA, 25 bp, Homo sapien
tcctgttttcagggttgggcagctt

SEQ ID NO: 1867809 - DNA, 25 bp, Homo sapien
agccttaggaaagagctccagtgtc

SEQ ID NO: 1867810 - DNA, 25 bp, Homo sapien
tttatattaagattcactcctggcg

SEQ ID NO: 1867811 - DNA, 25 bp, Homo sapien
tgaaggtacaaagttcccacatgcc

SEQ ID NO: 1867812 - DNA, 25 bp, Homo sapien
tcctggcgttgtacatttaatgggc

SEQ ID NO: 1867813 - DNA, 25 bp, Homo sapien
cacatagttactgagctgaaggtac

SEQ ID NO: 1867814 - DNA, 25 bp, Homo sapien
gcgcccagcctgtggacatgttttt

SEQ ID NO: 1867815 - DNA, 25 bp, Homo sapien
ccgcgcccagcctgtggacatgttt

SEQ ID NO: 1867816 - DNA, 25 bp, Homo sapien
gcccagcctgtggacatgtttttaa

SEQ ID NO: 1867817 - DNA, 25 bp, Homo sapien
cccagcctgtggacatgtttttaaa

SEQ ID NO: 1867818 - DNA, 25 bp, Homo sapien
ggagttgtatgcctttgattgagtc

SEQ ID NO: 1867819 - DNA, 25 bp, Homo sapien
tgtatgcctttgattgagtctaatt

SEQ ID NO: 1867820 - DNA, 25 bp, Homo sapien
tttggagttgtatgcctttgattga

SEQ ID NO: 1867821 - DNA, 25 bp, Homo sapien
gttgtatgcctttgattgagtctaa

SEQ ID NO: 1867822 - DNA, 25 bp, Homo sapien
tgctctcctggaacgaccaaggtga

SEQ ID NO: 1867823 - DNA, 25 bp, Homo sapien
tacagactccatcgtacaggtgaga

SEQ ID NO: 1867824 - DNA, 25 bp, Homo sapien
taattccaagagctagtacagactc

SEQ ID NO: 1867825 - DNA, 25 bp, Homo sapien
agataccttgtgaaagtcagaggcc

SEQ ID NO: 1867826 - DNA, 25 bp, Homo sapien
tgctgctcctaaattgactcatgtg

SEQ ID NO: 1867827 - DNA, 25 bp, Homo sapien
cactgccccagtggagtctaagtca

SEQ ID NO: 1867828 - DNA, 25 bp, Homo sapien
gactcatgtgcacgtcacacagatg

SEQ ID NO: 1867829 - DNA, 25 bp, Homo sapien
cagttttcagtgatagctctgctgc

SEQ ID NO: 1867830 - DNA, 25 bp, Homo sapien
gaggatggatgagaagatgggcaca

SEQ ID NO: 1867831 - DNA, 25 bp, Homo sapien
gggcacaatcttcagatcctgaaca

SEQ ID NO: 1867832 - DNA, 25 bp, Homo sapien
tattcttgccttgaccagccagacc

SEQ ID NO: 1867833 - DNA, 25 bp, Homo sapien
atgagttattcttgccttgaccagc

SEQ ID NO: 1867834 - DNA, 25 bp, Homo sapien
agttattcttgccttgaccagccag

SEQ ID NO: 1867835 - DNA, 25 bp, Homo sapien
ttcttgccttgaccagccagaccat

SEQ ID NO: 1867836 - DNA, 25 bp, Homo sapien
gggtctgagcttccacactgatttg

SEQ ID NO: 1867837 - DNA, 25 bp, Homo sapien
tgcccaaacccaaaggttgagctgg

SEQ ID NO: 1867838 - DNA, 25 bp, Homo sapien
gatttgtaacccatttcaccttctg

SEQ ID NO: 1867839 - DNA, 25 bp, Homo sapien
tctgccacccgaagataatctgaac

SEQ ID NO: 1867840 - DNA, 25 bp, Homo sapien
ttcctccacgaggacaaggagctcc

SEQ ID NO: 1867841 - DNA, 25 bp, Homo sapien
gatgcagggaattgctttacagcag

SEQ ID NO: 1867842 - DNA, 25 bp, Homo sapien
tggagactgcacatagccactcgct

SEQ ID NO: 1867843 - DNA, 25 bp, Homo sapien
tgttcatagcatgtactccctggta

SEQ ID NO: 1867844 - DNA, 25 bp, Homo sapien
cactttgcggcatctcctgttatcg

SEQ ID NO: 1867845 - DNA, 25 bp, Homo sapien
tgcggcatctcctgttatcgctctt

SEQ ID NO: 1867846 - DNA, 25 bp, Homo sapien
tggaagccacactttgcggcatctc

SEQ ID NO: 1867847 - DNA, 25 bp, Homo sapien
catctcctgttatcgctcttttttc

SEQ ID NO: 1867848 - DNA, 25 bp, Homo sapien
gagcaataatggtatccacttctgt

SEQ ID NO: 1867849 - DNA, 25 bp, Homo sapien
tcctcgatgaattgtccctggagag

SEQ ID NO: 1867850 - DNA, 25 bp, Homo sapien
tgtccctggagagcaataatggtat

SEQ ID NO: 1867851 - DNA, 25 bp, Homo sapien
gcagatgccatattgttcctcgatg

SEQ ID NO: 1867852 - DNA, 25 bp, Homo sapien
tttctaacaagcgtcctgggctgct

SEQ ID NO: 1867853 - DNA, 25 bp, Homo sapien
tgcttgttacttagccaggcaggca

SEQ ID NO: 1867854 - DNA, 25 bp, Homo sapien
tcttgggaaacagcttcagtgcagg

SEQ ID NO: 1867855 - DNA, 25 bp, Homo sapien
gattccaacgcccagtcagggaaga

SEQ ID NO: 1867856 - DNA, 25 bp, Homo sapien
gagtattcaaccaggactggtccca

SEQ ID NO: 1867857 - DNA, 25 bp, Homo sapien
ccacctggatgtgagtattcaacca

SEQ ID NO: 1867858 - DNA, 25 bp, Homo sapien
gttcactcaagcctatgtcatgctg

SEQ ID NO: 1867859 - DNA, 25 bp, Homo sapien
caagcctatgtcatgctgtggccac

SEQ ID NO: 1867860 - DNA, 25 bp, Homo sapien
caggtggcgcccgagtctggccgaa

SEQ ID NO: 1867861 - DNA, 25 bp, Homo sapien
gagtctggccgaacgctgagctccc

SEQ ID NO: 1867862 - DNA, 25 bp, Homo sapien
gagctcccctcggtctgatttctga

SEQ ID NO: 1867863 - DNA, 25 bp, Homo sapien
gctcccctcggtctgatttctgagg

SEQ ID NO: 1867864 - DNA, 25 bp, Homo sapien
gtattccaccttgagccaaagcctg

SEQ ID NO: 1867865 - DNA, 25 bp, Homo sapien
acacagtggcggcaaggtctgaccg

SEQ ID NO: 1867866 - DNA, 25 bp, Homo sapien
tgtaatctgtatcatgcaaagggac

SEQ ID NO: 1867867 - DNA, 25 bp, Homo sapien
ggtaattggtcttgggctcccagtc

SEQ ID NO: 1867868 - DNA, 25 bp, Homo sapien
tgaacaccactgacacaggcttcca

SEQ ID NO: 1867869 - DNA, 25 bp, Homo sapien
tgagctttttagagtggtgaacacc

SEQ ID NO: 1867870 - DNA, 25 bp, Homo sapien
tgccagaactcattagggagagaac

SEQ ID NO: 1867871 - DNA, 25 bp, Homo sapien
tgcaacaaggattcagcccaatgtg

SEQ ID NO: 1867872 - DNA, 25 bp, Homo sapien
taatggcgcaggtatagcaaatggc

SEQ ID NO: 1867873 - DNA, 25 bp, Homo sapien
atggcgcaggtatagcaaatggcag

SEQ ID NO: 1867874 - DNA, 25 bp, Homo sapien
ctgctaatggcgcaggtatagcaaa

SEQ ID NO: 1867875 - DNA, 25 bp, Homo sapien
gctaatggcgcaggtatagcaaatg

SEQ ID NO: 1867876 - DNA, 25 bp, Homo sapien
tcgtcagtgactcggatactcaggg

SEQ ID NO: 1867877 - DNA, 25 bp, Homo sapien
attccaacaaagatgccctcagcct

SEQ ID NO: 1867878 - DNA, 25 bp, Homo sapien
ctagaacattggaaccaaacattcc

SEQ ID NO: 1867879 - DNA, 25 bp, Homo sapien
cttggcccactgagcatgttcgtca

SEQ ID NO: 1867880 - DNA, 25 bp, Homo sapien
catgccctctgcctgtcctattcct

SEQ ID NO: 1867881 - DNA, 25 bp, Homo sapien
ctgcctgtcctattcctttttccat

SEQ ID NO: 1867882 - DNA, 25 bp, Homo sapien
ccctctgcctgtcctattccttttt

SEQ ID NO: 1867883 - DNA, 25 bp, Homo sapien
tctgcctgtcctattcctttttcca

SEQ ID NO: 1867884 - DNA, 25 bp, Homo sapien
acagcaggctcgacaccccctggtt

SEQ ID NO: 1867885 - DNA, 25 bp, Homo sapien
cagcaggctcgacaccccctggttt

SEQ ID NO: 1867886 - DNA, 25 bp, Homo sapien
ttacagcaggctcgacaccccctgg

SEQ ID NO: 1867887 - DNA, 25 bp, Homo sapien
agcaggctcgacaccccctggtttc

SEQ ID NO: 1867888 - DNA, 25 bp, Homo sapien
ttccacagttcccaaacacgtccag

SEQ ID NO: 1867889 - DNA, 25 bp, Homo sapien
tccacagttcccaaacacgtccagg

SEQ ID NO: 1867890 - DNA, 25 bp, Homo sapien
gctgcttccacagttcccaaacacg

SEQ ID NO: 1867891 - DNA, 25 bp, Homo sapien
tagcgaatacacatgaggctcagcc

SEQ ID NO: 1867892 - DNA, 25 bp, Homo sapien
ggatgtaatccccaagtgagaccaa

SEQ ID NO: 1867893 - DNA, 25 bp, Homo sapien
gacaggaggtgcatgcactgctgcc

SEQ ID NO: 1867894 - DNA, 25 bp, Homo sapien
caattggccgaaacctttgctggag

SEQ ID NO: 1867895 - DNA, 25 bp, Homo sapien
ggctcctcttctagggttgctgatt

SEQ ID NO: 1867896 - DNA, 25 bp, Homo sapien
ttgggctcctcttctagggttgctg

SEQ ID NO: 1867897 - DNA, 25 bp, Homo sapien
tgggctcctcttctagggttgctga

SEQ ID NO: 1867898 - DNA, 25 bp, Homo sapien
ctcctcttctagggttgctgattct

SEQ ID NO: 1867899 - DNA, 25 bp, Homo sapien
ggcctgccccttggaggtgggaaca

SEQ ID NO: 1867900 - DNA, 25 bp, Homo sapien
gacagggcctgccccttggaggtgg

SEQ ID NO: 1867901 - DNA, 25 bp, Homo sapien
cagcaggggcctgagtgtgattctc

SEQ ID NO: 1867902 - DNA, 25 bp, Homo sapien
ctgccccttggaggtgggaacagca

SEQ ID NO: 1867903 - DNA, 25 bp, Homo sapien
aacccatagctctgatcatccttgg

SEQ ID NO: 1867904 - DNA, 25 bp, Homo sapien
tctgaactcacaacggtaggagcca

SEQ ID NO: 1867905 - DNA, 25 bp, Homo sapien
ccaagttctgaactcacaacggtag

SEQ ID NO: 1867906 - DNA, 25 bp, Homo sapien
ggccttttgtaacccatagctctga

SEQ ID NO: 1867907 - DNA, 25 bp, Homo sapien
tcatggtgagaaaagcttttcatcc

SEQ ID NO: 1867908 - DNA, 25 bp, Homo sapien
tcctccttaggacactgtgggaaga

SEQ ID NO: 1867909 - DNA, 25 bp, Homo sapien
ctccttaggacactgtgggaagaaa

SEQ ID NO: 1867910 - DNA, 25 bp, Homo sapien
gggtcctccttaggacactgtggga

SEQ ID NO: 1867911 - DNA, 25 bp, Homo sapien
agtgcaccatagtgcctgccttggg

SEQ ID NO: 1867912 - DNA, 25 bp, Homo sapien
tgggctttggtggaccacagcaggc

SEQ ID NO: 1867913 - DNA, 25 bp, Homo sapien
caaactccaggcaatggagccagct

SEQ ID NO: 1867914 - DNA, 25 bp, Homo sapien
ccaagtgcaccatagtgcctgcctt

SEQ ID NO: 1867915 - DNA, 25 bp, Homo sapien
catgcatcctagttagatactccca

SEQ ID NO: 1867916 - DNA, 25 bp, Homo sapien
tgcatcctagttagatactcccata

SEQ ID NO: 1867917 - DNA, 25 bp, Homo sapien
catactccatgcatcctagttagat

SEQ ID NO: 1867918 - DNA, 25 bp, Homo sapien
gcatcctagttagatactcccatac

SEQ ID NO: 1867919 - DNA, 25 bp, Homo sapien
aacgggggctcttccatgtggccca

SEQ ID NO: 1867920 - DNA, 25 bp, Homo sapien
tgttaacgggggctcttccatgtgg

SEQ ID NO: 1867921 - DNA, 25 bp, Homo sapien
tgaagtccacatcgctggtccttaa

SEQ ID NO: 1867922 - DNA, 25 bp, Homo sapien
caggtttgaagagcgagctgtggtc

SEQ ID NO: 1867923 - DNA, 25 bp, Homo sapien
ggaatttggtggaacttagtgagaa

SEQ ID NO: 1867924 - DNA, 25 bp, Homo sapien
tggtggaacttagtgagaaatagtg

SEQ ID NO: 1867925 - DNA, 25 bp, Homo sapien
tgaggaatttggtggaacttagtga

SEQ ID NO: 1867926 - DNA, 25 bp, Homo sapien
gaacttagtgagaaatagtgtgtga

SEQ ID NO: 1867927 - DNA, 25 bp, Homo sapien
gaaagctgtttgtgtatctccacca

SEQ ID NO: 1867928 - DNA, 25 bp, Homo sapien
agagaaagctgtttgtgtatctcca

SEQ ID NO: 1867929 - DNA, 25 bp, Homo sapien
atctccaccactggcccagaggaca

SEQ ID NO: 1867930 - DNA, 25 bp, Homo sapien
ctgcatgaggcagcccacagttgcc

SEQ ID NO: 1867931 - DNA, 25 bp, Homo sapien
ggaaaggatggttcctgctttgctc

SEQ ID NO: 1867932 - DNA, 25 bp, Homo sapien
aaaggatggttcctgctttgctcat

SEQ ID NO: 1867933 - DNA, 25 bp, Homo sapien
aggggaaagtgtggttctcacaaga

SEQ ID NO: 1867934 - DNA, 25 bp, Homo sapien
gaaaggatggttcctgctttgctca

SEQ ID NO: 1867935 - DNA, 25 bp, Homo sapien
ttccaattgccatgtggaactgcca

SEQ ID NO: 1867936 - DNA, 25 bp, Homo sapien
ttttccaattgccatgtggaactgc

SEQ ID NO: 1867937 - DNA, 25 bp, Homo sapien
gtgtgcgctcctcggagtttttcca

SEQ ID NO: 1867938 - DNA, 25 bp, Homo sapien
ctggtgtgcgctcctcggagttttt

SEQ ID NO: 1867939 - DNA, 25 bp, Homo sapien
tgtgaccaagttgctccagggtagg

SEQ ID NO: 1867940 - DNA, 25 bp, Homo sapien
cacatcagtggtttctgcaagaatg

SEQ ID NO: 1867941 - DNA, 25 bp, Homo sapien
tagatgtgtgcatagaggccctgac

SEQ ID NO: 1867942 - DNA, 25 bp, Homo sapien
ccagggtaggcagattgctctcaaa

SEQ ID NO: 1867943 - DNA, 25 bp, Homo sapien
tctccaaggtgagtaaagcacaggt

SEQ ID NO: 1867944 - DNA, 25 bp, Homo sapien
ccatctgcctcaccatggaatcctg

SEQ ID NO: 1867945 - DNA, 25 bp, Homo sapien
ccaaggtgagtaaagcacaggtgtt

SEQ ID NO: 1867946 - DNA, 25 bp, Homo sapien
catctgcctcaccatggaatcctgt

SEQ ID NO: 1867947 - DNA, 25 bp, Homo sapien
acagtgtctgcaattggcagccaga

SEQ ID NO: 1867948 - DNA, 25 bp, Homo sapien
gccagaaggagtccgcaagaagcag

SEQ ID NO: 1867949 - DNA, 25 bp, Homo sapien
cctgatgatttgctcaacagtgtct

SEQ ID NO: 1867950 - DNA, 25 bp, Homo sapien
gctcccctgatgatttgctcaacag

SEQ ID NO: 1867951 - DNA, 25 bp, Homo sapien
tgagaccgcgccacaggaggaaggc

SEQ ID NO: 1867952 - DNA, 25 bp, Homo sapien
ccaggatctgggagcgcaaggtgag

SEQ ID NO: 1867953 - DNA, 25 bp, Homo sapien
gatctgggagcgcaaggtgagtgca

SEQ ID NO: 1867954 - DNA, 25 bp, Homo sapien
ctgcctggggcaatgatggcgtcag

SEQ ID NO: 1867955 - DNA, 25 bp, Homo sapien
taggtgagactgttgaggcaggaat

SEQ ID NO: 1867956 - DNA, 25 bp, Homo sapien
tgtcacatatatcagccgcaactcc

SEQ ID NO: 1867957 - DNA, 25 bp, Homo sapien
tgctaacccagagctccagattcct

SEQ ID NO: 1867958 - DNA, 25 bp, Homo sapien
cctgacatgaggtagtaggtgagac

SEQ ID NO: 1867959 - DNA, 25 bp, Homo sapien
ggcctgtccccggactgatggcggc

SEQ ID NO: 1867960 - DNA, 25 bp, Homo sapien
actgatggcggcagcattgttagtg

SEQ ID NO: 1867961 - DNA, 25 bp, Homo sapien
cccggactgatggcggcagcattgt

SEQ ID NO: 1867962 - DNA, 25 bp, Homo sapien
cctgtccccggactgatggcggcag

SEQ ID NO: 1867963 - DNA, 25 bp, Homo sapien
tggcttctgcgctgctgtagaaggt

SEQ ID NO: 1867964 - DNA, 25 bp, Homo sapien
tctgcgctgctgtagaaggtcccca

SEQ ID NO: 1867965 - DNA, 25 bp, Homo sapien
agcagagggccctgtcttggcttct

SEQ ID NO: 1867966 - DNA, 25 bp, Homo sapien
tgtcttggcttctgcgctgctgtag

SEQ ID NO: 1867967 - DNA, 25 bp, Homo sapien
taggtgatttgcttcctgaaagcat

SEQ ID NO: 1867968 - DNA, 25 bp, Homo sapien
cagagggtagggtttaggtgatttg

SEQ ID NO: 1867969 - DNA, 25 bp, Homo sapien
ctggcttgggtcagagggtagggtt

SEQ ID NO: 1867970 - DNA, 25 bp, Homo sapien
tagggtttaggtgatttgcttcctg

SEQ ID NO: 1867971 - DNA, 25 bp, Homo sapien
cttctagtccctgttgtctgttgac

SEQ ID NO: 1867972 - DNA, 25 bp, Homo sapien
aaaggcttctagtccctgttgtctg

SEQ ID NO: 1867973 - DNA, 25 bp, Homo sapien
ggcttctagtccctgttgtctgttg

SEQ ID NO: 1867974 - DNA, 25 bp, Homo sapien
ccaaaaaggcttctagtccctgttg

SEQ ID NO: 1867975 - DNA, 25 bp, Homo sapien
agacatatctgaagtggaatctcct

SEQ ID NO: 1867976 - DNA, 25 bp, Homo sapien
tgaagtggaatctcctacaattttg

SEQ ID NO: 1867977 - DNA, 25 bp, Homo sapien
ggaacatattaacatagctatacaa

SEQ ID NO: 1867978 - DNA, 25 bp, Homo sapien
gattttgggagtatgtcagatactg

SEQ ID NO: 1867979 - DNA, 25 bp, Homo sapien
tcctgctgatttatgctagacatgt

SEQ ID NO: 1867980 - DNA, 25 bp, Homo sapien
ctgagtcctgctgatttatgctaga

SEQ ID NO: 1867981 - DNA, 25 bp, Homo sapien
tcactctgagtcctgctgatttatg

SEQ ID NO: 1867982 - DNA, 25 bp, Homo sapien
tgctgatttatgctagacatgttga

SEQ ID NO: 1867983 - DNA, 25 bp, Homo sapien
ccagggcccaagtaaggagaaacat

SEQ ID NO: 1867984 - DNA, 25 bp, Homo sapien
cagggcccaagtaaggagaaacatg

SEQ ID NO: 1867985 - DNA, 25 bp, Homo sapien
gccagggcccaagtaaggagaaaca

SEQ ID NO: 1867986 - DNA, 25 bp, Homo sapien
cacaggaagagttcctgcactgact

SEQ ID NO: 1867987 - DNA, 25 bp, Homo sapien
cactgactgaatgcagcatggaggg

SEQ ID NO: 1867988 - DNA, 25 bp, Homo sapien
tgggccgggcactccgggatgagaa

SEQ ID NO: 1867989 - DNA, 25 bp, Homo sapien
catctccaccttattgtgataggcc

SEQ ID NO: 1867990 - DNA, 25 bp, Homo sapien
cattttttccaaccgcagaggcgat

SEQ ID NO: 1867991 - DNA, 25 bp, Homo sapien
ttttttccaaccgcagaggcgatgc

SEQ ID NO: 1867992 - DNA, 25 bp, Homo sapien
ttttccaaccgcagaggcgatgctg

SEQ ID NO: 1867993 - DNA, 25 bp, Homo sapien
agcattttttccaaccgcagaggcg

SEQ ID NO: 1867994 - DNA, 25 bp, Homo sapien
caaagacataatcgctgctgtaagg

SEQ ID NO: 1867995 - DNA, 25 bp, Homo sapien
gggatccactcacaaatctggatca

SEQ ID NO: 1867996 - DNA, 25 bp, Homo sapien
ggcagactgagtcctaagtaagttg

SEQ ID NO: 1867997 - DNA, 25 bp, Homo sapien
caaatctggatcaaggcaggcagac

SEQ ID NO: 1867998 - DNA, 25 bp, Homo sapien
gtctatgaggttgctgcaaggcatc

SEQ ID NO: 1867999 - DNA, 25 bp, Homo sapien
gacacaggtctatgaggttgctgca

SEQ ID NO: 1868000 - DNA, 25 bp, Homo sapien
cacctgacacaggtctatgaggttg

SEQ ID NO: 1868001 - DNA, 25 bp, Homo sapien
caggtctatgaggttgctgcaaggc

SEQ ID NO: 1868002 - DNA, 25 bp, Homo sapien
gacaatctgagactacataaaccac

SEQ ID NO: 1868003 - DNA, 25 bp, Homo sapien
tatcagtcttcctctaccatggatg

SEQ ID NO: 1868004 - DNA, 25 bp, Homo sapien
tcgatgggtgacaaactagtactat

SEQ ID NO: 1868005 - DNA, 25 bp, Homo sapien
gttctgggatcaggcatttctccaa

SEQ ID NO: 1868006 - DNA, 25 bp, Homo sapien
agtcactcaatatacatgaaactca

SEQ ID NO: 1868007 - DNA, 25 bp, Homo sapien
taaaaaacagatagagcactgagaa

SEQ ID NO: 1868008 - DNA, 25 bp, Homo sapien
cactcaatatacatgaaactcaatc

SEQ ID NO: 1868009 - DNA, 25 bp, Homo sapien
cttaaaaaacagatagagcactgag

SEQ ID NO: 1868010 - DNA, 25 bp, Homo sapien
gagcaggtctgtcaccatctatggt

SEQ ID NO: 1868011 - DNA, 25 bp, Homo sapien
cagagacagtgcttccgtagccaaa

SEQ ID NO: 1868012 - DNA, 25 bp, Homo sapien
gcactgtgtgataccccgcttaaaa

SEQ ID NO: 1868013 - DNA, 25 bp, Homo sapien
tgatattctccactgtaaggcactg

SEQ ID NO: 1868014 - DNA, 25 bp, Homo sapien
gctgagaccctagggatattttcta

SEQ ID NO: 1868015 - DNA, 25 bp, Homo sapien
tgtaccccatctgcctgccagaaaa

SEQ ID NO: 1868016 - DNA, 25 bp, Homo sapien
cagaaatagatcaaccttgatccaa

SEQ ID NO: 1868017 - DNA, 25 bp, Homo sapien
gatcaaccttgatccaactgtaccc

SEQ ID NO: 1868018 - DNA, 25 bp, Homo sapien
aggaggacagtttgaatccaggagt

SEQ ID NO: 1868019 - DNA, 25 bp, Homo sapien
aggcaggaggacagtttgaatccag

SEQ ID NO: 1868020 - DNA, 25 bp, Homo sapien
gcaggaggacagtttgaatccagga

SEQ ID NO: 1868021 - DNA, 25 bp, Homo sapien
tgaggcaggaggacagtttgaatcc

SEQ ID NO: 1868022 - DNA, 25 bp, Homo sapien
ttgagcccaggagctgtgatcatgc

SEQ ID NO: 1868023 - DNA, 25 bp, Homo sapien
actcaggaggctgaggtgggaggat

SEQ ID NO: 1868024 - DNA, 25 bp, Homo sapien
tggcatgtgctttgtagtcccaact

SEQ ID NO: 1868025 - DNA, 25 bp, Homo sapien
ctgtgatcatgccagtgtacttcag

SEQ ID NO: 1868026 - DNA, 25 bp, Homo sapien
catgtaggctggttcaggacagaca

SEQ ID NO: 1868027 - DNA, 25 bp, Homo sapien
gcctgatgtgtaagataacagactg

SEQ ID NO: 1868028 - DNA, 25 bp, Homo sapien
tatgccagaccaacaaaaacacaga

SEQ ID NO: 1868029 - DNA, 25 bp, Homo sapien
taccgactgaaaattagggaccatc

SEQ ID NO: 1868030 - DNA, 25 bp, Homo sapien
cataacctctaaatggcatgttcag

SEQ ID NO: 1868031 - DNA, 25 bp, Homo sapien
ggcaggaaagctaatgacataacct

SEQ ID NO: 1868032 - DNA, 25 bp, Homo sapien
gaaacagtgtttttgaatcgcaact

SEQ ID NO: 1868033 - DNA, 25 bp, Homo sapien
tctaggaagcagtatcaagagaggc

SEQ ID NO: 1868034 - DNA, 25 bp, Homo sapien
tacaaaactcccacagaattaaaga

SEQ ID NO: 1868035 - DNA, 25 bp, Homo sapien
tatagatgccagaagggtagctcgg

SEQ ID NO: 1868036 - DNA, 25 bp, Homo sapien
aaatgcagacaaaacgctggacggg

SEQ ID NO: 1868037 - DNA, 25 bp, Homo sapien
gctgaacagcccatctagtaaacaa

SEQ ID NO: 1868038 - DNA, 25 bp, Homo sapien
taagggaaggcgaaaactcactgtc

SEQ ID NO: 1868039 - DNA, 25 bp, Homo sapien
tcctgttgttgcaggcacatcacag

SEQ ID NO: 1868040 - DNA, 25 bp, Homo sapien
tgttgttgcaggcacatcacagttg

SEQ ID NO: 1868041 - DNA, 25 bp, Homo sapien
cctttcctgttgttgcaggcacatc

SEQ ID NO: 1868042 - DNA, 25 bp, Homo sapien
cttaatataacattgcctttcctgt

SEQ ID NO: 1868043 - DNA, 25 bp, Homo sapien
agccatcccattcctgcggtaggca

SEQ ID NO: 1868044 - DNA, 25 bp, Homo sapien
ccatcccattcctgcggtaggcatt

SEQ ID NO: 1868045 - DNA, 25 bp, Homo sapien
aaagccatcccattcctgcggtagg

SEQ ID NO: 1868046 - DNA, 25 bp, Homo sapien
gaaaagccatcccattcctgcggta

SEQ ID NO: 1868047 - DNA, 25 bp, Homo sapien
aactctacttcctaaaattgcgcta

SEQ ID NO: 1868048 - DNA, 25 bp, Homo sapien
aagaaaacattctaacaaggactag

SEQ ID NO: 1868049 - DNA, 25 bp, Homo sapien
tgtgttgtagaacacttctggattg

SEQ ID NO: 1868050 - DNA, 25 bp, Homo sapien
aattgcgctatagaacagtgttaag

SEQ ID NO: 1868051 - DNA, 25 bp, Homo sapien
taagtatagagtatacatgctctgt

SEQ ID NO: 1868052 - DNA, 25 bp, Homo sapien
tcttcacatcttgggatgtgagggc

SEQ ID NO: 1868053 - DNA, 25 bp, Homo sapien
gtctctaggatgatctgtgggccac

SEQ ID NO: 1868054 - DNA, 25 bp, Homo sapien
catgctctgtctctaggatgatctg

SEQ ID NO: 1868055 - DNA, 25 bp, Homo sapien
tggtggtgggagtgactgggtaagc

SEQ ID NO: 1868056 - DNA, 25 bp, Homo sapien
tccaattggtggtgggagtgactgg

SEQ ID NO: 1868057 - DNA, 25 bp, Homo sapien
tgtctctccagtccaattggtggtg

SEQ ID NO: 1868058 - DNA, 25 bp, Homo sapien
tctgtctctccagtccaattggtgg

SEQ ID NO: 1868059 - DNA, 25 bp, Homo sapien
ctcttgttcagcagacccgtgggag

SEQ ID NO: 1868060 - DNA, 25 bp, Homo sapien
gtgagaggaggtaagctaatgcaca

SEQ ID NO: 1868061 - DNA, 25 bp, Homo sapien
gaggaggtaagctaatgcacaagta

SEQ ID NO: 1868062 - DNA, 25 bp, Homo sapien
cttgttcagcagacccgtgggaggt

SEQ ID NO: 1868063 - DNA, 25 bp, Homo sapien
tctgctctgtaactttaggcttgtc

SEQ ID NO: 1868064 - DNA, 25 bp, Homo sapien
tctgtaactttaggcttgtcaatca

SEQ ID NO: 1868065 - DNA, 25 bp, Homo sapien
cttttcatcactttgccttccaact

SEQ ID NO: 1868066 - DNA, 25 bp, Homo sapien
tccaactttgcactcactctgctct

SEQ ID NO: 1868067 - DNA, 25 bp, Homo sapien
tcttcataactagacttctggaggt

SEQ ID NO: 1868068 - DNA, 25 bp, Homo sapien
ttttaaatatcctgagacccactgg

SEQ ID NO: 1868069 - DNA, 25 bp, Homo sapien
tggttgtacattagagccacttggg

SEQ ID NO: 1868070 - DNA, 25 bp, Homo sapien
ctgcaactgtccttttctaatgaag

SEQ ID NO: 1868071 - DNA, 25 bp, Homo sapien
gtatggcctgagtacaactgtagag

SEQ ID NO: 1868072 - DNA, 25 bp, Homo sapien
gagcaatgcatagataccacttcct

SEQ ID NO: 1868073 - DNA, 25 bp, Homo sapien
tgaggaccaccactggctgacattt

SEQ ID NO: 1868074 - DNA, 25 bp, Homo sapien
gctattccagcagatcaaccagatg

SEQ ID NO: 1868075 - DNA, 25 bp, Homo sapien
aaaaaatcccctgatggtgtacagc

SEQ ID NO: 1868076 - DNA, 25 bp, Homo sapien
taccagtcactcttctaggtgtggg

SEQ ID NO: 1868077 - DNA, 25 bp, Homo sapien
caaacaggtaaagtccatgctctca

SEQ ID NO: 1868078 - DNA, 25 bp, Homo sapien
gagtctccacaaggtttgcctgcag

SEQ ID NO: 1868079 - DNA, 25 bp, Homo sapien
ctatcaatctttaacaaggtgtcaa

SEQ ID NO: 1868080 - DNA, 25 bp, Homo sapien
tcaatctttaacaaggtgtcaaaca

SEQ ID NO: 1868081 - DNA, 25 bp, Homo sapien
tatcaatctttaacaaggtgtcaaa

SEQ ID NO: 1868082 - DNA, 25 bp, Homo sapien
caatctttaacaaggtgtcaaacat

SEQ ID NO: 1868083 - DNA, 25 bp, Homo sapien
ggttctttgaataagcctgatgtgc

SEQ ID NO: 1868084 - DNA, 25 bp, Homo sapien
ccagttctgcactgtgatgttggta

SEQ ID NO: 1868085 - DNA, 25 bp, Homo sapien
gaattgtcggtgtttgttctccagt

SEQ ID NO: 1868086 - DNA, 25 bp, Homo sapien
tttttagatgaattgtcggtgtttg

SEQ ID NO: 1868087 - DNA, 25 bp, Homo sapien
ggaacctgatcctgtttgtaaattc

SEQ ID NO: 1868088 - DNA, 25 bp, Homo sapien
aacctgatcctgtttgtaaattcct

SEQ ID NO: 1868089 - DNA, 25 bp, Homo sapien
cctggaacctgatcctgtttgtaaa

SEQ ID NO: 1868090 - DNA, 25 bp, Homo sapien
ctggaacctgatcctgtttgtaaat

SEQ ID NO: 1868091 - DNA, 25 bp, Homo sapien
cacccaactaaaggagtccttccag

SEQ ID NO: 1868092 - DNA, 25 bp, Homo sapien
agctattttgacacccaactaaagg

SEQ ID NO: 1868093 - DNA, 25 bp, Homo sapien
gaagcattaaagctattttgacacc

SEQ ID NO: 1868094 - DNA, 25 bp, Homo sapien
aatgtatgatatgccgtttcttcat

SEQ ID NO: 1868095 - DNA, 25 bp, Homo sapien
ggaaagaatgggttgttattgctta

SEQ ID NO: 1868096 - DNA, 25 bp, Homo sapien
ggagaatggacagattagtgaccaa

SEQ ID NO: 1868097 - DNA, 25 bp, Homo sapien
gaaagtcgatagaggctattaggga

SEQ ID NO: 1868098 - DNA, 25 bp, Homo sapien
tcttatagatagaaagtcgatagag

SEQ ID NO: 1868099 - DNA, 25 bp, Homo sapien
gatgttgatataatgggaatgtgcc

SEQ ID NO: 1868100 - DNA, 25 bp, Homo sapien
tgacatccagaaatggtaataaccc

SEQ ID NO: 1868101 - DNA, 25 bp, Homo sapien
acatccagaaatggtaataacccat

SEQ ID NO: 1868102 - DNA, 25 bp, Homo sapien
atgatgttgatataatgggaatgtg

SEQ ID NO: 1868103 - DNA, 25 bp, Homo sapien
tttaggatgatggagccaagacggc

SEQ ID NO: 1868104 - DNA, 25 bp, Homo sapien
gagatgttctactgccattggccat

SEQ ID NO: 1868105 - DNA, 25 bp, Homo sapien
taaaagttataatgtggccggtgtg

SEQ ID NO: 1868106 - DNA, 25 bp, Homo sapien
tgtagatggagacaaccttcaagtg

SEQ ID NO: 1868107 - DNA, 25 bp, Homo sapien
gctaacactattggtaagcttttgc

SEQ ID NO: 1868108 - DNA, 25 bp, Homo sapien
tttaaagctattgctaacactattg

SEQ ID NO: 1868109 - DNA, 25 bp, Homo sapien
tagtctaacttagatataattgttt

SEQ ID NO: 1868110 - DNA, 25 bp, Homo sapien
gctattgctaacactattggtaagc

SEQ ID NO: 1868111 - DNA, 25 bp, Homo sapien
gagatcgatgatataccttgtccaa

SEQ ID NO: 1868112 - DNA, 25 bp, Homo sapien
tcactttagtctggacttggcacag

SEQ ID NO: 1868113 - DNA, 25 bp, Homo sapien
taaattcatctgactgtaggcaacc

SEQ ID NO: 1868114 - DNA, 25 bp, Homo sapien
ttcagtggcaccatttttggaaggc

SEQ ID NO: 1868115 - DNA, 25 bp, Homo sapien
gagagcatactccacctattgggca

SEQ ID NO: 1868116 - DNA, 25 bp, Homo sapien
caggctctcatcacaggtatttgga

SEQ ID NO: 1868117 - DNA, 25 bp, Homo sapien
tgatctgtgcatacatagcctaggg

SEQ ID NO: 1868118 - DNA, 25 bp, Homo sapien
gagaacctatccaggtgccagggca

SEQ ID NO: 1868119 - DNA, 25 bp, Homo sapien
aaggatatattgctttaatcagcaa

SEQ ID NO: 1868120 - DNA, 25 bp, Homo sapien
taggtatatcaaactttactttctg

SEQ ID NO: 1868121 - DNA, 25 bp, Homo sapien
tcaccattacagagagcttctggag

SEQ ID NO: 1868122 - DNA, 25 bp, Homo sapien
tgttgaactacttccttataaacag

SEQ ID NO: 1868123 - DNA, 25 bp, Homo sapien
attacagtcaccacaaattgctttc

SEQ ID NO: 1868124 - DNA, 25 bp, Homo sapien
tcaaaattctttcatattataaata

SEQ ID NO: 1868125 - DNA, 25 bp, Homo sapien
ataaatataactttttataactctg

SEQ ID NO: 1868126 - DNA, 25 bp, Homo sapien
gctgtagcgtcgaatggcctctctg

SEQ ID NO: 1868127 - DNA, 25 bp, Homo sapien
tcctgtggctgtagcgtcgaatggc

SEQ ID NO: 1868128 - DNA, 25 bp, Homo sapien
ccaatcctgtggctgtagcgtcgaa

SEQ ID NO: 1868129 - DNA, 25 bp, Homo sapien
ggcatcgctgtgagcctcaacacca

SEQ ID NO: 1868130 - DNA, 25 bp, Homo sapien
acttagaattgttttagcctcttgc

SEQ ID NO: 1868131 - DNA, 25 bp, Homo sapien
gaatctgagccttccggtgttgggt

SEQ ID NO: 1868132 - DNA, 25 bp, Homo sapien
attgataagtgaggttttgctcctg

SEQ ID NO: 1868133 - DNA, 25 bp, Homo sapien
ctaagtatcactactgctgttcact

SEQ ID NO: 1868134 - DNA, 25 bp, Homo sapien
tataccatttggatcttaaaacacc

SEQ ID NO: 1868135 - DNA, 25 bp, Homo sapien
cttctaaaatggtacttatgctgtc

SEQ ID NO: 1868136 - DNA, 25 bp, Homo sapien
tctaagactctatataatctgagcc

SEQ ID NO: 1868137 - DNA, 25 bp, Homo sapien
ctttgagtcctagagtattatccta

SEQ ID NO: 1868138 - DNA, 25 bp, Homo sapien
tcagtctccagagtcccactttgga

SEQ ID NO: 1868139 - DNA, 25 bp, Homo sapien
tttgtcaagtgataaagggcaggaa

SEQ ID NO: 1868140 - DNA, 25 bp, Homo sapien
tacaggcccttgatgttagctgctg

SEQ ID NO: 1868141 - DNA, 25 bp, Homo sapien
ccactttggactcaatttggtatag

SEQ ID NO: 1868142 - DNA, 25 bp, Homo sapien
catattttgtcaggaggctctctga

SEQ ID NO: 1868143 - DNA, 25 bp, Homo sapien
ggctctctgacactcatgctcccac

SEQ ID NO: 1868144 - DNA, 25 bp, Homo sapien
ctaacatattttgtcaggaggctct

SEQ ID NO: 1868145 - DNA, 25 bp, Homo sapien
aacatattttgtcaggaggctctct

SEQ ID NO: 1868146 - DNA, 25 bp, Homo sapien
ccaggaaatccagcacatataggat

SEQ ID NO: 1868147 - DNA, 25 bp, Homo sapien
cagcggctgcggttgctgagcagtt

SEQ ID NO: 1868148 - DNA, 25 bp, Homo sapien
acatataggatattcctctcaactg

SEQ ID NO: 1868149 - DNA, 25 bp, Homo sapien
atataggatattcctctcaactgct

SEQ ID NO: 1868150 - DNA, 25 bp, Homo sapien
ttggttaccatgtcttgcctcacaa

SEQ ID NO: 1868151 - DNA, 25 bp, Homo sapien
ggttaccatgtcttgcctcacaaga

SEQ ID NO: 1868152 - DNA, 25 bp, Homo sapien
ctcagcagagttgtgatactgaatg

SEQ ID NO: 1868153 - DNA, 25 bp, Homo sapien
gttgtgatactgaatgaaggttgca

SEQ ID NO: 1868154 - DNA, 25 bp, Homo sapien
gtttcatacgctaaatatgctaaga

SEQ ID NO: 1868155 - DNA, 25 bp, Homo sapien
gtgccacagtttcatacgctaaata

SEQ ID NO: 1868156 - DNA, 25 bp, Homo sapien
cacagtttcatacgctaaatatgct

SEQ ID NO: 1868157 - DNA, 25 bp, Homo sapien
ctgtgccacagtttcatacgctaaa

SEQ ID NO: 1868158 - DNA, 25 bp, Homo sapien
gcgacaacattgggttttatctcca

SEQ ID NO: 1868159 - DNA, 25 bp, Homo sapien
cgacaacattgggttttatctccat

SEQ ID NO: 1868160 - DNA, 25 bp, Homo sapien
tgcgacaacattgggttttatctcc

SEQ ID NO: 1868161 - DNA, 25 bp, Homo sapien
ctgcagtccaaccagtctcgaaatt

SEQ ID NO: 1868162 - DNA, 25 bp, Homo sapien
cagtccaaccagtctcgaaatttgg

SEQ ID NO: 1868163 - DNA, 25 bp, Homo sapien
tccaaccagtctcgaaatttggaag

SEQ ID NO: 1868164 - DNA, 25 bp, Homo sapien
caaccagtctcgaaatttggaagct

SEQ ID NO: 1868165 - DNA, 25 bp, Homo sapien
tctcagctaggaagccggtagcctg

SEQ ID NO: 1868166 - DNA, 25 bp, Homo sapien
taaagttggtgctgttacgggcaga

SEQ ID NO: 1868167 - DNA, 25 bp, Homo sapien
tggtggagtgagaccggcctttcgg

SEQ ID NO: 1868168 - DNA, 25 bp, Homo sapien
ggacgcagaggaactgtgagtaggc

SEQ ID NO: 1868169 - DNA, 25 bp, Homo sapien
aatccataattcgagtttgtctttc

SEQ ID NO: 1868170 - DNA, 25 bp, Homo sapien
ttaattgtcgactttcacagaattc

SEQ ID NO: 1868171 - DNA, 25 bp, Homo sapien
ctgcatattgagctgaatccataat

SEQ ID NO: 1868172 - DNA, 25 bp, Homo sapien
gaaacttaattgtcgactttcacag

SEQ ID NO: 1868173 - DNA, 25 bp, Homo sapien
tgtcccacaagaggtaggataatta

SEQ ID NO: 1868174 - DNA, 25 bp, Homo sapien
aaatgagacaggctggtacttcttg

SEQ ID NO: 1868175 - DNA, 25 bp, Homo sapien
ccgcttccttggtaaggagagcatt

SEQ ID NO: 1868176 - DNA, 25 bp, Homo sapien
gaaagaatatgaccacttccgcttc

SEQ ID NO: 1868177 - DNA, 25 bp, Homo sapien
tcccttgagcttctaagaatgcaga

SEQ ID NO: 1868178 - DNA, 25 bp, Homo sapien
tgaacacaatggctgtcccttgagc

SEQ ID NO: 1868179 - DNA, 25 bp, Homo sapien
gagcaaaatcctctgcaatcataag

SEQ ID NO: 1868180 - DNA, 25 bp, Homo sapien
ttcagtataggtatttcaagtagcc

SEQ ID NO: 1868181 - DNA, 25 bp, Homo sapien
tgacactatgtagggttatagtccc

SEQ ID NO: 1868182 - DNA, 25 bp, Homo sapien
tactttcagtatgacaattcacaga

SEQ ID NO: 1868183 - DNA, 25 bp, Homo sapien
gctctgaagatggtctgtatgacac

SEQ ID NO: 1868184 - DNA, 25 bp, Homo sapien
tacccatgaaactagaatcttcctg

SEQ ID NO: 1868185 - DNA, 25 bp, Homo sapien
gacaacttagcatgtttttggccca

SEQ ID NO: 1868186 - DNA, 25 bp, Homo sapien
aatgatgacatcagaaatacatgtt

SEQ ID NO: 1868187 - DNA, 25 bp, Homo sapien
acatgtttatcatctgctttggaca

SEQ ID NO: 1868188 - DNA, 25 bp, Homo sapien
caaccatatcctgtttgggcaatga

SEQ ID NO: 1868189 - DNA, 25 bp, Homo sapien
tctcctgtctggtcaatagagttga

SEQ ID NO: 1868190 - DNA, 25 bp, Homo sapien
ggaagtcctgagcaatcttttgtct

SEQ ID NO: 1868191 - DNA, 25 bp, Homo sapien
tcttttgttcgcattattgctgcca

SEQ ID NO: 1868192 - DNA, 25 bp, Homo sapien
ggtcaatagagttgaggaagtcctg

SEQ ID NO: 1868193 - DNA, 25 bp, Homo sapien
taatgtttacctcgctcttttctgg

SEQ ID NO: 1868194 - DNA, 25 bp, Homo sapien
tctggttggacacattgcttgaaca

SEQ ID NO: 1868195 - DNA, 25 bp, Homo sapien
gaggtaacattttcccaatcaagta

SEQ ID NO: 1868196 - DNA, 25 bp, Homo sapien
tatcaattatactcctaccaagagg

SEQ ID NO: 1868197 - DNA, 25 bp, Homo sapien
taaatgattccctatctcaatcttc

SEQ ID NO: 1868198 - DNA, 25 bp, Homo sapien
tttgagtggaggattttaatgggat

SEQ ID NO: 1868199 - DNA, 25 bp, Homo sapien
tatctcaatcttcccctccaccaac

SEQ ID NO: 1868200 - DNA, 25 bp, Homo sapien
actactctacactccatctctttag

SEQ ID NO: 1868201 - DNA, 25 bp, Homo sapien
tacaaaagtaccctatcagatatat

SEQ ID NO: 1868202 - DNA, 25 bp, Homo sapien
catttttaaattgggccactgtctt

SEQ ID NO: 1868203 - DNA, 25 bp, Homo sapien
tcttgatgttgctctttgaaacata

SEQ ID NO: 1868204 - DNA, 25 bp, Homo sapien
tattctatacaaaagtaccctatca

SEQ ID NO: 1868205 - DNA, 25 bp, Homo sapien
tctttctcttggacgtggatatcca

SEQ ID NO: 1868206 - DNA, 25 bp, Homo sapien
tatgccagtactgctctatcgtaat

SEQ ID NO: 1868207 - DNA, 25 bp, Homo sapien
gaattttatagtttgagcccttgta

SEQ ID NO: 1868208 - DNA, 25 bp, Homo sapien
caaatatgtctacacttatgccagt

SEQ ID NO: 1868209 - DNA, 25 bp, Homo sapien
cttcgagaagatcatcctcatcgat

SEQ ID NO: 1868210 - DNA, 25 bp, Homo sapien
tttgatttgtagtctcggataaaca

SEQ ID NO: 1868211 - DNA, 25 bp, Homo sapien
atcctcatcgatgcctttgacaatc

SEQ ID NO: 1868212 - DNA, 25 bp, Homo sapien
catcgatgcctttgacaatctttga

SEQ ID NO: 1868213 - DNA, 25 bp, Homo sapien
ttatctttgcgcatcaaaaacagaa

SEQ ID NO: 1868214 - DNA, 25 bp, Homo sapien
gtgattacccttgctccccgcagct

SEQ ID NO: 1868215 - DNA, 25 bp, Homo sapien
cttatctttgcgcatcaaaaacaga

SEQ ID NO: 1868216 - DNA, 25 bp, Homo sapien
gagtgattacccttgctccccgcag

SEQ ID NO: 1868217 - DNA, 25 bp, Homo sapien
gtttagttttggcaagtcttcagtg

SEQ ID NO: 1868218 - DNA, 25 bp, Homo sapien
cttcagtgggtaaaggattcagtcc

SEQ ID NO: 1868219 - DNA, 25 bp, Homo sapien
agttttggcaagtcttcagtgggta

SEQ ID NO: 1868220 - DNA, 25 bp, Homo sapien
ttttggcaagtcttcagtgggtaaa

SEQ ID NO: 1868221 - DNA, 25 bp, Homo sapien
ttcagcaaagcatattatctgaaag

SEQ ID NO: 1868222 - DNA, 25 bp, Homo sapien
taggcactatagatccttccacctc

SEQ ID NO: 1868223 - DNA, 25 bp, Homo sapien
caacctcctaggcactatagatcct

SEQ ID NO: 1868224 - DNA, 25 bp, Homo sapien
atttcagcaaagcatattatctgaa

SEQ ID NO: 1868225 - DNA, 25 bp, Homo sapien
aataaaatagcagtagtagtagagg

SEQ ID NO: 1868226 - DNA, 25 bp, Homo sapien
caaagtgggctgaattatttattca

SEQ ID NO: 1868227 - DNA, 25 bp, Homo sapien
caaattaagctactacagttccctc

SEQ ID NO: 1868228 - DNA, 25 bp, Homo sapien
agctactacagttccctcccattta

SEQ ID NO: 1868229 - DNA, 25 bp, Homo sapien
taaaagggtcactctgatggccggg

SEQ ID NO: 1868230 - DNA, 25 bp, Homo sapien
catccctaaagcaggctataaaacc

SEQ ID NO: 1868231 - DNA, 25 bp, Homo sapien
agaggcagaaagtccactctcattt

SEQ ID NO: 1868232 - DNA, 25 bp, Homo sapien
taaggcatcttgaaaattgagaaaa

SEQ ID NO: 1868233 - DNA, 25 bp, Homo sapien
agtgggcacatttggcagagccatc

SEQ ID NO: 1868234 - DNA, 25 bp, Homo sapien
tcagcaaaggtgtgcaacaaagtgg

SEQ ID NO: 1868235 - DNA, 25 bp, Homo sapien
agagccatcagatcaatgccaggta

SEQ ID NO: 1868236 - DNA, 25 bp, Homo sapien
tatatcatggtcattcccaaggagg

SEQ ID NO: 1868237 - DNA, 25 bp, Homo sapien
tctaatctctatgtggtcagatacc

SEQ ID NO: 1868238 - DNA, 25 bp, Homo sapien
ggtcagataccaccacttccaatac

SEQ ID NO: 1868239 - DNA, 25 bp, Homo sapien
cataaaaatgatttcccccacgaag

SEQ ID NO: 1868240 - DNA, 25 bp, Homo sapien
tgtacttcccactgtctcaactctc

SEQ ID NO: 1868241 - DNA, 25 bp, Homo sapien
gccatatggcttaaagcagggtaca

SEQ ID NO: 1868242 - DNA, 25 bp, Homo sapien
ttaaagcagggtacagattcaatgt

SEQ ID NO: 1868243 - DNA, 25 bp, Homo sapien
taaaaccctgctgtaagaaatcaca

SEQ ID NO: 1868244 - DNA, 25 bp, Homo sapien
ttaaaaaggccatatggcttaaagc

SEQ ID NO: 1868245 - DNA, 25 bp, Homo sapien
cctgtcaggctttaagatttgtatt

SEQ ID NO: 1868246 - DNA, 25 bp, Homo sapien
ataccactaaagagtaaatatctgg

SEQ ID NO: 1868247 - DNA, 25 bp, Homo sapien
ccttataagacaggaggacatgtaa

SEQ ID NO: 1868248 - DNA, 25 bp, Homo sapien
tccttcccctatgataataaacctg

SEQ ID NO: 1868249 - DNA, 25 bp, Homo sapien
ggtacagagtaggtgtacagtcaaa

SEQ ID NO: 1868250 - DNA, 25 bp, Homo sapien
gaggctcagcaaattatgcattaaa

SEQ ID NO: 1868251 - DNA, 25 bp, Homo sapien
tcaaattatgaggttactcagtgca

SEQ ID NO: 1868252 - DNA, 25 bp, Homo sapien
gtcaaatggcatgtctaaaaaataa

SEQ ID NO: 1868253 - DNA, 25 bp, Homo sapien
ggccttctagcatcacctaaagaat

SEQ ID NO: 1868254 - DNA, 25 bp, Homo sapien
agattaattaactgagtgtgtacca

SEQ ID NO: 1868255 - DNA, 25 bp, Homo sapien
agaggccttctagcatcacctaaag

SEQ ID NO: 1868256 - DNA, 25 bp, Homo sapien
catcttctaccaaaactgctgtttc

SEQ ID NO: 1868257 - DNA, 25 bp, Homo sapien
gtaatccaagggtcagcaaatattt

SEQ ID NO: 1868258 - DNA, 25 bp, Homo sapien
caactttgtgggctataaggtctct

SEQ ID NO: 1868259 - DNA, 25 bp, Homo sapien
gaatgtgtatagctatgctgcacta

SEQ ID NO: 1868260 - DNA, 25 bp, Homo sapien
ccaatgacagtccatagatgaatga

SEQ ID NO: 1868261 - DNA, 25 bp, Homo sapien
gaccactagacctttcctgaaacca

SEQ ID NO: 1868262 - DNA, 25 bp, Homo sapien
tcaaccctggtacataaaataagct

SEQ ID NO: 1868263 - DNA, 25 bp, Homo sapien
caacagccgtccaacaaaataaatg

SEQ ID NO: 1868264 - DNA, 25 bp, Homo sapien
gctaaactgcaaataagaggaggac

SEQ ID NO: 1868265 - DNA, 25 bp, Homo sapien
ccaggtaaagtgaacactgtgagca

SEQ ID NO: 1868266 - DNA, 25 bp, Homo sapien
caatgggaggtaagtatacacgcac

SEQ ID NO: 1868267 - DNA, 25 bp, Homo sapien
gaagctcaggtaaatctgggccaga

SEQ ID NO: 1868268 - DNA, 25 bp, Homo sapien
taaggtaaaatcctggctgcatctg

SEQ ID NO: 1868269 - DNA, 25 bp, Homo sapien
catagtatgggaaagaaaagcgttt

SEQ ID NO: 1868270 - DNA, 25 bp, Homo sapien
ggcatagtatgggaaagaaaagcgt

SEQ ID NO: 1868271 - DNA, 25 bp, Homo sapien
tatgggaaagaaaagcgttttgcta

SEQ ID NO: 1868272 - DNA, 25 bp, Homo sapien
aaagaaaagcgttttgctaccagag

SEQ ID NO: 1868273 - DNA, 25 bp, Homo sapien
aaaagcggcgaaccatgagattata

SEQ ID NO: 1868274 - DNA, 25 bp, Homo sapien
aagcggcgaaccatgagattatatc

SEQ ID NO: 1868275 - DNA, 25 bp, Homo sapien
ccggcttaaaaagcggcgaaccatg

SEQ ID NO: 1868276 - DNA, 25 bp, Homo sapien
gcggcgaaccatgagattatatctc

SEQ ID NO: 1868277 - DNA, 25 bp, Homo sapien
ccacacacagatttacctctttctt

SEQ ID NO: 1868278 - DNA, 25 bp, Homo sapien
cctcagccatgaacctaagatgtga

SEQ ID NO: 1868279 - DNA, 25 bp, Homo sapien
cccttacgagggctgtgtgccatgt

SEQ ID NO: 1868280 - DNA, 25 bp, Homo sapien
cttttcttatactggcctcagccat

SEQ ID NO: 1868281 - DNA, 25 bp, Homo sapien
cagccctgccatatttcttcagaaa

SEQ ID NO: 1868282 - DNA, 25 bp, Homo sapien
taaatagcaaatgcacgcttcagca

SEQ ID NO: 1868283 - DNA, 25 bp, Homo sapien
aggaagatctctaccagctgggtgg

SEQ ID NO: 1868284 - DNA, 25 bp, Homo sapien
gttgaaaatttacgacagccctgcc

SEQ ID NO: 1868285 - DNA, 25 bp, Homo sapien
tacttgttaaagtcaaaactactgc

SEQ ID NO: 1868286 - DNA, 25 bp, Homo sapien
gaaaacaatgaaggccttacatact

SEQ ID NO: 1868287 - DNA, 25 bp, Homo sapien
gatgataccttccttggaacgttta

SEQ ID NO: 1868288 - DNA, 25 bp, Homo sapien
taaacttttcctagtcattagcgtc

SEQ ID NO: 1868289 - DNA, 25 bp, Homo sapien
gatgcaaacacactacctacaagaa

SEQ ID NO: 1868290 - DNA, 25 bp, Homo sapien
gcaaggctatccttcagagatgaaa

SEQ ID NO: 1868291 - DNA, 25 bp, Homo sapien
tcatcatgactagaccgaacttaca

SEQ ID NO: 1868292 - DNA, 25 bp, Homo sapien
caagaatatcatacacagcaaggct

SEQ ID NO: 1868293 - DNA, 25 bp, Homo sapien
tactgagaaagctgctcttagtctg

SEQ ID NO: 1868294 - DNA, 25 bp, Homo sapien
ctagataaggtatgcttggctggca

SEQ ID NO: 1868295 - DNA, 25 bp, Homo sapien
gcttgcttctaggtttaggactccc

SEQ ID NO: 1868296 - DNA, 25 bp, Homo sapien
ggtggagaaacctttttacattgca

SEQ ID NO: 1868297 - DNA, 25 bp, Homo sapien
gacttctcaacagcaacaatacgag

SEQ ID NO: 1868298 - DNA, 25 bp, Homo sapien
cagggttctcgctaagttgctcagg

SEQ ID NO: 1868299 - DNA, 25 bp, Homo sapien
agacagggttctcgctaagttgctc

SEQ ID NO: 1868300 - DNA, 25 bp, Homo sapien
accgttcccagccaggacttctcaa

SEQ ID NO: 1868301 - DNA, 25 bp, Homo sapien
tgggccttggatggaatgtggatgt

SEQ ID NO: 1868302 - DNA, 25 bp, Homo sapien
gatgttgtttacaccgatcccctcc

SEQ ID NO: 1868303 - DNA, 25 bp, Homo sapien
gatcccctccattaaaggcagcata

SEQ ID NO: 1868304 - DNA, 25 bp, Homo sapien
ggcagcataatgttggtcttcaaaa

SEQ ID NO: 1868305 - DNA, 25 bp, Homo sapien
cagtaaaatttacatactaccaagt

SEQ ID NO: 1868306 - DNA, 25 bp, Homo sapien
ccagtaaaatttacatactaccaag

SEQ ID NO: 1868307 - DNA, 25 bp, Homo sapien
taaacttatgttacatggtataaaa

SEQ ID NO: 1868308 - DNA, 25 bp, Homo sapien
aataaacttatgttacatggtataa

SEQ ID NO: 1868309 - DNA, 25 bp, Homo sapien
ggtcctcagcactttatgaattagt

SEQ ID NO: 1868310 - DNA, 25 bp, Homo sapien
acttccaaattgacagcctgcccat

SEQ ID NO: 1868311 - DNA, 25 bp, Homo sapien
tacattctacgcagggaactgcagg

SEQ ID NO: 1868312 - DNA, 25 bp, Homo sapien
tggtaggtattaaagggtcctcagc

SEQ ID NO: 1868313 - DNA, 25 bp, Homo sapien
aaaagtttttgagcaccagcatggt

SEQ ID NO: 1868314 - DNA, 25 bp, Homo sapien
aagtttttgagcaccagcatggtat

SEQ ID NO: 1868315 - DNA, 25 bp, Homo sapien
ccaaaagtttttgagcaccagcatg

SEQ ID NO: 1868316 - DNA, 25 bp, Homo sapien
gaacatccagaatgctccaaaatcc

SEQ ID NO: 1868317 - DNA, 25 bp, Homo sapien
ttttgtacctatattcataagcgat

SEQ ID NO: 1868318 - DNA, 25 bp, Homo sapien
gcgatagtagtgtacagctttcttt

SEQ ID NO: 1868319 - DNA, 25 bp, Homo sapien
ttccctgaaacttggtatatatgtt

SEQ ID NO: 1868320 - DNA, 25 bp, Homo sapien
catgagggaggattctaagatgaag

SEQ ID NO: 1868321 - DNA, 25 bp, Homo sapien
cactctgcagacatataaatagaat

SEQ ID NO: 1868322 - DNA, 25 bp, Homo sapien
tccagtcgcagaatttatgctaaca

SEQ ID NO: 1868323 - DNA, 25 bp, Homo sapien
gaataatatagcacaactaaatgga

SEQ ID NO: 1868324 - DNA, 25 bp, Homo sapien
gctaacaacgcactaaaatattctg

SEQ ID NO: 1868325 - DNA, 25 bp, Homo sapien
tttaccttgatctcacaatgatccc

SEQ ID NO: 1868326 - DNA, 25 bp, Homo sapien
ggccaatgtaattgttacttttcta

SEQ ID NO: 1868327 - DNA, 25 bp, Homo sapien
ctctccactaaagtaactctctaga

SEQ ID NO: 1868328 - DNA, 25 bp, Homo sapien
ctagaatataggaaacctttcaaag

SEQ ID NO: 1868329 - DNA, 25 bp, Homo sapien
tttatgaaaatgctgtaatatccac

SEQ ID NO: 1868330 - DNA, 25 bp, Homo sapien
cttagtggtaagtatataacatgac

SEQ ID NO: 1868331 - DNA, 25 bp, Homo sapien
tacatacaaaagtagactgatttaa

SEQ ID NO: 1868332 - DNA, 25 bp, Homo sapien
cacaaggaggaatactgtacacagt

SEQ ID NO: 1868333 - DNA, 25 bp, Homo sapien
tttacttatcatctgctttcacacg

SEQ ID NO: 1868334 - DNA, 25 bp, Homo sapien
tcatctgctttcacacggcaatggc

SEQ ID NO: 1868335 - DNA, 25 bp, Homo sapien
taacagaaatcctatggcccacaaa

SEQ ID NO: 1868336 - DNA, 25 bp, Homo sapien
cggcaatggcagagttaggtagtta

SEQ ID NO: 1868337 - DNA, 25 bp, Homo sapien
tcttctacccataaacttgttctct

SEQ ID NO: 1868338 - DNA, 25 bp, Homo sapien
tgttctcttgaaaagcgataggaac

SEQ ID NO: 1868339 - DNA, 25 bp, Homo sapien
gttgatttctgacaggtaagcacca

SEQ ID NO: 1868340 - DNA, 25 bp, Homo sapien
ataggaacacaatttcccactactt

SEQ ID NO: 1868341 - DNA, 25 bp, Homo sapien
gccagaatcattcagcagtggaagg

SEQ ID NO: 1868342 - DNA, 25 bp, Homo sapien
tatagaatctgttttccctatgaag

SEQ ID NO: 1868343 - DNA, 25 bp, Homo sapien
gatattgtgataacaatagggaaaa

SEQ ID NO: 1868344 - DNA, 25 bp, Homo sapien
cagtggaaggatattgtgataacaa

SEQ ID NO: 1868345 - DNA, 25 bp, Homo sapien
aattgtaatctcaccttagatggtt

SEQ ID NO: 1868346 - DNA, 25 bp, Homo sapien
ctcaccttagatggttaaaacatat

SEQ ID NO: 1868347 - DNA, 25 bp, Homo sapien
taatctcaccttagatggttaaaac

SEQ ID NO: 1868348 - DNA, 25 bp, Homo sapien
aaaattgtaatctcaccttagatgg

SEQ ID NO: 1868349 - DNA, 25 bp, Homo sapien
ggctgtgtgtggtctcgcccatata

SEQ ID NO: 1868350 - DNA, 25 bp, Homo sapien
tatacacaaggcctaacaaatagag

SEQ ID NO: 1868351 - DNA, 25 bp, Homo sapien
tctctactggtcactaaaaaagcta

SEQ ID NO: 1868352 - DNA, 25 bp, Homo sapien
tagagacctaaatctgcgatcgcct

SEQ ID NO: 1868353 - DNA, 25 bp, Homo sapien
tcaaagttgaagaacgttgttccaa

SEQ ID NO: 1868354 - DNA, 25 bp, Homo sapien
tgaagaacgttgttccaaagaccac

SEQ ID NO: 1868355 - DNA, 25 bp, Homo sapien
ttgaagaacgttgttccaaagacca

SEQ ID NO: 1868356 - DNA, 25 bp, Homo sapien
ctgtcaaagttgaagaacgttgttc

SEQ ID NO: 1868357 - DNA, 25 bp, Homo sapien
gctacagctgttattgataagcagt

SEQ ID NO: 1868358 - DNA, 25 bp, Homo sapien
cacagtgctacagctgttattgata

SEQ ID NO: 1868359 - DNA, 25 bp, Homo sapien
gccacagtgctacagctgttattga

SEQ ID NO: 1868360 - DNA, 25 bp, Homo sapien
agtgctacagctgttattgataagc

SEQ ID NO: 1868361 - DNA, 25 bp, Homo sapien
aacactgacaatttatatactggaa

SEQ ID NO: 1868362 - DNA, 25 bp, Homo sapien
gatgacaattactgtgccggttgtg

SEQ ID NO: 1868363 - DNA, 25 bp, Homo sapien
agaataacctccctacagtaaagca

SEQ ID NO: 1868364 - DNA, 25 bp, Homo sapien
tctgacagctaagagcacagtggat

SEQ ID NO: 1868365 - DNA, 25 bp, Homo sapien
tagcacaaagttacagcagtgttcc

SEQ ID NO: 1868366 - DNA, 25 bp, Homo sapien
caaagttacagcagtgttccaacgt

SEQ ID NO: 1868367 - DNA, 25 bp, Homo sapien
tgttccatagcacaaagttacagca

SEQ ID NO: 1868368 - DNA, 25 bp, Homo sapien
ttacagcagtgttccaacgtatact

SEQ ID NO: 1868369 - DNA, 25 bp, Homo sapien
cattgtgggtagtagtttcctgctt

SEQ ID NO: 1868370 - DNA, 25 bp, Homo sapien
taagtggtagtgtatgtaacattgc

SEQ ID NO: 1868371 - DNA, 25 bp, Homo sapien
tgctttagtctagccacatcctcag

SEQ ID NO: 1868372 - DNA, 25 bp, Homo sapien
tctttggttttgtcagtagcatgtt

SEQ ID NO: 1868373 - DNA, 25 bp, Homo sapien
tcatttttccacagacacaataatg

SEQ ID NO: 1868374 - DNA, 25 bp, Homo sapien
catttttccacagacacaataatga

SEQ ID NO: 1868375 - DNA, 25 bp, Homo sapien
atttttccacagacacaataatgaa

SEQ ID NO: 1868376 - DNA, 25 bp, Homo sapien
taaatggttaatctccgcaggtcac

SEQ ID NO: 1868377 - DNA, 25 bp, Homo sapien
aaaaggagggactatggcatcaaac

SEQ ID NO: 1868378 - DNA, 25 bp, Homo sapien
taggcagtcccactttacttaagag

SEQ ID NO: 1868379 - DNA, 25 bp, Homo sapien
tcagtgagtgctctctaaccacagt

SEQ ID NO: 1868380 - DNA, 25 bp, Homo sapien
ctcttttgaaaagtgggctgcacct

SEQ ID NO: 1868381 - DNA, 25 bp, Homo sapien
tcaatccgtctctatatcacaaggc

SEQ ID NO: 1868382 - DNA, 25 bp, Homo sapien
gaaatgtcttaagtatgtgccccaa

SEQ ID NO: 1868383 - DNA, 25 bp, Homo sapien
gggagctaactcattgaaggcacta

SEQ ID NO: 1868384 - DNA, 25 bp, Homo sapien
gaaaataagaagtacagaggattcc

SEQ ID NO: 1868385 - DNA, 25 bp, Homo sapien
cattgtcgagcgtttactgtaccgg

SEQ ID NO: 1868386 - DNA, 25 bp, Homo sapien
tgtaccgggtactatgctaagccat

SEQ ID NO: 1868387 - DNA, 25 bp, Homo sapien
gaggattccataagatgactatagc

SEQ ID NO: 1868388 - DNA, 25 bp, Homo sapien
tacaaacaagaagataatcctggag

SEQ ID NO: 1868389 - DNA, 25 bp, Homo sapien
caaggaataagattaaggtgaggtt

SEQ ID NO: 1868390 - DNA, 25 bp, Homo sapien
cctggagtcttcaaattaccctgcc

SEQ ID NO: 1868391 - DNA, 25 bp, Homo sapien
tcaaattaccctgccacatatcttt

SEQ ID NO: 1868392 - DNA, 25 bp, Homo sapien
ttctcttgcctctgcctgactagct

SEQ ID NO: 1868393 - DNA, 25 bp, Homo sapien
aattctcttgcctctgcctgactag

SEQ ID NO: 1868394 - DNA, 25 bp, Homo sapien
caattctcttgcctctgcctgacta

SEQ ID NO: 1868395 - DNA, 25 bp, Homo sapien
ctcttgcctctgcctgactagctgg

SEQ ID NO: 1868396 - DNA, 25 bp, Homo sapien
caccttagaattaagagatatagta

SEQ ID NO: 1868397 - DNA, 25 bp, Homo sapien
tacatgtatcatattaagataagtg

SEQ ID NO: 1868398 - DNA, 25 bp, Homo sapien
ataagtgaaataatgggatatctgg

SEQ ID NO: 1868399 - DNA, 25 bp, Homo sapien
ctttaaaatgaattcgatttcactg

SEQ ID NO: 1868400 - DNA, 25 bp, Homo sapien
aaagtggttgtgtactctattctgt

SEQ ID NO: 1868401 - DNA, 25 bp, Homo sapien
ctctagaaaagtggttgtgtactct

SEQ ID NO: 1868402 - DNA, 25 bp, Homo sapien
aaactttctaatgactacaacaaca

SEQ ID NO: 1868403 - DNA, 25 bp, Homo sapien
cttctctagaaaagtggttgtgtac

SEQ ID NO: 1868404 - DNA, 25 bp, Homo sapien
taggctcacttcacgcagttgctaa

SEQ ID NO: 1868405 - DNA, 25 bp, Homo sapien
gaaggctatcaatttagccacaaga

SEQ ID NO: 1868406 - DNA, 25 bp, Homo sapien
gacgttaattcaactatgaaggcta

SEQ ID NO: 1868407 - DNA, 25 bp, Homo sapien
taaatcaatgaaccagctctacaga

SEQ ID NO: 1868408 - DNA, 25 bp, Homo sapien
tgtactccttccactacttgaagtt

SEQ ID NO: 1868409 - DNA, 25 bp, Homo sapien
taattctgttgcaaagcttatagac

SEQ ID NO: 1868410 - DNA, 25 bp, Homo sapien
cttgaagttgcagtagacattggac

SEQ ID NO: 1868411 - DNA, 25 bp, Homo sapien
gcttatagacttccctgtactcctt

SEQ ID NO: 1868412 - DNA, 25 bp, Homo sapien
tgactaagagtagacctttaaagac

SEQ ID NO: 1868413 - DNA, 25 bp, Homo sapien
tgtcctgtgaattcaacagcatctt

SEQ ID NO: 1868414 - DNA, 25 bp, Homo sapien
aaaccactatagcatttaaatcagc

SEQ ID NO: 1868415 - DNA, 25 bp, Homo sapien
ccatacaccaaacagagtactattt

SEQ ID NO: 1868416 - DNA, 25 bp, Homo sapien
tggatgctacactcccactaactac

SEQ ID NO: 1868417 - DNA, 25 bp, Homo sapien
tcgccgtgccataaagcaacaattt

SEQ ID NO: 1868418 - DNA, 25 bp, Homo sapien
acagagaacacagcggatcttttcc

SEQ ID NO: 1868419 - DNA, 25 bp, Homo sapien
tcttctctcgccgtgccataaagca

SEQ ID NO: 1868420 - DNA, 25 bp, Homo sapien
actgctgcgcttcccgcgaggagaa

SEQ ID NO: 1868421 - DNA, 25 bp, Homo sapien
ctgcggcccgggacacgcttggaaa

SEQ ID NO: 1868422 - DNA, 25 bp, Homo sapien
gaaaaggtgactcggctgtgtgacg

SEQ ID NO: 1868423 - DNA, 25 bp, Homo sapien
tctgctttaagaacccttggaggca

SEQ ID NO: 1868424 - DNA, 25 bp, Homo sapien
tactactaggatatcaggaaacgtc

SEQ ID NO: 1868425 - DNA, 25 bp, Homo sapien
ggaaacgtcccattcgacatcgtat

SEQ ID NO: 1868426 - DNA, 25 bp, Homo sapien
tcagctttcgctcctagtgtcttgg

SEQ ID NO: 1868427 - DNA, 25 bp, Homo sapien
ccactcagtggtaatgttgagaccc

SEQ ID NO: 1868428 - DNA, 25 bp, Homo sapien
tgtgttcttcaatggtgcttcttct

SEQ ID NO: 1868429 - DNA, 25 bp, Homo sapien
tctaggatgtctccattccccatgg

SEQ ID NO: 1868430 - DNA, 25 bp, Homo sapien
tgaaacggccaatgtgaaaacagct

SEQ ID NO: 1868431 - DNA, 25 bp, Homo sapien
tccccatttattgaaacggccaatg

SEQ ID NO: 1868432 - DNA, 25 bp, Homo sapien
tccccagcaagggttttgcaactta

SEQ ID NO: 1868433 - DNA, 25 bp, Homo sapien
gacagacacgaaacttagtcttaga

SEQ ID NO: 1868434 - DNA, 25 bp, Homo sapien
tgtccagctatgcacttgagttcct

SEQ ID NO: 1868435 - DNA, 25 bp, Homo sapien
tcccttgggagtcgctcagacagag

SEQ ID NO: 1868436 - DNA, 25 bp, Homo sapien
accgcaccatggtggagatcatcgc

SEQ ID NO: 1868437 - DNA, 25 bp, Homo sapien
gagcggcggaacctgcccgccggtg

SEQ ID NO: 1868438 - DNA, 25 bp, Homo sapien
ttcaaggtaagaggctacaccgccc

SEQ ID NO: 1868439 - DNA, 25 bp, Homo sapien
caacaagaccctgcccgtggccttc

SEQ ID NO: 1868440 - DNA, 25 bp, Homo sapien
gaagaacaactgtcagccggagaag

SEQ ID NO: 1868441 - DNA, 25 bp, Homo sapien
gcagatattcatgctcctcagggaa

SEQ ID NO: 1868442 - DNA, 25 bp, Homo sapien
tatggcactagtaccccactgtgag

SEQ ID NO: 1868443 - DNA, 25 bp, Homo sapien
taatatacacatctggcgttggcag

SEQ ID NO: 1868444 - DNA, 25 bp, Homo sapien
catttgagcggaggcttgaattaaa

SEQ ID NO: 1868445 - DNA, 25 bp, Homo sapien
taataaacaattagatggcactgtg

SEQ ID NO: 1868446 - DNA, 25 bp, Homo sapien
tgagccctgccatatgacagacatt

SEQ ID NO: 1868447 - DNA, 25 bp, Homo sapien
tattcaattcggctatcacatgttc

SEQ ID NO: 1868448 - DNA, 25 bp, Homo sapien
acccgttatgttgttgcttagcctg

SEQ ID NO: 1868449 - DNA, 25 bp, Homo sapien
ccttattaactgaagatggtctgac

SEQ ID NO: 1868450 - DNA, 25 bp, Homo sapien
gcttagcctgttagcagtatccaca

SEQ ID NO: 1868451 - DNA, 25 bp, Homo sapien
cacagatgagcttcttaaaggtgct

SEQ ID NO: 1868452 - DNA, 25 bp, Homo sapien
tgattcgaactaagggccactctcc

SEQ ID NO: 1868453 - DNA, 25 bp, Homo sapien
tcttgtcccacccttttgtatctca

SEQ ID NO: 1868454 - DNA, 25 bp, Homo sapien
ctagctttgccgttgagattcagga

SEQ ID NO: 1868455 - DNA, 25 bp, Homo sapien
acatctcagtggcatttcaagttct

SEQ ID NO: 1868456 - DNA, 25 bp, Homo sapien
ttgccccaatacggcaggtactccc

SEQ ID NO: 1868457 - DNA, 25 bp, Homo sapien
cttgttgccccaatacggcaggtac

SEQ ID NO: 1868458 - DNA, 25 bp, Homo sapien
tgttgccccaatacggcaggtactc

SEQ ID NO: 1868459 - DNA, 25 bp, Homo sapien
ttgttgccccaatacggcaggtact

SEQ ID NO: 1868460 - DNA, 25 bp, Homo sapien
tgaatcgctgtctcatctacaccca

SEQ ID NO: 1868461 - DNA, 25 bp, Homo sapien
caaagtgaatcgctgtctcatctac

SEQ ID NO: 1868462 - DNA, 25 bp, Homo sapien
agtgaatcgctgtctcatctacacc

SEQ ID NO: 1868463 - DNA, 25 bp, Homo sapien
ttcttcaaagtgaatcgctgtctca

SEQ ID NO: 1868464 - DNA, 25 bp, Homo sapien
tataacctagcacagtttttggcac

SEQ ID NO: 1868465 - DNA, 25 bp, Homo sapien
gcataaaaatttaattgcatgccat

SEQ ID NO: 1868466 - DNA, 25 bp, Homo sapien
ccttttataagcttcttaaggacag

SEQ ID NO: 1868467 - DNA, 25 bp, Homo sapien
gcccagcccatattgtcctttagca

SEQ ID NO: 1868468 - DNA, 25 bp, Homo sapien
tagcaggatcagaattttagagcag

SEQ ID NO: 1868469 - DNA, 25 bp, Homo sapien
cagttgctagtccaacactctagaa

SEQ ID NO: 1868470 - DNA, 25 bp, Homo sapien
tggccagaacccacatctccagttg

SEQ ID NO: 1868471 - DNA, 25 bp, Homo sapien
ctcagacttgtccaatatgtagcag

SEQ ID NO: 1868472 - DNA, 25 bp, Homo sapien
catctggagtggactcagtggacat

SEQ ID NO: 1868473 - DNA, 25 bp, Homo sapien
gaccagtcactgactgttttggtcc

SEQ ID NO: 1868474 - DNA, 25 bp, Homo sapien
gttttggtccacatctggagtggac

SEQ ID NO: 1868475 - DNA, 25 bp, Homo sapien
cagtggacatgattctcaggctgag

SEQ ID NO: 1868476 - DNA, 25 bp, Homo sapien
tctctaaatgggagcacagacgtgt

SEQ ID NO: 1868477 - DNA, 25 bp, Homo sapien
tcatatgactgccacggcaccgtgg

SEQ ID NO: 1868478 - DNA, 25 bp, Homo sapien
ggaggaacgcaaccacatctgaagc

SEQ ID NO: 1868479 - DNA, 25 bp, Homo sapien
tttggctggctaatcggaggaacgc

SEQ ID NO: 1868480 - DNA, 25 bp, Homo sapien
tacacgctgttcacattattctggt

SEQ ID NO: 1868481 - DNA, 25 bp, Homo sapien
tggttcttcttatatgatctaaata

SEQ ID NO: 1868482 - DNA, 25 bp, Homo sapien
cgttttaagtgcgacttctttctga

SEQ ID NO: 1868483 - DNA, 25 bp, Homo sapien
ttaatgcatacagaagtgccctgcc

SEQ ID NO: 1868484 - DNA, 25 bp, Homo sapien
ttgacttcggtctctaaaagtgctc

SEQ ID NO: 1868485 - DNA, 25 bp, Homo sapien
ggtaacttgctaacgtgaatggtca

SEQ ID NO: 1868486 - DNA, 25 bp, Homo sapien
tagtgattgcgtttggctatgtgtt

SEQ ID NO: 1868487 - DNA, 25 bp, Homo sapien
ccataatggtatagatagtgattgc

SEQ ID NO: 1868488 - DNA, 25 bp, Homo sapien
gagttccagaacaggtaccacagct

SEQ ID NO: 1868489 - DNA, 25 bp, Homo sapien
gcagagaagtccacaccattaggga

SEQ ID NO: 1868490 - DNA, 25 bp, Homo sapien
taactatcgtttgctctttagacgg

SEQ ID NO: 1868491 - DNA, 25 bp, Homo sapien
gaaccatgtactagttcctgggaat

SEQ ID NO: 1868492 - DNA, 25 bp, Homo sapien
taagccagaaagtatgagaattctc

SEQ ID NO: 1868493 - DNA, 25 bp, Homo sapien
acgaacaccaggagaataagccaga

SEQ ID NO: 1868494 - DNA, 25 bp, Homo sapien
tgtataagtgagaaggcaaacagct

SEQ ID NO: 1868495 - DNA, 25 bp, Homo sapien
cagctgattcctgttaagacgaaca

SEQ ID NO: 1868496 - DNA, 25 bp, Homo sapien
acccgttcctcggcggagctgcttg

SEQ ID NO: 1868497 - DNA, 25 bp, Homo sapien
gggcctttaagcctctcgccttcgc

SEQ ID NO: 1868498 - DNA, 25 bp, Homo sapien
gtgtcccctgcacccgttcctcggc

SEQ ID NO: 1868499 - DNA, 25 bp, Homo sapien
cctgcacccgttcctcggcggagct

SEQ ID NO: 1868500 - DNA, 25 bp, Homo sapien
gtaccctgtggaaggggtctgcaga

SEQ ID NO: 1868501 - DNA, 25 bp, Homo sapien
tccaaatgctgccctgaaggccctt

SEQ ID NO: 1868502 - DNA, 25 bp, Homo sapien
ccttcctggagagcaggggtaccct

SEQ ID NO: 1868503 - DNA, 25 bp, Homo sapien
tctgcagagtgttgtcttccagtca

SEQ ID NO: 1868504 - DNA, 25 bp, Homo sapien
cgtatcacgtaaaccatgaatggaa

SEQ ID NO: 1868505 - DNA, 25 bp, Homo sapien
tagggaacccggagatatcgtatca

SEQ ID NO: 1868506 - DNA, 25 bp, Homo sapien
tggaatacatcaacaccttcagaac

SEQ ID NO: 1868507 - DNA, 25 bp, Homo sapien
caattggcttgctatgggcttcttc

SEQ ID NO: 1868508 - DNA, 25 bp, Homo sapien
catcccaatcctcaatctgtagtct

SEQ ID NO: 1868509 - DNA, 25 bp, Homo sapien
ttgcacttaatttggcagcattggc

SEQ ID NO: 1868510 - DNA, 25 bp, Homo sapien
ccatgtaggtatgttgtgttttgtg

SEQ ID NO: 1868511 - DNA, 25 bp, Homo sapien
atctgtagtctcttccaaggttttc

SEQ ID NO: 1868512 - DNA, 25 bp, Homo sapien
gggtcctccttgcaatctgacaaag

SEQ ID NO: 1868513 - DNA, 25 bp, Homo sapien
tgacaaaggggcactacccagttcc

SEQ ID NO: 1868514 - DNA, 25 bp, Homo sapien
ttccctcacatctgaagtggaaccc

SEQ ID NO: 1868515 - DNA, 25 bp, Homo sapien
ttctatgaatggctctggggtcctc

SEQ ID NO: 1868516 - DNA, 25 bp, Homo sapien
cagggatggggcacgaccgtttctt

SEQ ID NO: 1868517 - DNA, 25 bp, Homo sapien
gggatggggcacgaccgtttcttgc

SEQ ID NO: 1868518 - DNA, 25 bp, Homo sapien
ccagggatggggcacgaccgtttct

SEQ ID NO: 1868519 - DNA, 25 bp, Homo sapien
ggatggggcacgaccgtttcttgcc

SEQ ID NO: 1868520 - DNA, 25 bp, Homo sapien
tcttggctgcttgacaacgttggat

SEQ ID NO: 1868521 - DNA, 25 bp, Homo sapien
gggaaagccagttctattgttagca

SEQ ID NO: 1868522 - DNA, 25 bp, Homo sapien
aatttaggtgaaaacaggtcaacat

SEQ ID NO: 1868523 - DNA, 25 bp, Homo sapien
tgagaaaggccagggtatgccactg

SEQ ID NO: 1868524 - DNA, 25 bp, Homo sapien
ctggttcaatcaaaaccacgtttgg

SEQ ID NO: 1868525 - DNA, 25 bp, Homo sapien
tctgtgcatagatcctgaaaggaaa

SEQ ID NO: 1868526 - DNA, 25 bp, Homo sapien
gaacattgccttgggttgctttcca

SEQ ID NO: 1868527 - DNA, 25 bp, Homo sapien
tccagagactgaagaactaggttgt

SEQ ID NO: 1868528 - DNA, 25 bp, Homo sapien
gcttaaagttgggactgagacagga

SEQ ID NO: 1868529 - DNA, 25 bp, Homo sapien
aggaacatcgtttgtattgaatcca

SEQ ID NO: 1868530 - DNA, 25 bp, Homo sapien
gaggagcctttgaagccctcagaga

SEQ ID NO: 1868531 - DNA, 25 bp, Homo sapien
gcctttgaagccctcagagatcttc

SEQ ID NO: 1868532 - DNA, 25 bp, Homo sapien
gtttgtattgaatccaaagaggagc

SEQ ID NO: 1868533 - DNA, 25 bp, Homo sapien
taggcagccccagaacaagtggtct

SEQ ID NO: 1868534 - DNA, 25 bp, Homo sapien
cactttgtgtcattagtcagtctca

SEQ ID NO: 1868535 - DNA, 25 bp, Homo sapien
gagcttgctttgtgttgggcactgc

SEQ ID NO: 1868536 - DNA, 25 bp, Homo sapien
caggccacttcgaggctgcatgcag

SEQ ID NO: 1868537 - DNA, 25 bp, Homo sapien
tttggaatagactagacctctgcgg

SEQ ID NO: 1868538 - DNA, 25 bp, Homo sapien
tcagatatcatgacactttaggcat

SEQ ID NO: 1868539 - DNA, 25 bp, Homo sapien
acatgacatcacaccaaagaaactt

SEQ ID NO: 1868540 - DNA, 25 bp, Homo sapien
ctaggatgataggtacaagccacaa

SEQ ID NO: 1868541 - DNA, 25 bp, Homo sapien
caggaacttcatagtttccagttta

SEQ ID NO: 1868542 - DNA, 25 bp, Homo sapien
tctcatcggcatggagccgtggtcc

SEQ ID NO: 1868543 - DNA, 25 bp, Homo sapien
tctgcaaagttctcactcttctcgc

SEQ ID NO: 1868544 - DNA, 25 bp, Homo sapien
catagaaagcttcagacttagctgc

SEQ ID NO: 1868545 - DNA, 25 bp, Homo sapien
tcgcaaccaggaatctaaatcatag

SEQ ID NO: 1868546 - DNA, 25 bp, Homo sapien
tcctcggtgagcatggccttgcttc

SEQ ID NO: 1868547 - DNA, 25 bp, Homo sapien
tctggtctgggaagtagctcaggct

SEQ ID NO: 1868548 - DNA, 25 bp, Homo sapien
tgaaacccgttcttgcacatgttgg

SEQ ID NO: 1868549 - DNA, 25 bp, Homo sapien
gacagaagtctagtccacaagtggg

SEQ ID NO: 1868550 - DNA, 25 bp, Homo sapien
tacaaagggaaacctcactgggatg

SEQ ID NO: 1868551 - DNA, 25 bp, Homo sapien
tccaagtgggcatgaaagttcatca

SEQ ID NO: 1868552 - DNA, 25 bp, Homo sapien
ggatataatatctgccctgccttca

SEQ ID NO: 1868553 - DNA, 25 bp, Homo sapien
taaaaaagtgctccggctccaagtg

SEQ ID NO: 1868554 - DNA, 25 bp, Homo sapien
catggcatggttggagtacttctcc

SEQ ID NO: 1868555 - DNA, 25 bp, Homo sapien
gcacagagggtacacttggcagccc

SEQ ID NO: 1868556 - DNA, 25 bp, Homo sapien
tccaacaatttatctgaaggtccag

SEQ ID NO: 1868557 - DNA, 25 bp, Homo sapien
agccccattcgagaacccatggcat

SEQ ID NO: 1868558 - DNA, 25 bp, Homo sapien
catgtgcaggaaatgctgactccat

SEQ ID NO: 1868559 - DNA, 25 bp, Homo sapien
tctcatgtgcaggaaatgctgactc

SEQ ID NO: 1868560 - DNA, 25 bp, Homo sapien
tttttctctcatgtgcaggaaatgc

SEQ ID NO: 1868561 - DNA, 25 bp, Homo sapien
tttctctcatgtgcaggaaatgctg

SEQ ID NO: 1868562 - DNA, 25 bp, Homo sapien
tgaaggtgcttaataaggattggtc

SEQ ID NO: 1868563 - DNA, 25 bp, Homo sapien
ctgaaggtgcttaataaggattggt

SEQ ID NO: 1868564 - DNA, 25 bp, Homo sapien
cagcaaggatgaacatattctgcac

SEQ ID NO: 1868565 - DNA, 25 bp, Homo sapien
tcagcaaggatgaacatattctgca

SEQ ID NO: 1868566 - DNA, 25 bp, Homo sapien
cagtcgaaccaaatggccatgtgta

SEQ ID NO: 1868567 - DNA, 25 bp, Homo sapien
catgtgtacggctggccctttagag

SEQ ID NO: 1868568 - DNA, 25 bp, Homo sapien
tgtttagggtaagatgccacagtcg

SEQ ID NO: 1868569 - DNA, 25 bp, Homo sapien
ggcttcacactatgtggctggccag

SEQ ID NO: 1868570 - DNA, 25 bp, Homo sapien
cttggcttttcccatagatggcggt

SEQ ID NO: 1868571 - DNA, 25 bp, Homo sapien
ggagcacgcggatcagcccagtcgt

SEQ ID NO: 1868572 - DNA, 25 bp, Homo sapien
ttttcccatagatggcggtcccgga

SEQ ID NO: 1868573 - DNA, 25 bp, Homo sapien
ggatcagcccagtcgtggttctctg

SEQ ID NO: 1868574 - DNA, 25 bp, Homo sapien
tttctaatttttctacaatgacact

SEQ ID NO: 1868575 - DNA, 25 bp, Homo sapien
ttctaatttttctacaatgacactc

SEQ ID NO: 1868576 - DNA, 25 bp, Homo sapien
tctaatttttctacaatgacactcc

SEQ ID NO: 1868577 - DNA, 25 bp, Homo sapien
ttttctaatttttctacaatgacac

SEQ ID NO: 1868578 - DNA, 25 bp, Homo sapien
ctgctgaaagaccagtaggccagta

SEQ ID NO: 1868579 - DNA, 25 bp, Homo sapien
tatggactgaagataagatacaagc

SEQ ID NO: 1868580 - DNA, 25 bp, Homo sapien
atcattaggccccttggtggcacct

SEQ ID NO: 1868581 - DNA, 25 bp, Homo sapien
gatacaagcaggataattgttccag

SEQ ID NO: 1868582 - DNA, 25 bp, Homo sapien
ctgtgcagaaggataatgaccaggc

SEQ ID NO: 1868583 - DNA, 25 bp, Homo sapien
ttggcaaaaataccatagaaggcac

SEQ ID NO: 1868584 - DNA, 25 bp, Homo sapien
tgcagtcagctatgcagtgcacacc

SEQ ID NO: 1868585 - DNA, 25 bp, Homo sapien
cactacagtggagccgcattgtgcc

SEQ ID NO: 1868586 - DNA, 25 bp, Homo sapien
gcaaaggcactgtgttgagaagtcg

SEQ ID NO: 1868587 - DNA, 25 bp, Homo sapien
ggcactgtgttgagaagtcgtgggt

SEQ ID NO: 1868588 - DNA, 25 bp, Homo sapien
aaaggcactgtgttgagaagtcgtg

SEQ ID NO: 1868589 - DNA, 25 bp, Homo sapien
cagcaaaggcactgtgttgagaagt

SEQ ID NO: 1868590 - DNA, 25 bp, Homo sapien
ttagacagacaagagcccagagaac

SEQ ID NO: 1868591 - DNA, 25 bp, Homo sapien
tttagacagacaagagcccagagaa

SEQ ID NO: 1868592 - DNA, 25 bp, Homo sapien
ttttagacagacaagagcccagaga

SEQ ID NO: 1868593 - DNA, 25 bp, Homo sapien
cttttagacagacaagagcccagag

SEQ ID NO: 1868594 - DNA, 25 bp, Homo sapien
tcctccaggcttacaggctcacaga

SEQ ID NO: 1868595 - DNA, 25 bp, Homo sapien
atactcttcctccaggcttacaggc

SEQ ID NO: 1868596 - DNA, 25 bp, Homo sapien
cttggatctgcatactcttcctcca

SEQ ID NO: 1868597 - DNA, 25 bp, Homo sapien
tccaggcttacaggctcacagatca

SEQ ID NO: 1868598 - DNA, 25 bp, Homo sapien
actggacatgtgctgttgggttaga

SEQ ID NO: 1868599 - DNA, 25 bp, Homo sapien
tagaattcagattcatgggtctgct

SEQ ID NO: 1868600 - DNA, 25 bp, Homo sapien
tgggtctgctaagtcctagttcaca

SEQ ID NO: 1868601 - DNA, 25 bp, Homo sapien
caggagggataagagaggactggac

SEQ ID NO: 1868602 - DNA, 25 bp, Homo sapien
tgaaaccacggatgccattttacat

SEQ ID NO: 1868603 - DNA, 25 bp, Homo sapien
cttccacggggtagactcctggttg

SEQ ID NO: 1868604 - DNA, 25 bp, Homo sapien
ttttacatgccttgtaggcttccac

SEQ ID NO: 1868605 - DNA, 25 bp, Homo sapien
tgtaggcttccacggggtagactcc

SEQ ID NO: 1868606 - DNA, 25 bp, Homo sapien
ttgaaggtgaagagtgcattgtgaa

SEQ ID NO: 1868607 - DNA, 25 bp, Homo sapien
tgagaattcattcgttaatgctggg

SEQ ID NO: 1868608 - DNA, 25 bp, Homo sapien
ctccctgacaaggccgttgtgagaa

SEQ ID NO: 1868609 - DNA, 25 bp, Homo sapien
aaggtgaagagtgcattgtgaatgc

SEQ ID NO: 1868610 - DNA, 25 bp, Homo sapien
aacttcttcaggatgatacccctga

SEQ ID NO: 1868611 - DNA, 25 bp, Homo sapien
ctgaatgacaacttcttcaggatga

SEQ ID NO: 1868612 - DNA, 25 bp, Homo sapien
cttcaggatgatacccctgaaccat

SEQ ID NO: 1868613 - DNA, 25 bp, Homo sapien
cttcttcaggatgatacccctgaac

SEQ ID NO: 1868614 - DNA, 25 bp, Homo sapien
tttgtcggcggagggtcaggactgg

SEQ ID NO: 1868615 - DNA, 25 bp, Homo sapien
tgtcggcggagggtcaggactggcc

SEQ ID NO: 1868616 - DNA, 25 bp, Homo sapien
caattcatcctgaccgcgtctgcaa

SEQ ID NO: 1868617 - DNA, 25 bp, Homo sapien
aggcaattcatcctgaccgcgtctg

SEQ ID NO: 1868618 - DNA, 25 bp, Homo sapien
ttttttggcctccaggtgcgatttg

SEQ ID NO: 1868619 - DNA, 25 bp, Homo sapien
ttctctccggcgctggaagcctgaa

SEQ ID NO: 1868620 - DNA, 25 bp, Homo sapien
caggtgcgatttgtactgaatgatc

SEQ ID NO: 1868621 - DNA, 25 bp, Homo sapien
ccctcttagtgattatgttcgctgt

SEQ ID NO: 1868622 - DNA, 25 bp, Homo sapien
cagcttcagagtgcctataagcagc

SEQ ID NO: 1868623 - DNA, 25 bp, Homo sapien
cagtcctccaacccttgttctggtt

SEQ ID NO: 1868624 - DNA, 25 bp, Homo sapien
gccatgaccattgactcagagaggg

SEQ ID NO: 1868625 - DNA, 25 bp, Homo sapien
gcactggccatgaccattgactcag

SEQ ID NO: 1868626 - DNA, 25 bp, Homo sapien
tcatcgtccaaggtgaggcagctaa

SEQ ID NO: 1868627 - DNA, 25 bp, Homo sapien
ggttaaaagtaacactcgctctgcc

SEQ ID NO: 1868628 - DNA, 25 bp, Homo sapien
tgaggagactctcaggtgtagtcag

SEQ ID NO: 1868629 - DNA, 25 bp, Homo sapien
tctgcagctggaatcgaatgaggtg

SEQ ID NO: 1868630 - DNA, 25 bp, Homo sapien
gggatggggagcccttgttctcatg

SEQ ID NO: 1868631 - DNA, 25 bp, Homo sapien
gatggggagcccttgttctcatgct

SEQ ID NO: 1868632 - DNA, 25 bp, Homo sapien
ggatggggagcccttgttctcatgc

SEQ ID NO: 1868633 - DNA, 25 bp, Homo sapien
tgcagcatgacttgcaccttcagag

SEQ ID NO: 1868634 - DNA, 25 bp, Homo sapien
tgaggctcccagttgcagcatgact

SEQ ID NO: 1868635 - DNA, 25 bp, Homo sapien
accttcagagtgtcggtgtacccca

SEQ ID NO: 1868636 - DNA, 25 bp, Homo sapien
gtcggtgtaccccaagctgtgcttt

SEQ ID NO: 1868637 - DNA, 25 bp, Homo sapien
cagagaagtgggaccccgactgaga

SEQ ID NO: 1868638 - DNA, 25 bp, Homo sapien
gggaccccgactgagaattcttgga

SEQ ID NO: 1868639 - DNA, 25 bp, Homo sapien
gccagagagccagcgtcagtgctcc

SEQ ID NO: 1868640 - DNA, 25 bp, Homo sapien
gatggcagtagctgtttagtccctg

SEQ ID NO: 1868641 - DNA, 25 bp, Homo sapien
gatgctgatgttgggaagtcctagt

SEQ ID NO: 1868642 - DNA, 25 bp, Homo sapien
tgcctcatggccaccgtagcagctg

SEQ ID NO: 1868643 - DNA, 25 bp, Homo sapien
gacaaggggcattcttggctgctgc

SEQ ID NO: 1868644 - DNA, 25 bp, Homo sapien
gctgcctgggtgttttcccgcattt

SEQ ID NO: 1868645 - DNA, 25 bp, Homo sapien
aaagcacggccctagcgtttcagcg

SEQ ID NO: 1868646 - DNA, 25 bp, Homo sapien
ccctgccagatgtttcggatgccaa

SEQ ID NO: 1868647 - DNA, 25 bp, Homo sapien
ccaactaatggagctcggcgaggct

SEQ ID NO: 1868648 - DNA, 25 bp, Homo sapien
tgagcgtctagcagaaaaagtgcct

SEQ ID NO: 1868649 - DNA, 25 bp, Homo sapien
gttacatcctctctcttgagtcctg

SEQ ID NO: 1868650 - DNA, 25 bp, Homo sapien
ccagaaagtgctctccaaatgtcct

SEQ ID NO: 1868651 - DNA, 25 bp, Homo sapien
caaatgtccttttatggttatcgag

SEQ ID NO: 1868652 - DNA, 25 bp, Homo sapien
catggatgtgatgggctcggtattc

SEQ ID NO: 1868653 - DNA, 25 bp, Homo sapien
agagtcatagactcaggtctgagct

SEQ ID NO: 1868654 - DNA, 25 bp, Homo sapien
gtgagagtcatagactcaggtctga

SEQ ID NO: 1868655 - DNA, 25 bp, Homo sapien
tggagtgagagtcatagactcaggt

SEQ ID NO: 1868656 - DNA, 25 bp, Homo sapien
gagtgagagtcatagactcaggtct

SEQ ID NO: 1868657 - DNA, 25 bp, Homo sapien
caaagtgaatgtcctgccctgtgat

SEQ ID NO: 1868658 - DNA, 25 bp, Homo sapien
cttcaggaggagaattgatggccca

SEQ ID NO: 1868659 - DNA, 25 bp, Homo sapien
ggcccaaagtgaatgtcctgccctg

SEQ ID NO: 1868660 - DNA, 25 bp, Homo sapien
gaggagaattgatggcccaaagtga

SEQ ID NO: 1868661 - DNA, 25 bp, Homo sapien
tcagccacagcatcagtgtcgtgtg

SEQ ID NO: 1868662 - DNA, 25 bp, Homo sapien
catcagtgtcgtgtggggagggaga

SEQ ID NO: 1868663 - DNA, 25 bp, Homo sapien
ccatcagccacagcatcagtgtcgt

SEQ ID NO: 1868664 - DNA, 25 bp, Homo sapien
ccacagcatcagtgtcgtgtgggga

SEQ ID NO: 1868665 - DNA, 25 bp, Homo sapien
caagctgcccagattcttggcctgg

SEQ ID NO: 1868666 - DNA, 25 bp, Homo sapien
gggccgcacggcttgtttccatggt

SEQ ID NO: 1868667 - DNA, 25 bp, Homo sapien
gggtggtcacctcaaaattggctgt

SEQ ID NO: 1868668 - DNA, 25 bp, Homo sapien
ttttctgggagcctcggtgtctgcc

SEQ ID NO: 1868669 - DNA, 25 bp, Homo sapien
cctggtcaccccgacgctgagcttc

SEQ ID NO: 1868670 - DNA, 25 bp, Homo sapien
cgctgagcttccctgctatcttctc

SEQ ID NO: 1868671 - DNA, 25 bp, Homo sapien
ggctcgttgttaggggcctgctctc

SEQ ID NO: 1868672 - DNA, 25 bp, Homo sapien
tcataagggctcgttgttaggggcc

SEQ ID NO: 1868673 - DNA, 25 bp, Homo sapien
tgcagcaaggatccaagtcatgact

SEQ ID NO: 1868674 - DNA, 25 bp, Homo sapien
tactaagaagatggtaggaatctcc

SEQ ID NO: 1868675 - DNA, 25 bp, Homo sapien
tctctgggtcaagctcctatgttcc

SEQ ID NO: 1868676 - DNA, 25 bp, Homo sapien
taaagctcacgttattgggacagga

SEQ ID NO: 1868677 - DNA, 25 bp, Homo sapien
gcagcaaacaccgacttgagcgtgg

SEQ ID NO: 1868678 - DNA, 25 bp, Homo sapien
catgacaatgtaattctcattagca

SEQ ID NO: 1868679 - DNA, 25 bp, Homo sapien
cgctgagttgcgcagcaaacaccga

SEQ ID NO: 1868680 - DNA, 25 bp, Homo sapien
cagcgacgctgagttgcgcagcaaa

SEQ ID NO: 1868681 - DNA, 25 bp, Homo sapien
cactgtgaagtttcaagggctgctg

SEQ ID NO: 1868682 - DNA, 25 bp, Homo sapien
ttctctgcgtgtcttactctcatct

SEQ ID NO: 1868683 - DNA, 25 bp, Homo sapien
ccactatgggcgctcatagccaggg

SEQ ID NO: 1868684 - DNA, 25 bp, Homo sapien
tgggcgctcatagccagggcttctc

SEQ ID NO: 1868685 - DNA, 25 bp, Homo sapien
tggtgatccatagaccataagtcca

SEQ ID NO: 1868686 - DNA, 25 bp, Homo sapien
tgcagttgcaactgaccccagggaa

SEQ ID NO: 1868687 - DNA, 25 bp, Homo sapien
ggagcctgataccatgagaagcacc

SEQ ID NO: 1868688 - DNA, 25 bp, Homo sapien
aatggggtcagaaatggtctggccc

SEQ ID NO: 1868689 - DNA, 25 bp, Homo sapien
gtcttccccagtcacagggctgggg

SEQ ID NO: 1868690 - DNA, 25 bp, Homo sapien
cccagtcacagggctggggccttcc

SEQ ID NO: 1868691 - DNA, 25 bp, Homo sapien
tccccagtcacagggctggggcctt

SEQ ID NO: 1868692 - DNA, 25 bp, Homo sapien
tcttccccagtcacagggctggggc

SEQ ID NO: 1868693 - DNA, 25 bp, Homo sapien
tgtcgttctatgcaggtgaagtcca

SEQ ID NO: 1868694 - DNA, 25 bp, Homo sapien
tcgttctatgcaggtgaagtccagc

SEQ ID NO: 1868695 - DNA, 25 bp, Homo sapien
aaatttcctgtgtcgttctatgcag

SEQ ID NO: 1868696 - DNA, 25 bp, Homo sapien
cctgtgtcgttctatgcaggtgaag

SEQ ID NO: 1868697 - DNA, 25 bp, Homo sapien
cagaggaggctggtttggccaggac

SEQ ID NO: 1868698 - DNA, 25 bp, Homo sapien
ttggccaggactgttgcctgcctct

SEQ ID NO: 1868699 - DNA, 25 bp, Homo sapien
ggtttggccaggactgttgcctgcc

SEQ ID NO: 1868700 - DNA, 25 bp, Homo sapien
gctggtttggccaggactgttgcct

SEQ ID NO: 1868701 - DNA, 25 bp, Homo sapien
ttgagattagctcaaatgtctcttt

SEQ ID NO: 1868702 - DNA, 25 bp, Homo sapien
ctttaaagatatgtggatgatccac

SEQ ID NO: 1868703 - DNA, 25 bp, Homo sapien
gtattgagattagctcaaatgtctc

SEQ ID NO: 1868704 - DNA, 25 bp, Homo sapien
ctggtattgagattagctcaaatgt

SEQ ID NO: 1868705 - DNA, 25 bp, Homo sapien
tgtctctccgagagaacagctcgca

SEQ ID NO: 1868706 - DNA, 25 bp, Homo sapien
cccagttggtagctgtggagcagaa

SEQ ID NO: 1868707 - DNA, 25 bp, Homo sapien
cctgtcagcaatcccgggtcgttgt

SEQ ID NO: 1868708 - DNA, 25 bp, Homo sapien
gaacagctcgcacttcccaggtgtg

SEQ ID NO: 1868709 - DNA, 25 bp, Homo sapien
tctctggtctcctttgagtttcagt

SEQ ID NO: 1868710 - DNA, 25 bp, Homo sapien
ctctggtctcctttgagtttcagtc

SEQ ID NO: 1868711 - DNA, 25 bp, Homo sapien
gagctgagaagctggcgctgtctcc

SEQ ID NO: 1868712 - DNA, 25 bp, Homo sapien
agctgggagagtcgtcaagatcagc

SEQ ID NO: 1868713 - DNA, 25 bp, Homo sapien
tgggagagtcgtcaagatcagcagc

SEQ ID NO: 1868714 - DNA, 25 bp, Homo sapien
gagtcgtcaagatcagcagctcaag

SEQ ID NO: 1868715 - DNA, 25 bp, Homo sapien
gcaagcagggtgagcttggacctac

SEQ ID NO: 1868716 - DNA, 25 bp, Homo sapien
ctgcaagcagggtgagcttggacct

SEQ ID NO: 1868717 - DNA, 25 bp, Homo sapien
tgcaagcagggtgagcttggaccta

SEQ ID NO: 1868718 - DNA, 25 bp, Homo sapien
cttttcttgcaagacgatgagcttg

SEQ ID NO: 1868719 - DNA, 25 bp, Homo sapien
ttttcttgcaagacgatgagcttga

SEQ ID NO: 1868720 - DNA, 25 bp, Homo sapien
tttcttgcaagacgatgagcttgac

SEQ ID NO: 1868721 - DNA, 25 bp, Homo sapien
ttcttgcaagacgatgagcttgacc

SEQ ID NO: 1868722 - DNA, 25 bp, Homo sapien
ggaggaatggtgcaagtcacaaccc

SEQ ID NO: 1868723 - DNA, 25 bp, Homo sapien
cctttttgacccttcaacaagatgt

SEQ ID NO: 1868724 - DNA, 25 bp, Homo sapien
tcaacaagatgtttcttgagcaaat

SEQ ID NO: 1868725 - DNA, 25 bp, Homo sapien
tggaggaatggtgcaagtcacaacc

SEQ ID NO: 1868726 - DNA, 25 bp, Homo sapien
aacatcctcctaagtgctgctctga

SEQ ID NO: 1868727 - DNA, 25 bp, Homo sapien
tgctctgagccccgttggtcgccag

SEQ ID NO: 1868728 - DNA, 25 bp, Homo sapien
cgttggtcgccagcccctcgggtgt

SEQ ID NO: 1868729 - DNA, 25 bp, Homo sapien
catcctgcaatgtctctgttccttg

SEQ ID NO: 1868730 - DNA, 25 bp, Homo sapien
ggccattgccagcactgagcctttt

SEQ ID NO: 1868731 - DNA, 25 bp, Homo sapien
tctgctgtaccagaagaatccttgg

SEQ ID NO: 1868732 - DNA, 25 bp, Homo sapien
tgcttggccggccattgccagcact

SEQ ID NO: 1868733 - DNA, 25 bp, Homo sapien
caggagtgcccatttctctgctgta

SEQ ID NO: 1868734 - DNA, 25 bp, Homo sapien
tcccctctgccaaatgaccagtgca

SEQ ID NO: 1868735 - DNA, 25 bp, Homo sapien
tctcccctactagatgaccagttca

SEQ ID NO: 1868736 - DNA, 25 bp, Homo sapien
aaccagatcactagtgcatccacag

SEQ ID NO: 1868737 - DNA, 25 bp, Homo sapien
accagtgcatccacagtcccctctg

SEQ ID NO: 1868738 - DNA, 25 bp, Homo sapien
cctggtgcgccatgattctttgagt

SEQ ID NO: 1868739 - DNA, 25 bp, Homo sapien
gggtaagctgacacttcacgttcct

SEQ ID NO: 1868740 - DNA, 25 bp, Homo sapien
tcgtttaggatctttctgactgcca

SEQ ID NO: 1868741 - DNA, 25 bp, Homo sapien
caatgattctgtaggccaagtctcc

SEQ ID NO: 1868742 - DNA, 25 bp, Homo sapien
gccagataggatgcccagagtagaa

SEQ ID NO: 1868743 - DNA, 25 bp, Homo sapien
tgtggccagataggatgcccagagt

SEQ ID NO: 1868744 - DNA, 25 bp, Homo sapien
ctctttataatgatatcataggctg

SEQ ID NO: 1868745 - DNA, 25 bp, Homo sapien
tcatgtggccagataggatgcccag

SEQ ID NO: 1868746 - DNA, 25 bp, Homo sapien
aatggaattactccccactcagtcc

SEQ ID NO: 1868747 - DNA, 25 bp, Homo sapien
cagaagcactgaagtagtactgctc

SEQ ID NO: 1868748 - DNA, 25 bp, Homo sapien
gctaatgtggaatggaattactccc

SEQ ID NO: 1868749 - DNA, 25 bp, Homo sapien
cactgaagtagtactgctctaaggt

SEQ ID NO: 1868750 - DNA, 25 bp, Homo sapien
tgcctatcctgttcgcctggccagg

SEQ ID NO: 1868751 - DNA, 25 bp, Homo sapien
taaaacagagggaatgacaaccact

SEQ ID NO: 1868752 - DNA, 25 bp, Homo sapien
tggattatcatttgcaatagcccaa

SEQ ID NO: 1868753 - DNA, 25 bp, Homo sapien
tgtccaatccccatagggcatctga

SEQ ID NO: 1868754 - DNA, 25 bp, Homo sapien
cataacaagtactgggggcctcaca

SEQ ID NO: 1868755 - DNA, 25 bp, Homo sapien
aaggttgtgtcccttcttcaaacat

SEQ ID NO: 1868756 - DNA, 25 bp, Homo sapien
gggcctcacagtcttcacagcactg

SEQ ID NO: 1868757 - DNA, 25 bp, Homo sapien
aagggaggcatttgcatctcattgc

SEQ ID NO: 1868758 - DNA, 25 bp, Homo sapien
cagtctttccccgaagtgagaagag

SEQ ID NO: 1868759 - DNA, 25 bp, Homo sapien
cccgctgggttcagagcaatagtaa

SEQ ID NO: 1868760 - DNA, 25 bp, Homo sapien
gaaatgtgcatcttgcccgctgggt

SEQ ID NO: 1868761 - DNA, 25 bp, Homo sapien
gagaagagggtaccacactgctgct

SEQ ID NO: 1868762 - DNA, 25 bp, Homo sapien
taggcatccagacagtgtgttgaat

SEQ ID NO: 1868763 - DNA, 25 bp, Homo sapien
tgtaggataccacaaagttagggac

SEQ ID NO: 1868764 - DNA, 25 bp, Homo sapien
ggctcagcatggataactgtcctca

SEQ ID NO: 1868765 - DNA, 25 bp, Homo sapien
agttagggacccgtctgttgtgtgc

SEQ ID NO: 1868766 - DNA, 25 bp, Homo sapien
cttctgcctgcacgacctcctgggc

SEQ ID NO: 1868767 - DNA, 25 bp, Homo sapien
tgtcttctgcctgcacgacctcctg

SEQ ID NO: 1868768 - DNA, 25 bp, Homo sapien
gccccgccgatgatgtcttctgcct

SEQ ID NO: 1868769 - DNA, 25 bp, Homo sapien
ccccgccgatgatgtcttctgcctg

SEQ ID NO: 1868770 - DNA, 25 bp, Homo sapien
tttgtcacacacttagcccactggg

SEQ ID NO: 1868771 - DNA, 25 bp, Homo sapien
taccatggtttatgttcagggccat

SEQ ID NO: 1868772 - DNA, 25 bp, Homo sapien
tgctgccagacttcaccctgccaga

SEQ ID NO: 1868773 - DNA, 25 bp, Homo sapien
gaggggccactaccccactttgtca

SEQ ID NO: 1868774 - DNA, 25 bp, Homo sapien
ggcttcacattgtagcccgtctcca

SEQ ID NO: 1868775 - DNA, 25 bp, Homo sapien
acattgtagcccgtctccacagtgc

SEQ ID NO: 1868776 - DNA, 25 bp, Homo sapien
ctgctccggcttcacattgtagccc

SEQ ID NO: 1868777 - DNA, 25 bp, Homo sapien
tccggcttcacattgtagcccgtct

SEQ ID NO: 1868778 - DNA, 25 bp, Homo sapien
tcctcttcctgcaacccatcatctc

SEQ ID NO: 1868779 - DNA, 25 bp, Homo sapien
tccaccacgagctcatcctcaggca

SEQ ID NO: 1868780 - DNA, 25 bp, Homo sapien
tcctgcaacccatcatctctggaca

SEQ ID NO: 1868781 - DNA, 25 bp, Homo sapien
ccatcctggcatccaccacgagctc

SEQ ID NO: 1868782 - DNA, 25 bp, Homo sapien
tttctcctcggatcttcttaatctt

SEQ ID NO: 1868783 - DNA, 25 bp, Homo sapien
ggctttttctcctcggatcttctta

SEQ ID NO: 1868784 - DNA, 25 bp, Homo sapien
tctcctcggatcttcttaatcttca

SEQ ID NO: 1868785 - DNA, 25 bp, Homo sapien
ttgggctttttctcctcggatcttc

SEQ ID NO: 1868786 - DNA, 25 bp, Homo sapien
tcagctcatagaccaggttaggaag

SEQ ID NO: 1868787 - DNA, 25 bp, Homo sapien
aatgattcgcttattaggtaaagta

SEQ ID NO: 1868788 - DNA, 25 bp, Homo sapien
gtcaagtttaaatggagcagtcttt

SEQ ID NO: 1868789 - DNA, 25 bp, Homo sapien
gctttttatggagtaaatgattcgc

SEQ ID NO: 1868790 - DNA, 25 bp, Homo sapien
tgtgataagtatgctcctctgaagc

SEQ ID NO: 1868791 - DNA, 25 bp, Homo sapien
tctggggacacggacgtgcccacat

SEQ ID NO: 1868792 - DNA, 25 bp, Homo sapien
gaatgacccctattagcaccagtgg

SEQ ID NO: 1868793 - DNA, 25 bp, Homo sapien
gaagggcttgcagtgtgataagtat

SEQ ID NO: 1868794 - DNA, 25 bp, Homo sapien
catcaggcccaaagataaagccaaa

SEQ ID NO: 1868795 - DNA, 25 bp, Homo sapien
ccaggatgcaagttggaaattctat

SEQ ID NO: 1868796 - DNA, 25 bp, Homo sapien
taaagccaaaccagaacaccagatt

SEQ ID NO: 1868797 - DNA, 25 bp, Homo sapien
gattatacccagcttgagccctgag

SEQ ID NO: 1868798 - DNA, 25 bp, Homo sapien
gcttggtgtttgcaattgtcttcgg

SEQ ID NO: 1868799 - DNA, 25 bp, Homo sapien
tgtgctgtagccaagatccacttgc

SEQ ID NO: 1868800 - DNA, 25 bp, Homo sapien
gcctgaacacctcttgcaacgtcca

SEQ ID NO: 1868801 - DNA, 25 bp, Homo sapien
ttactagtccccgtggtctgcatgg

SEQ ID NO: 1868802 - DNA, 25 bp, Homo sapien
cccaatggagattcatcatggttct

SEQ ID NO: 1868803 - DNA, 25 bp, Homo sapien
ccaatggagattcatcatggttctt

SEQ ID NO: 1868804 - DNA, 25 bp, Homo sapien
ccctgtgctcatgggaacatctgcc

SEQ ID NO: 1868805 - DNA, 25 bp, Homo sapien
gagctgttggtttattccctgggac

SEQ ID NO: 1868806 - DNA, 25 bp, Homo sapien
ctcctttgggtgacaaaatgccagg

SEQ ID NO: 1868807 - DNA, 25 bp, Homo sapien
tgggactgtagcaaaagctgctgct

SEQ ID NO: 1868808 - DNA, 25 bp, Homo sapien
gcacgacatagacttgccagacgcc

SEQ ID NO: 1868809 - DNA, 25 bp, Homo sapien
gatgagaaagagtagagaccccctt

SEQ ID NO: 1868810 - DNA, 25 bp, Homo sapien
acagcacctggactacaactgtgcc

SEQ ID NO: 1868811 - DNA, 25 bp, Homo sapien
tctgcggcagagatggagcatcacc

SEQ ID NO: 1868812 - DNA, 25 bp, Homo sapien
cagcaaggactaacagccgaggaga

SEQ ID NO: 1868813 - DNA, 25 bp, Homo sapien
ggcaattgacatctgctaccccagt

SEQ ID NO: 1868814 - DNA, 25 bp, Homo sapien
caaagttagaatggacctgtcaggc

SEQ ID NO: 1868815 - DNA, 25 bp, Homo sapien
cagtgatatctggagggcaattgac

SEQ ID NO: 1868816 - DNA, 25 bp, Homo sapien
cctgtggtccacatccatttctaca

SEQ ID NO: 1868817 - DNA, 25 bp, Homo sapien
ccacatccatttctacagcatacat

SEQ ID NO: 1868818 - DNA, 25 bp, Homo sapien
tgtggtccacatccatttctacagc

SEQ ID NO: 1868819 - DNA, 25 bp, Homo sapien
cacctgtggtccacatccatttcta

SEQ ID NO: 1868820 - DNA, 25 bp, Homo sapien
taaaatactgccgaagaggctttgt

SEQ ID NO: 1868821 - DNA, 25 bp, Homo sapien
tactgccgaagaggctttgttatct

SEQ ID NO: 1868822 - DNA, 25 bp, Homo sapien
gccgaagaggctttgttatctgttt

SEQ ID NO: 1868823 - DNA, 25 bp, Homo sapien
cactaaaatactgccgaagaggctt

SEQ ID NO: 1868824 - DNA, 25 bp, Homo sapien
agcccactccatgaactggctgttg

SEQ ID NO: 1868825 - DNA, 25 bp, Homo sapien
gccaggaccagagctctcagtcctc

SEQ ID NO: 1868826 - DNA, 25 bp, Homo sapien
tccctgggaatgcatgcctctccat

SEQ ID NO: 1868827 - DNA, 25 bp, Homo sapien
aactggctgttgagagccaggacca

SEQ ID NO: 1868828 - DNA, 25 bp, Homo sapien
taggcatcaatactcctcacgggag

SEQ ID NO: 1868829 - DNA, 25 bp, Homo sapien
tagaaaataagatcgaggcagtgct

SEQ ID NO: 1868830 - DNA, 25 bp, Homo sapien
aggacacgcatctcattccagtagg

SEQ ID NO: 1868831 - DNA, 25 bp, Homo sapien
cagagagcacccgtgaagatgcacg

SEQ ID NO: 1868832 - DNA, 25 bp, Homo sapien
cctcctggtgttgagcacgtcgttg

SEQ ID NO: 1868833 - DNA, 25 bp, Homo sapien
ctggcgacctggctgagcaatcatc

SEQ ID NO: 1868834 - DNA, 25 bp, Homo sapien
taagaagctctctcatggagagtcc

SEQ ID NO: 1868835 - DNA, 25 bp, Homo sapien
cgtcgttgagaaccctggcgacctg

SEQ ID NO: 1868836 - DNA, 25 bp, Homo sapien
gctggactcctcacgttgaaatgat

SEQ ID NO: 1868837 - DNA, 25 bp, Homo sapien
tattagtcctctgagaacttgggcc

SEQ ID NO: 1868838 - DNA, 25 bp, Homo sapien
caattataagtctgggagcctgctg

SEQ ID NO: 1868839 - DNA, 25 bp, Homo sapien
aactaagtaggccacaattctgggc

SEQ ID NO: 1868840 - DNA, 25 bp, Homo sapien
tgagaacatttggatctcaggggtg

SEQ ID NO: 1868841 - DNA, 25 bp, Homo sapien
gagaacatttggatctcaggggtga

SEQ ID NO: 1868842 - DNA, 25 bp, Homo sapien
tatgagaacatttggatctcagggg

SEQ ID NO: 1868843 - DNA, 25 bp, Homo sapien
aatatgagaacatttggatctcagg

SEQ ID NO: 1868844 - DNA, 25 bp, Homo sapien
tgaactccaagacgctcagcttcca

SEQ ID NO: 1868845 - DNA, 25 bp, Homo sapien
tggcacaagaaagagcctggctctg

SEQ ID NO: 1868846 - DNA, 25 bp, Homo sapien
tcctgcctgatgaggccgaatgagc

SEQ ID NO: 1868847 - DNA, 25 bp, Homo sapien
tgggccacatcagctccacatgaat

SEQ ID NO: 1868848 - DNA, 25 bp, Homo sapien
cgttgctgacagcttaataatgtga

SEQ ID NO: 1868849 - DNA, 25 bp, Homo sapien
agaaatctaaacaacgccctggcgt

SEQ ID NO: 1868850 - DNA, 25 bp, Homo sapien
gagcatgtgtgaggagttcccacca

SEQ ID NO: 1868851 - DNA, 25 bp, Homo sapien
tgttgataaaatccccatggagccc

SEQ ID NO: 1868852 - DNA, 25 bp, Homo sapien
agacagaaccaagtgccatgcaggg

SEQ ID NO: 1868853 - DNA, 25 bp, Homo sapien
gcaccagacagaaccaagtgccatg

SEQ ID NO: 1868854 - DNA, 25 bp, Homo sapien
cagacagaaccaagtgccatgcagg

SEQ ID NO: 1868855 - DNA, 25 bp, Homo sapien
accagacagaaccaagtgccatgca

SEQ ID NO: 1868856 - DNA, 25 bp, Homo sapien
cagacaatgagttccacatttagaa

SEQ ID NO: 1868857 - DNA, 25 bp, Homo sapien
ttgcttcttcctctactccatgccc

SEQ ID NO: 1868858 - DNA, 25 bp, Homo sapien
aaatttcagtagaaagaatcccatt

SEQ ID NO: 1868859 - DNA, 25 bp, Homo sapien
ctcaaagccagtacagacaatgagt

SEQ ID NO: 1868860 - DNA, 25 bp, Homo sapien
cagagactcccaattaccaaaaaca

SEQ ID NO: 1868861 - DNA, 25 bp, Homo sapien
ctggaaccatcttggatggctccca

SEQ ID NO: 1868862 - DNA, 25 bp, Homo sapien
caagggccatggaatgactgtgtcc

SEQ ID NO: 1868863 - DNA, 25 bp, Homo sapien
aacaccctggaaccatcttggatgg

SEQ ID NO: 1868864 - DNA, 25 bp, Homo sapien
ctttgacgcagcagacagtctctct

SEQ ID NO: 1868865 - DNA, 25 bp, Homo sapien
gtctctctgatgatacttggatgac

SEQ ID NO: 1868866 - DNA, 25 bp, Homo sapien
ttgacgcagcagacagtctctctga

SEQ ID NO: 1868867 - DNA, 25 bp, Homo sapien
gatgatacttggatgacattccatt

SEQ ID NO: 1868868 - DNA, 25 bp, Homo sapien
tgtgagacttgatggcagtctttgg

SEQ ID NO: 1868869 - DNA, 25 bp, Homo sapien
gctcttattgcttatgaacataagc

SEQ ID NO: 1868870 - DNA, 25 bp, Homo sapien
acataagcaactgttgtgggcctca

SEQ ID NO: 1868871 - DNA, 25 bp, Homo sapien
gcagtctttgggttgaaatcctagc

SEQ ID NO: 1868872 - DNA, 25 bp, Homo sapien
catatgaggactgccattaacacta

SEQ ID NO: 1868873 - DNA, 25 bp, Homo sapien
gaggtgaagttttttgtgtcatggc

SEQ ID NO: 1868874 - DNA, 25 bp, Homo sapien
caccttggttttgcaccgggagagg

SEQ ID NO: 1868875 - DNA, 25 bp, Homo sapien
cactacttgtgatatggcagttaga

SEQ ID NO: 1868876 - DNA, 25 bp, Homo sapien
ctcaaagaatgagccacaagtgata

SEQ ID NO: 1868877 - DNA, 25 bp, Homo sapien
tgcagtgcgggctttgttcttgcct

SEQ ID NO: 1868878 - DNA, 25 bp, Homo sapien
tttgggctcagtagtctcagaccag

SEQ ID NO: 1868879 - DNA, 25 bp, Homo sapien
tcttgcctgtgtggaggcatttcac

SEQ ID NO: 1868880 - DNA, 25 bp, Homo sapien
gccctgttgttgtctttattatgtt

SEQ ID NO: 1868881 - DNA, 25 bp, Homo sapien
gttcagcgagagtctcatgcttttt

SEQ ID NO: 1868882 - DNA, 25 bp, Homo sapien
ggttcagcgagagtctcatgctttt

SEQ ID NO: 1868883 - DNA, 25 bp, Homo sapien
ttggccctgttgttgtctttattat

SEQ ID NO: 1868884 - DNA, 25 bp, Homo sapien
gcagcaggtcctgttcgcttaagtt

SEQ ID NO: 1868885 - DNA, 25 bp, Homo sapien
taagctgggagatgcatactgacaa

SEQ ID NO: 1868886 - DNA, 25 bp, Homo sapien
tataaaataggacaacgaggtggcc

SEQ ID NO: 1868887 - DNA, 25 bp, Homo sapien
tgaggcgagtcacagaagtacttac

SEQ ID NO: 1868888 - DNA, 25 bp, Homo sapien
gcctggaaagtcagcctgggaaaac

SEQ ID NO: 1868889 - DNA, 25 bp, Homo sapien
taagatcaagacttcactggcccca

SEQ ID NO: 1868890 - DNA, 25 bp, Homo sapien
gaaaactcgcacttggtgtggcctt

SEQ ID NO: 1868891 - DNA, 25 bp, Homo sapien
tctaagatgcttggtattgtctgtc

SEQ ID NO: 1868892 - DNA, 25 bp, Homo sapien
gatcgtgtggccaaataagctgatg

SEQ ID NO: 1868893 - DNA, 25 bp, Homo sapien
aaggaagcctcctaccctatagctg

SEQ ID NO: 1868894 - DNA, 25 bp, Homo sapien
tgttcttgggacacctaaggacctc

SEQ ID NO: 1868895 - DNA, 25 bp, Homo sapien
taagctgatggactctgtttccgac

SEQ ID NO: 1868896 - DNA, 25 bp, Homo sapien
tgcacatatgataagaaggccagac

SEQ ID NO: 1868897 - DNA, 25 bp, Homo sapien
gatgtgctgcacatatgataagaag

SEQ ID NO: 1868898 - DNA, 25 bp, Homo sapien
catatgataagaaggccagacaggc

SEQ ID NO: 1868899 - DNA, 25 bp, Homo sapien
tgctgcacatatgataagaaggcca

SEQ ID NO: 1868900 - DNA, 25 bp, Homo sapien
gaattctgaacatccaatccgagtc

SEQ ID NO: 1868901 - DNA, 25 bp, Homo sapien
aaaggccttcgggatcatttcagcc

SEQ ID NO: 1868902 - DNA, 25 bp, Homo sapien
gggagcctcaccctttaccagcgaa

SEQ ID NO: 1868903 - DNA, 25 bp, Homo sapien
gaattaagtacccagaagtgccttc

SEQ ID NO: 1868904 - DNA, 25 bp, Homo sapien
gttgatgagtgcatttttcttagtt

SEQ ID NO: 1868905 - DNA, 25 bp, Homo sapien
gaaggagttgatgagtgcatttttc

SEQ ID NO: 1868906 - DNA, 25 bp, Homo sapien
caggctgggtaagctttttaggaga

SEQ ID NO: 1868907 - DNA, 25 bp, Homo sapien
cgggcgttcactgggagaaggagtt

SEQ ID NO: 1868908 - DNA, 25 bp, Homo sapien
caggctacagttgaatcaggcagga

SEQ ID NO: 1868909 - DNA, 25 bp, Homo sapien
ccccgtgggtattttggcatcaaca

SEQ ID NO: 1868910 - DNA, 25 bp, Homo sapien
gcaagcaaaccccatggctggtaga

SEQ ID NO: 1868911 - DNA, 25 bp, Homo sapien
gtttaccagggaacatcgaggctca

SEQ ID NO: 1868912 - DNA, 25 bp, Homo sapien
tcaaggcagtgatacagaggagtct

SEQ ID NO: 1868913 - DNA, 25 bp, Homo sapien
gcttgattataaaaagtgcgcctca

SEQ ID NO: 1868914 - DNA, 25 bp, Homo sapien
catgataccagcaagatgaggcttg

SEQ ID NO: 1868915 - DNA, 25 bp, Homo sapien
agtctatgaagctggagtcttaggg

SEQ ID NO: 1868916 - DNA, 25 bp, Homo sapien
tcggctgaggcgtttggcgacatca

SEQ ID NO: 1868917 - DNA, 25 bp, Homo sapien
taggccaactcgatctcactgtcag

SEQ ID NO: 1868918 - DNA, 25 bp, Homo sapien
tctcagccgggatatcatagttgcg

SEQ ID NO: 1868919 - DNA, 25 bp, Homo sapien
catagttgcggtatttcttggccac

SEQ ID NO: 1868920 - DNA, 25 bp, Homo sapien
caaaaatggtgcacagcgccaaagt

SEQ ID NO: 1868921 - DNA, 25 bp, Homo sapien
gatcccagagctattttgaataaca

SEQ ID NO: 1868922 - DNA, 25 bp, Homo sapien
gctgctaagaaaatctagtgatctg

SEQ ID NO: 1868923 - DNA, 25 bp, Homo sapien
tacctacacaattatgatcccagag

SEQ ID NO: 1868924 - DNA, 25 bp, Homo sapien
gtaggtttagactatgacataaaag

SEQ ID NO: 1868925 - DNA, 25 bp, Homo sapien
tgtatatgtaggtttagactatgac

SEQ ID NO: 1868926 - DNA, 25 bp, Homo sapien
taaaagcatgggctctggataccaa

SEQ ID NO: 1868927 - DNA, 25 bp, Homo sapien
aactgactggatttgcaatcatggc

SEQ ID NO: 1868928 - DNA, 25 bp, Homo sapien
atcacatcaccagtaaagagagaga

SEQ ID NO: 1868929 - DNA, 25 bp, Homo sapien
ggtttttgaggaatagaatcacatc

SEQ ID NO: 1868930 - DNA, 25 bp, Homo sapien
gaggaatagaatcacatcaccagta

SEQ ID NO: 1868931 - DNA, 25 bp, Homo sapien
tatcagttccagaagccttctggtg

SEQ ID NO: 1868932 - DNA, 25 bp, Homo sapien
ttttactatactagctttgaggtta

SEQ ID NO: 1868933 - DNA, 25 bp, Homo sapien
tctgtgagctcaattgtaatgtctt

SEQ ID NO: 1868934 - DNA, 25 bp, Homo sapien
ctgtgagctcaattgtaatgtcttc

SEQ ID NO: 1868935 - DNA, 25 bp, Homo sapien
tcttttactatactagctttgaggt

SEQ ID NO: 1868936 - DNA, 25 bp, Homo sapien
gatgcacacggagatctgacgttcg

SEQ ID NO: 1868937 - DNA, 25 bp, Homo sapien
gagataaacctgaaagcgagccacg

SEQ ID NO: 1868938 - DNA, 25 bp, Homo sapien
cacacattggcttgactttgggaga

SEQ ID NO: 1868939 - DNA, 25 bp, Homo sapien
tatgctaggcaaggatcccagtgag

SEQ ID NO: 1868940 - DNA, 25 bp, Homo sapien
caagctggtacatgctctggttgga

SEQ ID NO: 1868941 - DNA, 25 bp, Homo sapien
gatagcatttttgactcgggacttg

SEQ ID NO: 1868942 - DNA, 25 bp, Homo sapien
ggctggacctacaagtgactattgg

SEQ ID NO: 1868943 - DNA, 25 bp, Homo sapien
gctctaaggcatacggaaacaccag

SEQ ID NO: 1868944 - DNA, 25 bp, Homo sapien
taggaagttgctggaggaagtgaga

SEQ ID NO: 1868945 - DNA, 25 bp, Homo sapien
cttaggaagttgctggaggaagtga

SEQ ID NO: 1868946 - DNA, 25 bp, Homo sapien
ggaagttgctggaggaagtgagaag

SEQ ID NO: 1868947 - DNA, 25 bp, Homo sapien
tgctggaggaagtgagaaggtgggt

SEQ ID NO: 1868948 - DNA, 25 bp, Homo sapien
caggcccctgtgggtagagctctct

SEQ ID NO: 1868949 - DNA, 25 bp, Homo sapien
ctggatcttgcaggcccctgtgggt

SEQ ID NO: 1868950 - DNA, 25 bp, Homo sapien
tgcaggcccctgtgggtagagctct

SEQ ID NO: 1868951 - DNA, 25 bp, Homo sapien
gcccctgtgggtagagctctcttac

SEQ ID NO: 1868952 - DNA, 25 bp, Homo sapien
gagcttgggcaacagattgcagtca

SEQ ID NO: 1868953 - DNA, 25 bp, Homo sapien
cccatccaggaacttgcgccgggac

SEQ ID NO: 1868954 - DNA, 25 bp, Homo sapien
cccacaagtgttggcgtcaatctcc

SEQ ID NO: 1868955 - DNA, 25 bp, Homo sapien
gagccttggttaggcctctttcaag

SEQ ID NO: 1868956 - DNA, 25 bp, Homo sapien
tcatagggtcttcagagtggagtag

SEQ ID NO: 1868957 - DNA, 25 bp, Homo sapien
tggagtagctcatctagaatcctgt

SEQ ID NO: 1868958 - DNA, 25 bp, Homo sapien
tcatctagaatcctgtccccttcat

SEQ ID NO: 1868959 - DNA, 25 bp, Homo sapien
tcttgccagtggatacagtcatagg

SEQ ID NO: 1868960 - DNA, 25 bp, Homo sapien
tatagctaacccaacccaagaagag

SEQ ID NO: 1868961 - DNA, 25 bp, Homo sapien
gctaatattccacatcaacctacat

SEQ ID NO: 1868962 - DNA, 25 bp, Homo sapien
tccaagacaaagatatgcatcagat

SEQ ID NO: 1868963 - DNA, 25 bp, Homo sapien
catgcctggccaatactagccattt

SEQ ID NO: 1868964 - DNA, 25 bp, Homo sapien
cctgggacgtacaatggaaatgtgc

SEQ ID NO: 1868965 - DNA, 25 bp, Homo sapien
caactgctatggtcttccttacaag

SEQ ID NO: 1868966 - DNA, 25 bp, Homo sapien
cacacatagctggtccttaaaccat

SEQ ID NO: 1868967 - DNA, 25 bp, Homo sapien
ccagggcacatacgcttatgcaagc

SEQ ID NO: 1868968 - DNA, 25 bp, Homo sapien
tgctaccagtgcttgatttcagata

SEQ ID NO: 1868969 - DNA, 25 bp, Homo sapien
cacgggctgtgtgacaatgaaacat

SEQ ID NO: 1868970 - DNA, 25 bp, Homo sapien
aattcttagtactttcagcgaccgt

SEQ ID NO: 1868971 - DNA, 25 bp, Homo sapien
catctggtcaaaaagtgagaaatcc

SEQ ID NO: 1868972 - DNA, 25 bp, Homo sapien
tcatctgttggaagaagaagccttt

SEQ ID NO: 1868973 - DNA, 25 bp, Homo sapien
tctgttggaagaagaagcctttctt

SEQ ID NO: 1868974 - DNA, 25 bp, Homo sapien
ggaagaagaagcctttctttccaca

SEQ ID NO: 1868975 - DNA, 25 bp, Homo sapien
ttggaagaagaagcctttctttcca

SEQ ID NO: 1868976 - DNA, 25 bp, Homo sapien
ctaggacaagaggaagagacactga

SEQ ID NO: 1868977 - DNA, 25 bp, Homo sapien
ttctattagactttccagaaactca

SEQ ID NO: 1868978 - DNA, 25 bp, Homo sapien
gtgtgttttctattagactttccag

SEQ ID NO: 1868979 - DNA, 25 bp, Homo sapien
tttccagaaactcataaatgattgt

SEQ ID NO: 1868980 - DNA, 25 bp, Homo sapien
aactcataaatgattgtagaaccca

SEQ ID NO: 1868981 - DNA, 25 bp, Homo sapien
tctgccaaacgactcaggtaggact

SEQ ID NO: 1868982 - DNA, 25 bp, Homo sapien
gcaaacatcagtgggcatgagacca

SEQ ID NO: 1868983 - DNA, 25 bp, Homo sapien
tcagagccaagagagaagcataggt

SEQ ID NO: 1868984 - DNA, 25 bp, Homo sapien
tgagaaatcacgtggctcaaccctc

SEQ ID NO: 1868985 - DNA, 25 bp, Homo sapien
caggtggcacctcttagaaggagaa

SEQ ID NO: 1868986 - DNA, 25 bp, Homo sapien
acaggagcaatttgaagattcgggc

SEQ ID NO: 1868987 - DNA, 25 bp, Homo sapien
tctttttctagcagcatcagccagg

SEQ ID NO: 1868988 - DNA, 25 bp, Homo sapien
gcatcagccaggagcatgacccact

SEQ ID NO: 1868989 - DNA, 25 bp, Homo sapien
tggtttgccgtgctttatgcatccc

SEQ ID NO: 1868990 - DNA, 25 bp, Homo sapien
ccctgggagtagctataaagccttt

SEQ ID NO: 1868991 - DNA, 25 bp, Homo sapien
gcctttgttggtttgccgtgcttta

SEQ ID NO: 1868992 - DNA, 25 bp, Homo sapien
ctttatgcatccctgggagtagcta

SEQ ID NO: 1868993 - DNA, 25 bp, Homo sapien
aggccgggaattgcacatgtacttg

SEQ ID NO: 1868994 - DNA, 25 bp, Homo sapien
ggtaaagttgtgcagctagaagtgc

SEQ ID NO: 1868995 - DNA, 25 bp, Homo sapien
tagattgttagttcatggagggcaa

SEQ ID NO: 1868996 - DNA, 25 bp, Homo sapien
cagaaagaataagcctcttgggtaa

SEQ ID NO: 1868997 - DNA, 25 bp, Homo sapien
taatggatgtcattgcccacaagat

SEQ ID NO: 1868998 - DNA, 25 bp, Homo sapien
agcagcaatgaagcaagagcaccaa

SEQ ID NO: 1868999 - DNA, 25 bp, Homo sapien
cacactatagggttcaagcagcaat

SEQ ID NO: 1869000 - DNA, 25 bp, Homo sapien
aagccctccaagctggcactgtggg

SEQ ID NO: 1869001 - DNA, 25 bp, Homo sapien
aggccccgcaagagaaccaagtcct

SEQ ID NO: 1869002 - DNA, 25 bp, Homo sapien
tccctttcagaaggccccgcaagag

SEQ ID NO: 1869003 - DNA, 25 bp, Homo sapien
gaattctgtagccaatgtcagaaat

SEQ ID NO: 1869004 - DNA, 25 bp, Homo sapien
tgaagggcctgatgtaggatgggcc

SEQ ID NO: 1869005 - DNA, 25 bp, Homo sapien
cctggagaaaccttgtagggaccag

SEQ ID NO: 1869006 - DNA, 25 bp, Homo sapien
gaagcgggaatatgttgctctaatg

SEQ ID NO: 1869007 - DNA, 25 bp, Homo sapien
tctaatgtgatcacaggcagggttg

SEQ ID NO: 1869008 - DNA, 25 bp, Homo sapien
gaccagaaggaagcgggaatatgtt

SEQ ID NO: 1869009 - DNA, 25 bp, Homo sapien
gctgcttggtatttttgatgtaggc

SEQ ID NO: 1869010 - DNA, 25 bp, Homo sapien
gatgcccgctgtgttggattcccgg

SEQ ID NO: 1869011 - DNA, 25 bp, Homo sapien
gaaaacttggaaaagatgtcgatgc

SEQ ID NO: 1869012 - DNA, 25 bp, Homo sapien
ggattcccggtgttttgcagccagt

SEQ ID NO: 1869013 - DNA, 25 bp, Homo sapien
ttgcaccgatgctccacacacatgt

SEQ ID NO: 1869014 - DNA, 25 bp, Homo sapien
tcctgggtatactgagaatcaccac

SEQ ID NO: 1869015 - DNA, 25 bp, Homo sapien
gggtgctttgcaccgatgctccaca

SEQ ID NO: 1869016 - DNA, 25 bp, Homo sapien
gagctgtctccatccatcaggaggg

SEQ ID NO: 1869017 - DNA, 25 bp, Homo sapien
ctaccaagacacaggaattcagtgt

SEQ ID NO: 1869018 - DNA, 25 bp, Homo sapien
ccaagacacaggaattcagtgtcat

SEQ ID NO: 1869019 - DNA, 25 bp, Homo sapien
taccaagacacaggaattcagtgtc

SEQ ID NO: 1869020 - DNA, 25 bp, Homo sapien
accaagacacaggaattcagtgtca

SEQ ID NO: 1869021 - DNA, 25 bp, Homo sapien
gcattttaacagcatcaagcgttct

SEQ ID NO: 1869022 - DNA, 25 bp, Homo sapien
tatacacaactgcagtccagagaag

SEQ ID NO: 1869023 - DNA, 25 bp, Homo sapien
caagcgttctgctacctgagagtag

SEQ ID NO: 1869024 - DNA, 25 bp, Homo sapien
taggtcactaacatggcaggaatgc

SEQ ID NO: 1869025 - DNA, 25 bp, Homo sapien
ctctggttctgaaatgaaggaaact

SEQ ID NO: 1869026 - DNA, 25 bp, Homo sapien
gaaggaaactttgtcctcacttcaa

SEQ ID NO: 1869027 - DNA, 25 bp, Homo sapien
ttcaacgtcttccaagcaaagtgag

SEQ ID NO: 1869028 - DNA, 25 bp, Homo sapien
cattctgtcaggctttcggctctgg

SEQ ID NO: 1869029 - DNA, 25 bp, Homo sapien
gaaggtcaggaagggcgggtgcgtg

SEQ ID NO: 1869030 - DNA, 25 bp, Homo sapien
ctaggttgtgcaggtcagctggctt

SEQ ID NO: 1869031 - DNA, 25 bp, Homo sapien
cgtctgtcttcacgtccccgttgaa

SEQ ID NO: 1869032 - DNA, 25 bp, Homo sapien
ctcctcgatcttattgacgtctgtc

SEQ ID NO: 1869033 - DNA, 25 bp, Homo sapien
tgagagaaaggacagttgccgatgc

SEQ ID NO: 1869034 - DNA, 25 bp, Homo sapien
cgatgctttctccatcgattccagc

SEQ ID NO: 1869035 - DNA, 25 bp, Homo sapien
gatcatgaagaggcgctgagagaaa

SEQ ID NO: 1869036 - DNA, 25 bp, Homo sapien
cacagtggtgacattgaacacgact

SEQ ID NO: 1869037 - DNA, 25 bp, Homo sapien
tggttttgtaaacaattgaatatag

SEQ ID NO: 1869038 - DNA, 25 bp, Homo sapien
agatggttttgtaaacaattgaata

SEQ ID NO: 1869039 - DNA, 25 bp, Homo sapien
aacaattgaatatagttgtgtacat

SEQ ID NO: 1869040 - DNA, 25 bp, Homo sapien
tgtaaacaattgaatatagttgtgt

SEQ ID NO: 1869041 - DNA, 25 bp, Homo sapien
ccatttctacactgttcttcttcac

SEQ ID NO: 1869042 - DNA, 25 bp, Homo sapien
cccatttctacactgttcttcttca

SEQ ID NO: 1869043 - DNA, 25 bp, Homo sapien
gtcaaccacaggccatatgtaccca

SEQ ID NO: 1869044 - DNA, 25 bp, Homo sapien
acaggccatatgtacccaaccacat

SEQ ID NO: 1869045 - DNA, 25 bp, Homo sapien
tcaaccacaggccatatgtacccaa

SEQ ID NO: 1869046 - DNA, 25 bp, Homo sapien
gccatatgtacccaaccacatttgt

SEQ ID NO: 1869047 - DNA, 25 bp, Homo sapien
gggcatctttaccaagggccagctt

SEQ ID NO: 1869048 - DNA, 25 bp, Homo sapien
tctcaactatatgcaggcacttggc

SEQ ID NO: 1869049 - DNA, 25 bp, Homo sapien
gcagggtcctcataaggtcctgttt

SEQ ID NO: 1869050 - DNA, 25 bp, Homo sapien
cttcctctagtcagccatggtgaaa

SEQ ID NO: 1869051 - DNA, 25 bp, Homo sapien
tggtgatgaaagagacatggtccct

SEQ ID NO: 1869052 - DNA, 25 bp, Homo sapien
agtgcagtagtagtagagaatgggt

SEQ ID NO: 1869053 - DNA, 25 bp, Homo sapien
gcagtagtagtagagaatgggtgga

SEQ ID NO: 1869054 - DNA, 25 bp, Homo sapien
atgtggtgatgaaagagacatggtc

SEQ ID NO: 1869055 - DNA, 25 bp, Homo sapien
tcttctcccgcctagggtgattggg

SEQ ID NO: 1869056 - DNA, 25 bp, Homo sapien
ggaaatgtttctcccagccaagtgc

SEQ ID NO: 1869057 - DNA, 25 bp, Homo sapien
gtcatgtgggcccacccaactaatt

SEQ ID NO: 1869058 - DNA, 25 bp, Homo sapien
gaaagccacactcctacgacaggtc

SEQ ID NO: 1869059 - DNA, 25 bp, Homo sapien
caaatttccatacctcgtgcagagg

SEQ ID NO: 1869060 - DNA, 25 bp, Homo sapien
gagcctgcttgcaaataacaatggc

SEQ ID NO: 1869061 - DNA, 25 bp, Homo sapien
cctgcttgcaaataacaatggcagc

SEQ ID NO: 1869062 - DNA, 25 bp, Homo sapien
ccatacctcgtgcagaggaggagcc

SEQ ID NO: 1869063 - DNA, 25 bp, Homo sapien
tcagatgtcggaccctacctccagg

SEQ ID NO: 1869064 - DNA, 25 bp, Homo sapien
ctctttgcctgtgggaccagtcaga

SEQ ID NO: 1869065 - DNA, 25 bp, Homo sapien
ggaccagtcagatgtcggaccctac

SEQ ID NO: 1869066 - DNA, 25 bp, Homo sapien
cctgtgggaccagtcagatgtcgga

SEQ ID NO: 1869067 - DNA, 25 bp, Homo sapien
atctctgggcctctgacaccttctc

SEQ ID NO: 1869068 - DNA, 25 bp, Homo sapien
tctgggcctctgacaccttctctgc

SEQ ID NO: 1869069 - DNA, 25 bp, Homo sapien
tcatctctgggcctctgacaccttc

SEQ ID NO: 1869070 - DNA, 25 bp, Homo sapien
ctctgggcctctgacaccttctctg

SEQ ID NO: 1869071 - DNA, 25 bp, Homo sapien
gaacttagtgttgggcttccttgtc

SEQ ID NO: 1869072 - DNA, 25 bp, Homo sapien
catatccgagaacttagtgttgggc

SEQ ID NO: 1869073 - DNA, 25 bp, Homo sapien
cctcagtgctttccatatccgagaa

SEQ ID NO: 1869074 - DNA, 25 bp, Homo sapien
tggtctgacccatctatggtgcctt

SEQ ID NO: 1869075 - DNA, 25 bp, Homo sapien
aaccttgctgaagatctggccttag

SEQ ID NO: 1869076 - DNA, 25 bp, Homo sapien
accatgctgtttcaggtagcaaata

SEQ ID NO: 1869077 - DNA, 25 bp, Homo sapien
ttaggcatggggctttatttctggg

SEQ ID NO: 1869078 - DNA, 25 bp, Homo sapien
tgctgaagatctggccttaggcatg

SEQ ID NO: 1869079 - DNA, 25 bp, Homo sapien
aaaagagaattctataactcattgt

SEQ ID NO: 1869080 - DNA, 25 bp, Homo sapien
ctacaatatttaccaccaggtctgg

SEQ ID NO: 1869081 - DNA, 25 bp, Homo sapien
catgcattgacccttattacaggtt

SEQ ID NO: 1869082 - DNA, 25 bp, Homo sapien
acaggttcatttagtgcttattttc

SEQ ID NO: 1869083 - DNA, 25 bp, Homo sapien
ctggtaagggctaagaacctgcctt

SEQ ID NO: 1869084 - DNA, 25 bp, Homo sapien
tggtaagggctaagaacctgccttc

SEQ ID NO: 1869085 - DNA, 25 bp, Homo sapien
ttgtgttgcccatggaactggagac

SEQ ID NO: 1869086 - DNA, 25 bp, Homo sapien
tgaaagtcagtgtgcctcttgtgtt

SEQ ID NO: 1869087 - DNA, 25 bp, Homo sapien
gagacctgatactctttcactggca

SEQ ID NO: 1869088 - DNA, 25 bp, Homo sapien
tcagtgtgcctcttgtgttgcccat

SEQ ID NO: 1869089 - DNA, 25 bp, Homo sapien
tgcttgaatggcttggctaactcac

SEQ ID NO: 1869090 - DNA, 25 bp, Homo sapien
ttaccattaggaatgtgtgacctca

SEQ ID NO: 1869091 - DNA, 25 bp, Homo sapien
gaaactgccctgagtgtttaccatt

SEQ ID NO: 1869092 - DNA, 25 bp, Homo sapien
ctcaggtaatctgtccttgggagcg

SEQ ID NO: 1869093 - DNA, 25 bp, Homo sapien
agtgacaggtgaatatggccactct

SEQ ID NO: 1869094 - DNA, 25 bp, Homo sapien
gtgacaggtgaatatggccactctc

SEQ ID NO: 1869095 - DNA, 25 bp, Homo sapien
gctcctccaacctcataaccattta

SEQ ID NO: 1869096 - DNA, 25 bp, Homo sapien
cagcaaaggccaagcccacagctcc

SEQ ID NO: 1869097 - DNA, 25 bp, Homo sapien
tccaacctcataaccatttacagca

SEQ ID NO: 1869098 - DNA, 25 bp, Homo sapien
cataaccatttacagcaaaggccaa

SEQ ID NO: 1869099 - DNA, 25 bp, Homo sapien
taccacctgttcatctgaacccagg

SEQ ID NO: 1869100 - DNA, 25 bp, Homo sapien
aagtcagcaccaaaccgaaggagca

SEQ ID NO: 1869101 - DNA, 25 bp, Homo sapien
ccatctgatttgtgacttcagggtc

SEQ ID NO: 1869102 - DNA, 25 bp, Homo sapien
cttcagggtcaccatttttagttgt

SEQ ID NO: 1869103 - DNA, 25 bp, Homo sapien
catcagactcgtagactcactcact

SEQ ID NO: 1869104 - DNA, 25 bp, Homo sapien
tgtctttcatccctggtgtattggt

SEQ ID NO: 1869105 - DNA, 25 bp, Homo sapien
tcatccctggtgtattggtttgttt

SEQ ID NO: 1869106 - DNA, 25 bp, Homo sapien
tatgaaaccatcagactcgtagact

SEQ ID NO: 1869107 - DNA, 25 bp, Homo sapien
gagaaggtcctggggtcttgactgg

SEQ ID NO: 1869108 - DNA, 25 bp, Homo sapien
ggtgtccccctatcacctgctctgg

SEQ ID NO: 1869109 - DNA, 25 bp, Homo sapien
ccccctatcacctgctctggaatct

SEQ ID NO: 1869110 - DNA, 25 bp, Homo sapien
gctctggaatctgccctagcaacag

SEQ ID NO: 1869111 - DNA, 25 bp, Homo sapien
tctcataaggtacctgtgaatccag

SEQ ID NO: 1869112 - DNA, 25 bp, Homo sapien
tgctctgacagcgagtctcataagg

SEQ ID NO: 1869113 - DNA, 25 bp, Homo sapien
ctaaactgctagatttgaggactgg

SEQ ID NO: 1869114 - DNA, 25 bp, Homo sapien
gcacttgaaagcctaacttggcaaa

SEQ ID NO: 1869115 - DNA, 25 bp, Homo sapien
aagtcctggcgactgtttctgctca

SEQ ID NO: 1869116 - DNA, 25 bp, Homo sapien
aggtttccctacttctgcagcgtcg

SEQ ID NO: 1869117 - DNA, 25 bp, Homo sapien
cctttgtgaaaggtcttggcgccca

SEQ ID NO: 1869118 - DNA, 25 bp, Homo sapien
tagggaaactttgcactgagagagt

SEQ ID NO: 1869119 - DNA, 25 bp, Homo sapien
ttcacaaagagctcgatctcggggt

SEQ ID NO: 1869120 - DNA, 25 bp, Homo sapien
cccgttagctgtcgccgagtctgtc

SEQ ID NO: 1869121 - DNA, 25 bp, Homo sapien
aaagagctcgatctcggggtccctg

SEQ ID NO: 1869122 - DNA, 25 bp, Homo sapien
tgtcgtccccgttagctgtcgccga

SEQ ID NO: 1869123 - DNA, 25 bp, Homo sapien
ctgcccggaggtgtcacaggatccg

SEQ ID NO: 1869124 - DNA, 25 bp, Homo sapien
aacaggtcgtgggagcaacaagtgc

SEQ ID NO: 1869125 - DNA, 25 bp, Homo sapien
tcacatgaaaaggagcgaagccggg

SEQ ID NO: 1869126 - DNA, 25 bp, Homo sapien
atctattctccagcccgagcagcgg

SEQ ID NO: 1869127 - DNA, 25 bp, Homo sapien
tttaagatgtatgcagacttatttt

SEQ ID NO: 1869128 - DNA, 25 bp, Homo sapien
tttcctgtgtcaggcatttgggcag

SEQ ID NO: 1869129 - DNA, 25 bp, Homo sapien
ttaagatgtatgcagacttattttc

SEQ ID NO: 1869130 - DNA, 25 bp, Homo sapien
ggtttcctgtgtcaggcatttgggc

SEQ ID NO: 1869131 - DNA, 25 bp, Homo sapien
gtaggcgaagttggataagatgcat

SEQ ID NO: 1869132 - DNA, 25 bp, Homo sapien
tgttgtggggtaggcgaagttggat

SEQ ID NO: 1869133 - DNA, 25 bp, Homo sapien
tggggtaggcgaagttggataagat

SEQ ID NO: 1869134 - DNA, 25 bp, Homo sapien
tcatcggatgccagtcagcctgctg

SEQ ID NO: 1869135 - DNA, 25 bp, Homo sapien
ggattgactcagagtatatatgact

SEQ ID NO: 1869136 - DNA, 25 bp, Homo sapien
gagtatatatgacttcatgaaacac

SEQ ID NO: 1869137 - DNA, 25 bp, Homo sapien
tatatgacttcatgaaacaccacag

SEQ ID NO: 1869138 - DNA, 25 bp, Homo sapien
cctggattgactcagagtatatatg

SEQ ID NO: 1869139 - DNA, 25 bp, Homo sapien
tactccatagttacccaaaccatct

SEQ ID NO: 1869140 - DNA, 25 bp, Homo sapien
tgtaaaggcaggtgcaatcactttg

SEQ ID NO: 1869141 - DNA, 25 bp, Homo sapien
taaaggcaggtgcaatcactttggg

SEQ ID NO: 1869142 - DNA, 25 bp, Homo sapien
agagggtgccagaattactccatag

SEQ ID NO: 1869143 - DNA, 25 bp, Homo sapien
ctgtggacagattcctgcacgtagt

SEQ ID NO: 1869144 - DNA, 25 bp, Homo sapien
tctctgacgctgttgatgccctgca

SEQ ID NO: 1869145 - DNA, 25 bp, Homo sapien
tagtacacccagtctctgacgctgt

SEQ ID NO: 1869146 - DNA, 25 bp, Homo sapien
gatgccctgcactctggttctgctt

SEQ ID NO: 1869147 - DNA, 25 bp, Homo sapien
tccatagtatatttcttggaacaca

SEQ ID NO: 1869148 - DNA, 25 bp, Homo sapien
agtattttccatagtatatttcttg

SEQ ID NO: 1869149 - DNA, 25 bp, Homo sapien
cttggaacacaaaaatgatgagatt

SEQ ID NO: 1869150 - DNA, 25 bp, Homo sapien
catagtatatttcttggaacacaaa

SEQ ID NO: 1869151 - DNA, 25 bp, Homo sapien
tagtctaacactatctcccccttga

SEQ ID NO: 1869152 - DNA, 25 bp, Homo sapien
tctcctgatcaccacgtctagtttg

SEQ ID NO: 1869153 - DNA, 25 bp, Homo sapien
tggccagctgatattctctcccgca

SEQ ID NO: 1869154 - DNA, 25 bp, Homo sapien
ttctctcccgcagggttgacactga

SEQ ID NO: 1869155 - DNA, 25 bp, Homo sapien
ttagtccctccgactcctgaatatg

SEQ ID NO: 1869156 - DNA, 25 bp, Homo sapien
tattgagatccaaggaccatggcat

SEQ ID NO: 1869157 - DNA, 25 bp, Homo sapien
gaccatggcattatgaatctttccc

SEQ ID NO: 1869158 - DNA, 25 bp, Homo sapien
agtccctccgactcctgaatatgta

SEQ ID NO: 1869159 - DNA, 25 bp, Homo sapien
cttcacaaagaggtaaatctcaggg

SEQ ID NO: 1869160 - DNA, 25 bp, Homo sapien
tcagggttcatgtgagctccctcct

SEQ ID NO: 1869161 - DNA, 25 bp, Homo sapien
tcacaaagaggtaaatctcagggtt

SEQ ID NO: 1869162 - DNA, 25 bp, Homo sapien
aaatctcagggttcatgtgagctcc

SEQ ID NO: 1869163 - DNA, 25 bp, Homo sapien
tctcctggagttctgctgcgcagag

SEQ ID NO: 1869164 - DNA, 25 bp, Homo sapien
gtagagaaggccttactgtgctgaa

SEQ ID NO: 1869165 - DNA, 25 bp, Homo sapien
aatataacccttccattgagatgcc

SEQ ID NO: 1869166 - DNA, 25 bp, Homo sapien
cagaatagcaggaatacttggtggt

SEQ ID NO: 1869167 - DNA, 25 bp, Homo sapien
gctggtctggaacctcatacgtcct

SEQ ID NO: 1869168 - DNA, 25 bp, Homo sapien
catgggtattcagctgagtggcata

SEQ ID NO: 1869169 - DNA, 25 bp, Homo sapien
cccttaatggtatagactgacacaa

SEQ ID NO: 1869170 - DNA, 25 bp, Homo sapien
gagttcagagtatatctcatcaggc

SEQ ID NO: 1869171 - DNA, 25 bp, Homo sapien
gcttattgatccgagagatctgttt

SEQ ID NO: 1869172 - DNA, 25 bp, Homo sapien
ttgatccgagagatctgtttacagg

SEQ ID NO: 1869173 - DNA, 25 bp, Homo sapien
ttattgatccgagagatctgtttac

SEQ ID NO: 1869174 - DNA, 25 bp, Homo sapien
tattgatccgagagatctgtttaca

SEQ ID NO: 1869175 - DNA, 25 bp, Homo sapien
aggaatcaacgagctcttaaaaggc

SEQ ID NO: 1869176 - DNA, 25 bp, Homo sapien
agcaactagcaactgctatcaatga

SEQ ID NO: 1869177 - DNA, 25 bp, Homo sapien
gcaactgctatcaatgacaggtctc

SEQ ID NO: 1869178 - DNA, 25 bp, Homo sapien
ttgcagaggaatcaacgagctctta

SEQ ID NO: 1869179 - DNA, 25 bp, Homo sapien
tacacatctcttcataaatgcttac

SEQ ID NO: 1869180 - DNA, 25 bp, Homo sapien
catacacatctcttcataaatgctt

SEQ ID NO: 1869181 - DNA, 25 bp, Homo sapien
atacacatctcttcataaatgctta

SEQ ID NO: 1869182 - DNA, 25 bp, Homo sapien
tgcttctcaaattgaacatggtcat

SEQ ID NO: 1869183 - DNA, 25 bp, Homo sapien
ttgaacatggtcatccatattttgc

SEQ ID NO: 1869184 - DNA, 25 bp, Homo sapien
gaacatggtcatccatattttgcct

SEQ ID NO: 1869185 - DNA, 25 bp, Homo sapien
tgaacatggtcatccatattttgcc

SEQ ID NO: 1869186 - DNA, 25 bp, Homo sapien
tgtaacctactcttgcaacaatcag

SEQ ID NO: 1869187 - DNA, 25 bp, Homo sapien
caacaatcagcaagttttggccaaa

SEQ ID NO: 1869188 - DNA, 25 bp, Homo sapien
tacttatgatgcacaacacgatgcc

SEQ ID NO: 1869189 - DNA, 25 bp, Homo sapien
actttagtttggagctcaattcgcc

SEQ ID NO: 1869190 - DNA, 25 bp, Homo sapien
gactatcgttaatgatatgttgctg

SEQ ID NO: 1869191 - DNA, 25 bp, Homo sapien
tatgttgctgaaatgtttggaggtg

SEQ ID NO: 1869192 - DNA, 25 bp, Homo sapien
tttggaggtgaagagtactgatgtc

SEQ ID NO: 1869193 - DNA, 25 bp, Homo sapien
ggcatgtgggtgttcttcaactttt

SEQ ID NO: 1869194 - DNA, 25 bp, Homo sapien
taatggaagacagacggaaactact

SEQ ID NO: 1869195 - DNA, 25 bp, Homo sapien
taaagcaatagagatgacagccacc

SEQ ID NO: 1869196 - DNA, 25 bp, Homo sapien
tgccagtggcaactagagtagctaa

SEQ ID NO: 1869197 - DNA, 25 bp, Homo sapien
ccctatggcaactcagcatggagga

SEQ ID NO: 1869198 - DNA, 25 bp, Homo sapien
ctggcttggtgccagcgcagaactg

SEQ ID NO: 1869199 - DNA, 25 bp, Homo sapien
tgaactggattgagaacaacatgcc

SEQ ID NO: 1869200 - DNA, 25 bp, Homo sapien
gcttacagagcctagtgaccaggtg

SEQ ID NO: 1869201 - DNA, 25 bp, Homo sapien
ccgattgttctttgtttgctgagac

SEQ ID NO: 1869202 - DNA, 25 bp, Homo sapien
ttgcaaacaccctcccagccgaaat

SEQ ID NO: 1869203 - DNA, 25 bp, Homo sapien
tggatggctgatgacgctgtccgca

SEQ ID NO: 1869204 - DNA, 25 bp, Homo sapien
tgcaggagctacactagctacagat

SEQ ID NO: 1869205 - DNA, 25 bp, Homo sapien
tgtccgcattggcacaagctgcagg

SEQ ID NO: 1869206 - DNA, 25 bp, Homo sapien
tgggacaggacatacgacctcatcc

SEQ ID NO: 1869207 - DNA, 25 bp, Homo sapien
gcagcttaaacaccacctggaggtt

SEQ ID NO: 1869208 - DNA, 25 bp, Homo sapien
tacaaatttattcgtgtgcacacag

SEQ ID NO: 1869209 - DNA, 25 bp, Homo sapien
gggaaccacagagcgattaccacta

SEQ ID NO: 1869210 - DNA, 25 bp, Homo sapien
tgtaccctgtgccaacccactaagt

SEQ ID NO: 1869211 - DNA, 25 bp, Homo sapien
gggtctgcatgtaccctgtgccaac

SEQ ID NO: 1869212 - DNA, 25 bp, Homo sapien
tgccaacccactaagtcaacaaatc

SEQ ID NO: 1869213 - DNA, 25 bp, Homo sapien
agtcaacaaatccagacacgtgaat

SEQ ID NO: 1869214 - DNA, 25 bp, Homo sapien
tagagaacttacttttggcttggtg

SEQ ID NO: 1869215 - DNA, 25 bp, Homo sapien
cttacttttggcttggtgacatgga

SEQ ID NO: 1869216 - DNA, 25 bp, Homo sapien
aggtcaggtagagaacttacttttg

SEQ ID NO: 1869217 - DNA, 25 bp, Homo sapien
tcaggtagagaacttacttttggct

SEQ ID NO: 1869218 - DNA, 25 bp, Homo sapien
ctgatgccttcatttggggatatta

SEQ ID NO: 1869219 - DNA, 25 bp, Homo sapien
gcttctgtatttgccagctgactcc

SEQ ID NO: 1869220 - DNA, 25 bp, Homo sapien
gagcttcagtgtaatgtttcctgct

SEQ ID NO: 1869221 - DNA, 25 bp, Homo sapien
ctgtatttgccagctgactccagcc

SEQ ID NO: 1869222 - DNA, 25 bp, Homo sapien
gccactatgtaagatataaactttc

SEQ ID NO: 1869223 - DNA, 25 bp, Homo sapien
tcaaatctgcaaacaggtgagtcat

SEQ ID NO: 1869224 - DNA, 25 bp, Homo sapien
agcaggtgggtcaaatctgcaaaca

SEQ ID NO: 1869225 - DNA, 25 bp, Homo sapien
cagcaggtgggtcaaatctgcaaac

SEQ ID NO: 1869226 - DNA, 25 bp, Homo sapien
tgggtcaaatctgcaaacaggtgag

SEQ ID NO: 1869227 - DNA, 25 bp, Homo sapien
gaccagacagactgacagccgaatt

SEQ ID NO: 1869228 - DNA, 25 bp, Homo sapien
gtccaggaccagacagactgacagc

SEQ ID NO: 1869229 - DNA, 25 bp, Homo sapien
aggaccagacagactgacagccgaa

SEQ ID NO: 1869230 - DNA, 25 bp, Homo sapien
ccaggaccagacagactgacagccg

SEQ ID NO: 1869231 - DNA, 25 bp, Homo sapien
tatccagtaagacggacagacgtct

SEQ ID NO: 1869232 - DNA, 25 bp, Homo sapien
tagatccacgtttcatttatcccaa

SEQ ID NO: 1869233 - DNA, 25 bp, Homo sapien
tccccggtaaaggtgctcgcttatc

SEQ ID NO: 1869234 - DNA, 25 bp, Homo sapien
gacagacgtctatggtagatccacg

SEQ ID NO: 1869235 - DNA, 25 bp, Homo sapien
gccaaagttgctttctccgcggcca

SEQ ID NO: 1869236 - DNA, 25 bp, Homo sapien
cagccaaagttgctttctccgcggc

SEQ ID NO: 1869237 - DNA, 25 bp, Homo sapien
ccttggtgcagccaaagttgctttc

SEQ ID NO: 1869238 - DNA, 25 bp, Homo sapien
ggtgcagccaaagttgctttctccg

SEQ ID NO: 1869239 - DNA, 25 bp, Homo sapien
gcaattgcctgaggcctttccggga

SEQ ID NO: 1869240 - DNA, 25 bp, Homo sapien
tgccaggtgcacattaactaagtgg

SEQ ID NO: 1869241 - DNA, 25 bp, Homo sapien
gactcgctggtttttaggttccatg

SEQ ID NO: 1869242 - DNA, 25 bp, Homo sapien
gaaggccatcggcttggcaattgcc

SEQ ID NO: 1869243 - DNA, 25 bp, Homo sapien
tagcagaatattttatacttggtcc

SEQ ID NO: 1869244 - DNA, 25 bp, Homo sapien
tacttggcatccaactcatgagtgg

SEQ ID NO: 1869245 - DNA, 25 bp, Homo sapien
gaacaggaaggtatgtcctgtcagt

SEQ ID NO: 1869246 - DNA, 25 bp, Homo sapien
tacttggtccttgcaatggtgtgag

SEQ ID NO: 1869247 - DNA, 25 bp, Homo sapien
tacattgtttttgggtgtctccttc

SEQ ID NO: 1869248 - DNA, 25 bp, Homo sapien
gcccatatctgataagctttatgga

SEQ ID NO: 1869249 - DNA, 25 bp, Homo sapien
ggaatggcataagaatttatagata

SEQ ID NO: 1869250 - DNA, 25 bp, Homo sapien
agttataaatgaaggacaaggagga

SEQ ID NO: 1869251 - DNA, 25 bp, Homo sapien
cattgaagaattaccaagtttggcc

SEQ ID NO: 1869252 - DNA, 25 bp, Homo sapien
tggaacgagggtcaataacaataca

SEQ ID NO: 1869253 - DNA, 25 bp, Homo sapien
taacagaagcgccatcactgcagat

SEQ ID NO: 1869254 - DNA, 25 bp, Homo sapien
tacagccttcgctttaggaaaacag

SEQ ID NO: 1869255 - DNA, 25 bp, Homo sapien
tttgatgaggcccagtttaccaatt

SEQ ID NO: 1869256 - DNA, 25 bp, Homo sapien
cttttcaagagcttatttgctaccg

SEQ ID NO: 1869257 - DNA, 25 bp, Homo sapien
cagcagcaatatatgagtggtccag

SEQ ID NO: 1869258 - DNA, 25 bp, Homo sapien
ttgctaccgtatataccctctttgg

SEQ ID NO: 1869259 - DNA, 25 bp, Homo sapien
tctgcaaaggcatgtcgcctggaaa

SEQ ID NO: 1869260 - DNA, 25 bp, Homo sapien
ttcctgctagaaagaacttcagtag

SEQ ID NO: 1869261 - DNA, 25 bp, Homo sapien
acttcagtagctagaacttccggta

SEQ ID NO: 1869262 - DNA, 25 bp, Homo sapien
taaatacgagtgatgatagcagaca

SEQ ID NO: 1869263 - DNA, 25 bp, Homo sapien
gccaggtatctcttggtagggaaat

SEQ ID NO: 1869264 - DNA, 25 bp, Homo sapien
ttagcagaaagtcacacagtttagg

SEQ ID NO: 1869265 - DNA, 25 bp, Homo sapien
taggtttagcatgtagatcttgtcc

SEQ ID NO: 1869266 - DNA, 25 bp, Homo sapien
cacagcctttggagtgctattggat

SEQ ID NO: 1869267 - DNA, 25 bp, Homo sapien
gaccaggcaggtcaaaagtactacc

SEQ ID NO: 1869268 - DNA, 25 bp, Homo sapien
gttcttttcaaggatcgagtggcca

SEQ ID NO: 1869269 - DNA, 25 bp, Homo sapien
cacagccttaggttgttggaatgga

SEQ ID NO: 1869270 - DNA, 25 bp, Homo sapien
gaaacagagctatatcatctcggct

SEQ ID NO: 1869271 - DNA, 25 bp, Homo sapien
caaattaaagtacccatcaggagag

SEQ ID NO: 1869272 - DNA, 25 bp, Homo sapien
ttctgctgttgggaatacatctcca

SEQ ID NO: 1869273 - DNA, 25 bp, Homo sapien
tgcgccaagtccaaataaagcagga

SEQ ID NO: 1869274 - DNA, 25 bp, Homo sapien
cagtgaacaatggagacatactctc

SEQ ID NO: 1869275 - DNA, 25 bp, Homo sapien
tatgaaataagggtatgacccctct

SEQ ID NO: 1869276 - DNA, 25 bp, Homo sapien
taatggttgagctatttcagcatgc

SEQ ID NO: 1869277 - DNA, 25 bp, Homo sapien
tgccaagagagacccctatgaaata

SEQ ID NO: 1869278 - DNA, 25 bp, Homo sapien
tgacccctcttggtcatattctgct

SEQ ID NO: 1869279 - DNA, 25 bp, Homo sapien
caaatctgtggagttcatggcttct

SEQ ID NO: 1869280 - DNA, 25 bp, Homo sapien
actctgtgtataagggaccaccctt

SEQ ID NO: 1869281 - DNA, 25 bp, Homo sapien
tattggatgcatatctgctaacgca

SEQ ID NO: 1869282 - DNA, 25 bp, Homo sapien
tgctaacgcattatcgtaaccgtgg

SEQ ID NO: 1869283 - DNA, 25 bp, Homo sapien
caattctacctaaagggacattttg

SEQ ID NO: 1869284 - DNA, 25 bp, Homo sapien
tcaataaacatgatagaaacccaat

SEQ ID NO: 1869285 - DNA, 25 bp, Homo sapien
tctgccactatgagtcacgagcaca

SEQ ID NO: 1869286 - DNA, 25 bp, Homo sapien
caaatgccattgttcaggcatctgc

SEQ ID NO: 1869287 - DNA, 25 bp, Homo sapien
cactgctatgattggttgaattcga

SEQ ID NO: 1869288 - DNA, 25 bp, Homo sapien
taaaatgtgccacccttcatcagcc

SEQ ID NO: 1869289 - DNA, 25 bp, Homo sapien
cagaaagtcatctgacttattctgt

SEQ ID NO: 1869290 - DNA, 25 bp, Homo sapien
taaacagtaagattaggatgagcgt

SEQ ID NO: 1869291 - DNA, 25 bp, Homo sapien
tgctacggaggtgaaaaaccagaga

SEQ ID NO: 1869292 - DNA, 25 bp, Homo sapien
gccatgggcaacagacttgctacgg

SEQ ID NO: 1869293 - DNA, 25 bp, Homo sapien
ttctgttgtaagttcaccttataga

SEQ ID NO: 1869294 - DNA, 25 bp, Homo sapien
ctaggaaataatcttctgttgtaag

SEQ ID NO: 1869295 - DNA, 25 bp, Homo sapien
aattcccctctgagggatggaattc

SEQ ID NO: 1869296 - DNA, 25 bp, Homo sapien
ctcatttgtgaaatattatagcttt

SEQ ID NO: 1869297 - DNA, 25 bp, Homo sapien
cattcgctgtttcatatgattctaa

SEQ ID NO: 1869298 - DNA, 25 bp, Homo sapien
cacatattttaacattcgctgtttc

SEQ ID NO: 1869299 - DNA, 25 bp, Homo sapien
catgagcggactgtcaggtcccaaa

SEQ ID NO: 1869300 - DNA, 25 bp, Homo sapien
catgtaatgagtaggaaagcgctta

SEQ ID NO: 1869301 - DNA, 25 bp, Homo sapien
tttacatctgttccgggccacatgg

SEQ ID NO: 1869302 - DNA, 25 bp, Homo sapien
ggctgctactggagattgatcaatc

SEQ ID NO: 1869303 - DNA, 25 bp, Homo sapien
ggttgaaagactcagtgcagcaagt

SEQ ID NO: 1869304 - DNA, 25 bp, Homo sapien
gaaggacaccaagagaaatttcgaa

SEQ ID NO: 1869305 - DNA, 25 bp, Homo sapien
gacaccaagagaaatttcgaagtca

SEQ ID NO: 1869306 - DNA, 25 bp, Homo sapien
tgcagcaagtatgaaggacaccaag

SEQ ID NO: 1869307 - DNA, 25 bp, Homo sapien
ttcaaagtacttgatcagttcagtg

SEQ ID NO: 1869308 - DNA, 25 bp, Homo sapien
tacttgatcagttcagtgtaagata

SEQ ID NO: 1869309 - DNA, 25 bp, Homo sapien
cttgatcagttcagtgtaagataat

SEQ ID NO: 1869310 - DNA, 25 bp, Homo sapien
aagtacttgatcagttcagtgtaag

SEQ ID NO: 1869311 - DNA, 25 bp, Homo sapien
tatggatggtagttgctctctctgt

SEQ ID NO: 1869312 - DNA, 25 bp, Homo sapien
ctggctatggatggtagttgctctc

SEQ ID NO: 1869313 - DNA, 25 bp, Homo sapien
gatggtagttgctctctctgtcctt

SEQ ID NO: 1869314 - DNA, 25 bp, Homo sapien
ctatctggctatggatggtagttgc

SEQ ID NO: 1869315 - DNA, 25 bp, Homo sapien
gggtctggaggagactccctcgggc

SEQ ID NO: 1869316 - DNA, 25 bp, Homo sapien
gcagcgatccgttcagtccgtatta

SEQ ID NO: 1869317 - DNA, 25 bp, Homo sapien
tcacctgcgctcaactctggagcgg

SEQ ID NO: 1869318 - DNA, 25 bp, Homo sapien
tctggagcggagcacctgaccgcgc

SEQ ID NO: 1869319 - DNA, 25 bp, Homo sapien
cgtactgtagtggattattttctca

SEQ ID NO: 1869320 - DNA, 25 bp, Homo sapien
cttgtgtgttagtgcccctattttg

SEQ ID NO: 1869321 - DNA, 25 bp, Homo sapien
ttgtctttttccgtactgtagtgga

SEQ ID NO: 1869322 - DNA, 25 bp, Homo sapien
agtgcttcttgtgtgttagtgcccc

SEQ ID NO: 1869323 - DNA, 25 bp, Homo sapien
tcatcccatcccgaagggcatctgg

SEQ ID NO: 1869324 - DNA, 25 bp, Homo sapien
gggtcatcccatcccgaagggcatc

SEQ ID NO: 1869325 - DNA, 25 bp, Homo sapien
actgggtcatcccatcccgaagggc

SEQ ID NO: 1869326 - DNA, 25 bp, Homo sapien
atcccatcccgaagggcatctgggc

SEQ ID NO: 1869327 - DNA, 25 bp, Homo sapien
tgtgtgtacgggtgtataccagttc

SEQ ID NO: 1869328 - DNA, 25 bp, Homo sapien
acgggtgtataccagttcttcctgc

SEQ ID NO: 1869329 - DNA, 25 bp, Homo sapien
ctgcagggtgtgagtgcttgcaagt

SEQ ID NO: 1869330 - DNA, 25 bp, Homo sapien
ctttcctgtgtgtacgggtgtatac

SEQ ID NO: 1869331 - DNA, 25 bp, Homo sapien
tccttttccctcatgaatgaagtca

SEQ ID NO: 1869332 - DNA, 25 bp, Homo sapien
ttccctcatgaatgaagtcaggaaa

SEQ ID NO: 1869333 - DNA, 25 bp, Homo sapien
cttttccctcatgaatgaagtcagg

SEQ ID NO: 1869334 - DNA, 25 bp, Homo sapien
ttttccctcatgaatgaagtcagga

SEQ ID NO: 1869335 - DNA, 25 bp, Homo sapien
tccacacctgttgtctgattccaca

SEQ ID NO: 1869336 - DNA, 25 bp, Homo sapien
acctgttgtctgattccacaaagga

SEQ ID NO: 1869337 - DNA, 25 bp, Homo sapien
tgtctgattccacaaaggactccat

SEQ ID NO: 1869338 - DNA, 25 bp, Homo sapien
tgttgtctgattccacaaaggactc

SEQ ID NO: 1869339 - DNA, 25 bp, Homo sapien
tcaacgagacagaaagtcaacaagg

SEQ ID NO: 1869340 - DNA, 25 bp, Homo sapien
cagaaagtcaacaaggatacccagg

SEQ ID NO: 1869341 - DNA, 25 bp, Homo sapien
cagatcaacgagacagaaagtcaac

SEQ ID NO: 1869342 - DNA, 25 bp, Homo sapien
cgagacagaaagtcaacaaggatac

SEQ ID NO: 1869343 - DNA, 25 bp, Homo sapien
cacagtgctaggaggttcccttgca

SEQ ID NO: 1869344 - DNA, 25 bp, Homo sapien
gctctttgagctatacacgtgcaca

SEQ ID NO: 1869345 - DNA, 25 bp, Homo sapien
ccacagatgattgagaagagtcagc

SEQ ID NO: 1869346 - DNA, 25 bp, Homo sapien
tgcatctgaatagcggagcctacta

SEQ ID NO: 1869347 - DNA, 25 bp, Homo sapien
caacgaggctgggagagttctacag

SEQ ID NO: 1869348 - DNA, 25 bp, Homo sapien
gaacaacgcacacacatcaggactg

SEQ ID NO: 1869349 - DNA, 25 bp, Homo sapien
acttttttgagcacacgggtgtcgc

SEQ ID NO: 1869350 - DNA, 25 bp, Homo sapien
tgtcgcgtgagtaggaccggcatac

SEQ ID NO: 1869351 - DNA, 25 bp, Homo sapien
cggctattatcgagaaggagcaggc

SEQ ID NO: 1869352 - DNA, 25 bp, Homo sapien
aagaggagacggctattatcgagaa

SEQ ID NO: 1869353 - DNA, 25 bp, Homo sapien
gagacggctattatcgagaaggagc

SEQ ID NO: 1869354 - DNA, 25 bp, Homo sapien
gcatgataaagaggagacggctatt

SEQ ID NO: 1869355 - DNA, 25 bp, Homo sapien
tcttcctctatgtcactgtcgcaca

SEQ ID NO: 1869356 - DNA, 25 bp, Homo sapien
gcacacgtgcacgacgacacttggg

SEQ ID NO: 1869357 - DNA, 25 bp, Homo sapien
gccaggacgccgagtttggatgatt

SEQ ID NO: 1869358 - DNA, 25 bp, Homo sapien
cagttggacacggagggtggcaggc

SEQ ID NO: 1869359 - DNA, 25 bp, Homo sapien
ggtttatctgttggcccctaatcat

SEQ ID NO: 1869360 - DNA, 25 bp, Homo sapien
tgttttggtcaaactggtttatctg

SEQ ID NO: 1869361 - DNA, 25 bp, Homo sapien
caaactggtttatctgttggcccct

SEQ ID NO: 1869362 - DNA, 25 bp, Homo sapien
tggtcaaactggtttatctgttggc

SEQ ID NO: 1869363 - DNA, 25 bp, Homo sapien
cttagggccaccaaaatagctactt

SEQ ID NO: 1869364 - DNA, 25 bp, Homo sapien
gctacattcttagggccaccaaaat

SEQ ID NO: 1869365 - DNA, 25 bp, Homo sapien
gacagctacattcttagggccacca

SEQ ID NO: 1869366 - DNA, 25 bp, Homo sapien
cattcttagggccaccaaaatagct

SEQ ID NO: 1869367 - DNA, 25 bp, Homo sapien
tggctactgaagcttttgtatgcat

SEQ ID NO: 1869368 - DNA, 25 bp, Homo sapien
ttggagaagtttgttcttaccaatc

SEQ ID NO: 1869369 - DNA, 25 bp, Homo sapien
tgttcttaccaatcatctgaagcct

SEQ ID NO: 1869370 - DNA, 25 bp, Homo sapien
tttgtatgcatcacatagttctctt

SEQ ID NO: 1869371 - DNA, 25 bp, Homo sapien
tcagttaagagtcagagaagtctgt

SEQ ID NO: 1869372 - DNA, 25 bp, Homo sapien
aagtctgtattaggcacctcttgcc

SEQ ID NO: 1869373 - DNA, 25 bp, Homo sapien
cagaaatagagtgttacaactccag

SEQ ID NO: 1869374 - DNA, 25 bp, Homo sapien
cctgctgtgtagagtaaaggctttc

SEQ ID NO: 1869375 - DNA, 25 bp, Homo sapien
gtgaaatcataggcagggagaactg

SEQ ID NO: 1869376 - DNA, 25 bp, Homo sapien
tctgatacaagcaagctgatgtggc

SEQ ID NO: 1869377 - DNA, 25 bp, Homo sapien
cagggagaactgcatcaacaagcat

SEQ ID NO: 1869378 - DNA, 25 bp, Homo sapien
gcattgaatctctgatacaagcaag

SEQ ID NO: 1869379 - DNA, 25 bp, Homo sapien
caaagttccacggtgaacaatgatt

SEQ ID NO: 1869380 - DNA, 25 bp, Homo sapien
tgagttaaccgcatccagggtttct

SEQ ID NO: 1869381 - DNA, 25 bp, Homo sapien
caatgattgagttaaccgcatccag

SEQ ID NO: 1869382 - DNA, 25 bp, Homo sapien
tccacggtgaacaatgattgagtta

SEQ ID NO: 1869383 - DNA, 25 bp, Homo sapien
tcatcctcaaatgaggaatagaaag

SEQ ID NO: 1869384 - DNA, 25 bp, Homo sapien
tggcctctgtcatcctcaaatgagg

SEQ ID NO: 1869385 - DNA, 25 bp, Homo sapien
cctctgtcatcctcaaatgaggaat

SEQ ID NO: 1869386 - DNA, 25 bp, Homo sapien
tctgtcatcctcaaatgaggaatag

SEQ ID NO: 1869387 - DNA, 25 bp, Homo sapien
caagtgccactgagtttctctctca

SEQ ID NO: 1869388 - DNA, 25 bp, Homo sapien
ttggtggctggcagtccaagtgcca

SEQ ID NO: 1869389 - DNA, 25 bp, Homo sapien
tcatgccaccttggcttacgggcca

SEQ ID NO: 1869390 - DNA, 25 bp, Homo sapien
aattgcagagaaatgtgttggtggc

SEQ ID NO: 1869391 - DNA, 25 bp, Homo sapien
gagcatcacgcttggtcattactaa

SEQ ID NO: 1869392 - DNA, 25 bp, Homo sapien
tgctgcagcttaaggtacacattag

SEQ ID NO: 1869393 - DNA, 25 bp, Homo sapien
tctacaagcgactctactgaaaggg

SEQ ID NO: 1869394 - DNA, 25 bp, Homo sapien
gatgtctggtatgtactcacacgtg

SEQ ID NO: 1869395 - DNA, 25 bp, Homo sapien
tattgaactttggtggatcccagag

SEQ ID NO: 1869396 - DNA, 25 bp, Homo sapien
atttaggcatgcacgaggttgggat

SEQ ID NO: 1869397 - DNA, 25 bp, Homo sapien
tgctgagcgaccagcgtaaccgcct

SEQ ID NO: 1869398 - DNA, 25 bp, Homo sapien
cgccttactacttcctagatttagg

SEQ ID NO: 1869399 - DNA, 25 bp, Homo sapien
cagcatagaggaggtcatagttgag

SEQ ID NO: 1869400 - DNA, 25 bp, Homo sapien
gcgtggcatcgttgatgggctgcca

SEQ ID NO: 1869401 - DNA, 25 bp, Homo sapien
catagttgaggactggcgtggcatc

SEQ ID NO: 1869402 - DNA, 25 bp, Homo sapien
ggccacagcatagaggaggtcatag

SEQ ID NO: 1869403 - DNA, 25 bp, Homo sapien
gagccaagtgcagtttgtctccatc

SEQ ID NO: 1869404 - DNA, 25 bp, Homo sapien
ggagccaagtgcagtttgtctccat

SEQ ID NO: 1869405 - DNA, 25 bp, Homo sapien
ggaacgtcacacagtcatcataagt

SEQ ID NO: 1869406 - DNA, 25 bp, Homo sapien
gaagctctatcctagctcgggctgc

SEQ ID NO: 1869407 - DNA, 25 bp, Homo sapien
tacggacacgtctgaaactcttaaa

SEQ ID NO: 1869408 - DNA, 25 bp, Homo sapien
gattgctgaagtttatacggacacg

SEQ ID NO: 1869409 - DNA, 25 bp, Homo sapien
ggaaaatccattggccatggcatgg

SEQ ID NO: 1869410 - DNA, 25 bp, Homo sapien
ccatggcatggatctcgtatgatgt

SEQ ID NO: 1869411 - DNA, 25 bp, Homo sapien
atggcatggatctcgtatgatgtca

SEQ ID NO: 1869412 - DNA, 25 bp, Homo sapien
aggaaaatccattggccatggcatg

SEQ ID NO: 1869413 - DNA, 25 bp, Homo sapien
caatgcctgagcttgggccattaag

SEQ ID NO: 1869414 - DNA, 25 bp, Homo sapien
gagcttgggccattaagtctagctt

SEQ ID NO: 1869415 - DNA, 25 bp, Homo sapien
tgaaagcgaggtgctttttcctttg

SEQ ID NO: 1869416 - DNA, 25 bp, Homo sapien
atgcctgagcttgggccattaagtc

SEQ ID NO: 1869417 - DNA, 25 bp, Homo sapien
cagggacacaataatattttgttgt

SEQ ID NO: 1869418 - DNA, 25 bp, Homo sapien
ataatattttgttgtcctctggctc

SEQ ID NO: 1869419 - DNA, 25 bp, Homo sapien
tattttgttgtcctctggctcccat

SEQ ID NO: 1869420 - DNA, 25 bp, Homo sapien
aatattttgttgtcctctggctccc

SEQ ID NO: 1869421 - DNA, 25 bp, Homo sapien
ccttgcctaaatccactttgtaagt

SEQ ID NO: 1869422 - DNA, 25 bp, Homo sapien
ttgcctaaatccactttgtaagtac

SEQ ID NO: 1869423 - DNA, 25 bp, Homo sapien
tccttgcctaaatccactttgtaag

SEQ ID NO: 1869424 - DNA, 25 bp, Homo sapien
tgcctaaatccactttgtaagtacc

SEQ ID NO: 1869425 - DNA, 25 bp, Homo sapien
tgcattgagctgagtaagccaagat

SEQ ID NO: 1869426 - DNA, 25 bp, Homo sapien
tcatagagtatactttgccacgaca

SEQ ID NO: 1869427 - DNA, 25 bp, Homo sapien
aaaaaccaactatgcagggttggtg

SEQ ID NO: 1869428 - DNA, 25 bp, Homo sapien
aaatgaagaatatttgggctaggcg

SEQ ID NO: 1869429 - DNA, 25 bp, Homo sapien
tccagtcagcgagtttgtgccaaag

SEQ ID NO: 1869430 - DNA, 25 bp, Homo sapien
gacagactggacttctggttatgcc

SEQ ID NO: 1869431 - DNA, 25 bp, Homo sapien
gaggcagctcaagagttagacagac

SEQ ID NO: 1869432 - DNA, 25 bp, Homo sapien
gaagctcctggccaatagaatatta

SEQ ID NO: 1869433 - DNA, 25 bp, Homo sapien
gaataaagatggactatccaggctg

SEQ ID NO: 1869434 - DNA, 25 bp, Homo sapien
tcttgagaaggtaaagacatgtaca

SEQ ID NO: 1869435 - DNA, 25 bp, Homo sapien
tcttctcattccctaaaagtaagga

SEQ ID NO: 1869436 - DNA, 25 bp, Homo sapien
gaaagagcacttcaaggccgggagt

SEQ ID NO: 1869437 - DNA, 25 bp, Homo sapien
caatattccctctatggataccctc

SEQ ID NO: 1869438 - DNA, 25 bp, Homo sapien
ccctctatggataccctctgaggat

SEQ ID NO: 1869439 - DNA, 25 bp, Homo sapien
attccctctatggataccctctgag

SEQ ID NO: 1869440 - DNA, 25 bp, Homo sapien
atattccctctatggataccctctg

SEQ ID NO: 1869441 - DNA, 25 bp, Homo sapien
caaagtgcagcccattaccagcagg

SEQ ID NO: 1869442 - DNA, 25 bp, Homo sapien
tcaatacagccaggactggcccaca

SEQ ID NO: 1869443 - DNA, 25 bp, Homo sapien
taagccacagtttcatgagcagcag

SEQ ID NO: 1869444 - DNA, 25 bp, Homo sapien
gcaggccagtcatgaccttcaccta

SEQ ID NO: 1869445 - DNA, 25 bp, Homo sapien
tttcactgcagcaggtaccccatgg

SEQ ID NO: 1869446 - DNA, 25 bp, Homo sapien
gggcatccaattttgcaagaaagaa

SEQ ID NO: 1869447 - DNA, 25 bp, Homo sapien
ttttagtgcaaaaggaggctctaca

SEQ ID NO: 1869448 - DNA, 25 bp, Homo sapien
cagacactgattggctcagcatggg

SEQ ID NO: 1869449 - DNA, 25 bp, Homo sapien
tataccaccaagcttttcctgaacc

SEQ ID NO: 1869450 - DNA, 25 bp, Homo sapien
gaggatactctcaaaaagcgaataa

SEQ ID NO: 1869451 - DNA, 25 bp, Homo sapien
tcacagtaaagcttcttagtcctgg

SEQ ID NO: 1869452 - DNA, 25 bp, Homo sapien
ctggtatggtgaaagggtcctatac

SEQ ID NO: 1869453 - DNA, 25 bp, Homo sapien
tgacaaccactgcacagtccgggtg

SEQ ID NO: 1869454 - DNA, 25 bp, Homo sapien
gtagaatagacaccccccgctttgc

SEQ ID NO: 1869455 - DNA, 25 bp, Homo sapien
ctgaatcctgggttcttactaaaat

SEQ ID NO: 1869456 - DNA, 25 bp, Homo sapien
tcctgggttcttactaaaatgacaa

SEQ ID NO: 1869457 - DNA, 25 bp, Homo sapien
cacagaatccagcagatagtcatca

SEQ ID NO: 1869458 - DNA, 25 bp, Homo sapien
tgctccattccctgtcatcacgttg

SEQ ID NO: 1869459 - DNA, 25 bp, Homo sapien
tggacaggaggttctatactacact

SEQ ID NO: 1869460 - DNA, 25 bp, Homo sapien
tacacttcacgtagcttctcaggct

SEQ ID NO: 1869461 - DNA, 25 bp, Homo sapien
cagtcccctgaggttaaatgtttgg

SEQ ID NO: 1869462 - DNA, 25 bp, Homo sapien
ggtacagcatgaacactgctcacat

SEQ ID NO: 1869463 - DNA, 25 bp, Homo sapien
ggagcttacatttgtcaccatgtgg

SEQ ID NO: 1869464 - DNA, 25 bp, Homo sapien
tgtggacactgctatggtatataac

SEQ ID NO: 1869465 - DNA, 25 bp, Homo sapien
tgaacggtctaccttgtctttacca

SEQ ID NO: 1869466 - DNA, 25 bp, Homo sapien
ccaaatgtgataggtggctgagaaa

SEQ ID NO: 1869467 - DNA, 25 bp, Homo sapien
tgatttccccacttaacaatgttat

SEQ ID NO: 1869468 - DNA, 25 bp, Homo sapien
gcctctgaaccttctcagggagtat

SEQ ID NO: 1869469 - DNA, 25 bp, Homo sapien
tctgtgtcactatgggaaactagat

SEQ ID NO: 1869470 - DNA, 25 bp, Homo sapien
cctagtatggctgcttgcccatggg

SEQ ID NO: 1869471 - DNA, 25 bp, Homo sapien
ccatacttatgaaggaggcctgctg

SEQ ID NO: 1869472 - DNA, 25 bp, Homo sapien
gaagggcccctaatacaatcagctg

SEQ ID NO: 1869473 - DNA, 25 bp, Homo sapien
gctggctttaaatgactgctctccc

SEQ ID NO: 1869474 - DNA, 25 bp, Homo sapien
cccacactggacttgacgctggctt

SEQ ID NO: 1869475 - DNA, 25 bp, Homo sapien
gctatggaagtacgactggcaggac

SEQ ID NO: 1869476 - DNA, 25 bp, Homo sapien
tctcccttctcaagtgctatggaag

SEQ ID NO: 1869477 - DNA, 25 bp, Homo sapien
gattggtaaagacctcgacatccac

SEQ ID NO: 1869478 - DNA, 25 bp, Homo sapien
ggtaaagacctcgacatccaccaca

SEQ ID NO: 1869479 - DNA, 25 bp, Homo sapien
ccacacaggcaaccagagtggaaac

SEQ ID NO: 1869480 - DNA, 25 bp, Homo sapien
taacctcctgattggtaaagacctc

SEQ ID NO: 1869481 - DNA, 25 bp, Homo sapien
aggcctcggtgctgccttgctctgg

SEQ ID NO: 1869482 - DNA, 25 bp, Homo sapien
cttccagatggatattgctgtggcc

SEQ ID NO: 1869483 - DNA, 25 bp, Homo sapien
agagttaggcaacctcagagttggg

SEQ ID NO: 1869484 - DNA, 25 bp, Homo sapien
cagcagagtaacgaacggcccggct

SEQ ID NO: 1869485 - DNA, 25 bp, Homo sapien
aaagtattccccaatcagctaaaat

SEQ ID NO: 1869486 - DNA, 25 bp, Homo sapien
tatagatacactttggccaatggct

SEQ ID NO: 1869487 - DNA, 25 bp, Homo sapien
caattggccttattggtgttccaaa

SEQ ID NO: 1869488 - DNA, 25 bp, Homo sapien
tcttatcatctggatctccgctcag

SEQ ID NO: 1869489 - DNA, 25 bp, Homo sapien
atgtaagatccacgagggcaggaac

SEQ ID NO: 1869490 - DNA, 25 bp, Homo sapien
gctttatcacgaaggcaggttctcc

SEQ ID NO: 1869491 - DNA, 25 bp, Homo sapien
tacatgctgaggcaagctatgagct

SEQ ID NO: 1869492 - DNA, 25 bp, Homo sapien
tgcaaaggatatacaggagtcactg

SEQ ID NO: 1869493 - DNA, 25 bp, Homo sapien
tgttggctaacctttagagagaact

SEQ ID NO: 1869494 - DNA, 25 bp, Homo sapien
cgctcaaagacgatgaaaaacctag

SEQ ID NO: 1869495 - DNA, 25 bp, Homo sapien
tccgtgcaatatatagagttgtccc

SEQ ID NO: 1869496 - DNA, 25 bp, Homo sapien
tcttccatagtagggtaggaataca

SEQ ID NO: 1869497 - DNA, 25 bp, Homo sapien
gaagctgcccctatggaatgcacct

SEQ ID NO: 1869498 - DNA, 25 bp, Homo sapien
tgcttcctcccggtagatatccaag

SEQ ID NO: 1869499 - DNA, 25 bp, Homo sapien
ggacttggtcctgaatacacatcta

SEQ ID NO: 1869500 - DNA, 25 bp, Homo sapien
gatatccaagctcttactaggccta

SEQ ID NO: 1869501 - DNA, 25 bp, Homo sapien
tccacaattgtcagcacatctttag

SEQ ID NO: 1869502 - DNA, 25 bp, Homo sapien
gtggcaaactaactctaaaccatag

SEQ ID NO: 1869503 - DNA, 25 bp, Homo sapien
gggagactaactggaattccccaga

SEQ ID NO: 1869504 - DNA, 25 bp, Homo sapien
tatagtaatagtaaaagcaggtgcc

SEQ ID NO: 1869505 - DNA, 25 bp, Homo sapien
tgcaatctgctaagactcacactac

SEQ ID NO: 1869506 - DNA, 25 bp, Homo sapien
cactactatcttataacgggttggg

SEQ ID NO: 1869507 - DNA, 25 bp, Homo sapien
acaggtgaatgcaaaccattttgca

SEQ ID NO: 1869508 - DNA, 25 bp, Homo sapien
ctcatgagtgtattgtaaagattaa

SEQ ID NO: 1869509 - DNA, 25 bp, Homo sapien
ctcacacagcaacacgggttctctt

SEQ ID NO: 1869510 - DNA, 25 bp, Homo sapien
tgtttagagccatccgatatgaggc

SEQ ID NO: 1869511 - DNA, 25 bp, Homo sapien
ggctctttgtggcaacctgctgcag

SEQ ID NO: 1869512 - DNA, 25 bp, Homo sapien
atggtaccagctggcgagtcgctca

SEQ ID NO: 1869513 - DNA, 25 bp, Homo sapien
gctcaagagcggttcagcaacagca

SEQ ID NO: 1869514 - DNA, 25 bp, Homo sapien
tagcactgactgttaagaatccatc

SEQ ID NO: 1869515 - DNA, 25 bp, Homo sapien
tgaagaagtgattctctgactgctg

SEQ ID NO: 1869516 - DNA, 25 bp, Homo sapien
tcttcaggctcaagagcggttcagc

SEQ ID NO: 1869517 - DNA, 25 bp, Homo sapien
cagacactaggcaggagtgaatcca

SEQ ID NO: 1869518 - DNA, 25 bp, Homo sapien
tgtcatccctggttacaggagctca

SEQ ID NO: 1869519 - DNA, 25 bp, Homo sapien
catcatttatgaatcagcactgtgc

SEQ ID NO: 1869520 - DNA, 25 bp, Homo sapien
gatgaacatgatgtcatccctggtt

SEQ ID NO: 1869521 - DNA, 25 bp, Homo sapien
taagcattagtattagaccatctgg

SEQ ID NO: 1869522 - DNA, 25 bp, Homo sapien
tgattatagcagaccagaccaagtc

SEQ ID NO: 1869523 - DNA, 25 bp, Homo sapien
gaccagacagacttatctcagacca

SEQ ID NO: 1869524 - DNA, 25 bp, Homo sapien
tagatggccaatcctatagtgtttg

SEQ ID NO: 1869525 - DNA, 25 bp, Homo sapien
tgatgtcccagaactctcagaactt

SEQ ID NO: 1869526 - DNA, 25 bp, Homo sapien
tcatggaggcaatttagctgaaagc

SEQ ID NO: 1869527 - DNA, 25 bp, Homo sapien
cagcagcgtcaccttgtagtattta

SEQ ID NO: 1869528 - DNA, 25 bp, Homo sapien
catcatgctttggatattcagggcc

SEQ ID NO: 1869529 - DNA, 25 bp, Homo sapien
catttgctgtaagggtcaaataact

SEQ ID NO: 1869530 - DNA, 25 bp, Homo sapien
cttgcacatttgctgtaagggtcaa

SEQ ID NO: 1869531 - DNA, 25 bp, Homo sapien
tgcacatttgctgtaagggtcaaat

SEQ ID NO: 1869532 - DNA, 25 bp, Homo sapien
ttgctgtaagggtcaaataactcac

SEQ ID NO: 1869533 - DNA, 25 bp, Homo sapien
ctgcagagtactcttcagttttctt

SEQ ID NO: 1869534 - DNA, 25 bp, Homo sapien
aaacttcttggtagactgcagagta

SEQ ID NO: 1869535 - DNA, 25 bp, Homo sapien
agactgcagagtactcttcagtttt

SEQ ID NO: 1869536 - DNA, 25 bp, Homo sapien
aacttcttggtagactgcagagtac

SEQ ID NO: 1869537 - DNA, 25 bp, Homo sapien
ctgcttggatcaggggtagaatgtt

SEQ ID NO: 1869538 - DNA, 25 bp, Homo sapien
tgcttggatcaggggtagaatgttc

SEQ ID NO: 1869539 - DNA, 25 bp, Homo sapien
catgaaaatcaccagttaccagcag

SEQ ID NO: 1869540 - DNA, 25 bp, Homo sapien
gacttggccaacgtgttcactgact

SEQ ID NO: 1869541 - DNA, 25 bp, Homo sapien
tagataattaatacatgccgaagat

SEQ ID NO: 1869542 - DNA, 25 bp, Homo sapien
tgggatatatgtgacctcgtggcac

SEQ ID NO: 1869543 - DNA, 25 bp, Homo sapien
taggactcaatagggccacaaggtg

SEQ ID NO: 1869544 - DNA, 25 bp, Homo sapien
tggtcaccatgaggaaagcggctac

SEQ ID NO: 1869545 - DNA, 25 bp, Homo sapien
caagtgagacatgatccaaggagca

SEQ ID NO: 1869546 - DNA, 25 bp, Homo sapien
ctgattacacaagaggagggcctga

SEQ ID NO: 1869547 - DNA, 25 bp, Homo sapien
ttttgtctgtggctatcaggattgt

SEQ ID NO: 1869548 - DNA, 25 bp, Homo sapien
tggttttgtctgtggctatcaggat

SEQ ID NO: 1869549 - DNA, 25 bp, Homo sapien
taatcctctgggatggttttgtctg

SEQ ID NO: 1869550 - DNA, 25 bp, Homo sapien
ctaatcctctgggatggttttgtct

SEQ ID NO: 1869551 - DNA, 25 bp, Homo sapien
ttggctcacagtttaagaaggcttt

SEQ ID NO: 1869552 - DNA, 25 bp, Homo sapien
cttggctcacagtttaagaaggctt

SEQ ID NO: 1869553 - DNA, 25 bp, Homo sapien
tgcagcacagtaagaaaagtcctcc

SEQ ID NO: 1869554 - DNA, 25 bp, Homo sapien
tgcaaaacaacgagtgacagcccag

SEQ ID NO: 1869555 - DNA, 25 bp, Homo sapien
ccctgggctcctcattccgatgaag

SEQ ID NO: 1869556 - DNA, 25 bp, Homo sapien
cattgcacgcaaacaacgagttggg

SEQ ID NO: 1869557 - DNA, 25 bp, Homo sapien
cctccagtgtatgaaacctccagct

SEQ ID NO: 1869558 - DNA, 25 bp, Homo sapien
ccctctgccaataacatgtgaatga

SEQ ID NO: 1869559 - DNA, 25 bp, Homo sapien
gcttatcaagagcaagccaatggca

SEQ ID NO: 1869560 - DNA, 25 bp, Homo sapien
gagaaggaacatggccttgcctacc

SEQ ID NO: 1869561 - DNA, 25 bp, Homo sapien
tcctcctagggataagacaagcctt

SEQ ID NO: 1869562 - DNA, 25 bp, Homo sapien
tcctgagatacaaaggagagacatg

SEQ ID NO: 1869563 - DNA, 25 bp, Homo sapien
tcttgaaagtatcaggaacatgcag

SEQ ID NO: 1869564 - DNA, 25 bp, Homo sapien
ggaacctatttaattcagctgcaga

SEQ ID NO: 1869565 - DNA, 25 bp, Homo sapien
ctttctcaacttgagtgacttcctg

SEQ ID NO: 1869566 - DNA, 25 bp, Homo sapien
ctttaatcagcactttctcaacttg

SEQ ID NO: 1869567 - DNA, 25 bp, Homo sapien
gacttcctgagtctcacagattctc

SEQ ID NO: 1869568 - DNA, 25 bp, Homo sapien
tcagcactttctcaacttgagtgac

SEQ ID NO: 1869569 - DNA, 25 bp, Homo sapien
gtctccagctgtgttaaatccggaa

SEQ ID NO: 1869570 - DNA, 25 bp, Homo sapien
gctgtgttaaatccggaaggctgag

SEQ ID NO: 1869571 - DNA, 25 bp, Homo sapien
tccagctgtgttaaatccggaaggc

SEQ ID NO: 1869572 - DNA, 25 bp, Homo sapien
tgttaaatccggaaggctgagtgtt

SEQ ID NO: 1869573 - DNA, 25 bp, Homo sapien
tgtgacctttctgccatgtgtgtat

SEQ ID NO: 1869574 - DNA, 25 bp, Homo sapien
gtgacctttctgccatgtgtgtatg

SEQ ID NO: 1869575 - DNA, 25 bp, Homo sapien
atgtgacctttctgccatgtgtgta

SEQ ID NO: 1869576 - DNA, 25 bp, Homo sapien
gtctgttacacgttcatcactggag

SEQ ID NO: 1869577 - DNA, 25 bp, Homo sapien
caaaattctatggactggactcagg

SEQ ID NO: 1869578 - DNA, 25 bp, Homo sapien
gatcgagtggatgctacagaacgta

SEQ ID NO: 1869579 - DNA, 25 bp, Homo sapien
gagtcatgccctcccaaatttaggt

SEQ ID NO: 1869580 - DNA, 25 bp, Homo sapien
ctgcccgccggtgcgagcgcgtggg

SEQ ID NO: 1869581 - DNA, 25 bp, Homo sapien
gtgggtcagtgggattctgcctgct

SEQ ID NO: 1869582 - DNA, 25 bp, Homo sapien
gggccagctgctagcgcgcggcgct

SEQ ID NO: 1869583 - DNA, 25 bp, Homo sapien
ggcgtccgcgatgcgccggcggagg

SEQ ID NO: 1869584 - DNA, 25 bp, Homo sapien
aggagccggcggagatgggcgcgtc

SEQ ID NO: 1869585 - DNA, 25 bp, Homo sapien
ctcatcgggccaacctccaatcaga

SEQ ID NO: 1869586 - DNA, 25 bp, Homo sapien
gtcacccgggacaaagcggctccag

SEQ ID NO: 1869587 - DNA, 25 bp, Homo sapien
tccaatcagacccagggaaaccgaa

SEQ ID NO: 1869588 - DNA, 25 bp, Homo sapien
cagatgtctgagccccccgactctg

SEQ ID NO: 1869589 - DNA, 25 bp, Homo sapien
agatgtctgagccccccgactctgg

SEQ ID NO: 1869590 - DNA, 25 bp, Homo sapien
gctttgccaggatttgcagccatca

SEQ ID NO: 1869591 - DNA, 25 bp, Homo sapien
cctcccgggcttctgcgcttggtgg

SEQ ID NO: 1869592 - DNA, 25 bp, Homo sapien
actgaggaaatgtcggggagcccct

SEQ ID NO: 1869593 - DNA, 25 bp, Homo sapien
tgccctgcgcgggcttcacagcttt

SEQ ID NO: 1869594 - DNA, 25 bp, Homo sapien
ctgaggacagaagggttcgggctgc

SEQ ID NO: 1869595 - DNA, 25 bp, Homo sapien
agataggaacaggactgagtctcat

SEQ ID NO: 1869596 - DNA, 25 bp, Homo sapien
cagataggaacaggactgagtctca

SEQ ID NO: 1869597 - DNA, 25 bp, Homo sapien
actcaggcaccctctttgtacaagc

SEQ ID NO: 1869598 - DNA, 25 bp, Homo sapien
tactcaggcaccctctttgtacaag

SEQ ID NO: 1869599 - DNA, 25 bp, Homo sapien
ctcaggcaccctctttgtacaagcc

SEQ ID NO: 1869600 - DNA, 25 bp, Homo sapien
ctactcaggcaccctctttgtacaa

SEQ ID NO: 1869601 - DNA, 25 bp, Homo sapien
ctctcctctgcccaacacatataat

SEQ ID NO: 1869602 - DNA, 25 bp, Homo sapien
tggaccatcctttctctgatgacct

SEQ ID NO: 1869603 - DNA, 25 bp, Homo sapien
ggaccatcctttctctgatgacctc

SEQ ID NO: 1869604 - DNA, 25 bp, Homo sapien
gcccaacacatataatgctgccttc

SEQ ID NO: 1869605 - DNA, 25 bp, Homo sapien
tctgatgtgcttccatgatatccat

SEQ ID NO: 1869606 - DNA, 25 bp, Homo sapien
gggactgtcccacaatacatatttc

SEQ ID NO: 1869607 - DNA, 25 bp, Homo sapien
tttgagcagtcagaatctggggact

SEQ ID NO: 1869608 - DNA, 25 bp, Homo sapien
catgatatccatacttcttctcctt

SEQ ID NO: 1869609 - DNA, 25 bp, Homo sapien
aaacacttcctccatggagggtgac

SEQ ID NO: 1869610 - DNA, 25 bp, Homo sapien
catccactctctcgcctggcaaggg

SEQ ID NO: 1869611 - DNA, 25 bp, Homo sapien
cagcagacacccttgggaaacactt

SEQ ID NO: 1869612 - DNA, 25 bp, Homo sapien
gaccatccactctctcgcctggcaa

SEQ ID NO: 1869613 - DNA, 25 bp, Homo sapien
gaatctcactaggatggctgcactg

SEQ ID NO: 1869614 - DNA, 25 bp, Homo sapien
taaagtgtgggatgaatctcactag

SEQ ID NO: 1869615 - DNA, 25 bp, Homo sapien
tccagataagagtataaagtgtggg

SEQ ID NO: 1869616 - DNA, 25 bp, Homo sapien
aattccagataagagtataaagtgt

SEQ ID NO: 1869617 - DNA, 25 bp, Homo sapien
tattattctagttccataaacaagc

SEQ ID NO: 1869618 - DNA, 25 bp, Homo sapien
atttctctatatctacagccaaatg

SEQ ID NO: 1869619 - DNA, 25 bp, Homo sapien
aataggagttgataataccaccaga

SEQ ID NO: 1869620 - DNA, 25 bp, Homo sapien
aacaagcttaaaataggagttgata

SEQ ID NO: 1869621 - DNA, 25 bp, Homo sapien
gtggagactggaataacttgggctt

SEQ ID NO: 1869622 - DNA, 25 bp, Homo sapien
catcacaaataccacctcacctctc

SEQ ID NO: 1869623 - DNA, 25 bp, Homo sapien
cctgatactccagtagtagccttgt

SEQ ID NO: 1869624 - DNA, 25 bp, Homo sapien
gatactccagtagtagccttgtgga

SEQ ID NO: 1869625 - DNA, 25 bp, Homo sapien
cagcgatccatcaggaccacaggca

SEQ ID NO: 1869626 - DNA, 25 bp, Homo sapien
tgcaccacctcagaggtagtgactt

SEQ ID NO: 1869627 - DNA, 25 bp, Homo sapien
ggtagtgacttctatatttctgaca

SEQ ID NO: 1869628 - DNA, 25 bp, Homo sapien
ctgtcttcccggagaataaggccat

SEQ ID NO: 1869629 - DNA, 25 bp, Homo sapien
ctgcaaagggaagataaaaccaaca

SEQ ID NO: 1869630 - DNA, 25 bp, Homo sapien
tgcaaagggaagataaaaccaacaa

SEQ ID NO: 1869631 - DNA, 25 bp, Homo sapien
tcactgaggccaaaatcttcctggg

SEQ ID NO: 1869632 - DNA, 25 bp, Homo sapien
actgaggccaaaatcttcctggggt

SEQ ID NO: 1869633 - DNA, 25 bp, Homo sapien
ttcctcactgaggccaaaatcttcc

SEQ ID NO: 1869634 - DNA, 25 bp, Homo sapien
cctcactgaggccaaaatcttcctg

SEQ ID NO: 1869635 - DNA, 25 bp, Homo sapien
tggcccagcctctatttcatcaata

SEQ ID NO: 1869636 - DNA, 25 bp, Homo sapien
gaggatggcccagcctctatttcat

SEQ ID NO: 1869637 - DNA, 25 bp, Homo sapien
ggatggcccagcctctatttcatca

SEQ ID NO: 1869638 - DNA, 25 bp, Homo sapien
caggtcagtgtctgaggatggccca

SEQ ID NO: 1869639 - DNA, 25 bp, Homo sapien
taaagctaaatggtaaggcgaagcc

SEQ ID NO: 1869640 - DNA, 25 bp, Homo sapien
tggtaaggcgaagccttccaggctt

SEQ ID NO: 1869641 - DNA, 25 bp, Homo sapien
agcaagcttgcaggataaagctaaa

SEQ ID NO: 1869642 - DNA, 25 bp, Homo sapien
caagcttgcaggataaagctaaatg

SEQ ID NO: 1869643 - DNA, 25 bp, Homo sapien
cattttcatggaaaaggcagttcca

SEQ ID NO: 1869644 - DNA, 25 bp, Homo sapien
atttagttattgaagaactgaagtt

SEQ ID NO: 1869645 - DNA, 25 bp, Homo sapien
aatttagttattgaagaactgaagt

SEQ ID NO: 1869646 - DNA, 25 bp, Homo sapien
aaatttagttattgaagaactgaag

SEQ ID NO: 1869647 - DNA, 25 bp, Homo sapien
aaaaatccataagtcttctttatct

SEQ ID NO: 1869648 - DNA, 25 bp, Homo sapien
agaaaaatccataagtcttctttat

SEQ ID NO: 1869649 - DNA, 25 bp, Homo sapien
tccataagtcttctttatcttatag

SEQ ID NO: 1869650 - DNA, 25 bp, Homo sapien
gaaaaatccataagtcttctttatc

SEQ ID NO: 1869651 - DNA, 25 bp, Homo sapien
gctaagctgtgagctactaactcag

SEQ ID NO: 1869652 - DNA, 25 bp, Homo sapien
gaacctgccaagttatagtctgcaa

SEQ ID NO: 1869653 - DNA, 25 bp, Homo sapien
aaatacagtgcttcattgcgaccct

SEQ ID NO: 1869654 - DNA, 25 bp, Homo sapien
tcaacctcatgggataattctagcc

SEQ ID NO: 1869655 - DNA, 25 bp, Homo sapien
taggagttccaattgctagttgaga

SEQ ID NO: 1869656 - DNA, 25 bp, Homo sapien
aagaattatgttaatagagcctagg

SEQ ID NO: 1869657 - DNA, 25 bp, Homo sapien
taaaccatgtattccggtctctata

SEQ ID NO: 1869658 - DNA, 25 bp, Homo sapien
cttttagcattagatacgtttacaa

SEQ ID NO: 1869659 - DNA, 25 bp, Homo sapien
ctactgttgaagataccaaacacat

SEQ ID NO: 1869660 - DNA, 25 bp, Homo sapien
tactgttgaagataccaaacacatg

SEQ ID NO: 1869661 - DNA, 25 bp, Homo sapien
actgttgaagataccaaacacatgc

SEQ ID NO: 1869662 - DNA, 25 bp, Homo sapien
agtgtgtttttgtagagctcaggtc

SEQ ID NO: 1869663 - DNA, 25 bp, Homo sapien
gtgtttttgtagagctcaggtctag

SEQ ID NO: 1869664 - DNA, 25 bp, Homo sapien
ggtctaggtgctgccaggtggggta

SEQ ID NO: 1869665 - DNA, 25 bp, Homo sapien
caggtggggtagtgccactcctcca

SEQ ID NO: 1869666 - DNA, 25 bp, Homo sapien
caattcggcattgcccttccggctg

SEQ ID NO: 1869667 - DNA, 25 bp, Homo sapien
tgggggacacccaccaaatggagat

SEQ ID NO: 1869668 - DNA, 25 bp, Homo sapien
ggacacccaccaaatggagataact

SEQ ID NO: 1869669 - DNA, 25 bp, Homo sapien
tgtttatattcaattcggcattgcc

SEQ ID NO: 1869670 - DNA, 25 bp, Homo sapien
gcctgccacccttcgctttatctgg

SEQ ID NO: 1869671 - DNA, 25 bp, Homo sapien
ctgaaggctataggcctgccaccct

SEQ ID NO: 1869672 - DNA, 25 bp, Homo sapien
aaggctataggcctgccacccttcg

SEQ ID NO: 1869673 - DNA, 25 bp, Homo sapien
tataggcctgccacccttcgcttta

SEQ ID NO: 1869674 - DNA, 25 bp, Homo sapien
aagagcctggtgatttgacggccat

SEQ ID NO: 1869675 - DNA, 25 bp, Homo sapien
tagaagagcctggtgatttgacggc

SEQ ID NO: 1869676 - DNA, 25 bp, Homo sapien
gaagagcctggtgatttgacggcca

SEQ ID NO: 1869677 - DNA, 25 bp, Homo sapien
tcctagaagagcctggtgatttgac

SEQ ID NO: 1869678 - DNA, 25 bp, Homo sapien
tttgggtaatgggtccagaagacta

SEQ ID NO: 1869679 - DNA, 25 bp, Homo sapien
ctacagtcatatttataaagtatta

SEQ ID NO: 1869680 - DNA, 25 bp, Homo sapien
taatacacatctgaacctctaacag

SEQ ID NO: 1869681 - DNA, 25 bp, Homo sapien
tgggtaatgggtccagaagactaca

SEQ ID NO: 1869682 - DNA, 25 bp, Homo sapien
ggacaggtatagcaagcacatccct

SEQ ID NO: 1869683 - DNA, 25 bp, Homo sapien
tgacacagcaaatcaggcatcctct

SEQ ID NO: 1869684 - DNA, 25 bp, Homo sapien
cctcttgcaggaattagaaccaagg

SEQ ID NO: 1869685 - DNA, 25 bp, Homo sapien
taacttctcaagtattgcagccttc

SEQ ID NO: 1869686 - DNA, 25 bp, Homo sapien
tatagtttaatgtgagactgtctgc

SEQ ID NO: 1869687 - DNA, 25 bp, Homo sapien
tcctccatttaaatcgtatagttta

SEQ ID NO: 1869688 - DNA, 25 bp, Homo sapien
gaagaagtctggtggttcatgctgc

SEQ ID NO: 1869689 - DNA, 25 bp, Homo sapien
tcttcactttgcaagctacaatttc

SEQ ID NO: 1869690 - DNA, 25 bp, Homo sapien
cacagatgagatgttcaaaaacctt

SEQ ID NO: 1869691 - DNA, 25 bp, Homo sapien
gtactgacatttcccctacagaatc

SEQ ID NO: 1869692 - DNA, 25 bp, Homo sapien
aaattctatgaagtcagggaccatg

SEQ ID NO: 1869693 - DNA, 25 bp, Homo sapien
cagaatcatccccaatgaagaaatg

SEQ ID NO: 1869694 - DNA, 25 bp, Homo sapien
ggacactggaacttcccgcttccaa

SEQ ID NO: 1869695 - DNA, 25 bp, Homo sapien
gaaagagtgcttctctaaatttgcc

SEQ ID NO: 1869696 - DNA, 25 bp, Homo sapien
cttgcaggacactggaacttcccgc

SEQ ID NO: 1869697 - DNA, 25 bp, Homo sapien
gccatgaagcagtccaagaaagagt

SEQ ID NO: 1869698 - DNA, 25 bp, Homo sapien
caacatcaacaagtcaccagaagga

SEQ ID NO: 1869699 - DNA, 25 bp, Homo sapien
atatatgtgggcaaaatgtgtactt

SEQ ID NO: 1869700 - DNA, 25 bp, Homo sapien
aatatatgtgggcaaaatgtgtact

SEQ ID NO: 1869701 - DNA, 25 bp, Homo sapien
aaatatatgtgggcaaaatgtgtac

SEQ ID NO: 1869702 - DNA, 25 bp, Homo sapien
aaaatatatgtgggcaaaatgtgta

SEQ ID NO: 1869703 - DNA, 25 bp, Homo sapien
gacaccaggagcttttaaacgaatg

SEQ ID NO: 1869704 - DNA, 25 bp, Homo sapien
aatgacaccaggagcttttaaacga

SEQ ID NO: 1869705 - DNA, 25 bp, Homo sapien
aaacacaccatttaattagaaggag

SEQ ID NO: 1869706 - DNA, 25 bp, Homo sapien
ttagaaggagattctccaggtcatc

SEQ ID NO: 1869707 - DNA, 25 bp, Homo sapien
gaaaggacgtatgcaagtgtccaaa

SEQ ID NO: 1869708 - DNA, 25 bp, Homo sapien
ccaaacacagaagatatgccttcca

SEQ ID NO: 1869709 - DNA, 25 bp, Homo sapien
tgtggatatcaggatgagaaaggac

SEQ ID NO: 1869710 - DNA, 25 bp, Homo sapien
gccttccataatggccttgtggata

SEQ ID NO: 1869711 - DNA, 25 bp, Homo sapien
tatccagcgtagcttgcaataatgt

SEQ ID NO: 1869712 - DNA, 25 bp, Homo sapien
tccttacttgtttccgtctctacaa

SEQ ID NO: 1869713 - DNA, 25 bp, Homo sapien
cccaaagcagtaagagcccataatt

SEQ ID NO: 1869714 - DNA, 25 bp, Homo sapien
cagtaagagcccataattgggtgag

SEQ ID NO: 1869715 - DNA, 25 bp, Homo sapien
tgcagatttacatgcttttatatct

SEQ ID NO: 1869716 - DNA, 25 bp, Homo sapien
cagatttacatgcttttatatctgg

SEQ ID NO: 1869717 - DNA, 25 bp, Homo sapien
tttgcagatttacatgcttttatat

SEQ ID NO: 1869718 - DNA, 25 bp, Homo sapien
gatttacatgcttttatatctggaa

SEQ ID NO: 1869719 - DNA, 25 bp, Homo sapien
gggacccatactcaaaatcttcatc

SEQ ID NO: 1869720 - DNA, 25 bp, Homo sapien
tggcaactgggacccatactcaaaa

SEQ ID NO: 1869721 - DNA, 25 bp, Homo sapien
cactctggcaactgggacccatact

SEQ ID NO: 1869722 - DNA, 25 bp, Homo sapien
actgggacccatactcaaaatcttc

SEQ ID NO: 1869723 - DNA, 25 bp, Homo sapien
taaagagcatattcactgtgactgg

SEQ ID NO: 1869724 - DNA, 25 bp, Homo sapien
ttattaaagagcatattcactgtga

SEQ ID NO: 1869725 - DNA, 25 bp, Homo sapien
atattcactgtgactggataaagga

SEQ ID NO: 1869726 - DNA, 25 bp, Homo sapien
cactgtgactggataaaggagatgt

SEQ ID NO: 1869727 - DNA, 25 bp, Homo sapien
catgagtgcctaaattctccagttg

SEQ ID NO: 1869728 - DNA, 25 bp, Homo sapien
tcaggtccattgtcccatgagtgcc

SEQ ID NO: 1869729 - DNA, 25 bp, Homo sapien
ttcatgcagtgctaaaaagacattc

SEQ ID NO: 1869730 - DNA, 25 bp, Homo sapien
taaactgatggagattgacagtccc

SEQ ID NO: 1869731 - DNA, 25 bp, Homo sapien
acgatattttgcactgctagttcaa

SEQ ID NO: 1869732 - DNA, 25 bp, Homo sapien
ctgtacgataaacgatattttgcac

SEQ ID NO: 1869733 - DNA, 25 bp, Homo sapien
gcactgctagttcaaaatctacttt

SEQ ID NO: 1869734 - DNA, 25 bp, Homo sapien
tttgcactgctagttcaaaatctac

SEQ ID NO: 1869735 - DNA, 25 bp, Homo sapien
caaagactgtaaatattggtccata

SEQ ID NO: 1869736 - DNA, 25 bp, Homo sapien
gcaaagactgtaaatattggtccat

SEQ ID NO: 1869737 - DNA, 25 bp, Homo sapien
agcaaagactgtaaatattggtcca

SEQ ID NO: 1869738 - DNA, 25 bp, Homo sapien
cggtgttacgaagtacaggcaggca

SEQ ID NO: 1869739 - DNA, 25 bp, Homo sapien
caggcacacacggtatgttgtagaa

SEQ ID NO: 1869740 - DNA, 25 bp, Homo sapien
tgttacagaaagagcctacgtatcc

SEQ ID NO: 1869741 - DNA, 25 bp, Homo sapien
gattatcatgcggttgtaagaaatg

SEQ ID NO: 1869742 - DNA, 25 bp, Homo sapien
agtgttttctggagtggctgtacca

SEQ ID NO: 1869743 - DNA, 25 bp, Homo sapien
gtgttttctggagtggctgtaccat

SEQ ID NO: 1869744 - DNA, 25 bp, Homo sapien
aagtgttttctggagtggctgtacc

SEQ ID NO: 1869745 - DNA, 25 bp, Homo sapien
tatttagccttctgacacaagcttg

SEQ ID NO: 1869746 - DNA, 25 bp, Homo sapien
tcaagatcatatgcataaggaaggc

SEQ ID NO: 1869747 - DNA, 25 bp, Homo sapien
tatggtattcagtatggcccaggat

SEQ ID NO: 1869748 - DNA, 25 bp, Homo sapien
agtttggcagcaacctataaaccca

SEQ ID NO: 1869749 - DNA, 25 bp, Homo sapien
tgctactacgtataaattcattcta

SEQ ID NO: 1869750 - DNA, 25 bp, Homo sapien
caaattgggctaaccagatggaaaa

SEQ ID NO: 1869751 - DNA, 25 bp, Homo sapien
tgaaggcaaatgatcagtggtaaaa

SEQ ID NO: 1869752 - DNA, 25 bp, Homo sapien
gaatctcagagattttgaaggcaaa

SEQ ID NO: 1869753 - DNA, 25 bp, Homo sapien
gattactagtctcttcaggccgtag

SEQ ID NO: 1869754 - DNA, 25 bp, Homo sapien
tgaggcaagcaggtatgttccccgt

SEQ ID NO: 1869755 - DNA, 25 bp, Homo sapien
tgtgtacggaccaactgtgcaagca

SEQ ID NO: 1869756 - DNA, 25 bp, Homo sapien
ttccaaaaatgtcgatgcacgctgc

SEQ ID NO: 1869757 - DNA, 25 bp, Homo sapien
tgatgcacgggggtctacgcaaatt

SEQ ID NO: 1869758 - DNA, 25 bp, Homo sapien
gaatccagcccttgatgcacggggg

SEQ ID NO: 1869759 - DNA, 25 bp, Homo sapien
gctttcccaaactcaaatccaactc

SEQ ID NO: 1869760 - DNA, 25 bp, Homo sapien
tataaattctagaggggctttccca

SEQ ID NO: 1869761 - DNA, 25 bp, Homo sapien
gcaaggcaacccaggattataatca

SEQ ID NO: 1869762 - DNA, 25 bp, Homo sapien
caggattataatcactgttggggaa

SEQ ID NO: 1869763 - DNA, 25 bp, Homo sapien
gtgaaacagtcctgccgtcccttgc

SEQ ID NO: 1869764 - DNA, 25 bp, Homo sapien
tgatttttccattgtcgctccctcc

SEQ ID NO: 1869765 - DNA, 25 bp, Homo sapien
gcagctctccttcgtaactgtagct

SEQ ID NO: 1869766 - DNA, 25 bp, Homo sapien
tgggctacggaacctgtcgggactc

SEQ ID NO: 1869767 - DNA, 25 bp, Homo sapien
ggcttttgccgctgacccagagatg

SEQ ID NO: 1869768 - DNA, 25 bp, Homo sapien
tatatgattgctaaacccaaggcag

SEQ ID NO: 1869769 - DNA, 25 bp, Homo sapien
actgctgaatgtccgtcccggagga

SEQ ID NO: 1869770 - DNA, 25 bp, Homo sapien
ggcaggacacccattagttgcgaca

SEQ ID NO: 1869771 - DNA, 25 bp, Homo sapien
ttatgacccttgcatataaaagaca

SEQ ID NO: 1869772 - DNA, 25 bp, Homo sapien
gaaaggatattgagcttatgaccct

SEQ ID NO: 1869773 - DNA, 25 bp, Homo sapien
gaggccatgagtaggcgatgcatat

SEQ ID NO: 1869774 - DNA, 25 bp, Homo sapien
gaacatcacccacgaaattatagag

SEQ ID NO: 1869775 - DNA, 25 bp, Homo sapien
agcagctcttgctcggttgggagac

SEQ ID NO: 1869776 - DNA, 25 bp, Homo sapien
tgacacccgccatttacagacacgt

SEQ ID NO: 1869777 - DNA, 25 bp, Homo sapien
tactgaattagaatccatgggcacg

SEQ ID NO: 1869778 - DNA, 25 bp, Homo sapien
ttttttgctagtgatccaggatgct

SEQ ID NO: 1869779 - DNA, 25 bp, Homo sapien
tgaaaagagcatgccccatttggag

SEQ ID NO: 1869780 - DNA, 25 bp, Homo sapien
aaacaaacacatagagcctgcctgg

SEQ ID NO: 1869781 - DNA, 25 bp, Homo sapien
gaagcccacgtgttagaagcaccgg

SEQ ID NO: 1869782 - DNA, 25 bp, Homo sapien
ttggagaagcatcaagaagcccacg

SEQ ID NO: 1869783 - DNA, 25 bp, Homo sapien
gagcactttcttcagacgcttatga

SEQ ID NO: 1869784 - DNA, 25 bp, Homo sapien
gtaggtaacgtggagaatctgattt

SEQ ID NO: 1869785 - DNA, 25 bp, Homo sapien
tttgatatgaaatagtatgttctcc

SEQ ID NO: 1869786 - DNA, 25 bp, Homo sapien
cagacgcttatgacttgagtaggta

SEQ ID NO: 1869787 - DNA, 25 bp, Homo sapien
ggaaatccctctctggtcggtcctc

SEQ ID NO: 1869788 - DNA, 25 bp, Homo sapien
cccagtgctcaatccctggtagttg

SEQ ID NO: 1869789 - DNA, 25 bp, Homo sapien
ccagtgctcaatccctggtagttgg

SEQ ID NO: 1869790 - DNA, 25 bp, Homo sapien
aggacgaaaaggaaatccctctctg

SEQ ID NO: 1869791 - DNA, 25 bp, Homo sapien
gggtctcctgaacgtcccaacaagc

SEQ ID NO: 1869792 - DNA, 25 bp, Homo sapien
cctgtgtcaggccgtcacacggcgg

SEQ ID NO: 1869793 - DNA, 25 bp, Homo sapien
tccagagtcgaaggcgctctgagga

SEQ ID NO: 1869794 - DNA, 25 bp, Homo sapien
tgaacgtcccaacaagctccttggg

SEQ ID NO: 1869795 - DNA, 25 bp, Homo sapien
tgaacctagtttggctgggactcgc

SEQ ID NO: 1869796 - DNA, 25 bp, Homo sapien
tgaggcgcggcccttaatttccgga

SEQ ID NO: 1869797 - DNA, 25 bp, Homo sapien
gccgtcaagatgtgctcgacgcccg

SEQ ID NO: 1869798 - DNA, 25 bp, Homo sapien
cggaggatttcgaggccctgaggcg

SEQ ID NO: 1869799 - DNA, 25 bp, Homo sapien
ggatacctgtctacaaatgagctag

SEQ ID NO: 1869800 - DNA, 25 bp, Homo sapien
aactacctctggctttgactaggcc

SEQ ID NO: 1869801 - DNA, 25 bp, Homo sapien
tgactaggccagttagcagacatat

SEQ ID NO: 1869802 - DNA, 25 bp, Homo sapien
ggaagctcttaactctggatacctg

SEQ ID NO: 1869803 - DNA, 25 bp, Homo sapien
gaacaagtggcatcttacgcagacc

SEQ ID NO: 1869804 - DNA, 25 bp, Homo sapien
tacgcagaccaacagagtatttgag

SEQ ID NO: 1869805 - DNA, 25 bp, Homo sapien
taaccgtggatctatagctgtggcc

SEQ ID NO: 1869806 - DNA, 25 bp, Homo sapien
tcagaagctgcccttgaacaagtgg

SEQ ID NO: 1869807 - DNA, 25 bp, Homo sapien
ttgcctaaggtcagatagctgatga

SEQ ID NO: 1869808 - DNA, 25 bp, Homo sapien
acttgcctaaggtcagatagctgat

SEQ ID NO: 1869809 - DNA, 25 bp, Homo sapien
tgcctaaggtcagatagctgatgag

SEQ ID NO: 1869810 - DNA, 25 bp, Homo sapien
cttgcctaaggtcagatagctgatg

SEQ ID NO: 1869811 - DNA, 25 bp, Homo sapien
cactaagataggactagggtaccaa

SEQ ID NO: 1869812 - DNA, 25 bp, Homo sapien
tctcagaatgagtgactttgcacct

SEQ ID NO: 1869813 - DNA, 25 bp, Homo sapien
taaagtccctgaaaaggagtaggca

SEQ ID NO: 1869814 - DNA, 25 bp, Homo sapien
cattaggatcagattataggaagcc

SEQ ID NO: 1869815 - DNA, 25 bp, Homo sapien
gaaaaaattcttagtccaagcttca

SEQ ID NO: 1869816 - DNA, 25 bp, Homo sapien
cacacataattttagacagttttga

SEQ ID NO: 1869817 - DNA, 25 bp, Homo sapien
ctacttgtctgtcaaagtaatgtaa

SEQ ID NO: 1869818 - DNA, 25 bp, Homo sapien
tcacgattacagtatagcctacatt

SEQ ID NO: 1869819 - DNA, 25 bp, Homo sapien
tgtgttaatgttggtccctggaata

SEQ ID NO: 1869820 - DNA, 25 bp, Homo sapien
gtgttaatgttggtccctggaataa

SEQ ID NO: 1869821 - DNA, 25 bp, Homo sapien
gaagtcagcaaaattctggtggact

SEQ ID NO: 1869822 - DNA, 25 bp, Homo sapien
tatgtctccctttaatttgagcatg

SEQ ID NO: 1869823 - DNA, 25 bp, Homo sapien
gcatgtgtccaattattttgccagt

SEQ ID NO: 1869824 - DNA, 25 bp, Homo sapien
ctaatgaagctttgttgctaagatc

SEQ ID NO: 1869825 - DNA, 25 bp, Homo sapien
catggtaccccattatagctttggg

SEQ ID NO: 1869826 - DNA, 25 bp, Homo sapien
gaattgccaacacgtcatggtaccc

SEQ ID NO: 1869827 - DNA, 25 bp, Homo sapien
acaggttagtatattgcaggtctca

SEQ ID NO: 1869828 - DNA, 25 bp, Homo sapien
tcacctccaggatacaagaattgcc

SEQ ID NO: 1869829 - DNA, 25 bp, Homo sapien
cagcaattctttaatagttaccaaa

SEQ ID NO: 1869830 - DNA, 25 bp, Homo sapien
tgtacttagaaactgagattatcta

SEQ ID NO: 1869831 - DNA, 25 bp, Homo sapien
gaaagtctaaacaaccaattcagca

SEQ ID NO: 1869832 - DNA, 25 bp, Homo sapien
aaagagtaagactaaatgtacttag

SEQ ID NO: 1869833 - DNA, 25 bp, Homo sapien
agcttcaagtttgtttcacataatg

SEQ ID NO: 1869834 - DNA, 25 bp, Homo sapien
aatgaaataagtcactaatacttac

SEQ ID NO: 1869835 - DNA, 25 bp, Homo sapien
ttgtttcacataatgaaataagtca

SEQ ID NO: 1869836 - DNA, 25 bp, Homo sapien
caagtttgtttcacataatgaaata

SEQ ID NO: 1869837 - DNA, 25 bp, Homo sapien
ttctttctttatcaggtgagtagca

SEQ ID NO: 1869838 - DNA, 25 bp, Homo sapien
tccatgcatccagggcaataccaca

SEQ ID NO: 1869839 - DNA, 25 bp, Homo sapien
catcacccagtggaaacatccatgc

SEQ ID NO: 1869840 - DNA, 25 bp, Homo sapien
gcaggatattggaaatattcagagt

SEQ ID NO: 1869841 - DNA, 25 bp, Homo sapien
gaataaccgttgctccaccaaaaga

SEQ ID NO: 1869842 - DNA, 25 bp, Homo sapien
tcttcactaagagtctgaataaccg

SEQ ID NO: 1869843 - DNA, 25 bp, Homo sapien
ctctgatcttcactaagagtctgaa

SEQ ID NO: 1869844 - DNA, 25 bp, Homo sapien
taagagtctgaataaccgttgctcc

SEQ ID NO: 1869845 - DNA, 25 bp, Homo sapien
aatcagactgagagcttgggaacat

SEQ ID NO: 1869846 - DNA, 25 bp, Homo sapien
cagactgagagcttgggaacattct

SEQ ID NO: 1869847 - DNA, 25 bp, Homo sapien
agaatcagactgagagcttgggaac

SEQ ID NO: 1869848 - DNA, 25 bp, Homo sapien
ggctttccatgatcaatgtcaagaa

SEQ ID NO: 1869849 - DNA, 25 bp, Homo sapien
tgtttcagggttctaaggtagagcc

SEQ ID NO: 1869850 - DNA, 25 bp, Homo sapien
gccaagacttgtcccctatttctgc

SEQ ID NO: 1869851 - DNA, 25 bp, Homo sapien
tctgcagcagattggtccttgaaat

SEQ ID NO: 1869852 - DNA, 25 bp, Homo sapien
ccttgaaatagtaagttgcagatgc

SEQ ID NO: 1869853 - DNA, 25 bp, Homo sapien
actataaacccatgagatgccaggt

SEQ ID NO: 1869854 - DNA, 25 bp, Homo sapien
ggtcaatgccaatagcagaataaag

SEQ ID NO: 1869855 - DNA, 25 bp, Homo sapien
tgtgttctacagcagcaactataaa

SEQ ID NO: 1869856 - DNA, 25 bp, Homo sapien
caactataaacccatgagatgccag

SEQ ID NO: 1869857 - DNA, 25 bp, Homo sapien
aacaacaagtggatatttttcacca

SEQ ID NO: 1869858 - DNA, 25 bp, Homo sapien
acaacaagtggatatttttcaccag

SEQ ID NO: 1869859 - DNA, 25 bp, Homo sapien
tcagaggggaattccagtttgcagg

SEQ ID NO: 1869860 - DNA, 25 bp, Homo sapien
aggggaattccagtttgcaggagtt

SEQ ID NO: 1869861 - DNA, 25 bp, Homo sapien
tccaaagggtgtcaaggcgatcatt

SEQ ID NO: 1869862 - DNA, 25 bp, Homo sapien
tttgggatccaaagggtgtcaaggc

SEQ ID NO: 1869863 - DNA, 25 bp, Homo sapien
ggataatataaacgcaagaaggtgc

SEQ ID NO: 1869864 - DNA, 25 bp, Homo sapien
caaaatgttgcccataagccagtgt

SEQ ID NO: 1869865 - DNA, 25 bp, Homo sapien
tcaaacattaagtctgtacaaccaa

SEQ ID NO: 1869866 - DNA, 25 bp, Homo sapien
tctgtacaaccaacggaataaggcc

SEQ ID NO: 1869867 - DNA, 25 bp, Homo sapien
agtgtgatcaaacattaagtctgta

SEQ ID NO: 1869868 - DNA, 25 bp, Homo sapien
gtctgtacaaccaacggaataaggc

SEQ ID NO: 1869869 - DNA, 25 bp, Homo sapien
agtacttgtattttgttgacccatg

SEQ ID NO: 1869870 - DNA, 25 bp, Homo sapien
caagtttctgtcagtccagcaacag

SEQ ID NO: 1869871 - DNA, 25 bp, Homo sapien
tagaatgggcattgcattgggctca

SEQ ID NO: 1869872 - DNA, 25 bp, Homo sapien
taatgtcatctaggatgcaggaccc

SEQ ID NO: 1869873 - DNA, 25 bp, Homo sapien
taaagataaagcaacgtccctgtcc

SEQ ID NO: 1869874 - DNA, 25 bp, Homo sapien
tttcatatgggcaacaggatttatg

SEQ ID NO: 1869875 - DNA, 25 bp, Homo sapien
acaggatttatgtattgccagtcaa

SEQ ID NO: 1869876 - DNA, 25 bp, Homo sapien
gcacatgcaatttgggtggcaccat

SEQ ID NO: 1869877 - DNA, 25 bp, Homo sapien
aagcacatgcaatttgggtggcacc

SEQ ID NO: 1869878 - DNA, 25 bp, Homo sapien
gagctgagcagcagtttcagcttag

SEQ ID NO: 1869879 - DNA, 25 bp, Homo sapien
tgagcagcagtttcagcttagtctc

SEQ ID NO: 1869880 - DNA, 25 bp, Homo sapien
ctgagcagcagtttcagcttagtct

SEQ ID NO: 1869881 - DNA, 25 bp, Homo sapien
gggagctgagcagcagtttcagctt

SEQ ID NO: 1869882 - DNA, 25 bp, Homo sapien
aagcgctccaaacccgactgcttct

SEQ ID NO: 1869883 - DNA, 25 bp, Homo sapien
ctgggtccgcctagcgcggccttgt

SEQ ID NO: 1869884 - DNA, 25 bp, Homo sapien
ggctcccgacgctagcctgctcgag

SEQ ID NO: 1869885 - DNA, 25 bp, Homo sapien
tggctgcgggccgagcagctctggc

SEQ ID NO: 1869886 - DNA, 25 bp, Homo sapien
caatgcctgggtggtgtcgtgctca

SEQ ID NO: 1869887 - DNA, 25 bp, Homo sapien
gatttactccctgctgaattcaccc

SEQ ID NO: 1869888 - DNA, 25 bp, Homo sapien
cccgccgcggagagagccaggcaat

SEQ ID NO: 1869889 - DNA, 25 bp, Homo sapien
tttccgcagacctgatgccgatcag

SEQ ID NO: 1869890 - DNA, 25 bp, Homo sapien
tgaataaaggccgattcccaggctg

SEQ ID NO: 1869891 - DNA, 25 bp, Homo sapien
gaacttccctgacagagcgtttagg

SEQ ID NO: 1869892 - DNA, 25 bp, Homo sapien
tcttctttcctagggcagagcccga

SEQ ID NO: 1869893 - DNA, 25 bp, Homo sapien
gcttggaaatgctcaaacttggcct

SEQ ID NO: 1869894 - DNA, 25 bp, Homo sapien
tctgtaaacagggagatcataccag

SEQ ID NO: 1869895 - DNA, 25 bp, Homo sapien
cctaggccacctgaccgatgtttgt

SEQ ID NO: 1869896 - DNA, 25 bp, Homo sapien
tggtcgatgggctaatctttcaggc

SEQ ID NO: 1869897 - DNA, 25 bp, Homo sapien
cgatgtttgtgctggctgtaaagcc

SEQ ID NO: 1869898 - DNA, 25 bp, Homo sapien
ggccttatctaacacccatgcacat

SEQ ID NO: 1869899 - DNA, 25 bp, Homo sapien
tgttcagtactggaattccctcagc

SEQ ID NO: 1869900 - DNA, 25 bp, Homo sapien
gcacattgtgctagtctccaagtaa

SEQ ID NO: 1869901 - DNA, 25 bp, Homo sapien
tcaggttccatgaaacttgatgact

SEQ ID NO: 1869902 - DNA, 25 bp, Homo sapien
gagctcataatgtagtctgaagaat

SEQ ID NO: 1869903 - DNA, 25 bp, Homo sapien
tggagctcataatgtagtctgaaga

SEQ ID NO: 1869904 - DNA, 25 bp, Homo sapien
ggagctcataatgtagtctgaagaa

SEQ ID NO: 1869905 - DNA, 25 bp, Homo sapien
ctggagctcataatgtagtctgaag

SEQ ID NO: 1869906 - DNA, 25 bp, Homo sapien
attccacttccagctgcaggcttgg

SEQ ID NO: 1869907 - DNA, 25 bp, Homo sapien
aaaaattccacttccagctgcaggc

SEQ ID NO: 1869908 - DNA, 25 bp, Homo sapien
tccacttccagctgcaggcttggac

SEQ ID NO: 1869909 - DNA, 25 bp, Homo sapien
aaattccacttccagctgcaggctt

SEQ ID NO: 1869910 - DNA, 25 bp, Homo sapien
aaggggacatcctcttgcaggtgag

SEQ ID NO: 1869911 - DNA, 25 bp, Homo sapien
ctctttcaaggggacatcctcttgc

SEQ ID NO: 1869912 - DNA, 25 bp, Homo sapien
tttcaaggggacatcctcttgcagg

SEQ ID NO: 1869913 - DNA, 25 bp, Homo sapien
gggacatcctcttgcaggtgagtac

SEQ ID NO: 1869914 - DNA, 25 bp, Homo sapien
tcaggacaggcagtaccactgggtg

SEQ ID NO: 1869915 - DNA, 25 bp, Homo sapien
gagagaaatctcatctataatctgt

SEQ ID NO: 1869916 - DNA, 25 bp, Homo sapien
aaatctcatctataatctgttccag

SEQ ID NO: 1869917 - DNA, 25 bp, Homo sapien
gatgcaataagtttctcaggacagg

SEQ ID NO: 1869918 - DNA, 25 bp, Homo sapien
tcaagcagttgactgacagctgagc

SEQ ID NO: 1869919 - DNA, 25 bp, Homo sapien
agttgactgacagctgagcagccat

SEQ ID NO: 1869920 - DNA, 25 bp, Homo sapien
cctcaagcagttgactgacagctga

SEQ ID NO: 1869921 - DNA, 25 bp, Homo sapien
agcagttgactgacagctgagcagc

SEQ ID NO: 1869922 - DNA, 25 bp, Homo sapien
gttactttgctatgtgctcctaatg

SEQ ID NO: 1869923 - DNA, 25 bp, Homo sapien
taatgtatctagtgtgtcctgtgac

SEQ ID NO: 1869924 - DNA, 25 bp, Homo sapien
tccatgcaggccttaactttcccat

SEQ ID NO: 1869925 - DNA, 25 bp, Homo sapien
actttcccatggtcaatgcagtttt

SEQ ID NO: 1869926 - DNA, 25 bp, Homo sapien
ttttgggatcggacttttatttgca

SEQ ID NO: 1869927 - DNA, 25 bp, Homo sapien
gctgtatcaatagtacatggttaac

SEQ ID NO: 1869928 - DNA, 25 bp, Homo sapien
ttttatttgcaatgtagcgttgctg

SEQ ID NO: 1869929 - DNA, 25 bp, Homo sapien
catggttaactctaatatgcgtgca

SEQ ID NO: 1869930 - DNA, 25 bp, Homo sapien
gacatcaggaagatactgcccaaag

SEQ ID NO: 1869931 - DNA, 25 bp, Homo sapien
gacagggtctgtcttcagtgcaaca

SEQ ID NO: 1869932 - DNA, 25 bp, Homo sapien
aatatagacagagaagttgggcctt

SEQ ID NO: 1869933 - DNA, 25 bp, Homo sapien
cacagagaagtacctgcttgaagcc

SEQ ID NO: 1869934 - DNA, 25 bp, Homo sapien
cacgttccccattgctttgcaagca

SEQ ID NO: 1869935 - DNA, 25 bp, Homo sapien
ttggcatctgctcccggaaacctgc

SEQ ID NO: 1869936 - DNA, 25 bp, Homo sapien
cctgccccgagaacacgttccccat

SEQ ID NO: 1869937 - DNA, 25 bp, Homo sapien
tttggcatctgctcccggaaacctg

SEQ ID NO: 1869938 - DNA, 25 bp, Homo sapien
tcacgtaggttggattatcctgttc

SEQ ID NO: 1869939 - DNA, 25 bp, Homo sapien
ttttccagggatgagctggttgctt

SEQ ID NO: 1869940 - DNA, 25 bp, Homo sapien
gttgagcaacgaagaagcactggat

SEQ ID NO: 1869941 - DNA, 25 bp, Homo sapien
tctggggtggaaacattatacgttc

SEQ ID NO: 1869942 - DNA, 25 bp, Homo sapien
tggatgagttttccagggatgagct

SEQ ID NO: 1869943 - DNA, 25 bp, Homo sapien
gaagacaagccatcatgaactctgg

SEQ ID NO: 1869944 - DNA, 25 bp, Homo sapien
cagtggtccaggtgccaggtaagct

SEQ ID NO: 1869945 - DNA, 25 bp, Homo sapien
tcatgcatgcgtggcagccaacaag

SEQ ID NO: 1869946 - DNA, 25 bp, Homo sapien
ggtaagctcggccatgcctggaaac

SEQ ID NO: 1869947 - DNA, 25 bp, Homo sapien
acatgcatggtctgggaacatctgc

SEQ ID NO: 1869948 - DNA, 25 bp, Homo sapien
tcttgggaggcacctagaggctcta

SEQ ID NO: 1869949 - DNA, 25 bp, Homo sapien
cagcagccaggtttctacagaggac

SEQ ID NO: 1869950 - DNA, 25 bp, Homo sapien
gatctcaaggtggaaagccctgcac

SEQ ID NO: 1869951 - DNA, 25 bp, Homo sapien
actgccaccgctaacaaggtttccg

SEQ ID NO: 1869952 - DNA, 25 bp, Homo sapien
gaactgccaccgctaacaaggtttc

SEQ ID NO: 1869953 - DNA, 25 bp, Homo sapien
tgccaccgctaacaaggtttccgtc

SEQ ID NO: 1869954 - DNA, 25 bp, Homo sapien
tgaactgccaccgctaacaaggttt

SEQ ID NO: 1869955 - DNA, 25 bp, Homo sapien
ttaaatctccttgatattggagaac

SEQ ID NO: 1869956 - DNA, 25 bp, Homo sapien
atctccttgatattggagaactcat

SEQ ID NO: 1869957 - DNA, 25 bp, Homo sapien
tgttaaatctccttgatattggaga

SEQ ID NO: 1869958 - DNA, 25 bp, Homo sapien
aaatctccttgatattggagaactc

SEQ ID NO: 1869959 - DNA, 25 bp, Homo sapien
tctcgacaatgaaaacttattcagc

SEQ ID NO: 1869960 - DNA, 25 bp, Homo sapien
caatgaaaacttattcagcaaagct

SEQ ID NO: 1869961 - DNA, 25 bp, Homo sapien
gtgaagaccatctcgacaatgaaaa

SEQ ID NO: 1869962 - DNA, 25 bp, Homo sapien
gaccatctcgacaatgaaaacttat

SEQ ID NO: 1869963 - DNA, 25 bp, Homo sapien
gcatccaaagagtaaaatgaataat

SEQ ID NO: 1869964 - DNA, 25 bp, Homo sapien
ttcagatcccagaggcatccaaaga

SEQ ID NO: 1869965 - DNA, 25 bp, Homo sapien
gaggcatccaaagagtaaaatgaat

SEQ ID NO: 1869966 - DNA, 25 bp, Homo sapien
atcccagaggcatccaaagagtaaa

SEQ ID NO: 1869967 - DNA, 25 bp, Homo sapien
caggtgtggcgcatataagaagtcc

SEQ ID NO: 1869968 - DNA, 25 bp, Homo sapien
cccagcgtgatgaccgagatggcaa

SEQ ID NO: 1869969 - DNA, 25 bp, Homo sapien
ccaagagtggtgtgaggaccccaat

SEQ ID NO: 1869970 - DNA, 25 bp, Homo sapien
cacaaggttggtccctgggaacaca

SEQ ID NO: 1869971 - DNA, 25 bp, Homo sapien
cagatacaggtgacattgtccccat

SEQ ID NO: 1869972 - DNA, 25 bp, Homo sapien
cacagatacaggtgacattgtcccc

SEQ ID NO: 1869973 - DNA, 25 bp, Homo sapien
gatacaggtgacattgtccccatca

SEQ ID NO: 1869974 - DNA, 25 bp, Homo sapien
gtcacagatacaggtgacattgtcc

SEQ ID NO: 1869975 - DNA, 25 bp, Homo sapien
catggtgacaatagacgaatccgac

SEQ ID NO: 1869976 - DNA, 25 bp, Homo sapien
cgaatccgactgcaagttttctaga

SEQ ID NO: 1869977 - DNA, 25 bp, Homo sapien
catagttgtattgtggctgacagtg

SEQ ID NO: 1869978 - DNA, 25 bp, Homo sapien
gacacacttcgtttcgccgcctgaa

SEQ ID NO: 1869979 - DNA, 25 bp, Homo sapien
aggagggctatctcccgactgtaat

SEQ ID NO: 1869980 - DNA, 25 bp, Homo sapien
tatctcccgactgtaatgcttggga

SEQ ID NO: 1869981 - DNA, 25 bp, Homo sapien
ccgactgtaatgcttgggaaaatct

SEQ ID NO: 1869982 - DNA, 25 bp, Homo sapien
tgtaatgcttgggaaaatctttcca

SEQ ID NO: 1869983 - DNA, 25 bp, Homo sapien
tatgctaatagaaagatccttcagg

SEQ ID NO: 1869984 - DNA, 25 bp, Homo sapien
tggaactgttgagagcagatcaagg

SEQ ID NO: 1869985 - DNA, 25 bp, Homo sapien
caggtatgtagggagcatctcatcc

SEQ ID NO: 1869986 - DNA, 25 bp, Homo sapien
tcatgttccgctttgtctatgctaa

SEQ ID NO: 1869987 - DNA, 25 bp, Homo sapien
ccccaccaagagctcagagtggaag

SEQ ID NO: 1869988 - DNA, 25 bp, Homo sapien
atatgatcagccagatagatcgccc

SEQ ID NO: 1869989 - DNA, 25 bp, Homo sapien
cagcaccaaacccattttcctaagt

SEQ ID NO: 1869990 - DNA, 25 bp, Homo sapien
aaacccattttcctaagtgctgaga

SEQ ID NO: 1869991 - DNA, 25 bp, Homo sapien
gaaccggcatagcttctggatgact

SEQ ID NO: 1869992 - DNA, 25 bp, Homo sapien
cacctattacgggatcctggcatgt

SEQ ID NO: 1869993 - DNA, 25 bp, Homo sapien
gctgggaacgtttgagaaccggcat

SEQ ID NO: 1869994 - DNA, 25 bp, Homo sapien
tgtaagtgatggtcccgccaatggg

SEQ ID NO: 1869995 - DNA, 25 bp, Homo sapien
gtcaggccaaggtagaattttgatg

SEQ ID NO: 1869996 - DNA, 25 bp, Homo sapien
cggtcaggccaaggtagaattttga

SEQ ID NO: 1869997 - DNA, 25 bp, Homo sapien
caaggaagagacaatatagtagaaa

SEQ ID NO: 1869998 - DNA, 25 bp, Homo sapien
tatagtagaaatacggtcaggccaa

SEQ ID NO: 1869999 - DNA, 25 bp, Homo sapien
tgctttccacatgaacctgacttct

SEQ ID NO: 1870000 - DNA, 25 bp, Homo sapien
ttgattttccaaagcccctctctgc

SEQ ID NO: 1870001 - DNA, 25 bp, Homo sapien
caatttcttaattttgcccttgatt

SEQ ID NO: 1870002 - DNA, 25 bp, Homo sapien
cgtcaccttttcagaactacccaat

SEQ ID NO: 1870003 - DNA, 25 bp, Homo sapien
ggaaactgagcttgcattgaaattg

SEQ ID NO: 1870004 - DNA, 25 bp, Homo sapien
tgggctccagactgaattattagca

SEQ ID NO: 1870005 - DNA, 25 bp, Homo sapien
accaggaaactgagcttgcattgaa

SEQ ID NO: 1870006 - DNA, 25 bp, Homo sapien
cagattcagcttcatagatgggctc

SEQ ID NO: 1870007 - DNA, 25 bp, Homo sapien
gatcaaccatgatgttcagctttag

SEQ ID NO: 1870008 - DNA, 25 bp, Homo sapien
aatgacgtctttggttgcaatactg

SEQ ID NO: 1870009 - DNA, 25 bp, Homo sapien
cagctttagaggcagcgggtgaaca

SEQ ID NO: 1870010 - DNA, 25 bp, Homo sapien
gatgaggaacccgtatggaaagtaa

SEQ ID NO: 1870011 - DNA, 25 bp, Homo sapien
aatgacagtgtagtagatttagatg

SEQ ID NO: 1870012 - DNA, 25 bp, Homo sapien
catggagacatacagcaagattaca

SEQ ID NO: 1870013 - DNA, 25 bp, Homo sapien
cagcacctacagttaagtaagaccc

SEQ ID NO: 1870014 - DNA, 25 bp, Homo sapien
accagagggcgaacgagcaaagaaa

SEQ ID NO: 1870015 - DNA, 25 bp, Homo sapien
tgttccaataaacctcatcatagtt

SEQ ID NO: 1870016 - DNA, 25 bp, Homo sapien
cctcctcgtggtataaaatctttgg

SEQ ID NO: 1870017 - DNA, 25 bp, Homo sapien
tgctccatcaagatacctcctcgtg

SEQ ID NO: 1870018 - DNA, 25 bp, Homo sapien
tccctggtcgaggtcttgactgtca

SEQ ID NO: 1870019 - DNA, 25 bp, Homo sapien
actcatgtcaaggtagaattggtac

SEQ ID NO: 1870020 - DNA, 25 bp, Homo sapien
gacaagttcaatgtgtagtatctct

SEQ ID NO: 1870021 - DNA, 25 bp, Homo sapien
tgaaccatcctgactctactcatgt

SEQ ID NO: 1870022 - DNA, 25 bp, Homo sapien
tctctggggacattaacatatgact

SEQ ID NO: 1870023 - DNA, 25 bp, Homo sapien
tccatcacatgccttaggacctcgt

SEQ ID NO: 1870024 - DNA, 25 bp, Homo sapien
ggtgctctgcactgtactcatttcc

SEQ ID NO: 1870025 - DNA, 25 bp, Homo sapien
ggctttactcgtttctaggctgttc

SEQ ID NO: 1870026 - DNA, 25 bp, Homo sapien
tcgtgcacttcacttttgtggctgg

SEQ ID NO: 1870027 - DNA, 25 bp, Homo sapien
tctaacaatctcaatctctactctt

SEQ ID NO: 1870028 - DNA, 25 bp, Homo sapien
tcagcagggtaaaaggttgcaaact

SEQ ID NO: 1870029 - DNA, 25 bp, Homo sapien
tctgtaacaccttaagggagaacaa

SEQ ID NO: 1870030 - DNA, 25 bp, Homo sapien
caaatggccgggttcctctaacaat

SEQ ID NO: 1870031 - DNA, 25 bp, Homo sapien
gcccaaagccactcaaagaaggtgt

SEQ ID NO: 1870032 - DNA, 25 bp, Homo sapien
gagattccaaactaccagactagtg

SEQ ID NO: 1870033 - DNA, 25 bp, Homo sapien
gacatcagggctttttacagttacc

SEQ ID NO: 1870034 - DNA, 25 bp, Homo sapien
ggattcaaatgttcagacagcccaa

SEQ ID NO: 1870035 - DNA, 25 bp, Homo sapien
tctgctgcagctagaatctatgtct

SEQ ID NO: 1870036 - DNA, 25 bp, Homo sapien
ccgcttgggcactgggttccatcag

SEQ ID NO: 1870037 - DNA, 25 bp, Homo sapien
tagatgactgttgttccagacgacc

SEQ ID NO: 1870038 - DNA, 25 bp, Homo sapien
tctggctccataggcactgatgaac

SEQ ID NO: 1870039 - DNA, 25 bp, Homo sapien
catgggaggtactgaatgcagctaa

SEQ ID NO: 1870040 - DNA, 25 bp, Homo sapien
cctgggactgtgcaaccaggagccc

SEQ ID NO: 1870041 - DNA, 25 bp, Homo sapien
caaattggcatcattcacatcgtgt

SEQ ID NO: 1870042 - DNA, 25 bp, Homo sapien
caagcaggacttccaaattggcatc

SEQ ID NO: 1870043 - DNA, 25 bp, Homo sapien
gctctaagcatctgcgccacagact

SEQ ID NO: 1870044 - DNA, 25 bp, Homo sapien
tgttctgcagtcattcatcccgctc

SEQ ID NO: 1870045 - DNA, 25 bp, Homo sapien
catcagagaaaccacggtgcaggtc

SEQ ID NO: 1870046 - DNA, 25 bp, Homo sapien
tccagagtgctttgaatatgcgacc

SEQ ID NO: 1870047 - DNA, 25 bp, Homo sapien
gcagttccttcaggatacctacacc

SEQ ID NO: 1870048 - DNA, 25 bp, Homo sapien
gggttgaaagcttctaagccagtac

SEQ ID NO: 1870049 - DNA, 25 bp, Homo sapien
agttccttcaggatacctacacctc

SEQ ID NO: 1870050 - DNA, 25 bp, Homo sapien
agtaccacaggaattgtgcaaggcc

SEQ ID NO: 1870051 - DNA, 25 bp, Homo sapien
agtgactccatgtatcatgtgtcaa

SEQ ID NO: 1870052 - DNA, 25 bp, Homo sapien
gactccatgtatcatgtgtcaacat

SEQ ID NO: 1870053 - DNA, 25 bp, Homo sapien
gggaagtgactccatgtatcatgtg

SEQ ID NO: 1870054 - DNA, 25 bp, Homo sapien
ccatgtatcatgtgtcaacattttc

SEQ ID NO: 1870055 - DNA, 25 bp, Homo sapien
catcgggatcctaatttcttgggtc

SEQ ID NO: 1870056 - DNA, 25 bp, Homo sapien
ggaaggtgagcacaagcttttcttg

SEQ ID NO: 1870057 - DNA, 25 bp, Homo sapien
ggatctcatctacaaccaaagcacg

SEQ ID NO: 1870058 - DNA, 25 bp, Homo sapien
gatccaaaatgccatcgacctaagt

SEQ ID NO: 1870059 - DNA, 25 bp, Homo sapien
ggattgttgtcgcacatcaccttca

SEQ ID NO: 1870060 - DNA, 25 bp, Homo sapien
cagcagttcaaagatacaggattgt

SEQ ID NO: 1870061 - DNA, 25 bp, Homo sapien
ttcaaagatacaggattgttgtcgc

SEQ ID NO: 1870062 - DNA, 25 bp, Homo sapien
gatacaggattgttgtcgcacatca

SEQ ID NO: 1870063 - DNA, 25 bp, Homo sapien
cttcttgcactcatattcaaaaatg

SEQ ID NO: 1870064 - DNA, 25 bp, Homo sapien
cactcatattcaaaaatgtctaata

SEQ ID NO: 1870065 - DNA, 25 bp, Homo sapien
tgcggtgtaaatcgagaatctgctg

SEQ ID NO: 1870066 - DNA, 25 bp, Homo sapien
gcttggacaccgaagtcatgttgtt

SEQ ID NO: 1870067 - DNA, 25 bp, Homo sapien
caactgctgttcttcatagcgccaa

SEQ ID NO: 1870068 - DNA, 25 bp, Homo sapien
gctgttctggatttccaactgctgt

SEQ ID NO: 1870069 - DNA, 25 bp, Homo sapien
gatcccaaagcaaataaatgtcact

SEQ ID NO: 1870070 - DNA, 25 bp, Homo sapien
ccattcccatgcagctggtgtctga

SEQ ID NO: 1870071 - DNA, 25 bp, Homo sapien
gcaatgtgtctcctcactccattcc

SEQ ID NO: 1870072 - DNA, 25 bp, Homo sapien
tagtctggccgagccttagttccac

SEQ ID NO: 1870073 - DNA, 25 bp, Homo sapien
tatggctccttaacggcagtaatgg

SEQ ID NO: 1870074 - DNA, 25 bp, Homo sapien
caagtttctgtgctacacactggaa

SEQ ID NO: 1870075 - DNA, 25 bp, Homo sapien
tgtggccctgaggaacttgcttagt

SEQ ID NO: 1870076 - DNA, 25 bp, Homo sapien
tcatatgtcacaaccacacttccag

SEQ ID NO: 1870077 - DNA, 25 bp, Homo sapien
actgcttgaaaggagttgtagtcca

SEQ ID NO: 1870078 - DNA, 25 bp, Homo sapien
tatgtattaactcaagtgatggtgg

SEQ ID NO: 1870079 - DNA, 25 bp, Homo sapien
taggtctgattgaggctctgtacaa

SEQ ID NO: 1870080 - DNA, 25 bp, Homo sapien
tccttcactaccatatggatcccag

SEQ ID NO: 1870081 - DNA, 25 bp, Homo sapien
ccacatgaataatgcctctctaggg

SEQ ID NO: 1870082 - DNA, 25 bp, Homo sapien
aggattccacatgaataatgcctct

SEQ ID NO: 1870083 - DNA, 25 bp, Homo sapien
cacctctaccaaactgctcctgctg

SEQ ID NO: 1870084 - DNA, 25 bp, Homo sapien
gtcacagtcacgcccttgaagcctg

SEQ ID NO: 1870085 - DNA, 25 bp, Homo sapien
acagtcacgcccttgaagcctggta

SEQ ID NO: 1870086 - DNA, 25 bp, Homo sapien
ttgaaccctgtcacagtcacgccct

SEQ ID NO: 1870087 - DNA, 25 bp, Homo sapien
ctgtcacagtcacgcccttgaagcc

SEQ ID NO: 1870088 - DNA, 25 bp, Homo sapien
caaagtcgagaaataggtgtatcaa

SEQ ID NO: 1870089 - DNA, 25 bp, Homo sapien
taactgtgggcattagatttctgaa

SEQ ID NO: 1870090 - DNA, 25 bp, Homo sapien
gggtcctccgagaagtagactagat

SEQ ID NO: 1870091 - DNA, 25 bp, Homo sapien
gtaattcctatctatgtcagcctgg

SEQ ID NO: 1870092 - DNA, 25 bp, Homo sapien
gaggaagtgttcatgaggtcttctt

SEQ ID NO: 1870093 - DNA, 25 bp, Homo sapien
tccaagtcggtcttgtaggacctat

SEQ ID NO: 1870094 - DNA, 25 bp, Homo sapien
tcttgtaggacctatagagggcgga

SEQ ID NO: 1870095 - DNA, 25 bp, Homo sapien
cggaggaagtgttcatgaggtcttc

SEQ ID NO: 1870096 - DNA, 25 bp, Homo sapien
ctgactctcatgttcagggtaacat

SEQ ID NO: 1870097 - DNA, 25 bp, Homo sapien
gcagttctttaaggcaactgcaatg

SEQ ID NO: 1870098 - DNA, 25 bp, Homo sapien
gaggcagttctttaaggcaactgca

SEQ ID NO: 1870099 - DNA, 25 bp, Homo sapien
gcaaaaaggtccattgggaggcagt

SEQ ID NO: 1870100 - DNA, 25 bp, Homo sapien
aaggtccattgggaggcagttcttt

SEQ ID NO: 1870101 - DNA, 25 bp, Homo sapien
ctttcccgaggccacccataacctg

SEQ ID NO: 1870102 - DNA, 25 bp, Homo sapien
gacgtcacgctcttgacaaatgaga

SEQ ID NO: 1870103 - DNA, 25 bp, Homo sapien
ggaggaagacgtcacgctcttgaca

SEQ ID NO: 1870104 - DNA, 25 bp, Homo sapien
cataacctgtctcgcaggagcacca

SEQ ID NO: 1870105 - DNA, 25 bp, Homo sapien
ctgaggtccatgagcctgaggcttt

SEQ ID NO: 1870106 - DNA, 25 bp, Homo sapien
gatgcttagacattagtgccatggt

SEQ ID NO: 1870107 - DNA, 25 bp, Homo sapien
tggtcagtaggcctaaccttcattg

SEQ ID NO: 1870108 - DNA, 25 bp, Homo sapien
ccctctatgtgtgaatgaccagtct

SEQ ID NO: 1870109 - DNA, 25 bp, Homo sapien
tcctatttcctgacctataatgcca

SEQ ID NO: 1870110 - DNA, 25 bp, Homo sapien
caaagagaagggtatctggtactta

SEQ ID NO: 1870111 - DNA, 25 bp, Homo sapien
ttcctgacctataatgccaaagaga

SEQ ID NO: 1870112 - DNA, 25 bp, Homo sapien
tataatgccaaagagaagggtatct

SEQ ID NO: 1870113 - DNA, 25 bp, Homo sapien
ccttgttgtgtccattgatatacca

SEQ ID NO: 1870114 - DNA, 25 bp, Homo sapien
tgtgtccattgatataccaagggag

SEQ ID NO: 1870115 - DNA, 25 bp, Homo sapien
tccattgatataccaagggaggagg

SEQ ID NO: 1870116 - DNA, 25 bp, Homo sapien
tgttgtgtccattgatataccaagg

SEQ ID NO: 1870117 - DNA, 25 bp, Homo sapien
gcagagtttactgatagaggcttca

SEQ ID NO: 1870118 - DNA, 25 bp, Homo sapien
tattatgaaggacctggccatatct

SEQ ID NO: 1870119 - DNA, 25 bp, Homo sapien
acagaatcacacatccgtctcggtg

SEQ ID NO: 1870120 - DNA, 25 bp, Homo sapien
gaagaggacccagtagtttattatg

SEQ ID NO: 1870121 - DNA, 25 bp, Homo sapien
tatgctcaaaatgtcggtaatttgg

SEQ ID NO: 1870122 - DNA, 25 bp, Homo sapien
ctgttgtcacatttatgctcaaaat

SEQ ID NO: 1870123 - DNA, 25 bp, Homo sapien
ggtaatttggtcagtgttattccca

SEQ ID NO: 1870124 - DNA, 25 bp, Homo sapien
ggaaaactgaggctgttcaagtagg

SEQ ID NO: 1870125 - DNA, 25 bp, Homo sapien
cttcagccgtaggactttttgtggc

SEQ ID NO: 1870126 - DNA, 25 bp, Homo sapien
ttctccagactaccagggaccagga

SEQ ID NO: 1870127 - DNA, 25 bp, Homo sapien
tagatgctcagcgatcagcgtgacc

SEQ ID NO: 1870128 - DNA, 25 bp, Homo sapien
gaagctctctggataatgtcactct

SEQ ID NO: 1870129 - DNA, 25 bp, Homo sapien
taagggatgaaccaggaagctctct

SEQ ID NO: 1870130 - DNA, 25 bp, Homo sapien
cagagtcgcatgtctagactgccga

SEQ ID NO: 1870131 - DNA, 25 bp, Homo sapien
tctggactggaggtagatcaggccc

SEQ ID NO: 1870132 - DNA, 25 bp, Homo sapien
cctgccttcaagtggtacagaatac

SEQ ID NO: 1870133 - DNA, 25 bp, Homo sapien
gatggaatcgtgacatgactcggga

SEQ ID NO: 1870134 - DNA, 25 bp, Homo sapien
aaaataccaaatgagcacatctctg

SEQ ID NO: 1870135 - DNA, 25 bp, Homo sapien
aacgtatatactgtgccataggcca

SEQ ID NO: 1870136 - DNA, 25 bp, Homo sapien
tttgttcctgtcatagagtgcagaa

SEQ ID NO: 1870137 - DNA, 25 bp, Homo sapien
tttagagcacagaacgtatatactg

SEQ ID NO: 1870138 - DNA, 25 bp, Homo sapien
cttcaccagctggttcatgttcatg

SEQ ID NO: 1870139 - DNA, 25 bp, Homo sapien
tgcctcttcaccagctggttcatgt

SEQ ID NO: 1870140 - DNA, 25 bp, Homo sapien
ctcttcaccagctggttcatgttca

SEQ ID NO: 1870141 - DNA, 25 bp, Homo sapien
gcctcttcaccagctggttcatgtt

SEQ ID NO: 1870142 - DNA, 25 bp, Homo sapien
aggttttcctgtgatgtattttcca

SEQ ID NO: 1870143 - DNA, 25 bp, Homo sapien
caaactcctttcacactcaatagaa

SEQ ID NO: 1870144 - DNA, 25 bp, Homo sapien
cataccttgacctgacaaggatttc

SEQ ID NO: 1870145 - DNA, 25 bp, Homo sapien
gatttcctagctgatccctgcctgc

SEQ ID NO: 1870146 - DNA, 25 bp, Homo sapien
cctacaatcattggagataatggag

SEQ ID NO: 1870147 - DNA, 25 bp, Homo sapien
ggagatgggtaaatgctcttggcca

SEQ ID NO: 1870148 - DNA, 25 bp, Homo sapien
aaggagttacaaagatctggctgcc

SEQ ID NO: 1870149 - DNA, 25 bp, Homo sapien
tattttaagccctacaatcattgga

SEQ ID NO: 1870150 - DNA, 25 bp, Homo sapien
gtgtatttacttcagacaagaaaac

SEQ ID NO: 1870151 - DNA, 25 bp, Homo sapien
ctgtctgagccacagtggacagagc

SEQ ID NO: 1870152 - DNA, 25 bp, Homo sapien
agagcttccaattggacctcccctg

SEQ ID NO: 1870153 - DNA, 25 bp, Homo sapien
tccccaggggactgtctgagccaca

SEQ ID NO: 1870154 - DNA, 25 bp, Homo sapien
ctttgccagggccatcactaggagg

SEQ ID NO: 1870155 - DNA, 25 bp, Homo sapien
cagggccatcactaggagggcagat

SEQ ID NO: 1870156 - DNA, 25 bp, Homo sapien
tagagagaaggcattgctgcagcca

SEQ ID NO: 1870157 - DNA, 25 bp, Homo sapien
gcagatgtgacatagagagaaggca

SEQ ID NO: 1870158 - DNA, 25 bp, Homo sapien
gaaatgacaattggaatagtagaca

SEQ ID NO: 1870159 - DNA, 25 bp, Homo sapien
accaatgaacctctaacaacaatga

SEQ ID NO: 1870160 - DNA, 25 bp, Homo sapien
caatgaacctctaacaacaatgact

SEQ ID NO: 1870161 - DNA, 25 bp, Homo sapien
gacaattggaatagtagacaaataa

SEQ ID NO: 1870162 - DNA, 25 bp, Homo sapien
caaaggatgaatagtagactcgtaa

SEQ ID NO: 1870163 - DNA, 25 bp, Homo sapien
taaatcacaataaacatgaggcaca

SEQ ID NO: 1870164 - DNA, 25 bp, Homo sapien
agactcgtaattccagttcagtgca

SEQ ID NO: 1870165 - DNA, 25 bp, Homo sapien
gaggcacaaagtggttctccttggg

SEQ ID NO: 1870166 - DNA, 25 bp, Homo sapien
ccaggtaagcatggccaggataaca

SEQ ID NO: 1870167 - DNA, 25 bp, Homo sapien
attaaaaggcatgaagaactccaga

SEQ ID NO: 1870168 - DNA, 25 bp, Homo sapien
gaatgcaaccatccagaagggcagg

SEQ ID NO: 1870169 - DNA, 25 bp, Homo sapien
tactctgatcgtcaatagaatccag

SEQ ID NO: 1870170 - DNA, 25 bp, Homo sapien
ccttctctgcccctcatgtacacca

SEQ ID NO: 1870171 - DNA, 25 bp, Homo sapien
cttctctgcccctcatgtacaccat

SEQ ID NO: 1870172 - DNA, 25 bp, Homo sapien
aggccttctctgcccctcatgtaca

SEQ ID NO: 1870173 - DNA, 25 bp, Homo sapien
tacacagtctaggccttctctgccc

SEQ ID NO: 1870174 - DNA, 25 bp, Homo sapien
tgctgctgacacttttggtcctaat

SEQ ID NO: 1870175 - DNA, 25 bp, Homo sapien
tgttcctccgaaagacagcagcagc

SEQ ID NO: 1870176 - DNA, 25 bp, Homo sapien
gcagccagaattctaatgatctgca

SEQ ID NO: 1870177 - DNA, 25 bp, Homo sapien
tgtgtctgttcctccgaaagacagc

SEQ ID NO: 1870178 - DNA, 25 bp, Homo sapien
tcccaaaggctctctccataagctg

SEQ ID NO: 1870179 - DNA, 25 bp, Homo sapien
tttcccaaaggctctctccataagc

SEQ ID NO: 1870180 - DNA, 25 bp, Homo sapien
ggctctctccataagctgtattaac

SEQ ID NO: 1870181 - DNA, 25 bp, Homo sapien
ccataagctgtattaacttgttcat

SEQ ID NO: 1870182 - DNA, 25 bp, Homo sapien
caagactcatttcgcgttttcaggc

SEQ ID NO: 1870183 - DNA, 25 bp, Homo sapien
ggagggagaaccaagcaagactcat

SEQ ID NO: 1870184 - DNA, 25 bp, Homo sapien
ggctggctcccgctctgatcagatg

SEQ ID NO: 1870185 - DNA, 25 bp, Homo sapien
gctctcacgcccagtggagggagaa

SEQ ID NO: 1870186 - DNA, 25 bp, Homo sapien
cagacattgatgttgttttgccctg

SEQ ID NO: 1870187 - DNA, 25 bp, Homo sapien
tggacacagttgacagctcccttcc

SEQ ID NO: 1870188 - DNA, 25 bp, Homo sapien
tgcttctctcagacattgatgttgt

SEQ ID NO: 1870189 - DNA, 25 bp, Homo sapien
tctttgtgtatgcttctctcagaca

SEQ ID NO: 1870190 - DNA, 25 bp, Homo sapien
gttatgactccagtgatgccccagc

SEQ ID NO: 1870191 - DNA, 25 bp, Homo sapien
ttgttatgactccagtgatgcccca

SEQ ID NO: 1870192 - DNA, 25 bp, Homo sapien
gaaatccaagtcaccctccaagtag

SEQ ID NO: 1870193 - DNA, 25 bp, Homo sapien
ctccaagtaggacccttttctggat

SEQ ID NO: 1870194 - DNA, 25 bp, Homo sapien
tgcacataatttcagaatcatcgac

SEQ ID NO: 1870195 - DNA, 25 bp, Homo sapien
cataatttcagaatcatcgacttgt

SEQ ID NO: 1870196 - DNA, 25 bp, Homo sapien
gaatcatcgacttgtcattgactct

SEQ ID NO: 1870197 - DNA, 25 bp, Homo sapien
tttcagaatcatcgacttgtcattg

SEQ ID NO: 1870198 - DNA, 25 bp, Homo sapien
ttattccagacccatcgcccttggt

SEQ ID NO: 1870199 - DNA, 25 bp, Homo sapien
tattccagacccatcgcccttggtt

SEQ ID NO: 1870200 - DNA, 25 bp, Homo sapien
caggcctgtgtcagctgtatcagaa

SEQ ID NO: 1870201 - DNA, 25 bp, Homo sapien
gagaaactattgatggtccccaggc

SEQ ID NO: 1870202 - DNA, 25 bp, Homo sapien
gcttctgcctaaagagccagcttcg

SEQ ID NO: 1870203 - DNA, 25 bp, Homo sapien
ggctgctaggttcatctgtgggcca

SEQ ID NO: 1870204 - DNA, 25 bp, Homo sapien
ttagatggctggcagcgtgaatttt

SEQ ID NO: 1870205 - DNA, 25 bp, Homo sapien
aatgtaaacgaagaagtggtgggca

SEQ ID NO: 1870206 - DNA, 25 bp, Homo sapien
aaggatctctagtaatgctccaact

SEQ ID NO: 1870207 - DNA, 25 bp, Homo sapien
gatctctagtaatgctccaacttgt

SEQ ID NO: 1870208 - DNA, 25 bp, Homo sapien
ctgtaatgtaaacgaagaagtggtg

SEQ ID NO: 1870209 - DNA, 25 bp, Homo sapien
caaagggctacagcacattttcctg

SEQ ID NO: 1870210 - DNA, 25 bp, Homo sapien
agcacattttcctgaatctgcggac

SEQ ID NO: 1870211 - DNA, 25 bp, Homo sapien
gggctacagcacattttcctgaatc

SEQ ID NO: 1870212 - DNA, 25 bp, Homo sapien
acagcacattttcctgaatctgcgg

SEQ ID NO: 1870213 - DNA, 25 bp, Homo sapien
tttgtacgtgcaggtcccccttgct

SEQ ID NO: 1870214 - DNA, 25 bp, Homo sapien
tgccagcagaggccaacaacccagt

SEQ ID NO: 1870215 - DNA, 25 bp, Homo sapien
ccttgggcctttgattgggcagggg

SEQ ID NO: 1870216 - DNA, 25 bp, Homo sapien
gctcaggctggtgtttgtacgtgca

SEQ ID NO: 1870217 - DNA, 25 bp, Homo sapien
gatctgcccaaaaccctctcaggtg

SEQ ID NO: 1870218 - DNA, 25 bp, Homo sapien
ggtgaacctcgagggcatcccattc

SEQ ID NO: 1870219 - DNA, 25 bp, Homo sapien
aatttaacaccttactgctgatctg

SEQ ID NO: 1870220 - DNA, 25 bp, Homo sapien
caaaaccctctcaggtgaggtgaac

SEQ ID NO: 1870221 - DNA, 25 bp, Homo sapien
gctcttgcgggttcccaggctgtcg

SEQ ID NO: 1870222 - DNA, 25 bp, Homo sapien
tcgggagcagaggtgaactgccttc

SEQ ID NO: 1870223 - DNA, 25 bp, Homo sapien
gtggggtttcacaagaccagacttc

SEQ ID NO: 1870224 - DNA, 25 bp, Homo sapien
caagaccagacttcaaatgctgggg

SEQ ID NO: 1870225 - DNA, 25 bp, Homo sapien
tttggtgcctgatgcctctctccag

SEQ ID NO: 1870226 - DNA, 25 bp, Homo sapien
catgatttcctatatttggtgcctg

SEQ ID NO: 1870227 - DNA, 25 bp, Homo sapien
tggggactgtaataaataagagatc

SEQ ID NO: 1870228 - DNA, 25 bp, Homo sapien
aagagatcctctccacatgatttcc

SEQ ID NO: 1870229 - DNA, 25 bp, Homo sapien
tgagttgttgagagacctggactac

SEQ ID NO: 1870230 - DNA, 25 bp, Homo sapien
gggccatgtggattttcacaagctg

SEQ ID NO: 1870231 - DNA, 25 bp, Homo sapien
tcctggctgtagaaagaacgtggga

SEQ ID NO: 1870232 - DNA, 25 bp, Homo sapien
tagaaagaacgtgggaactctgggc

SEQ ID NO: 1870233 - DNA, 25 bp, Homo sapien
gggtgacagtcagtcctccaacagc

SEQ ID NO: 1870234 - DNA, 25 bp, Homo sapien
ccaacagcagcacacttggaagctg

SEQ ID NO: 1870235 - DNA, 25 bp, Homo sapien
ctccattgtgttcagcagggtgaca

SEQ ID NO: 1870236 - DNA, 25 bp, Homo sapien
tccaacagcagcacacttggaagct

SEQ ID NO: 1870237 - DNA, 25 bp, Homo sapien
aaggcagcagagggggaggagggtg

SEQ ID NO: 1870238 - DNA, 25 bp, Homo sapien
cagcagagggggaggagggtggatg

SEQ ID NO: 1870239 - DNA, 25 bp, Homo sapien
ggcagcagagggggaggagggtgga

SEQ ID NO: 1870240 - DNA, 25 bp, Homo sapien
ctgcaaggcagcagagggggaggag

SEQ ID NO: 1870241 - DNA, 25 bp, Homo sapien
gggttgcgggtgtgagcaggcaaag

SEQ ID NO: 1870242 - DNA, 25 bp, Homo sapien
ctgggttgcgggtgtgagcaggcaa

SEQ ID NO: 1870243 - DNA, 25 bp, Homo sapien
ggttgcgggtgtgagcaggcaaaga

SEQ ID NO: 1870244 - DNA, 25 bp, Homo sapien
tgggttgcgggtgtgagcaggcaaa

SEQ ID NO: 1870245 - DNA, 25 bp, Homo sapien
aaagcccctggtcatgcaggtctcc

SEQ ID NO: 1870246 - DNA, 25 bp, Homo sapien
ggtctctgcaccctgaattgcttcc

SEQ ID NO: 1870247 - DNA, 25 bp, Homo sapien
cacaatgcagaatgagttcaaggct

SEQ ID NO: 1870248 - DNA, 25 bp, Homo sapien
ttggagcctctatcttcagattccc

SEQ ID NO: 1870249 - DNA, 25 bp, Homo sapien
gcaggttcaaatctaaagtgtgata

SEQ ID NO: 1870250 - DNA, 25 bp, Homo sapien
tcctgttttcagtacccaccattct

SEQ ID NO: 1870251 - DNA, 25 bp, Homo sapien
aaagtacttgatacctgttctcctg

SEQ ID NO: 1870252 - DNA, 25 bp, Homo sapien
cattcttctagttagcaggttcaaa

SEQ ID NO: 1870253 - DNA, 25 bp, Homo sapien
tggctgcagatccaaatgaatctcc

SEQ ID NO: 1870254 - DNA, 25 bp, Homo sapien
aatgatgccagaagtaatctctccc

SEQ ID NO: 1870255 - DNA, 25 bp, Homo sapien
cttctgcaaggagctagagtcattc

SEQ ID NO: 1870256 - DNA, 25 bp, Homo sapien
caaagctgtcccagtctaagcctag

SEQ ID NO: 1870257 - DNA, 25 bp, Homo sapien
gaatccatgaagaactaagacacgg

SEQ ID NO: 1870258 - DNA, 25 bp, Homo sapien
taagacacggaagctggaggcacag

SEQ ID NO: 1870259 - DNA, 25 bp, Homo sapien
tgtaattccttcactctactgttct

SEQ ID NO: 1870260 - DNA, 25 bp, Homo sapien
tgtttctgtaattccttcactctac

SEQ ID NO: 1870261 - DNA, 25 bp, Homo sapien
cacataaagttctgacataatacaa

SEQ ID NO: 1870262 - DNA, 25 bp, Homo sapien
gcagatccaaatgattatcaggcat

SEQ ID NO: 1870263 - DNA, 25 bp, Homo sapien
tgcagatccaaatgattatcaggca

SEQ ID NO: 1870264 - DNA, 25 bp, Homo sapien
atgcagatccaaatgattatcaggc

SEQ ID NO: 1870265 - DNA, 25 bp, Homo sapien
ttctgacccctcgaaaggctgcaca

SEQ ID NO: 1870266 - DNA, 25 bp, Homo sapien
caggcttatgggagttaagtttgga

SEQ ID NO: 1870267 - DNA, 25 bp, Homo sapien
tgaagaatgtaggaggcccagctat

SEQ ID NO: 1870268 - DNA, 25 bp, Homo sapien
ttggagcttctgacccctcgaaagg

SEQ ID NO: 1870269 - DNA, 25 bp, Homo sapien
tctctggatggacgagcatgccaag

SEQ ID NO: 1870270 - DNA, 25 bp, Homo sapien
attcttttgagggatcagaagctcc

SEQ ID NO: 1870271 - DNA, 25 bp, Homo sapien
caatattttcgcaggctgtgcattc

SEQ ID NO: 1870272 - DNA, 25 bp, Homo sapien
tcagccatgaactccatggccaata

SEQ ID NO: 1870273 - DNA, 25 bp, Homo sapien
ccttaggaagcgaggattccaggct

SEQ ID NO: 1870274 - DNA, 25 bp, Homo sapien
taggaagcgaggattccaggctatt

SEQ ID NO: 1870275 - DNA, 25 bp, Homo sapien
cttaggaagcgaggattccaggcta

SEQ ID NO: 1870276 - DNA, 25 bp, Homo sapien
gaagcgaggattccaggctattcct

SEQ ID NO: 1870277 - DNA, 25 bp, Homo sapien
tgagttgcctacttgcgctagcaca

SEQ ID NO: 1870278 - DNA, 25 bp, Homo sapien
taagagagggagcattcaagaactc

SEQ ID NO: 1870279 - DNA, 25 bp, Homo sapien
tcactatggttcatgggaaacacac

SEQ ID NO: 1870280 - DNA, 25 bp, Homo sapien
tatcagagaggacctaaaagagccc

SEQ ID NO: 1870281 - DNA, 25 bp, Homo sapien
ttaactggcttcacaatctttggca

SEQ ID NO: 1870282 - DNA, 25 bp, Homo sapien
ggtttaggaccagatggaagtgcct

SEQ ID NO: 1870283 - DNA, 25 bp, Homo sapien
tattggctgtagaaatggtctggga

SEQ ID NO: 1870284 - DNA, 25 bp, Homo sapien
catctctgcactaggtctgccttga

SEQ ID NO: 1870285 - DNA, 25 bp, Homo sapien
catattttatggtcagggtacaact

SEQ ID NO: 1870286 - DNA, 25 bp, Homo sapien
gaacctaagaagcaaaagcgaacat

SEQ ID NO: 1870287 - DNA, 25 bp, Homo sapien
caatccagattattggaaatgccat

SEQ ID NO: 1870288 - DNA, 25 bp, Homo sapien
ggtacaactgacacgatttccaaca

SEQ ID NO: 1870289 - DNA, 25 bp, Homo sapien
tcagaaaacccgatcgaatactgag

SEQ ID NO: 1870290 - DNA, 25 bp, Homo sapien
gaaaacccgatcgaatactgagcat

SEQ ID NO: 1870291 - DNA, 25 bp, Homo sapien
cctaaatcagaaaacccgatcgaat

SEQ ID NO: 1870292 - DNA, 25 bp, Homo sapien
aacccgatcgaatactgagcataat

SEQ ID NO: 1870293 - DNA, 25 bp, Homo sapien
tcatttgagacaaactgagttagca

SEQ ID NO: 1870294 - DNA, 25 bp, Homo sapien
ttagcatgatgttgtcggaggaatc

SEQ ID NO: 1870295 - DNA, 25 bp, Homo sapien
gatgttgtcggaggaatctccagta

SEQ ID NO: 1870296 - DNA, 25 bp, Homo sapien
gacaaactgagttagcatgatgttg

SEQ ID NO: 1870297 - DNA, 25 bp, Homo sapien
cagtgggttgaaaggctttgagaat

SEQ ID NO: 1870298 - DNA, 25 bp, Homo sapien
gagaatttgggtttggcagataaat

SEQ ID NO: 1870299 - DNA, 25 bp, Homo sapien
ttgttttgcagtgggttgaaaggct

SEQ ID NO: 1870300 - DNA, 25 bp, Homo sapien
gggtttggcagataaatctgatgag

SEQ ID NO: 1870301 - DNA, 25 bp, Homo sapien
aaaggcggcattatcccttttcatg

SEQ ID NO: 1870302 - DNA, 25 bp, Homo sapien
cctgacttcctgatgttattcatga

SEQ ID NO: 1870303 - DNA, 25 bp, Homo sapien
tggaggaaaaacagtgctctgacta

SEQ ID NO: 1870304 - DNA, 25 bp, Homo sapien
ttgttactggaagagaaacccatgg

SEQ ID NO: 1870305 - DNA, 25 bp, Homo sapien
cactgggaatattggaaggaaaact

SEQ ID NO: 1870306 - DNA, 25 bp, Homo sapien
gaaacaaagagcatgtacttatcag

SEQ ID NO: 1870307 - DNA, 25 bp, Homo sapien
cattccttgctacagtctatgccac

SEQ ID NO: 1870308 - DNA, 25 bp, Homo sapien
gctacagaggctatatagagttcaa

SEQ ID NO: 1870309 - DNA, 25 bp, Homo sapien
gcaggaatattcatcaagtgtgatc

SEQ ID NO: 1870310 - DNA, 25 bp, Homo sapien
tcaagtgtgatctctttctcacctt

SEQ ID NO: 1870311 - DNA, 25 bp, Homo sapien
caagtgtgatctctttctcaccttc

SEQ ID NO: 1870312 - DNA, 25 bp, Homo sapien
cttggcaggaatattcatcaagtgt

SEQ ID NO: 1870313 - DNA, 25 bp, Homo sapien
aaatgagccacctaaccagcaacaa

SEQ ID NO: 1870314 - DNA, 25 bp, Homo sapien
gagtgatttttagttcttccagaca

SEQ ID NO: 1870315 - DNA, 25 bp, Homo sapien
ggagtgtcccgtctcattatattca

SEQ ID NO: 1870316 - DNA, 25 bp, Homo sapien
cacaacttctggttcgagtgatttt

SEQ ID NO: 1870317 - DNA, 25 bp, Homo sapien
attcatggcagtaggagataattac

SEQ ID NO: 1870318 - DNA, 25 bp, Homo sapien
gattcatggcagtaggagataatta

SEQ ID NO: 1870319 - DNA, 25 bp, Homo sapien
acttgttgaacagaagttgtcgcag

SEQ ID NO: 1870320 - DNA, 25 bp, Homo sapien
agacaacttgttgaacagaagttgt

SEQ ID NO: 1870321 - DNA, 25 bp, Homo sapien
aacttgttgaacagaagttgtcgca

SEQ ID NO: 1870322 - DNA, 25 bp, Homo sapien
acaacttgttgaacagaagttgtcg

SEQ ID NO: 1870323 - DNA, 25 bp, Homo sapien
tcctagaagcagttagtagaccatg

SEQ ID NO: 1870324 - DNA, 25 bp, Homo sapien
caaagaacaacagtaccaaatgcca

SEQ ID NO: 1870325 - DNA, 25 bp, Homo sapien
cacatgaatggtaagacaaggcaat

SEQ ID NO: 1870326 - DNA, 25 bp, Homo sapien
gaagagtttcctaaccacatgaatg

SEQ ID NO: 1870327 - DNA, 25 bp, Homo sapien
cttactgtccaagagtattccaaag

SEQ ID NO: 1870328 - DNA, 25 bp, Homo sapien
tactgtccaagagtattccaaagca

SEQ ID NO: 1870329 - DNA, 25 bp, Homo sapien
ttactgtccaagagtattccaaagc

SEQ ID NO: 1870330 - DNA, 25 bp, Homo sapien
tgcctgagttctctacttattccaa

SEQ ID NO: 1870331 - DNA, 25 bp, Homo sapien
tcacttgacaatacaataggttatt

SEQ ID NO: 1870332 - DNA, 25 bp, Homo sapien
acttgacaatacaataggttattgt

SEQ ID NO: 1870333 - DNA, 25 bp, Homo sapien
cacttgacaatacaataggttattg

SEQ ID NO: 1870334 - DNA, 25 bp, Homo sapien
cttgacaatacaataggttattgtt

SEQ ID NO: 1870335 - DNA, 25 bp, Homo sapien
tcagcaatcaagagggacagggcta

SEQ ID NO: 1870336 - DNA, 25 bp, Homo sapien
caatagccagtgcagggacaacaaa

SEQ ID NO: 1870337 - DNA, 25 bp, Homo sapien
gacagatataatgagagggcaccca

SEQ ID NO: 1870338 - DNA, 25 bp, Homo sapien
cagactccagaagggttcaccgtgg

SEQ ID NO: 1870339 - DNA, 25 bp, Homo sapien
gaataaccgtggatatcacaggtcc

SEQ ID NO: 1870340 - DNA, 25 bp, Homo sapien
cattggcacgtcacgatgtcttgag

SEQ ID NO: 1870341 - DNA, 25 bp, Homo sapien
ttcattcactaggtggcagcctgca

SEQ ID NO: 1870342 - DNA, 25 bp, Homo sapien
cataggtgatccattttacaacggg

SEQ ID NO: 1870343 - DNA, 25 bp, Homo sapien
tagaatgttccccagagtcaacgag

SEQ ID NO: 1870344 - DNA, 25 bp, Homo sapien
tggtctgacccaattaacacacggc

SEQ ID NO: 1870345 - DNA, 25 bp, Homo sapien
tctgatagctgtaaccccttttgag

SEQ ID NO: 1870346 - DNA, 25 bp, Homo sapien
tcaacgaggccatgctgataatagt

SEQ ID NO: 1870347 - DNA, 25 bp, Homo sapien
gttgaattggacaccctgaaatggc

SEQ ID NO: 1870348 - DNA, 25 bp, Homo sapien
attttgcacgaaggatgacacagct

SEQ ID NO: 1870349 - DNA, 25 bp, Homo sapien
atattgctcagaatcgacaccaccg

SEQ ID NO: 1870350 - DNA, 25 bp, Homo sapien
tgggttttgccgaatgatgacagaa

SEQ ID NO: 1870351 - DNA, 25 bp, Homo sapien
gtcttggccatatagaactaacatt

SEQ ID NO: 1870352 - DNA, 25 bp, Homo sapien
cagatgtcttggccatatagaacta

SEQ ID NO: 1870353 - DNA, 25 bp, Homo sapien
tgacatgctgtgtttcatcaaattt

SEQ ID NO: 1870354 - DNA, 25 bp, Homo sapien
gatgtcttggccatatagaactaac

SEQ ID NO: 1870355 - DNA, 25 bp, Homo sapien
tgctaccagaggaactattggcccc

SEQ ID NO: 1870356 - DNA, 25 bp, Homo sapien
tgcacccggccctagatttggaatt

SEQ ID NO: 1870357 - DNA, 25 bp, Homo sapien
gcatcatgtggagggcatagcacct

SEQ ID NO: 1870358 - DNA, 25 bp, Homo sapien
tctgaaactcaagaccagggcaagt

SEQ ID NO: 1870359 - DNA, 25 bp, Homo sapien
tgatgtttcccctgtagccactgct

SEQ ID NO: 1870360 - DNA, 25 bp, Homo sapien
cagttcttcaagcagagagagcaca

SEQ ID NO: 1870361 - DNA, 25 bp, Homo sapien
agggtatattcatcatccttggacc

SEQ ID NO: 1870362 - DNA, 25 bp, Homo sapien
tgcagggcagggtatattcatcatc

SEQ ID NO: 1870363 - DNA, 25 bp, Homo sapien
cttccaggtgtccgatctgtgccaa

SEQ ID NO: 1870364 - DNA, 25 bp, Homo sapien
tccaggtgtccgatctgtgccaaca

SEQ ID NO: 1870365 - DNA, 25 bp, Homo sapien
ccaggtgtccgatctgtgccaacaa

SEQ ID NO: 1870366 - DNA, 25 bp, Homo sapien
aggtgtccgatctgtgccaacaata

SEQ ID NO: 1870367 - DNA, 25 bp, Homo sapien
gccttctcggcaacatgttcaatgg

SEQ ID NO: 1870368 - DNA, 25 bp, Homo sapien
aaagagccgtcttctaatggaaaca

SEQ ID NO: 1870369 - DNA, 25 bp, Homo sapien
tttccgaacactctgaaagagccgt

SEQ ID NO: 1870370 - DNA, 25 bp, Homo sapien
caacttcatacccagcaacgatgct

SEQ ID NO: 1870371 - DNA, 25 bp, Homo sapien
agtgaagttaaaccaggttccacag

SEQ ID NO: 1870372 - DNA, 25 bp, Homo sapien
tagtgaagttaaaccaggttccaca

SEQ ID NO: 1870373 - DNA, 25 bp, Homo sapien
gcttgttataggtttgatttagtga

SEQ ID NO: 1870374 - DNA, 25 bp, Homo sapien
ttttcctgcttgttataggtttgat

SEQ ID NO: 1870375 - DNA, 25 bp, Homo sapien
tgctgtaaacaatgactactgggtt

SEQ ID NO: 1870376 - DNA, 25 bp, Homo sapien
tgtgcaaagatatctcacccaaagc

SEQ ID NO: 1870377 - DNA, 25 bp, Homo sapien
gaggcatcatatctcctgtagttgc

SEQ ID NO: 1870378 - DNA, 25 bp, Homo sapien
tctggctccgaattatgaggcatca

SEQ ID NO: 1870379 - DNA, 25 bp, Homo sapien
tccaacttgggcgacaagagtgaca

SEQ ID NO: 1870380 - DNA, 25 bp, Homo sapien
caacttgggcgacaagagtgacatt

SEQ ID NO: 1870381 - DNA, 25 bp, Homo sapien
cactccaacttgggcgacaagagtg

SEQ ID NO: 1870382 - DNA, 25 bp, Homo sapien
ctccaacttgggcgacaagagtgac

SEQ ID NO: 1870383 - DNA, 25 bp, Homo sapien
aattgggtgacctgaaccgactcaa

SEQ ID NO: 1870384 - DNA, 25 bp, Homo sapien
tgacctgaaccgactcaaaaccttg

SEQ ID NO: 1870385 - DNA, 25 bp, Homo sapien
tgggtgacctgaaccgactcaaaac

SEQ ID NO: 1870386 - DNA, 25 bp, Homo sapien
tgaaccgactcaaaaccttgaattc

SEQ ID NO: 1870387 - DNA, 25 bp, Homo sapien
gcagaagatgaattcaaaaggtcat

SEQ ID NO: 1870388 - DNA, 25 bp, Homo sapien
ggagtatatagcagaagatgaattc

SEQ ID NO: 1870389 - DNA, 25 bp, Homo sapien
tttgcatatttggagtatatagcag

SEQ ID NO: 1870390 - DNA, 25 bp, Homo sapien
tcattaattttgaaagtgccccaaa

SEQ ID NO: 1870391 - DNA, 25 bp, Homo sapien
ttttagtcagggtctcacttttgtc

SEQ ID NO: 1870392 - DNA, 25 bp, Homo sapien
gcagcctcagtcttctgggttcaag

SEQ ID NO: 1870393 - DNA, 25 bp, Homo sapien
ttagtcagggtctcacttttgtcac

SEQ ID NO: 1870394 - DNA, 25 bp, Homo sapien
cacttttgtcacctaggctagtgtg

SEQ ID NO: 1870395 - DNA, 25 bp, Homo sapien
tgagctggatggacctaaaggttga

SEQ ID NO: 1870396 - DNA, 25 bp, Homo sapien
cctgtaaacaaacattgactagcta

SEQ ID NO: 1870397 - DNA, 25 bp, Homo sapien
tgggtccagacaggcctaacatgat

SEQ ID NO: 1870398 - DNA, 25 bp, Homo sapien
taaaatcatatgattgcagagctga

SEQ ID NO: 1870399 - DNA, 25 bp, Homo sapien
cagaaattgacactctggctgaggt

SEQ ID NO: 1870400 - DNA, 25 bp, Homo sapien
caggtgtagctgtcttcacaggtac

SEQ ID NO: 1870401 - DNA, 25 bp, Homo sapien
acattcacagcttgggagtgctcca

SEQ ID NO: 1870402 - DNA, 25 bp, Homo sapien
gctccagccgtgtgaaggtagcagt

SEQ ID NO: 1870403 - DNA, 25 bp, Homo sapien
gcaggactccattcaggctgttgca

SEQ ID NO: 1870404 - DNA, 25 bp, Homo sapien
caggactccattcaggctgttgcag

SEQ ID NO: 1870405 - DNA, 25 bp, Homo sapien
ctgcaggactccattcaggctgttg

SEQ ID NO: 1870406 - DNA, 25 bp, Homo sapien
aggactccattcaggctgttgcagt

SEQ ID NO: 1870407 - DNA, 25 bp, Homo sapien
aatggaggcttcaagagcttcagaa

SEQ ID NO: 1870408 - DNA, 25 bp, Homo sapien
taattagcccatgtgaccataataa

SEQ ID NO: 1870409 - DNA, 25 bp, Homo sapien
tggaatctctataggtcacctgaag

SEQ ID NO: 1870410 - DNA, 25 bp, Homo sapien
ctgtggtagcctttgctctgataat

SEQ ID NO: 1870411 - DNA, 25 bp, Homo sapien
ctttttttgttttgatgccatcatt

SEQ ID NO: 1870412 - DNA, 25 bp, Homo sapien
tttcttattcacaatgagttctttt

SEQ ID NO: 1870413 - DNA, 25 bp, Homo sapien
gatgttttttcttattcacaatgag

SEQ ID NO: 1870414 - DNA, 25 bp, Homo sapien
gttttttcttattcacaatgagttc

SEQ ID NO: 1870415 - DNA, 25 bp, Homo sapien
aagccaccgtggccgtcagtgaagg

SEQ ID NO: 1870416 - DNA, 25 bp, Homo sapien
ccgtggccgtcagtgaaggtgaaga

SEQ ID NO: 1870417 - DNA, 25 bp, Homo sapien
caccgtggccgtcagtgaaggtgaa

SEQ ID NO: 1870418 - DNA, 25 bp, Homo sapien
ccaccgtggccgtcagtgaaggtga

SEQ ID NO: 1870419 - DNA, 25 bp, Homo sapien
gaacagcagcagtcgggtgcatagt

SEQ ID NO: 1870420 - DNA, 25 bp, Homo sapien
tgaacagcagcagtcgggtgcatag

SEQ ID NO: 1870421 - DNA, 25 bp, Homo sapien
gagctgatccgaacccctgggtgtt

SEQ ID NO: 1870422 - DNA, 25 bp, Homo sapien
ggtgtttatgtttccactccacgga

SEQ ID NO: 1870423 - DNA, 25 bp, Homo sapien
aacctgtgacatcatgacttctgct

SEQ ID NO: 1870424 - DNA, 25 bp, Homo sapien
tgctcccattgcagatgtagtaaat

SEQ ID NO: 1870425 - DNA, 25 bp, Homo sapien
ttcatacaaaccctgctatttctcc

SEQ ID NO: 1870426 - DNA, 25 bp, Homo sapien
gcttaaacttcatacaaaccctgct

SEQ ID NO: 1870427 - DNA, 25 bp, Homo sapien
gggtgtgcttaaacttcatacaaac

SEQ ID NO: 1870428 - DNA, 25 bp, Homo sapien
taaacttcatacaaaccctgctatt

SEQ ID NO: 1870429 - DNA, 25 bp, Homo sapien
tctgtagctgtactagccagggtcc

SEQ ID NO: 1870430 - DNA, 25 bp, Homo sapien
ttgcaagtaaggtacccagagtggt

SEQ ID NO: 1870431 - DNA, 25 bp, Homo sapien
ccagagtggtgcctagtatttcaac

SEQ ID NO: 1870432 - DNA, 25 bp, Homo sapien
caaggcacatggtcaaaatgggctc

SEQ ID NO: 1870433 - DNA, 25 bp, Homo sapien
ctctggaaatggagggatcccagct

SEQ ID NO: 1870434 - DNA, 25 bp, Homo sapien
cagtttttatagttacttgctggat

SEQ ID NO: 1870435 - DNA, 25 bp, Homo sapien
tgcacttgggttaactgatggccat

SEQ ID NO: 1870436 - DNA, 25 bp, Homo sapien
ggattgtgtcagaatttgacttctc

SEQ ID NO: 1870437 - DNA, 25 bp, Homo sapien
tgtgtgggcaccagcttccgtggga

SEQ ID NO: 1870438 - DNA, 25 bp, Homo sapien
tgggcaccagcttccgtgggaaggc

SEQ ID NO: 1870439 - DNA, 25 bp, Homo sapien
agcttccgtgggaaggcttggccat

SEQ ID NO: 1870440 - DNA, 25 bp, Homo sapien
caccagcttccgtgggaaggcttgg

SEQ ID NO: 1870441 - DNA, 25 bp, Homo sapien
tgtggctcaatcacttcttatgctg

SEQ ID NO: 1870442 - DNA, 25 bp, Homo sapien
ggaaagaaagtatcagtatctgagc

SEQ ID NO: 1870443 - DNA, 25 bp, Homo sapien
tctcttcacaccagaactcgaggga

SEQ ID NO: 1870444 - DNA, 25 bp, Homo sapien
cgagggagcccttccttcagtatac

SEQ ID NO: 1870445 - DNA, 25 bp, Homo sapien
ctgggtcataccctataaagctgaa

SEQ ID NO: 1870446 - DNA, 25 bp, Homo sapien
agcccttcatgcataattccaatga

SEQ ID NO: 1870447 - DNA, 25 bp, Homo sapien
ctctgaacacactgggtcataccct

SEQ ID NO: 1870448 - DNA, 25 bp, Homo sapien
cataattccaatgaggagaggtggg

SEQ ID NO: 1870449 - DNA, 25 bp, Homo sapien
aaccccacattgactccagcacttc

SEQ ID NO: 1870450 - DNA, 25 bp, Homo sapien
ttgtttcagcaaaccccacattgac

SEQ ID NO: 1870451 - DNA, 25 bp, Homo sapien
gtattgtttcagcaaaccccacatt

SEQ ID NO: 1870452 - DNA, 25 bp, Homo sapien
tgtttcagcaaaccccacattgact

SEQ ID NO: 1870453 - DNA, 25 bp, Homo sapien
tgagacttaaagcctgaatcaagtt

SEQ ID NO: 1870454 - DNA, 25 bp, Homo sapien
gacttaaagcctgaatcaagttctc

SEQ ID NO: 1870455 - DNA, 25 bp, Homo sapien
gagacttaaagcctgaatcaagttc

SEQ ID NO: 1870456 - DNA, 25 bp, Homo sapien
acttaaagcctgaatcaagttctcc

SEQ ID NO: 1870457 - DNA, 25 bp, Homo sapien
gcaagagtgaccacagtccaaggcc

SEQ ID NO: 1870458 - DNA, 25 bp, Homo sapien
gactccaggttctcccctaagcatt

SEQ ID NO: 1870459 - DNA, 25 bp, Homo sapien
taatccaatcggtaatcagacaaaa

SEQ ID NO: 1870460 - DNA, 25 bp, Homo sapien
ggttctcccctaagcattgcaggag

SEQ ID NO: 1870461 - DNA, 25 bp, Homo sapien
ttcggttgacttcccattgttgggc

SEQ ID NO: 1870462 - DNA, 25 bp, Homo sapien
cgtggactaggagtagttaccctct

SEQ ID NO: 1870463 - DNA, 25 bp, Homo sapien
caatagggatgaagaattttggcaa

SEQ ID NO: 1870464 - DNA, 25 bp, Homo sapien
cattgttgggccttccgtggactag

SEQ ID NO: 1870465 - DNA, 25 bp, Homo sapien
aataatgtgggatttggggctggcc

SEQ ID NO: 1870466 - DNA, 25 bp, Homo sapien
ggctggcccagtatggacttctcag

SEQ ID NO: 1870467 - DNA, 25 bp, Homo sapien
gctggcccagtatggacttctcagg

SEQ ID NO: 1870468 - DNA, 25 bp, Homo sapien
ggcccagtatggacttctcaggcac

SEQ ID NO: 1870469 - DNA, 25 bp, Homo sapien
gctgttgattttgaaatagcccatg

SEQ ID NO: 1870470 - DNA, 25 bp, Homo sapien
cttggaaaccgtatctcaagggagt

SEQ ID NO: 1870471 - DNA, 25 bp, Homo sapien
ttgattttgaaatagcccatgctga

SEQ ID NO: 1870472 - DNA, 25 bp, Homo sapien
gctgacttggaaaccgtatctcaag

SEQ ID NO: 1870473 - DNA, 25 bp, Homo sapien
caggaagcgggcttcaaaggagaga

SEQ ID NO: 1870474 - DNA, 25 bp, Homo sapien
gcaggaagcgggcttcaaaggagag

SEQ ID NO: 1870475 - DNA, 25 bp, Homo sapien
tgcaggaagcgggcttcaaaggaga

SEQ ID NO: 1870476 - DNA, 25 bp, Homo sapien
tgggattcctcttccaaagccagag

SEQ ID NO: 1870477 - DNA, 25 bp, Homo sapien
tattgttacttttgccttgggattc

SEQ ID NO: 1870478 - DNA, 25 bp, Homo sapien
caagcacacttgtaaacattttcat

SEQ ID NO: 1870479 - DNA, 25 bp, Homo sapien
tcaagcacacttgtaaacattttca

SEQ ID NO: 1870480 - DNA, 25 bp, Homo sapien
ataacctgagcctctttgaccagtg

SEQ ID NO: 1870481 - DNA, 25 bp, Homo sapien
tgaccagtgagtttatgggaaggtc

SEQ ID NO: 1870482 - DNA, 25 bp, Homo sapien
gttggacacacgcacagaaagtggg

SEQ ID NO: 1870483 - DNA, 25 bp, Homo sapien
aagagcagggagaaagttggacaca

SEQ ID NO: 1870484 - DNA, 25 bp, Homo sapien
ctctgcttcatcagacctgcaatag

SEQ ID NO: 1870485 - DNA, 25 bp, Homo sapien
tctctgcttcatcagacctgcaata

SEQ ID NO: 1870486 - DNA, 25 bp, Homo sapien
tcctctaacctcttcctatcagccc

SEQ ID NO: 1870487 - DNA, 25 bp, Homo sapien
gcaatcaacctcataatggaggagg

SEQ ID NO: 1870488 - DNA, 25 bp, Homo sapien
tcagccctggggcaatcaacctcat

SEQ ID NO: 1870489 - DNA, 25 bp, Homo sapien
gccctggggcaatcaacctcataat

SEQ ID NO: 1870490 - DNA, 25 bp, Homo sapien
tttaagttctagaagcatctcctct

SEQ ID NO: 1870491 - DNA, 25 bp, Homo sapien
ttctagaagcatctcctctaggatt

SEQ ID NO: 1870492 - DNA, 25 bp, Homo sapien
tctagaagcatctcctctaggattc

SEQ ID NO: 1870493 - DNA, 25 bp, Homo sapien
tcaggttaagattgaagagtgaata

SEQ ID NO: 1870494 - DNA, 25 bp, Homo sapien
ttaagattgaagagtgaataatgtc

SEQ ID NO: 1870495 - DNA, 25 bp, Homo sapien
cccacataataagattcaggttaag

SEQ ID NO: 1870496 - DNA, 25 bp, Homo sapien
ggaaataacagaccccacataataa

SEQ ID NO: 1870497 - DNA, 25 bp, Homo sapien
tgatagtaaacaataagcctgggaa

SEQ ID NO: 1870498 - DNA, 25 bp, Homo sapien
tgaattcttgaagccaggaccatgc

SEQ ID NO: 1870499 - DNA, 25 bp, Homo sapien
aaggagtagcatgactgggcctcac

SEQ ID NO: 1870500 - DNA, 25 bp, Homo sapien
taccctctgagtatgtgatatgcac

SEQ ID NO: 1870501 - DNA, 25 bp, Homo sapien
acttttgtgtttgtgatctaagccc

SEQ ID NO: 1870502 - DNA, 25 bp, Homo sapien
tttggccagaaattagctactctgc

SEQ ID NO: 1870503 - DNA, 25 bp, Homo sapien
cgaactttgaattctctccatttga

SEQ ID NO: 1870504 - DNA, 25 bp, Homo sapien
tttgtgatctaagcccaagaaaagg

SEQ ID NO: 1870505 - DNA, 25 bp, Homo sapien
tgtgagtctagctcccctaccagaa

SEQ ID NO: 1870506 - DNA, 25 bp, Homo sapien
gatgtccgaagctccttccaaggta

SEQ ID NO: 1870507 - DNA, 25 bp, Homo sapien
gtacgagattgctgctccaaatggg

SEQ ID NO: 1870508 - DNA, 25 bp, Homo sapien
tatgggtcctaaagcaaacatgcag

SEQ ID NO: 1870509 - DNA, 25 bp, Homo sapien
aaagggagtccacgccacctttgca

SEQ ID NO: 1870510 - DNA, 25 bp, Homo sapien
gagtccacgccacctttgcattgga

SEQ ID NO: 1870511 - DNA, 25 bp, Homo sapien
cccacccacacaaagggagtccacg

SEQ ID NO: 1870512 - DNA, 25 bp, Homo sapien
acacaaagggagtccacgccacctt

SEQ ID NO: 1870513 - DNA, 25 bp, Homo sapien
aaattctctatggaaagggcgccac

SEQ ID NO: 1870514 - DNA, 25 bp, Homo sapien
caaagtgcagcaatgtgttccagaa

SEQ ID NO: 1870515 - DNA, 25 bp, Homo sapien
gaacagctcaaatcctaaaaggtga

SEQ ID NO: 1870516 - DNA, 25 bp, Homo sapien
ccagcccagagcatattagcataag

SEQ ID NO: 1870517 - DNA, 25 bp, Homo sapien
gtgaaaaccatacaatcagcaatag

SEQ ID NO: 1870518 - DNA, 25 bp, Homo sapien
caatcagcaatagtgtggtcaagtt

SEQ ID NO: 1870519 - DNA, 25 bp, Homo sapien
tgaatatgaactatacaagacatat

SEQ ID NO: 1870520 - DNA, 25 bp, Homo sapien
ccatacaatcagcaatagtgtggtc

SEQ ID NO: 1870521 - DNA, 25 bp, Homo sapien
gaaaagtcacactgcatttatggta

SEQ ID NO: 1870522 - DNA, 25 bp, Homo sapien
aacagttacacctggcaaaggctta

SEQ ID NO: 1870523 - DNA, 25 bp, Homo sapien
taagagcctcacaatccagtgtgtg

SEQ ID NO: 1870524 - DNA, 25 bp, Homo sapien
tttccagaatgcagtatccctatgt

SEQ ID NO: 1870525 - DNA, 25 bp, Homo sapien
tcatcaaagataggctgcaagtcac

SEQ ID NO: 1870526 - DNA, 25 bp, Homo sapien
cccgcagctcctcaggatttagaaa

SEQ ID NO: 1870527 - DNA, 25 bp, Homo sapien
gaatagccggtctagtttgtcctca

SEQ ID NO: 1870528 - DNA, 25 bp, Homo sapien
gactccaataatttcgaatagccgg

SEQ ID NO: 1870529 - DNA, 25 bp, Homo sapien
aaaggaaccgttcctgctcagcgcg

SEQ ID NO: 1870530 - DNA, 25 bp, Homo sapien
gactcatccacgaagaagcccttgt

SEQ ID NO: 1870531 - DNA, 25 bp, Homo sapien
ctggatgtagagtcacagcggagaa

SEQ ID NO: 1870532 - DNA, 25 bp, Homo sapien
aggagccgctggatgtagagtcaca

SEQ ID NO: 1870533 - DNA, 25 bp, Homo sapien
caggagagcggaattctcaagtttc

SEQ ID NO: 1870534 - DNA, 25 bp, Homo sapien
aaggctccaccgtcaggagagcgga

SEQ ID NO: 1870535 - DNA, 25 bp, Homo sapien
cggaattctcaagtttcgcgttggg

SEQ ID NO: 1870536 - DNA, 25 bp, Homo sapien
caccgtcaggagagcggaattctca

SEQ ID NO: 1870537 - DNA, 25 bp, Homo sapien
gggagagctagtttgtcagtttcca

SEQ ID NO: 1870538 - DNA, 25 bp, Homo sapien
cgggagagctagtttgtcagtttcc

SEQ ID NO: 1870539 - DNA, 25 bp, Homo sapien
ggagagctagtttgtcagtttccag

SEQ ID NO: 1870540 - DNA, 25 bp, Homo sapien
ggaggttgcagtattcccctagccc

SEQ ID NO: 1870541 - DNA, 25 bp, Homo sapien
gtggaggttgcagtattcccctagc

SEQ ID NO: 1870542 - DNA, 25 bp, Homo sapien
ctagccccggggatggcagagccat

SEQ ID NO: 1870543 - DNA, 25 bp, Homo sapien
aggttgcagtattcccctagccccg

SEQ ID NO: 1870544 - DNA, 25 bp, Homo sapien
acttttaagagctcagcaccatcgg

SEQ ID NO: 1870545 - DNA, 25 bp, Homo sapien
caccatcggaacatgaggagatcat

SEQ ID NO: 1870546 - DNA, 25 bp, Homo sapien
gctcagcaccatcggaacatgagga

SEQ ID NO: 1870547 - DNA, 25 bp, Homo sapien
taagagctcagcaccatcggaacat

SEQ ID NO: 1870548 - DNA, 25 bp, Homo sapien
gacccgtagataaggacagctgcat

SEQ ID NO: 1870549 - DNA, 25 bp, Homo sapien
tcagtcagacccgtagataaggaca

SEQ ID NO: 1870550 - DNA, 25 bp, Homo sapien
gtcagacccgtagataaggacagct

SEQ ID NO: 1870551 - DNA, 25 bp, Homo sapien
gtagataaggacagctgcatcctgc

SEQ ID NO: 1870552 - DNA, 25 bp, Homo sapien
tgtgtacccattggagaaagcagca

SEQ ID NO: 1870553 - DNA, 25 bp, Homo sapien
gggctgctacaagcttcaggatatc

SEQ ID NO: 1870554 - DNA, 25 bp, Homo sapien
ccctctcactggcattgcaaagaaa

SEQ ID NO: 1870555 - DNA, 25 bp, Homo sapien
caacatcgtttctccggtgctggcg

SEQ ID NO: 1870556 - DNA, 25 bp, Homo sapien
aacacaaccctcaacccactgaagg

SEQ ID NO: 1870557 - DNA, 25 bp, Homo sapien
gtaacacaaccctcaacccactgaa

SEQ ID NO: 1870558 - DNA, 25 bp, Homo sapien
aagtaacacaaccctcaacccactg

SEQ ID NO: 1870559 - DNA, 25 bp, Homo sapien
acacaaccctcaacccactgaaggg

SEQ ID NO: 1870560 - DNA, 25 bp, Homo sapien
gaaagctgtgcagattatctgtgga

SEQ ID NO: 1870561 - DNA, 25 bp, Homo sapien
tgaggctgccacatctaagagaagc

SEQ ID NO: 1870562 - DNA, 25 bp, Homo sapien
gcatcaagcccctaatggagaaagc

SEQ ID NO: 1870563 - DNA, 25 bp, Homo sapien
taaactgtgttagatagggaggaga

SEQ ID NO: 1870564 - DNA, 25 bp, Homo sapien
cctggtgtttacacttcaagtctac

SEQ ID NO: 1870565 - DNA, 25 bp, Homo sapien
ttcccataggaaatctgggctgaca

SEQ ID NO: 1870566 - DNA, 25 bp, Homo sapien
cacttcaagtctacttcccatagga

SEQ ID NO: 1870567 - DNA, 25 bp, Homo sapien
gcttcctggtgtttacacttcaagt

SEQ ID NO: 1870568 - DNA, 25 bp, Homo sapien
ggagggaaagctttggttgcagcaa

SEQ ID NO: 1870569 - DNA, 25 bp, Homo sapien
gagggaaagctttggttgcagcaac

SEQ ID NO: 1870570 - DNA, 25 bp, Homo sapien
caaaggagggaaagctttggttgca

SEQ ID NO: 1870571 - DNA, 25 bp, Homo sapien
aaggagggaaagctttggttgcagc

SEQ ID NO: 1870572 - DNA, 25 bp, Homo sapien
tataagaaacatgcaattccactcc

SEQ ID NO: 1870573 - DNA, 25 bp, Homo sapien
ttgcactgcattgcaaatcgactcc

SEQ ID NO: 1870574 - DNA, 25 bp, Homo sapien
attggactggcccttactgcttacc

SEQ ID NO: 1870575 - DNA, 25 bp, Homo sapien
aaatcgactcccactattggactgg

SEQ ID NO: 1870576 - DNA, 25 bp, Homo sapien
ctcacgcagctggtaagcaaaggga

SEQ ID NO: 1870577 - DNA, 25 bp, Homo sapien
taatcgggaaacaaactgagactgc

SEQ ID NO: 1870578 - DNA, 25 bp, Homo sapien
aagtaacttgccctggctcacgcag

SEQ ID NO: 1870579 - DNA, 25 bp, Homo sapien
gaactgtggaccatgtggccagcaa

SEQ ID NO: 1870580 - DNA, 25 bp, Homo sapien
ctgcttgagaaataatgcctgcccc

SEQ ID NO: 1870581 - DNA, 25 bp, Homo sapien
tacaccagtgctatccaagagaact

SEQ ID NO: 1870582 - DNA, 25 bp, Homo sapien
tcaggtaactacgtgaagtgggatc

SEQ ID NO: 1870583 - DNA, 25 bp, Homo sapien
tggttaccatatgtgctagctcagc

SEQ ID NO: 1870584 - DNA, 25 bp, Homo sapien
gaaactgccgatgttttgttcctat

SEQ ID NO: 1870585 - DNA, 25 bp, Homo sapien
tcctattgtcactttgcagagcttc

SEQ ID NO: 1870586 - DNA, 25 bp, Homo sapien
ttgtcactttgcagagcttcttcat

SEQ ID NO: 1870587 - DNA, 25 bp, Homo sapien
ctgccgatgttttgttcctattgtc

SEQ ID NO: 1870588 - DNA, 25 bp, Homo sapien
agtcaatcaggtctctgattccaca

SEQ ID NO: 1870589 - DNA, 25 bp, Homo sapien
aggtctctgattccacaacattctt

SEQ ID NO: 1870590 - DNA, 25 bp, Homo sapien
caatcaggtctctgattccacaaca

SEQ ID NO: 1870591 - DNA, 25 bp, Homo sapien
tcaggtctctgattccacaacattc

SEQ ID NO: 1870592 - DNA, 25 bp, Homo sapien
gcattacttctaatgagacggtcaa

SEQ ID NO: 1870593 - DNA, 25 bp, Homo sapien
tctctctgaatgcattacttctaat

SEQ ID NO: 1870594 - DNA, 25 bp, Homo sapien
tctaatgagacggtcaatctctttt

SEQ ID NO: 1870595 - DNA, 25 bp, Homo sapien
ctgaatgcattacttctaatgagac

SEQ ID NO: 1870596 - DNA, 25 bp, Homo sapien
actagggaaaaagtggtagagagat

SEQ ID NO: 1870597 - DNA, 25 bp, Homo sapien
gactagggaaaaagtggtagagaga

SEQ ID NO: 1870598 - DNA, 25 bp, Homo sapien
cagagtcctcgagcttttccggata

SEQ ID NO: 1870599 - DNA, 25 bp, Homo sapien
tgtaggttctgtctaggatgtcccc

SEQ ID NO: 1870600 - DNA, 25 bp, Homo sapien
catggccattgcagtagtagatcca

SEQ ID NO: 1870601 - DNA, 25 bp, Homo sapien
tagatccatttctcccggttctggg

SEQ ID NO: 1870602 - DNA, 25 bp, Homo sapien
aacagaggcagaagagttggattct

SEQ ID NO: 1870603 - DNA, 25 bp, Homo sapien
ctggatgctactcagtacctttggt

SEQ ID NO: 1870604 - DNA, 25 bp, Homo sapien
tactcagtacctttggtctaacaga

SEQ ID NO: 1870605 - DNA, 25 bp, Homo sapien
tacctttggtctaacagaggcagaa

SEQ ID NO: 1870606 - DNA, 25 bp, Homo sapien
gaaaacatctttggtataagcccac

SEQ ID NO: 1870607 - DNA, 25 bp, Homo sapien
tcaaaattcatctctcgcttccgga

SEQ ID NO: 1870608 - DNA, 25 bp, Homo sapien
ccagacatgagtgctagttaccttc

SEQ ID NO: 1870609 - DNA, 25 bp, Homo sapien
tcatgcatgagaggacactaggagg

SEQ ID NO: 1870610 - DNA, 25 bp, Homo sapien
gaggaagggacttcatgggtttcca

SEQ ID NO: 1870611 - DNA, 25 bp, Homo sapien
ttggtccccggcttgatcaccacca

SEQ ID NO: 1870612 - DNA, 25 bp, Homo sapien
agctggagaaggacgggagtgtgcc

SEQ ID NO: 1870613 - DNA, 25 bp, Homo sapien
gccacagacgttgtctgtctccttg

SEQ ID NO: 1870614 - DNA, 25 bp, Homo sapien
tggacacttgtcacaggttagcacc

SEQ ID NO: 1870615 - DNA, 25 bp, Homo sapien
ggcaagtgcattctcggtcagtcaa

SEQ ID NO: 1870616 - DNA, 25 bp, Homo sapien
tgtgccaatgagattcgaggccttc

SEQ ID NO: 1870617 - DNA, 25 bp, Homo sapien
cagacgcgcaggcttgtgttggtac

SEQ ID NO: 1870618 - DNA, 25 bp, Homo sapien
cagagcagaaaaagggccaacaatt

SEQ ID NO: 1870619 - DNA, 25 bp, Homo sapien
agcagagcagaaaaagggccaacaa

SEQ ID NO: 1870620 - DNA, 25 bp, Homo sapien
aaaccaagaagatgttacataggag

SEQ ID NO: 1870621 - DNA, 25 bp, Homo sapien
caagaagatgttacataggagcaga

SEQ ID NO: 1870622 - DNA, 25 bp, Homo sapien
gctgcaacacagtagaacgagagaa

SEQ ID NO: 1870623 - DNA, 25 bp, Homo sapien
gaccaggactgcatcctcttgacag

SEQ ID NO: 1870624 - DNA, 25 bp, Homo sapien
gcttgatctactggctgtgatgctt

SEQ ID NO: 1870625 - DNA, 25 bp, Homo sapien
cattcctgttaaagatccgaccagg

SEQ ID NO: 1870626 - DNA, 25 bp, Homo sapien
ctttttctgagcacagcggatgcac

SEQ ID NO: 1870627 - DNA, 25 bp, Homo sapien
ctgagcacagcggatgcactggata

SEQ ID NO: 1870628 - DNA, 25 bp, Homo sapien
tgagcacagcggatgcactggataa

SEQ ID NO: 1870629 - DNA, 25 bp, Homo sapien
tttctgagcacagcggatgcactgg

SEQ ID NO: 1870630 - DNA, 25 bp, Homo sapien
gattccaagtagatgagtgaactct

SEQ ID NO: 1870631 - DNA, 25 bp, Homo sapien
agattccaagtagatgagtgaactc

SEQ ID NO: 1870632 - DNA, 25 bp, Homo sapien
tgtccttagaaataactatttctaa

SEQ ID NO: 1870633 - DNA, 25 bp, Homo sapien
cttccgtgtccttagaaataactat

SEQ ID NO: 1870634 - DNA, 25 bp, Homo sapien
cctcatctccttccgtgtccttaga

SEQ ID NO: 1870635 - DNA, 25 bp, Homo sapien
acctcatctccttccgtgtccttag

SEQ ID NO: 1870636 - DNA, 25 bp, Homo sapien
gttttagctaaacttccaagcacca

SEQ ID NO: 1870637 - DNA, 25 bp, Homo sapien
ttcaatccacacacaggttgctctc

SEQ ID NO: 1870638 - DNA, 25 bp, Homo sapien
cctttcaatccacacacaggttgct

SEQ ID NO: 1870639 - DNA, 25 bp, Homo sapien
ctcagtttataaccagcagttttag

SEQ ID NO: 1870640 - DNA, 25 bp, Homo sapien
gtggagcagaactgctcattaaatt

SEQ ID NO: 1870641 - DNA, 25 bp, Homo sapien
cgtggagcagaactgctcattaaat

SEQ ID NO: 1870642 - DNA, 25 bp, Homo sapien
tggagcagaactgctcattaaattt

SEQ ID NO: 1870643 - DNA, 25 bp, Homo sapien
ctgagccccagacttttgaacccag

SEQ ID NO: 1870644 - DNA, 25 bp, Homo sapien
tgagccccagacttttgaacccagc

SEQ ID NO: 1870645 - DNA, 25 bp, Homo sapien
tgggtgtcgagcaacaagaatgttt

SEQ ID NO: 1870646 - DNA, 25 bp, Homo sapien
gtcgagcaacaagaatgttttgtcc

SEQ ID NO: 1870647 - DNA, 25 bp, Homo sapien
cagagtgtctgtaggatgaattccc

SEQ ID NO: 1870648 - DNA, 25 bp, Homo sapien
tacacagccctgtcgtgaaaacaag

SEQ ID NO: 1870649 - DNA, 25 bp, Homo sapien
gaattcccaggccatagcaactgca

SEQ ID NO: 1870650 - DNA, 25 bp, Homo sapien
tctgaagggagactgggacttgcct

SEQ ID NO: 1870651 - DNA, 25 bp, Homo sapien
agactgcaccaccctgcagggtcac

SEQ ID NO: 1870652 - DNA, 25 bp, Homo sapien
gagactgcaccaccctgcagggtca

SEQ ID NO: 1870653 - DNA, 25 bp, Homo sapien
tgagggagactgcaccaccctgcag

SEQ ID NO: 1870654 - DNA, 25 bp, Homo sapien
gggagactgcaccaccctgcagggt

SEQ ID NO: 1870655 - DNA, 25 bp, Homo sapien
cgagggatcggaaagactgtagaaa

SEQ ID NO: 1870656 - DNA, 25 bp, Homo sapien
taaacgagggatcggaaagactgta

SEQ ID NO: 1870657 - DNA, 25 bp, Homo sapien
tgcctagccacaggtaaacgaggga

SEQ ID NO: 1870658 - DNA, 25 bp, Homo sapien
cacaggtaaacgagggatcggaaag

SEQ ID NO: 1870659 - DNA, 25 bp, Homo sapien
tggaagccggcgctttggaggcgcc

SEQ ID NO: 1870660 - DNA, 25 bp, Homo sapien
agggtgatatttcggcatacagaac

SEQ ID NO: 1870661 - DNA, 25 bp, Homo sapien
ttggaggcgccggagagtgggtcta

SEQ ID NO: 1870662 - DNA, 25 bp, Homo sapien
agagtgggtctaagggtgatatttc

SEQ ID NO: 1870663 - DNA, 25 bp, Homo sapien
ccactgtcttccactgcggtagcat

SEQ ID NO: 1870664 - DNA, 25 bp, Homo sapien
ttgcgccctgctcgggaatgcaccg

SEQ ID NO: 1870665 - DNA, 25 bp, Homo sapien
gacagcacccggaggtctccggtgt

SEQ ID NO: 1870666 - DNA, 25 bp, Homo sapien
catcccgacatgacattgcagctgc

SEQ ID NO: 1870667 - DNA, 25 bp, Homo sapien
aagggagcccgcgatcatcgtggct

SEQ ID NO: 1870668 - DNA, 25 bp, Homo sapien
ccgcgatcatcgtggctgtggctcg

SEQ ID NO: 1870669 - DNA, 25 bp, Homo sapien
agcccgcgatcatcgtggctgtggc

SEQ ID NO: 1870670 - DNA, 25 bp, Homo sapien
ggagaagggagcccgcgatcatcgt

SEQ ID NO: 1870671 - DNA, 25 bp, Homo sapien
cagctggaatcggcggctgcttctg

SEQ ID NO: 1870672 - DNA, 25 bp, Homo sapien
tgaaccggggactcgcaggggcgcc

SEQ ID NO: 1870673 - DNA, 25 bp, Homo sapien
gcgcgcggggcagctggaatcggcg

SEQ ID NO: 1870674 - DNA, 25 bp, Homo sapien
atctacctccaacaccccatgtgca

SEQ ID NO: 1870675 - DNA, 25 bp, Homo sapien
gcaagggaggctctaggggcgctca

SEQ ID NO: 1870676 - DNA, 25 bp, Homo sapien
gggaggctctaggggcgctcagcac

SEQ ID NO: 1870677 - DNA, 25 bp, Homo sapien
aagggaggctctaggggcgctcagc

SEQ ID NO: 1870678 - DNA, 25 bp, Homo sapien
caagggaggctctaggggcgctcag

SEQ ID NO: 1870679 - DNA, 25 bp, Homo sapien
cgacttcccatagcgaagcttccag

SEQ ID NO: 1870680 - DNA, 25 bp, Homo sapien
gcgagagagcaaaggaacgacttcc

SEQ ID NO: 1870681 - DNA, 25 bp, Homo sapien
gctctcctccgacagcggctgagga

SEQ ID NO: 1870682 - DNA, 25 bp, Homo sapien
aggactgggcgcgagagagcaaagg

SEQ ID NO: 1870683 - DNA, 25 bp, Homo sapien
gtcggtggccaccgggcgcagggac

SEQ ID NO: 1870684 - DNA, 25 bp, Homo sapien
tgagtcggtggccaccgggcgcagg

SEQ ID NO: 1870685 - DNA, 25 bp, Homo sapien
ctgagtcggtggccaccgggcgcag

SEQ ID NO: 1870686 - DNA, 25 bp, Homo sapien
agtcggtggccaccgggcgcaggga

SEQ ID NO: 1870687 - DNA, 25 bp, Homo sapien
caatgggtatctccatggctgctcc

SEQ ID NO: 1870688 - DNA, 25 bp, Homo sapien
gctttagtgcaatgggtgatggcaa

SEQ ID NO: 1870689 - DNA, 25 bp, Homo sapien
tggctgctccttactcagcataaga

SEQ ID NO: 1870690 - DNA, 25 bp, Homo sapien
tgacgtttcttgaatatcacccagt

SEQ ID NO: 1870691 - DNA, 25 bp, Homo sapien
agcgcttgttaagcaccagtttttc

SEQ ID NO: 1870692 - DNA, 25 bp, Homo sapien
gaagcgcttgttaagcaccagtttt

SEQ ID NO: 1870693 - DNA, 25 bp, Homo sapien
tggaagcgcttgttaagcaccagtt

SEQ ID NO: 1870694 - DNA, 25 bp, Homo sapien
tctggaagcgcttgttaagcaccag

SEQ ID NO: 1870695 - DNA, 25 bp, Homo sapien
tgtgattttatgagcagatggcacc

SEQ ID NO: 1870696 - DNA, 25 bp, Homo sapien
gtgattttatgagcagatggcacca

SEQ ID NO: 1870697 - DNA, 25 bp, Homo sapien
tgaacttccaaagacttattttgtg

SEQ ID NO: 1870698 - DNA, 25 bp, Homo sapien
tctagttcactaagatgcctcatta

SEQ ID NO: 1870699 - DNA, 25 bp, Homo sapien
cgacccggccctctgatctttatta

SEQ ID NO: 1870700 - DNA, 25 bp, Homo sapien
attgacctgtgagtcatttaggagc

SEQ ID NO: 1870701 - DNA, 25 bp, Homo sapien
aggctctggagtgaaactctggctt

SEQ ID NO: 1870702 - DNA, 25 bp, Homo sapien
tagtccttaatctctagaagcctga

SEQ ID NO: 1870703 - DNA, 25 bp, Homo sapien
tatgcacagtaagcctctgtttccc

SEQ ID NO: 1870704 - DNA, 25 bp, Homo sapien
gtaaacagcctcaaatgcaacacgt

SEQ ID NO: 1870705 - DNA, 25 bp, Homo sapien
aagaaagttgtctccacattggctt

SEQ ID NO: 1870706 - DNA, 25 bp, Homo sapien
ttagcgtcagctgtcccaacgctga

SEQ ID NO: 1870707 - DNA, 25 bp, Homo sapien
tcaattagcgtcagctgtcccaacg

SEQ ID NO: 1870708 - DNA, 25 bp, Homo sapien
aattagcgtcagctgtcccaacgct

SEQ ID NO: 1870709 - DNA, 25 bp, Homo sapien
tagcgtcagctgtcccaacgctgac

SEQ ID NO: 1870710 - DNA, 25 bp, Homo sapien
cataatgctctcctacataggtgtg

SEQ ID NO: 1870711 - DNA, 25 bp, Homo sapien
ggttgtggtggaacaaagccgatat

SEQ ID NO: 1870712 - DNA, 25 bp, Homo sapien
tccagcaaaatagtgaaggcagcat

SEQ ID NO: 1870713 - DNA, 25 bp, Homo sapien
taggtgtgttccagcaaaatagtga

SEQ ID NO: 1870714 - DNA, 25 bp, Homo sapien
ttcaaaccactgtatcccatttaca

SEQ ID NO: 1870715 - DNA, 25 bp, Homo sapien
catattcatcatttggtgaagtggg

SEQ ID NO: 1870716 - DNA, 25 bp, Homo sapien
cactttaaacttcttgacagcttca

SEQ ID NO: 1870717 - DNA, 25 bp, Homo sapien
tcatttggtgaagtgggaattttac

SEQ ID NO: 1870718 - DNA, 25 bp, Homo sapien
gttttgggataccatgatgcaagga

SEQ ID NO: 1870719 - DNA, 25 bp, Homo sapien
agtaagactgccctcattctggata

SEQ ID NO: 1870720 - DNA, 25 bp, Homo sapien
cagttagtgacagagttggacagat

SEQ ID NO: 1870721 - DNA, 25 bp, Homo sapien
ccatgatgcaaggaacctatagaaa

SEQ ID NO: 1870722 - DNA, 25 bp, Homo sapien
cactcttagaaaaggcccaagtcat

SEQ ID NO: 1870723 - DNA, 25 bp, Homo sapien
gcattcctccggtcactcttagaaa

SEQ ID NO: 1870724 - DNA, 25 bp, Homo sapien
tcaatgcacagtcccacggtagcat

SEQ ID NO: 1870725 - DNA, 25 bp, Homo sapien
aatcaccagctacctcaatgcacag

SEQ ID NO: 1870726 - DNA, 25 bp, Homo sapien
acgcaatgtgcgcaactttgtcctt

SEQ ID NO: 1870727 - DNA, 25 bp, Homo sapien
tgtatctgacgcaatgtgcgcaact

SEQ ID NO: 1870728 - DNA, 25 bp, Homo sapien
agaaattgtatctgacgcaatgtgc

SEQ ID NO: 1870729 - DNA, 25 bp, Homo sapien
tctgacgcaatgtgcgcaactttgt

SEQ ID NO: 1870730 - DNA, 25 bp, Homo sapien
tttgttgcaagctgaatgggccacc

SEQ ID NO: 1870731 - DNA, 25 bp, Homo sapien
cagtataggcattctgattgaggtt

SEQ ID NO: 1870732 - DNA, 25 bp, Homo sapien
cccaagttgctagtcgaggaacagt

SEQ ID NO: 1870733 - DNA, 25 bp, Homo sapien
gcttcaatgatctcacagtataggc

SEQ ID NO: 1870734 - DNA, 25 bp, Homo sapien
cactaggcacaatagttggcgttca

SEQ ID NO: 1870735 - DNA, 25 bp, Homo sapien
cctggatccaaagggcaagtcagtt

SEQ ID NO: 1870736 - DNA, 25 bp, Homo sapien
caaggttactactatgggccactgt

SEQ ID NO: 1870737 - DNA, 25 bp, Homo sapien
tgagtttcaaggacccatgtctgcc

SEQ ID NO: 1870738 - DNA, 25 bp, Homo sapien
atttatttgatgcctaggtttctcc

SEQ ID NO: 1870739 - DNA, 25 bp, Homo sapien
tttgatgcctaggtttctccctcac

SEQ ID NO: 1870740 - DNA, 25 bp, Homo sapien
tatttgatgcctaggtttctccctc

SEQ ID NO: 1870741 - DNA, 25 bp, Homo sapien
tttatttgatgcctaggtttctccc

SEQ ID NO: 1870742 - DNA, 25 bp, Homo sapien
tgctgctgatccgtaagtaacttcg

SEQ ID NO: 1870743 - DNA, 25 bp, Homo sapien
tgatccatctgaggcgacaaaccag

SEQ ID NO: 1870744 - DNA, 25 bp, Homo sapien
taaaggtcgaaatcaagtgcgctcg

SEQ ID NO: 1870745 - DNA, 25 bp, Homo sapien
tgcttcgctgcagaaagtaactccg

SEQ ID NO: 1870746 - DNA, 25 bp, Homo sapien
ccttcagggtgttaagcagttataa

SEQ ID NO: 1870747 - DNA, 25 bp, Homo sapien
ctttagacagtagctcacagtagag

SEQ ID NO: 1870748 - DNA, 25 bp, Homo sapien
aatgtgtacctgtctttggcaatac

SEQ ID NO: 1870749 - DNA, 25 bp, Homo sapien
gaaacaagtacacaatccttcaggg

SEQ ID NO: 1870750 - DNA, 25 bp, Homo sapien
gaagtcagtcacaggtcacattggc

SEQ ID NO: 1870751 - DNA, 25 bp, Homo sapien
tcagtcacaggtcacattggcagtc

SEQ ID NO: 1870752 - DNA, 25 bp, Homo sapien
ttacgccctgccatcatattctgtt

SEQ ID NO: 1870753 - DNA, 25 bp, Homo sapien
ggagtgagacattacgccctgccat

SEQ ID NO: 1870754 - DNA, 25 bp, Homo sapien
cctcctgggttcaagtgattctcat

SEQ ID NO: 1870755 - DNA, 25 bp, Homo sapien
cagtgctgtgatcttggctcactgc

SEQ ID NO: 1870756 - DNA, 25 bp, Homo sapien
tcctgggttcaagtgattctcatac

SEQ ID NO: 1870757 - DNA, 25 bp, Homo sapien
acccatgctggagcgcagtgctgtg

SEQ ID NO: 1870758 - DNA, 25 bp, Homo sapien
cagttgtaaatagtagtttattaag

SEQ ID NO: 1870759 - DNA, 25 bp, Homo sapien
gtgttatacaactgtctcatgcttt

SEQ ID NO: 1870760 - DNA, 25 bp, Homo sapien
ttatacaactgtctcatgctttgct

SEQ ID NO: 1870761 - DNA, 25 bp, Homo sapien
gttatacaactgtctcatgctttgc

SEQ ID NO: 1870762 - DNA, 25 bp, Homo sapien
tatgaggagagccaacttttgtgca

SEQ ID NO: 1870763 - DNA, 25 bp, Homo sapien
tatgtacatgtaattggaggaccag

SEQ ID NO: 1870764 - DNA, 25 bp, Homo sapien
taaatgaacgagagctacacacagc

SEQ ID NO: 1870765 - DNA, 25 bp, Homo sapien
tttgtgcaggcacgttccacagtgc

SEQ ID NO: 1870766 - DNA, 25 bp, Homo sapien
tttatgctccttactgtgatcacag

SEQ ID NO: 1870767 - DNA, 25 bp, Homo sapien
cactaacttgtttacaggtgctgta

SEQ ID NO: 1870768 - DNA, 25 bp, Homo sapien
gagaacaggccttgtgtaacagaag

SEQ ID NO: 1870769 - DNA, 25 bp, Homo sapien
taccctgacttgctttcaataactg

SEQ ID NO: 1870770 - DNA, 25 bp, Homo sapien
ttctctggtggcacctcccgttcct

SEQ ID NO: 1870771 - DNA, 25 bp, Homo sapien
tgattctctggtggcacctcccgtt

SEQ ID NO: 1870772 - DNA, 25 bp, Homo sapien
tctctggtggcacctcccgttcctc

SEQ ID NO: 1870773 - DNA, 25 bp, Homo sapien
ccttgattctctggtggcacctccc

SEQ ID NO: 1870774 - DNA, 25 bp, Homo sapien
gggctgactgcctatgggaaccgca

SEQ ID NO: 1870775 - DNA, 25 bp, Homo sapien
gcaggagctactcccatgcaggact

SEQ ID NO: 1870776 - DNA, 25 bp, Homo sapien
gcccagcctgtgatttgtagcaagg

SEQ ID NO: 1870777 - DNA, 25 bp, Homo sapien
agtccgcgtctgtcacctggtgtga

SEQ ID NO: 1870778 - DNA, 25 bp, Homo sapien
tctgggttcttaagcttgtctccat

SEQ ID NO: 1870779 - DNA, 25 bp, Homo sapien
tactttctcaagaggaaggcagact

SEQ ID NO: 1870780 - DNA, 25 bp, Homo sapien
tctctgggttcttaagcttgtctcc

SEQ ID NO: 1870781 - DNA, 25 bp, Homo sapien
atactttctcaagaggaaggcagac

SEQ ID NO: 1870782 - DNA, 25 bp, Homo sapien
tttccaagaagtgttacactgaaaa

SEQ ID NO: 1870783 - DNA, 25 bp, Homo sapien
agtccagggccttgtataaaaagtg

SEQ ID NO: 1870784 - DNA, 25 bp, Homo sapien
ttccaagaagtgttacactgaaaag

SEQ ID NO: 1870785 - DNA, 25 bp, Homo sapien
gatgtcctacaccagcaccattttc

SEQ ID NO: 1870786 - DNA, 25 bp, Homo sapien
gggaaatgcgtgatatatgatggta

SEQ ID NO: 1870787 - DNA, 25 bp, Homo sapien
tctgggctgctagatctacttcctg

SEQ ID NO: 1870788 - DNA, 25 bp, Homo sapien
gatgccgtgagtagatgtcctacac

SEQ ID NO: 1870789 - DNA, 25 bp, Homo sapien
gcaatccagctgtttgagggatagc

SEQ ID NO: 1870790 - DNA, 25 bp, Homo sapien
cattccattggcatatctggctgaa

SEQ ID NO: 1870791 - DNA, 25 bp, Homo sapien
ttacgtgcatactgtggccaggtgg

SEQ ID NO: 1870792 - DNA, 25 bp, Homo sapien
gaactggttttcagagttacaggac

SEQ ID NO: 1870793 - DNA, 25 bp, Homo sapien
tgagaacacctgagtaccaccagtc

SEQ ID NO: 1870794 - DNA, 25 bp, Homo sapien
taagtcataactcttctgtccatct

SEQ ID NO: 1870795 - DNA, 25 bp, Homo sapien
gtaccaccagtcatgtaagtcataa

SEQ ID NO: 1870796 - DNA, 25 bp, Homo sapien
tctgagaacacctgagtaccaccag

SEQ ID NO: 1870797 - DNA, 25 bp, Homo sapien
aaaatgggctgcaatcaatcctgaa

SEQ ID NO: 1870798 - DNA, 25 bp, Homo sapien
aatgggctgcaatcaatcctgaatc

SEQ ID NO: 1870799 - DNA, 25 bp, Homo sapien
aagtccctgatctgctgttgtcaca

SEQ ID NO: 1870800 - DNA, 25 bp, Homo sapien
aaactgcagagaggatgtttcaatc

SEQ ID NO: 1870801 - DNA, 25 bp, Homo sapien
cacaaggacttcttagtgcaataat

SEQ ID NO: 1870802 - DNA, 25 bp, Homo sapien
cagtcttggtgaatggggctggacc

SEQ ID NO: 1870803 - DNA, 25 bp, Homo sapien
tctttttcacaaggacttcttagtg

SEQ ID NO: 1870804 - DNA, 25 bp, Homo sapien
tagtgcaataatattcctatgagga

SEQ ID NO: 1870805 - DNA, 25 bp, Homo sapien
ctaggcaagtgagctcagtccagct

SEQ ID NO: 1870806 - DNA, 25 bp, Homo sapien
taggcaagtgagctcagtccagctt

SEQ ID NO: 1870807 - DNA, 25 bp, Homo sapien
taagcttcctctgttgaggtctcag

SEQ ID NO: 1870808 - DNA, 25 bp, Homo sapien
tgtcttagacaccttcgccagtagc

SEQ ID NO: 1870809 - DNA, 25 bp, Homo sapien
ctgtcttagacaccttcgccagtag

SEQ ID NO: 1870810 - DNA, 25 bp, Homo sapien
ctgttttccttgaccccattgttga

SEQ ID NO: 1870811 - DNA, 25 bp, Homo sapien
tgaccccattgttgatgtcttggga

SEQ ID NO: 1870812 - DNA, 25 bp, Homo sapien
gcaggttggttgcacttgtctttct

SEQ ID NO: 1870813 - DNA, 25 bp, Homo sapien
gaagcaggttggttgcacttgtctt

SEQ ID NO: 1870814 - DNA, 25 bp, Homo sapien
aataaaataaccctgaggagtcagt

SEQ ID NO: 1870815 - DNA, 25 bp, Homo sapien
gaagggctagaggattgaatctgca

SEQ ID NO: 1870816 - DNA, 25 bp, Homo sapien
ggcctgtatcttccatgtgtataga

SEQ ID NO: 1870817 - DNA, 25 bp, Homo sapien
tctcagaattgaggcctgtatcttc

SEQ ID NO: 1870818 - DNA, 25 bp, Homo sapien
cagaactttgtagtaatctaccaca

SEQ ID NO: 1870819 - DNA, 25 bp, Homo sapien
taccacatcaatggtggagagcccc

SEQ ID NO: 1870820 - DNA, 25 bp, Homo sapien
cctctcctgtgctcttcttctgaag

SEQ ID NO: 1870821 - DNA, 25 bp, Homo sapien
cacaatgataggatgctttgggagc

SEQ ID NO: 1870822 - DNA, 25 bp, Homo sapien
tatttatcaaagtttatcctgtggt

SEQ ID NO: 1870823 - DNA, 25 bp, Homo sapien
tctctaagtggtaatcctcatacca

SEQ ID NO: 1870824 - DNA, 25 bp, Homo sapien
ttctcattccggatggcatgtcagc

SEQ ID NO: 1870825 - DNA, 25 bp, Homo sapien
tgattggcagttgagcaggagctct

SEQ ID NO: 1870826 - DNA, 25 bp, Homo sapien
ctcagattccgtaggacttgggaac

SEQ ID NO: 1870827 - DNA, 25 bp, Homo sapien
gattccgtaggacttgggaactgtc

SEQ ID NO: 1870828 - DNA, 25 bp, Homo sapien
gactcagattccgtaggacttggga

SEQ ID NO: 1870829 - DNA, 25 bp, Homo sapien
tcagactcagattccgtaggacttg

SEQ ID NO: 1870830 - DNA, 25 bp, Homo sapien
agaaggatttgcaggtctgttattc

SEQ ID NO: 1870831 - DNA, 25 bp, Homo sapien
ccttggtgatgctgtggggaattct

SEQ ID NO: 1870832 - DNA, 25 bp, Homo sapien
aagatgcttccaacttgagaaggat

SEQ ID NO: 1870833 - DNA, 25 bp, Homo sapien
tctgtggttccggtttcatttctgg

SEQ ID NO: 1870834 - DNA, 25 bp, Homo sapien
ggctgtgagtaggtctttcgcagaa

SEQ ID NO: 1870835 - DNA, 25 bp, Homo sapien
taggtctttcgcagaaaaaccttca

SEQ ID NO: 1870836 - DNA, 25 bp, Homo sapien
tgtgagtaggtctttcgcagaaaaa

SEQ ID NO: 1870837 - DNA, 25 bp, Homo sapien
tgagtaggtctttcgcagaaaaacc

SEQ ID NO: 1870838 - DNA, 25 bp, Homo sapien
ctggacgactgggaaaacttgctgg

SEQ ID NO: 1870839 - DNA, 25 bp, Homo sapien
ggtcttcattgtggtcgtccctgca

SEQ ID NO: 1870840 - DNA, 25 bp, Homo sapien
caaatccgaaggtcgatagagacag

SEQ ID NO: 1870841 - DNA, 25 bp, Homo sapien
taacggaagaaaactgactggtctc

SEQ ID NO: 1870842 - DNA, 25 bp, Homo sapien
tttcctggccttcgatgtttgtttc

SEQ ID NO: 1870843 - DNA, 25 bp, Homo sapien
tttgtttccaacttactctgcacca

SEQ ID NO: 1870844 - DNA, 25 bp, Homo sapien
tctctagttcgtgggtgtttctttg

SEQ ID NO: 1870845 - DNA, 25 bp, Homo sapien
ctttcttggacatctctctagttcg

SEQ ID NO: 1870846 - DNA, 25 bp, Homo sapien
tggtttgctctggaactccgtaatc

SEQ ID NO: 1870847 - DNA, 25 bp, Homo sapien
gtttccttgagtgagacctgtttca

SEQ ID NO: 1870848 - DNA, 25 bp, Homo sapien
gaatttcctaagagcacaatgcagt

SEQ ID NO: 1870849 - DNA, 25 bp, Homo sapien
taatggaccattaagcagcactgac

SEQ ID NO: 1870850 - DNA, 25 bp, Homo sapien
ggaagccttatcaccatgactgctg

SEQ ID NO: 1870851 - DNA, 25 bp, Homo sapien
tttggctgtggaagccttatcacca

SEQ ID NO: 1870852 - DNA, 25 bp, Homo sapien
taggcaagccgttcaccatcatctc

SEQ ID NO: 1870853 - DNA, 25 bp, Homo sapien
cttgcttttgtcaccgctgggtgtt

SEQ ID NO: 1870854 - DNA, 25 bp, Homo sapien
caaaaagttcacctccaagttagag

SEQ ID NO: 1870855 - DNA, 25 bp, Homo sapien
ccaagttagagtcatgtagctgttt

SEQ ID NO: 1870856 - DNA, 25 bp, Homo sapien
tagagtcatgtagctgtttctgcat

SEQ ID NO: 1870857 - DNA, 25 bp, Homo sapien
ttcagagataaggaattccaaaaag

SEQ ID NO: 1870858 - DNA, 25 bp, Homo sapien
ggactacgtacctgagcccttcgga

SEQ ID NO: 1870859 - DNA, 25 bp, Homo sapien
agaaagcacgcctacatctgcctgg

SEQ ID NO: 1870860 - DNA, 25 bp, Homo sapien
caacggctgtgatcgtgttctccta

SEQ ID NO: 1870861 - DNA, 25 bp, Homo sapien
gaacctcgtgcaccctggactggtg

SEQ ID NO: 1870862 - DNA, 25 bp, Homo sapien
cgacagtcggatccatagcagccat

SEQ ID NO: 1870863 - DNA, 25 bp, Homo sapien
ttcgacagtcggatccatagcagcc

SEQ ID NO: 1870864 - DNA, 25 bp, Homo sapien
tcgacagtcggatccatagcagcca

SEQ ID NO: 1870865 - DNA, 25 bp, Homo sapien
gaggcttgcatgtattgccccatac

SEQ ID NO: 1870866 - DNA, 25 bp, Homo sapien
ttagggatcaaaatcacatcatttg

SEQ ID NO: 1870867 - DNA, 25 bp, Homo sapien
atcatttgaaggtgaggcttgcatg

SEQ ID NO: 1870868 - DNA, 25 bp, Homo sapien
ttttagggatcaaaatcacatcatt

SEQ ID NO: 1870869 - DNA, 25 bp, Homo sapien
tctgaaagtccacacccttggacat

SEQ ID NO: 1870870 - DNA, 25 bp, Homo sapien
ggagccttcggacagtatatatcaa

SEQ ID NO: 1870871 - DNA, 25 bp, Homo sapien
gcttctagacccaggtaagtttcca

SEQ ID NO: 1870872 - DNA, 25 bp, Homo sapien
tctgcactaattccacctaggcttc

SEQ ID NO: 1870873 - DNA, 25 bp, Homo sapien
ggttccattctgaaagttcagcagg

SEQ ID NO: 1870874 - DNA, 25 bp, Homo sapien
tcagcaggttctttgtccctgcact

SEQ ID NO: 1870875 - DNA, 25 bp, Homo sapien
tcaatctactggctccttcagtgtc

SEQ ID NO: 1870876 - DNA, 25 bp, Homo sapien
tcagtgtcccttggttccattctga

SEQ ID NO: 1870877 - DNA, 25 bp, Homo sapien
caaagtgctgctaactgtgtgctgg

SEQ ID NO: 1870878 - DNA, 25 bp, Homo sapien
tagggaaattggagccttctggacc

SEQ ID NO: 1870879 - DNA, 25 bp, Homo sapien
tccagactagtaagaacagatgcac

SEQ ID NO: 1870880 - DNA, 25 bp, Homo sapien
cgaatacgtagtttcatgtagggca

SEQ ID NO: 1870881 - DNA, 25 bp, Homo sapien
cactgcactagccatctgagtcaga

SEQ ID NO: 1870882 - DNA, 25 bp, Homo sapien
tattcacgcttatgtcagggtaact

SEQ ID NO: 1870883 - DNA, 25 bp, Homo sapien
caagctaggatacgagcacagtccc

SEQ ID NO: 1870884 - DNA, 25 bp, Homo sapien
gaacacaagtaacaaggctacactg

SEQ ID NO: 1870885 - DNA, 25 bp, Homo sapien
aatagttccctatacccagattctc

SEQ ID NO: 1870886 - DNA, 25 bp, Homo sapien
tctcccacccaagttaatgtctgtg

SEQ ID NO: 1870887 - DNA, 25 bp, Homo sapien
ttcaaggcctatttgaagctgcatt

SEQ ID NO: 1870888 - DNA, 25 bp, Homo sapien
tgaagtattcccctttaatgccaat

SEQ ID NO: 1870889 - DNA, 25 bp, Homo sapien
gcatctttaaagagattgcaagcaa

SEQ ID NO: 1870890 - DNA, 25 bp, Homo sapien
aaacattaaggtagaactcagtgga

SEQ ID NO: 1870891 - DNA, 25 bp, Homo sapien
cagtggataagacacatgatctgat

SEQ ID NO: 1870892 - DNA, 25 bp, Homo sapien
tagcacatgatgttaaactcaaggt

SEQ ID NO: 1870893 - DNA, 25 bp, Homo sapien
gaaacagagttgatgtgctccatgc

SEQ ID NO: 1870894 - DNA, 25 bp, Homo sapien
cactcattgcttgggatttatctac

SEQ ID NO: 1870895 - DNA, 25 bp, Homo sapien
aacatgttggaacttggcgtgaaga

SEQ ID NO: 1870896 - DNA, 25 bp, Homo sapien
tattgttacctagcagggtcagggc

SEQ ID NO: 1870897 - DNA, 25 bp, Homo sapien
gtgtggccccattgcatggcactgt

SEQ ID NO: 1870898 - DNA, 25 bp, Homo sapien
catcctcacgtattttagttctatg

SEQ ID NO: 1870899 - DNA, 25 bp, Homo sapien
tcctcatcctcacgtattttagttc

SEQ ID NO: 1870900 - DNA, 25 bp, Homo sapien
ctccaagttccaactcttttacatt

SEQ ID NO: 1870901 - DNA, 25 bp, Homo sapien
tgctacagactgtaccaggagatgc

SEQ ID NO: 1870902 - DNA, 25 bp, Homo sapien
gggagacaactaacaactgccttga

SEQ ID NO: 1870903 - DNA, 25 bp, Homo sapien
gaccatgccattagctgttgggaaa

SEQ ID NO: 1870904 - DNA, 25 bp, Homo sapien
caggagatgcaagaatatgacggct

SEQ ID NO: 1870905 - DNA, 25 bp, Homo sapien
tgtgctcctaagttaaacgtgatgg

SEQ ID NO: 1870906 - DNA, 25 bp, Homo sapien
tcccactgcaaagattaggttatga

SEQ ID NO: 1870907 - DNA, 25 bp, Homo sapien
caaatgttgcctgatctaactccac

SEQ ID NO: 1870908 - DNA, 25 bp, Homo sapien
tagttttgcaacaccacgtgattct

SEQ ID NO: 1870909 - DNA, 25 bp, Homo sapien
tggggatggaactttctgtggactt

SEQ ID NO: 1870910 - DNA, 25 bp, Homo sapien
tgtggactttaggcccttaagacca

SEQ ID NO: 1870911 - DNA, 25 bp, Homo sapien
ctggggatggaactttctgtggact

SEQ ID NO: 1870912 - DNA, 25 bp, Homo sapien
ttctgtggactttaggcccttaaga

SEQ ID NO: 1870913 - DNA, 25 bp, Homo sapien
tagggagaggtgcatacaagctacc

SEQ ID NO: 1870914 - DNA, 25 bp, Homo sapien
tctctaaagagtactacggtgtcct

SEQ ID NO: 1870915 - DNA, 25 bp, Homo sapien
cataatattagatctgccctggtca

SEQ ID NO: 1870916 - DNA, 25 bp, Homo sapien
gaaagggccacttacatgatacaac

SEQ ID NO: 1870917 - DNA, 25 bp, Homo sapien
tatgagatcatggtctggaggctac

SEQ ID NO: 1870918 - DNA, 25 bp, Homo sapien
gattatgggcaataattttccccac

SEQ ID NO: 1870919 - DNA, 25 bp, Homo sapien
ggaggctactcgtaccaaataccag

SEQ ID NO: 1870920 - DNA, 25 bp, Homo sapien
ctgacacaatggagaagacatagat

SEQ ID NO: 1870921 - DNA, 25 bp, Homo sapien
tgtgaagtcatccaaagcaaaagtc

SEQ ID NO: 1870922 - DNA, 25 bp, Homo sapien
tagtccaagtaagcacccaacaggt

SEQ ID NO: 1870923 - DNA, 25 bp, Homo sapien
gactttctagggaaaagccagccta

SEQ ID NO: 1870924 - DNA, 25 bp, Homo sapien
tgtgcacccttagactcatgtatgg

SEQ ID NO: 1870925 - DNA, 25 bp, Homo sapien
taatgtcattaagcccagaacgccc

SEQ ID NO: 1870926 - DNA, 25 bp, Homo sapien
tatgtttgtgaatgggctggcaccc

SEQ ID NO: 1870927 - DNA, 25 bp, Homo sapien
catactgtggtgacgtgatccgggt

SEQ ID NO: 1870928 - DNA, 25 bp, Homo sapien
tgatctgtaagcaccccatgaagga

SEQ ID NO: 1870929 - DNA, 25 bp, Homo sapien
catcagaataggcatctgctatcct

SEQ ID NO: 1870930 - DNA, 25 bp, Homo sapien
tccgccatccggacagaagctcaaa

SEQ ID NO: 1870931 - DNA, 25 bp, Homo sapien
gaagggcaagttctctttggttctc

SEQ ID NO: 1870932 - DNA, 25 bp, Homo sapien
ggtataggtgaccatcacatcagaa

SEQ ID NO: 1870933 - DNA, 25 bp, Homo sapien
gatgtctttactgccccagctgagt

SEQ ID NO: 1870934 - DNA, 25 bp, Homo sapien
catggagaacgttccaaattgttgg

SEQ ID NO: 1870935 - DNA, 25 bp, Homo sapien
cttctgaatgcagcttggttactga

SEQ ID NO: 1870936 - DNA, 25 bp, Homo sapien
ttggacttggaatgccaacttctga

SEQ ID NO: 1870937 - DNA, 25 bp, Homo sapien
tgtagtgggtagtgacactgtcttc

SEQ ID NO: 1870938 - DNA, 25 bp, Homo sapien
gtgacactgtcttctaatgtgatga

SEQ ID NO: 1870939 - DNA, 25 bp, Homo sapien
gaattgttatacttctttcattttc

SEQ ID NO: 1870940 - DNA, 25 bp, Homo sapien
tcattttctgtactgtagtgggtag

SEQ ID NO: 1870941 - DNA, 25 bp, Homo sapien
cacagctgttaagcacagggaggaa

SEQ ID NO: 1870942 - DNA, 25 bp, Homo sapien
aagacagtatgggttacagacacac

SEQ ID NO: 1870943 - DNA, 25 bp, Homo sapien
ccaatttagtttcccatgagaggag

SEQ ID NO: 1870944 - DNA, 25 bp, Homo sapien
tctgtatcagattaagcaagttccc

SEQ ID NO: 1870945 - DNA, 25 bp, Homo sapien
ctagcttgaggtaaattcagtggag

SEQ ID NO: 1870946 - DNA, 25 bp, Homo sapien
tagcttgaggtaaattcagtggaga

SEQ ID NO: 1870947 - DNA, 25 bp, Homo sapien
gagctctctaaaaagagcgcttttg

SEQ ID NO: 1870948 - DNA, 25 bp, Homo sapien
tgagccaattttgtatgtccataaa

SEQ ID NO: 1870949 - DNA, 25 bp, Homo sapien
aaataaattgtcttggagctctcta

SEQ ID NO: 1870950 - DNA, 25 bp, Homo sapien
tgtccataaataacccatgtacact

SEQ ID NO: 1870951 - DNA, 25 bp, Homo sapien
gttggcgttgaaagtcctaagcatc

SEQ ID NO: 1870952 - DNA, 25 bp, Homo sapien
aaaggtggttacatcagctctgaag

SEQ ID NO: 1870953 - DNA, 25 bp, Homo sapien
cctaagcatctttcgcagattaaag

SEQ ID NO: 1870954 - DNA, 25 bp, Homo sapien
tattggttggcgttgaaagtcctaa

SEQ ID NO: 1870955 - DNA, 25 bp, Homo sapien
gataccattgactgtctcagtgcaa

SEQ ID NO: 1870956 - DNA, 25 bp, Homo sapien
gactgggtggtgatactgtaagaat

SEQ ID NO: 1870957 - DNA, 25 bp, Homo sapien
tgaggatggactgggtggtgatact

SEQ ID NO: 1870958 - DNA, 25 bp, Homo sapien
ggtggtgatactgtaagaatccttt

SEQ ID NO: 1870959 - DNA, 25 bp, Homo sapien
agtgtgagcaaagaccggtgactgc

SEQ ID NO: 1870960 - DNA, 25 bp, Homo sapien
gatattctcctctcggttcctgtgg

SEQ ID NO: 1870961 - DNA, 25 bp, Homo sapien
gctgaaagatttccgagctgcagaa

SEQ ID NO: 1870962 - DNA, 25 bp, Homo sapien
gactgtgcagtgtggctcaagataa

SEQ ID NO: 1870963 - DNA, 25 bp, Homo sapien
aaattgcctaggtggaaactggcca

SEQ ID NO: 1870964 - DNA, 25 bp, Homo sapien
caaattgcctaggtggaaactggcc

SEQ ID NO: 1870965 - DNA, 25 bp, Homo sapien
gaaggagcagaaatgttaatggagg

SEQ ID NO: 1870966 - DNA, 25 bp, Homo sapien
aggagcagaaatgttaatggaggag

SEQ ID NO: 1870967 - DNA, 25 bp, Homo sapien
ccaattatgaaagagctagacctag

SEQ ID NO: 1870968 - DNA, 25 bp, Homo sapien
gtaggcagccttgaaccaaactttc

SEQ ID NO: 1870969 - DNA, 25 bp, Homo sapien
ggcgaagactaccacaactattgag

SEQ ID NO: 1870970 - DNA, 25 bp, Homo sapien
cagcaggatggaccattttgagcca

SEQ ID NO: 1870971 - DNA, 25 bp, Homo sapien
tgtgctgatgtcttactgactagtg

SEQ ID NO: 1870972 - DNA, 25 bp, Homo sapien
ttttggtagcttctactgcctgagc

SEQ ID NO: 1870973 - DNA, 25 bp, Homo sapien
ttactgctcagtcctactgggattc

SEQ ID NO: 1870974 - DNA, 25 bp, Homo sapien
cctactgggattcctttgctgaatg

SEQ ID NO: 1870975 - DNA, 25 bp, Homo sapien
gccaggtattatttgctgttgaatg

SEQ ID NO: 1870976 - DNA, 25 bp, Homo sapien
tattatttgctgttgaatgtgaccc

SEQ ID NO: 1870977 - DNA, 25 bp, Homo sapien
atgtgaccctctttctggccccttt

SEQ ID NO: 1870978 - DNA, 25 bp, Homo sapien
gctgttgaatgtgaccctctttctg

SEQ ID NO: 1870979 - DNA, 25 bp, Homo sapien
cacctatcaaccctaaccttcttgg

SEQ ID NO: 1870980 - DNA, 25 bp, Homo sapien
aactagaagtttgctagctactaat

SEQ ID NO: 1870981 - DNA, 25 bp, Homo sapien
agaagtttgctagctactaatcttg

SEQ ID NO: 1870982 - DNA, 25 bp, Homo sapien
ggtttgccacacctatcaaccctaa

SEQ ID NO: 1870983 - DNA, 25 bp, Homo sapien
tggcttttgacattcaggaggacac

SEQ ID NO: 1870984 - DNA, 25 bp, Homo sapien
tgtggagacccttcttaagtggcag

SEQ ID NO: 1870985 - DNA, 25 bp, Homo sapien
taagtggcagttccctagattagga

SEQ ID NO: 1870986 - DNA, 25 bp, Homo sapien
tgtaacccctagaggcgtcatggtg

SEQ ID NO: 1870987 - DNA, 25 bp, Homo sapien
catagatacactaaagggccatttc

SEQ ID NO: 1870988 - DNA, 25 bp, Homo sapien
gccatagctttagaacaatgtcaca

SEQ ID NO: 1870989 - DNA, 25 bp, Homo sapien
gaatgtgctaattccttgaggctac

SEQ ID NO: 1870990 - DNA, 25 bp, Homo sapien
caagggttgctcaagatgagaagtc

SEQ ID NO: 1870991 - DNA, 25 bp, Homo sapien
taaatctttacggaaacttgtcatg

SEQ ID NO: 1870992 - DNA, 25 bp, Homo sapien
aagtgcatggtcagaatcaggagag

SEQ ID NO: 1870993 - DNA, 25 bp, Homo sapien
tacggaaacttgtcatgtgaaatat

SEQ ID NO: 1870994 - DNA, 25 bp, Homo sapien
gagcaaagtgcatggtcagaatcag

SEQ ID NO: 1870995 - DNA, 25 bp, Homo sapien
tgcgcaagcagtccttcatggagct

SEQ ID NO: 1870996 - DNA, 25 bp, Homo sapien
ggtcttatgaaagtccctccagagg

SEQ ID NO: 1870997 - DNA, 25 bp, Homo sapien
tggtcaggatcagcacgaggctcac

SEQ ID NO: 1870998 - DNA, 25 bp, Homo sapien
ccaggaagggcttactgcgcaagca

SEQ ID NO: 1870999 - DNA, 25 bp, Homo sapien
aaaagaagagacttcagttacggat

SEQ ID NO: 1871000 - DNA, 25 bp, Homo sapien
tacggatgtatattccagggaatag

SEQ ID NO: 1871001 - DNA, 25 bp, Homo sapien
ttcagttacggatgtatattccagg

SEQ ID NO: 1871002 - DNA, 25 bp, Homo sapien
tatattccagggaatagattcttac

SEQ ID NO: 1871003 - DNA, 25 bp, Homo sapien
tatattcaacatttggagctacatg

SEQ ID NO: 1871004 - DNA, 25 bp, Homo sapien
caacatttggagctacatgggatac

SEQ ID NO: 1871005 - DNA, 25 bp, Homo sapien
ggtggagaggcaagttagaatttta

SEQ ID NO: 1871006 - DNA, 25 bp, Homo sapien
agataggtgctagtaattgtgaaac

SEQ ID NO: 1871007 - DNA, 25 bp, Homo sapien
agtgttaacattttctgggctgatg

SEQ ID NO: 1871008 - DNA, 25 bp, Homo sapien
ttgcaagagtgttaacattttctgg

SEQ ID NO: 1871009 - DNA, 25 bp, Homo sapien
ctttgcaagagtgttaacattttct

SEQ ID NO: 1871010 - DNA, 25 bp, Homo sapien
aagagtgttaacattttctgggctg

SEQ ID NO: 1871011 - DNA, 25 bp, Homo sapien
tgacttctcccattgccttaatttt

SEQ ID NO: 1871012 - DNA, 25 bp, Homo sapien
ctgacttctcccattgccttaattt

SEQ ID NO: 1871013 - DNA, 25 bp, Homo sapien
ctccagtcggccctgcatctaaatt

SEQ ID NO: 1871014 - DNA, 25 bp, Homo sapien
tccagtcggccctgcatctaaattg

SEQ ID NO: 1871015 - DNA, 25 bp, Homo sapien
ccagtcggccctgcatctaaattgt

SEQ ID NO: 1871016 - DNA, 25 bp, Homo sapien
gaagtgtcagttatagtctcagtac

SEQ ID NO: 1871017 - DNA, 25 bp, Homo sapien
cctcagggtccagcataggttcaag

SEQ ID NO: 1871018 - DNA, 25 bp, Homo sapien
ttaacgcatcttcattccctcaggg

SEQ ID NO: 1871019 - DNA, 25 bp, Homo sapien
ggttcaagtatataagggatcctca

SEQ ID NO: 1871020 - DNA, 25 bp, Homo sapien
gcaaaactacatagctggaccaatg

SEQ ID NO: 1871021 - DNA, 25 bp, Homo sapien
tagagtcaaccagttaggcagcaca

SEQ ID NO: 1871022 - DNA, 25 bp, Homo sapien
tcttagtggctttcactgggaatcc

SEQ ID NO: 1871023 - DNA, 25 bp, Homo sapien
tatagctgttacaaaccactcctgg

SEQ ID NO: 1871024 - DNA, 25 bp, Homo sapien
gaaaccctgacctagagaacttaca

SEQ ID NO: 1871025 - DNA, 25 bp, Homo sapien
gatgattgacaacattcactgtgag

SEQ ID NO: 1871026 - DNA, 25 bp, Homo sapien
gagggtcctacattgggctgttcca

SEQ ID NO: 1871027 - DNA, 25 bp, Homo sapien
caatgttcatagatccagagcagtg

SEQ ID NO: 1871028 - DNA, 25 bp, Homo sapien
caaaatttgtggcagaaagacctca

SEQ ID NO: 1871029 - DNA, 25 bp, Homo sapien
gagaagtgtcacgatattagtcagg

SEQ ID NO: 1871030 - DNA, 25 bp, Homo sapien
ttctattctacaaagccaagttgtg

SEQ ID NO: 1871031 - DNA, 25 bp, Homo sapien
gaaaactaggtatcaacatggctta

SEQ ID NO: 1871032 - DNA, 25 bp, Homo sapien
gtgccttttaaagtgtctccggaca

SEQ ID NO: 1871033 - DNA, 25 bp, Homo sapien
ccaatgataagcaatccgggacatc

SEQ ID NO: 1871034 - DNA, 25 bp, Homo sapien
caggcaggaaaatggtaccgtggta

SEQ ID NO: 1871035 - DNA, 25 bp, Homo sapien
gggacatcttaggagcatagcaaat

SEQ ID NO: 1871036 - DNA, 25 bp, Homo sapien
tatagatgaccgagacactgagtct

SEQ ID NO: 1871037 - DNA, 25 bp, Homo sapien
tgtttcagcagatcccgaattaggt

SEQ ID NO: 1871038 - DNA, 25 bp, Homo sapien
caagactgagcaccctttaagtgga

SEQ ID NO: 1871039 - DNA, 25 bp, Homo sapien
tggaatcggaatcaactgcagggct

SEQ ID NO: 1871040 - DNA, 25 bp, Homo sapien
tgtaaatacaagcactagaggaccc

SEQ ID NO: 1871041 - DNA, 25 bp, Homo sapien
tcttgggagttcttggctgtgcagc

SEQ ID NO: 1871042 - DNA, 25 bp, Homo sapien
tactgctaagcctcacgagagtgag

SEQ ID NO: 1871043 - DNA, 25 bp, Homo sapien
cagcttctgggcatgaacagggtca

SEQ ID NO: 1871044 - DNA, 25 bp, Homo sapien
ttcttaatatctagtcataccattc

SEQ ID NO: 1871045 - DNA, 25 bp, Homo sapien
gtcttaaggatgagacctctgcatt

SEQ ID NO: 1871046 - DNA, 25 bp, Homo sapien
gaatttcttaatatctagtcatacc

SEQ ID NO: 1871047 - DNA, 25 bp, Homo sapien
agcttctgagtcttaaggatgagac

SEQ ID NO: 1871048 - DNA, 25 bp, Homo sapien
atgaagtgctgcctctttaattggc

SEQ ID NO: 1871049 - DNA, 25 bp, Homo sapien
agaaatgaagtgctgcctctttaat

SEQ ID NO: 1871050 - DNA, 25 bp, Homo sapien
aaatgaagtgctgcctctttaattg

SEQ ID NO: 1871051 - DNA, 25 bp, Homo sapien
gaagtgctgcctctttaattggcag

SEQ ID NO: 1871052 - DNA, 25 bp, Homo sapien
tttaatttagtgttgggatacctca

SEQ ID NO: 1871053 - DNA, 25 bp, Homo sapien
ttaatttagtgttgggatacctcac

SEQ ID NO: 1871054 - DNA, 25 bp, Homo sapien
gaaataatatcatccagcacgcatt

SEQ ID NO: 1871055 - DNA, 25 bp, Homo sapien
gtcttattggagacggcagcctgcc

SEQ ID NO: 1871056 - DNA, 25 bp, Homo sapien
agtataattatagcccttgtggttc

SEQ ID NO: 1871057 - DNA, 25 bp, Homo sapien
gcagcctgcctgagatcctctagca

SEQ ID NO: 1871058 - DNA, 25 bp, Homo sapien
ggttgagcgcgctgaggccgaaggt

SEQ ID NO: 1871059 - DNA, 25 bp, Homo sapien
tggaagcggttgagcgcgctgaggc

SEQ ID NO: 1871060 - DNA, 25 bp, Homo sapien
tccagcacggctcggtgggtctgca

SEQ ID NO: 1871061 - DNA, 25 bp, Homo sapien
ttcatttccagcacggctcggtggg

SEQ ID NO: 1871062 - DNA, 25 bp, Homo sapien
agcctgtggcagaacgactggagcc

SEQ ID NO: 1871063 - DNA, 25 bp, Homo sapien
gtggcagaacgactggagccctctg

SEQ ID NO: 1871064 - DNA, 25 bp, Homo sapien
gcctgtggcagaacgactggagccc

SEQ ID NO: 1871065 - DNA, 25 bp, Homo sapien
cagcctgtggcagaacgactggagc

SEQ ID NO: 1871066 - DNA, 25 bp, Homo sapien
caccagatccagctcgcaggcgctc

SEQ ID NO: 1871067 - DNA, 25 bp, Homo sapien
tccaccagatccagctcgcaggcgc

SEQ ID NO: 1871068 - DNA, 25 bp, Homo sapien
ccagatccagctcgcaggcgctccc

SEQ ID NO: 1871069 - DNA, 25 bp, Homo sapien
agatccagctcgcaggcgctcccgg

SEQ ID NO: 1871070 - DNA, 25 bp, Homo sapien
ttcatctcggtgctgcagtcccctg

SEQ ID NO: 1871071 - DNA, 25 bp, Homo sapien
atgagcagcgttccctcggtctagc

SEQ ID NO: 1871072 - DNA, 25 bp, Homo sapien
tccctcgctggaggtggttccgtgt

SEQ ID NO: 1871073 - DNA, 25 bp, Homo sapien
gttccgtgtggagcgtcccacagat

SEQ ID NO: 1871074 - DNA, 25 bp, Homo sapien
gcttttcagcgaagaaaaggagcag

SEQ ID NO: 1871075 - DNA, 25 bp, Homo sapien
gcaagggcaattagagcccaaggag

SEQ ID NO: 1871076 - DNA, 25 bp, Homo sapien
ccatgtgcctcggtgttgtaagaag

SEQ ID NO: 1871077 - DNA, 25 bp, Homo sapien
taagaagcagacatgtgccccataa

SEQ ID NO: 1871078 - DNA, 25 bp, Homo sapien
caagggatttcctcgcaacaccttc

SEQ ID NO: 1871079 - DNA, 25 bp, Homo sapien
agaccagtccgctgcagctgagggc

SEQ ID NO: 1871080 - DNA, 25 bp, Homo sapien
acagcatgcaagggatttcctcgca

SEQ ID NO: 1871081 - DNA, 25 bp, Homo sapien
tcctcgctgtgattccacagaccag

SEQ ID NO: 1871082 - DNA, 25 bp, Homo sapien
catttgccaatagcagtagcctgtg

SEQ ID NO: 1871083 - DNA, 25 bp, Homo sapien
cacccatgaggactgtttcaagcca

SEQ ID NO: 1871084 - DNA, 25 bp, Homo sapien
tattgaaagtgaagatctacaggca

SEQ ID NO: 1871085 - DNA, 25 bp, Homo sapien
tatccctggtgcgttgggaccgtct

SEQ ID NO: 1871086 - DNA, 25 bp, Homo sapien
tcagaaacagcgacaatgcttaagg

SEQ ID NO: 1871087 - DNA, 25 bp, Homo sapien
aagtgacttcaaggccaccctcaga

SEQ ID NO: 1871088 - DNA, 25 bp, Homo sapien
gaaagttttggctatacagcagaga

SEQ ID NO: 1871089 - DNA, 25 bp, Homo sapien
taaattgaaagtgaccttggcggcc

SEQ ID NO: 1871090 - DNA, 25 bp, Homo sapien
gaaaagagccggaagaagcacacct

SEQ ID NO: 1871091 - DNA, 25 bp, Homo sapien
gaaaggaatcaagctcaggcctgga

SEQ ID NO: 1871092 - DNA, 25 bp, Homo sapien
gatgatcaggcagcaaactcaccct

SEQ ID NO: 1871093 - DNA, 25 bp, Homo sapien
tgatttgcacttaacctccagggag

SEQ ID NO: 1871094 - DNA, 25 bp, Homo sapien
tgcttaaccactatatcaccttggt

SEQ ID NO: 1871095 - DNA, 25 bp, Homo sapien
aatgacgtttgccacatctcttgac

SEQ ID NO: 1871096 - DNA, 25 bp, Homo sapien
tgtacatagcttaattaagaaatcc

SEQ ID NO: 1871097 - DNA, 25 bp, Homo sapien
catagcctgttagttgtcaatagca

SEQ ID NO: 1871098 - DNA, 25 bp, Homo sapien
tgtatgtttctgatacttgtttctg

SEQ ID NO: 1871099 - DNA, 25 bp, Homo sapien
gcattgtatgtttctgatacttgtt

SEQ ID NO: 1871100 - DNA, 25 bp, Homo sapien
ttttagcattgtatgtttctgatac

SEQ ID NO: 1871101 - DNA, 25 bp, Homo sapien
aggatctaaacaaagttcattatgg

SEQ ID NO: 1871102 - DNA, 25 bp, Homo sapien
taaagaggcatggaaaccacgttta

SEQ ID NO: 1871103 - DNA, 25 bp, Homo sapien
gatgtgtacattaaaagcgggcagc

SEQ ID NO: 1871104 - DNA, 25 bp, Homo sapien
tttattcaatgcactcaccaaagag

SEQ ID NO: 1871105 - DNA, 25 bp, Homo sapien
ggcaaggtgggcaagtacaaaaata

SEQ ID NO: 1871106 - DNA, 25 bp, Homo sapien
ttatgcctaccttaatgattagggc

SEQ ID NO: 1871107 - DNA, 25 bp, Homo sapien
tcacaaagccagttgagcaaaacct

SEQ ID NO: 1871108 - DNA, 25 bp, Homo sapien
taaacgtcaatccacttaatcagct

SEQ ID NO: 1871109 - DNA, 25 bp, Homo sapien
catgtgtgtctcatcttatgcctac

SEQ ID NO: 1871110 - DNA, 25 bp, Homo sapien
ggtgaatcactccaagccatagaat

SEQ ID NO: 1871111 - DNA, 25 bp, Homo sapien
ccctggcatgcttcgcttgataaaa

SEQ ID NO: 1871112 - DNA, 25 bp, Homo sapien
tcctgcaaggcacatattttagagt

SEQ ID NO: 1871113 - DNA, 25 bp, Homo sapien
gcattaattcttgcaggattcctgc

SEQ ID NO: 1871114 - DNA, 25 bp, Homo sapien
aaaggcacagacacataaggggaca

SEQ ID NO: 1871115 - DNA, 25 bp, Homo sapien
taaatggggatgtcttgaaattcct

SEQ ID NO: 1871116 - DNA, 25 bp, Homo sapien
tgtggaagaaatcggcaaaggcaca

SEQ ID NO: 1871117 - DNA, 25 bp, Homo sapien
ggatagagattgaatgtggaagaaa

SEQ ID NO: 1871118 - DNA, 25 bp, Homo sapien
cagcagttgctagcgtgctggacag

SEQ ID NO: 1871119 - DNA, 25 bp, Homo sapien
agggccagcagttgctagcgtgctg

SEQ ID NO: 1871120 - DNA, 25 bp, Homo sapien
tggtaacgggccttgaagaagcagg

SEQ ID NO: 1871121 - DNA, 25 bp, Homo sapien
tgctggacaggtggtaacgggcctt

SEQ ID NO: 1871122 - DNA, 25 bp, Homo sapien
tgatttcaggcatatccccctttcc

SEQ ID NO: 1871123 - DNA, 25 bp, Homo sapien
ttgatttcaggcatatccccctttc

SEQ ID NO: 1871124 - DNA, 25 bp, Homo sapien
ttcaggcatatccccctttcccttg

SEQ ID NO: 1871125 - DNA, 25 bp, Homo sapien
aggcatatccccctttcccttgtag

SEQ ID NO: 1871126 - DNA, 25 bp, Homo sapien
gagctgggatgtagcaaactcctca

SEQ ID NO: 1871127 - DNA, 25 bp, Homo sapien
gtggagctgggatgtagcaaactcc

SEQ ID NO: 1871128 - DNA, 25 bp, Homo sapien
ctgggatgtagcaaactcctcactc

SEQ ID NO: 1871129 - DNA, 25 bp, Homo sapien
gctgggatgtagcaaactcctcact

SEQ ID NO: 1871130 - DNA, 25 bp, Homo sapien
attggcgcatggaggcaacaacaga

SEQ ID NO: 1871131 - DNA, 25 bp, Homo sapien
ctggctttcggtttggattggcgca

SEQ ID NO: 1871132 - DNA, 25 bp, Homo sapien
caacaacagaattggagagtgagag

SEQ ID NO: 1871133 - DNA, 25 bp, Homo sapien
tgtggttggtagtggctgcatccct

SEQ ID NO: 1871134 - DNA, 25 bp, Homo sapien
tgcctccattggtatgtgagtggtt

SEQ ID NO: 1871135 - DNA, 25 bp, Homo sapien
tgtgcctccattggtatgtgagtgg

SEQ ID NO: 1871136 - DNA, 25 bp, Homo sapien
ctgtgcctccattggtatgtgagtg

SEQ ID NO: 1871137 - DNA, 25 bp, Homo sapien
cctccattggtatgtgagtggttca

SEQ ID NO: 1871138 - DNA, 25 bp, Homo sapien
caagattcgcgatgaagacaatgtc

SEQ ID NO: 1871139 - DNA, 25 bp, Homo sapien
gacaatgtcaggagtagttcagcaa

SEQ ID NO: 1871140 - DNA, 25 bp, Homo sapien
gggaacctggttatacatctcatgc

SEQ ID NO: 1871141 - DNA, 25 bp, Homo sapien
tgctcattgtctcagatgggaacct

SEQ ID NO: 1871142 - DNA, 25 bp, Homo sapien
tacgctgtgttatttcagggattac

SEQ ID NO: 1871143 - DNA, 25 bp, Homo sapien
gaatgtctctgttcacaaagtttgc

SEQ ID NO: 1871144 - DNA, 25 bp, Homo sapien
caaagtttgctggtgaacaagactc

SEQ ID NO: 1871145 - DNA, 25 bp, Homo sapien
ggttaggtggtctcctacgctgtgt

SEQ ID NO: 1871146 - DNA, 25 bp, Homo sapien
ttgagggtttgtttgtgtaacgata

SEQ ID NO: 1871147 - DNA, 25 bp, Homo sapien
tgtttgtgtaacgatagatcaagat

SEQ ID NO: 1871148 - DNA, 25 bp, Homo sapien
attttatgaacattagtaacacaaa

SEQ ID NO: 1871149 - DNA, 25 bp, Homo sapien
gtgtaacgatagatcaagattttgc

SEQ ID NO: 1871150 - DNA, 25 bp, Homo sapien
caaagacatcgttgattttctgtct

SEQ ID NO: 1871151 - DNA, 25 bp, Homo sapien
tattcaaagacatcgttgattttct

SEQ ID NO: 1871152 - DNA, 25 bp, Homo sapien
ttgcagtgtcgaatgtttaggcagg

SEQ ID NO: 1871153 - DNA, 25 bp, Homo sapien
aataacatcttgcagtgtcgaatgt

SEQ ID NO: 1871154 - DNA, 25 bp, Homo sapien
tagttatcactgccaaaaatttttc

SEQ ID NO: 1871155 - DNA, 25 bp, Homo sapien
tatatccaccaccttggtttgcata

SEQ ID NO: 1871156 - DNA, 25 bp, Homo sapien
tatccaccaccttggtttgcatatc

SEQ ID NO: 1871157 - DNA, 25 bp, Homo sapien
atatccaccaccttggtttgcatat

SEQ ID NO: 1871158 - DNA, 25 bp, Homo sapien
ccaaatccattctatccaccatcat

SEQ ID NO: 1871159 - DNA, 25 bp, Homo sapien
actactaaaaccaggaccactgcca

SEQ ID NO: 1871160 - DNA, 25 bp, Homo sapien
aaatccattctatccaccatcatct

SEQ ID NO: 1871161 - DNA, 25 bp, Homo sapien
taaaaccaggaccactgccatagct

SEQ ID NO: 1871162 - DNA, 25 bp, Homo sapien
gtttcctccatgacccataaaatta

SEQ ID NO: 1871163 - DNA, 25 bp, Homo sapien
ccaccaaagcttccatcacagccaa

SEQ ID NO: 1871164 - DNA, 25 bp, Homo sapien
atcacagccaaaattaccttcacca

SEQ ID NO: 1871165 - DNA, 25 bp, Homo sapien
ttccaccaaagcttccatcacagcc

SEQ ID NO: 1871166 - DNA, 25 bp, Homo sapien
ctccatgacctctctgtgatccagc

SEQ ID NO: 1871167 - DNA, 25 bp, Homo sapien
ccatgacctctctgtgatccagcag

SEQ ID NO: 1871168 - DNA, 25 bp, Homo sapien
atgacctctctgtgatccagcagac

SEQ ID NO: 1871169 - DNA, 25 bp, Homo sapien
catgacctctctgtgatccagcaga

SEQ ID NO: 1871170 - DNA, 25 bp, Homo sapien
tcactcctaaatggagaccaggatt

SEQ ID NO: 1871171 - DNA, 25 bp, Homo sapien
cactcctaaatggagaccaggattt

SEQ ID NO: 1871172 - DNA, 25 bp, Homo sapien
acacacctatcaactttgtgtggtc

SEQ ID NO: 1871173 - DNA, 25 bp, Homo sapien
acctatcaactttgtgtggtcgagc

SEQ ID NO: 1871174 - DNA, 25 bp, Homo sapien
aagctcagaccaccagtaaagagtt

SEQ ID NO: 1871175 - DNA, 25 bp, Homo sapien
tcttcaacataagaataagtcacaa

SEQ ID NO: 1871176 - DNA, 25 bp, Homo sapien
tgcatccacctcttcaacataagaa

SEQ ID NO: 1871177 - DNA, 25 bp, Homo sapien
gaccaccagtaaagagttttctcaa

SEQ ID NO: 1871178 - DNA, 25 bp, Homo sapien
tactgggaggcagtttcacctccat

SEQ ID NO: 1871179 - DNA, 25 bp, Homo sapien
gctactgggaggcagtttcacctcc

SEQ ID NO: 1871180 - DNA, 25 bp, Homo sapien
ctactgggaggcagtttcacctcca

SEQ ID NO: 1871181 - DNA, 25 bp, Homo sapien
tgagacgcccctgttgaaccatcat

SEQ ID NO: 1871182 - DNA, 25 bp, Homo sapien
cataacagcaccctgttgagacgcc

SEQ ID NO: 1871183 - DNA, 25 bp, Homo sapien
aagatttatcttaacagcagtggaa

SEQ ID NO: 1871184 - DNA, 25 bp, Homo sapien
catgcaaagctttctgcaagaatgc

SEQ ID NO: 1871185 - DNA, 25 bp, Homo sapien
ctggcaagctctttgtttgtcaaac

SEQ ID NO: 1871186 - DNA, 25 bp, Homo sapien
gactggcaagctctttgtttgtcaa

SEQ ID NO: 1871187 - DNA, 25 bp, Homo sapien
actggcaagctctttgtttgtcaaa

SEQ ID NO: 1871188 - DNA, 25 bp, Homo sapien
tggcaagctctttgtttgtcaaact

SEQ ID NO: 1871189 - DNA, 25 bp, Homo sapien
agataccgaagaggcagaatttgca

SEQ ID NO: 1871190 - DNA, 25 bp, Homo sapien
aataatccaggaataatctgacagg

SEQ ID NO: 1871191 - DNA, 25 bp, Homo sapien
cacaataatccaggaataatctgac

SEQ ID NO: 1871192 - DNA, 25 bp, Homo sapien
gggcagagtccagagataccgaaga

SEQ ID NO: 1871193 - DNA, 25 bp, Homo sapien
agttcgatgtggattctgtgactaa

SEQ ID NO: 1871194 - DNA, 25 bp, Homo sapien
tcatacgtagttcgatgtggattct

SEQ ID NO: 1871195 - DNA, 25 bp, Homo sapien
tcgatgtggattctgtgactaatct

SEQ ID NO: 1871196 - DNA, 25 bp, Homo sapien
cgtagttcgatgtggattctgtgac

SEQ ID NO: 1871197 - DNA, 25 bp, Homo sapien
gtatccaaaagccaccttaagcagc

SEQ ID NO: 1871198 - DNA, 25 bp, Homo sapien
aaaagccaccttaagcagctcttct

SEQ ID NO: 1871199 - DNA, 25 bp, Homo sapien
tttgtatccaaaagccaccttaagc

SEQ ID NO: 1871200 - DNA, 25 bp, Homo sapien
ttctttgtatccaaaagccacctta

SEQ ID NO: 1871201 - DNA, 25 bp, Homo sapien
taggtgtaagttcattgcttcagcc

SEQ ID NO: 1871202 - DNA, 25 bp, Homo sapien
gtaagttcattgcttcagccctgtt

SEQ ID NO: 1871203 - DNA, 25 bp, Homo sapien
ggtgtaagttcattgcttcagccct

SEQ ID NO: 1871204 - DNA, 25 bp, Homo sapien
tgtaagttcattgcttcagccctgt

SEQ ID NO: 1871205 - DNA, 25 bp, Homo sapien
gccaagccgatcaagaccacttgaa

SEQ ID NO: 1871206 - DNA, 25 bp, Homo sapien
tttctcgtctgccaagccgatcaag

SEQ ID NO: 1871207 - DNA, 25 bp, Homo sapien
tctgtagaaggggcaagccctcttt

SEQ ID NO: 1871208 - DNA, 25 bp, Homo sapien
gccgatcaagaccacttgaatagag

SEQ ID NO: 1871209 - DNA, 25 bp, Homo sapien
ttggggacaaataaacatctctacg

SEQ ID NO: 1871210 - DNA, 25 bp, Homo sapien
ggacaaataaacatctctacgagag

SEQ ID NO: 1871211 - DNA, 25 bp, Homo sapien
ggggacaaataaacatctctacgag

SEQ ID NO: 1871212 - DNA, 25 bp, Homo sapien
acaaataaacatctctacgagaggg

SEQ ID NO: 1871213 - DNA, 25 bp, Homo sapien
cacttcttggtcgtggtcctctttt

SEQ ID NO: 1871214 - DNA, 25 bp, Homo sapien
tctcttaggagaatgacccccactt

SEQ ID NO: 1871215 - DNA, 25 bp, Homo sapien
cgtggtcctctttttactaggagtg

SEQ ID NO: 1871216 - DNA, 25 bp, Homo sapien
cagatctcttaggaggtgcagatct

SEQ ID NO: 1871217 - DNA, 25 bp, Homo sapien
cagacttcttgaaggacctctagtt

SEQ ID NO: 1871218 - DNA, 25 bp, Homo sapien
tcagacttcttgaaggacctctagt

SEQ ID NO: 1871219 - DNA, 25 bp, Homo sapien
tctcagacttcttgaaggacctcta

SEQ ID NO: 1871220 - DNA, 25 bp, Homo sapien
acctctcagacttcttgaaggacct

SEQ ID NO: 1871221 - DNA, 25 bp, Homo sapien
ctaccactttcaaataattgtttgg

SEQ ID NO: 1871222 - DNA, 25 bp, Homo sapien
accactttcaaataattgtttggtg

SEQ ID NO: 1871223 - DNA, 25 bp, Homo sapien
cactttcaaataattgtttggtggc

SEQ ID NO: 1871224 - DNA, 25 bp, Homo sapien
actttcaaataattgtttggtggct

SEQ ID NO: 1871225 - DNA, 25 bp, Homo sapien
tttccatttaatgactttccattca

SEQ ID NO: 1871226 - DNA, 25 bp, Homo sapien
tttaatgactttccattcatgtctc

SEQ ID NO: 1871227 - DNA, 25 bp, Homo sapien
ctgcatccttagtgtctgctgggct

SEQ ID NO: 1871228 - DNA, 25 bp, Homo sapien
tctggctgcatccttagtgtctgct

SEQ ID NO: 1871229 - DNA, 25 bp, Homo sapien
cattagtttccatattaagcccacc

SEQ ID NO: 1871230 - DNA, 25 bp, Homo sapien
aagaacttttctgggcaatctgctt

SEQ ID NO: 1871231 - DNA, 25 bp, Homo sapien
catatttgccaaatggtgcttcaag

SEQ ID NO: 1871232 - DNA, 25 bp, Homo sapien
agcccaccaatgaagaacttttctg

SEQ ID NO: 1871233 - DNA, 25 bp, Homo sapien
ccacactttcagtcttatgagcagg

SEQ ID NO: 1871234 - DNA, 25 bp, Homo sapien
tgagcaggatcttttagtacagtct

SEQ ID NO: 1871235 - DNA, 25 bp, Homo sapien
aggacataattaggactgaaagtat

SEQ ID NO: 1871236 - DNA, 25 bp, Homo sapien
agtacagtcttactttctttggctc

SEQ ID NO: 1871237 - DNA, 25 bp, Homo sapien
cagggcataactgagtggctcccgg

SEQ ID NO: 1871238 - DNA, 25 bp, Homo sapien
aacttgaagacgtcaacacccatag

SEQ ID NO: 1871239 - DNA, 25 bp, Homo sapien
cagcagattgcaacttgaagacgtc

SEQ ID NO: 1871240 - DNA, 25 bp, Homo sapien
ggtagccaccatggaacagcagatt

SEQ ID NO: 1871241 - DNA, 25 bp, Homo sapien
gacaaaactggaaaatgaatgggat

SEQ ID NO: 1871242 - DNA, 25 bp, Homo sapien
catagagtttcctacactttccagg

SEQ ID NO: 1871243 - DNA, 25 bp, Homo sapien
caggaaaatttatctggctgctcat

SEQ ID NO: 1871244 - DNA, 25 bp, Homo sapien
ggataagccccttcatggcatagag

SEQ ID NO: 1871245 - DNA, 25 bp, Homo sapien
ttagtaagtcctgccctgatgtggt

SEQ ID NO: 1871246 - DNA, 25 bp, Homo sapien
ttcaacttttgctgctccgacaatg

SEQ ID NO: 1871247 - DNA, 25 bp, Homo sapien
caacttctgctttagttgcttcatt

SEQ ID NO: 1871248 - DNA, 25 bp, Homo sapien
gacaatggatgtgtagaaggccagc

SEQ ID NO: 1871249 - DNA, 25 bp, Homo sapien
taatgtactcaagcttttcccgata

SEQ ID NO: 1871250 - DNA, 25 bp, Homo sapien
cagagtaatgtactcaagcttttcc

SEQ ID NO: 1871251 - DNA, 25 bp, Homo sapien
ctgatgacacagagtaatgtactca

SEQ ID NO: 1871252 - DNA, 25 bp, Homo sapien
tactcaagcttttcccgatattcca

SEQ ID NO: 1871253 - DNA, 25 bp, Homo sapien
tttctgcccctatactttatgttta

SEQ ID NO: 1871254 - DNA, 25 bp, Homo sapien
gcccctatactttatgtttatgtga

SEQ ID NO: 1871255 - DNA, 25 bp, Homo sapien
cataagaataggtactcctgctgac

SEQ ID NO: 1871256 - DNA, 25 bp, Homo sapien
tttcttacataagaataggtactcc

SEQ ID NO: 1871257 - DNA, 25 bp, Homo sapien
tttagaggcactaacatctgtctgc

SEQ ID NO: 1871258 - DNA, 25 bp, Homo sapien
ggtgagccaacttcctaaatagcaa

SEQ ID NO: 1871259 - DNA, 25 bp, Homo sapien
taaatagcaagccttgctctaaaga

SEQ ID NO: 1871260 - DNA, 25 bp, Homo sapien
aacagaagttgtatcccccgggatg

SEQ ID NO: 1871261 - DNA, 25 bp, Homo sapien
atttcctttcttgtgaactgcatgt

SEQ ID NO: 1871262 - DNA, 25 bp, Homo sapien
tgaactgcatgtgcccaacagcagg

SEQ ID NO: 1871263 - DNA, 25 bp, Homo sapien
tttcttgtgaactgcatgtgcccaa

SEQ ID NO: 1871264 - DNA, 25 bp, Homo sapien
atgtgcccaacagcaggaattcttc

SEQ ID NO: 1871265 - DNA, 25 bp, Homo sapien
cgggacggcattctgaagatggctc

SEQ ID NO: 1871266 - DNA, 25 bp, Homo sapien
caggggaggtagaattcattatctc

SEQ ID NO: 1871267 - DNA, 25 bp, Homo sapien
tagtcagggattccgggacggcatt

SEQ ID NO: 1871268 - DNA, 25 bp, Homo sapien
ttcattatctcccatagtcagggat

SEQ ID NO: 1871269 - DNA, 25 bp, Homo sapien
tgctgccaatgtttcacctgaaatt

SEQ ID NO: 1871270 - DNA, 25 bp, Homo sapien
tcttgtgctgccaatgtttcacctg

SEQ ID NO: 1871271 - DNA, 25 bp, Homo sapien
tagggggctttgattcatcttgtgc

SEQ ID NO: 1871272 - DNA, 25 bp, Homo sapien
aatttccattctagggggctttgat

SEQ ID NO: 1871273 - DNA, 25 bp, Homo sapien
gcatcaaacacaatgttgtctaatg

SEQ ID NO: 1871274 - DNA, 25 bp, Homo sapien
atttgttgcatcaaacacaatgttg

SEQ ID NO: 1871275 - DNA, 25 bp, Homo sapien
tgttgcatcaaacacaatgttgtct

SEQ ID NO: 1871276 - DNA, 25 bp, Homo sapien
ttatatttgttgcatcaaacacaat

SEQ ID NO: 1871277 - DNA, 25 bp, Homo sapien
cttgagaaagcttttgattgtttag

SEQ ID NO: 1871278 - DNA, 25 bp, Homo sapien
ttgattgtttagcatcccttgaaac

SEQ ID NO: 1871279 - DNA, 25 bp, Homo sapien
gtattgtctgattctgtgtttcttg

SEQ ID NO: 1871280 - DNA, 25 bp, Homo sapien
ctgattctgtgtttcttgagaaagc

SEQ ID NO: 1871281 - DNA, 25 bp, Homo sapien
cttgtgaagtatacatcctctcctt

SEQ ID NO: 1871282 - DNA, 25 bp, Homo sapien
tgaagtatacatcctctccttgcaa

SEQ ID NO: 1871283 - DNA, 25 bp, Homo sapien
tgtgaagtatacatcctctccttgc

SEQ ID NO: 1871284 - DNA, 25 bp, Homo sapien
agtatacatcctctccttgcaaagc

SEQ ID NO: 1871285 - DNA, 25 bp, Homo sapien
aactcctgaagtggggctaacctgt

SEQ ID NO: 1871286 - DNA, 25 bp, Homo sapien
gggctaacctgtatcctatttcagg

SEQ ID NO: 1871287 - DNA, 25 bp, Homo sapien
tgaagtggggctaacctgtatccta

SEQ ID NO: 1871288 - DNA, 25 bp, Homo sapien
taacctgtatcctatttcaggcatc

SEQ ID NO: 1871289 - DNA, 25 bp, Homo sapien
ggttttccattagatgatcctgaga

SEQ ID NO: 1871290 - DNA, 25 bp, Homo sapien
ttccattagatgatcctgagacacc

SEQ ID NO: 1871291 - DNA, 25 bp, Homo sapien
cagacttccatttaacctatataaa

SEQ ID NO: 1871292 - DNA, 25 bp, Homo sapien
ataaaccaaggttttccattagatg

SEQ ID NO: 1871293 - DNA, 25 bp, Homo sapien
agttccacagccaagctcgctatca

SEQ ID NO: 1871294 - DNA, 25 bp, Homo sapien
gctcgctatcatgaccatagctttt

SEQ ID NO: 1871295 - DNA, 25 bp, Homo sapien
gttcttgaacagttccacagccaag

SEQ ID NO: 1871296 - DNA, 25 bp, Homo sapien
tcttcatgttcggttcttgaacagt

SEQ ID NO: 1871297 - DNA, 25 bp, Homo sapien
aggagatttctcctactacgtagga

SEQ ID NO: 1871298 - DNA, 25 bp, Homo sapien
tactacgtaggaatcggtgagatag

SEQ ID NO: 1871299 - DNA, 25 bp, Homo sapien
tcctactacgtaggaatcggtgaga

SEQ ID NO: 1871300 - DNA, 25 bp, Homo sapien
gatttctcctactacgtaggaatcg

SEQ ID NO: 1871301 - DNA, 25 bp, Homo sapien
cagtaaaagactgcaagtcctgctg

SEQ ID NO: 1871302 - DNA, 25 bp, Homo sapien
gagaggtatctgcagtaaaagactg

SEQ ID NO: 1871303 - DNA, 25 bp, Homo sapien
tcctgggtcctaaggagaggtatct

SEQ ID NO: 1871304 - DNA, 25 bp, Homo sapien
tccaactctcctgggtcctaaggag

SEQ ID NO: 1871305 - DNA, 25 bp, Homo sapien
gaaggatggtattccggaaagccaa

SEQ ID NO: 1871306 - DNA, 25 bp, Homo sapien
agaaggatggtattccggaaagcca

SEQ ID NO: 1871307 - DNA, 25 bp, Homo sapien
gataaagctgctactccaaattctt

SEQ ID NO: 1871308 - DNA, 25 bp, Homo sapien
ataaagctgctactccaaattcttt

SEQ ID NO: 1871309 - DNA, 25 bp, Homo sapien
taaagctgctactccaaattctttc

SEQ ID NO: 1871310 - DNA, 25 bp, Homo sapien
gtttttggtgtcatagtatgtgcga

SEQ ID NO: 1871311 - DNA, 25 bp, Homo sapien
tttttggtgtcatagtatgtgcgaa

SEQ ID NO: 1871312 - DNA, 25 bp, Homo sapien
ttggtgtcatagtatgtgcgaatgt

SEQ ID NO: 1871313 - DNA, 25 bp, Homo sapien
tttggtgtcatagtatgtgcgaatg

SEQ ID NO: 1871314 - DNA, 25 bp, Homo sapien
agttccatactcattattacaattg

SEQ ID NO: 1871315 - DNA, 25 bp, Homo sapien
caatatgtcaaatgtcccagttcca

SEQ ID NO: 1871316 - DNA, 25 bp, Homo sapien
tcttccacttgatctattaccccag

SEQ ID NO: 1871317 - DNA, 25 bp, Homo sapien
cccagttaacctccagctgaagctg

SEQ ID NO: 1871318 - DNA, 25 bp, Homo sapien
tgtaagcaagagtacaacatcttgt

SEQ ID NO: 1871319 - DNA, 25 bp, Homo sapien
catgttctcttgtgtgcatatttga

SEQ ID NO: 1871320 - DNA, 25 bp, Homo sapien
agccaccgagaaacatgggatcaca

SEQ ID NO: 1871321 - DNA, 25 bp, Homo sapien
gcttgaagatgagtacaaataacca

SEQ ID NO: 1871322 - DNA, 25 bp, Homo sapien
cattctcttagtcaagttgcctttt

SEQ ID NO: 1871323 - DNA, 25 bp, Homo sapien
attctcttagtcaagttgccttttg

SEQ ID NO: 1871324 - DNA, 25 bp, Homo sapien
gagtagagacactcttgacccattt

SEQ ID NO: 1871325 - DNA, 25 bp, Homo sapien
caggtagtgggcctgaactatctct

SEQ ID NO: 1871326 - DNA, 25 bp, Homo sapien
tggagtagagacactcttgacccat

SEQ ID NO: 1871327 - DNA, 25 bp, Homo sapien
ctctggagtagagacactcttgacc

SEQ ID NO: 1871328 - DNA, 25 bp, Homo sapien
cctgaaactttagcactgaaataat

SEQ ID NO: 1871329 - DNA, 25 bp, Homo sapien
ttcttacgctgacgtttctcattgc

SEQ ID NO: 1871330 - DNA, 25 bp, Homo sapien
cttctggcaggcgtttcttacgctg

SEQ ID NO: 1871331 - DNA, 25 bp, Homo sapien
ggggaaaagcccttgctcacttcat

SEQ ID NO: 1871332 - DNA, 25 bp, Homo sapien
gcaaaatattgtccctaggtgggga

SEQ ID NO: 1871333 - DNA, 25 bp, Homo sapien
tggggagagtaggatcaccctgcca

SEQ ID NO: 1871334 - DNA, 25 bp, Homo sapien
cctcagcctggagcaaaatattgtc

SEQ ID NO: 1871335 - DNA, 25 bp, Homo sapien
ggagagtaggatcaccctgccatac

SEQ ID NO: 1871336 - DNA, 25 bp, Homo sapien
tgtgcaagtccgaatagagctgggt

SEQ ID NO: 1871337 - DNA, 25 bp, Homo sapien
caagtccgaatagagctgggttttg

SEQ ID NO: 1871338 - DNA, 25 bp, Homo sapien
ccgaatagagctgggttttggactg

SEQ ID NO: 1871339 - DNA, 25 bp, Homo sapien
ccaggggtgtgcaagtccgaataga

SEQ ID NO: 1871340 - DNA, 25 bp, Homo sapien
ctggagcgaccaggcgctcccagtc

SEQ ID NO: 1871341 - DNA, 25 bp, Homo sapien
tggagcgaccaggcgctcccagtca

SEQ ID NO: 1871342 - DNA, 25 bp, Homo sapien
ggagcgaccaggcgctcccagtcac

SEQ ID NO: 1871343 - DNA, 25 bp, Homo sapien
cttcggactggaagcggtttagtag

SEQ ID NO: 1871344 - DNA, 25 bp, Homo sapien
gtggtcaggattgcgggcacggtga

SEQ ID NO: 1871345 - DNA, 25 bp, Homo sapien
ggtggtcaggattgcgggcacggtg

SEQ ID NO: 1871346 - DNA, 25 bp, Homo sapien
ctggaagcggtttagtaggctgagg

SEQ ID NO: 1871347 - DNA, 25 bp, Homo sapien
gcctgtggccgatggactggagccc

SEQ ID NO: 1871348 - DNA, 25 bp, Homo sapien
cagcctgtggccgatggactggagc

SEQ ID NO: 1871349 - DNA, 25 bp, Homo sapien
gtggccgatggactggagccctctg

SEQ ID NO: 1871350 - DNA, 25 bp, Homo sapien
ctgtggccgatggactggagccctc

SEQ ID NO: 1871351 - DNA, 25 bp, Homo sapien
atgctgatggcccaatacatttggg

SEQ ID NO: 1871352 - DNA, 25 bp, Homo sapien
cccttggcaagatactgtaatagga

SEQ ID NO: 1871353 - DNA, 25 bp, Homo sapien
agtgaggtgaaaatgctgatggccc

SEQ ID NO: 1871354 - DNA, 25 bp, Homo sapien
atttggggctatttagagccagaag

SEQ ID NO: 1871355 - DNA, 25 bp, Homo sapien
ggatcttttgccacaacagaaaagt

SEQ ID NO: 1871356 - DNA, 25 bp, Homo sapien
cttcggatcttttgccacaacagaa

SEQ ID NO: 1871357 - DNA, 25 bp, Homo sapien
caacaacttcggatcttttgccaca

SEQ ID NO: 1871358 - DNA, 25 bp, Homo sapien
ccccaggagcaacaacttcggatct

SEQ ID NO: 1871359 - DNA, 25 bp, Homo sapien
tggtgacagctttcagataaaaaga

SEQ ID NO: 1871360 - DNA, 25 bp, Homo sapien
atggtgacagctttcagataaaaag

SEQ ID NO: 1871361 - DNA, 25 bp, Homo sapien
gcttgcctcttagaaacagatcctg

SEQ ID NO: 1871362 - DNA, 25 bp, Homo sapien
caatgggttgctgatactggccttc

SEQ ID NO: 1871363 - DNA, 25 bp, Homo sapien
tagttcggttggtttcacatgtgcc

SEQ ID NO: 1871364 - DNA, 25 bp, Homo sapien
tcttcagtcaccagaggattagacg

SEQ ID NO: 1871365 - DNA, 25 bp, Homo sapien
gactcaactcctcctatgtctgggt

SEQ ID NO: 1871366 - DNA, 25 bp, Homo sapien
gaataacatcgtctgactcaactcc

SEQ ID NO: 1871367 - DNA, 25 bp, Homo sapien
acatcgaataacatcgtctgactca

SEQ ID NO: 1871368 - DNA, 25 bp, Homo sapien
tcgtctgactcaactcctcctatgt

SEQ ID NO: 1871369 - DNA, 25 bp, Homo sapien
tgttggaggcctctagccttacaac

SEQ ID NO: 1871370 - DNA, 25 bp, Homo sapien
tagccttacaacatctggaaaaaac

SEQ ID NO: 1871371 - DNA, 25 bp, Homo sapien
ctggattgttggaggcctctagcct

SEQ ID NO: 1871372 - DNA, 25 bp, Homo sapien
gcctctagccttacaacatctggaa

SEQ ID NO: 1871373 - DNA, 25 bp, Homo sapien
ttctattatatacggggtattaaca

SEQ ID NO: 1871374 - DNA, 25 bp, Homo sapien
gattctattatatacggggtattaa

SEQ ID NO: 1871375 - DNA, 25 bp, Homo sapien
tctattatatacggggtattaacaa

SEQ ID NO: 1871376 - DNA, 25 bp, Homo sapien
tgattctattatatacggggtatta

SEQ ID NO: 1871377 - DNA, 25 bp, Homo sapien
ccatgaaaatagagtccaaattgga

SEQ ID NO: 1871378 - DNA, 25 bp, Homo sapien
attggatttggaccacgttttcaat

SEQ ID NO: 1871379 - DNA, 25 bp, Homo sapien
tagacactgtttagtcctggatata

SEQ ID NO: 1871380 - DNA, 25 bp, Homo sapien
cctggatatatgataatagagtaag

SEQ ID NO: 1871381 - DNA, 25 bp, Homo sapien
tactagctatacgttagagactact

SEQ ID NO: 1871382 - DNA, 25 bp, Homo sapien
gagaaaagatgcaactgacaacaaa

SEQ ID NO: 1871383 - DNA, 25 bp, Homo sapien
taaacctataacgagttcagtaatc

SEQ ID NO: 1871384 - DNA, 25 bp, Homo sapien
tcagtaatcaattgcctctggcaag

SEQ ID NO: 1871385 - DNA, 25 bp, Homo sapien
cagtaaagtctgcaagaattctaaa

SEQ ID NO: 1871386 - DNA, 25 bp, Homo sapien
ccagtaaagtctgcaagaattctaa

SEQ ID NO: 1871387 - DNA, 25 bp, Homo sapien
ttattgcctctgctgcttaattgct

SEQ ID NO: 1871388 - DNA, 25 bp, Homo sapien
tattgcctctgctgcttaattgctt

SEQ ID NO: 1871389 - DNA, 25 bp, Homo sapien
ctctgctgcttaattgctttgacac

SEQ ID NO: 1871390 - DNA, 25 bp, Homo sapien
tgcttaattgctttgacactcccac

SEQ ID NO: 1871391 - DNA, 25 bp, Homo sapien
tccattctctttgtcgtggttgtag

SEQ ID NO: 1871392 - DNA, 25 bp, Homo sapien
ctttgtcgtggttgtagaagaggta

SEQ ID NO: 1871393 - DNA, 25 bp, Homo sapien
ttctctttgtcgtggttgtagaaga

SEQ ID NO: 1871394 - DNA, 25 bp, Homo sapien
cattctctttgtcgtggttgtagaa

SEQ ID NO: 1871395 - DNA, 25 bp, Homo sapien
agcatataattgctcacagtagcca

SEQ ID NO: 1871396 - DNA, 25 bp, Homo sapien
ggttgtatatgtttaggaaattgtc

SEQ ID NO: 1871397 - DNA, 25 bp, Homo sapien
aagtgacaccaccttcatagaaatg

SEQ ID NO: 1871398 - DNA, 25 bp, Homo sapien
tttataatgccttcaatcttgttac

SEQ ID NO: 1871399 - DNA, 25 bp, Homo sapien
gatttgtagcctcattacttcaatc

SEQ ID NO: 1871400 - DNA, 25 bp, Homo sapien
tgaaaacgtcttgatttgtagcctc

SEQ ID NO: 1871401 - DNA, 25 bp, Homo sapien
aaaacgtcttgatttgtagcctcat

SEQ ID NO: 1871402 - DNA, 25 bp, Homo sapien
acgtcttgatttgtagcctcattac

SEQ ID NO: 1871403 - DNA, 25 bp, Homo sapien
tccacataggtgaaagagcttgcaa

SEQ ID NO: 1871404 - DNA, 25 bp, Homo sapien
aaggtctccacataggtgaaagagc

SEQ ID NO: 1871405 - DNA, 25 bp, Homo sapien
gaaagagcttgcaacctcttcaatc

SEQ ID NO: 1871406 - DNA, 25 bp, Homo sapien
cataggtgaaagagcttgcaacctc

SEQ ID NO: 1871407 - DNA, 25 bp, Homo sapien
tgttctaggagacactcccttagag

SEQ ID NO: 1871408 - DNA, 25 bp, Homo sapien
aatttgggggattgattaaacacat

SEQ ID NO: 1871409 - DNA, 25 bp, Homo sapien
tcctctgattccataacctgagtaa

SEQ ID NO: 1871410 - DNA, 25 bp, Homo sapien
tccctggcagtttgagtcttggaga

SEQ ID NO: 1871411 - DNA, 25 bp, Homo sapien
tcattcctcctggtgcgttcgtgct

SEQ ID NO: 1871412 - DNA, 25 bp, Homo sapien
actggctcagaagggaagctgcaga

SEQ ID NO: 1871413 - DNA, 25 bp, Homo sapien
attcctcctggtgcgttcgtgctct

SEQ ID NO: 1871414 - DNA, 25 bp, Homo sapien
tctcactggctcagaagggaagctg

SEQ ID NO: 1871415 - DNA, 25 bp, Homo sapien
ctccatcaatgtgtttcccttcttc

SEQ ID NO: 1871416 - DNA, 25 bp, Homo sapien
tccatcaatgtgtttcccttcttcc

SEQ ID NO: 1871417 - DNA, 25 bp, Homo sapien
catcaatgtgtttcccttcttcctc

SEQ ID NO: 1871418 - DNA, 25 bp, Homo sapien
gctttgagggactctcttgcctctc

SEQ ID NO: 1871419 - DNA, 25 bp, Homo sapien
agagctttgagggactctcttgcct

SEQ ID NO: 1871420 - DNA, 25 bp, Homo sapien
ttgagggactctcttgcctctcgtc

SEQ ID NO: 1871421 - DNA, 25 bp, Homo sapien
caggaaggtcctttcgaagggtgtg

SEQ ID NO: 1871422 - DNA, 25 bp, Homo sapien
tatgcttcatccaaatacttagagg

SEQ ID NO: 1871423 - DNA, 25 bp, Homo sapien
tgcttcatccaaatacttagaggat

SEQ ID NO: 1871424 - DNA, 25 bp, Homo sapien
catatgcttcatccaaatacttaga

SEQ ID NO: 1871425 - DNA, 25 bp, Homo sapien
cttcatatgcttcatccaaatactt

SEQ ID NO: 1871426 - DNA, 25 bp, Homo sapien
cccacagtggaagactgtggagcaa

SEQ ID NO: 1871427 - DNA, 25 bp, Homo sapien
cttcccacagtggaagactgtggag

SEQ ID NO: 1871428 - DNA, 25 bp, Homo sapien
ttcccacagtggaagactgtggagc

SEQ ID NO: 1871429 - DNA, 25 bp, Homo sapien
tcccacagtggaagactgtggagca

SEQ ID NO: 1871430 - DNA, 25 bp, Homo sapien
attggtgaatttactcagctcactg

SEQ ID NO: 1871431 - DNA, 25 bp, Homo sapien
tggtgaatttactcagctcactggg

SEQ ID NO: 1871432 - DNA, 25 bp, Homo sapien
tgaatttactcagctcactgggctg

SEQ ID NO: 1871433 - DNA, 25 bp, Homo sapien
ggtgaatttactcagctcactgggc

SEQ ID NO: 1871434 - DNA, 25 bp, Homo sapien
ggctgccctgagctttctaggctta

SEQ ID NO: 1871435 - DNA, 25 bp, Homo sapien
gctgccctgagctttctaggcttaa

SEQ ID NO: 1871436 - DNA, 25 bp, Homo sapien
gaaattctcattagttacagtggag

SEQ ID NO: 1871437 - DNA, 25 bp, Homo sapien
ggtaaatgccagaccattctgtgac

SEQ ID NO: 1871438 - DNA, 25 bp, Homo sapien
catgtcttaatggtaaaacgcttta

SEQ ID NO: 1871439 - DNA, 25 bp, Homo sapien
agttaaagccttgccacggtaaatg

SEQ ID NO: 1871440 - DNA, 25 bp, Homo sapien
ttattgtaaatagtttcaaagtcca

SEQ ID NO: 1871441 - DNA, 25 bp, Homo sapien
tattgtaaatagtttcaaagtccat

SEQ ID NO: 1871442 - DNA, 25 bp, Homo sapien
agtttctctgagaaagaacagatat

SEQ ID NO: 1871443 - DNA, 25 bp, Homo sapien
gatggatgaggtataagtttctctg

SEQ ID NO: 1871444 - DNA, 25 bp, Homo sapien
ctcagtgattattctgtctgggtca

SEQ ID NO: 1871445 - DNA, 25 bp, Homo sapien
cattgggaactatctcacagtgatg

SEQ ID NO: 1871446 - DNA, 25 bp, Homo sapien
gatgaaagatctttgggccttgcgt

SEQ ID NO: 1871447 - DNA, 25 bp, Homo sapien
catttgtgcaattgccctgaaacct

SEQ ID NO: 1871448 - DNA, 25 bp, Homo sapien
gagacagtgatgaaagatctttggg

SEQ ID NO: 1871449 - DNA, 25 bp, Homo sapien
cagtgttacccatgctcatttgtgc

SEQ ID NO: 1871450 - DNA, 25 bp, Homo sapien
tatttttatggtatactattctaga

SEQ ID NO: 1871451 - DNA, 25 bp, Homo sapien
ctactgccagacatattgaaactcc

SEQ ID NO: 1871452 - DNA, 25 bp, Homo sapien
aaaatctactgccagacatattgaa

SEQ ID NO: 1871453 - DNA, 25 bp, Homo sapien
ttaaatttgtcataccacattctcc

SEQ ID NO: 1871454 - DNA, 25 bp, Homo sapien
ttcaagtgtcgtgttctcagctcag

SEQ ID NO: 1871455 - DNA, 25 bp, Homo sapien
cagatttcaagtgtcgtgttctcag

SEQ ID NO: 1871456 - DNA, 25 bp, Homo sapien
gatttcaagtgtcgtgttctcagct

SEQ ID NO: 1871457 - DNA, 25 bp, Homo sapien
tttcaagtgtcgtgttctcagctca

SEQ ID NO: 1871458 - DNA, 25 bp, Homo sapien
agatggagtctcgccctgtcctgtc

SEQ ID NO: 1871459 - DNA, 25 bp, Homo sapien
gatggagtctcgccctgtcctgtca

SEQ ID NO: 1871460 - DNA, 25 bp, Homo sapien
tggagtctcgccctgtcctgtcacc

SEQ ID NO: 1871461 - DNA, 25 bp, Homo sapien
gagtctcgccctgtcctgtcaccca

SEQ ID NO: 1871462 - DNA, 25 bp, Homo sapien
gaaggcaggagattcttgaatatgg

SEQ ID NO: 1871463 - DNA, 25 bp, Homo sapien
ttgaatatgggcttcatcccaaact

SEQ ID NO: 1871464 - DNA, 25 bp, Homo sapien
atgagaaaggtttcatttcccttca

SEQ ID NO: 1871465 - DNA, 25 bp, Homo sapien
tgagaaaggtttcatttcccttcac

SEQ ID NO: 1871466 - DNA, 25 bp, Homo sapien
ctgcttgtgacagaatcagtgacaa

SEQ ID NO: 1871467 - DNA, 25 bp, Homo sapien
cactgcttgtgacagaatcagtgac

SEQ ID NO: 1871468 - DNA, 25 bp, Homo sapien
ctgctactgtgagcaattgggatcc

SEQ ID NO: 1871469 - DNA, 25 bp, Homo sapien
gagcaattgggatccccagcagcta

SEQ ID NO: 1871470 - DNA, 25 bp, Homo sapien
ccagctttctgtcttcctcaaatcc

SEQ ID NO: 1871471 - DNA, 25 bp, Homo sapien
cagctttctgtcttcctcaaatcca

SEQ ID NO: 1871472 - DNA, 25 bp, Homo sapien
tctgtcttcctcaaatccaaggtat

SEQ ID NO: 1871473 - DNA, 25 bp, Homo sapien
tcttcctcaaatccaaggtatccat

SEQ ID NO: 1871474 - DNA, 25 bp, Homo sapien
tcaaatggtactttactagcaggct

SEQ ID NO: 1871475 - DNA, 25 bp, Homo sapien
ggtactttactagcaggctctttca

SEQ ID NO: 1871476 - DNA, 25 bp, Homo sapien
aaatggtactttactagcaggctct

SEQ ID NO: 1871477 - DNA, 25 bp, Homo sapien
actttactagcaggctctttcagac

SEQ ID NO: 1871478 - DNA, 25 bp, Homo sapien
gagcagacaccagcttaaatgactg

SEQ ID NO: 1871479 - DNA, 25 bp, Homo sapien
ctgctgacatgccataaccttgaaa

SEQ ID NO: 1871480 - DNA, 25 bp, Homo sapien
ctttgaagatacaggatgctttctt

SEQ ID NO: 1871481 - DNA, 25 bp, Homo sapien
tgaagatacaggatgctttcttcat

SEQ ID NO: 1871482 - DNA, 25 bp, Homo sapien
tttgaagatacaggatgctttcttc

SEQ ID NO: 1871483 - DNA, 25 bp, Homo sapien
cctttgaagatacaggatgctttct

SEQ ID NO: 1871484 - DNA, 25 bp, Homo sapien
caggctagcctctttcattgagatt

SEQ ID NO: 1871485 - DNA, 25 bp, Homo sapien
tctgatcatggactatctcataatc

SEQ ID NO: 1871486 - DNA, 25 bp, Homo sapien
gttttgaatttttctcgagtcaggc

SEQ ID NO: 1871487 - DNA, 25 bp, Homo sapien
cataagtgtaaaggcaggttttgaa

SEQ ID NO: 1871488 - DNA, 25 bp, Homo sapien
aataaagctttcacagtgtggaagt

SEQ ID NO: 1871489 - DNA, 25 bp, Homo sapien
ataaagctttcacagtgtggaagtg

SEQ ID NO: 1871490 - DNA, 25 bp, Homo sapien
atttagccttctgaggcttctgggt

SEQ ID NO: 1871491 - DNA, 25 bp, Homo sapien
tctgggtagacttggtgactttgac

SEQ ID NO: 1871492 - DNA, 25 bp, Homo sapien
tgctttgatgacaccagtagtaact

SEQ ID NO: 1871493 - DNA, 25 bp, Homo sapien
ttcagaagctttcttgtccactgct

SEQ ID NO: 1871494 - DNA, 25 bp, Homo sapien
ccagaagagaatagtcagagaggct

SEQ ID NO: 1871495 - DNA, 25 bp, Homo sapien
ccagcttattaccagaatagtattc

SEQ ID NO: 1871496 - DNA, 25 bp, Homo sapien
ccaccagtgatttggtctggcttgt

SEQ ID NO: 1871497 - DNA, 25 bp, Homo sapien
gacgtgcaaacaatgtgagctgtgt

SEQ ID NO: 1871498 - DNA, 25 bp, Homo sapien
agctcagcagacgtgcaaacaatgt

SEQ ID NO: 1871499 - DNA, 25 bp, Homo sapien
cagagcttgaggcagtgtagttcca

SEQ ID NO: 1871500 - DNA, 25 bp, Homo sapien
ccttgcaacaagacgtgtgagcact

SEQ ID NO: 1871501 - DNA, 25 bp, Homo sapien
gaagagttggtcgtccagagcttga

SEQ ID NO: 1871502 - DNA, 25 bp, Homo sapien
gagaacatgtctccactaggcccac

SEQ ID NO: 1871503 - DNA, 25 bp, Homo sapien
cagtgacatagtagttgctgatctc

SEQ ID NO: 1871504 - DNA, 25 bp, Homo sapien
acaggttggctcatccttggagaca

SEQ ID NO: 1871505 - DNA, 25 bp, Homo sapien
ccacagtgtaaccaagaagggcatg

SEQ ID NO: 1871506 - DNA, 25 bp, Homo sapien
ttggagacagcagctttgaatttgc

SEQ ID NO: 1871507 - DNA, 25 bp, Homo sapien
atggttcttttgttgatacaatcac

SEQ ID NO: 1871508 - DNA, 25 bp, Homo sapien
ggaacacttttgcacctcagcagcc

SEQ ID NO: 1871509 - DNA, 25 bp, Homo sapien
tttaagggaacacttttgcacctca

SEQ ID NO: 1871510 - DNA, 25 bp, Homo sapien
aagggaacacttttgcacctcagca

SEQ ID NO: 1871511 - DNA, 25 bp, Homo sapien
caataatgctgttaagaatctcttc

SEQ ID NO: 1871512 - DNA, 25 bp, Homo sapien
tttaggggtggttttagcagcatgt

SEQ ID NO: 1871513 - DNA, 25 bp, Homo sapien
gccagtagtcatggactttcccaga

SEQ ID NO: 1871514 - DNA, 25 bp, Homo sapien
gtgtccaataacaataatgctgtta

SEQ ID NO: 1871515 - DNA, 25 bp, Homo sapien
acaaattcgtgccttcatcactgga

SEQ ID NO: 1871516 - DNA, 25 bp, Homo sapien
gatctttgtgaatgcccagcacacc

SEQ ID NO: 1871517 - DNA, 25 bp, Homo sapien
gcacacctgtgcagtcatcttctgt

SEQ ID NO: 1871518 - DNA, 25 bp, Homo sapien
taaagcttgacatgctgtcagtaag

SEQ ID NO: 1871519 - DNA, 25 bp, Homo sapien
caagatctctcggtgataagcgttc

SEQ ID NO: 1871520 - DNA, 25 bp, Homo sapien
tgaaaatgatcaaccacagagtgtc

SEQ ID NO: 1871521 - DNA, 25 bp, Homo sapien
attttcaatactgaggctgcactat

SEQ ID NO: 1871522 - DNA, 25 bp, Homo sapien
ggaacctgagtgattatgcccaaaa

SEQ ID NO: 1871523 - DNA, 25 bp, Homo sapien
cttggcacagtgtagagtttcctgc

SEQ ID NO: 1871524 - DNA, 25 bp, Homo sapien
caatagagtgtaagctgaagggtaa

SEQ ID NO: 1871525 - DNA, 25 bp, Homo sapien
aaccaggagagatcctcggttccag

SEQ ID NO: 1871526 - DNA, 25 bp, Homo sapien
caaaagctaattctgcttggcacag

SEQ ID NO: 1871527 - DNA, 25 bp, Homo sapien
atagcagctccttcaacgtagcaca

SEQ ID NO: 1871528 - DNA, 25 bp, Homo sapien
gtacttccgatgctgacctctcctg

SEQ ID NO: 1871529 - DNA, 25 bp, Homo sapien
tcctggccatttgtggtatagcagc

SEQ ID NO: 1871530 - DNA, 25 bp, Homo sapien
acgtagcacacaatattgaggcagc

SEQ ID NO: 1871531 - DNA, 25 bp, Homo sapien
cactcagcctgaggcaacagattcc

SEQ ID NO: 1871532 - DNA, 25 bp, Homo sapien
caacagattcctctgttgtggatac

SEQ ID NO: 1871533 - DNA, 25 bp, Homo sapien
ggcaacagattcctctgttgtggat

SEQ ID NO: 1871534 - DNA, 25 bp, Homo sapien
gcctgaggcaacagattcctctgtt

SEQ ID NO: 1871535 - DNA, 25 bp, Homo sapien
ttccaaactcggtttccatcattga

SEQ ID NO: 1871536 - DNA, 25 bp, Homo sapien
tccaaactcggtttccatcattgat

SEQ ID NO: 1871537 - DNA, 25 bp, Homo sapien
gcacaatgatgggagtatgagagct

SEQ ID NO: 1871538 - DNA, 25 bp, Homo sapien
cacaatgatgggagtatgagagcta

SEQ ID NO: 1871539 - DNA, 25 bp, Homo sapien
agcacaatgatgggagtatgagagc

SEQ ID NO: 1871540 - DNA, 25 bp, Homo sapien
aggttatgaagctttgcattgttac

SEQ ID NO: 1871541 - DNA, 25 bp, Homo sapien
gaggttatgaagctttgcattgtta

SEQ ID NO: 1871542 - DNA, 25 bp, Homo sapien
ccaagaggttatgaagctttgcatt

SEQ ID NO: 1871543 - DNA, 25 bp, Homo sapien
aagaggttatgaagctttgcattgt

SEQ ID NO: 1871544 - DNA, 25 bp, Homo sapien
tttcatttgtgttgactcttttcat

SEQ ID NO: 1871545 - DNA, 25 bp, Homo sapien
aagctgtcctccatcacagttttca

SEQ ID NO: 1871546 - DNA, 25 bp, Homo sapien
cgcagagtcacagttagaagctgtc

SEQ ID NO: 1871547 - DNA, 25 bp, Homo sapien
cagtcgcagagtcacagttagaagc

SEQ ID NO: 1871548 - DNA, 25 bp, Homo sapien
catcctgtttcctccacacctttcc

SEQ ID NO: 1871549 - DNA, 25 bp, Homo sapien
ttcatcctgtttcctccacaccttt

SEQ ID NO: 1871550 - DNA, 25 bp, Homo sapien
aattcatcctgtttcctccacacct

SEQ ID NO: 1871551 - DNA, 25 bp, Homo sapien
ctgatccaattcatcctgtttcctc

SEQ ID NO: 1871552 - DNA, 25 bp, Homo sapien
gtgcattgctttacaaggaaaagtc

SEQ ID NO: 1871553 - DNA, 25 bp, Homo sapien
cattggacttgaagtcagtgttcat

SEQ ID NO: 1871554 - DNA, 25 bp, Homo sapien
tgctctctgatctaatacaatagaa

SEQ ID NO: 1871555 - DNA, 25 bp, Homo sapien
acatgtcacccagcacgcaactgaa

SEQ ID NO: 1871556 - DNA, 25 bp, Homo sapien
tttccttctttagtgagcaaatctt

SEQ ID NO: 1871557 - DNA, 25 bp, Homo sapien
agtaagcaaagtacaggtgttctct

SEQ ID NO: 1871558 - DNA, 25 bp, Homo sapien
caaggtagcatctttctagatctgg

SEQ ID NO: 1871559 - DNA, 25 bp, Homo sapien
caaggtcagatggtcatgatcagga

SEQ ID NO: 1871560 - DNA, 25 bp, Homo sapien
gacaaagccataactacaacctaag

SEQ ID NO: 1871561 - DNA, 25 bp, Homo sapien
ggtcttgagccaagcccagaaataa

SEQ ID NO: 1871562 - DNA, 25 bp, Homo sapien
ggtgctcaagacaatgtaatgctaa

SEQ ID NO: 1871563 - DNA, 25 bp, Homo sapien
ttctggtgctcaagacaatgtaatg

SEQ ID NO: 1871564 - DNA, 25 bp, Homo sapien
gctcaagacaatgtaatgctaaact

SEQ ID NO: 1871565 - DNA, 25 bp, Homo sapien
aatgtaatgctaaactgacaaatgg

SEQ ID NO: 1871566 - DNA, 25 bp, Homo sapien
aataccattgtccagagttcttgat

SEQ ID NO: 1871567 - DNA, 25 bp, Homo sapien
tgataaagtattgttatagagagta

SEQ ID NO: 1871568 - DNA, 25 bp, Homo sapien
gagttcttgataaagtattgttata

SEQ ID NO: 1871569 - DNA, 25 bp, Homo sapien
taccattgtccagagttcttgataa

SEQ ID NO: 1871570 - DNA, 25 bp, Homo sapien
tacttatagcatgacaccaggccta

SEQ ID NO: 1871571 - DNA, 25 bp, Homo sapien
tgtatgtacatacttatagcatgac

SEQ ID NO: 1871572 - DNA, 25 bp, Homo sapien
tgtacatacttatagcatgacacca

SEQ ID NO: 1871573 - DNA, 25 bp, Homo sapien
attgaagacatagctttactctctt

SEQ ID NO: 1871574 - DNA, 25 bp, Homo sapien
cacctgaacggcagcctttggaatt

SEQ ID NO: 1871575 - DNA, 25 bp, Homo sapien
caaacacttctcaatatcatcaagc

SEQ ID NO: 1871576 - DNA, 25 bp, Homo sapien
tttggaattcgagtcccaggaccaa

SEQ ID NO: 1871577 - DNA, 25 bp, Homo sapien
gagtcccaggaccaaatacattgga

SEQ ID NO: 1871578 - DNA, 25 bp, Homo sapien
cttctcaactggtatactactggca

SEQ ID NO: 1871579 - DNA, 25 bp, Homo sapien
ccttgattgggagtgctactaatag

SEQ ID NO: 1871580 - DNA, 25 bp, Homo sapien
tgtcactcaattacccaaaaccttc

SEQ ID NO: 1871581 - DNA, 25 bp, Homo sapien
cctctatgtgttgcttgtggtagga

SEQ ID NO: 1871582 - DNA, 25 bp, Homo sapien
taggatgtgctacaagaacctgatc

SEQ ID NO: 1871583 - DNA, 25 bp, Homo sapien
tcattatccagtagggtgatcatat

SEQ ID NO: 1871584 - DNA, 25 bp, Homo sapien
tgaacatttgtagctgcaatatcga

SEQ ID NO: 1871585 - DNA, 25 bp, Homo sapien
actgcaggatttaggctgttataac

SEQ ID NO: 1871586 - DNA, 25 bp, Homo sapien
gagcacccatttctattctcaagtg

SEQ ID NO: 1871587 - DNA, 25 bp, Homo sapien
aattctgagagtagagatcatgtcc

SEQ ID NO: 1871588 - DNA, 25 bp, Homo sapien
ttatatggtcatgctaattactccc

SEQ ID NO: 1871589 - DNA, 25 bp, Homo sapien
ccagtacttgacacataaaagtgct

SEQ ID NO: 1871590 - DNA, 25 bp, Homo sapien
tgagttcaggaactagggttttatg

SEQ ID NO: 1871591 - DNA, 25 bp, Homo sapien
ccagcagcgagggtgcttatgccca

SEQ ID NO: 1871592 - DNA, 25 bp, Homo sapien
gaatatctggccgtccaagggagtt

SEQ ID NO: 1871593 - DNA, 25 bp, Homo sapien
gaggtggtatcacccctccacacat

SEQ ID NO: 1871594 - DNA, 25 bp, Homo sapien
ctaatacctgcatctataaaaaact

SEQ ID NO: 1871595 - DNA, 25 bp, Homo sapien
taatacctgcatctataaaaaactt

SEQ ID NO: 1871596 - DNA, 25 bp, Homo sapien
aatacctgcatctataaaaaactta

SEQ ID NO: 1871597 - DNA, 25 bp, Homo sapien
ataaaaaccccaatgagacaccatt

SEQ ID NO: 1871598 - DNA, 25 bp, Homo sapien
tggaacgtttatacagtgttggtga

SEQ ID NO: 1871599 - DNA, 25 bp, Homo sapien
attaccgtacatatacccaaatgaa

SEQ ID NO: 1871600 - DNA, 25 bp, Homo sapien
aaaatggaacgtttatacagtgttg

SEQ ID NO: 1871601 - DNA, 25 bp, Homo sapien
ctccagcatggatgaaagagcgaga

SEQ ID NO: 1871602 - DNA, 25 bp, Homo sapien
gcactccagcatggatgaaagagcg

SEQ ID NO: 1871603 - DNA, 25 bp, Homo sapien
cactccagcatggatgaaagagcga

SEQ ID NO: 1871604 - DNA, 25 bp, Homo sapien
ccagcatggatgaaagagcgagact

SEQ ID NO: 1871605 - DNA, 25 bp, Homo sapien
cagtgtaatttatctcctgcaaact

SEQ ID NO: 1871606 - DNA, 25 bp, Homo sapien
tactccatgtcaacttggttgaagg

SEQ ID NO: 1871607 - DNA, 25 bp, Homo sapien
cctgcaaactattttcctgtctaag

SEQ ID NO: 1871608 - DNA, 25 bp, Homo sapien
cctgtctaagtctaatattctgtga

SEQ ID NO: 1871609 - DNA, 25 bp, Homo sapien
gctacaagaagacgaggtctgcgac

SEQ ID NO: 1871610 - DNA, 25 bp, Homo sapien
ggtctgcgaccttcacgttccatga

SEQ ID NO: 1871611 - DNA, 25 bp, Homo sapien
cagcaaatcctgtagcaataacttt

SEQ ID NO: 1871612 - DNA, 25 bp, Homo sapien
cttgtcccatttttgctacaagaag

SEQ ID NO: 1871613 - DNA, 25 bp, Homo sapien
tagactggctgctttgaattgtcca

SEQ ID NO: 1871614 - DNA, 25 bp, Homo sapien
taagtgtgaactctcccaaggtaac

SEQ ID NO: 1871615 - DNA, 25 bp, Homo sapien
tacattgagagctccattaaagcca

SEQ ID NO: 1871616 - DNA, 25 bp, Homo sapien
aaaatgcttgcttgctccactgaca

SEQ ID NO: 1871617 - DNA, 25 bp, Homo sapien
cactcaccattcgatcattcgcttt

SEQ ID NO: 1871618 - DNA, 25 bp, Homo sapien
atgttcaccaaatacctttttcagg

SEQ ID NO: 1871619 - DNA, 25 bp, Homo sapien
aattcctggcgatatgctccactca

SEQ ID NO: 1871620 - DNA, 25 bp, Homo sapien
ctcttgatagcagatgttatctctt

SEQ ID NO: 1871621 - DNA, 25 bp, Homo sapien
gatatttccatctccgctagcagca

SEQ ID NO: 1871622 - DNA, 25 bp, Homo sapien
tagtgcagcaagacaacgttcagcc

SEQ ID NO: 1871623 - DNA, 25 bp, Homo sapien
agccaaagcttgatccctgctggat

SEQ ID NO: 1871624 - DNA, 25 bp, Homo sapien
tgcccgagatgcatccactgcaaga

SEQ ID NO: 1871625 - DNA, 25 bp, Homo sapien
ttcaatctgcctgtttcgcactgaa

SEQ ID NO: 1871626 - DNA, 25 bp, Homo sapien
tatcaattgccagaacttctacagc

SEQ ID NO: 1871627 - DNA, 25 bp, Homo sapien
cctgtttcgcactgaagtattatca

SEQ ID NO: 1871628 - DNA, 25 bp, Homo sapien
caactggtacttatttactccaaca

SEQ ID NO: 1871629 - DNA, 25 bp, Homo sapien
tattccctcagctacagctttggcc

SEQ ID NO: 1871630 - DNA, 25 bp, Homo sapien
attcgaagtttaggtattccctcag

SEQ ID NO: 1871631 - DNA, 25 bp, Homo sapien
gaatctattctagcttgtcttcggg

SEQ ID NO: 1871632 - DNA, 25 bp, Homo sapien
agctttggccattccacccatttct

SEQ ID NO: 1871633 - DNA, 25 bp, Homo sapien
catcatgtaagaacctccccaagga

SEQ ID NO: 1871634 - DNA, 25 bp, Homo sapien
ggcaaacccaaagcttcatcaaaag

SEQ ID NO: 1871635 - DNA, 25 bp, Homo sapien
tgttcctggcaattcgagcactttt

SEQ ID NO: 1871636 - DNA, 25 bp, Homo sapien
aagactgagtccctccaaatactgc

SEQ ID NO: 1871637 - DNA, 25 bp, Homo sapien
caacatgattaaacagcaactgctg

SEQ ID NO: 1871638 - DNA, 25 bp, Homo sapien
tgtcaatttccatattaagcttcag

SEQ ID NO: 1871639 - DNA, 25 bp, Homo sapien
gaaacaggtgatagatattgcaact

SEQ ID NO: 1871640 - DNA, 25 bp, Homo sapien
tagtgcctcttataatcctctgaaa

SEQ ID NO: 1871641 - DNA, 25 bp, Homo sapien
gcttgcatgcttgcttaaatacata

SEQ ID NO: 1871642 - DNA, 25 bp, Homo sapien
ttgcatgcttgcttaaatacataac

SEQ ID NO: 1871643 - DNA, 25 bp, Homo sapien
agtactaacttatgacttttgcttc

SEQ ID NO: 1871644 - DNA, 25 bp, Homo sapien
atatgagagtactaacttatgactt

SEQ ID NO: 1871645 - DNA, 25 bp, Homo sapien
gctcagtaagtgaccatccagatgt

SEQ ID NO: 1871646 - DNA, 25 bp, Homo sapien
ctgctcagtaagtgaccatccagat

SEQ ID NO: 1871647 - DNA, 25 bp, Homo sapien
tgctcagtaagtgaccatccagatg

SEQ ID NO: 1871648 - DNA, 25 bp, Homo sapien
ttttctctattaagtgagcccagag

SEQ ID NO: 1871649 - DNA, 25 bp, Homo sapien
ttctctattaagtgagcccagagtc

SEQ ID NO: 1871650 - DNA, 25 bp, Homo sapien
cattttctctattaagtgagcccag

SEQ ID NO: 1871651 - DNA, 25 bp, Homo sapien
tagaaattcattccaattccccaga

SEQ ID NO: 1871652 - DNA, 25 bp, Homo sapien
tgctaaagtataggccagctccaga

SEQ ID NO: 1871653 - DNA, 25 bp, Homo sapien
tcatcaattgtcaggccagcctgga

SEQ ID NO: 1871654 - DNA, 25 bp, Homo sapien
gttctagagtactccaatccatctg

SEQ ID NO: 1871655 - DNA, 25 bp, Homo sapien
gcctggagtccagttctagagtact

SEQ ID NO: 1871656 - DNA, 25 bp, Homo sapien
ctgcatatggtatccactaattgaa

SEQ ID NO: 1871657 - DNA, 25 bp, Homo sapien
tatggtatccactaattgaaattga

SEQ ID NO: 1871658 - DNA, 25 bp, Homo sapien
gcatatggtatccactaattgaaat

SEQ ID NO: 1871659 - DNA, 25 bp, Homo sapien
ggtatccactaattgaaattgaatt

SEQ ID NO: 1871660 - DNA, 25 bp, Homo sapien
caacatcaccacgaactcgagggtt

SEQ ID NO: 1871661 - DNA, 25 bp, Homo sapien
tgtgtcgccagatcaaaggcaactg

SEQ ID NO: 1871662 - DNA, 25 bp, Homo sapien
tccacagtgtcaatagcaactccag

SEQ ID NO: 1871663 - DNA, 25 bp, Homo sapien
gaatcatagccacgatgtgtcgcca

SEQ ID NO: 1871664 - DNA, 25 bp, Homo sapien
tatggtccacgtgtgaatggcttca

SEQ ID NO: 1871665 - DNA, 25 bp, Homo sapien
taaaaccagcatactggcggatggt

SEQ ID NO: 1871666 - DNA, 25 bp, Homo sapien
tcgttgctgtatgagcctggagcct

SEQ ID NO: 1871667 - DNA, 25 bp, Homo sapien
cctggagcctgatgattcttttacc

SEQ ID NO: 1871668 - DNA, 25 bp, Homo sapien
acacccaatagaaataagaactgac

SEQ ID NO: 1871669 - DNA, 25 bp, Homo sapien
ggtggagcatggaaacacccaatag

SEQ ID NO: 1871670 - DNA, 25 bp, Homo sapien
atggaaacacccaatagaaataaga

SEQ ID NO: 1871671 - DNA, 25 bp, Homo sapien
tggagcatggaaacacccaatagaa

SEQ ID NO: 1871672 - DNA, 25 bp, Homo sapien
tctttccagaagtacctccgaattg

SEQ ID NO: 1871673 - DNA, 25 bp, Homo sapien
tgccagggacttcgcccaaaactag

SEQ ID NO: 1871674 - DNA, 25 bp, Homo sapien
gaggttggtcgaagtgaaaatctaa

SEQ ID NO: 1871675 - DNA, 25 bp, Homo sapien
caaaactagaggttggtcgaagtga

SEQ ID NO: 1871676 - DNA, 25 bp, Homo sapien
agagggcggctgcacttctgcgtcc

SEQ ID NO: 1871677 - DNA, 25 bp, Homo sapien
gagggcggctgcacttctgcgtccc

SEQ ID NO: 1871678 - DNA, 25 bp, Homo sapien
cctgttttggactccgctgtgggag

SEQ ID NO: 1871679 - DNA, 25 bp, Homo sapien
taggcctgttttggactccgctgtg

SEQ ID NO: 1871680 - DNA, 25 bp, Homo sapien
acacagccaggcctccccgccctca

SEQ ID NO: 1871681 - DNA, 25 bp, Homo sapien
tccacacagccaggcctccccgccc

SEQ ID NO: 1871682 - DNA, 25 bp, Homo sapien
cacagccaggcctccccgccctcac

SEQ ID NO: 1871683 - DNA, 25 bp, Homo sapien
ctgtcagacatccacacagccaggc

SEQ ID NO: 1871684 - DNA, 25 bp, Homo sapien
aatctaatagcgctctcatgggcgc

SEQ ID NO: 1871685 - DNA, 25 bp, Homo sapien
tagatgcccgtttccgctttcttcc

SEQ ID NO: 1871686 - DNA, 25 bp, Homo sapien
ggcgcattcctgatgacgtttaggg

SEQ ID NO: 1871687 - DNA, 25 bp, Homo sapien
ccagcgtcagccggacgactctggg

SEQ ID NO: 1871688 - DNA, 25 bp, Homo sapien
gaaatgcccgatgtcctaaaagatc

SEQ ID NO: 1871689 - DNA, 25 bp, Homo sapien
aaagatctgcccttaggatcctgag

SEQ ID NO: 1871690 - DNA, 25 bp, Homo sapien
tcattgctaaatttctcccgcgggc

SEQ ID NO: 1871691 - DNA, 25 bp, Homo sapien
tcccgcgggcactagtgaagtcaag

SEQ ID NO: 1871692 - DNA, 25 bp, Homo sapien
ttagcagttgccaaatctaggaaac

SEQ ID NO: 1871693 - DNA, 25 bp, Homo sapien
tattggttaacagctcatatcagga

SEQ ID NO: 1871694 - DNA, 25 bp, Homo sapien
gaggctaaggcttctgcaggattta

SEQ ID NO: 1871695 - DNA, 25 bp, Homo sapien
gtttataatgcctgaatggaactca

SEQ ID NO: 1871696 - DNA, 25 bp, Homo sapien
tattggattccaacccacgagagca

SEQ ID NO: 1871697 - DNA, 25 bp, Homo sapien
gaaccagtgttcttaggatgcggga

SEQ ID NO: 1871698 - DNA, 25 bp, Homo sapien
acagcttacaatctcagcctggaag

SEQ ID NO: 1871699 - DNA, 25 bp, Homo sapien
cctgataggtttgggactcacatga

SEQ ID NO: 1871700 - DNA, 25 bp, Homo sapien
tggccctcacgctggccaggaagtt

SEQ ID NO: 1871701 - DNA, 25 bp, Homo sapien
tgaacaatgtctccggtacatcgcc

SEQ ID NO: 1871702 - DNA, 25 bp, Homo sapien
catcgcaggaaaggttacagccggc

SEQ ID NO: 1871703 - DNA, 25 bp, Homo sapien
gaacgtcctggatgacaacacggcg

SEQ ID NO: 1871704 - DNA, 25 bp, Homo sapien
tcagaggtctctaactatcagtctc

SEQ ID NO: 1871705 - DNA, 25 bp, Homo sapien
gataagcttcttgacttaggtccct

SEQ ID NO: 1871706 - DNA, 25 bp, Homo sapien
cctaggagccattactgtgaagtgt

SEQ ID NO: 1871707 - DNA, 25 bp, Homo sapien
tccaggtatgtctttcttgaggacc

SEQ ID NO: 1871708 - DNA, 25 bp, Homo sapien
taggtcttatgaggcactggtcaag

SEQ ID NO: 1871709 - DNA, 25 bp, Homo sapien
gcgcatatgcagagcctaggcctgg

SEQ ID NO: 1871710 - DNA, 25 bp, Homo sapien
agaactgaggctccggcgcatatgc

SEQ ID NO: 1871711 - DNA, 25 bp, Homo sapien
tcaagtggtgaagccaacgtccagg

SEQ ID NO: 1871712 - DNA, 25 bp, Homo sapien
ttcccactgtgcttgatctcgagct

SEQ ID NO: 1871713 - DNA, 25 bp, Homo sapien
gaacgcttctctcttgataaacttt

SEQ ID NO: 1871714 - DNA, 25 bp, Homo sapien
tctcgagctactgaagccagcaaga

SEQ ID NO: 1871715 - DNA, 25 bp, Homo sapien
gaaatgctcaggattaaaagtgtct

SEQ ID NO: 1871716 - DNA, 25 bp, Homo sapien
aaatatatttgtggttgttgcatgg

SEQ ID NO: 1871717 - DNA, 25 bp, Homo sapien
taaatatatttgtggttgttgcatg

SEQ ID NO: 1871718 - DNA, 25 bp, Homo sapien
gttgttgcatgggataagcttgtgg

SEQ ID NO: 1871719 - DNA, 25 bp, Homo sapien
catgggataagcttgtgggcagaat

SEQ ID NO: 1871720 - DNA, 25 bp, Homo sapien
tttggtgatctcattgtggaccttt

SEQ ID NO: 1871721 - DNA, 25 bp, Homo sapien
catttgagttcggtgtgcaagtcaa

SEQ ID NO: 1871722 - DNA, 25 bp, Homo sapien
tgggccgataccacaactttggtga

SEQ ID NO: 1871723 - DNA, 25 bp, Homo sapien
tgcaagtcaagattgggccgatacc

SEQ ID NO: 1871724 - DNA, 25 bp, Homo sapien
catcacgagcaaaattccccagtgc

SEQ ID NO: 1871725 - DNA, 25 bp, Homo sapien
ggtctctgtacctgtcgtgaacaga

SEQ ID NO: 1871726 - DNA, 25 bp, Homo sapien
gtacctgtcgtgaacagattattaa

SEQ ID NO: 1871727 - DNA, 25 bp, Homo sapien
tggacctcaggatatctcatcacga

SEQ ID NO: 1871728 - DNA, 25 bp, Homo sapien
aaaacatgagctcctgctgtgttac

SEQ ID NO: 1871729 - DNA, 25 bp, Homo sapien
tcaagtttatgatggtgatctagaa

SEQ ID NO: 1871730 - DNA, 25 bp, Homo sapien
tatggtcttatgactttttaggaga

SEQ ID NO: 1871731 - DNA, 25 bp, Homo sapien
atttctgagtatggtcttatgactt

SEQ ID NO: 1871732 - DNA, 25 bp, Homo sapien
gagtatggtcttatgactttttagg

SEQ ID NO: 1871733 - DNA, 25 bp, Homo sapien
ttctgagtatggtcttatgactttt

SEQ ID NO: 1871734 - DNA, 25 bp, Homo sapien
caaggctaagagtctcaggaactgg

SEQ ID NO: 1871735 - DNA, 25 bp, Homo sapien
caggaactgggagtcttgtagtcaa

SEQ ID NO: 1871736 - DNA, 25 bp, Homo sapien
tctaagacctccaatgaatttcaca

SEQ ID NO: 1871737 - DNA, 25 bp, Homo sapien
cacattttcaccagtcaaggctaag

SEQ ID NO: 1871738 - DNA, 25 bp, Homo sapien
tgtgaaactcaaagttctgtatgag

SEQ ID NO: 1871739 - DNA, 25 bp, Homo sapien
taaggtggtcaagctgaaccgtctc

SEQ ID NO: 1871740 - DNA, 25 bp, Homo sapien
ctcacccattccaaaatttcgtaag

SEQ ID NO: 1871741 - DNA, 25 bp, Homo sapien
ctgtatgagattctggcattcctct

SEQ ID NO: 1871742 - DNA, 25 bp, Homo sapien
ggtttcaccatgagagaaggcaatt

SEQ ID NO: 1871743 - DNA, 25 bp, Homo sapien
gtttcaccatgagagaaggcaattc

SEQ ID NO: 1871744 - DNA, 25 bp, Homo sapien
caggtttcaccatgagagaaggcaa

SEQ ID NO: 1871745 - DNA, 25 bp, Homo sapien
aggtttcaccatgagagaaggcaat

SEQ ID NO: 1871746 - DNA, 25 bp, Homo sapien
tttgggcaccaaccactgagccaac

SEQ ID NO: 1871747 - DNA, 25 bp, Homo sapien
ggcaccaaccactgagccaacattt

SEQ ID NO: 1871748 - DNA, 25 bp, Homo sapien
ctgtttgggcaccaaccactgagcc

SEQ ID NO: 1871749 - DNA, 25 bp, Homo sapien
aaccactgagccaacattttttggg

SEQ ID NO: 1871750 - DNA, 25 bp, Homo sapien
ttgggtagaactaggtaggtgtcca

SEQ ID NO: 1871751 - DNA, 25 bp, Homo sapien
ggtagaactaggtaggtgtccacac

SEQ ID NO: 1871752 - DNA, 25 bp, Homo sapien
ccattgagttgggtagaactaggta

SEQ ID NO: 1871753 - DNA, 25 bp, Homo sapien
catagccattgagttgggtagaact

SEQ ID NO: 1871754 - DNA, 25 bp, Homo sapien
tttgagatcacgacatgttggagcc

SEQ ID NO: 1871755 - DNA, 25 bp, Homo sapien
tcacgacatgttggagcctgagcag

SEQ ID NO: 1871756 - DNA, 25 bp, Homo sapien
acatgttggagcctgagcagtgtga

SEQ ID NO: 1871757 - DNA, 25 bp, Homo sapien
ggatgtgatgtttgagatcacgaca

SEQ ID NO: 1871758 - DNA, 25 bp, Homo sapien
gttatttaagttttgcagacagatt

SEQ ID NO: 1871759 - DNA, 25 bp, Homo sapien
tacgtgtatgcacgtgtgaacacac

SEQ ID NO: 1871760 - DNA, 25 bp, Homo sapien
ggaaattcaggcatagcacatgtac

SEQ ID NO: 1871761 - DNA, 25 bp, Homo sapien
cacacacagatttgctggacctaca

SEQ ID NO: 1871762 - DNA, 25 bp, Homo sapien
tcactctggtccatactctctttgg

SEQ ID NO: 1871763 - DNA, 25 bp, Homo sapien
catttttacactggccatttgggac

SEQ ID NO: 1871764 - DNA, 25 bp, Homo sapien
gggacttaggatctattcactctgg

SEQ ID NO: 1871765 - DNA, 25 bp, Homo sapien
cagatagcatttgagctcgttgcaa

SEQ ID NO: 1871766 - DNA, 25 bp, Homo sapien
catgtccatggaactgattgtcaag

SEQ ID NO: 1871767 - DNA, 25 bp, Homo sapien
tggctgtggtcaccatgtccatgga

SEQ ID NO: 1871768 - DNA, 25 bp, Homo sapien
gctggctgtggtcaccatgtccatg

SEQ ID NO: 1871769 - DNA, 25 bp, Homo sapien
accatgtccatggaactgattgtca

SEQ ID NO: 1871770 - DNA, 25 bp, Homo sapien
ggcttgaagtgtgtaaagctttcac

SEQ ID NO: 1871771 - DNA, 25 bp, Homo sapien
tgcacacagatatctaggcttgaag

SEQ ID NO: 1871772 - DNA, 25 bp, Homo sapien
cacttgacatcccattgaaagaaaa

SEQ ID NO: 1871773 - DNA, 25 bp, Homo sapien
taaataggtagttcattcagtttct

SEQ ID NO: 1871774 - DNA, 25 bp, Homo sapien
taatggagtcatcgttcacattctt

SEQ ID NO: 1871775 - DNA, 25 bp, Homo sapien
tggagtcatcgttcacattcttgtt

SEQ ID NO: 1871776 - DNA, 25 bp, Homo sapien
tcatcgttcacattcttgtttagaa

SEQ ID NO: 1871777 - DNA, 25 bp, Homo sapien
gagtcatcgttcacattcttgttta

SEQ ID NO: 1871778 - DNA, 25 bp, Homo sapien
caataaacagaatcatcatagcagt

SEQ ID NO: 1871779 - DNA, 25 bp, Homo sapien
ccaataaacagaatcatcatagcag

SEQ ID NO: 1871780 - DNA, 25 bp, Homo sapien
tccaataaacagaatcatcatagca

SEQ ID NO: 1871781 - DNA, 25 bp, Homo sapien
cttccaataaacagaatcatcatag

SEQ ID NO: 1871782 - DNA, 25 bp, Homo sapien
ctgtccccagagaggcaactttaga

SEQ ID NO: 1871783 - DNA, 25 bp, Homo sapien
cccagagaggcaactttagaattaa

SEQ ID NO: 1871784 - DNA, 25 bp, Homo sapien
tccccagagaggcaactttagaatt

SEQ ID NO: 1871785 - DNA, 25 bp, Homo sapien
cagagaggcaactttagaattaaac

SEQ ID NO: 1871786 - DNA, 25 bp, Homo sapien
tgtgacgctgaagaggaaaatctac

SEQ ID NO: 1871787 - DNA, 25 bp, Homo sapien
atgagtcatgttgtgacgctgaaga

SEQ ID NO: 1871788 - DNA, 25 bp, Homo sapien
tgacgctgaagaggaaaatctactt

SEQ ID NO: 1871789 - DNA, 25 bp, Homo sapien
acgctgaagaggaaaatctacttgc

SEQ ID NO: 1871790 - DNA, 25 bp, Homo sapien
gtcatcagacctccaacaactgctg

SEQ ID NO: 1871791 - DNA, 25 bp, Homo sapien
gttccgatagaggaacccagtgcag

SEQ ID NO: 1871792 - DNA, 25 bp, Homo sapien
tgtcatcagacctccaacaactgct

SEQ ID NO: 1871793 - DNA, 25 bp, Homo sapien
aacaactgctgttccgatagaggaa

SEQ ID NO: 1871794 - DNA, 25 bp, Homo sapien
tccttagggagggtttagcactctc

SEQ ID NO: 1871795 - DNA, 25 bp, Homo sapien
gaaactcttgagcagtgttagaaaa

SEQ ID NO: 1871796 - DNA, 25 bp, Homo sapien
tacaccttaaagaagagaatcatct

SEQ ID NO: 1871797 - DNA, 25 bp, Homo sapien
tcaggccagagtgtaacattacaca

SEQ ID NO: 1871798 - DNA, 25 bp, Homo sapien
tgtttctaaacctgcattcccaagg

SEQ ID NO: 1871799 - DNA, 25 bp, Homo sapien
catgtaagtagtttggttctcaggc

SEQ ID NO: 1871800 - DNA, 25 bp, Homo sapien
taaattttaccgaagtgaatgcacc

SEQ ID NO: 1871801 - DNA, 25 bp, Homo sapien
agtgaggcctcccttttgagagcca

SEQ ID NO: 1871802 - DNA, 25 bp, Homo sapien
catggatcctcagtttagtagtaaa

SEQ ID NO: 1871803 - DNA, 25 bp, Homo sapien
tggaggttatggaccccacatgtat

SEQ ID NO: 1871804 - DNA, 25 bp, Homo sapien
gttggaggcgcccattgctactgcc

SEQ ID NO: 1871805 - DNA, 25 bp, Homo sapien
tcccactacaccaggtaagccgtgg

SEQ ID NO: 1871806 - DNA, 25 bp, Homo sapien
gaagaatattaacgtctccaacatc

SEQ ID NO: 1871807 - DNA, 25 bp, Homo sapien
ccaacatcttacatagttactttta

SEQ ID NO: 1871808 - DNA, 25 bp, Homo sapien
taacgtctccaacatcttacatagt

SEQ ID NO: 1871809 - DNA, 25 bp, Homo sapien
tgtttttttgtgttaagagtagcta

SEQ ID NO: 1871810 - DNA, 25 bp, Homo sapien
aagaaggcaaatggtctccaaataa

SEQ ID NO: 1871811 - DNA, 25 bp, Homo sapien
cttcaatggagcagtcccaaaggaa

SEQ ID NO: 1871812 - DNA, 25 bp, Homo sapien
tgcttggccgacatcctaaatctct

SEQ ID NO: 1871813 - DNA, 25 bp, Homo sapien
tcctgttacacagaagtcagggcag

SEQ ID NO: 1871814 - DNA, 25 bp, Homo sapien
agtcaggaacttgtatccaagcaca

SEQ ID NO: 1871815 - DNA, 25 bp, Homo sapien
caataatcatagaaccaaatgggtg

SEQ ID NO: 1871816 - DNA, 25 bp, Homo sapien
gaattgccatatccgcacaagtgcc

SEQ ID NO: 1871817 - DNA, 25 bp, Homo sapien
gcacagagaccattcctgcaatgct

SEQ ID NO: 1871818 - DNA, 25 bp, Homo sapien
tctgctgtttgataaatcttgtttc

SEQ ID NO: 1871819 - DNA, 25 bp, Homo sapien
aagatttttacaagactaccttcat

SEQ ID NO: 1871820 - DNA, 25 bp, Homo sapien
aacttgggagcagttaactctatta

SEQ ID NO: 1871821 - DNA, 25 bp, Homo sapien
aagaaatcttttctcagaacttggg

SEQ ID NO: 1871822 - DNA, 25 bp, Homo sapien
ccagcccagggtacagatttgatga

SEQ ID NO: 1871823 - DNA, 25 bp, Homo sapien
cagcagtgatgcagaaattacctac

SEQ ID NO: 1871824 - DNA, 25 bp, Homo sapien
tagaacattctacaaggtctgcttc

SEQ ID NO: 1871825 - DNA, 25 bp, Homo sapien
aaatttccatgagggctaaggcggc

SEQ ID NO: 1871826 - DNA, 25 bp, Homo sapien
tgttgagcttgcctcggtgctccac

SEQ ID NO: 1871827 - DNA, 25 bp, Homo sapien
gagcttgcctcggtgctccactagg

SEQ ID NO: 1871828 - DNA, 25 bp, Homo sapien
catgttgagcttgcctcggtgctcc

SEQ ID NO: 1871829 - DNA, 25 bp, Homo sapien
tgcctcggtgctccactaggctgga

SEQ ID NO: 1871830 - DNA, 25 bp, Homo sapien
cagcgagagagaagtacgtgtttac

SEQ ID NO: 1871831 - DNA, 25 bp, Homo sapien
gaagtacgtgtttacaatggccctg

SEQ ID NO: 1871832 - DNA, 25 bp, Homo sapien
caatggccgagttaaagctgggcca

SEQ ID NO: 1871833 - DNA, 25 bp, Homo sapien
ccctgcactgtttgtctccaggttc

SEQ ID NO: 1871834 - DNA, 25 bp, Homo sapien
tagtgaaccaaaagaggggatatta

SEQ ID NO: 1871835 - DNA, 25 bp, Homo sapien
gatattagttctgaatatggaagac

SEQ ID NO: 1871836 - DNA, 25 bp, Homo sapien
ccaaaagaggggatattagttctga

SEQ ID NO: 1871837 - DNA, 25 bp, Homo sapien
cagtccagaggatgcagtttgcttt

SEQ ID NO: 1871838 - DNA, 25 bp, Homo sapien
gaaaagaggagaattgagccagcat

SEQ ID NO: 1871839 - DNA, 25 bp, Homo sapien
aaagaggagaattgagccagcataa

SEQ ID NO: 1871840 - DNA, 25 bp, Homo sapien
cactgacaatgtctctgtttagtct

SEQ ID NO: 1871841 - DNA, 25 bp, Homo sapien
agtcttgattatctacagttaagag

SEQ ID NO: 1871842 - DNA, 25 bp, Homo sapien
caatcattgcaaacaagtctgagta

SEQ ID NO: 1871843 - DNA, 25 bp, Homo sapien
aagatgcctgctacagccaagccaa

SEQ ID NO: 1871844 - DNA, 25 bp, Homo sapien
tcagtccagatcgatacaagatgcc

SEQ ID NO: 1871845 - DNA, 25 bp, Homo sapien
gccccaaaggcatggatcgtcattg

SEQ ID NO: 1871846 - DNA, 25 bp, Homo sapien
tcagcatttgggtggggctcgtttt

SEQ ID NO: 1871847 - DNA, 25 bp, Homo sapien
aaagatatcagaactgtggctgcac

SEQ ID NO: 1871848 - DNA, 25 bp, Homo sapien
gatatcagaactgtggctgcactga

SEQ ID NO: 1871849 - DNA, 25 bp, Homo sapien
aatttctaaaattgtcatgatcagc

SEQ ID NO: 1871850 - DNA, 25 bp, Homo sapien
tcaggaaggtcatgaggaagccaaa

SEQ ID NO: 1871851 - DNA, 25 bp, Homo sapien
gagtaggttgatacccacactgctg

SEQ ID NO: 1871852 - DNA, 25 bp, Homo sapien
ggcccaaagcagcaacgagtaggtt

SEQ ID NO: 1871853 - DNA, 25 bp, Homo sapien
gcaggattccctgtacaatagtgcc

SEQ ID NO: 1871854 - DNA, 25 bp, Homo sapien
tcttctgatgttccgatgcgttcgg

SEQ ID NO: 1871855 - DNA, 25 bp, Homo sapien
tcccaaagtgcaggtgtgtccggaa

SEQ ID NO: 1871856 - DNA, 25 bp, Homo sapien
aggtggcgtgtctgggtctggagtt

SEQ ID NO: 1871857 - DNA, 25 bp, Homo sapien
ccaaagtgcaggtgtgtccggaatt

SEQ ID NO: 1871858 - DNA, 25 bp, Homo sapien
tgagctgctcgagaacagtctggtc

SEQ ID NO: 1871859 - DNA, 25 bp, Homo sapien
aactcaaagaatatgcccatgtctg

SEQ ID NO: 1871860 - DNA, 25 bp, Homo sapien
gaggatataactcaaagaatatgcc

SEQ ID NO: 1871861 - DNA, 25 bp, Homo sapien
gtctggtccgtttcatactcaacaa

SEQ ID NO: 1871862 - DNA, 25 bp, Homo sapien
acagaggcacactgagagcttcaca

SEQ ID NO: 1871863 - DNA, 25 bp, Homo sapien
ggacagaggcacactgagagcttca

SEQ ID NO: 1871864 - DNA, 25 bp, Homo sapien
gacagaggcacactgagagcttcac

SEQ ID NO: 1871865 - DNA, 25 bp, Homo sapien
tgagatgttgataagaacaaaggac

SEQ ID NO: 1871866 - DNA, 25 bp, Homo sapien
atgttgataagaacaaaggactgct

SEQ ID NO: 1871867 - DNA, 25 bp, Homo sapien
gatgttgataagaacaaaggactgc

SEQ ID NO: 1871868 - DNA, 25 bp, Homo sapien
tgtgagatgttgataagaacaaagg

SEQ ID NO: 1871869 - DNA, 25 bp, Homo sapien
aggatgaacagagccttgaaagtgt

SEQ ID NO: 1871870 - DNA, 25 bp, Homo sapien
aaagtgtcaggattgtgctgaaggt

SEQ ID NO: 1871871 - DNA, 25 bp, Homo sapien
gtttcattaagtacatggctaatat

SEQ ID NO: 1871872 - DNA, 25 bp, Homo sapien
ctttcgtcttggtctggtattgttg

SEQ ID NO: 1871873 - DNA, 25 bp, Homo sapien
cacaaggcctttgaactaggaaatg

SEQ ID NO: 1871874 - DNA, 25 bp, Homo sapien
gagcagctggcatcactagttttgt

SEQ ID NO: 1871875 - DNA, 25 bp, Homo sapien
ttacagccgagaatgagtttaataa

SEQ ID NO: 1871876 - DNA, 25 bp, Homo sapien
tcttgctaggtcgttcagagcagct

SEQ ID NO: 1871877 - DNA, 25 bp, Homo sapien
cagggtgagtacatccaaagaactg

SEQ ID NO: 1871878 - DNA, 25 bp, Homo sapien
ggtgagtacatccaaagaactgcat

SEQ ID NO: 1871879 - DNA, 25 bp, Homo sapien
ttgcagggtgagtacatccaaagaa

SEQ ID NO: 1871880 - DNA, 25 bp, Homo sapien
tgcagggtgagtacatccaaagaac

SEQ ID NO: 1871881 - DNA, 25 bp, Homo sapien
tctgggatgctaaggactctgatgc

SEQ ID NO: 1871882 - DNA, 25 bp, Homo sapien
aatagttccaggtctcacaaatgag

SEQ ID NO: 1871883 - DNA, 25 bp, Homo sapien
ggaactctgtgagcacactgccaat

SEQ ID NO: 1871884 - DNA, 25 bp, Homo sapien
gatgctaaggactctgatgcctggg

SEQ ID NO: 1871885 - DNA, 25 bp, Homo sapien
ctttgttcgaaaagctgattacttt

SEQ ID NO: 1871886 - DNA, 25 bp, Homo sapien
agttctttgttcgaaaagctgatta

SEQ ID NO: 1871887 - DNA, 25 bp, Homo sapien
gttctttgttcgaaaagctgattac

SEQ ID NO: 1871888 - DNA, 25 bp, Homo sapien
tctttgttcgaaaagctgattactt

SEQ ID NO: 1871889 - DNA, 25 bp, Homo sapien
cagtcttgcacaatgctcactaggt

SEQ ID NO: 1871890 - DNA, 25 bp, Homo sapien
tgtttcaggaaatacgtaatgcacc

SEQ ID NO: 1871891 - DNA, 25 bp, Homo sapien
cctgattcagttcgttataaagcac

SEQ ID NO: 1871892 - DNA, 25 bp, Homo sapien
aatgatgcagcccttatccatgcag

SEQ ID NO: 1871893 - DNA, 25 bp, Homo sapien
ttgagtaactcatgttcacagccag

SEQ ID NO: 1871894 - DNA, 25 bp, Homo sapien
tctcacataggcaagtagccttgca

SEQ ID NO: 1871895 - DNA, 25 bp, Homo sapien
agatcttgatactggcaactattgg

SEQ ID NO: 1871896 - DNA, 25 bp, Homo sapien
acagttacttaggagatcttgatac

SEQ ID NO: 1871897 - DNA, 25 bp, Homo sapien
ttagtaaaggtgaatgcattgaaga

SEQ ID NO: 1871898 - DNA, 25 bp, Homo sapien
acagaaagccagcagctatttttac

SEQ ID NO: 1871899 - DNA, 25 bp, Homo sapien
ttcagtgatggtgtcaactttatca

SEQ ID NO: 1871900 - DNA, 25 bp, Homo sapien
tatagctatataactgagtcagaaa

SEQ ID NO: 1871901 - DNA, 25 bp, Homo sapien
tgtctagactgagccataatgtggt

SEQ ID NO: 1871902 - DNA, 25 bp, Homo sapien
aacacattgatgataaatattccat

SEQ ID NO: 1871903 - DNA, 25 bp, Homo sapien
ccacttttggtatagtgatatgaac

SEQ ID NO: 1871904 - DNA, 25 bp, Homo sapien
taaacagtaatatttggcgtgcctg

SEQ ID NO: 1871905 - DNA, 25 bp, Homo sapien
tttgtcacagtcatcagggcaaccg

SEQ ID NO: 1871906 - DNA, 25 bp, Homo sapien
agggcaaccggcacaaggtgttcct

SEQ ID NO: 1871907 - DNA, 25 bp, Homo sapien
agtcatcagggcaaccggcacaagg

SEQ ID NO: 1871908 - DNA, 25 bp, Homo sapien
tggtacggggtattctttctattca

SEQ ID NO: 1871909 - DNA, 25 bp, Homo sapien
gaagttgaaagtgtctcaaccttaa

SEQ ID NO: 1871910 - DNA, 25 bp, Homo sapien
agaagttgaaagtgtctcaacctta

SEQ ID NO: 1871911 - DNA, 25 bp, Homo sapien
catagtagtattttagactatcttg

SEQ ID NO: 1871912 - DNA, 25 bp, Homo sapien
gacagtaggcaattccacagcctac

SEQ ID NO: 1871913 - DNA, 25 bp, Homo sapien
ttgattgggacagtaggcaattcca

SEQ ID NO: 1871914 - DNA, 25 bp, Homo sapien
gtagtattttagactatcttgattg

SEQ ID NO: 1871915 - DNA, 25 bp, Homo sapien
caactgcattgggactctttggtcc

SEQ ID NO: 1871916 - DNA, 25 bp, Homo sapien
taggatctcgtcataccagctttgg

SEQ ID NO: 1871917 - DNA, 25 bp, Homo sapien
tggtcctacaccatagacaaaatct

SEQ ID NO: 1871918 - DNA, 25 bp, Homo sapien
gggtcacttgacatatagagattct

SEQ ID NO: 1871919 - DNA, 25 bp, Homo sapien
tcaacaaatatttactaatttacat

SEQ ID NO: 1871920 - DNA, 25 bp, Homo sapien
caacaaatatttactaatttacata

SEQ ID NO: 1871921 - DNA, 25 bp, Homo sapien
ttcaacaaatatttactaatttaca

SEQ ID NO: 1871922 - DNA, 25 bp, Homo sapien
cacctttgggcattcgttgttacct

SEQ ID NO: 1871923 - DNA, 25 bp, Homo sapien
agtgcacttgtttgcccacctttgg

SEQ ID NO: 1871924 - DNA, 25 bp, Homo sapien
ggtcctctggatcactatgttgtaa

SEQ ID NO: 1871925 - DNA, 25 bp, Homo sapien
ggttttgcggtcctctggatcacta

SEQ ID NO: 1871926 - DNA, 25 bp, Homo sapien
gagactgctttccttagttcattgt

SEQ ID NO: 1871927 - DNA, 25 bp, Homo sapien
catctttagcatgttactggcaggt

SEQ ID NO: 1871928 - DNA, 25 bp, Homo sapien
tacaatctccctttgcacttgcaac

SEQ ID NO: 1871929 - DNA, 25 bp, Homo sapien
ttagcatgttactggcaggtggaga

SEQ ID NO: 1871930 - DNA, 25 bp, Homo sapien
cctagcgagtctaatgtgcacagag

SEQ ID NO: 1871931 - DNA, 25 bp, Homo sapien
tacctgctcaggagatacacactgc

SEQ ID NO: 1871932 - DNA, 25 bp, Homo sapien
tccagtctgaaaagtcctagcgagt

SEQ ID NO: 1871933 - DNA, 25 bp, Homo sapien
tacacactgcatgtgagcactgcac

SEQ ID NO: 1871934 - DNA, 25 bp, Homo sapien
gcaggtaaagatggaagcagcacag

SEQ ID NO: 1871935 - DNA, 25 bp, Homo sapien
tgcaggtaaagatggaagcagcaca

SEQ ID NO: 1871936 - DNA, 25 bp, Homo sapien
ttaaaatcaatgatttaacacttac

SEQ ID NO: 1871937 - DNA, 25 bp, Homo sapien
tggttttctgagcaggatgaaatat

SEQ ID NO: 1871938 - DNA, 25 bp, Homo sapien
tgttggttttctgagcaggatgaaa

SEQ ID NO: 1871939 - DNA, 25 bp, Homo sapien
tttctgagcaggatgaaatatctac

SEQ ID NO: 1871940 - DNA, 25 bp, Homo sapien
ggttttctgagcaggatgaaatatc

SEQ ID NO: 1871941 - DNA, 25 bp, Homo sapien
gacaccttctggctgactttaggaa

SEQ ID NO: 1871942 - DNA, 25 bp, Homo sapien
gattcacatgttcaaggcctggttc

SEQ ID NO: 1871943 - DNA, 25 bp, Homo sapien
tcagctcattgaaagccatacacag

SEQ ID NO: 1871944 - DNA, 25 bp, Homo sapien
tgtatagctcaatcacccagtgtat

SEQ ID NO: 1871945 - DNA, 25 bp, Homo sapien
ctttaggagggccatggtgtataat

SEQ ID NO: 1871946 - DNA, 25 bp, Homo sapien
ggtgttttaagatcaggatgacatg

SEQ ID NO: 1871947 - DNA, 25 bp, Homo sapien
tgaagtactgtgctctttcttgcag

SEQ ID NO: 1871948 - DNA, 25 bp, Homo sapien
caggatgacatggttttcctagagt

SEQ ID NO: 1871949 - DNA, 25 bp, Homo sapien
ctcaacgatggttctctcccctgtg

SEQ ID NO: 1871950 - DNA, 25 bp, Homo sapien
tccccgtccctagccatttctagtc

SEQ ID NO: 1871951 - DNA, 25 bp, Homo sapien
tcaacgatggttctctcccctgtgc

SEQ ID NO: 1871952 - DNA, 25 bp, Homo sapien
tccctagccatttctagtctccaat

SEQ ID NO: 1871953 - DNA, 25 bp, Homo sapien
gcgcgcccctctcaccgcgattgtt

SEQ ID NO: 1871954 - DNA, 25 bp, Homo sapien
gttgcggcgttgaggagctgcggcg

SEQ ID NO: 1871955 - DNA, 25 bp, Homo sapien
cctctcaccgcgattgttcacttgc

SEQ ID NO: 1871956 - DNA, 25 bp, Homo sapien
tcctgcagttgggccggcgcgttgc

SEQ ID NO: 1871957 - DNA, 25 bp, Homo sapien
cagtgcgctgccagtgtcatgccaa

SEQ ID NO: 1871958 - DNA, 25 bp, Homo sapien
ggaggcgttcgcattcaaacaagaa

SEQ ID NO: 1871959 - DNA, 25 bp, Homo sapien
taaagagctaattaggagtccacag

SEQ ID NO: 1871960 - DNA, 25 bp, Homo sapien
catataaggattcgggttgcccagg

SEQ ID NO: 1871961 - DNA, 25 bp, Homo sapien
tctttctttctagtgccgaacaatt

SEQ ID NO: 1871962 - DNA, 25 bp, Homo sapien
gttctttctttctagtgccgaacaa

SEQ ID NO: 1871963 - DNA, 25 bp, Homo sapien
tttgttctttctttctagtgccgaa

SEQ ID NO: 1871964 - DNA, 25 bp, Homo sapien
tgttctttctttctagtgccgaaca

SEQ ID NO: 1871965 - DNA, 25 bp, Homo sapien
cagttttctgaaggggcctttattg

SEQ ID NO: 1871966 - DNA, 25 bp, Homo sapien
aggtgaagaaccctgtagagggact

SEQ ID NO: 1871967 - DNA, 25 bp, Homo sapien
atgaggccagttttctgaaggggcc

SEQ ID NO: 1871968 - DNA, 25 bp, Homo sapien
gaagaaccctgtagagggactgtgt

SEQ ID NO: 1871969 - DNA, 25 bp, Homo sapien
tgggtcatcttgaacagtgggctta

SEQ ID NO: 1871970 - DNA, 25 bp, Homo sapien
gaaaagcattgcttacagcagaatg

SEQ ID NO: 1871971 - DNA, 25 bp, Homo sapien
gcttatgggagtactaagcccacat

SEQ ID NO: 1871972 - DNA, 25 bp, Homo sapien
taaggtaccactcttttatgacaga

SEQ ID NO: 1871973 - DNA, 25 bp, Homo sapien
taggggctgcattggtggtcttgca

SEQ ID NO: 1871974 - DNA, 25 bp, Homo sapien
aggggctgcattggtggtcttgcac

SEQ ID NO: 1871975 - DNA, 25 bp, Homo sapien
ctaggggctgcattggtggtcttgc

SEQ ID NO: 1871976 - DNA, 25 bp, Homo sapien
tgcctcatgattacttagatccttg

SEQ ID NO: 1871977 - DNA, 25 bp, Homo sapien
tatcgatctgatatgacaacccgat

SEQ ID NO: 1871978 - DNA, 25 bp, Homo sapien
tactgcagtttgatactggataagc

SEQ ID NO: 1871979 - DNA, 25 bp, Homo sapien
gatactggataagcatatcgatctg

SEQ ID NO: 1871980 - DNA, 25 bp, Homo sapien
caactcaattgtgaggatgccagcc

SEQ ID NO: 1871981 - DNA, 25 bp, Homo sapien
tagccctactcggtgtgtaatgcgt

SEQ ID NO: 1871982 - DNA, 25 bp, Homo sapien
tggagctaggaaaggcaactacagc

SEQ ID NO: 1871983 - DNA, 25 bp, Homo sapien
gactgagttctacctccttgagtgg

SEQ ID NO: 1871984 - DNA, 25 bp, Homo sapien
tgctgtttgaacaattgcaggaggc

SEQ ID NO: 1871985 - DNA, 25 bp, Homo sapien
tgaacaattgcaggaggccttgcaa

SEQ ID NO: 1871986 - DNA, 25 bp, Homo sapien
acaattgcaggaggccttgcaactg

SEQ ID NO: 1871987 - DNA, 25 bp, Homo sapien
tgtttgaacaattgcaggaggcctt

SEQ ID NO: 1871988 - DNA, 25 bp, Homo sapien
agatcttcgtacttgcaaccattgg

SEQ ID NO: 1871989 - DNA, 25 bp, Homo sapien
tatagagatcttcgtacttgcaacc

SEQ ID NO: 1871990 - DNA, 25 bp, Homo sapien
tagagatcttcgtacttgcaaccat

SEQ ID NO: 1871991 - DNA, 25 bp, Homo sapien
gttactatagagatcttcgtacttg

SEQ ID NO: 1871992 - DNA, 25 bp, Homo sapien
gcgacagagccagacagactttttt

SEQ ID NO: 1871993 - DNA, 25 bp, Homo sapien
gaatcacttgatccctgcaagcgga

SEQ ID NO: 1871994 - DNA, 25 bp, Homo sapien
catggatggtaagtgtttcaacagg

SEQ ID NO: 1871995 - DNA, 25 bp, Homo sapien
caggttacatatgataacaggccaa

SEQ ID NO: 1871996 - DNA, 25 bp, Homo sapien
tgcatagtccatcgtcacagttatc

SEQ ID NO: 1871997 - DNA, 25 bp, Homo sapien
actggcacaaggtgctccttgttca

SEQ ID NO: 1871998 - DNA, 25 bp, Homo sapien
ccatcgtcacagttatctgggcaac

SEQ ID NO: 1871999 - DNA, 25 bp, Homo sapien
tatctgggcaactggcacaaggtgc

SEQ ID NO: 1872000 - DNA, 25 bp, Homo sapien
gattgggacagtaggcatttccaca

SEQ ID NO: 1872001 - DNA, 25 bp, Homo sapien
ttagaactttttgattgggacagta

SEQ ID NO: 1872002 - DNA, 25 bp, Homo sapien
taggcatttccacatccaacgaggt

SEQ ID NO: 1872003 - DNA, 25 bp, Homo sapien
cgaggtatgaagagtaccaaacaac

SEQ ID NO: 1872004 - DNA, 25 bp, Homo sapien
gttgggagtctttggccctacacca

SEQ ID NO: 1872005 - DNA, 25 bp, Homo sapien
tagagattctcaccacattttagac

SEQ ID NO: 1872006 - DNA, 25 bp, Homo sapien
tgtccaaccactgcgttgggagtct

SEQ ID NO: 1872007 - DNA, 25 bp, Homo sapien
agctttggattgcttgtgaccatga

SEQ ID NO: 1872008 - DNA, 25 bp, Homo sapien
ctgtgtctgtaattgcactggtttg

SEQ ID NO: 1872009 - DNA, 25 bp, Homo sapien
tgggttactgtgtctgtaattgcac

SEQ ID NO: 1872010 - DNA, 25 bp, Homo sapien
tgtcattcgatcctttgggttactg

SEQ ID NO: 1872011 - DNA, 25 bp, Homo sapien
ttgcccacttttgggcatttgctgc

SEQ ID NO: 1872012 - DNA, 25 bp, Homo sapien
tactgctctcctcagttcattgtgc

SEQ ID NO: 1872013 - DNA, 25 bp, Homo sapien
caatctccctttgcacttgtgtttg

SEQ ID NO: 1872014 - DNA, 25 bp, Homo sapien
tctccctttgcacttgtgtttgggt

SEQ ID NO: 1872015 - DNA, 25 bp, Homo sapien
gcagggggagatactgctctcctca

SEQ ID NO: 1872016 - DNA, 25 bp, Homo sapien
cagcaaccaggaacaacagcactgg

SEQ ID NO: 1872017 - DNA, 25 bp, Homo sapien
acaaaaccggtggaacagggatctg

SEQ ID NO: 1872018 - DNA, 25 bp, Homo sapien
caaaaccggtggaacagggatctgc

SEQ ID NO: 1872019 - DNA, 25 bp, Homo sapien
cagtggtttccagagcaggatgaag

SEQ ID NO: 1872020 - DNA, 25 bp, Homo sapien
gtcattgctggcccttcatgatcca

SEQ ID NO: 1872021 - DNA, 25 bp, Homo sapien
tcattgctggcccttcatgatccat

SEQ ID NO: 1872022 - DNA, 25 bp, Homo sapien
gtctcccaattttagcagtgagtgt

SEQ ID NO: 1872023 - DNA, 25 bp, Homo sapien
tcttccagctcttatttggatatct

SEQ ID NO: 1872024 - DNA, 25 bp, Homo sapien
gtcttccagctcttatttggatatc

SEQ ID NO: 1872025 - DNA, 25 bp, Homo sapien
ttcataatcgtcttccctagctcct

SEQ ID NO: 1872026 - DNA, 25 bp, Homo sapien
gccagtctttcatgggtctgtacaa

SEQ ID NO: 1872027 - DNA, 25 bp, Homo sapien
ggtccctagtagttggagcacaggc

SEQ ID NO: 1872028 - DNA, 25 bp, Homo sapien
aagtgtcccatgaaacagtggtccc

SEQ ID NO: 1872029 - DNA, 25 bp, Homo sapien
gcacaggctgtaaagagactccatt

SEQ ID NO: 1872030 - DNA, 25 bp, Homo sapien
tcttcaccttgttttaatctaaata

SEQ ID NO: 1872031 - DNA, 25 bp, Homo sapien
gagttcttcaccttgttttaatcta

SEQ ID NO: 1872032 - DNA, 25 bp, Homo sapien
gtcctccctagatagcacaatggtg

SEQ ID NO: 1872033 - DNA, 25 bp, Homo sapien
gcaacttaagaatatgtcctcccta

SEQ ID NO: 1872034 - DNA, 25 bp, Homo sapien
tgagaacttgaacaggcaaatgcgt

SEQ ID NO: 1872035 - DNA, 25 bp, Homo sapien
cattaagctgacttaagggccatgg

SEQ ID NO: 1872036 - DNA, 25 bp, Homo sapien
tgagggcctctactccaggaaggat

SEQ ID NO: 1872037 - DNA, 25 bp, Homo sapien
atgttgctgagggcctctactccag

SEQ ID NO: 1872038 - DNA, 25 bp, Homo sapien
gctgagggcctctactccaggaagg

SEQ ID NO: 1872039 - DNA, 25 bp, Homo sapien
gttgctgagggcctctactccagga

SEQ ID NO: 1872040 - DNA, 25 bp, Homo sapien
caggccgacctagatgactcataag

SEQ ID NO: 1872041 - DNA, 25 bp, Homo sapien
cagcaggatgactgaaccaggagct

SEQ ID NO: 1872042 - DNA, 25 bp, Homo sapien
catggaactatgagcgcggtgtgca

SEQ ID NO: 1872043 - DNA, 25 bp, Homo sapien
caagtatagccagaaagggtctcac

SEQ ID NO: 1872044 - DNA, 25 bp, Homo sapien
tggtgacttctaacgcctttgccct

SEQ ID NO: 1872045 - DNA, 25 bp, Homo sapien
gacataggctgacacctggatctta

SEQ ID NO: 1872046 - DNA, 25 bp, Homo sapien
gggctgggtcggtggtgacttctaa

SEQ ID NO: 1872047 - DNA, 25 bp, Homo sapien
tgaagaaccaacttgctgttgaggg

SEQ ID NO: 1872048 - DNA, 25 bp, Homo sapien
cttatgggcagatcagaagaattgc

SEQ ID NO: 1872049 - DNA, 25 bp, Homo sapien
tattgccatgagatgggctcacctt

SEQ ID NO: 1872050 - DNA, 25 bp, Homo sapien
tatcgacaattcctaaagctaaaga

SEQ ID NO: 1872051 - DNA, 25 bp, Homo sapien
ctaaagcgtacaatatggtggaatc

SEQ ID NO: 1872052 - DNA, 25 bp, Homo sapien
tttgacatcattttggccttttgcg

SEQ ID NO: 1872053 - DNA, 25 bp, Homo sapien
gccttttgcgcagcatctttactcc

SEQ ID NO: 1872054 - DNA, 25 bp, Homo sapien
cctgcttgcaattttccactcctgt

SEQ ID NO: 1872055 - DNA, 25 bp, Homo sapien
cattttggccttttgcgcagcatct

SEQ ID NO: 1872056 - DNA, 25 bp, Homo sapien
actgaggcacagatatgctcttggg

SEQ ID NO: 1872057 - DNA, 25 bp, Homo sapien
agtactattgttatctccgtttaca

SEQ ID NO: 1872058 - DNA, 25 bp, Homo sapien
cacagatatgctcttgggtacttgt

SEQ ID NO: 1872059 - DNA, 25 bp, Homo sapien
tgggtacttgtcagcagcagttgtt

SEQ ID NO: 1872060 - DNA, 25 bp, Homo sapien
ttgctggctggtgaaatgacgcctc

SEQ ID NO: 1872061 - DNA, 25 bp, Homo sapien
tgctggctggtgaaatgacgcctct

SEQ ID NO: 1872062 - DNA, 25 bp, Homo sapien
gctggctggtgaaatgacgcctctc

SEQ ID NO: 1872063 - DNA, 25 bp, Homo sapien
gttgctggctggtgaaatgacgcct

SEQ ID NO: 1872064 - DNA, 25 bp, Homo sapien
tgctcttactttggcaattgtagag

SEQ ID NO: 1872065 - DNA, 25 bp, Homo sapien
gagtaattttagaacactgctggag

SEQ ID NO: 1872066 - DNA, 25 bp, Homo sapien
cttgatcatgagacgggtgtcctgg

SEQ ID NO: 1872067 - DNA, 25 bp, Homo sapien
gaaatagatttagagcatctgctgc

SEQ ID NO: 1872068 - DNA, 25 bp, Homo sapien
aagggaggaagagaccattaactgc

SEQ ID NO: 1872069 - DNA, 25 bp, Homo sapien
cattaactgcaacataaagcgtctc

SEQ ID NO: 1872070 - DNA, 25 bp, Homo sapien
gtctcacgtcttgtgactttcttca

SEQ ID NO: 1872071 - DNA, 25 bp, Homo sapien
ttgtccatttgcaggaacagagaaa

SEQ ID NO: 1872072 - DNA, 25 bp, Homo sapien
aaggctctagtgcactatgatcgtg

SEQ ID NO: 1872073 - DNA, 25 bp, Homo sapien
tcaaggctctagtgcactatgatcg

SEQ ID NO: 1872074 - DNA, 25 bp, Homo sapien
ctagtgcactatgatcgtgcctgta

SEQ ID NO: 1872075 - DNA, 25 bp, Homo sapien
gtgcactatgatcgtgcctgtaagt

SEQ ID NO: 1872076 - DNA, 25 bp, Homo sapien
tcagtgatagtcatcacgagaacat

SEQ ID NO: 1872077 - DNA, 25 bp, Homo sapien
tgatacttgagtcttcctgaatacc

SEQ ID NO: 1872078 - DNA, 25 bp, Homo sapien
gggaaatttcaatgatacttgagtc

SEQ ID NO: 1872079 - DNA, 25 bp, Homo sapien
aacatcgggcaagggaaatttcaat

SEQ ID NO: 1872080 - DNA, 25 bp, Homo sapien
catggtcttgtttcggaagtacttt

SEQ ID NO: 1872081 - DNA, 25 bp, Homo sapien
attctgaacttcaagttccgtgaag

SEQ ID NO: 1872082 - DNA, 25 bp, Homo sapien
tcaagttccgtgaagccggataaaa

SEQ ID NO: 1872083 - DNA, 25 bp, Homo sapien
ctcatggtcttgtttcggaagtact

SEQ ID NO: 1872084 - DNA, 25 bp, Homo sapien
ctattccatttttacatgaggccat

SEQ ID NO: 1872085 - DNA, 25 bp, Homo sapien
ttctattccatttttacatgaggcc

SEQ ID NO: 1872086 - DNA, 25 bp, Homo sapien
tctattccatttttacatgaggcca

SEQ ID NO: 1872087 - DNA, 25 bp, Homo sapien
tgcaaccctgtttactcagaagatg

SEQ ID NO: 1872088 - DNA, 25 bp, Homo sapien
tcagtgcattttacgttagttggcc

SEQ ID NO: 1872089 - DNA, 25 bp, Homo sapien
tagttggccttaactgtgctcttcc

SEQ ID NO: 1872090 - DNA, 25 bp, Homo sapien
gaagctatttatgctcatctggcaa

SEQ ID NO: 1872091 - DNA, 25 bp, Homo sapien
tgagggacccagttataccataagt

SEQ ID NO: 1872092 - DNA, 25 bp, Homo sapien
gggagttgaaccacataagacctat

SEQ ID NO: 1872093 - DNA, 25 bp, Homo sapien
tcatcgtcacagcatagaacagttg

SEQ ID NO: 1872094 - DNA, 25 bp, Homo sapien
tagcccaggttactgttgagggacc

SEQ ID NO: 1872095 - DNA, 25 bp, Homo sapien
cacacagacaagtggctttacagaa

SEQ ID NO: 1872096 - DNA, 25 bp, Homo sapien
tgttgagtggttgcatcccagataa

SEQ ID NO: 1872097 - DNA, 25 bp, Homo sapien
cagtcgaagtattcatcatagtaga

SEQ ID NO: 1872098 - DNA, 25 bp, Homo sapien
atcccagataatggacttgtatgtc

SEQ ID NO: 1872099 - DNA, 25 bp, Homo sapien
ggcttcacatgggacgcctgtctta

SEQ ID NO: 1872100 - DNA, 25 bp, Homo sapien
tcacagttacttgggcaggcttcac

SEQ ID NO: 1872101 - DNA, 25 bp, Homo sapien
aagtttgtcttcacagttacttggg

SEQ ID NO: 1872102 - DNA, 25 bp, Homo sapien
gggacgcctgtcttataaggttcat

SEQ ID NO: 1872103 - DNA, 25 bp, Homo sapien
tggcggcaagatgcaatggcacagc

SEQ ID NO: 1872104 - DNA, 25 bp, Homo sapien
tcaggtaagatgtggcccaaacaat

SEQ ID NO: 1872105 - DNA, 25 bp, Homo sapien
tcgaggtgatccttgttggcggcaa

SEQ ID NO: 1872106 - DNA, 25 bp, Homo sapien
aatagtgacaaacgtagagatatcg

SEQ ID NO: 1872107 - DNA, 25 bp, Homo sapien
aattacacttgaccatgatacagga

SEQ ID NO: 1872108 - DNA, 25 bp, Homo sapien
tgtagtggtcagtagttatgtcatc

SEQ ID NO: 1872109 - DNA, 25 bp, Homo sapien
gatacaggataagatgtcatatgca

SEQ ID NO: 1872110 - DNA, 25 bp, Homo sapien
tcatcatccgttgttgtccattctc

SEQ ID NO: 1872111 - DNA, 25 bp, Homo sapien
ggttgctctctgtcatatcacaata

SEQ ID NO: 1872112 - DNA, 25 bp, Homo sapien
gggggttgctctctgtcatatcaca

SEQ ID NO: 1872113 - DNA, 25 bp, Homo sapien
tctgtcatatcacaatactttgaaa

SEQ ID NO: 1872114 - DNA, 25 bp, Homo sapien
gaagtctcctctcaagggggttgct

SEQ ID NO: 1872115 - DNA, 25 bp, Homo sapien
gagcctgcactatttctaacccttg

SEQ ID NO: 1872116 - DNA, 25 bp, Homo sapien
cctgcactatttctaacccttgttg

SEQ ID NO: 1872117 - DNA, 25 bp, Homo sapien
tccagagcctgcactatttctaacc

SEQ ID NO: 1872118 - DNA, 25 bp, Homo sapien
cagagcctgcactatttctaaccct

SEQ ID NO: 1872119 - DNA, 25 bp, Homo sapien
tcttcttgtacatttggcaagtcgg

SEQ ID NO: 1872120 - DNA, 25 bp, Homo sapien
tcctgagggcgttgtgtatattaac

SEQ ID NO: 1872121 - DNA, 25 bp, Homo sapien
ggctggtggaactactcttctcctg

SEQ ID NO: 1872122 - DNA, 25 bp, Homo sapien
gtcggtgacgagcttattaaattgg

SEQ ID NO: 1872123 - DNA, 25 bp, Homo sapien
cagcaaccaaaaacaagaggtgttt

SEQ ID NO: 1872124 - DNA, 25 bp, Homo sapien
ttaaatttgtgtcctgataagaacc

SEQ ID NO: 1872125 - DNA, 25 bp, Homo sapien
tgtgtcctgataagaaccaagcctt

SEQ ID NO: 1872126 - DNA, 25 bp, Homo sapien
agcctttctctatgtagtgtatttg

SEQ ID NO: 1872127 - DNA, 25 bp, Homo sapien
tctctatgtagtgtatttgtgcttt

SEQ ID NO: 1872128 - DNA, 25 bp, Homo sapien
aagaattatctcaccaagctctgtc

SEQ ID NO: 1872129 - DNA, 25 bp, Homo sapien
gaattatctcaccaagctctgtcct

SEQ ID NO: 1872130 - DNA, 25 bp, Homo sapien
ataaaagaattatctcaccaagctc

SEQ ID NO: 1872131 - DNA, 25 bp, Homo sapien
aaaagaattatctcaccaagctctg

SEQ ID NO: 1872132 - DNA, 25 bp, Homo sapien
caggttctgtttctttacctctcac

SEQ ID NO: 1872133 - DNA, 25 bp, Homo sapien
tccaggttctgtttctttacctctc

SEQ ID NO: 1872134 - DNA, 25 bp, Homo sapien
ccaggttctgtttctttacctctca

SEQ ID NO: 1872135 - DNA, 25 bp, Homo sapien
tgtctgctaaggggacgtttttctc

SEQ ID NO: 1872136 - DNA, 25 bp, Homo sapien
tctgctaaggggacgtttttctcca

SEQ ID NO: 1872137 - DNA, 25 bp, Homo sapien
aattcttccttaatgcagttaagaa

SEQ ID NO: 1872138 - DNA, 25 bp, Homo sapien
attcttccttaatgcagttaagaaa

SEQ ID NO: 1872139 - DNA, 25 bp, Homo sapien
caattcttccttaatgcagttaaga

SEQ ID NO: 1872140 - DNA, 25 bp, Homo sapien
cgtacagtcagatagggtaacccac

SEQ ID NO: 1872141 - DNA, 25 bp, Homo sapien
aatgattcttttcctgtagacgtac

SEQ ID NO: 1872142 - DNA, 25 bp, Homo sapien
tcctgtagacgtacagtcagatagg

SEQ ID NO: 1872143 - DNA, 25 bp, Homo sapien
tcttttcctgtagacgtacagtcag

SEQ ID NO: 1872144 - DNA, 25 bp, Homo sapien
tatcataggcatattcttttccact

SEQ ID NO: 1872145 - DNA, 25 bp, Homo sapien
cagactggaggtatcataggcatat

SEQ ID NO: 1872146 - DNA, 25 bp, Homo sapien
tggaggtatcataggcatattcttt

SEQ ID NO: 1872147 - DNA, 25 bp, Homo sapien
ggtatcataggcatattcttttcca

SEQ ID NO: 1872148 - DNA, 25 bp, Homo sapien
caggtaaagcgtattgataaagaag

SEQ ID NO: 1872149 - DNA, 25 bp, Homo sapien
ctaacaggtaaagcgtattgataaa

SEQ ID NO: 1872150 - DNA, 25 bp, Homo sapien
ctggctctaacaggtaaagcgtatt

SEQ ID NO: 1872151 - DNA, 25 bp, Homo sapien
ggctctaacaggtaaagcgtattga

SEQ ID NO: 1872152 - DNA, 25 bp, Homo sapien
tcagggagcagagcacctgtttgca

SEQ ID NO: 1872153 - DNA, 25 bp, Homo sapien
aagtggaaaccgctttgactctgac

SEQ ID NO: 1872154 - DNA, 25 bp, Homo sapien
tttgactctgactaggatctgttgc

SEQ ID NO: 1872155 - DNA, 25 bp, Homo sapien
ggaagcagttctaacagtgccccac

SEQ ID NO: 1872156 - DNA, 25 bp, Homo sapien
caccaggattgctggtgccaagaga

SEQ ID NO: 1872157 - DNA, 25 bp, Homo sapien
taggtgcagcccatttaggccctca

SEQ ID NO: 1872158 - DNA, 25 bp, Homo sapien
gtgagccaagaagctgtcagcacca

SEQ ID NO: 1872159 - DNA, 25 bp, Homo sapien
tactgacggtgagaaggacaccact

SEQ ID NO: 1872160 - DNA, 25 bp, Homo sapien
gacattacccttggcacaactggat

SEQ ID NO: 1872161 - DNA, 25 bp, Homo sapien
ttcccttgcgctgcttctgagtgtc

SEQ ID NO: 1872162 - DNA, 25 bp, Homo sapien
cataactgtgctcctctggtccact

SEQ ID NO: 1872163 - DNA, 25 bp, Homo sapien
ggattcaccatgtcgtcttcttcta

SEQ ID NO: 1872164 - DNA, 25 bp, Homo sapien
cttactcttacagagggagatggaa

SEQ ID NO: 1872165 - DNA, 25 bp, Homo sapien
ttattgagaaaagatgggctttcca

SEQ ID NO: 1872166 - DNA, 25 bp, Homo sapien
tccacttcagtttgaacctctacat

SEQ ID NO: 1872167 - DNA, 25 bp, Homo sapien
taggtctggtaaacacttgggtctg

SEQ ID NO: 1872168 - DNA, 25 bp, Homo sapien
tcttcgaaagtctttaatgcttgcc

SEQ ID NO: 1872169 - DNA, 25 bp, Homo sapien
tgaagtccacctttcttcgaaagtc

SEQ ID NO: 1872170 - DNA, 25 bp, Homo sapien
tctttaatgcttgccaagatttccc

SEQ ID NO: 1872171 - DNA, 25 bp, Homo sapien
gctgaagtccacctttcttcgaaag

SEQ ID NO: 1872172 - DNA, 25 bp, Homo sapien
taattgctatggtagttgccagcat

SEQ ID NO: 1872173 - DNA, 25 bp, Homo sapien
cactgccccagttctcaaatggaga

SEQ ID NO: 1872174 - DNA, 25 bp, Homo sapien
gagaaagtctccgattcatcactgc

SEQ ID NO: 1872175 - DNA, 25 bp, Homo sapien
ggagaattttgcaagatgctcttaa

SEQ ID NO: 1872176 - DNA, 25 bp, Homo sapien
ttaaaacagctctttcgatgatctc

SEQ ID NO: 1872177 - DNA, 25 bp, Homo sapien
aaacagctctttcgatgatctccat

SEQ ID NO: 1872178 - DNA, 25 bp, Homo sapien
gtgttaaaacagctctttcgatgat

SEQ ID NO: 1872179 - DNA, 25 bp, Homo sapien
taaaacagctctttcgatgatctcc

SEQ ID NO: 1872180 - DNA, 25 bp, Homo sapien
caaagagaaagacgtgaatcttcat

SEQ ID NO: 1872181 - DNA, 25 bp, Homo sapien
acaaagagaaagacgtgaatcttca

SEQ ID NO: 1872182 - DNA, 25 bp, Homo sapien
aacaaagagaaagacgtgaatcttc

SEQ ID NO: 1872183 - DNA, 25 bp, Homo sapien
ggtgcaacgatcagcattcaccaag

SEQ ID NO: 1872184 - DNA, 25 bp, Homo sapien
tttcttggtaaggaacatatgtcta

SEQ ID NO: 1872185 - DNA, 25 bp, Homo sapien
tacaacgaccgtaacgtttggtgca

SEQ ID NO: 1872186 - DNA, 25 bp, Homo sapien
taacgtttggtgcaacgatcagcat

SEQ ID NO: 1872187 - DNA, 25 bp, Homo sapien
gaatgaaggtcacataacacagaaa

SEQ ID NO: 1872188 - DNA, 25 bp, Homo sapien
ctggtagaatgaaggtcacataaca

SEQ ID NO: 1872189 - DNA, 25 bp, Homo sapien
acataacacagaaaatggagatagt

SEQ ID NO: 1872190 - DNA, 25 bp, Homo sapien
aatggagatagtaaaagatcctcat

SEQ ID NO: 1872191 - DNA, 25 bp, Homo sapien
caatagagaggtgaagcaagatggc

SEQ ID NO: 1872192 - DNA, 25 bp, Homo sapien
tagtagggagcgtatgcctacatgg

SEQ ID NO: 1872193 - DNA, 25 bp, Homo sapien
aatcaactgagcacttatagtacct

SEQ ID NO: 1872194 - DNA, 25 bp, Homo sapien
gcagaataaagggttccatccattg

SEQ ID NO: 1872195 - DNA, 25 bp, Homo sapien
tcaacatcatcacaaaacgttttac

SEQ ID NO: 1872196 - DNA, 25 bp, Homo sapien
aatctatactttggttcaaaattgc

SEQ ID NO: 1872197 - DNA, 25 bp, Homo sapien
taatgcagtatccataatcatactc

SEQ ID NO: 1872198 - DNA, 25 bp, Homo sapien
tcctctcactttttcgcatctttca

SEQ ID NO: 1872199 - DNA, 25 bp, Homo sapien
aatagagtggagatatgctgtggac

SEQ ID NO: 1872200 - DNA, 25 bp, Homo sapien
catcaagagtgaggtaccacaaata

SEQ ID NO: 1872201 - DNA, 25 bp, Homo sapien
gggacaaatctgttcgaaagctaga

SEQ ID NO: 1872202 - DNA, 25 bp, Homo sapien
ctgtggacatcaacacaatcctgca

SEQ ID NO: 1872203 - DNA, 25 bp, Homo sapien
tgagttccaggtcttatgcagtaag

SEQ ID NO: 1872204 - DNA, 25 bp, Homo sapien
gaccattacctattctgcactctct

SEQ ID NO: 1872205 - DNA, 25 bp, Homo sapien
tcaagtccaagctaccatactcagg

SEQ ID NO: 1872206 - DNA, 25 bp, Homo sapien
tatgcagtaagcaatcctaatttca

SEQ ID NO: 1872207 - DNA, 25 bp, Homo sapien
tgacagacacctgaattatactcac

SEQ ID NO: 1872208 - DNA, 25 bp, Homo sapien
ccgtgacagacacctgaattatact

SEQ ID NO: 1872209 - DNA, 25 bp, Homo sapien
gtgacagacacctgaattatactca

SEQ ID NO: 1872210 - DNA, 25 bp, Homo sapien
cgtgacagacacctgaattatactc

SEQ ID NO: 1872211 - DNA, 25 bp, Homo sapien
gtaaaattgtgacccaaaagtgcag

SEQ ID NO: 1872212 - DNA, 25 bp, Homo sapien
aaattgtgacccaaaagtgcagaat

SEQ ID NO: 1872213 - DNA, 25 bp, Homo sapien
tgacccaaaagtgcagaataaagaa

SEQ ID NO: 1872214 - DNA, 25 bp, Homo sapien
ctggtaaaattgtgacccaaaagtg

SEQ ID NO: 1872215 - DNA, 25 bp, Homo sapien
tatttgggtccgtagggtcacattc

SEQ ID NO: 1872216 - DNA, 25 bp, Homo sapien
caatgacgtgagtctttagggtacc

SEQ ID NO: 1872217 - DNA, 25 bp, Homo sapien
cctactaaaggtgatatggtgccct

SEQ ID NO: 1872218 - DNA, 25 bp, Homo sapien
tctgtcacgcagcaatgagttgtag

SEQ ID NO: 1872219 - DNA, 25 bp, Homo sapien
tttctctgtcccatgtcgggccttt

SEQ ID NO: 1872220 - DNA, 25 bp, Homo sapien
tattgtggaagatgtatttgtcttt

SEQ ID NO: 1872221 - DNA, 25 bp, Homo sapien
aatattgtggaagatgtatttgtct

SEQ ID NO: 1872222 - DNA, 25 bp, Homo sapien
ctctgtcccatgtcgggccttttca

SEQ ID NO: 1872223 - DNA, 25 bp, Homo sapien
ttagaatggcattcattccagaagg

SEQ ID NO: 1872224 - DNA, 25 bp, Homo sapien
ttttcttatagtgatgcaattgcaa

SEQ ID NO: 1872225 - DNA, 25 bp, Homo sapien
ggttgtatccgcatttccattataa

SEQ ID NO: 1872226 - DNA, 25 bp, Homo sapien
tgcaattgcaataccatagttacgg

SEQ ID NO: 1872227 - DNA, 25 bp, Homo sapien
tgccagatccatcattaacatgttg

SEQ ID NO: 1872228 - DNA, 25 bp, Homo sapien
cagatgccgatagagtttttgacac

SEQ ID NO: 1872229 - DNA, 25 bp, Homo sapien
ccaaactgggaaggatttgctaaca

SEQ ID NO: 1872230 - DNA, 25 bp, Homo sapien
tttttgacactgagaatgccagatc

SEQ ID NO: 1872231 - DNA, 25 bp, Homo sapien
gaataataaacaactgaccagaatc

SEQ ID NO: 1872232 - DNA, 25 bp, Homo sapien
taaacaactgaccagaatcttcacc

SEQ ID NO: 1872233 - DNA, 25 bp, Homo sapien
cagaagccagattggaataataaac

SEQ ID NO: 1872234 - DNA, 25 bp, Homo sapien
taataaacaactgaccagaatcttc

SEQ ID NO: 1872235 - DNA, 25 bp, Homo sapien
ggtcatttggacagagtggtcactg

SEQ ID NO: 1872236 - DNA, 25 bp, Homo sapien
acttggcagggcgttcctcaatgag

SEQ ID NO: 1872237 - DNA, 25 bp, Homo sapien
tcactgtggccatgtctcgtggcaa

SEQ ID NO: 1872238 - DNA, 25 bp, Homo sapien
tacttctcagaaatatggcaatggg

SEQ ID NO: 1872239 - DNA, 25 bp, Homo sapien
caagatgccgagatgactgctggca

SEQ ID NO: 1872240 - DNA, 25 bp, Homo sapien
gcatttgtcaacaatcctgtcatag

SEQ ID NO: 1872241 - DNA, 25 bp, Homo sapien
tagtgacagcaataaggccatgtct

SEQ ID NO: 1872242 - DNA, 25 bp, Homo sapien
tgctcccctgagcaatagcccaggt

SEQ ID NO: 1872243 - DNA, 25 bp, Homo sapien
ttctagacggctcttcctcatgatt

SEQ ID NO: 1872244 - DNA, 25 bp, Homo sapien
tctgacagataattaagaaagcagc

SEQ ID NO: 1872245 - DNA, 25 bp, Homo sapien
ccctgggtccactggtccatattct

SEQ ID NO: 1872246 - DNA, 25 bp, Homo sapien
cagcagctttttctagacggctctt

SEQ ID NO: 1872247 - DNA, 25 bp, Homo sapien
agttttctaacactgataacagctt

SEQ ID NO: 1872248 - DNA, 25 bp, Homo sapien
tactttcattagatttaggccgtaa

SEQ ID NO: 1872249 - DNA, 25 bp, Homo sapien
tctgctggtaattgcccaatttgat

SEQ ID NO: 1872250 - DNA, 25 bp, Homo sapien
ccaatttgattgttaagcatagttc

SEQ ID NO: 1872251 - DNA, 25 bp, Homo sapien
gccgccatgaacatgctgtgctttg

SEQ ID NO: 1872252 - DNA, 25 bp, Homo sapien
agatatccgggtcagagcagataaa

SEQ ID NO: 1872253 - DNA, 25 bp, Homo sapien
cgccatgaacatgctgtgctttgct

SEQ ID NO: 1872254 - DNA, 25 bp, Homo sapien
gcagataaaattcaagccgccatga

SEQ ID NO: 1872255 - DNA, 25 bp, Homo sapien
ttaggctcatcaaccattgtctgtc

SEQ ID NO: 1872256 - DNA, 25 bp, Homo sapien
ctgtggtttaggctcatcaaccatt

SEQ ID NO: 1872257 - DNA, 25 bp, Homo sapien
tggtttaggctcatcaaccattgtc

SEQ ID NO: 1872258 - DNA, 25 bp, Homo sapien
catcaaccattgtctgtctttctgc

SEQ ID NO: 1872259 - DNA, 25 bp, Homo sapien
ttgtgtcctcttcgcctgatgaaca

SEQ ID NO: 1872260 - DNA, 25 bp, Homo sapien
tgtgtcctcttcgcctgatgaacac

SEQ ID NO: 1872261 - DNA, 25 bp, Homo sapien
tgtcctcttcgcctgatgaacacaa

SEQ ID NO: 1872262 - DNA, 25 bp, Homo sapien
gtcctcttcgcctgatgaacacaac

SEQ ID NO: 1872263 - DNA, 25 bp, Homo sapien
ttagtgggctatggagcgctttcgg

SEQ ID NO: 1872264 - DNA, 25 bp, Homo sapien
cagttcctttgttagagatttgccc

SEQ ID NO: 1872265 - DNA, 25 bp, Homo sapien
tatggagcgctttcgggctgcagct

SEQ ID NO: 1872266 - DNA, 25 bp, Homo sapien
gctctgcaactgctctcgctgcagt

SEQ ID NO: 1872267 - DNA, 25 bp, Homo sapien
tcaaaatgatcttcatcatttattt

SEQ ID NO: 1872268 - DNA, 25 bp, Homo sapien
tatttcaatcagaaaaaatgttttc

SEQ ID NO: 1872269 - DNA, 25 bp, Homo sapien
tcatttatttcaatcagaaaaaatg

SEQ ID NO: 1872270 - DNA, 25 bp, Homo sapien
caaaatgatcttcatcatttatttc

SEQ ID NO: 1872271 - DNA, 25 bp, Homo sapien
taacatgatcaaaggttctccagca

SEQ ID NO: 1872272 - DNA, 25 bp, Homo sapien
aacatgatcaaaggttctccagcac

SEQ ID NO: 1872273 - DNA, 25 bp, Homo sapien
ctaacatgatcaaaggttctccagc

SEQ ID NO: 1872274 - DNA, 25 bp, Homo sapien
agctgatgagtaaagcatagaccat

SEQ ID NO: 1872275 - DNA, 25 bp, Homo sapien
gctgatgagtaaagcatagaccatt

SEQ ID NO: 1872276 - DNA, 25 bp, Homo sapien
ctctccttagtatgccagtggctca

SEQ ID NO: 1872277 - DNA, 25 bp, Homo sapien
gtgaggccgctgacaactgaattag

SEQ ID NO: 1872278 - DNA, 25 bp, Homo sapien
gacagagctatccagacctcttcag

SEQ ID NO: 1872279 - DNA, 25 bp, Homo sapien
tgcagaactacaagtggacagagct

SEQ ID NO: 1872280 - DNA, 25 bp, Homo sapien
tgatgagtctcttccagacttatga

SEQ ID NO: 1872281 - DNA, 25 bp, Homo sapien
gagtctcttccagacttatgaaaat

SEQ ID NO: 1872282 - DNA, 25 bp, Homo sapien
gatgagtctcttccagacttatgaa

SEQ ID NO: 1872283 - DNA, 25 bp, Homo sapien
tgagtctcttccagacttatgaaaa

SEQ ID NO: 1872284 - DNA, 25 bp, Homo sapien
gggatccaggaatcatcgtgagcag

SEQ ID NO: 1872285 - DNA, 25 bp, Homo sapien
tgtcgactgacaactctcagtgagt

SEQ ID NO: 1872286 - DNA, 25 bp, Homo sapien
gatccaggaatcatcgtgagcagct

SEQ ID NO: 1872287 - DNA, 25 bp, Homo sapien
acaggctgttttatgccttgtcgac

SEQ ID NO: 1872288 - DNA, 25 bp, Homo sapien
ccgccattccgtcgcaaaatacatt

SEQ ID NO: 1872289 - DNA, 25 bp, Homo sapien
gccattccgtcgcaaaatacattgt

SEQ ID NO: 1872290 - DNA, 25 bp, Homo sapien
cattccgtcgcaaaatacattgtaa

SEQ ID NO: 1872291 - DNA, 25 bp, Homo sapien
ccattccgtcgcaaaatacattgta

SEQ ID NO: 1872292 - DNA, 25 bp, Homo sapien
attaagatgtcggctttttctgctg

SEQ ID NO: 1872293 - DNA, 25 bp, Homo sapien
gacaccattcactgtcagctgtccc

SEQ ID NO: 1872294 - DNA, 25 bp, Homo sapien
cccccccaacaatgcaccaaattat

SEQ ID NO: 1872295 - DNA, 25 bp, Homo sapien
taagatgtcggctttttctgctgcc

SEQ ID NO: 1872296 - DNA, 25 bp, Homo sapien
cagtgccactagaggactattcctg

SEQ ID NO: 1872297 - DNA, 25 bp, Homo sapien
attcagtgccactagaggactattc

SEQ ID NO: 1872298 - DNA, 25 bp, Homo sapien
ccactagaggactattcctgagagc

SEQ ID NO: 1872299 - DNA, 25 bp, Homo sapien
gtgccactagaggactattcctgag

SEQ ID NO: 1872300 - DNA, 25 bp, Homo sapien
ttgagcccctaggtctattgtggtt

SEQ ID NO: 1872301 - DNA, 25 bp, Homo sapien
acttgagcccctaggtctattgtgg

SEQ ID NO: 1872302 - DNA, 25 bp, Homo sapien
aacttgagcccctaggtctattgtg

SEQ ID NO: 1872303 - DNA, 25 bp, Homo sapien
ttagcccagggaacttgagccccta

SEQ ID NO: 1872304 - DNA, 25 bp, Homo sapien
ggaggatcagcagccgttgtgtaac

SEQ ID NO: 1872305 - DNA, 25 bp, Homo sapien
cctgtagcatctgagcaagtgctgc

SEQ ID NO: 1872306 - DNA, 25 bp, Homo sapien
ccctccagggattttgtgatatcag

SEQ ID NO: 1872307 - DNA, 25 bp, Homo sapien
tgatatcagtgcacgtaagagagcc

SEQ ID NO: 1872308 - DNA, 25 bp, Homo sapien
gattaggctctttgctccctggagg

SEQ ID NO: 1872309 - DNA, 25 bp, Homo sapien
tcttttcctccctagactgtcagtt

SEQ ID NO: 1872310 - DNA, 25 bp, Homo sapien
ttcgtgggatcagcgattaggctct

SEQ ID NO: 1872311 - DNA, 25 bp, Homo sapien
cctttgtgaatcctcttcgtgggat

SEQ ID NO: 1872312 - DNA, 25 bp, Homo sapien
tttcttattcttttcacttctctta

SEQ ID NO: 1872313 - DNA, 25 bp, Homo sapien
tcttattcttttcacttctcttagc

SEQ ID NO: 1872314 - DNA, 25 bp, Homo sapien
cagaactgatccagcccctttcttc

SEQ ID NO: 1872315 - DNA, 25 bp, Homo sapien
ttattcttttcacttctcttagcca

SEQ ID NO: 1872316 - DNA, 25 bp, Homo sapien
cctctgcttgggatgctctttctag

SEQ ID NO: 1872317 - DNA, 25 bp, Homo sapien
tgcttgggatgctctttctagtctc

SEQ ID NO: 1872318 - DNA, 25 bp, Homo sapien
ggatgctctttctagtctctgcttc

SEQ ID NO: 1872319 - DNA, 25 bp, Homo sapien
ttacactttccattcctctgcttgg

SEQ ID NO: 1872320 - DNA, 25 bp, Homo sapien
actcgattggccacatcgtcaaggt

SEQ ID NO: 1872321 - DNA, 25 bp, Homo sapien
catttccatgaacctttgtgtcagt

SEQ ID NO: 1872322 - DNA, 25 bp, Homo sapien
tgaacctttgtgtcagttcagaaac

SEQ ID NO: 1872323 - DNA, 25 bp, Homo sapien
catcgtcaaggttcatttccatgaa

SEQ ID NO: 1872324 - DNA, 25 bp, Homo sapien
ggtaacacagtacagatgtcttctt

SEQ ID NO: 1872325 - DNA, 25 bp, Homo sapien
gtttcttggtaacacagtacagatg

SEQ ID NO: 1872326 - DNA, 25 bp, Homo sapien
tcttggtaacacagtacagatgtct

SEQ ID NO: 1872327 - DNA, 25 bp, Homo sapien
ttgtttcttggtaacacagtacaga

SEQ ID NO: 1872328 - DNA, 25 bp, Homo sapien
tagtttacccttcaaaagccagatg

SEQ ID NO: 1872329 - DNA, 25 bp, Homo sapien
ctagtttacccttcaaaagccagat

SEQ ID NO: 1872330 - DNA, 25 bp, Homo sapien
tctagtttacccttcaaaagccaga

SEQ ID NO: 1872331 - DNA, 25 bp, Homo sapien
tttatatttgtcatattttcttcct

SEQ ID NO: 1872332 - DNA, 25 bp, Homo sapien
tatttgtcatattttcttcctgtgt

SEQ ID NO: 1872333 - DNA, 25 bp, Homo sapien
tatatttgtcatattttcttcctgt

SEQ ID NO: 1872334 - DNA, 25 bp, Homo sapien
atttgtcatattttcttcctgtgtt

SEQ ID NO: 1872335 - DNA, 25 bp, Homo sapien
cattgaatgttttggaacacaggac

SEQ ID NO: 1872336 - DNA, 25 bp, Homo sapien
cacttctagcaattaggcctaagta

SEQ ID NO: 1872337 - DNA, 25 bp, Homo sapien
gaactttcttaatcagttggcttcc

SEQ ID NO: 1872338 - DNA, 25 bp, Homo sapien
catcagattggaagtcactgaaagt

SEQ ID NO: 1872339 - DNA, 25 bp, Homo sapien
tcagtccgtaatgccacaggccagg

SEQ ID NO: 1872340 - DNA, 25 bp, Homo sapien
tcctgaggcatattctctagggctc

SEQ ID NO: 1872341 - DNA, 25 bp, Homo sapien
agtttcctgaggcatattctctagg

SEQ ID NO: 1872342 - DNA, 25 bp, Homo sapien
aggcagtttcctgaggcatattctc

SEQ ID NO: 1872343 - DNA, 25 bp, Homo sapien
aagaagcttcaagtgaatgataact

SEQ ID NO: 1872344 - DNA, 25 bp, Homo sapien
tgttgatagaattctcagagcccag

SEQ ID NO: 1872345 - DNA, 25 bp, Homo sapien
ctgttgatagaattctcagagccca

SEQ ID NO: 1872346 - DNA, 25 bp, Homo sapien
cacaaagaagcttcaagtgaatgat

SEQ ID NO: 1872347 - DNA, 25 bp, Homo sapien
tatcctaaaggtatgtgaactttct

SEQ ID NO: 1872348 - DNA, 25 bp, Homo sapien
caggcatatcctaaaggtatgtgaa

SEQ ID NO: 1872349 - DNA, 25 bp, Homo sapien
gtcaggcatatcctaaaggtatgtg

SEQ ID NO: 1872350 - DNA, 25 bp, Homo sapien
ggcatatcctaaaggtatgtgaact

SEQ ID NO: 1872351 - DNA, 25 bp, Homo sapien
gtaatgttgctaagtgcagaacaaa

SEQ ID NO: 1872352 - DNA, 25 bp, Homo sapien
gaagtgtggtaatgttgctaagtgc

SEQ ID NO: 1872353 - DNA, 25 bp, Homo sapien
agtgtgaagtgtggtaatgttgcta

SEQ ID NO: 1872354 - DNA, 25 bp, Homo sapien
tgtggtaatgttgctaagtgcagaa

SEQ ID NO: 1872355 - DNA, 25 bp, Homo sapien
gaccctgtgaactttccaaatgcct

SEQ ID NO: 1872356 - DNA, 25 bp, Homo sapien
ccaaatgcctgagatctcattactg

SEQ ID NO: 1872357 - DNA, 25 bp, Homo sapien
caaatgcctgagatctcattactga

SEQ ID NO: 1872358 - DNA, 25 bp, Homo sapien
ggaccctgtgaactttccaaatgcc

SEQ ID NO: 1872359 - DNA, 25 bp, Homo sapien
ataattagccttgcaccctcacatg

SEQ ID NO: 1872360 - DNA, 25 bp, Homo sapien
agaaaccctagaggccatctgtgag

SEQ ID NO: 1872361 - DNA, 25 bp, Homo sapien
tagccttgcaccctcacatgtgagt

SEQ ID NO: 1872362 - DNA, 25 bp, Homo sapien
tagaggccatctgtgagtcagatgc

SEQ ID NO: 1872363 - DNA, 25 bp, Homo sapien
ctttaggaggtagtcagaagaattt

SEQ ID NO: 1872364 - DNA, 25 bp, Homo sapien
tttaggaggtagtcagaagaatttc

SEQ ID NO: 1872365 - DNA, 25 bp, Homo sapien
gacagaaattgagaagttaacatcc

SEQ ID NO: 1872366 - DNA, 25 bp, Homo sapien
ggacagaaattgagaagttaacatc

SEQ ID NO: 1872367 - DNA, 25 bp, Homo sapien
cagaaattgagaagttaacatccat

SEQ ID NO: 1872368 - DNA, 25 bp, Homo sapien
tgggacagaaattgagaagttaaca

SEQ ID NO: 1872369 - DNA, 25 bp, Homo sapien
gcagaagcaacgaagtagagacgtt

SEQ ID NO: 1872370 - DNA, 25 bp, Homo sapien
ctgcagaactagcagaagcaacgaa

SEQ ID NO: 1872371 - DNA, 25 bp, Homo sapien
gcaacgaagtagagacgttggcttc

SEQ ID NO: 1872372 - DNA, 25 bp, Homo sapien
gaactagcagaagcaacgaagtaga

SEQ ID NO: 1872373 - DNA, 25 bp, Homo sapien
gatccagtgttctaaaccattcacg

SEQ ID NO: 1872374 - DNA, 25 bp, Homo sapien
gatggccacgttaacaggtagccct

SEQ ID NO: 1872375 - DNA, 25 bp, Homo sapien
ttagcaactagccatgatggccacg

SEQ ID NO: 1872376 - DNA, 25 bp, Homo sapien
tactctgacccaatttccgagctgg

SEQ ID NO: 1872377 - DNA, 25 bp, Homo sapien
gatgaccggactgtcaaaacaacca

SEQ ID NO: 1872378 - DNA, 25 bp, Homo sapien
gaatccctggattaggatgaccgga

SEQ ID NO: 1872379 - DNA, 25 bp, Homo sapien
gttagcaggataattgacaaaccac

SEQ ID NO: 1872380 - DNA, 25 bp, Homo sapien
cttgagtgttgctctcgctgtaggg

SEQ ID NO: 1872381 - DNA, 25 bp, Homo sapien
aatgcaggcattcaagggagagttg

SEQ ID NO: 1872382 - DNA, 25 bp, Homo sapien
gagaaatagaactccagtatggcgg

SEQ ID NO: 1872383 - DNA, 25 bp, Homo sapien
gagagttgtgagaatggcccacgtc

SEQ ID NO: 1872384 - DNA, 25 bp, Homo sapien
tactgcctgttctttcgacttcctc

SEQ ID NO: 1872385 - DNA, 25 bp, Homo sapien
cacaggctccaaaccaattctgaaa

SEQ ID NO: 1872386 - DNA, 25 bp, Homo sapien
gatgattctaagacctcctagaaga

SEQ ID NO: 1872387 - DNA, 25 bp, Homo sapien
caaacactttttgacgtgattgatg

SEQ ID NO: 1872388 - DNA, 25 bp, Homo sapien
taagaaagactcagcacttggagct

SEQ ID NO: 1872389 - DNA, 25 bp, Homo sapien
tgacaaagaattgccctgagatgtc

SEQ ID NO: 1872390 - DNA, 25 bp, Homo sapien
ttctgacaaagaattgccctgagat

SEQ ID NO: 1872391 - DNA, 25 bp, Homo sapien
acaaagaattgccctgagatgtcag

SEQ ID NO: 1872392 - DNA, 25 bp, Homo sapien
ctaaatagctttgcagattaaattt

SEQ ID NO: 1872393 - DNA, 25 bp, Homo sapien
ggttgtctgctataaactgtttggt

SEQ ID NO: 1872394 - DNA, 25 bp, Homo sapien
ttagacatggttcatttcccttctc

SEQ ID NO: 1872395 - DNA, 25 bp, Homo sapien
cccaaacaccagaagatggttgtct

SEQ ID NO: 1872396 - DNA, 25 bp, Homo sapien
tccatggcttgacacagacccaaac

SEQ ID NO: 1872397 - DNA, 25 bp, Homo sapien
gggcaaatgccattcttcccccttg

SEQ ID NO: 1872398 - DNA, 25 bp, Homo sapien
gagaacaatctcattgtcggcagcc

SEQ ID NO: 1872399 - DNA, 25 bp, Homo sapien
cagccaggtagcaaccactgggcaa

SEQ ID NO: 1872400 - DNA, 25 bp, Homo sapien
caggtagcaaccactgggcaaatgc

SEQ ID NO: 1872401 - DNA, 25 bp, Homo sapien
cgtgtggcacattttctttatttat

SEQ ID NO: 1872402 - DNA, 25 bp, Homo sapien
tacgtgtggcacattttctttattt

SEQ ID NO: 1872403 - DNA, 25 bp, Homo sapien
tggcacattttctttatttatccgt

SEQ ID NO: 1872404 - DNA, 25 bp, Homo sapien
tgtggcacattttctttatttatcc

SEQ ID NO: 1872405 - DNA, 25 bp, Homo sapien
cacattcaattatgtcggactgcat

SEQ ID NO: 1872406 - DNA, 25 bp, Homo sapien
ctccaggccacattcaattatgtcg

SEQ ID NO: 1872407 - DNA, 25 bp, Homo sapien
ctgatgacagctacaatcaagagtg

SEQ ID NO: 1872408 - DNA, 25 bp, Homo sapien
caggccacattcaattatgtcggac

SEQ ID NO: 1872409 - DNA, 25 bp, Homo sapien
taatttgaaggtaataataagcgag

SEQ ID NO: 1872410 - DNA, 25 bp, Homo sapien
cactcctagctttagtgaacgtgta

SEQ ID NO: 1872411 - DNA, 25 bp, Homo sapien
acagactcttcactcctagctttag

SEQ ID NO: 1872412 - DNA, 25 bp, Homo sapien
taataagcgagtctcagacacagac

SEQ ID NO: 1872413 - DNA, 25 bp, Homo sapien
cttgctttctgatttgccttgtcca

SEQ ID NO: 1872414 - DNA, 25 bp, Homo sapien
ttgctttctgatttgccttgtccat

SEQ ID NO: 1872415 - DNA, 25 bp, Homo sapien
tcttttgtagatctagaattgccta

SEQ ID NO: 1872416 - DNA, 25 bp, Homo sapien
ttttcttttgtagatctagaattgc

SEQ ID NO: 1872417 - DNA, 25 bp, Homo sapien
tttcttttgtagatctagaattgcc

SEQ ID NO: 1872418 - DNA, 25 bp, Homo sapien
ttttgtagatctagaattgcctatc

SEQ ID NO: 1872419 - DNA, 25 bp, Homo sapien
gatcgtcattgaacacattaacatt

SEQ ID NO: 1872420 - DNA, 25 bp, Homo sapien
gggcttgatcgtcattgaacacatt

SEQ ID NO: 1872421 - DNA, 25 bp, Homo sapien
gagcctggggcttgatcgtcattga

SEQ ID NO: 1872422 - DNA, 25 bp, Homo sapien
gcttgatcgtcattgaacacattaa

SEQ ID NO: 1872423 - DNA, 25 bp, Homo sapien
gccagagagttaatcagtttgtacg

SEQ ID NO: 1872424 - DNA, 25 bp, Homo sapien
ggctgtggactgaggacatttttca

SEQ ID NO: 1872425 - DNA, 25 bp, Homo sapien
tcccggaatcgcagatgctacgtgc

SEQ ID NO: 1872426 - DNA, 25 bp, Homo sapien
ttttcaagtgtaagctacagctggc

SEQ ID NO: 1872427 - DNA, 25 bp, Homo sapien
ttctgctctttcatcctaatggtgt

SEQ ID NO: 1872428 - DNA, 25 bp, Homo sapien
tgctctttcatcctaatggtgtccc

SEQ ID NO: 1872429 - DNA, 25 bp, Homo sapien
tgacaattctatgggtggatacagt

SEQ ID NO: 1872430 - DNA, 25 bp, Homo sapien
ctgttgacaattctatgggtggata

SEQ ID NO: 1872431 - DNA, 25 bp, Homo sapien
ctagtaattgggttcctcctcgtct

SEQ ID NO: 1872432 - DNA, 25 bp, Homo sapien
gtctctttatcctaaactcagcaag

SEQ ID NO: 1872433 - DNA, 25 bp, Homo sapien
tctctttatcctaaactcagcaagg

SEQ ID NO: 1872434 - DNA, 25 bp, Homo sapien
ggttcctcctcgtctgtctctttat

SEQ ID NO: 1872435 - DNA, 25 bp, Homo sapien
agctttctctccttagttaattcac

SEQ ID NO: 1872436 - DNA, 25 bp, Homo sapien
ctttctctccttagttaattcactt

SEQ ID NO: 1872437 - DNA, 25 bp, Homo sapien
aaggaaggaagtgaatctcatctac

SEQ ID NO: 1872438 - DNA, 25 bp, Homo sapien
ttagctttctctccttagttaattc

SEQ ID NO: 1872439 - DNA, 25 bp, Homo sapien
gctacagtggcctaggtcattaatt

SEQ ID NO: 1872440 - DNA, 25 bp, Homo sapien
ttatcttaggaactcagcactctgc

SEQ ID NO: 1872441 - DNA, 25 bp, Homo sapien
catcactggcaactaaacttcaaat

SEQ ID NO: 1872442 - DNA, 25 bp, Homo sapien
tgcaaaggttacaacgtagaaagaa

SEQ ID NO: 1872443 - DNA, 25 bp, Homo sapien
tacagtggggcaggcttattgaaat

SEQ ID NO: 1872444 - DNA, 25 bp, Homo sapien
aatattgccgttcttcaagtcctag

SEQ ID NO: 1872445 - DNA, 25 bp, Homo sapien
gagtgcctgttatacgcaaatacag

SEQ ID NO: 1872446 - DNA, 25 bp, Homo sapien
tattgaaatattgccgttcttcaag

SEQ ID NO: 1872447 - DNA, 25 bp, Homo sapien
ctcaccagtagagccttctaatgtc

SEQ ID NO: 1872448 - DNA, 25 bp, Homo sapien
gatacctcaccagtagagccttcta

SEQ ID NO: 1872449 - DNA, 25 bp, Homo sapien
ctgatacctcaccagtagagccttc

SEQ ID NO: 1872450 - DNA, 25 bp, Homo sapien
tacctcaccagtagagccttctaat

SEQ ID NO: 1872451 - DNA, 25 bp, Homo sapien
gcagttctgatgtaaccctgtgaca

SEQ ID NO: 1872452 - DNA, 25 bp, Homo sapien
tgcgaattaagccaaatgtacaagc

SEQ ID NO: 1872453 - DNA, 25 bp, Homo sapien
tatcctctgtaacaatcagcagaag

SEQ ID NO: 1872454 - DNA, 25 bp, Homo sapien
cctctggacgcttgggatattaata

SEQ ID NO: 1872455 - DNA, 25 bp, Homo sapien
cagggggctagcattctaggagggc

SEQ ID NO: 1872456 - DNA, 25 bp, Homo sapien
tctttgtgttttggcgggcaggttg

SEQ ID NO: 1872457 - DNA, 25 bp, Homo sapien
ggccctggtactgaacggacagctc

SEQ ID NO: 1872458 - DNA, 25 bp, Homo sapien
cgtggccctggtactgaacggacag

SEQ ID NO: 1872459 - DNA, 25 bp, Homo sapien
tcggcctgatttccctgctgagtgc

SEQ ID NO: 1872460 - DNA, 25 bp, Homo sapien
agctgcctgccgctgaatgcgaaga

SEQ ID NO: 1872461 - DNA, 25 bp, Homo sapien
gaattcgcggaattcaccaagccgc

SEQ ID NO: 1872462 - DNA, 25 bp, Homo sapien
tgggagcactgcacccttgtcggtc

SEQ ID NO: 1872463 - DNA, 25 bp, Homo sapien
gtaagatccgggaggctgaatttga

SEQ ID NO: 1872464 - DNA, 25 bp, Homo sapien
ggccgcggtagtccaggcgacttcc

SEQ ID NO: 1872465 - DNA, 25 bp, Homo sapien
ctagcggtaagatccgggaggctga

SEQ ID NO: 1872466 - DNA, 25 bp, Homo sapien
gctgaatttgaggccgcggtagtcc

SEQ ID NO: 1872467 - DNA, 25 bp, Homo sapien
caaacatttcttggccgaaagaggc

SEQ ID NO: 1872468 - DNA, 25 bp, Homo sapien
agaaaggccttagccagaagaactg

SEQ ID NO: 1872469 - DNA, 25 bp, Homo sapien
aagtgcagcctctttcggaactcaa

SEQ ID NO: 1872470 - DNA, 25 bp, Homo sapien
tgctgcctgggagtgaacgtcccct

SEQ ID NO: 1872471 - DNA, 25 bp, Homo sapien
tcgaaagagacccagagtcggcatc

SEQ ID NO: 1872472 - DNA, 25 bp, Homo sapien
tcgcgcgtctgcacatgaatgcccg

SEQ ID NO: 1872473 - DNA, 25 bp, Homo sapien
aagagacccagagtcggcatcagca

SEQ ID NO: 1872474 - DNA, 25 bp, Homo sapien
ctttcgaaagagacccagagtcggc

SEQ ID NO: 1872475 - DNA, 25 bp, Homo sapien
agttttcgattgctgtctctgccca

SEQ ID NO: 1872476 - DNA, 25 bp, Homo sapien
cgaatattccgatccatacaactgg

SEQ ID NO: 1872477 - DNA, 25 bp, Homo sapien
gaattgccctggtgtttggagcact

SEQ ID NO: 1872478 - DNA, 25 bp, Homo sapien
tacaactggatcaagttttcgattg

SEQ ID NO: 1872479 - DNA, 25 bp, Homo sapien
ggcattccccaagagcagtgactga

SEQ ID NO: 1872480 - DNA, 25 bp, Homo sapien
ttgggcattccccaagagcagtgac

SEQ ID NO: 1872481 - DNA, 25 bp, Homo sapien
agagctcttgggcattccccaagag

SEQ ID NO: 1872482 - DNA, 25 bp, Homo sapien
ttccccaagagcagtgactgagtga

SEQ ID NO: 1872483 - DNA, 25 bp, Homo sapien
gttggaaaggagattgcaacatgtc

SEQ ID NO: 1872484 - DNA, 25 bp, Homo sapien
agggctatcctcttccatttgaccg

SEQ ID NO: 1872485 - DNA, 25 bp, Homo sapien
catttgaccgggactaactgggaag

SEQ ID NO: 1872486 - DNA, 25 bp, Homo sapien
gactaactgggaagccaatatcatc

SEQ ID NO: 1872487 - DNA, 25 bp, Homo sapien
gataacctgcaagtcctacatattc

SEQ ID NO: 1872488 - DNA, 25 bp, Homo sapien
tgcaagtcctacatattcttccagg

SEQ ID NO: 1872489 - DNA, 25 bp, Homo sapien
acctgcaagtcctacatattcttcc

SEQ ID NO: 1872490 - DNA, 25 bp, Homo sapien
taacctgcaagtcctacatattctt

SEQ ID NO: 1872491 - DNA, 25 bp, Homo sapien
gagttaaggtcgtgggggcagtctc

SEQ ID NO: 1872492 - DNA, 25 bp, Homo sapien
tgcctgagttaaggtcgtgggggca

SEQ ID NO: 1872493 - DNA, 25 bp, Homo sapien
aggggtgcctgagttaaggtcgtgg

SEQ ID NO: 1872494 - DNA, 25 bp, Homo sapien
ttaaggtcgtgggggcagtctccat

SEQ ID NO: 1872495 - DNA, 25 bp, Homo sapien
aatagggaacaagtgttggctgctg

SEQ ID NO: 1872496 - DNA, 25 bp, Homo sapien
gaaatagggaacaagtgttggctgc

SEQ ID NO: 1872497 - DNA, 25 bp, Homo sapien
tgaaatagggaacaagtgttggctg

SEQ ID NO: 1872498 - DNA, 25 bp, Homo sapien
cttgaaatagggaacaagtgttggc

SEQ ID NO: 1872499 - DNA, 25 bp, Homo sapien
ggggctgaagaatcgtgtatctcca

SEQ ID NO: 1872500 - DNA, 25 bp, Homo sapien
gggctgaagaatcgtgtatctccat

SEQ ID NO: 1872501 - DNA, 25 bp, Homo sapien
tggggctgaagaatcgtgtatctcc

SEQ ID NO: 1872502 - DNA, 25 bp, Homo sapien
tctgttgaagtgtgcagcagtctcc

SEQ ID NO: 1872503 - DNA, 25 bp, Homo sapien
caagcacattcaaattggcaccgag

SEQ ID NO: 1872504 - DNA, 25 bp, Homo sapien
tcgggtagcgtatttgaccaggtag

SEQ ID NO: 1872505 - DNA, 25 bp, Homo sapien
ctgagacatctattttcgggtagcg

SEQ ID NO: 1872506 - DNA, 25 bp, Homo sapien
cataattggacgaggctgcagctgc

SEQ ID NO: 1872507 - DNA, 25 bp, Homo sapien
tgttctccgtctgagctccatgagt

SEQ ID NO: 1872508 - DNA, 25 bp, Homo sapien
gtttgattttgagcagtaaccaggc

SEQ ID NO: 1872509 - DNA, 25 bp, Homo sapien
tgttaccagaattgcatgctccctc

SEQ ID NO: 1872510 - DNA, 25 bp, Homo sapien
cattagagctcccattaagctgcct

SEQ ID NO: 1872511 - DNA, 25 bp, Homo sapien
tctcctcttagctgccccattagag

SEQ ID NO: 1872512 - DNA, 25 bp, Homo sapien
tgagctattaatgcaatctgcaggg

SEQ ID NO: 1872513 - DNA, 25 bp, Homo sapien
tgaagatctccagagctcgtttacg

SEQ ID NO: 1872514 - DNA, 25 bp, Homo sapien
tcctaatctaaaccggcagagggtg

SEQ ID NO: 1872515 - DNA, 25 bp, Homo sapien
gggctggtcaatgagcaatcaataa

SEQ ID NO: 1872516 - DNA, 25 bp, Homo sapien
gagaaggattcggtacattaacagt

SEQ ID NO: 1872517 - DNA, 25 bp, Homo sapien
cagagggtggttaatacgatttgaa

SEQ ID NO: 1872518 - DNA, 25 bp, Homo sapien
gttgattgatcagggcacctgttgt

SEQ ID NO: 1872519 - DNA, 25 bp, Homo sapien
catatgaattagagtgattggttga

SEQ ID NO: 1872520 - DNA, 25 bp, Homo sapien
gattggttgattgatcagggcacct

SEQ ID NO: 1872521 - DNA, 25 bp, Homo sapien
ggcaaggcaagaccgccgctcatat

SEQ ID NO: 1872522 - DNA, 25 bp, Homo sapien
ctcctagggccaaatctgcagatta

SEQ ID NO: 1872523 - DNA, 25 bp, Homo sapien
ggtccagcctccaagacaaagcagg

SEQ ID NO: 1872524 - DNA, 25 bp, Homo sapien
tacagtcagatggtcctaatggagg

SEQ ID NO: 1872525 - DNA, 25 bp, Homo sapien
gaaatattgatagcttagtaaggcc

SEQ ID NO: 1872526 - DNA, 25 bp, Homo sapien
catggacaagatgttcttgaacaac

SEQ ID NO: 1872527 - DNA, 25 bp, Homo sapien
tgcagaactatctcaccgaggcgct

SEQ ID NO: 1872528 - DNA, 25 bp, Homo sapien
accggacaccgatagggaacagccg

SEQ ID NO: 1872529 - DNA, 25 bp, Homo sapien
taaaactggcgacaaggaggagaaa

SEQ ID NO: 1872530 - DNA, 25 bp, Homo sapien
gctcaatcaccgacaccagttggga

SEQ ID NO: 1872531 - DNA, 25 bp, Homo sapien
caagcagggtgtcaacaagtgcgca

SEQ ID NO: 1872532 - DNA, 25 bp, Homo sapien
cctgctagagtttgtggcgcgccct

SEQ ID NO: 1872533 - DNA, 25 bp, Homo sapien
tgggtaataacacacgctccgggca

SEQ ID NO: 1872534 - DNA, 25 bp, Homo sapien
cttttttgttgttgtcacagattta

SEQ ID NO: 1872535 - DNA, 25 bp, Homo sapien
tttgttgttgtcacagatttattga

SEQ ID NO: 1872536 - DNA, 25 bp, Homo sapien
attgaaaataatacagcattgcaga

SEQ ID NO: 1872537 - DNA, 25 bp, Homo sapien
ttattgaaaataatacagcattgca

SEQ ID NO: 1872538 - DNA, 25 bp, Homo sapien
aattcatcccaactgtaggctgagt

SEQ ID NO: 1872539 - DNA, 25 bp, Homo sapien
gaaattcatcccaactgtaggctga

SEQ ID NO: 1872540 - DNA, 25 bp, Homo sapien
ttgaaattcatcccaactgtaggct

SEQ ID NO: 1872541 - DNA, 25 bp, Homo sapien
ggtccccgaggcattttgaaattca

SEQ ID NO: 1872542 - DNA, 25 bp, Homo sapien
taatggcaatctccttgcacatgtg

SEQ ID NO: 1872543 - DNA, 25 bp, Homo sapien
caatctccttgcacatgtgcttgtt

SEQ ID NO: 1872544 - DNA, 25 bp, Homo sapien
ggcaatctccttgcacatgtgcttg

SEQ ID NO: 1872545 - DNA, 25 bp, Homo sapien
aatggcaatctccttgcacatgtgc

SEQ ID NO: 1872546 - DNA, 25 bp, Homo sapien
tgcagagtgtggagacagccttgtc

SEQ ID NO: 1872547 - DNA, 25 bp, Homo sapien
cagagtgtggagacagccttgtctt

SEQ ID NO: 1872548 - DNA, 25 bp, Homo sapien
atgcagagtgtggagacagccttgt

SEQ ID NO: 1872549 - DNA, 25 bp, Homo sapien
gcagagtgtggagacagccttgtct

SEQ ID NO: 1872550 - DNA, 25 bp, Homo sapien
aaacatctctgctgtggttcaggtc

SEQ ID NO: 1872551 - DNA, 25 bp, Homo sapien
tggttcaggtccagacactcaagct

SEQ ID NO: 1872552 - DNA, 25 bp, Homo sapien
cactcaagctttctattaccgctgg

SEQ ID NO: 1872553 - DNA, 25 bp, Homo sapien
gagtccacatcagtccatacccatg

SEQ ID NO: 1872554 - DNA, 25 bp, Homo sapien
tgtgttgcatcttacagtggtccat

SEQ ID NO: 1872555 - DNA, 25 bp, Homo sapien
gaattggttcagaattgctcctgga

SEQ ID NO: 1872556 - DNA, 25 bp, Homo sapien
tctgcagcaccccttgtcgggacag

SEQ ID NO: 1872557 - DNA, 25 bp, Homo sapien
tgccttatacttccaagtgtgctca

SEQ ID NO: 1872558 - DNA, 25 bp, Homo sapien
tccaagtgtgctcatgcatctggct

SEQ ID NO: 1872559 - DNA, 25 bp, Homo sapien
cacttagagaatccatgggaaaaga

SEQ ID NO: 1872560 - DNA, 25 bp, Homo sapien
cctaagtcatagctttcagagggaa

SEQ ID NO: 1872561 - DNA, 25 bp, Homo sapien
taatactaatgaaagagagaggcaa

SEQ ID NO: 1872562 - DNA, 25 bp, Homo sapien
aggcagtatagctagaaccaggttc

SEQ ID NO: 1872563 - DNA, 25 bp, Homo sapien
ctgactcagaaagggcactgcttaa

SEQ ID NO: 1872564 - DNA, 25 bp, Homo sapien
gaccttgtactgcaataaagcaatg

SEQ ID NO: 1872565 - DNA, 25 bp, Homo sapien
cagcctcagaaagggtgctgcttaa

SEQ ID NO: 1872566 - DNA, 25 bp, Homo sapien
tattagctctaattctgcgcaggtc

SEQ ID NO: 1872567 - DNA, 25 bp, Homo sapien
caaggaattctctaaccattgacaa

SEQ ID NO: 1872568 - DNA, 25 bp, Homo sapien
tgctgggctcccatggttgtctcct

SEQ ID NO: 1872569 - DNA, 25 bp, Homo sapien
tacgttcctcagcaccagttacttg

SEQ ID NO: 1872570 - DNA, 25 bp, Homo sapien
aattggactttcaacctgcatgacc

SEQ ID NO: 1872571 - DNA, 25 bp, Homo sapien
agtcttccccatggtcattggctac

SEQ ID NO: 1872572 - DNA, 25 bp, Homo sapien
aagtcttccccatggtcattggcta

SEQ ID NO: 1872573 - DNA, 25 bp, Homo sapien
gcaatggcccactgtgatataagga

SEQ ID NO: 1872574 - DNA, 25 bp, Homo sapien
tggtgggaaactcatgacactacag

SEQ ID NO: 1872575 - DNA, 25 bp, Homo sapien
tgtgatataaggatgattacttggc

SEQ ID NO: 1872576 - DNA, 25 bp, Homo sapien
cctgtatggatgaggtctggtggga

SEQ ID NO: 1872577 - DNA, 25 bp, Homo sapien
tggtagctatccaggctgaacatgt

SEQ ID NO: 1872578 - DNA, 25 bp, Homo sapien
taaacctggtagctatccaggctga

SEQ ID NO: 1872579 - DNA, 25 bp, Homo sapien
gctatccaggctgaacatgtcatct

SEQ ID NO: 1872580 - DNA, 25 bp, Homo sapien
aataaacctggtagctatccaggct

SEQ ID NO: 1872581 - DNA, 25 bp, Homo sapien
tcagggtgactctggagaccattct

SEQ ID NO: 1872582 - DNA, 25 bp, Homo sapien
tctgctgttctaggagctgaaaggt

SEQ ID NO: 1872583 - DNA, 25 bp, Homo sapien
gagctgaaaggtggggatgcatagt

SEQ ID NO: 1872584 - DNA, 25 bp, Homo sapien
gactctggagaccattctgctgttc

SEQ ID NO: 1872585 - DNA, 25 bp, Homo sapien
ttttgataaacctagggctcctcca

SEQ ID NO: 1872586 - DNA, 25 bp, Homo sapien
tgttcaagcattgcagtacaacttt

SEQ ID NO: 1872587 - DNA, 25 bp, Homo sapien
gttgtgttcaagcattgcagtacaa

SEQ ID NO: 1872588 - DNA, 25 bp, Homo sapien
gggctcctccagttgtgttcaagca

SEQ ID NO: 1872589 - DNA, 25 bp, Homo sapien
tgttttcagcaagaagagtttttgg

SEQ ID NO: 1872590 - DNA, 25 bp, Homo sapien
gaatcagtgtgataggtgcgctgat

SEQ ID NO: 1872591 - DNA, 25 bp, Homo sapien
agtgtgataggtgcgctgataaagc

SEQ ID NO: 1872592 - DNA, 25 bp, Homo sapien
cgctgataaagctgtaccccaggag

SEQ ID NO: 1872593 - DNA, 25 bp, Homo sapien
taggtgcgctgataaagctgtaccc

SEQ ID NO: 1872594 - DNA, 25 bp, Homo sapien
tacagtcaaagtgaagccagtactc

SEQ ID NO: 1872595 - DNA, 25 bp, Homo sapien
tttgaatactgcttcaactaaatct

SEQ ID NO: 1872596 - DNA, 25 bp, Homo sapien
ccagtactctgatgggacctgaagc

SEQ ID NO: 1872597 - DNA, 25 bp, Homo sapien
ggataggtagcttgacaagttctac

SEQ ID NO: 1872598 - DNA, 25 bp, Homo sapien
aaatcagcagaaccttcaaaaccca

SEQ ID NO: 1872599 - DNA, 25 bp, Homo sapien
ggcattgtccgaattaaacattcca

SEQ ID NO: 1872600 - DNA, 25 bp, Homo sapien
tctctgtaaacttgtattggcattg

SEQ ID NO: 1872601 - DNA, 25 bp, Homo sapien
cagcagaaccttcaaaacccaatgg

SEQ ID NO: 1872602 - DNA, 25 bp, Homo sapien
ggtaatattctctactctgaaattt

SEQ ID NO: 1872603 - DNA, 25 bp, Homo sapien
taggtttaggattatgtctttttca

SEQ ID NO: 1872604 - DNA, 25 bp, Homo sapien
gttgtattaggtttaggattatgtc

SEQ ID NO: 1872605 - DNA, 25 bp, Homo sapien
tgacatgaatgtagccacagtagct

SEQ ID NO: 1872606 - DNA, 25 bp, Homo sapien
tggtgaccagggaagtcaccccaca

SEQ ID NO: 1872607 - DNA, 25 bp, Homo sapien
atcaaaagaacttaagtggatgttt

SEQ ID NO: 1872608 - DNA, 25 bp, Homo sapien
aatcaaaagaacttaagtggatgtt

SEQ ID NO: 1872609 - DNA, 25 bp, Homo sapien
gggaagtcaccccacagctatgggg

SEQ ID NO: 1872610 - DNA, 25 bp, Homo sapien
catcttgtgcaagttggtcacgttc

SEQ ID NO: 1872611 - DNA, 25 bp, Homo sapien
ttgtgcaagttggtcacgttcaccc

SEQ ID NO: 1872612 - DNA, 25 bp, Homo sapien
tcttgtgcaagttggtcacgttcac

SEQ ID NO: 1872613 - DNA, 25 bp, Homo sapien
tgtgcaagttggtcacgttcaccca

SEQ ID NO: 1872614 - DNA, 25 bp, Homo sapien
tcaggtaatgtgtctcaatgaagtc

SEQ ID NO: 1872615 - DNA, 25 bp, Homo sapien
gtgactgattcacatttttttccaa

SEQ ID NO: 1872616 - DNA, 25 bp, Homo sapien
gggtcatttttgtcagtggccagtt

SEQ ID NO: 1872617 - DNA, 25 bp, Homo sapien
gtttgtgcagttccagtagtgactg

SEQ ID NO: 1872618 - DNA, 25 bp, Homo sapien
atatcctgaaggaaaattcagccac

SEQ ID NO: 1872619 - DNA, 25 bp, Homo sapien
gatatcctgaaggaaaattcagcca

SEQ ID NO: 1872620 - DNA, 25 bp, Homo sapien
ccactatcccagtcatcagtctggt

SEQ ID NO: 1872621 - DNA, 25 bp, Homo sapien
ctatcacattcagcccactatccca

SEQ ID NO: 1872622 - DNA, 25 bp, Homo sapien
gagaggttaaagtaggaggcgtaga

SEQ ID NO: 1872623 - DNA, 25 bp, Homo sapien
gcgcacctgcgagttggatgcagtc

SEQ ID NO: 1872624 - DNA, 25 bp, Homo sapien
atggagaggttaaagtaggaggcgt

SEQ ID NO: 1872625 - DNA, 25 bp, Homo sapien
cctgcgagttggatgcagtcatcat

SEQ ID NO: 1872626 - DNA, 25 bp, Homo sapien
ggcagtggagtaattttggctgact

SEQ ID NO: 1872627 - DNA, 25 bp, Homo sapien
gagccactgcatgtagcctacattg

SEQ ID NO: 1872628 - DNA, 25 bp, Homo sapien
tgtgattaggtttaagtctctcagc

SEQ ID NO: 1872629 - DNA, 25 bp, Homo sapien
caggaaaccccgaggactcttggtg

SEQ ID NO: 1872630 - DNA, 25 bp, Homo sapien
taaacaatgcccacactgttgcaaa

SEQ ID NO: 1872631 - DNA, 25 bp, Homo sapien
tcttttccttctgagtgtccaaggg

SEQ ID NO: 1872632 - DNA, 25 bp, Homo sapien
tgtccaagggctaataaatcatctg

SEQ ID NO: 1872633 - DNA, 25 bp, Homo sapien
ctgttgcaaactgcccaaacttctt

SEQ ID NO: 1872634 - DNA, 25 bp, Homo sapien
gtagatcaccttaacttccttaatg

SEQ ID NO: 1872635 - DNA, 25 bp, Homo sapien
tatcagtggatttctacacactctg

SEQ ID NO: 1872636 - DNA, 25 bp, Homo sapien
ttgtccagcgatctccatatttcat

SEQ ID NO: 1872637 - DNA, 25 bp, Homo sapien
agaatttgtccagcgatctccatat

SEQ ID NO: 1872638 - DNA, 25 bp, Homo sapien
tggatttctacacactctggtctgt

SEQ ID NO: 1872639 - DNA, 25 bp, Homo sapien
aatatgacgggacagtctctaaaac

SEQ ID NO: 1872640 - DNA, 25 bp, Homo sapien
aattgtggaccagagaaatggcagg

SEQ ID NO: 1872641 - DNA, 25 bp, Homo sapien
cctgtgactggacctgaatatgacg

SEQ ID NO: 1872642 - DNA, 25 bp, Homo sapien
gcagagacctcttcaagttgaattc

SEQ ID NO: 1872643 - DNA, 25 bp, Homo sapien
atgaaaagtggcatcccaggggaat

SEQ ID NO: 1872644 - DNA, 25 bp, Homo sapien
tgttccttcagaacaaggaagtgaa

SEQ ID NO: 1872645 - DNA, 25 bp, Homo sapien
gaagtgaatgagaatgaaaagtggc

SEQ ID NO: 1872646 - DNA, 25 bp, Homo sapien
cattcagtggcaaattgctgttcct

SEQ ID NO: 1872647 - DNA, 25 bp, Homo sapien
gatagaatacttttggaaacggtca

SEQ ID NO: 1872648 - DNA, 25 bp, Homo sapien
atagaatacttttggaaacggtcat

SEQ ID NO: 1872649 - DNA, 25 bp, Homo sapien
aacagcttttcctctgcatactgga

SEQ ID NO: 1872650 - DNA, 25 bp, Homo sapien
taaacagcttttcctctgcatactg

SEQ ID NO: 1872651 - DNA, 25 bp, Homo sapien
agcttttcctctgcatactggatac

SEQ ID NO: 1872652 - DNA, 25 bp, Homo sapien
cagcttttcctctgcatactggata

SEQ ID NO: 1872653 - DNA, 25 bp, Homo sapien
tcattgaccaaatcgctatgggcat

SEQ ID NO: 1872654 - DNA, 25 bp, Homo sapien
cagccaagatttgctagccgccttt

SEQ ID NO: 1872655 - DNA, 25 bp, Homo sapien
atttaaaactttcgtctggctgcat

SEQ ID NO: 1872656 - DNA, 25 bp, Homo sapien
catagatggcatcacaaaaagtgtg

SEQ ID NO: 1872657 - DNA, 25 bp, Homo sapien
gctggaaaggatctgacacatactg

SEQ ID NO: 1872658 - DNA, 25 bp, Homo sapien
agctggaaaggatctgacacatact

SEQ ID NO: 1872659 - DNA, 25 bp, Homo sapien
ctggaaaggatctgacacatactgg

SEQ ID NO: 1872660 - DNA, 25 bp, Homo sapien
ttaaggttgaatgggcttatccatc

SEQ ID NO: 1872661 - DNA, 25 bp, Homo sapien
tacccatggccttgaaagctacaga

SEQ ID NO: 1872662 - DNA, 25 bp, Homo sapien
agctacagatgtaagggatactcct

SEQ ID NO: 1872663 - DNA, 25 bp, Homo sapien
ttatccatcctaccactacccatgg

SEQ ID NO: 1872664 - DNA, 25 bp, Homo sapien
gcaagagagccactctgctatgtac

SEQ ID NO: 1872665 - DNA, 25 bp, Homo sapien
tgtcaagggctgactcaataatcac

SEQ ID NO: 1872666 - DNA, 25 bp, Homo sapien
caagagagccactctgctatgtaca

SEQ ID NO: 1872667 - DNA, 25 bp, Homo sapien
ttttctagctgtactccaccatcca

SEQ ID NO: 1872668 - DNA, 25 bp, Homo sapien
tcagggacttgtgggttagtttcga

SEQ ID NO: 1872669 - DNA, 25 bp, Homo sapien
gagtgagtcaccaccagtcagggac

SEQ ID NO: 1872670 - DNA, 25 bp, Homo sapien
gtctaccgtgagttctctcaaacca

SEQ ID NO: 1872671 - DNA, 25 bp, Homo sapien
tttcaaaccagtggcccagtcagcg

SEQ ID NO: 1872672 - DNA, 25 bp, Homo sapien
tacaacctgcggatgtcagccggat

SEQ ID NO: 1872673 - DNA, 25 bp, Homo sapien
tcagccggatggaaattgaatgtga

SEQ ID NO: 1872674 - DNA, 25 bp, Homo sapien
taatcgagcctctgactacaacctg

SEQ ID NO: 1872675 - DNA, 25 bp, Homo sapien
tggtcatgacgcatacagtatgtga

SEQ ID NO: 1872676 - DNA, 25 bp, Homo sapien
ccaaaatgcttgtacttgtcagttg

SEQ ID NO: 1872677 - DNA, 25 bp, Homo sapien
gactttcctgtactgatcctccacg

SEQ ID NO: 1872678 - DNA, 25 bp, Homo sapien
tataaaacagctcctgcgtttccca

SEQ ID NO: 1872679 - DNA, 25 bp, Homo sapien
aagtgaaacagaatggccaaaggag

SEQ ID NO: 1872680 - DNA, 25 bp, Homo sapien
caagctctcgtgtccagctcttttc

SEQ ID NO: 1872681 - DNA, 25 bp, Homo sapien
ttcctaggaccatgattcccccttc

SEQ ID NO: 1872682 - DNA, 25 bp, Homo sapien
aaaatgtagccccaagctctcgtgt

SEQ ID NO: 1872683 - DNA, 25 bp, Homo sapien
cttgtcttaggcagacgtactccat

SEQ ID NO: 1872684 - DNA, 25 bp, Homo sapien
aggtggtaattgaccaatggctgct

SEQ ID NO: 1872685 - DNA, 25 bp, Homo sapien
aatagaaggtggtaattgaccaatg

SEQ ID NO: 1872686 - DNA, 25 bp, Homo sapien
gtcagacctcctaatagaaggtggt

SEQ ID NO: 1872687 - DNA, 25 bp, Homo sapien
tcagacctcctaatagaaggtggta

SEQ ID NO: 1872688 - DNA, 25 bp, Homo sapien
tcaatagggcacatctgttgtagcc

SEQ ID NO: 1872689 - DNA, 25 bp, Homo sapien
taagctgaggcctgtaagttcattt

SEQ ID NO: 1872690 - DNA, 25 bp, Homo sapien
tgggctgatctgttcttccacttgt

SEQ ID NO: 1872691 - DNA, 25 bp, Homo sapien
tgttgtagcctcacagattcttctg

SEQ ID NO: 1872692 - DNA, 25 bp, Homo sapien
gtatcccaggataaatgccttggtg

SEQ ID NO: 1872693 - DNA, 25 bp, Homo sapien
tctgtgacctatgcctacattttca

SEQ ID NO: 1872694 - DNA, 25 bp, Homo sapien
ctgtctcttctgtgacctatgccta

SEQ ID NO: 1872695 - DNA, 25 bp, Homo sapien
tcccaggataaatgccttggtgtca

SEQ ID NO: 1872696 - DNA, 25 bp, Homo sapien
ctctggtgggagagtcctgaagatt

SEQ ID NO: 1872697 - DNA, 25 bp, Homo sapien
tctctggtgggagagtcctgaagat

SEQ ID NO: 1872698 - DNA, 25 bp, Homo sapien
tctggtgggagagtcctgaagattc

SEQ ID NO: 1872699 - DNA, 25 bp, Homo sapien
ctggtgggagagtcctgaagattct

SEQ ID NO: 1872700 - DNA, 25 bp, Homo sapien
aggtagggacctgtatctgtccaat

SEQ ID NO: 1872701 - DNA, 25 bp, Homo sapien
caggtagggacctgtatctgtccaa

SEQ ID NO: 1872702 - DNA, 25 bp, Homo sapien
agaattccttgtcctaatttgccgt

SEQ ID NO: 1872703 - DNA, 25 bp, Homo sapien
cactactattgaagcctttgaaaca

SEQ ID NO: 1872704 - DNA, 25 bp, Homo sapien
tacagtagtgtgttgtggttcatca

SEQ ID NO: 1872705 - DNA, 25 bp, Homo sapien
tcttagaggcagaggtaaaacaaaa

SEQ ID NO: 1872706 - DNA, 25 bp, Homo sapien
cgtactgaatctcacattctttgaa

SEQ ID NO: 1872707 - DNA, 25 bp, Homo sapien
tactgaatctcacattctttgaatc

SEQ ID NO: 1872708 - DNA, 25 bp, Homo sapien
tcgtactgaatctcacattctttga

SEQ ID NO: 1872709 - DNA, 25 bp, Homo sapien
cttcgtactgaatctcacattcttt

SEQ ID NO: 1872710 - DNA, 25 bp, Homo sapien
aaattgtgtatgataatgaaccttc

SEQ ID NO: 1872711 - DNA, 25 bp, Homo sapien
gaagtaccagcgctaaaggagaaag

SEQ ID NO: 1872712 - DNA, 25 bp, Homo sapien
tgtgaagtaccagcgctaaaggaga

SEQ ID NO: 1872713 - DNA, 25 bp, Homo sapien
agtaccagcgctaaaggagaaagag

SEQ ID NO: 1872714 - DNA, 25 bp, Homo sapien
cctgtgaagtaccagcgctaaagga

SEQ ID NO: 1872715 - DNA, 25 bp, Homo sapien
cttatcctttgtcagggccgtgtgt

SEQ ID NO: 1872716 - DNA, 25 bp, Homo sapien
tcagggccgtgtgtttcacgttagt

SEQ ID NO: 1872717 - DNA, 25 bp, Homo sapien
tttgtcagggccgtgtgtttcacgt

SEQ ID NO: 1872718 - DNA, 25 bp, Homo sapien
gccgtgtgtttcacgttagtgttca

SEQ ID NO: 1872719 - DNA, 25 bp, Homo sapien
ggtattgaaatccataactcaccat

SEQ ID NO: 1872720 - DNA, 25 bp, Homo sapien
cttgggctcagagggactagggagg

SEQ ID NO: 1872721 - DNA, 25 bp, Homo sapien
gatatgagaaatgaagtagccacgg

SEQ ID NO: 1872722 - DNA, 25 bp, Homo sapien
ggaaatgatctacttggatatgaga

SEQ ID NO: 1872723 - DNA, 25 bp, Homo sapien
tattctttccctgatgaatgccagc

SEQ ID NO: 1872724 - DNA, 25 bp, Homo sapien
cagtttcatagtcagatgtattctc

SEQ ID NO: 1872725 - DNA, 25 bp, Homo sapien
ctttggtggtcattgtagccatgtg

SEQ ID NO: 1872726 - DNA, 25 bp, Homo sapien
catgtggatataaagggcacatttt

SEQ ID NO: 1872727 - DNA, 25 bp, Homo sapien
ggtcattacgcatccatttccttcc

SEQ ID NO: 1872728 - DNA, 25 bp, Homo sapien
ttccctctggtcattacgcatccat

SEQ ID NO: 1872729 - DNA, 25 bp, Homo sapien
cataggtatgggtgaatgctggcat

SEQ ID NO: 1872730 - DNA, 25 bp, Homo sapien
taccctctcagtggaagcataggta

SEQ ID NO: 1872731 - DNA, 25 bp, Homo sapien
tctgagaggaaacttcctccacttt

SEQ ID NO: 1872732 - DNA, 25 bp, Homo sapien
ctctgagaggaaacttcctccactt

SEQ ID NO: 1872733 - DNA, 25 bp, Homo sapien
atgcttctgtaaacattcttccttc

SEQ ID NO: 1872734 - DNA, 25 bp, Homo sapien
ttatgcttctgtaaacattcttcct

SEQ ID NO: 1872735 - DNA, 25 bp, Homo sapien
tatgcttctgtaaacattcttcctt

SEQ ID NO: 1872736 - DNA, 25 bp, Homo sapien
gctgctggcaaagcagcattcctct

SEQ ID NO: 1872737 - DNA, 25 bp, Homo sapien
gctggcaaagcagcattcctcttta

SEQ ID NO: 1872738 - DNA, 25 bp, Homo sapien
ggcaaagcagcattcctctttattt

SEQ ID NO: 1872739 - DNA, 25 bp, Homo sapien
gaaaccagtgacttctgtggctgct

SEQ ID NO: 1872740 - DNA, 25 bp, Homo sapien
ctgtcagcaacctccacccaataat

SEQ ID NO: 1872741 - DNA, 25 bp, Homo sapien
tgtcagcaacctccacccaataatc

SEQ ID NO: 1872742 - DNA, 25 bp, Homo sapien
tatccttcattgctctttttctcca

SEQ ID NO: 1872743 - DNA, 25 bp, Homo sapien
ccaattccatatccttcattgctct

SEQ ID NO: 1872744 - DNA, 25 bp, Homo sapien
attccatatccttcattgctctttt

SEQ ID NO: 1872745 - DNA, 25 bp, Homo sapien
atccttcattgctctttttctccat

SEQ ID NO: 1872746 - DNA, 25 bp, Homo sapien
caatgtgtagggacgcaaataaggc

SEQ ID NO: 1872747 - DNA, 25 bp, Homo sapien
taaacgctcgttgctgtaacatgat

SEQ ID NO: 1872748 - DNA, 25 bp, Homo sapien
cagtgaactctgaaactcagtggac

SEQ ID NO: 1872749 - DNA, 25 bp, Homo sapien
gactttagcctgttagagaccagtg

SEQ ID NO: 1872750 - DNA, 25 bp, Homo sapien
cattgcggtccactgtggtctagca

SEQ ID NO: 1872751 - DNA, 25 bp, Homo sapien
tcaggtcctgggagctagtcctgct

SEQ ID NO: 1872752 - DNA, 25 bp, Homo sapien
agtgggaagcacaaacatccctcaa

SEQ ID NO: 1872753 - DNA, 25 bp, Homo sapien
tggtctagcatttctcaggtcctgg

SEQ ID NO: 1872754 - DNA, 25 bp, Homo sapien
ccagccggcatagggcagaataaca

SEQ ID NO: 1872755 - DNA, 25 bp, Homo sapien
gggcagaataacaatcatttgctta

SEQ ID NO: 1872756 - DNA, 25 bp, Homo sapien
ggcatagggcagaataacaatcatt

SEQ ID NO: 1872757 - DNA, 25 bp, Homo sapien
gccggcatagggcagaataacaatc

SEQ ID NO: 1872758 - DNA, 25 bp, Homo sapien
cataaaaactgactttggtccccag

SEQ ID NO: 1872759 - DNA, 25 bp, Homo sapien
cctgtgaccgataaagtggtgtaac

SEQ ID NO: 1872760 - DNA, 25 bp, Homo sapien
ataaaatcagcaatcggcccctagc

SEQ ID NO: 1872761 - DNA, 25 bp, Homo sapien
tggtccccagtacagccattgagtg

SEQ ID NO: 1872762 - DNA, 25 bp, Homo sapien
tgtttactctccatgcaactccttc

SEQ ID NO: 1872763 - DNA, 25 bp, Homo sapien
cccttgtttactctccatgcaactc

SEQ ID NO: 1872764 - DNA, 25 bp, Homo sapien
cttgtttactctccatgcaactcct

SEQ ID NO: 1872765 - DNA, 25 bp, Homo sapien
ctccagcagttcccttgtttactct

SEQ ID NO: 1872766 - DNA, 25 bp, Homo sapien
cacggaagcgagtttaaagcataaa

SEQ ID NO: 1872767 - DNA, 25 bp, Homo sapien
aagcataaaatcaccaggggaaata

SEQ ID NO: 1872768 - DNA, 25 bp, Homo sapien
tcctctaacacggaagcgagtttaa

SEQ ID NO: 1872769 - DNA, 25 bp, Homo sapien
taaaatttctcgaacaatgagttct

SEQ ID NO: 1872770 - DNA, 25 bp, Homo sapien
caatatcttggaggatgccataatg

SEQ ID NO: 1872771 - DNA, 25 bp, Homo sapien
taattctgccaaaaactgtaactcc

SEQ ID NO: 1872772 - DNA, 25 bp, Homo sapien
atgattgtgcttggctgtttgtcca

SEQ ID NO: 1872773 - DNA, 25 bp, Homo sapien
cttgtccaataactatcttaaggga

SEQ ID NO: 1872774 - DNA, 25 bp, Homo sapien
agttctgctgtgaaccagacccatg

SEQ ID NO: 1872775 - DNA, 25 bp, Homo sapien
gtgaaccagacccatgccactctgg

SEQ ID NO: 1872776 - DNA, 25 bp, Homo sapien
tgccactctggacaccttcaacaca

SEQ ID NO: 1872777 - DNA, 25 bp, Homo sapien
tgctgtgaaccagacccatgccact

SEQ ID NO: 1872778 - DNA, 25 bp, Homo sapien
tgtgacaagtgtaaaagacccatga

SEQ ID NO: 1872779 - DNA, 25 bp, Homo sapien
ccatagaggtgctagcaggcattgc

SEQ ID NO: 1872780 - DNA, 25 bp, Homo sapien
tgccgggaggtacgaatgaattaca

SEQ ID NO: 1872781 - DNA, 25 bp, Homo sapien
catctttaggatagctggcccatga

SEQ ID NO: 1872782 - DNA, 25 bp, Homo sapien
cagggctaaacttgttcgtggaaca

SEQ ID NO: 1872783 - DNA, 25 bp, Homo sapien
gcattaatatcaggtgggcagagca

SEQ ID NO: 1872784 - DNA, 25 bp, Homo sapien
tctccaaagccaagactctgcaggt

SEQ ID NO: 1872785 - DNA, 25 bp, Homo sapien
ggcagcgcataggagtgcattaata

SEQ ID NO: 1872786 - DNA, 25 bp, Homo sapien
aaatttattagcgtttccacgattg

SEQ ID NO: 1872787 - DNA, 25 bp, Homo sapien
attagcgtttccacgattgatgatg

SEQ ID NO: 1872788 - DNA, 25 bp, Homo sapien
tcatggacaactgcttatttctctc

SEQ ID NO: 1872789 - DNA, 25 bp, Homo sapien
catggacaactgcttatttctctct

SEQ ID NO: 1872790 - DNA, 25 bp, Homo sapien
tatataatgagatctaattgctgct

SEQ ID NO: 1872791 - DNA, 25 bp, Homo sapien
ggtgcaatcaatctattacaaacca

SEQ ID NO: 1872792 - DNA, 25 bp, Homo sapien
tagctatataatgagatctaattgc

SEQ ID NO: 1872793 - DNA, 25 bp, Homo sapien
taggaacatttggtgcaatcaatct

SEQ ID NO: 1872794 - DNA, 25 bp, Homo sapien
ctgggtccttggggtctgtcaacaa

SEQ ID NO: 1872795 - DNA, 25 bp, Homo sapien
cacttcacttccatcatcagctggg

SEQ ID NO: 1872796 - DNA, 25 bp, Homo sapien
ggtccttggggtctgtcaacaaaga

SEQ ID NO: 1872797 - DNA, 25 bp, Homo sapien
tcacttccatcatcagctgggtcct

SEQ ID NO: 1872798 - DNA, 25 bp, Homo sapien
catttattacaaggataagttgctc

SEQ ID NO: 1872799 - DNA, 25 bp, Homo sapien
tgtaaatttctgcttaagcatcttc

SEQ ID NO: 1872800 - DNA, 25 bp, Homo sapien
ggataagttgctcaatccaccacat

SEQ ID NO: 1872801 - DNA, 25 bp, Homo sapien
tttctgcttaagcatcttcttttca

SEQ ID NO: 1872802 - DNA, 25 bp, Homo sapien
tgccacctcctacaaataaggggaa

SEQ ID NO: 1872803 - DNA, 25 bp, Homo sapien
ctactgccacctcctacaaataagg

SEQ ID NO: 1872804 - DNA, 25 bp, Homo sapien
ttggactgccagaaaatcctactgc

SEQ ID NO: 1872805 - DNA, 25 bp, Homo sapien
actgccacctcctacaaataagggg

SEQ ID NO: 1872806 - DNA, 25 bp, Homo sapien
agaattcttcccacttccatcagac

SEQ ID NO: 1872807 - DNA, 25 bp, Homo sapien
agtgtgggagttttctggttctgtc

SEQ ID NO: 1872808 - DNA, 25 bp, Homo sapien
aaattagttgctgtagaggccatga

SEQ ID NO: 1872809 - DNA, 25 bp, Homo sapien
taggagtacgaagtggccaaggcct

SEQ ID NO: 1872810 - DNA, 25 bp, Homo sapien
tgaggagctgatatgaccctcagat

SEQ ID NO: 1872811 - DNA, 25 bp, Homo sapien
ctgaggagctgatatgaccctcaga

SEQ ID NO: 1872812 - DNA, 25 bp, Homo sapien
gaggagctgatatgaccctcagatt

SEQ ID NO: 1872813 - DNA, 25 bp, Homo sapien
tctgtgtggtcataagaggagtcaa

SEQ ID NO: 1872814 - DNA, 25 bp, Homo sapien
tttccatggcattcctcttcagcag

SEQ ID NO: 1872815 - DNA, 25 bp, Homo sapien
tcctcctccacagagatatggctgc

SEQ ID NO: 1872816 - DNA, 25 bp, Homo sapien
caggtcagagtatagttccccgaaa

SEQ ID NO: 1872817 - DNA, 25 bp, Homo sapien
atcttggtccattcccatttgttgc

SEQ ID NO: 1872818 - DNA, 25 bp, Homo sapien
tgtaatcttggtccattcccatttg

SEQ ID NO: 1872819 - DNA, 25 bp, Homo sapien
tcaaatccatcactgtaatcttggt

SEQ ID NO: 1872820 - DNA, 25 bp, Homo sapien
catcactgtaatcttggtccattcc

SEQ ID NO: 1872821 - DNA, 25 bp, Homo sapien
gacagtaatggagctaggcgaatac

SEQ ID NO: 1872822 - DNA, 25 bp, Homo sapien
gggaccttaaggacataaaatcatg

SEQ ID NO: 1872823 - DNA, 25 bp, Homo sapien
taaaatcatgccagacagtaatgga

SEQ ID NO: 1872824 - DNA, 25 bp, Homo sapien
taggcgaatactcctcagttgaaat

SEQ ID NO: 1872825 - DNA, 25 bp, Homo sapien
taatgacagtcatagatgggaaatc

SEQ ID NO: 1872826 - DNA, 25 bp, Homo sapien
ctttacacatactatttcgctggcc

SEQ ID NO: 1872827 - DNA, 25 bp, Homo sapien
cgctggccaggtatgataattttcc

SEQ ID NO: 1872828 - DNA, 25 bp, Homo sapien
tgggaaatcactctgcgtgaatact

SEQ ID NO: 1872829 - DNA, 25 bp, Homo sapien
tgagtctgtataagctggagctccc

SEQ ID NO: 1872830 - DNA, 25 bp, Homo sapien
tataggaaattgagttatatgcaaa

SEQ ID NO: 1872831 - DNA, 25 bp, Homo sapien
tatttctgacattacccttagctgg

SEQ ID NO: 1872832 - DNA, 25 bp, Homo sapien
tccacttccagtgtatttggataaa

SEQ ID NO: 1872833 - DNA, 25 bp, Homo sapien
cacaggtctgtgcctctgccacaga

SEQ ID NO: 1872834 - DNA, 25 bp, Homo sapien
tcacaggtctgtgcctctgccacag

SEQ ID NO: 1872835 - DNA, 25 bp, Homo sapien
acaggtctgtgcctctgccacagac

SEQ ID NO: 1872836 - DNA, 25 bp, Homo sapien
tctttgatcaagtgagaccagggca

SEQ ID NO: 1872837 - DNA, 25 bp, Homo sapien
gagcggcccttgagttttgctacag

SEQ ID NO: 1872838 - DNA, 25 bp, Homo sapien
tacagtttccgtatgatgccacagc

SEQ ID NO: 1872839 - DNA, 25 bp, Homo sapien
caagagtgctccagtacattaacag

SEQ ID NO: 1872840 - DNA, 25 bp, Homo sapien
gactatcaaaagttgtttctcagca

SEQ ID NO: 1872841 - DNA, 25 bp, Homo sapien
actatcaaaagttgtttctcagcaa

SEQ ID NO: 1872842 - DNA, 25 bp, Homo sapien
ctatcaaaagttgtttctcagcaaa

SEQ ID NO: 1872843 - DNA, 25 bp, Homo sapien
tgactatcaaaagttgtttctcagc

SEQ ID NO: 1872844 - DNA, 25 bp, Homo sapien
tgtgccacagacttaagacttctgt

SEQ ID NO: 1872845 - DNA, 25 bp, Homo sapien
tcaaggttaagagcgatgcatattc

SEQ ID NO: 1872846 - DNA, 25 bp, Homo sapien
cacagtgtgccacagacttaagact

SEQ ID NO: 1872847 - DNA, 25 bp, Homo sapien
ctcaaggttaagagcgatgcatatt

SEQ ID NO: 1872848 - DNA, 25 bp, Homo sapien
tggccacttcttcggaatagtccga

SEQ ID NO: 1872849 - DNA, 25 bp, Homo sapien
ggtggccacttcttcggaatagtcc

SEQ ID NO: 1872850 - DNA, 25 bp, Homo sapien
gtggccacttcttcggaatagtccg

SEQ ID NO: 1872851 - DNA, 25 bp, Homo sapien
tcttggtgtggaaacgagtacttgg

SEQ ID NO: 1872852 - DNA, 25 bp, Homo sapien
agctggacagtgtaagaatgtggct

SEQ ID NO: 1872853 - DNA, 25 bp, Homo sapien
tgtcccaccacagctttctcgtagt

SEQ ID NO: 1872854 - DNA, 25 bp, Homo sapien
cagctttctcgtagtgggactgtca

SEQ ID NO: 1872855 - DNA, 25 bp, Homo sapien
tcggctgctggacttgcttgaggta

SEQ ID NO: 1872856 - DNA, 25 bp, Homo sapien
taccattgttgatctcagttgggca

SEQ ID NO: 1872857 - DNA, 25 bp, Homo sapien
taggaaaaacaagttgatcgctggg

SEQ ID NO: 1872858 - DNA, 25 bp, Homo sapien
aaacaagttgatcgctgggtctacc

SEQ ID NO: 1872859 - DNA, 25 bp, Homo sapien
tctcttgttccttggttgctagtcg

SEQ ID NO: 1872860 - DNA, 25 bp, Homo sapien
ctagtcgcattacaaggatgttttc

SEQ ID NO: 1872861 - DNA, 25 bp, Homo sapien
tcttgttccttggttgctagtcgca

SEQ ID NO: 1872862 - DNA, 25 bp, Homo sapien
ggatgttttccctgcgtgcagactc

SEQ ID NO: 1872863 - DNA, 25 bp, Homo sapien
tcattagagtttaagatctgtatac

SEQ ID NO: 1872864 - DNA, 25 bp, Homo sapien
tgtttcactcagtcgaactttcttg

SEQ ID NO: 1872865 - DNA, 25 bp, Homo sapien
gtctgtttcactcagtcgaactttc

SEQ ID NO: 1872866 - DNA, 25 bp, Homo sapien
tttcactcagtcgaactttcttggg

SEQ ID NO: 1872867 - DNA, 25 bp, Homo sapien
tctgtttcactcagtcgaactttct

SEQ ID NO: 1872868 - DNA, 25 bp, Homo sapien
ttgaaggatcatggtcctctgatga

SEQ ID NO: 1872869 - DNA, 25 bp, Homo sapien
ctgatgacttcatgttagtgccacc

SEQ ID NO: 1872870 - DNA, 25 bp, Homo sapien
gatgacttcatgttagtgccacctg

SEQ ID NO: 1872871 - DNA, 25 bp, Homo sapien
ttaagagcttgaaggatcatggtcc

SEQ ID NO: 1872872 - DNA, 25 bp, Homo sapien
tctgcacttgccagacagacacgtc

SEQ ID NO: 1872873 - DNA, 25 bp, Homo sapien
ttgccagacagacacgtcagttttg

SEQ ID NO: 1872874 - DNA, 25 bp, Homo sapien
gacagacacgtcagttttgacagca

SEQ ID NO: 1872875 - DNA, 25 bp, Homo sapien
tctgtaatcgactccactccactct

SEQ ID NO: 1872876 - DNA, 25 bp, Homo sapien
gcaaagttatggaactttcttctct

SEQ ID NO: 1872877 - DNA, 25 bp, Homo sapien
cttctcttagagtccaagttgatcc

SEQ ID NO: 1872878 - DNA, 25 bp, Homo sapien
caatctcaggtcttttcaagaatat

SEQ ID NO: 1872879 - DNA, 25 bp, Homo sapien
cgtcaatctcaggtcttttcaagaa

SEQ ID NO: 1872880 - DNA, 25 bp, Homo sapien
acccattttcgaccttgacccaatg

SEQ ID NO: 1872881 - DNA, 25 bp, Homo sapien
attttcgaccttgacccaatgctgc

SEQ ID NO: 1872882 - DNA, 25 bp, Homo sapien
ctgtagttctgacctggcggtcaca

SEQ ID NO: 1872883 - DNA, 25 bp, Homo sapien
tgacctggcggtcacagcagaacat

SEQ ID NO: 1872884 - DNA, 25 bp, Homo sapien
gggacgtggcaatcacatatttctg

SEQ ID NO: 1872885 - DNA, 25 bp, Homo sapien
cagggacgtggcaatcacatatttc

SEQ ID NO: 1872886 - DNA, 25 bp, Homo sapien
cctgccccgacagggacgtggcaat

SEQ ID NO: 1872887 - DNA, 25 bp, Homo sapien
ccgacagggacgtggcaatcacata

SEQ ID NO: 1872888 - DNA, 25 bp, Homo sapien
gaacccttaatccagcactcgctga

SEQ ID NO: 1872889 - DNA, 25 bp, Homo sapien
gtggcctgatgatgagaacccttaa

SEQ ID NO: 1872890 - DNA, 25 bp, Homo sapien
caagaatggcaggtacggaaccctc

SEQ ID NO: 1872891 - DNA, 25 bp, Homo sapien
gatgatgatccgaacttccttgacc

SEQ ID NO: 1872892 - DNA, 25 bp, Homo sapien
gcattcatcaccaatctcagtttcc

SEQ ID NO: 1872893 - DNA, 25 bp, Homo sapien
gagaattaccacaaatattacacac

SEQ ID NO: 1872894 - DNA, 25 bp, Homo sapien
tacacacaagattaagaggttagat

SEQ ID NO: 1872895 - DNA, 25 bp, Homo sapien
tgatggttcagaggtgagaattacc

SEQ ID NO: 1872896 - DNA, 25 bp, Homo sapien
gaccttaactctgccagaagtccca

SEQ ID NO: 1872897 - DNA, 25 bp, Homo sapien
ttggagcaagaccttaactctgcca

SEQ ID NO: 1872898 - DNA, 25 bp, Homo sapien
ggagcaagaccttaactctgccaga

SEQ ID NO: 1872899 - DNA, 25 bp, Homo sapien
caagaccttaactctgccagaagtc

SEQ ID NO: 1872900 - DNA, 25 bp, Homo sapien
tcccggtcattgaagctatgaattt

SEQ ID NO: 1872901 - DNA, 25 bp, Homo sapien
cactctcccggtcattgaagctatg

SEQ ID NO: 1872902 - DNA, 25 bp, Homo sapien
tgctgccactctcccggtcattgaa

SEQ ID NO: 1872903 - DNA, 25 bp, Homo sapien
ctttgccatttggattttctgctgc

SEQ ID NO: 1872904 - DNA, 25 bp, Homo sapien
tacagcagttacagtactgttagca

SEQ ID NO: 1872905 - DNA, 25 bp, Homo sapien
tgttagcatccctccttgtgaataa

SEQ ID NO: 1872906 - DNA, 25 bp, Homo sapien
aatagtccactggtaaggatacagc

SEQ ID NO: 1872907 - DNA, 25 bp, Homo sapien
tagtccactggtaaggatacagcag

SEQ ID NO: 1872908 - DNA, 25 bp, Homo sapien
ctctagaaaaagaatcccaggattt

SEQ ID NO: 1872909 - DNA, 25 bp, Homo sapien
atcccaggattttccctcctgtgtt

SEQ ID NO: 1872910 - DNA, 25 bp, Homo sapien
ttacatctctagaaaaagaatccca

SEQ ID NO: 1872911 - DNA, 25 bp, Homo sapien
caggattttccctcctgtgtttttg

SEQ ID NO: 1872912 - DNA, 25 bp, Homo sapien
tcgcttcttcatggtccatgacgcc

SEQ ID NO: 1872913 - DNA, 25 bp, Homo sapien
atggtccatgacgccagctgcggtt

SEQ ID NO: 1872914 - DNA, 25 bp, Homo sapien
gcttcttcatggtccatgacgccag

SEQ ID NO: 1872915 - DNA, 25 bp, Homo sapien
ttcatggtccatgacgccagctgcg

SEQ ID NO: 1872916 - DNA, 25 bp, Homo sapien
atttttaagttggacatcaaatctg

SEQ ID NO: 1872917 - DNA, 25 bp, Homo sapien
ttctagatttttaagttggacatca

SEQ ID NO: 1872918 - DNA, 25 bp, Homo sapien
ttttaagttggacatcaaatctggt

SEQ ID NO: 1872919 - DNA, 25 bp, Homo sapien
aagttggacatcaaatctggtgctg

SEQ ID NO: 1872920 - DNA, 25 bp, Homo sapien
aaccggatgctgactttggagcatg

SEQ ID NO: 1872921 - DNA, 25 bp, Homo sapien
tgttagaaaccggatgctgactttg

SEQ ID NO: 1872922 - DNA, 25 bp, Homo sapien
tagaaaccggatgctgactttggag

SEQ ID NO: 1872923 - DNA, 25 bp, Homo sapien
ctgttagaaaccggatgctgacttt

SEQ ID NO: 1872924 - DNA, 25 bp, Homo sapien
tgctctggagagcaacagccaggat

SEQ ID NO: 1872925 - DNA, 25 bp, Homo sapien
tctggagagcaacagccaggatgtc

SEQ ID NO: 1872926 - DNA, 25 bp, Homo sapien
gagcaacagccaggatgtccatgca

SEQ ID NO: 1872927 - DNA, 25 bp, Homo sapien
tggagagcaacagccaggatgtcca

SEQ ID NO: 1872928 - DNA, 25 bp, Homo sapien
cagaattgtgcaactgagcagcctg

SEQ ID NO: 1872929 - DNA, 25 bp, Homo sapien
caaaccccgagtggctgaatcacat

SEQ ID NO: 1872930 - DNA, 25 bp, Homo sapien
cagaatctctaggtttgaaggcagc

SEQ ID NO: 1872931 - DNA, 25 bp, Homo sapien
ttttctaagtgagtgctgccaccag

SEQ ID NO: 1872932 - DNA, 25 bp, Homo sapien
tcttgccccggagggacatgtgaca

SEQ ID NO: 1872933 - DNA, 25 bp, Homo sapien
ctgtggtccggagcctcaagatcta

SEQ ID NO: 1872934 - DNA, 25 bp, Homo sapien
gcctggagaaagctatttcagtgtc

SEQ ID NO: 1872935 - DNA, 25 bp, Homo sapien
acatgtgacacccagtacactgcat

SEQ ID NO: 1872936 - DNA, 25 bp, Homo sapien
ggccaacttgtcagtaactgatttc

SEQ ID NO: 1872937 - DNA, 25 bp, Homo sapien
ttcaataagagcataacctaattta

SEQ ID NO: 1872938 - DNA, 25 bp, Homo sapien
gataaatgcttctggggccaacttg

SEQ ID NO: 1872939 - DNA, 25 bp, Homo sapien
ccagtagagatccattatccttttg

SEQ ID NO: 1872940 - DNA, 25 bp, Homo sapien
ttgcctgcgaaagggaatttgtcct

SEQ ID NO: 1872941 - DNA, 25 bp, Homo sapien
cacccagcaatgaattaataatagc

SEQ ID NO: 1872942 - DNA, 25 bp, Homo sapien
ataatgcttcccgatgctgttcgca

SEQ ID NO: 1872943 - DNA, 25 bp, Homo sapien
taatagctgccaactagctgcaaga

SEQ ID NO: 1872944 - DNA, 25 bp, Homo sapien
tggccctctccgatgatgaatgagg

SEQ ID NO: 1872945 - DNA, 25 bp, Homo sapien
gtgtggccctctccgatgatgaatg

SEQ ID NO: 1872946 - DNA, 25 bp, Homo sapien
ccctctccgatgatgaatgaggcgc

SEQ ID NO: 1872947 - DNA, 25 bp, Homo sapien
tcccaacctccatttcaccagtgtg

SEQ ID NO: 1872948 - DNA, 25 bp, Homo sapien
attttggtgaaacgcttagaggtat

SEQ ID NO: 1872949 - DNA, 25 bp, Homo sapien
cttagaggtataatatgagctggat

SEQ ID NO: 1872950 - DNA, 25 bp, Homo sapien
attttcacagcatttgatgtactga

SEQ ID NO: 1872951 - DNA, 25 bp, Homo sapien
catttgatgtactgaatgttgtggg

SEQ ID NO: 1872952 - DNA, 25 bp, Homo sapien
caataggtagtttctcaacctgcac

SEQ ID NO: 1872953 - DNA, 25 bp, Homo sapien
tctgcccagtggtttaagttcttct

SEQ ID NO: 1872954 - DNA, 25 bp, Homo sapien
ggaaggtccttggtgtggcatccaa

SEQ ID NO: 1872955 - DNA, 25 bp, Homo sapien
taaaacacaactaattcagccacag

SEQ ID NO: 1872956 - DNA, 25 bp, Homo sapien
gatttaaatctgacaatgtccaggg

SEQ ID NO: 1872957 - DNA, 25 bp, Homo sapien
gatgagacctggaccctatttccaa

SEQ ID NO: 1872958 - DNA, 25 bp, Homo sapien
gctagtgtgcataaaagctgggatt

SEQ ID NO: 1872959 - DNA, 25 bp, Homo sapien
tttgctcctgaccacataattgtag

SEQ ID NO: 1872960 - DNA, 25 bp, Homo sapien
gacaggactgcgcatgacacagcta

SEQ ID NO: 1872961 - DNA, 25 bp, Homo sapien
tctgcacagcgaccagacaggactg

SEQ ID NO: 1872962 - DNA, 25 bp, Homo sapien
catgacacagctaaatacaattcca

SEQ ID NO: 1872963 - DNA, 25 bp, Homo sapien
catctctgcacagcgaccagacagg

SEQ ID NO: 1872964 - DNA, 25 bp, Homo sapien
tatgcacaagggcagtcgtgcttgg

SEQ ID NO: 1872965 - DNA, 25 bp, Homo sapien
gggacatgacagttggtcacctcca

SEQ ID NO: 1872966 - DNA, 25 bp, Homo sapien
gacatgatccagctatgcacaaggg

SEQ ID NO: 1872967 - DNA, 25 bp, Homo sapien
gaaaggcacataggagtggacatga

SEQ ID NO: 1872968 - DNA, 25 bp, Homo sapien
aaaaaattggatgggtgagactgca

SEQ ID NO: 1872969 - DNA, 25 bp, Homo sapien
taagataccatttcaagctcgcgaa

SEQ ID NO: 1872970 - DNA, 25 bp, Homo sapien
ttaatgggtcacaaattggtaagcc

SEQ ID NO: 1872971 - DNA, 25 bp, Homo sapien
ttttgggccactgtaacaatctacc

SEQ ID NO: 1872972 - DNA, 25 bp, Homo sapien
ctggaaggagaggataatcgaagca

SEQ ID NO: 1872973 - DNA, 25 bp, Homo sapien
taaccatgttggatactcacaggag

SEQ ID NO: 1872974 - DNA, 25 bp, Homo sapien
tcacaggagtaaaccagtagattgg

SEQ ID NO: 1872975 - DNA, 25 bp, Homo sapien
ggtattattagacgtatagcccaaa

SEQ ID NO: 1872976 - DNA, 25 bp, Homo sapien
gctgagatctaaagagactgccaat

SEQ ID NO: 1872977 - DNA, 25 bp, Homo sapien
cactgtggtagtaaagcagacccag

SEQ ID NO: 1872978 - DNA, 25 bp, Homo sapien
ggaacccttggtgacatgccttgta

SEQ ID NO: 1872979 - DNA, 25 bp, Homo sapien
gagcatttcctgtaagcatgtccca

SEQ ID NO: 1872980 - DNA, 25 bp, Homo sapien
caagggcaagtctattgaagggcaa

SEQ ID NO: 1872981 - DNA, 25 bp, Homo sapien
tggtcaaaacaaccgtggctccata

SEQ ID NO: 1872982 - DNA, 25 bp, Homo sapien
taagctgagtctcgcactctggaag

SEQ ID NO: 1872983 - DNA, 25 bp, Homo sapien
tgccttggaccctaacaaagttatg

SEQ ID NO: 1872984 - DNA, 25 bp, Homo sapien
cagctaactctttgtgaagggcgaa

SEQ ID NO: 1872985 - DNA, 25 bp, Homo sapien
tagagttggcctacagtggtgctca

SEQ ID NO: 1872986 - DNA, 25 bp, Homo sapien
tatggttattcctacgcagagggat

SEQ ID NO: 1872987 - DNA, 25 bp, Homo sapien
taaaacatgcctcccagaaagactg

SEQ ID NO: 1872988 - DNA, 25 bp, Homo sapien
gcttggagcataaggccttctggat

SEQ ID NO: 1872989 - DNA, 25 bp, Homo sapien
ccaattcttagtagggtgagacaca

SEQ ID NO: 1872990 - DNA, 25 bp, Homo sapien
aaatgggccccgtacaaatgtgtga

SEQ ID NO: 1872991 - DNA, 25 bp, Homo sapien
taaactagggaaggcatgttctgcc

SEQ ID NO: 1872992 - DNA, 25 bp, Homo sapien
tgataaaggacttggccacttggct

SEQ ID NO: 1872993 - DNA, 25 bp, Homo sapien
acagcctagagcagttgcatatgac

SEQ ID NO: 1872994 - DNA, 25 bp, Homo sapien
caaatgtatcaataccaggtgagcc

SEQ ID NO: 1872995 - DNA, 25 bp, Homo sapien
tagtatcacagctttatgcatcatc

SEQ ID NO: 1872996 - DNA, 25 bp, Homo sapien
gaaggtaagctctgacagatcaggg

SEQ ID NO: 1872997 - DNA, 25 bp, Homo sapien
taacaagtgccattatttgcctagc

SEQ ID NO: 1872998 - DNA, 25 bp, Homo sapien
tcaaagcattgtgggtggtcaatcc

SEQ ID NO: 1872999 - DNA, 25 bp, Homo sapien
tttgatacgctcacactactgtagg

SEQ ID NO: 1873000 - DNA, 25 bp, Homo sapien
tcctgaatagtttccgggtgtactg

SEQ ID NO: 1873001 - DNA, 25 bp, Homo sapien
tagtttccgggtgtactgaatgaag

SEQ ID NO: 1873002 - DNA, 25 bp, Homo sapien
cctgaatagtttccgggtgtactga

SEQ ID NO: 1873003 - DNA, 25 bp, Homo sapien
tccgggtgtactgaatgaaggcaga

SEQ ID NO: 1873004 - DNA, 25 bp, Homo sapien
ctcttgcaggtacacctgctgagca

SEQ ID NO: 1873005 - DNA, 25 bp, Homo sapien
tcagccgactttgccctggcaactg

SEQ ID NO: 1873006 - DNA, 25 bp, Homo sapien
ggtatctgagcaactgctcttggcc

SEQ ID NO: 1873007 - DNA, 25 bp, Homo sapien
agctggtatctgagcaactgctctt

SEQ ID NO: 1873008 - DNA, 25 bp, Homo sapien
gcccagcatgaccttcattctcata

SEQ ID NO: 1873009 - DNA, 25 bp, Homo sapien
ctggacactccattcatcaactggt

SEQ ID NO: 1873010 - DNA, 25 bp, Homo sapien
tcttcctctcggacaatgtggcggc

SEQ ID NO: 1873011 - DNA, 25 bp, Homo sapien
ggatgtgatgccagtagtaccagga

SEQ ID NO: 1873012 - DNA, 25 bp, Homo sapien
agttcactgtgtaaaggtgcccaga

SEQ ID NO: 1873013 - DNA, 25 bp, Homo sapien
gaaagttcactgtgtaaaggtgccc

SEQ ID NO: 1873014 - DNA, 25 bp, Homo sapien
cccagccgaaatgaaagttcactgt

SEQ ID NO: 1873015 - DNA, 25 bp, Homo sapien
acagactccccagccgaaatgaaag

SEQ ID NO: 1873016 - DNA, 25 bp, Homo sapien
gctgtgtttcttagcattccaaaat

SEQ ID NO: 1873017 - DNA, 25 bp, Homo sapien
tgcaaacaacttccatcattgtcct

SEQ ID NO: 1873018 - DNA, 25 bp, Homo sapien
cattatatttgagtgagttattcaa

SEQ ID NO: 1873019 - DNA, 25 bp, Homo sapien
catggtagttaatggttgaatcttt

SEQ ID NO: 1873020 - DNA, 25 bp, Homo sapien
tactggaatccaaaagacccttgga

SEQ ID NO: 1873021 - DNA, 25 bp, Homo sapien
caggctcttcatcttattcagtggg

SEQ ID NO: 1873022 - DNA, 25 bp, Homo sapien
cattctcatgaagctaaagcagcca

SEQ ID NO: 1873023 - DNA, 25 bp, Homo sapien
cagtgggcatgctgttattcctgat

SEQ ID NO: 1873024 - DNA, 25 bp, Homo sapien
tctgggattcaggaatctcttcagg

SEQ ID NO: 1873025 - DNA, 25 bp, Homo sapien
gattctcggcgtttggatgagatgt

SEQ ID NO: 1873026 - DNA, 25 bp, Homo sapien
cttttttgggcccttgtgattctcg

SEQ ID NO: 1873027 - DNA, 25 bp, Homo sapien
tattttgattattagtctgggattc

SEQ ID NO: 1873028 - DNA, 25 bp, Homo sapien
cacgactccgtgaaacaatattttc

SEQ ID NO: 1873029 - DNA, 25 bp, Homo sapien
gtaactacttcttgtcaagtctggg

SEQ ID NO: 1873030 - DNA, 25 bp, Homo sapien
tatatgatgagactggtggattttc

SEQ ID NO: 1873031 - DNA, 25 bp, Homo sapien
tgtcaacgttgagaagatcttcacg

SEQ ID NO: 1873032 - DNA, 25 bp, Homo sapien
cagcactacatacactgaatgtaga

SEQ ID NO: 1873033 - DNA, 25 bp, Homo sapien
gcagacagcactacatacactgaat

SEQ ID NO: 1873034 - DNA, 25 bp, Homo sapien
gacagcactacatacactgaatgta

SEQ ID NO: 1873035 - DNA, 25 bp, Homo sapien
cagacagcactacatacactgaatg

SEQ ID NO: 1873036 - DNA, 25 bp, Homo sapien
tgcttcttttaagccaacagcacac

SEQ ID NO: 1873037 - DNA, 25 bp, Homo sapien
tttgcttcttttaagccaacagcac

SEQ ID NO: 1873038 - DNA, 25 bp, Homo sapien
tgcttttgcttcttttaagccaaca

SEQ ID NO: 1873039 - DNA, 25 bp, Homo sapien
cttttgcttcttttaagccaacagc

SEQ ID NO: 1873040 - DNA, 25 bp, Homo sapien
agccaggatgatggtcgacttctcc

SEQ ID NO: 1873041 - DNA, 25 bp, Homo sapien
tcgacttctccttcctagtcacagg

SEQ ID NO: 1873042 - DNA, 25 bp, Homo sapien
tagtcacaggcaagacagcaaatgg

SEQ ID NO: 1873043 - DNA, 25 bp, Homo sapien
tccttcctagtcacaggcaagacag

SEQ ID NO: 1873044 - DNA, 25 bp, Homo sapien
aataaagtgccagtttgacccagag

SEQ ID NO: 1873045 - DNA, 25 bp, Homo sapien
gacccagagatcaagactgccaagt

SEQ ID NO: 1873046 - DNA, 25 bp, Homo sapien
gactgccaagttgtagaagctaaca

SEQ ID NO: 1873047 - DNA, 25 bp, Homo sapien
tgtagaagctaacataaccatcttg

SEQ ID NO: 1873048 - DNA, 25 bp, Homo sapien
gaggtcccagggactctactcttcg

SEQ ID NO: 1873049 - DNA, 25 bp, Homo sapien
ggtcccagggactctactcttcgat

SEQ ID NO: 1873050 - DNA, 25 bp, Homo sapien
ctctgaaggaggtcccagggactct

SEQ ID NO: 1873051 - DNA, 25 bp, Homo sapien
tgaaggaggtcccagggactctact

SEQ ID NO: 1873052 - DNA, 25 bp, Homo sapien
gatctacttctttgtgaaggctaga

SEQ ID NO: 1873053 - DNA, 25 bp, Homo sapien
tagtgagaagctctaagtgcaacaa

SEQ ID NO: 1873054 - DNA, 25 bp, Homo sapien
tgtcataagttccttcactagcatg

SEQ ID NO: 1873055 - DNA, 25 bp, Homo sapien
gcaacaaattgcacccagtgggcac

SEQ ID NO: 1873056 - DNA, 25 bp, Homo sapien
tgcactggaagctcatttcccactt

SEQ ID NO: 1873057 - DNA, 25 bp, Homo sapien
tccaaaaataccaattgtggctgca

SEQ ID NO: 1873058 - DNA, 25 bp, Homo sapien
taccaattgtggctgcactggaagc

SEQ ID NO: 1873059 - DNA, 25 bp, Homo sapien
tgctcatccaaaaataccaattgtg

SEQ ID NO: 1873060 - DNA, 25 bp, Homo sapien
gatggaaagtgcatagggccgaata

SEQ ID NO: 1873061 - DNA, 25 bp, Homo sapien
ggccgaatatatatcaagttcccag

SEQ ID NO: 1873062 - DNA, 25 bp, Homo sapien
gtgcatagggccgaatatatatcaa

SEQ ID NO: 1873063 - DNA, 25 bp, Homo sapien
tagggccgaatatatatcaagttcc

SEQ ID NO: 1873064 - DNA, 25 bp, Homo sapien
gagggaaaccaactgcctgaacacc

SEQ ID NO: 1873065 - DNA, 25 bp, Homo sapien
taagtacattgacgtcttgagacga

SEQ ID NO: 1873066 - DNA, 25 bp, Homo sapien
tggaggtcacagacttgctgctgca

SEQ ID NO: 1873067 - DNA, 25 bp, Homo sapien
gttaaagagactgaaagaccccatc

SEQ ID NO: 1873068 - DNA, 25 bp, Homo sapien
tgttagcttaaaatcgaatctccgt

SEQ ID NO: 1873069 - DNA, 25 bp, Homo sapien
gcttaaaatcgaatctccgtggcct

SEQ ID NO: 1873070 - DNA, 25 bp, Homo sapien
tagtgcaataaatctgttagcttaa

SEQ ID NO: 1873071 - DNA, 25 bp, Homo sapien
aatagtgcaataaatctgttagctt

SEQ ID NO: 1873072 - DNA, 25 bp, Homo sapien
agacagttgtaaggttctattgctg

SEQ ID NO: 1873073 - DNA, 25 bp, Homo sapien
ctgatgccttgttagacagttgtaa

SEQ ID NO: 1873074 - DNA, 25 bp, Homo sapien
ccttgttagacagttgtaaggttct

SEQ ID NO: 1873075 - DNA, 25 bp, Homo sapien
cagttgtaaggttctattgctggcc

SEQ ID NO: 1873076 - DNA, 25 bp, Homo sapien
tcttgttttaaataggctagataag

SEQ ID NO: 1873077 - DNA, 25 bp, Homo sapien
gttttaaataggctagataaggcca

SEQ ID NO: 1873078 - DNA, 25 bp, Homo sapien
tgccacaaggggacttgaaatataa

SEQ ID NO: 1873079 - DNA, 25 bp, Homo sapien
gataaggccaaatattctatatgtg

SEQ ID NO: 1873080 - DNA, 25 bp, Homo sapien
tcagaacattctctagtaccccagt

SEQ ID NO: 1873081 - DNA, 25 bp, Homo sapien
ctgagtaactagtaaggccccgata

SEQ ID NO: 1873082 - DNA, 25 bp, Homo sapien
cagtgatgactcgatgagccaaatt

SEQ ID NO: 1873083 - DNA, 25 bp, Homo sapien
taccccagtctgttgagcagtgatg

SEQ ID NO: 1873084 - DNA, 25 bp, Homo sapien
catgagaggcctacgttgaccaact

SEQ ID NO: 1873085 - DNA, 25 bp, Homo sapien
gggtgaagccctatgtgagttcatt

SEQ ID NO: 1873086 - DNA, 25 bp, Homo sapien
tgagatagtttccacagtcattggg

SEQ ID NO: 1873087 - DNA, 25 bp, Homo sapien
gctccttactgttggcgaatcacca

SEQ ID NO: 1873088 - DNA, 25 bp, Homo sapien
gaattgcccaaatggcatcagcgct

SEQ ID NO: 1873089 - DNA, 25 bp, Homo sapien
tggccaggcatctcgtgaataaacc

SEQ ID NO: 1873090 - DNA, 25 bp, Homo sapien
gacactgacccagaagtagagcagg

SEQ ID NO: 1873091 - DNA, 25 bp, Homo sapien
aacacctgagcgtatttcaatgggc

SEQ ID NO: 1873092 - DNA, 25 bp, Homo sapien
tggagcccgagagggcacaatctct

SEQ ID NO: 1873093 - DNA, 25 bp, Homo sapien
tttgaatcgtgcagggttggagccc

SEQ ID NO: 1873094 - DNA, 25 bp, Homo sapien
agagtttagcccaggaccggtccat

SEQ ID NO: 1873095 - DNA, 25 bp, Homo sapien
atctctgctgaaagtgtgtgatgca

SEQ ID NO: 1873096 - DNA, 25 bp, Homo sapien
gtactctgatggatgcagcatctat

SEQ ID NO: 1873097 - DNA, 25 bp, Homo sapien
ctaggttaggatgtcagtactctga

SEQ ID NO: 1873098 - DNA, 25 bp, Homo sapien
cagcatcagggtagactaggttagg

SEQ ID NO: 1873099 - DNA, 25 bp, Homo sapien
ttagatgcatcttttcctccgaaca

SEQ ID NO: 1873100 - DNA, 25 bp, Homo sapien
aactgatactcttgacactcagaga

SEQ ID NO: 1873101 - DNA, 25 bp, Homo sapien
aacataaatattgctttgccagaga

SEQ ID NO: 1873102 - DNA, 25 bp, Homo sapien
gatggctgccttatatccttggttt

SEQ ID NO: 1873103 - DNA, 25 bp, Homo sapien
tatagttattcagcttgaagcagtg

SEQ ID NO: 1873104 - DNA, 25 bp, Homo sapien
aagatttggaagtgatgggcagaca

SEQ ID NO: 1873105 - DNA, 25 bp, Homo sapien
tgggcagacacaaagtcagcagaga

SEQ ID NO: 1873106 - DNA, 25 bp, Homo sapien
ttaatcatagatacatcagtgatcc

SEQ ID NO: 1873107 - DNA, 25 bp, Homo sapien
gcagagaatggtagctgatctttaa

SEQ ID NO: 1873108 - DNA, 25 bp, Homo sapien
tgaaagttcaccctcttgtccagat

SEQ ID NO: 1873109 - DNA, 25 bp, Homo sapien
gttcaccctcttgtccagattccca

SEQ ID NO: 1873110 - DNA, 25 bp, Homo sapien
gaaagttcaccctcttgtccagatt

SEQ ID NO: 1873111 - DNA, 25 bp, Homo sapien
aagttcaccctcttgtccagattcc

SEQ ID NO: 1873112 - DNA, 25 bp, Homo sapien
aaataggtgttaagctttcctgtag

SEQ ID NO: 1873113 - DNA, 25 bp, Homo sapien
aataggtgttaagctttcctgtagt

SEQ ID NO: 1873114 - DNA, 25 bp, Homo sapien
ggttctccagggttgagcatagggc

SEQ ID NO: 1873115 - DNA, 25 bp, Homo sapien
cctctggttctccagggttgagcat

SEQ ID NO: 1873116 - DNA, 25 bp, Homo sapien
tctggttctccagggttgagcatag

SEQ ID NO: 1873117 - DNA, 25 bp, Homo sapien
tggttctccagggttgagcataggg

SEQ ID NO: 1873118 - DNA, 25 bp, Homo sapien
tctatctgtaaactccttagtggtg

SEQ ID NO: 1873119 - DNA, 25 bp, Homo sapien
tcttcaggaattgcatcagacaatt

SEQ ID NO: 1873120 - DNA, 25 bp, Homo sapien
caattcctgtctatctgtaaactcc

SEQ ID NO: 1873121 - DNA, 25 bp, Homo sapien
gaattgcatcagacaattcctgtct

SEQ ID NO: 1873122 - DNA, 25 bp, Homo sapien
gatatcctgactacggacaatggtg

SEQ ID NO: 1873123 - DNA, 25 bp, Homo sapien
gaaaagatctggcagcaaaggtagc

SEQ ID NO: 1873124 - DNA, 25 bp, Homo sapien
tatttgagggtcaataaggctctgg

SEQ ID NO: 1873125 - DNA, 25 bp, Homo sapien
gaattgctcctctctcatatagtgg

SEQ ID NO: 1873126 - DNA, 25 bp, Homo sapien
tctgaaatcttcaaagcctgctcag

SEQ ID NO: 1873127 - DNA, 25 bp, Homo sapien
taagaagtaaatcgaccaagtctgg

SEQ ID NO: 1873128 - DNA, 25 bp, Homo sapien
ttcacaggtcattattgcattaaga

SEQ ID NO: 1873129 - DNA, 25 bp, Homo sapien
gctcacgtttcatttcacaggtcat

SEQ ID NO: 1873130 - DNA, 25 bp, Homo sapien
ctggaaacaacgaggaacaattgtc

SEQ ID NO: 1873131 - DNA, 25 bp, Homo sapien
tgatagtgacaaggcacctctggaa

SEQ ID NO: 1873132 - DNA, 25 bp, Homo sapien
tggcagggtctacgatggcagcatc

SEQ ID NO: 1873133 - DNA, 25 bp, Homo sapien
gattgcttaaagatggaacccactc

SEQ ID NO: 1873134 - DNA, 25 bp, Homo sapien
tcactcaacattcctagtgggtagg

SEQ ID NO: 1873135 - DNA, 25 bp, Homo sapien
gagtcaaatggctcaacgttgctat

SEQ ID NO: 1873136 - DNA, 25 bp, Homo sapien
ttggagggactgctcaagtattccc

SEQ ID NO: 1873137 - DNA, 25 bp, Homo sapien
gtttggtatctattggcaaggcaca

SEQ ID NO: 1873138 - DNA, 25 bp, Homo sapien
tgcaaagaagtatccctgtaactct

SEQ ID NO: 1873139 - DNA, 25 bp, Homo sapien
tgtatgcgatgaaagctgacagatc

SEQ ID NO: 1873140 - DNA, 25 bp, Homo sapien
gtggacagagctttgtatgcgatga

SEQ ID NO: 1873141 - DNA, 25 bp, Homo sapien
tgttctgtgtggacagagctttgta

SEQ ID NO: 1873142 - DNA, 25 bp, Homo sapien
agctgacagatctaaaacagttaac

SEQ ID NO: 1873143 - DNA, 25 bp, Homo sapien
tgtatgtggtcagaaatcttggtca

SEQ ID NO: 1873144 - DNA, 25 bp, Homo sapien
ctgccctgaaggtgtatgtggtcag

SEQ ID NO: 1873145 - DNA, 25 bp, Homo sapien
gaaatcttggtcagaccacagtact

SEQ ID NO: 1873146 - DNA, 25 bp, Homo sapien
gtcagaaatcttggtcagaccacag

SEQ ID NO: 1873147 - DNA, 25 bp, Homo sapien
catgctcttggatgacgtgtaacag

SEQ ID NO: 1873148 - DNA, 25 bp, Homo sapien
taaaccaatgacctgaaggcctcag

SEQ ID NO: 1873149 - DNA, 25 bp, Homo sapien
gctccaaatgtcaaatgctgtactg

SEQ ID NO: 1873150 - DNA, 25 bp, Homo sapien
ccatgcgcttggcactgactttaaa

SEQ ID NO: 1873151 - DNA, 25 bp, Homo sapien
catagagggcacagcagtaaagttg

SEQ ID NO: 1873152 - DNA, 25 bp, Homo sapien
gacacaggcaatctcatagagggca

SEQ ID NO: 1873153 - DNA, 25 bp, Homo sapien
cacagcagtaaagttgtgagatcac

SEQ ID NO: 1873154 - DNA, 25 bp, Homo sapien
tctgcacttttgacatggacacagg

SEQ ID NO: 1873155 - DNA, 25 bp, Homo sapien
aggatgcagtccattctgcctctgt

SEQ ID NO: 1873156 - DNA, 25 bp, Homo sapien
gatgcagtccattctgcctctgttt

SEQ ID NO: 1873157 - DNA, 25 bp, Homo sapien
acagaaactggtggaggcagaccca

SEQ ID NO: 1873158 - DNA, 25 bp, Homo sapien
aatacagaaactggtggaggcagac

SEQ ID NO: 1873159 - DNA, 25 bp, Homo sapien
acttgcacagtctaattcaggacag

SEQ ID NO: 1873160 - DNA, 25 bp, Homo sapien
cttggacttgcacagtctaattcag

SEQ ID NO: 1873161 - DNA, 25 bp, Homo sapien
gacttgcacagtctaattcaggaca

SEQ ID NO: 1873162 - DNA, 25 bp, Homo sapien
tggacttgcacagtctaattcagga

SEQ ID NO: 1873163 - DNA, 25 bp, Homo sapien
tgggttgtaatgaaggaaagtagaa

SEQ ID NO: 1873164 - DNA, 25 bp, Homo sapien
ctgggttgtaatgaaggaaagtaga

SEQ ID NO: 1873165 - DNA, 25 bp, Homo sapien
ctatagcaactcttcacaaaactag

SEQ ID NO: 1873166 - DNA, 25 bp, Homo sapien
gcagacatccaggtcatcgctatag

SEQ ID NO: 1873167 - DNA, 25 bp, Homo sapien
ctctctgctgttattgggtgcataa

SEQ ID NO: 1873168 - DNA, 25 bp, Homo sapien
tgggtgcataattccactgttctct

SEQ ID NO: 1873169 - DNA, 25 bp, Homo sapien
gaccaaagcagttcacaagaggagc

SEQ ID NO: 1873170 - DNA, 25 bp, Homo sapien
tgatcctgccacaacgttgccatgg

SEQ ID NO: 1873171 - DNA, 25 bp, Homo sapien
gacagtataggcctgaccctctaaa

SEQ ID NO: 1873172 - DNA, 25 bp, Homo sapien
ggttctgaggtgaatacaggccaca

SEQ ID NO: 1873173 - DNA, 25 bp, Homo sapien
ccctacatgatacgtcaggctgaat

SEQ ID NO: 1873174 - DNA, 25 bp, Homo sapien
ttctcggctggacttcctgaaggac

SEQ ID NO: 1873175 - DNA, 25 bp, Homo sapien
cctcagcagccaaacgaatgtgtcg

SEQ ID NO: 1873176 - DNA, 25 bp, Homo sapien
tatatttcgggtcaacagtccaacc

SEQ ID NO: 1873177 - DNA, 25 bp, Homo sapien
cagggcagacctgtccaattagtgg

SEQ ID NO: 1873178 - DNA, 25 bp, Homo sapien
tgtccgtggacctctttcatgagag

SEQ ID NO: 1873179 - DNA, 25 bp, Homo sapien
tgccttaaataggtcagcgtgagac

SEQ ID NO: 1873180 - DNA, 25 bp, Homo sapien
tgaggagtcccacatcaactgaggc

SEQ ID NO: 1873181 - DNA, 25 bp, Homo sapien
tgggggcgccaatccactgcatctt

SEQ ID NO: 1873182 - DNA, 25 bp, Homo sapien
tgtttgagccgttcatagatcctca

SEQ ID NO: 1873183 - DNA, 25 bp, Homo sapien
gagctaaggactattttgtcatggg

SEQ ID NO: 1873184 - DNA, 25 bp, Homo sapien
caatatgccggtgtttgagccgttc

SEQ ID NO: 1873185 - DNA, 25 bp, Homo sapien
tacctcctatggctatagttccaga

SEQ ID NO: 1873186 - DNA, 25 bp, Homo sapien
ggtgggcctcatcaatcagccagaa

SEQ ID NO: 1873187 - DNA, 25 bp, Homo sapien
tgagtttaaggagattaggccaccc

SEQ ID NO: 1873188 - DNA, 25 bp, Homo sapien
tctgccttaagacggcaaaccagtt

SEQ ID NO: 1873189 - DNA, 25 bp, Homo sapien
taataaccatagttacactataata

SEQ ID NO: 1873190 - DNA, 25 bp, Homo sapien
tttaataaccatagttacactataa

SEQ ID NO: 1873191 - DNA, 25 bp, Homo sapien
ttttaataaccatagttacactata

SEQ ID NO: 1873192 - DNA, 25 bp, Homo sapien
tgttttaataaccatagttacacta

SEQ ID NO: 1873193 - DNA, 25 bp, Homo sapien
gcactgtaaagatgaactttcccat

SEQ ID NO: 1873194 - DNA, 25 bp, Homo sapien
ctgaggcaatatcagctccaagatg

SEQ ID NO: 1873195 - DNA, 25 bp, Homo sapien
gaggcaatatcagctccaagatgtg

SEQ ID NO: 1873196 - DNA, 25 bp, Homo sapien
agttcttaggataagcactgtaaag

SEQ ID NO: 1873197 - DNA, 25 bp, Homo sapien
tccctctgaggctctaaggagaatc

SEQ ID NO: 1873198 - DNA, 25 bp, Homo sapien
tccattcatacggtcacaaaagact

SEQ ID NO: 1873199 - DNA, 25 bp, Homo sapien
gtcacaaaagactccctctgaggct

SEQ ID NO: 1873200 - DNA, 25 bp, Homo sapien
cctctgaggctctaaggagaatcag

SEQ ID NO: 1873201 - DNA, 25 bp, Homo sapien
cagttctaagtatatagtctaccca

SEQ ID NO: 1873202 - DNA, 25 bp, Homo sapien
ggttaatacactaccctagatccat

SEQ ID NO: 1873203 - DNA, 25 bp, Homo sapien
gacagggtacatgtcttttcagcat

SEQ ID NO: 1873204 - DNA, 25 bp, Homo sapien
tgtcctgtggcctcaacaacatgat

SEQ ID NO: 1873205 - DNA, 25 bp, Homo sapien
aaatcaccctggaatgagcagtagc

SEQ ID NO: 1873206 - DNA, 25 bp, Homo sapien
gaagaattgatctgtagcctggagg

SEQ ID NO: 1873207 - DNA, 25 bp, Homo sapien
gaaacagcctgatagtacacgggca

SEQ ID NO: 1873208 - DNA, 25 bp, Homo sapien
gaatgaccaatacaagccacctctg

SEQ ID NO: 1873209 - DNA, 25 bp, Homo sapien
gcctgcaatgaccatgcatgccaca

SEQ ID NO: 1873210 - DNA, 25 bp, Homo sapien
tgcatgccacactcagaacattgct

SEQ ID NO: 1873211 - DNA, 25 bp, Homo sapien
tctgtatccacaaggacagttctgt

SEQ ID NO: 1873212 - DNA, 25 bp, Homo sapien
ttctgtccacagggaagtctaaggt

SEQ ID NO: 1873213 - DNA, 25 bp, Homo sapien
tggtcctcagtgtgattatgacttc

SEQ ID NO: 1873214 - DNA, 25 bp, Homo sapien
ctggtcctcagtgtgattatgactt

SEQ ID NO: 1873215 - DNA, 25 bp, Homo sapien
agggctttcagagcattgccgatgt

SEQ ID NO: 1873216 - DNA, 25 bp, Homo sapien
ccggagtgcacagcagcccaacaaa

SEQ ID NO: 1873217 - DNA, 25 bp, Homo sapien
gaaaagcaaggacaagccattagac

SEQ ID NO: 1873218 - DNA, 25 bp, Homo sapien
attagacacagagcgggccccggag

SEQ ID NO: 1873219 - DNA, 25 bp, Homo sapien
tattaatttagaacaccgggcagta

SEQ ID NO: 1873220 - DNA, 25 bp, Homo sapien
gatatgggtatccttgaagacaccg

SEQ ID NO: 1873221 - DNA, 25 bp, Homo sapien
taaaagtctgctcatgggcagtaat

SEQ ID NO: 1873222 - DNA, 25 bp, Homo sapien
tactgtaaccagaaagtgaccaggg

SEQ ID NO: 1873223 - DNA, 25 bp, Homo sapien
atttactgttaaccacctccatcat

SEQ ID NO: 1873224 - DNA, 25 bp, Homo sapien
cgtggtattgctcctttcctgcctt

SEQ ID NO: 1873225 - DNA, 25 bp, Homo sapien
ttctgctgtcctggttctaatttca

SEQ ID NO: 1873226 - DNA, 25 bp, Homo sapien
ccttctgctgtcctggttctaattt

SEQ ID NO: 1873227 - DNA, 25 bp, Homo sapien
ttgccttctgctgtcctggttctaa

SEQ ID NO: 1873228 - DNA, 25 bp, Homo sapien
cttccttccagtggtgaggacacga

SEQ ID NO: 1873229 - DNA, 25 bp, Homo sapien
gtgaggacacgactttgacatcctt

SEQ ID NO: 1873230 - DNA, 25 bp, Homo sapien
taaggtctatgattctctctaagaa

SEQ ID NO: 1873231 - DNA, 25 bp, Homo sapien
caaggttcactaaggtctatgattc

SEQ ID NO: 1873232 - DNA, 25 bp, Homo sapien
atgagaacgtcatccccagggcctg

SEQ ID NO: 1873233 - DNA, 25 bp, Homo sapien
gtattgttgtatcctccccagcctt

SEQ ID NO: 1873234 - DNA, 25 bp, Homo sapien
gggtaaaatgagaacgtcatcccca

SEQ ID NO: 1873235 - DNA, 25 bp, Homo sapien
gaatggtattgttgtatcctcccca

SEQ ID NO: 1873236 - DNA, 25 bp, Homo sapien
tccttcacccggagaatgacttgaa

SEQ ID NO: 1873237 - DNA, 25 bp, Homo sapien
gggcataccttccttcacccggaga

SEQ ID NO: 1873238 - DNA, 25 bp, Homo sapien
taccttccttcacccggagaatgac

SEQ ID NO: 1873239 - DNA, 25 bp, Homo sapien
ttccttcacccggagaatgacttga

SEQ ID NO: 1873240 - DNA, 25 bp, Homo sapien
gacctggtacaatgacaacatgctc

SEQ ID NO: 1873241 - DNA, 25 bp, Homo sapien
catgttgagacctggtacaatgaca

SEQ ID NO: 1873242 - DNA, 25 bp, Homo sapien
caatgacaacatgctcttgacatgt

SEQ ID NO: 1873243 - DNA, 25 bp, Homo sapien
actgccacatgttgagacctggtac

SEQ ID NO: 1873244 - DNA, 25 bp, Homo sapien
tatcaccacttccaagactttgctt

SEQ ID NO: 1873245 - DNA, 25 bp, Homo sapien
tttatcaccacttccaagactttgc

SEQ ID NO: 1873246 - DNA, 25 bp, Homo sapien
atcaccacttccaagactttgctta

SEQ ID NO: 1873247 - DNA, 25 bp, Homo sapien
ctttatcaccacttccaagactttg

SEQ ID NO: 1873248 - DNA, 25 bp, Homo sapien
ccgagaggatcgttagagaggctcc

SEQ ID NO: 1873249 - DNA, 25 bp, Homo sapien
tcctttggaccaagcaaacatcctt

SEQ ID NO: 1873250 - DNA, 25 bp, Homo sapien
tatgctacatgctcattatctctgc

SEQ ID NO: 1873251 - DNA, 25 bp, Homo sapien
gatttttgattgaagggtggcggct

SEQ ID NO: 1873252 - DNA, 25 bp, Homo sapien
agtgaaagaggcaaagggtggactc

SEQ ID NO: 1873253 - DNA, 25 bp, Homo sapien
ggtggactcaggaccattgcctcgc

SEQ ID NO: 1873254 - DNA, 25 bp, Homo sapien
attgcctcgccctctaaatccatgg

SEQ ID NO: 1873255 - DNA, 25 bp, Homo sapien
ggcacaagtgaaagaggcaaagggt

SEQ ID NO: 1873256 - DNA, 25 bp, Homo sapien
gagttgcctcagctggctattgaag

SEQ ID NO: 1873257 - DNA, 25 bp, Homo sapien
ccagataggtgagttgcctcagctg

SEQ ID NO: 1873258 - DNA, 25 bp, Homo sapien
gataggtgagttgcctcagctggct

SEQ ID NO: 1873259 - DNA, 25 bp, Homo sapien
cagctggctattgaagaaccagtca

SEQ ID NO: 1873260 - DNA, 25 bp, Homo sapien
tcccacatcttaggaggatgtcagg

SEQ ID NO: 1873261 - DNA, 25 bp, Homo sapien
tcagggtaaggcggcaaatctgtgt

SEQ ID NO: 1873262 - DNA, 25 bp, Homo sapien
ttaccaggagcaaagttgtcaaagg

SEQ ID NO: 1873263 - DNA, 25 bp, Homo sapien
aaatctgtgtgcaccagcagtaggt

SEQ ID NO: 1873264 - DNA, 25 bp, Homo sapien
cataagaaacttcaggagtattcgc

SEQ ID NO: 1873265 - DNA, 25 bp, Homo sapien
ccagccacgagggttagacaatgta

SEQ ID NO: 1873266 - DNA, 25 bp, Homo sapien
tctcagattgcaatgagtaggtctc

SEQ ID NO: 1873267 - DNA, 25 bp, Homo sapien
gatctgttgatccaaaggttctcag

SEQ ID NO: 1873268 - DNA, 25 bp, Homo sapien
tggcttgtactgaccatcaccaggg

SEQ ID NO: 1873269 - DNA, 25 bp, Homo sapien
aaatgccagaattgaccatggaggg

SEQ ID NO: 1873270 - DNA, 25 bp, Homo sapien
gtcctcctaggccaaatgccagaat

SEQ ID NO: 1873271 - DNA, 25 bp, Homo sapien
atcaccaggggccaaaaattcagtc

SEQ ID NO: 1873272 - DNA, 25 bp, Homo sapien
cccatgccctaaatagccaccaatc

SEQ ID NO: 1873273 - DNA, 25 bp, Homo sapien
taaatagccaccaatttccccatgc

SEQ ID NO: 1873274 - DNA, 25 bp, Homo sapien
cacttgccctaaatagccaccaatt

SEQ ID NO: 1873275 - DNA, 25 bp, Homo sapien
aattactacaattttcacttgccct

SEQ ID NO: 1873276 - DNA, 25 bp, Homo sapien
gaagcaaaggagcacaaaagtattt

SEQ ID NO: 1873277 - DNA, 25 bp, Homo sapien
tgttaatgaagcaaaggagcacaaa

SEQ ID NO: 1873278 - DNA, 25 bp, Homo sapien
taatgaagcaaaggagcacaaaagt

SEQ ID NO: 1873279 - DNA, 25 bp, Homo sapien
ctgttaatgaagcaaaggagcacaa

SEQ ID NO: 1873280 - DNA, 25 bp, Homo sapien
taagcaccgtcagatttaaggcagt

SEQ ID NO: 1873281 - DNA, 25 bp, Homo sapien
caggaacagaaggttgccaatgtca

SEQ ID NO: 1873282 - DNA, 25 bp, Homo sapien
gaagtgccacaaaggtaagcaccgt

SEQ ID NO: 1873283 - DNA, 25 bp, Homo sapien
gaaccaataaagtaggaagtgccac

SEQ ID NO: 1873284 - DNA, 25 bp, Homo sapien
tgaattgaccaaacaagaagctgaa

SEQ ID NO: 1873285 - DNA, 25 bp, Homo sapien
ctggctggtcttcacagtaaatcca

SEQ ID NO: 1873286 - DNA, 25 bp, Homo sapien
gtttgtaaacttcaactggctggtc

SEQ ID NO: 1873287 - DNA, 25 bp, Homo sapien
aatggaaatgccactaagtttgaag

SEQ ID NO: 1873288 - DNA, 25 bp, Homo sapien
taatggccacacagttgatgagatc

SEQ ID NO: 1873289 - DNA, 25 bp, Homo sapien
ttaatcccagatgacatacacagac

SEQ ID NO: 1873290 - DNA, 25 bp, Homo sapien
cttttaggagttttaatcccagatg

SEQ ID NO: 1873291 - DNA, 25 bp, Homo sapien
gccacacagttgatgagatcaaaat

SEQ ID NO: 1873292 - DNA, 25 bp, Homo sapien
tgcatcactttccaagacgtcaatt

SEQ ID NO: 1873293 - DNA, 25 bp, Homo sapien
gcaaaatgaccaagtaataagctgt

SEQ ID NO: 1873294 - DNA, 25 bp, Homo sapien
aatctctgcatgaataaactttgaa

SEQ ID NO: 1873295 - DNA, 25 bp, Homo sapien
tttttcaggcgaagattgctacttc

SEQ ID NO: 1873296 - DNA, 25 bp, Homo sapien
cacctgcactttcccaaactgtgaa

SEQ ID NO: 1873297 - DNA, 25 bp, Homo sapien
tgaagctctggaacagagtggtgcc

SEQ ID NO: 1873298 - DNA, 25 bp, Homo sapien
cagtgacattatcccaaggtggctg

SEQ ID NO: 1873299 - DNA, 25 bp, Homo sapien
tttagggtatacaaagagaccatac

SEQ ID NO: 1873300 - DNA, 25 bp, Homo sapien
atgtttggttggtcatgagatggaa

SEQ ID NO: 1873301 - DNA, 25 bp, Homo sapien
gaaagaagcggagcttgtgatgttt

SEQ ID NO: 1873302 - DNA, 25 bp, Homo sapien
agcttgtgatgtttggttggtcatg

SEQ ID NO: 1873303 - DNA, 25 bp, Homo sapien
tgaaggaaagaagcggagcttgtga

SEQ ID NO: 1873304 - DNA, 25 bp, Homo sapien
ctacacaatgtgttctctctggctc

SEQ ID NO: 1873305 - DNA, 25 bp, Homo sapien
ttgaagtcaagcctacacaatgtgt

SEQ ID NO: 1873306 - DNA, 25 bp, Homo sapien
caacgatttgtctattggctgaagg

SEQ ID NO: 1873307 - DNA, 25 bp, Homo sapien
gctctttgaacaactcaacgatttg

SEQ ID NO: 1873308 - DNA, 25 bp, Homo sapien
gagaaggcactacagtccaggtact

SEQ ID NO: 1873309 - DNA, 25 bp, Homo sapien
aatgaaggtaggacccaaaggcagg

SEQ ID NO: 1873310 - DNA, 25 bp, Homo sapien
caggatgcccaataatagggtgcaa

SEQ ID NO: 1873311 - DNA, 25 bp, Homo sapien
ccaggtactggattttagagtctca

SEQ ID NO: 1873312 - DNA, 25 bp, Homo sapien
actgtccaagtaagccagctcctag

SEQ ID NO: 1873313 - DNA, 25 bp, Homo sapien
tgtatcatggacattcacgcaaggg

SEQ ID NO: 1873314 - DNA, 25 bp, Homo sapien
gaagtcaatgtatcatggacattca

SEQ ID NO: 1873315 - DNA, 25 bp, Homo sapien
ccggtcacggacagaacaggcattt

SEQ ID NO: 1873316 - DNA, 25 bp, Homo sapien
aatccttaaggcaccggaggtagtg

SEQ ID NO: 1873317 - DNA, 25 bp, Homo sapien
cagatttaactaaggagttgctctt

SEQ ID NO: 1873318 - DNA, 25 bp, Homo sapien
caggccagatttaactaaggagttg

SEQ ID NO: 1873319 - DNA, 25 bp, Homo sapien
taaggcaccggaggtagtgtttgat

SEQ ID NO: 1873320 - DNA, 25 bp, Homo sapien
tacataagaaccgagggccagagaa

SEQ ID NO: 1873321 - DNA, 25 bp, Homo sapien
atatccacgagccttgggaaaggtc

SEQ ID NO: 1873322 - DNA, 25 bp, Homo sapien
aaaggtcagcggtacataagaaccg

SEQ ID NO: 1873323 - DNA, 25 bp, Homo sapien
tgtctctctatatccacgagccttg

SEQ ID NO: 1873324 - DNA, 25 bp, Homo sapien
tgtaagtgaactagcaaggtgactg

SEQ ID NO: 1873325 - DNA, 25 bp, Homo sapien
acaccttgttattgtggaagcctcc

SEQ ID NO: 1873326 - DNA, 25 bp, Homo sapien
cagctctgcatcagggcaatttgag

SEQ ID NO: 1873327 - DNA, 25 bp, Homo sapien
gccttggtacagctccatgactatg

SEQ ID NO: 1873328 - DNA, 25 bp, Homo sapien
tcggagggtcctatgcccacggagt

SEQ ID NO: 1873329 - DNA, 25 bp, Homo sapien
gtcctatgcccacggagtctcgctg

SEQ ID NO: 1873330 - DNA, 25 bp, Homo sapien
ctatgcccacggagtctcgctgatt

SEQ ID NO: 1873331 - DNA, 25 bp, Homo sapien
ggtcctatgcccacggagtctcgct

SEQ ID NO: 1873332 - DNA, 25 bp, Homo sapien
tacagtccgtgtagttctgcttcct

SEQ ID NO: 1873333 - DNA, 25 bp, Homo sapien
tagccactcccattaggcacctaaa

SEQ ID NO: 1873334 - DNA, 25 bp, Homo sapien
caacaagttaaatgcagctccagct

SEQ ID NO: 1873335 - DNA, 25 bp, Homo sapien
tcctttgcttactggcatattagcc

SEQ ID NO: 1873336 - DNA, 25 bp, Homo sapien
ccagaaacctggatgatcacgttgt

SEQ ID NO: 1873337 - DNA, 25 bp, Homo sapien
tcaggattggagagtccctcggcac

SEQ ID NO: 1873338 - DNA, 25 bp, Homo sapien
ctctataacattggtgggactgcag

SEQ ID NO: 1873339 - DNA, 25 bp, Homo sapien
gatatagatgccagatggtgtcaac

SEQ ID NO: 1873340 - DNA, 25 bp, Homo sapien
tattatatttccatgtcctgaccag

SEQ ID NO: 1873341 - DNA, 25 bp, Homo sapien
ttattatatttccatgtcctgacca

SEQ ID NO: 1873342 - DNA, 25 bp, Homo sapien
attatatttccatgtcctgaccagt

SEQ ID NO: 1873343 - DNA, 25 bp, Homo sapien
cttattatatttccatgtcctgacc

SEQ ID NO: 1873344 - DNA, 25 bp, Homo sapien
caggagatatatctcatctccgtgc

SEQ ID NO: 1873345 - DNA, 25 bp, Homo sapien
tttccttccatgaattgcctcccag

SEQ ID NO: 1873346 - DNA, 25 bp, Homo sapien
gatatatctcatctccgtgcatgtc

SEQ ID NO: 1873347 - DNA, 25 bp, Homo sapien
gaattgcctcccaggagatatatct

SEQ ID NO: 1873348 - DNA, 25 bp, Homo sapien
cttcccttggaagatctgaaatgtc

SEQ ID NO: 1873349 - DNA, 25 bp, Homo sapien
gcagcgcatgacctaaaatattgta

SEQ ID NO: 1873350 - DNA, 25 bp, Homo sapien
gaatacattactgtccaccttcagg

SEQ ID NO: 1873351 - DNA, 25 bp, Homo sapien
aggcctctactgaaggagttcctca

SEQ ID NO: 1873352 - DNA, 25 bp, Homo sapien
actgtgcagccctgtatgaaagact

SEQ ID NO: 1873353 - DNA, 25 bp, Homo sapien
gatgcttatggaaggcttgccccaa

SEQ ID NO: 1873354 - DNA, 25 bp, Homo sapien
tcatagctcccaccagagtgagtga

SEQ ID NO: 1873355 - DNA, 25 bp, Homo sapien
actcccttcaactggacctggctgg

SEQ ID NO: 1873356 - DNA, 25 bp, Homo sapien
gaaggactgaacgatcactctggct

SEQ ID NO: 1873357 - DNA, 25 bp, Homo sapien
cagtggcctttaaaatatggtgctc

SEQ ID NO: 1873358 - DNA, 25 bp, Homo sapien
ttgtatggtaatactcctgctgagc

SEQ ID NO: 1873359 - DNA, 25 bp, Homo sapien
attagtgagatttccttgtatggta

SEQ ID NO: 1873360 - DNA, 25 bp, Homo sapien
cctggcatgaaacaagcagcttctc

SEQ ID NO: 1873361 - DNA, 25 bp, Homo sapien
gaggtctgtatcctgcacagtttcc

SEQ ID NO: 1873362 - DNA, 25 bp, Homo sapien
gacaatctcttccatcggtttggca

SEQ ID NO: 1873363 - DNA, 25 bp, Homo sapien
gcatcttctaaagccagcactgtgt

SEQ ID NO: 1873364 - DNA, 25 bp, Homo sapien
tgttccactgatgatgacaacttca

SEQ ID NO: 1873365 - DNA, 25 bp, Homo sapien
caggtgacaattacttctggtagtg

SEQ ID NO: 1873366 - DNA, 25 bp, Homo sapien
gtgacaattacttctggtagtgaac

SEQ ID NO: 1873367 - DNA, 25 bp, Homo sapien
gacaggtgacaattacttctggtag

SEQ ID NO: 1873368 - DNA, 25 bp, Homo sapien
agacaggtgacaattacttctggta

SEQ ID NO: 1873369 - DNA, 25 bp, Homo sapien
gataatttacctttagcccgcagca

SEQ ID NO: 1873370 - DNA, 25 bp, Homo sapien
gcagcaagttactgtcctcccttgt

SEQ ID NO: 1873371 - DNA, 25 bp, Homo sapien
tgtcctcccttgttgtactaaagta

SEQ ID NO: 1873372 - DNA, 25 bp, Homo sapien
gcaatggatgataatttacctttag

SEQ ID NO: 1873373 - DNA, 25 bp, Homo sapien
tacaaaccttgtagtgatcagtgac

SEQ ID NO: 1873374 - DNA, 25 bp, Homo sapien
ctcctacaaaccttgtagtgatcag

SEQ ID NO: 1873375 - DNA, 25 bp, Homo sapien
caaaccttgtagtgatcagtgacat

SEQ ID NO: 1873376 - DNA, 25 bp, Homo sapien
cctacaaaccttgtagtgatcagtg

SEQ ID NO: 1873377 - DNA, 25 bp, Homo sapien
ctagagaagatgcagaacgccagca

SEQ ID NO: 1873378 - DNA, 25 bp, Homo sapien
ctatgacggagcaaagtcaagctca

SEQ ID NO: 1873379 - DNA, 25 bp, Homo sapien
caaagtcaagctcatctagagaaga

SEQ ID NO: 1873380 - DNA, 25 bp, Homo sapien
agaacgccagcaaagatcctcacaa

SEQ ID NO: 1873381 - DNA, 25 bp, Homo sapien
catcagaatacagacgaaggtagtg

SEQ ID NO: 1873382 - DNA, 25 bp, Homo sapien
atcaactggaaagctattggtaacc

SEQ ID NO: 1873383 - DNA, 25 bp, Homo sapien
ccatcagaatacagacgaaggtagt

SEQ ID NO: 1873384 - DNA, 25 bp, Homo sapien
tggaaagctattggtaaccaaggtg

SEQ ID NO: 1873385 - DNA, 25 bp, Homo sapien
cacagccaggaacttgactccatag

SEQ ID NO: 1873386 - DNA, 25 bp, Homo sapien
tcagaaacaaggatggcgtgtgccc

SEQ ID NO: 1873387 - DNA, 25 bp, Homo sapien
gaagggcttgtcttcggatccaatc

SEQ ID NO: 1873388 - DNA, 25 bp, Homo sapien
tgtgccctgagctcgatgggtcctg

SEQ ID NO: 1873389 - DNA, 25 bp, Homo sapien
tattaaatagtcaaatggatagtcg

SEQ ID NO: 1873390 - DNA, 25 bp, Homo sapien
ggcagagttggagtatatccctgta

SEQ ID NO: 1873391 - DNA, 25 bp, Homo sapien
atagtcgaggaagcctgtggaattc

SEQ ID NO: 1873392 - DNA, 25 bp, Homo sapien
ttccctggagaaaaggaatcatcca

SEQ ID NO: 1873393 - DNA, 25 bp, Homo sapien
agcttcctttgttggcaagatccgg

SEQ ID NO: 1873394 - DNA, 25 bp, Homo sapien
agccttcgaggtgggcttgtcccca

SEQ ID NO: 1873395 - DNA, 25 bp, Homo sapien
aaagaaacctgcattgtgacacgga

SEQ ID NO: 1873396 - DNA, 25 bp, Homo sapien
caagatccggattagacttgtgcct

SEQ ID NO: 1873397 - DNA, 25 bp, Homo sapien
actgtgacgttgtcgccatcttgtg

SEQ ID NO: 1873398 - DNA, 25 bp, Homo sapien
taagttgaggatgcttgtgttagtg

SEQ ID NO: 1873399 - DNA, 25 bp, Homo sapien
tccagcagaagcaattggccattct

SEQ ID NO: 1873400 - DNA, 25 bp, Homo sapien
gccatcttgtggcagcctttcagga

SEQ ID NO: 1873401 - DNA, 25 bp, Homo sapien
cagtgctaagttgcagacccaacac

SEQ ID NO: 1873402 - DNA, 25 bp, Homo sapien
ggctttgcaatttattcgttttcta

SEQ ID NO: 1873403 - DNA, 25 bp, Homo sapien
agacccaacacaatcactgagaagg

SEQ ID NO: 1873404 - DNA, 25 bp, Homo sapien
cccaaggtcaacagtgctaagttgc

SEQ ID NO: 1873405 - DNA, 25 bp, Homo sapien
acttcagggaatgtgcagtgtctgc

SEQ ID NO: 1873406 - DNA, 25 bp, Homo sapien
ttctctgaacttcagggaatgtgca

SEQ ID NO: 1873407 - DNA, 25 bp, Homo sapien
cagtgtctgcaaatcttacatgtca

SEQ ID NO: 1873408 - DNA, 25 bp, Homo sapien
agcatgtcagcacttctctgaactt

SEQ ID NO: 1873409 - DNA, 25 bp, Homo sapien
agcaagttggaacacccggcaaagc

SEQ ID NO: 1873410 - DNA, 25 bp, Homo sapien
tgaaagaagtcattgatcagcaagt

SEQ ID NO: 1873411 - DNA, 25 bp, Homo sapien
ccggcaaagcaaagacctatttgtg

SEQ ID NO: 1873412 - DNA, 25 bp, Homo sapien
agcaaagacctatttgtgagtgtat

SEQ ID NO: 1873413 - DNA, 25 bp, Homo sapien
tgtcttcttcctcagcatccaaatc

SEQ ID NO: 1873414 - DNA, 25 bp, Homo sapien
caaaatgtcttcttcctcagcatcc

SEQ ID NO: 1873415 - DNA, 25 bp, Homo sapien
aatgtcttcttcctcagcatccaaa

SEQ ID NO: 1873416 - DNA, 25 bp, Homo sapien
aaatgtcttcttcctcagcatccaa

SEQ ID NO: 1873417 - DNA, 25 bp, Homo sapien
gaagtagagtatgagccagaggcta

SEQ ID NO: 1873418 - DNA, 25 bp, Homo sapien
ggaacgctgtatagccagatggcct

SEQ ID NO: 1873419 - DNA, 25 bp, Homo sapien
tagatggatccctgccttcaacaaa

SEQ ID NO: 1873420 - DNA, 25 bp, Homo sapien
tgtgcttggagtactgcagctgcag

SEQ ID NO: 1873421 - DNA, 25 bp, Homo sapien
ctagcctttttcacaagctaacaca

SEQ ID NO: 1873422 - DNA, 25 bp, Homo sapien
tagcctttttcacaagctaacacac

SEQ ID NO: 1873423 - DNA, 25 bp, Homo sapien
ccatttaaccagcgagcatggagca

SEQ ID NO: 1873424 - DNA, 25 bp, Homo sapien
tgccatttaaccagcgagcatggag

SEQ ID NO: 1873425 - DNA, 25 bp, Homo sapien
gccatttaaccagcgagcatggagc

SEQ ID NO: 1873426 - DNA, 25 bp, Homo sapien
catttaaccagcgagcatggagcac

SEQ ID NO: 1873427 - DNA, 25 bp, Homo sapien
tgcaatggacccatgacggcactgc

SEQ ID NO: 1873428 - DNA, 25 bp, Homo sapien
tcccagtcactattaagagacaagg

SEQ ID NO: 1873429 - DNA, 25 bp, Homo sapien
ttttaagtgatggactacaacatgt

SEQ ID NO: 1873430 - DNA, 25 bp, Homo sapien
ggtgattgaatacacaggagcgtac

SEQ ID NO: 1873431 - DNA, 25 bp, Homo sapien
tgaacgtttgacagctccgcagttt

SEQ ID NO: 1873432 - DNA, 25 bp, Homo sapien
gacagctccgcagtttcatacacca

SEQ ID NO: 1873433 - DNA, 25 bp, Homo sapien
gcagtttcatacaccaggaaacctt

SEQ ID NO: 1873434 - DNA, 25 bp, Homo sapien
gctccgcagtttcatacaccaggaa

SEQ ID NO: 1873435 - DNA, 25 bp, Homo sapien
agtaacagcagtccaggcaaaagag

SEQ ID NO: 1873436 - DNA, 25 bp, Homo sapien
ttcagaaagggcaatctgataggaa

SEQ ID NO: 1873437 - DNA, 25 bp, Homo sapien
aagggcaatctgataggaaccctcc

SEQ ID NO: 1873438 - DNA, 25 bp, Homo sapien
gggcaatctgataggaaccctccat

SEQ ID NO: 1873439 - DNA, 25 bp, Homo sapien
aatgtaggagtatcctttgcctgag

SEQ ID NO: 1873440 - DNA, 25 bp, Homo sapien
actggagaatgtaggagtatccttt

SEQ ID NO: 1873441 - DNA, 25 bp, Homo sapien
ctggatgccaatatcagtatgaaat

SEQ ID NO: 1873442 - DNA, 25 bp, Homo sapien
gatgccaatatcagtatgaaattca

SEQ ID NO: 1873443 - DNA, 25 bp, Homo sapien
cagcaagactagagttctgactctg

SEQ ID NO: 1873444 - DNA, 25 bp, Homo sapien
acagctcagcaagactagagttctg

SEQ ID NO: 1873445 - DNA, 25 bp, Homo sapien
tcagcaagactagagttctgactct

SEQ ID NO: 1873446 - DNA, 25 bp, Homo sapien
gctcagcaagactagagttctgact

SEQ ID NO: 1873447 - DNA, 25 bp, Homo sapien
tcttagaggagttgtgcctacacac

SEQ ID NO: 1873448 - DNA, 25 bp, Homo sapien
tggctccatggagagatacaaccag

SEQ ID NO: 1873449 - DNA, 25 bp, Homo sapien
tacaaccagaaagggactttgtggc

SEQ ID NO: 1873450 - DNA, 25 bp, Homo sapien
gactagaagaggtgttgcctaaccc

SEQ ID NO: 1873451 - DNA, 25 bp, Homo sapien
catgttaggagcagttactgtggct

SEQ ID NO: 1873452 - DNA, 25 bp, Homo sapien
gcagacttcagtgctgtgggaataa

SEQ ID NO: 1873453 - DNA, 25 bp, Homo sapien
tctgcgctatctggtcaaggttccc

SEQ ID NO: 1873454 - DNA, 25 bp, Homo sapien
gataacatattagagctttcagcaa

SEQ ID NO: 1873455 - DNA, 25 bp, Homo sapien
ccctaatctaataactagctcaacc

SEQ ID NO: 1873456 - DNA, 25 bp, Homo sapien
taatctaataactagctcaaccctg

SEQ ID NO: 1873457 - DNA, 25 bp, Homo sapien
taataactagctcaaccctgctttc

SEQ ID NO: 1873458 - DNA, 25 bp, Homo sapien
tcaggggtcaatggttgagtttcta

SEQ ID NO: 1873459 - DNA, 25 bp, Homo sapien
tcagtctgtaaaaaagatttgatta

SEQ ID NO: 1873460 - DNA, 25 bp, Homo sapien
cagtctgtaaaaaagatttgattat

SEQ ID NO: 1873461 - DNA, 25 bp, Homo sapien
gtctgtaaaaaagatttgattatac

SEQ ID NO: 1873462 - DNA, 25 bp, Homo sapien
agtctgtaaaaaagatttgattata

SEQ ID NO: 1873463 - DNA, 25 bp, Homo sapien
ggccccagcgtttccgtatctcagt

SEQ ID NO: 1873464 - DNA, 25 bp, Homo sapien
gctgattgggcgtctcacactccat

SEQ ID NO: 1873465 - DNA, 25 bp, Homo sapien
tcttgacggtaattggctgattggg

SEQ ID NO: 1873466 - DNA, 25 bp, Homo sapien
cagtttccatggtaatgttacagga

SEQ ID NO: 1873467 - DNA, 25 bp, Homo sapien
cagccactcgctttaaaagtcctct

SEQ ID NO: 1873468 - DNA, 25 bp, Homo sapien
agtcctcttgctttaaggggagaag

SEQ ID NO: 1873469 - DNA, 25 bp, Homo sapien
ctcttgctttaaggggagaagccag

SEQ ID NO: 1873470 - DNA, 25 bp, Homo sapien
tcctcttgctttaaggggagaagcc

SEQ ID NO: 1873471 - DNA, 25 bp, Homo sapien
taaaatgggctgagtcactctaccc

SEQ ID NO: 1873472 - DNA, 25 bp, Homo sapien
tcagggataacaccaagcttagttg

SEQ ID NO: 1873473 - DNA, 25 bp, Homo sapien
tcgctggcagaggtacaagtaaaat

SEQ ID NO: 1873474 - DNA, 25 bp, Homo sapien
cttgaactcaaggaaagtagtgacc

SEQ ID NO: 1873475 - DNA, 25 bp, Homo sapien
tcgcaaatgtagaggtaaggccacg

SEQ ID NO: 1873476 - DNA, 25 bp, Homo sapien
taaagaggcccgagaatgatggaaa

SEQ ID NO: 1873477 - DNA, 25 bp, Homo sapien
taaggccacgattcaagcagttgct

SEQ ID NO: 1873478 - DNA, 25 bp, Homo sapien
acataggtgtgtctggcagcctcac

SEQ ID NO: 1873479 - DNA, 25 bp, Homo sapien
tgtagcattagccaggactcggcag

SEQ ID NO: 1873480 - DNA, 25 bp, Homo sapien
aaatcccgctccaaacacatgcacc

SEQ ID NO: 1873481 - DNA, 25 bp, Homo sapien
tcacacaagtaaaaggacccgagag

SEQ ID NO: 1873482 - DNA, 25 bp, Homo sapien
tgggaacaatgcaccggatgagctc

SEQ ID NO: 1873483 - DNA, 25 bp, Homo sapien
gatctgggccactgcaaaggttaag

SEQ ID NO: 1873484 - DNA, 25 bp, Homo sapien
cgaaccctgcgatgggaagatggcc

SEQ ID NO: 1873485 - DNA, 25 bp, Homo sapien
gcaaggctcgatgctgaaaacttct

SEQ ID NO: 1873486 - DNA, 25 bp, Homo sapien
gcagggacccacagcaaggctcgat

SEQ ID NO: 1873487 - DNA, 25 bp, Homo sapien
gatgctgaaaacttctgtgaggtac

SEQ ID NO: 1873488 - DNA, 25 bp, Homo sapien
ctgtgaggtactggatgtggagatc

SEQ ID NO: 1873489 - DNA, 25 bp, Homo sapien
ctacagaagataggcagatgtttag

SEQ ID NO: 1873490 - DNA, 25 bp, Homo sapien
aaatccgtatagttcatcagcctcg

SEQ ID NO: 1873491 - DNA, 25 bp, Homo sapien
ccccaagccgactgtgtgtgaaccg

SEQ ID NO: 1873492 - DNA, 25 bp, Homo sapien
tgctgaccccattgatagagacgga

SEQ ID NO: 1873493 - DNA, 25 bp, Homo sapien
gaaattctgtggagaccagctggca

SEQ ID NO: 1873494 - DNA, 25 bp, Homo sapien
gctatattgcttatgtttctgctca

SEQ ID NO: 1873495 - DNA, 25 bp, Homo sapien
aatagtcccctctgatcacagtcac

SEQ ID NO: 1873496 - DNA, 25 bp, Homo sapien
ctcagagtcacaataactggattta

SEQ ID NO: 1873497 - DNA, 25 bp, Homo sapien
tagtcccctctgatcacagtcacat

SEQ ID NO: 1873498 - DNA, 25 bp, Homo sapien
caaactagagcctcggatggtggcc

SEQ ID NO: 1873499 - DNA, 25 bp, Homo sapien
tagcgacattgatggcacacgagta

SEQ ID NO: 1873500 - DNA, 25 bp, Homo sapien
aagatccaaataatatcaggctaac

SEQ ID NO: 1873501 - DNA, 25 bp, Homo sapien
caggctaacaccttccaaactagag

SEQ ID NO: 1873502 - DNA, 25 bp, Homo sapien
cactgatggcaagaccagagggtct

SEQ ID NO: 1873503 - DNA, 25 bp, Homo sapien
tcaagatccgatgcattccaacagg

SEQ ID NO: 1873504 - DNA, 25 bp, Homo sapien
aatatccgcagctctggaaggctcc

SEQ ID NO: 1873505 - DNA, 25 bp, Homo sapien
ccagtctaggtttcacatttaggaa

SEQ ID NO: 1873506 - DNA, 25 bp, Homo sapien
ttgcaactcgttttgttcactgtaa

SEQ ID NO: 1873507 - DNA, 25 bp, Homo sapien
tgcaactcgttttgttcactgtaac

SEQ ID NO: 1873508 - DNA, 25 bp, Homo sapien
taaatcattaggttgatgtcaccat

SEQ ID NO: 1873509 - DNA, 25 bp, Homo sapien
gagtcaccagagaaaccagttccgg

SEQ ID NO: 1873510 - DNA, 25 bp, Homo sapien
aagaactgggagtcaccagagaaac

SEQ ID NO: 1873511 - DNA, 25 bp, Homo sapien
aaccagttccggtaatgtaaatcat

SEQ ID NO: 1873512 - DNA, 25 bp, Homo sapien
caatggagtaccacacagaatggac

SEQ ID NO: 1873513 - DNA, 25 bp, Homo sapien
tgagctggtacatcattcactcgca

SEQ ID NO: 1873514 - DNA, 25 bp, Homo sapien
gagttgacccttggaggtactggaa

SEQ ID NO: 1873515 - DNA, 25 bp, Homo sapien
acacagggagttgacccttggaggt

SEQ ID NO: 1873516 - DNA, 25 bp, Homo sapien
aaaaggacagccataagtacccctg

SEQ ID NO: 1873517 - DNA, 25 bp, Homo sapien
ccataagtacccctgttttacacat

SEQ ID NO: 1873518 - DNA, 25 bp, Homo sapien
gacagccataagtacccctgtttta

SEQ ID NO: 1873519 - DNA, 25 bp, Homo sapien
aaggacagccataagtacccctgtt

SEQ ID NO: 1873520 - DNA, 25 bp, Homo sapien
ccatcatataccacacgcgtggctg

SEQ ID NO: 1873521 - DNA, 25 bp, Homo sapien
ctgagtatgctggttggcagtagcc

SEQ ID NO: 1873522 - DNA, 25 bp, Homo sapien
cactccagtaaggttttcatcagag

SEQ ID NO: 1873523 - DNA, 25 bp, Homo sapien
ggctgcagcaggattcactccagta

SEQ ID NO: 1873524 - DNA, 25 bp, Homo sapien
gaagtcactggcattgaggtacctg

SEQ ID NO: 1873525 - DNA, 25 bp, Homo sapien
aaatccccaatctgagtggaccagg

SEQ ID NO: 1873526 - DNA, 25 bp, Homo sapien
ttcgtagcaagtgtatagatcctcc

SEQ ID NO: 1873527 - DNA, 25 bp, Homo sapien
caaggtccacacgtgttcgtagcaa

SEQ ID NO: 1873528 - DNA, 25 bp, Homo sapien
tcctcctagaggtggacttgtccgc

SEQ ID NO: 1873529 - DNA, 25 bp, Homo sapien
gtccgctgtcgtctctgtgtcgtca

SEQ ID NO: 1873530 - DNA, 25 bp, Homo sapien
tgtgtcgtcaccaggaccagtccag

SEQ ID NO: 1873531 - DNA, 25 bp, Homo sapien
taggaagctggatgcgaaagtgtcc

SEQ ID NO: 1873532 - DNA, 25 bp, Homo sapien
gaagatgtctcacctcttcattttc

SEQ ID NO: 1873533 - DNA, 25 bp, Homo sapien
cttcattttcaatggatggttttat

SEQ ID NO: 1873534 - DNA, 25 bp, Homo sapien
tcctctctgccactgaagatgtctc

SEQ ID NO: 1873535 - DNA, 25 bp, Homo sapien
cgatatggtgggcttcctctctgcc

SEQ ID NO: 1873536 - DNA, 25 bp, Homo sapien
tgacactgtagaccggaggggatcc

SEQ ID NO: 1873537 - DNA, 25 bp, Homo sapien
tgatgagcgggagctccgtgccaca

SEQ ID NO: 1873538 - DNA, 25 bp, Homo sapien
gccgttccagaatcagcttgagaaa

SEQ ID NO: 1873539 - DNA, 25 bp, Homo sapien
gggcgagccgttccagaatcagctt

SEQ ID NO: 1873540 - DNA, 25 bp, Homo sapien
ggtaggcatgtgaccggcttgtgga

SEQ ID NO: 1873541 - DNA, 25 bp, Homo sapien
cagtaacccctagcaggaaagtttg

SEQ ID NO: 1873542 - DNA, 25 bp, Homo sapien
aggcatgtgaccggcttgtggagga

SEQ ID NO: 1873543 - DNA, 25 bp, Homo sapien
gtaggcatgtgaccggcttgtggag

SEQ ID NO: 1873544 - DNA, 25 bp, Homo sapien
tagaacaggcccgtctcctgggcca

SEQ ID NO: 1873545 - DNA, 25 bp, Homo sapien
tttcatccacatagaacaggcccgt

SEQ ID NO: 1873546 - DNA, 25 bp, Homo sapien
gatctgatgaaccagcactggggag

SEQ ID NO: 1873547 - DNA, 25 bp, Homo sapien
tgaaccagcactggggagtttgccg

SEQ ID NO: 1873548 - DNA, 25 bp, Homo sapien
tggagatccccgaagcaacgcacac

SEQ ID NO: 1873549 - DNA, 25 bp, Homo sapien
tcccagaggtcagtgcaatcgaact

SEQ ID NO: 1873550 - DNA, 25 bp, Homo sapien
gaggtcagtgcaatcgaactgccag

SEQ ID NO: 1873551 - DNA, 25 bp, Homo sapien
ctggagatccccgaagcaacgcaca

SEQ ID NO: 1873552 - DNA, 25 bp, Homo sapien
cttgcagtcctctccggttagagcc

SEQ ID NO: 1873553 - DNA, 25 bp, Homo sapien
cagtcctctccggttagagcccttg

SEQ ID NO: 1873554 - DNA, 25 bp, Homo sapien
ggggggcctgtgagctatgcagcca

SEQ ID NO: 1873555 - DNA, 25 bp, Homo sapien
tcctctccggttagagcccttgttc

SEQ ID NO: 1873556 - DNA, 25 bp, Homo sapien
ccatgttttgaaagccgattgtgaa

SEQ ID NO: 1873557 - DNA, 25 bp, Homo sapien
ggtcctcgtgagactccagtcacag

SEQ ID NO: 1873558 - DNA, 25 bp, Homo sapien
gaaggacacaatcatcttcaggatc

SEQ ID NO: 1873559 - DNA, 25 bp, Homo sapien
tttgaaagccgattgtgaaggacac

SEQ ID NO: 1873560 - DNA, 25 bp, Homo sapien
taaggacaaggtgtcgaggctgacg

SEQ ID NO: 1873561 - DNA, 25 bp, Homo sapien
gacggaggctgaacctgccacagaa

SEQ ID NO: 1873562 - DNA, 25 bp, Homo sapien
tgtgtatactgatctagccgatagc

SEQ ID NO: 1873563 - DNA, 25 bp, Homo sapien
ccgatagcccttctgggcagccggg

SEQ ID NO: 1873564 - DNA, 25 bp, Homo sapien
gtgaggtccccatcagagttggaaa

SEQ ID NO: 1873565 - DNA, 25 bp, Homo sapien
gaggtccccatcagagttggaaact

SEQ ID NO: 1873566 - DNA, 25 bp, Homo sapien
gtccccatcagagttggaaacttct

SEQ ID NO: 1873567 - DNA, 25 bp, Homo sapien
ggtccccatcagagttggaaacttc

SEQ ID NO: 1873568 - DNA, 25 bp, Homo sapien
aaaaagacaatcagaatgaagccac

SEQ ID NO: 1873569 - DNA, 25 bp, Homo sapien
tgatgaaaaagacaatcagaatgaa

SEQ ID NO: 1873570 - DNA, 25 bp, Homo sapien
tgaaaaagacaatcagaatgaagcc

SEQ ID NO: 1873571 - DNA, 25 bp, Homo sapien
agaaagaagaccatgatgaaaaaga

SEQ ID NO: 1873572 - DNA, 25 bp, Homo sapien
ccaagccggagaaggatgttagacc

SEQ ID NO: 1873573 - DNA, 25 bp, Homo sapien
ccagtttgcattttactgcaagtaa

SEQ ID NO: 1873574 - DNA, 25 bp, Homo sapien
ctcgttcaaatccaagccggagaag

SEQ ID NO: 1873575 - DNA, 25 bp, Homo sapien
tgcaagtaactcctcaatggttgtt

SEQ ID NO: 1873576 - DNA, 25 bp, Homo sapien
gaagaagtttcctctgcctgataca

SEQ ID NO: 1873577 - DNA, 25 bp, Homo sapien
cagatgggctgtggcatttgcaggg

SEQ ID NO: 1873578 - DNA, 25 bp, Homo sapien
gattggctgactagagacattgtcc

SEQ ID NO: 1873579 - DNA, 25 bp, Homo sapien
gagacattgtcccaagtaaggaaga

SEQ ID NO: 1873580 - DNA, 25 bp, Homo sapien
tcccaggagtcaaaccagtcagcag

SEQ ID NO: 1873581 - DNA, 25 bp, Homo sapien
tgcttccaggtagtacatggctcca

SEQ ID NO: 1873582 - DNA, 25 bp, Homo sapien
tctcccgtaggtaagtggtgaccac

SEQ ID NO: 1873583 - DNA, 25 bp, Homo sapien
gaagcctctgggctcggactcggat

SEQ ID NO: 1873584 - DNA, 25 bp, Homo sapien
tgcaaggaagcttggctatctgcct

SEQ ID NO: 1873585 - DNA, 25 bp, Homo sapien
ggttcctctgaccaactgaaatgca

SEQ ID NO: 1873586 - DNA, 25 bp, Homo sapien
cttagtccttggttcctctgaccaa

SEQ ID NO: 1873587 - DNA, 25 bp, Homo sapien
tctctggagccacaaagaacccact

SEQ ID NO: 1873588 - DNA, 25 bp, Homo sapien
gaacaacctgattcttatgccacac

SEQ ID NO: 1873589 - DNA, 25 bp, Homo sapien
tctagaaagagatatagcacctgcc

SEQ ID NO: 1873590 - DNA, 25 bp, Homo sapien
tcactgaaccaacaaatgactgccc

SEQ ID NO: 1873591 - DNA, 25 bp, Homo sapien
caagagtaaccaaggcctgaatcac

SEQ ID NO: 1873592 - DNA, 25 bp, Homo sapien
cacctaggttagcaaaggtgctttt

SEQ ID NO: 1873593 - DNA, 25 bp, Homo sapien
tgtctcctagcctcacctaggttag

SEQ ID NO: 1873594 - DNA, 25 bp, Homo sapien
cctaggttagcaaaggtgcttttga

SEQ ID NO: 1873595 - DNA, 25 bp, Homo sapien
tctcctagcctcacctaggttagca

SEQ ID NO: 1873596 - DNA, 25 bp, Homo sapien
tcagtcagttccagtccctcaacag

SEQ ID NO: 1873597 - DNA, 25 bp, Homo sapien
tggagaactggcattagggacaatc

SEQ ID NO: 1873598 - DNA, 25 bp, Homo sapien
cattagggacaatctgccacctgta

SEQ ID NO: 1873599 - DNA, 25 bp, Homo sapien
agtcagttccagtccctcaacagca

SEQ ID NO: 1873600 - DNA, 25 bp, Homo sapien
gcacctgaataaagctaagagcctt

SEQ ID NO: 1873601 - DNA, 25 bp, Homo sapien
gctggagctagaagtgcaatgtcac

SEQ ID NO: 1873602 - DNA, 25 bp, Homo sapien
ccattgaatgaaggcgggcagtttg

SEQ ID NO: 1873603 - DNA, 25 bp, Homo sapien
tgagggcagttatgctttctagacc

SEQ ID NO: 1873604 - DNA, 25 bp, Homo sapien
caatcttcctgggagacacgtgtct

SEQ ID NO: 1873605 - DNA, 25 bp, Homo sapien
ggtggtgagcctcacatcttttcct

SEQ ID NO: 1873606 - DNA, 25 bp, Homo sapien
acgtgtctaatatcacatggaatgc

SEQ ID NO: 1873607 - DNA, 25 bp, Homo sapien
ttcctggagcccgagtggtgcactc

SEQ ID NO: 1873608 - DNA, 25 bp, Homo sapien
ccaaggctcccagtttctggaaaca

SEQ ID NO: 1873609 - DNA, 25 bp, Homo sapien
caaggctcccagtttctggaaacac

SEQ ID NO: 1873610 - DNA, 25 bp, Homo sapien
aaaagtctcctgtaattgtgatgtt

SEQ ID NO: 1873611 - DNA, 25 bp, Homo sapien
tgcaatggtaacctgggcagaattg

SEQ ID NO: 1873612 - DNA, 25 bp, Homo sapien
gatcagccatgccttcttgtggacc

SEQ ID NO: 1873613 - DNA, 25 bp, Homo sapien
tctggtataggaaaagatcctgttt

SEQ ID NO: 1873614 - DNA, 25 bp, Homo sapien
tgtttagcactgatcagccatgcct

SEQ ID NO: 1873615 - DNA, 25 bp, Homo sapien
aaagatcctgtttagcactgatcag

SEQ ID NO: 1873616 - DNA, 25 bp, Homo sapien
atactgagaagctaacattctggga

SEQ ID NO: 1873617 - DNA, 25 bp, Homo sapien
aatactgagaagctaacattctggg

SEQ ID NO: 1873618 - DNA, 25 bp, Homo sapien
tactgagaagctaacattctgggag

SEQ ID NO: 1873619 - DNA, 25 bp, Homo sapien
actgagaagctaacattctgggagc

SEQ ID NO: 1873620 - DNA, 25 bp, Homo sapien
tagtcgccttccacatggcactgca

SEQ ID NO: 1873621 - DNA, 25 bp, Homo sapien
cgatgtagtcgccttccacatggca

SEQ ID NO: 1873622 - DNA, 25 bp, Homo sapien
gatgtagtcgccttccacatggcac

SEQ ID NO: 1873623 - DNA, 25 bp, Homo sapien
tgtagtcgccttccacatggcactg

SEQ ID NO: 1873624 - DNA, 25 bp, Homo sapien
tgcctatttataagagagcaaggag

SEQ ID NO: 1873625 - DNA, 25 bp, Homo sapien
tcttccagtgataatccagccatat

SEQ ID NO: 1873626 - DNA, 25 bp, Homo sapien
cagtgataatccagccatatacatg

SEQ ID NO: 1873627 - DNA, 25 bp, Homo sapien
gataatccagccatatacatgtatt

SEQ ID NO: 1873628 - DNA, 25 bp, Homo sapien
tccaatcttccagtgataatccagc

SEQ ID NO: 1873629 - DNA, 25 bp, Homo sapien
cgatgggtgtctgcgccttggaaaa

SEQ ID NO: 1873630 - DNA, 25 bp, Homo sapien
aacttggtgaacgatgggtgtctgc

SEQ ID NO: 1873631 - DNA, 25 bp, Homo sapien
gaacaccacttggtggataaacttg

SEQ ID NO: 1873632 - DNA, 25 bp, Homo sapien
cacttggtggataaacttggtgaac

SEQ ID NO: 1873633 - DNA, 25 bp, Homo sapien
gaaaatagtaccacaagtgagcatg

SEQ ID NO: 1873634 - DNA, 25 bp, Homo sapien
aacacaggaggcacaagcctttcct

SEQ ID NO: 1873635 - DNA, 25 bp, Homo sapien
attcacaaacacaggaggcacaagc

SEQ ID NO: 1873636 - DNA, 25 bp, Homo sapien
tgtttagaaaatagtaccacaagtg

SEQ ID NO: 1873637 - DNA, 25 bp, Homo sapien
tccaggaagtacagaccctcatgtg

SEQ ID NO: 1873638 - DNA, 25 bp, Homo sapien
gaaagtacagctatctcgtggtcct

SEQ ID NO: 1873639 - DNA, 25 bp, Homo sapien
gatttggactgcttaccagctgtcc

SEQ ID NO: 1873640 - DNA, 25 bp, Homo sapien
ccccgaagtatgcttccaggaagta

SEQ ID NO: 1873641 - DNA, 25 bp, Homo sapien
cgttcaccaggtgtatctccaattg

SEQ ID NO: 1873642 - DNA, 25 bp, Homo sapien
aacaggaaagacgtcacagggaaca

SEQ ID NO: 1873643 - DNA, 25 bp, Homo sapien
gtccggcatgtcaccacaggcaaat

SEQ ID NO: 1873644 - DNA, 25 bp, Homo sapien
tgcgggcaccaccatgttcacgttc

SEQ ID NO: 1873645 - DNA, 25 bp, Homo sapien
gtgatccacgttccccctgcaaggc

SEQ ID NO: 1873646 - DNA, 25 bp, Homo sapien
catcaaaaatgactgtgatccacgt

SEQ ID NO: 1873647 - DNA, 25 bp, Homo sapien
ctgtgatccacgttccccctgcaag

SEQ ID NO: 1873648 - DNA, 25 bp, Homo sapien
tgtgatccacgttccccctgcaagg

SEQ ID NO: 1873649 - DNA, 25 bp, Homo sapien
ggttcaatatgtaaactcaggtgac

SEQ ID NO: 1873650 - DNA, 25 bp, Homo sapien
cttcaggttcaatatgtaaactcag

SEQ ID NO: 1873651 - DNA, 25 bp, Homo sapien
caggttcaatatgtaaactcaggtg

SEQ ID NO: 1873652 - DNA, 25 bp, Homo sapien
tcaatatgtaaactcaggtgacgta

SEQ ID NO: 1873653 - DNA, 25 bp, Homo sapien
aaagtagtacttcaatactcatcag

SEQ ID NO: 1873654 - DNA, 25 bp, Homo sapien
caatactcttaagattgctcagaca

SEQ ID NO: 1873655 - DNA, 25 bp, Homo sapien
ttgattggagcagcatagcttttgt

SEQ ID NO: 1873656 - DNA, 25 bp, Homo sapien
cattttcagttttgattggagcagc

SEQ ID NO: 1873657 - DNA, 25 bp, Homo sapien
tctgtccacttaaatcaatactctt

SEQ ID NO: 1873658 - DNA, 25 bp, Homo sapien
acacataggcctcttcttccagacg

SEQ ID NO: 1873659 - DNA, 25 bp, Homo sapien
cctagaccagataatgtggcacaca

SEQ ID NO: 1873660 - DNA, 25 bp, Homo sapien
tgaacctctaacttccgtgctgtag

SEQ ID NO: 1873661 - DNA, 25 bp, Homo sapien
cagacggcacgttccttgaagagac

SEQ ID NO: 1873662 - DNA, 25 bp, Homo sapien
tctctctgtcaagaatccgtggaca

SEQ ID NO: 1873663 - DNA, 25 bp, Homo sapien
acctaactcgtttgtgtcccagcca

SEQ ID NO: 1873664 - DNA, 25 bp, Homo sapien
cgtggacatgttatctggttagagc

SEQ ID NO: 1873665 - DNA, 25 bp, Homo sapien
ggtaactcactcacgttagactata

SEQ ID NO: 1873666 - DNA, 25 bp, Homo sapien
gctgcctgtcctcagagcatgccat

SEQ ID NO: 1873667 - DNA, 25 bp, Homo sapien
ctgctccctcgcctcctgaagggca

SEQ ID NO: 1873668 - DNA, 25 bp, Homo sapien
gcagcagctgcctgtcctcagagca

SEQ ID NO: 1873669 - DNA, 25 bp, Homo sapien
ctccctcgcctcctgaagggcagca

SEQ ID NO: 1873670 - DNA, 25 bp, Homo sapien
cccagggtgattaccagttttctgc

SEQ ID NO: 1873671 - DNA, 25 bp, Homo sapien
atatgaagtctgtgctctcggaatg

SEQ ID NO: 1873672 - DNA, 25 bp, Homo sapien
tgtgctctcggaatgtccacttctg

SEQ ID NO: 1873673 - DNA, 25 bp, Homo sapien
tggtgtccaaggccccaaagctctg

SEQ ID NO: 1873674 - DNA, 25 bp, Homo sapien
caaccatttggttagaggcaggata

SEQ ID NO: 1873675 - DNA, 25 bp, Homo sapien
tggtctacacaagccagttcgtgga

SEQ ID NO: 1873676 - DNA, 25 bp, Homo sapien
ggtgggtctctccttgacaactggg

SEQ ID NO: 1873677 - DNA, 25 bp, Homo sapien
taaagcctgcgatatgtagttctgg

SEQ ID NO: 1873678 - DNA, 25 bp, Homo sapien
gggtgattgaggtggacagaaggca

SEQ ID NO: 1873679 - DNA, 25 bp, Homo sapien
gacagctgaagaggtgtaatttaac

SEQ ID NO: 1873680 - DNA, 25 bp, Homo sapien
cagagatcgtttctccttgcaatgg

SEQ ID NO: 1873681 - DNA, 25 bp, Homo sapien
tcagaggcccgtcactggggtgatt

SEQ ID NO: 1873682 - DNA, 25 bp, Homo sapien
aactaggccaagattctgactgaca

SEQ ID NO: 1873683 - DNA, 25 bp, Homo sapien
ctaggccaagattctgactgacatt

SEQ ID NO: 1873684 - DNA, 25 bp, Homo sapien
aggccaagattctgactgacatttc

SEQ ID NO: 1873685 - DNA, 25 bp, Homo sapien
taggccaagattctgactgacattt

SEQ ID NO: 1873686 - DNA, 25 bp, Homo sapien
tccttgagagaattctgacaggaag

SEQ ID NO: 1873687 - DNA, 25 bp, Homo sapien
atgcgaaccaacactgccagctctg

SEQ ID NO: 1873688 - DNA, 25 bp, Homo sapien
taaataactatccacatcctaaaca

SEQ ID NO: 1873689 - DNA, 25 bp, Homo sapien
acaggaaggcatagaaatgcgaacc

SEQ ID NO: 1873690 - DNA, 25 bp, Homo sapien
gaagaaagcccagcgaggaggaggg

SEQ ID NO: 1873691 - DNA, 25 bp, Homo sapien
gggaagaaagcccagcgaggaggag

SEQ ID NO: 1873692 - DNA, 25 bp, Homo sapien
ctgctggggaagaaagcccagcgag

SEQ ID NO: 1873693 - DNA, 25 bp, Homo sapien
ctggggaagaaagcccagcgaggag

SEQ ID NO: 1873694 - DNA, 25 bp, Homo sapien
tggagtccagatccgacaggcagag

SEQ ID NO: 1873695 - DNA, 25 bp, Homo sapien
tccaattgtcctctggccgttcctg

SEQ ID NO: 1873696 - DNA, 25 bp, Homo sapien
cagcgtctgtagaagcaggtgaagc

SEQ ID NO: 1873697 - DNA, 25 bp, Homo sapien
tttgggaagccctgcaggcgatctg

SEQ ID NO: 1873698 - DNA, 25 bp, Homo sapien
tttcaatgatgaagtgcaaacactt

SEQ ID NO: 1873699 - DNA, 25 bp, Homo sapien
gcagaagttggcatcgctggttaaa

SEQ ID NO: 1873700 - DNA, 25 bp, Homo sapien
acaatttcaatgatgaagtgcaaac

SEQ ID NO: 1873701 - DNA, 25 bp, Homo sapien
cagaagttggcatcgctggttaaac

SEQ ID NO: 1873702 - DNA, 25 bp, Homo sapien
catacatcgtgaagactggcaggcc

SEQ ID NO: 1873703 - DNA, 25 bp, Homo sapien
tcccatacatcgtgaagactggcag

SEQ ID NO: 1873704 - DNA, 25 bp, Homo sapien
acatcgtgaagactggcaggccacc

SEQ ID NO: 1873705 - DNA, 25 bp, Homo sapien
ctgctcccatacatcgtgaagactg

SEQ ID NO: 1873706 - DNA, 25 bp, Homo sapien
acatggagtgtgaaggccattgagt

SEQ ID NO: 1873707 - DNA, 25 bp, Homo sapien
tgagtgggtgttccaaagggcagca

SEQ ID NO: 1873708 - DNA, 25 bp, Homo sapien
gagatcacatgtcctcccaagtagg

SEQ ID NO: 1873709 - DNA, 25 bp, Homo sapien
cagaatggagtttagttgaaggtgc

SEQ ID NO: 1873710 - DNA, 25 bp, Homo sapien
cactggttcaaagcagtagtaaggt

SEQ ID NO: 1873711 - DNA, 25 bp, Homo sapien
tggttcaaagcagtagtaaggtgtg

SEQ ID NO: 1873712 - DNA, 25 bp, Homo sapien
gttcaaagcagtagtaaggtgtggg

SEQ ID NO: 1873713 - DNA, 25 bp, Homo sapien
ctggttcaaagcagtagtaaggtgt

SEQ ID NO: 1873714 - DNA, 25 bp, Homo sapien
aatcagactctcctgaaaatgtggc

SEQ ID NO: 1873715 - DNA, 25 bp, Homo sapien
agaatgtgtgaacttgggagagcca

SEQ ID NO: 1873716 - DNA, 25 bp, Homo sapien
tcaatcagactctcctgaaaatgtg

SEQ ID NO: 1873717 - DNA, 25 bp, Homo sapien
gagagccagaagcataaagacatag

SEQ ID NO: 1873718 - DNA, 25 bp, Homo sapien
cagctcactgttcaggacggccctc

SEQ ID NO: 1873719 - DNA, 25 bp, Homo sapien
catcagctcactgttcaggacggcc

SEQ ID NO: 1873720 - DNA, 25 bp, Homo sapien
tcagctcactgttcaggacggccct

SEQ ID NO: 1873721 - DNA, 25 bp, Homo sapien
atcagctcactgttcaggacggccc

SEQ ID NO: 1873722 - DNA, 25 bp, Homo sapien
ttcaaaaatgcaagcaaatcattca

SEQ ID NO: 1873723 - DNA, 25 bp, Homo sapien
aaaaatgcaagcaaatcattcactg

SEQ ID NO: 1873724 - DNA, 25 bp, Homo sapien
tcaaaaatgcaagcaaatcattcac

SEQ ID NO: 1873725 - DNA, 25 bp, Homo sapien
aaatgcaagcaaatcattcactgat

SEQ ID NO: 1873726 - DNA, 25 bp, Homo sapien
ggcttcttccaggctaccagccaga

SEQ ID NO: 1873727 - DNA, 25 bp, Homo sapien
gtcatggacctcaccaactttcctc

SEQ ID NO: 1873728 - DNA, 25 bp, Homo sapien
accagccagaaagtctgaactaatt

SEQ ID NO: 1873729 - DNA, 25 bp, Homo sapien
gcttcttccaggctaccagccagaa

SEQ ID NO: 1873730 - DNA, 25 bp, Homo sapien
ttatagcccactttctctctggtac

SEQ ID NO: 1873731 - DNA, 25 bp, Homo sapien
gccgacgtgctctgagttagtggca

SEQ ID NO: 1873732 - DNA, 25 bp, Homo sapien
cgacgtgctctgagttagtggcatg

SEQ ID NO: 1873733 - DNA, 25 bp, Homo sapien
cattgccgacgtgctctgagttagt

SEQ ID NO: 1873734 - DNA, 25 bp, Homo sapien
agcagcattgccgacgtgctctgag

SEQ ID NO: 1873735 - DNA, 25 bp, Homo sapien
tttctgtttccatccgtgcaggtct

SEQ ID NO: 1873736 - DNA, 25 bp, Homo sapien
cttgttgcagagcactgggtaagga

SEQ ID NO: 1873737 - DNA, 25 bp, Homo sapien
tattaagagtcctgtgaagtggagg

SEQ ID NO: 1873738 - DNA, 25 bp, Homo sapien
gacaggacttgttgcagagcactgg

SEQ ID NO: 1873739 - DNA, 25 bp, Homo sapien
tgcacatggtggatgacaggggtga

SEQ ID NO: 1873740 - DNA, 25 bp, Homo sapien
caagttcctacactgggcctgtaca

SEQ ID NO: 1873741 - DNA, 25 bp, Homo sapien
ctcttgctggatgggaacggaattc

SEQ ID NO: 1873742 - DNA, 25 bp, Homo sapien
gatgcagcccaagttcctacactgg

SEQ ID NO: 1873743 - DNA, 25 bp, Homo sapien
tcctccggacgaccagggtctcttg

SEQ ID NO: 1873744 - DNA, 25 bp, Homo sapien
cgatgttacgtgacatggaaacgcg

SEQ ID NO: 1873745 - DNA, 25 bp, Homo sapien
tggagcggctctcgatgttacgtga

SEQ ID NO: 1873746 - DNA, 25 bp, Homo sapien
ggctctcgatgttacgtgacatgga

SEQ ID NO: 1873747 - DNA, 25 bp, Homo sapien
catggaaacgcgctggttttcattg

SEQ ID NO: 1873748 - DNA, 25 bp, Homo sapien
ggcgggcaactctcaggcttttgga

SEQ ID NO: 1873749 - DNA, 25 bp, Homo sapien
aaggcaagccccaatatcgacagca

SEQ ID NO: 1873750 - DNA, 25 bp, Homo sapien
atatcgacagcagcaagtacttgac

SEQ ID NO: 1873751 - DNA, 25 bp, Homo sapien
ggattttccgagctgccgcctcact

SEQ ID NO: 1873752 - DNA, 25 bp, Homo sapien
gctgcaatcagttagagactcgcct

SEQ ID NO: 1873753 - DNA, 25 bp, Homo sapien
gaaatgggaacactcacacctaaag

SEQ ID NO: 1873754 - DNA, 25 bp, Homo sapien
gactcgcctcacctactagcaagag

SEQ ID NO: 1873755 - DNA, 25 bp, Homo sapien
gatgcatggtctggcggaactcagc

SEQ ID NO: 1873756 - DNA, 25 bp, Homo sapien
ggccatgcagggtcttcactgtcat

SEQ ID NO: 1873757 - DNA, 25 bp, Homo sapien
gggccatgcagggtcttcactgtca

SEQ ID NO: 1873758 - DNA, 25 bp, Homo sapien
tgggccatgcagggtcttcactgtc

SEQ ID NO: 1873759 - DNA, 25 bp, Homo sapien
gagagtacctgttagttttatagca

SEQ ID NO: 1873760 - DNA, 25 bp, Homo sapien
tgtgtatgcctgtgttctatcaatg

SEQ ID NO: 1873761 - DNA, 25 bp, Homo sapien
gtgaatgtatcttcctgtgtatgcc

SEQ ID NO: 1873762 - DNA, 25 bp, Homo sapien
ctttctgtgaatgtatcttcctgtg

SEQ ID NO: 1873763 - DNA, 25 bp, Homo sapien
gcttccggtccatgtgaccgaggcc

SEQ ID NO: 1873764 - DNA, 25 bp, Homo sapien
cagaaagcagcttccggtccatgtg

SEQ ID NO: 1873765 - DNA, 25 bp, Homo sapien
cataaagtcacatgattcttctaag

SEQ ID NO: 1873766 - DNA, 25 bp, Homo sapien
gaggccccccataaagtcacatgat

SEQ ID NO: 1873767 - DNA, 25 bp, Homo sapien
tataaaaaacacactatgactatta

SEQ ID NO: 1873768 - DNA, 25 bp, Homo sapien
taaaaaacacactatgactattaag

SEQ ID NO: 1873769 - DNA, 25 bp, Homo sapien
tgtataaaaaacacactatgactat

SEQ ID NO: 1873770 - DNA, 25 bp, Homo sapien
gtataaaaaacacactatgactatt

SEQ ID NO: 1873771 - DNA, 25 bp, Homo sapien
tctctcggcacaacccaagttcaga

SEQ ID NO: 1873772 - DNA, 25 bp, Homo sapien
aagggtccaccgagtcctgaactca

SEQ ID NO: 1873773 - DNA, 25 bp, Homo sapien
caacactgttaagggagtagaggca

SEQ ID NO: 1873774 - DNA, 25 bp, Homo sapien
gcctagtctagaccaaagtgctctg

SEQ ID NO: 1873775 - DNA, 25 bp, Homo sapien
tgaggaagatgatgccctcagacac

SEQ ID NO: 1873776 - DNA, 25 bp, Homo sapien
gaggaagatgatgccctcagacacc

SEQ ID NO: 1873777 - DNA, 25 bp, Homo sapien
gatgaggaagatgatgccctcagac

SEQ ID NO: 1873778 - DNA, 25 bp, Homo sapien
gaagatgatgccctcagacaccatg

SEQ ID NO: 1873779 - DNA, 25 bp, Homo sapien
ctgcatcttgctcagagcagcctgg

SEQ ID NO: 1873780 - DNA, 25 bp, Homo sapien
tgtcatcctgcatcttgctcagagc

SEQ ID NO: 1873781 - DNA, 25 bp, Homo sapien
catcctgcatcttgctcagagcagc

SEQ ID NO: 1873782 - DNA, 25 bp, Homo sapien
tgattgtcatcctgcatcttgctca

SEQ ID NO: 1873783 - DNA, 25 bp, Homo sapien
gagggccaccttgaatgccttcaac

SEQ ID NO: 1873784 - DNA, 25 bp, Homo sapien
tggattctgtgaggcgattcatgcc

SEQ ID NO: 1873785 - DNA, 25 bp, Homo sapien
attgactgcgcatgagcttcccgga

SEQ ID NO: 1873786 - DNA, 25 bp, Homo sapien
agagaagggctcttcgctgtcccgg

SEQ ID NO: 1873787 - DNA, 25 bp, Homo sapien
aatgagatcaaacaagcacagtggc

SEQ ID NO: 1873788 - DNA, 25 bp, Homo sapien
aagaatgagatcaaacaagcacagt

SEQ ID NO: 1873789 - DNA, 25 bp, Homo sapien
gaatgagatcaaacaagcacagtgg

SEQ ID NO: 1873790 - DNA, 25 bp, Homo sapien
atgagatcaaacaagcacagtggct

SEQ ID NO: 1873791 - DNA, 25 bp, Homo sapien
ccactttctgggattccttggtctc

SEQ ID NO: 1873792 - DNA, 25 bp, Homo sapien
cactcaactccactttctgggattc

SEQ ID NO: 1873793 - DNA, 25 bp, Homo sapien
ctggattcactcaactccactttct

SEQ ID NO: 1873794 - DNA, 25 bp, Homo sapien
ccttggtctcctgtgagtctgccgt

SEQ ID NO: 1873795 - DNA, 25 bp, Homo sapien
tgtcactgaagtcataggggtcgta

SEQ ID NO: 1873796 - DNA, 25 bp, Homo sapien
gtcataggggtcgtatgaatcccca

SEQ ID NO: 1873797 - DNA, 25 bp, Homo sapien
ggtcgtatgaatccccatctttggc

SEQ ID NO: 1873798 - DNA, 25 bp, Homo sapien
tgtgtcactgaagtcataggggtcg

SEQ ID NO: 1873799 - DNA, 25 bp, Homo sapien
aaatacccacagcagttaagagaga

SEQ ID NO: 1873800 - DNA, 25 bp, Homo sapien
ggcttaggcctttgcaaactgctgc

SEQ ID NO: 1873801 - DNA, 25 bp, Homo sapien
tgttccaaacgagaccaagtcccca

SEQ ID NO: 1873802 - DNA, 25 bp, Homo sapien
gactagaacacaaacaggcgctgct

SEQ ID NO: 1873803 - DNA, 25 bp, Homo sapien
tcagtggttgggttgctgttcctac

SEQ ID NO: 1873804 - DNA, 25 bp, Homo sapien
tcaaaccccgcaggtctaggaacac

SEQ ID NO: 1873805 - DNA, 25 bp, Homo sapien
acaacctgacatcaataagcagcgc

SEQ ID NO: 1873806 - DNA, 25 bp, Homo sapien
tgacatcaataagcagcgctggttc

SEQ ID NO: 1873807 - DNA, 25 bp, Homo sapien
ggaacactctccatgaacaacctga

SEQ ID NO: 1873808 - DNA, 25 bp, Homo sapien
cttcctcttctgctcctggtcctct

SEQ ID NO: 1873809 - DNA, 25 bp, Homo sapien
cctggtcctcttggcttttctcctc

SEQ ID NO: 1873810 - DNA, 25 bp, Homo sapien
tctgctcctggtcctcttggctttt

SEQ ID NO: 1873811 - DNA, 25 bp, Homo sapien
tcctcttctgctcctggtcctcttg

SEQ ID NO: 1873812 - DNA, 25 bp, Homo sapien
cacttcgcttcttacgtttcttctc

SEQ ID NO: 1873813 - DNA, 25 bp, Homo sapien
attcatcctcacttcgcttcttacg

SEQ ID NO: 1873814 - DNA, 25 bp, Homo sapien
tctgattcatcctcacttcgcttct

SEQ ID NO: 1873815 - DNA, 25 bp, Homo sapien
ctgtctctgattcatcctcacttcg

SEQ ID NO: 1873816 - DNA, 25 bp, Homo sapien
gcatcataagcaggaaagacttcca

SEQ ID NO: 1873817 - DNA, 25 bp, Homo sapien
catcataagcaggaaagacttccat

SEQ ID NO: 1873818 - DNA, 25 bp, Homo sapien
cagaagtagagactgctacccatct

SEQ ID NO: 1873819 - DNA, 25 bp, Homo sapien
tagagactgctacccatcttttcaa

SEQ ID NO: 1873820 - DNA, 25 bp, Homo sapien
ctagctcctcttgtccctaagtccc

SEQ ID NO: 1873821 - DNA, 25 bp, Homo sapien
gactgctacccatcttttcaaaatg

SEQ ID NO: 1873822 - DNA, 25 bp, Homo sapien
gcgaggaagagtttatcagacttac

SEQ ID NO: 1873823 - DNA, 25 bp, Homo sapien
agactcacaactcaaccccaaaagg

SEQ ID NO: 1873824 - DNA, 25 bp, Homo sapien
aaaggctaacattcaccagactggg

SEQ ID NO: 1873825 - DNA, 25 bp, Homo sapien
gaaacaaatgtctagcccataatgg

SEQ ID NO: 1873826 - DNA, 25 bp, Homo sapien
caatgggacatttgaagagactacc

SEQ ID NO: 1873827 - DNA, 25 bp, Homo sapien
ttaaacatgagcttctgaggtgcca

SEQ ID NO: 1873828 - DNA, 25 bp, Homo sapien
gaagcagctaactgaaagtacagca

SEQ ID NO: 1873829 - DNA, 25 bp, Homo sapien
gacaaggaagattaccaaggtagct

SEQ ID NO: 1873830 - DNA, 25 bp, Homo sapien
cagtgttcgggctgtaactggagat

SEQ ID NO: 1873831 - DNA, 25 bp, Homo sapien
acagtcttgctcatgcgggccttcg

SEQ ID NO: 1873832 - DNA, 25 bp, Homo sapien
tcatgcgggccttcgcatgggctgt

SEQ ID NO: 1873833 - DNA, 25 bp, Homo sapien
gctgtggccagtcgaatcagagttt

SEQ ID NO: 1873834 - DNA, 25 bp, Homo sapien
tctgcaatgtaggtggccgactcct

SEQ ID NO: 1873835 - DNA, 25 bp, Homo sapien
cgtgaatactcttctgcaatgtagg

SEQ ID NO: 1873836 - DNA, 25 bp, Homo sapien
gctatcctggctgcgcaggcgtgaa

SEQ ID NO: 1873837 - DNA, 25 bp, Homo sapien
tgattttggccacatggatgtactt

SEQ ID NO: 1873838 - DNA, 25 bp, Homo sapien
tggagccacacacagtgaattccat

SEQ ID NO: 1873839 - DNA, 25 bp, Homo sapien
ctggagccacacacagtgaattcca

SEQ ID NO: 1873840 - DNA, 25 bp, Homo sapien
ggccaaaaataggtgtaagatccca

SEQ ID NO: 1873841 - DNA, 25 bp, Homo sapien
taagaaaagacctgaacctgcgctg

SEQ ID NO: 1873842 - DNA, 25 bp, Homo sapien
taatccacgtggttatgactccagg

SEQ ID NO: 1873843 - DNA, 25 bp, Homo sapien
ttgacctgggcatataaggccttag

SEQ ID NO: 1873844 - DNA, 25 bp, Homo sapien
tgtcatgcttctcataaatctgggt

SEQ ID NO: 1873845 - DNA, 25 bp, Homo sapien
tcctggctaaagttgggatcatctg

SEQ ID NO: 1873846 - DNA, 25 bp, Homo sapien
tccacagcactacccaagggcatag

SEQ ID NO: 1873847 - DNA, 25 bp, Homo sapien
tcttggtcccatgtagaaggttgtc

SEQ ID NO: 1873848 - DNA, 25 bp, Homo sapien
tgagatctcccgatcctgctcagga

SEQ ID NO: 1873849 - DNA, 25 bp, Homo sapien
ggtgcatccgaaggacatggtctga

SEQ ID NO: 1873850 - DNA, 25 bp, Homo sapien
cagcagtgagtcctgtagcccaatg

SEQ ID NO: 1873851 - DNA, 25 bp, Homo sapien
cccaggtgctctgtaacggtgcatc

SEQ ID NO: 1873852 - DNA, 25 bp, Homo sapien
gagtgggaatgaaaggcttgacctc

SEQ ID NO: 1873853 - DNA, 25 bp, Homo sapien
tggacatgacatcaataggaagaaa

SEQ ID NO: 1873854 - DNA, 25 bp, Homo sapien
aggcttgacctcaaagagcaaaaca

SEQ ID NO: 1873855 - DNA, 25 bp, Homo sapien
ggaatgaaaggcttgacctcaaaga

SEQ ID NO: 1873856 - DNA, 25 bp, Homo sapien
ggaacactgctctaaacaaaggaca

SEQ ID NO: 1873857 - DNA, 25 bp, Homo sapien
gcccagttagtcagcaaaaccaaat

SEQ ID NO: 1873858 - DNA, 25 bp, Homo sapien
tttggcctattattcccctgggtca

SEQ ID NO: 1873859 - DNA, 25 bp, Homo sapien
cctgggtcacctagaatacacttct

SEQ ID NO: 1873860 - DNA, 25 bp, Homo sapien
cagccttggcaatggtcactcgacc

SEQ ID NO: 1873861 - DNA, 25 bp, Homo sapien
catcacttcatggatggctgtgcga

SEQ ID NO: 1873862 - DNA, 25 bp, Homo sapien
ttcatcaatgcaaaccacgcctcgg

SEQ ID NO: 1873863 - DNA, 25 bp, Homo sapien
tcagccgagcatggatgccagcctt

SEQ ID NO: 1873864 - DNA, 25 bp, Homo sapien
gggcacacaaaggatctatgctcag

SEQ ID NO: 1873865 - DNA, 25 bp, Homo sapien
cacacaaaggatctatgctcaggct

SEQ ID NO: 1873866 - DNA, 25 bp, Homo sapien
acacaaaggatctatgctcaggctc

SEQ ID NO: 1873867 - DNA, 25 bp, Homo sapien
ggcacacaaaggatctatgctcagg

SEQ ID NO: 1873868 - DNA, 25 bp, Homo sapien
tagctcggggtgcagtgcaaagcac

SEQ ID NO: 1873869 - DNA, 25 bp, Homo sapien
cacataccgcagaagctgagacttg

SEQ ID NO: 1873870 - DNA, 25 bp, Homo sapien
gcagtgcaaagcacataccgcagaa

SEQ ID NO: 1873871 - DNA, 25 bp, Homo sapien
agcagccgtcagacccactccagag

SEQ ID NO: 1873872 - DNA, 25 bp, Homo sapien
ctattagaagaatattgatgtcccc

SEQ ID NO: 1873873 - DNA, 25 bp, Homo sapien
caagcagaggattgctttcttgaca

SEQ ID NO: 1873874 - DNA, 25 bp, Homo sapien
ccatggatacttggggccaatgact

SEQ ID NO: 1873875 - DNA, 25 bp, Homo sapien
catagtcatgcccatggatacttgg

SEQ ID NO: 1873876 - DNA, 25 bp, Homo sapien
ttcttgacatagtcatgcccatgga

SEQ ID NO: 1873877 - DNA, 25 bp, Homo sapien
ctcaaatttctaaaggatgcccaga

SEQ ID NO: 1873878 - DNA, 25 bp, Homo sapien
tcaaatttctaaaggatgcccagac

SEQ ID NO: 1873879 - DNA, 25 bp, Homo sapien
cctcaaatttctaaaggatgcccag

SEQ ID NO: 1873880 - DNA, 25 bp, Homo sapien
tccttgctcatctgcttaacattac

SEQ ID NO: 1873881 - DNA, 25 bp, Homo sapien
atccttgctcatctgcttaacatta

SEQ ID NO: 1873882 - DNA, 25 bp, Homo sapien
aacattacaggcaatcaggacagtc

SEQ ID NO: 1873883 - DNA, 25 bp, Homo sapien
atcatccagaatgacgtccacagag

SEQ ID NO: 1873884 - DNA, 25 bp, Homo sapien
tgaacccggtcaccaggcttcgctt

SEQ ID NO: 1873885 - DNA, 25 bp, Homo sapien
ggcttcgctttatccaccaagtcat

SEQ ID NO: 1873886 - DNA, 25 bp, Homo sapien
atccagaatgacgtccacagagcgg

SEQ ID NO: 1873887 - DNA, 25 bp, Homo sapien
tattctgtctcaaggggattgttct

SEQ ID NO: 1873888 - DNA, 25 bp, Homo sapien
cttgtagacagaaaggccatattct

SEQ ID NO: 1873889 - DNA, 25 bp, Homo sapien
atattctgtctcaaggggattgttc

SEQ ID NO: 1873890 - DNA, 25 bp, Homo sapien
gacagaaaggccatattctgtctca

SEQ ID NO: 1873891 - DNA, 25 bp, Homo sapien
ttgtcctccatagcgcctaatagtg

SEQ ID NO: 1873892 - DNA, 25 bp, Homo sapien
tctggaggtagactaaatgatgcta

SEQ ID NO: 1873893 - DNA, 25 bp, Homo sapien
tccaccactgtgaagactaatgacg

SEQ ID NO: 1873894 - DNA, 25 bp, Homo sapien
ggaaaaccttgcattgtcctcaatc

SEQ ID NO: 1873895 - DNA, 25 bp, Homo sapien
gacgactttgggacgaactagagaa

SEQ ID NO: 1873896 - DNA, 25 bp, Homo sapien
gagatcagaataacgtcgctctatg

SEQ ID NO: 1873897 - DNA, 25 bp, Homo sapien
gctctatggtcttcttagtagcagg

SEQ ID NO: 1873898 - DNA, 25 bp, Homo sapien
gacagtagtggacactgcggacgac

SEQ ID NO: 1873899 - DNA, 25 bp, Homo sapien
caagttttaccacgtaattccaatg

SEQ ID NO: 1873900 - DNA, 25 bp, Homo sapien
ccacaagctacccagatctactttg

SEQ ID NO: 1873901 - DNA, 25 bp, Homo sapien
catctccctgtctattcatttccta

SEQ ID NO: 1873902 - DNA, 25 bp, Homo sapien
gtaattccaatgctccacctctttg

SEQ ID NO: 1873903 - DNA, 25 bp, Homo sapien
tgccttccagtcctacgtagaactc

SEQ ID NO: 1873904 - DNA, 25 bp, Homo sapien
gcataggtagcatcaatggaggcca

SEQ ID NO: 1873905 - DNA, 25 bp, Homo sapien
gaactcctcatactgcttggcatag

SEQ ID NO: 1873906 - DNA, 25 bp, Homo sapien
tttagtgacaatgccctccacacag

SEQ ID NO: 1873907 - DNA, 25 bp, Homo sapien
tcacattgacaatcagccggtattg

SEQ ID NO: 1873908 - DNA, 25 bp, Homo sapien
gtcactgatcagctcccgaactttg

SEQ ID NO: 1873909 - DNA, 25 bp, Homo sapien
ccggtattggttgtcactgatcagc

SEQ ID NO: 1873910 - DNA, 25 bp, Homo sapien
tgctctgataaattccctggtcttc

SEQ ID NO: 1873911 - DNA, 25 bp, Homo sapien
cgtccagcaccacggtacccgccat

SEQ ID NO: 1873912 - DNA, 25 bp, Homo sapien
aggatgactccaccccggcgcgaaa

SEQ ID NO: 1873913 - DNA, 25 bp, Homo sapien
caaaggttacctcgaggaagaggcg

SEQ ID NO: 1873914 - DNA, 25 bp, Homo sapien
gcccgctgccaaagaactacctcca

SEQ ID NO: 1873915 - DNA, 25 bp, Homo sapien
accaaagtcgcgtggaggttcccag

SEQ ID NO: 1873916 - DNA, 25 bp, Homo sapien
cttgggagcatataagcattatgat

SEQ ID NO: 1873917 - DNA, 25 bp, Homo sapien
ggactagcgactgtccaatcaaaag

SEQ ID NO: 1873918 - DNA, 25 bp, Homo sapien
tggctgagttctctgaggtcggact

SEQ ID NO: 1873919 - DNA, 25 bp, Homo sapien
aagcattatgattggctgagttctc

SEQ ID NO: 1873920 - DNA, 25 bp, Homo sapien
gctggcgagagggaaagcattgcgt

SEQ ID NO: 1873921 - DNA, 25 bp, Homo sapien
tgggagttgtagtgttctccctcct

SEQ ID NO: 1873922 - DNA, 25 bp, Homo sapien
ccgatgcaacgaccaaattcagagg

SEQ ID NO: 1873923 - DNA, 25 bp, Homo sapien
cagaacttttgacccgatgcaacga

SEQ ID NO: 1873924 - DNA, 25 bp, Homo sapien
aacccagacacttccttgagtggga

SEQ ID NO: 1873925 - DNA, 25 bp, Homo sapien
cagacacttccttgagtgggacctt

SEQ ID NO: 1873926 - DNA, 25 bp, Homo sapien
agacacttccttgagtgggaccttt

SEQ ID NO: 1873927 - DNA, 25 bp, Homo sapien
cccagacacttccttgagtgggacc

SEQ ID NO: 1873928 - DNA, 25 bp, Homo sapien
cctggagtccttccggttagatatg

SEQ ID NO: 1873929 - DNA, 25 bp, Homo sapien
tcctggagtccttccggttagatat

SEQ ID NO: 1873930 - DNA, 25 bp, Homo sapien
tctcccttttgcactcttctgttgc

SEQ ID NO: 1873931 - DNA, 25 bp, Homo sapien
tcttgtctcccttttgcactcttct

SEQ ID NO: 1873932 - DNA, 25 bp, Homo sapien
cctgaaagatgcttgtgaggcactg

SEQ ID NO: 1873933 - DNA, 25 bp, Homo sapien
ccttccagcatcttactacattctt

SEQ ID NO: 1873934 - DNA, 25 bp, Homo sapien
agttcccttccagcatcttactaca

SEQ ID NO: 1873935 - DNA, 25 bp, Homo sapien
catcttactacattcttccaggtca

SEQ ID NO: 1873936 - DNA, 25 bp, Homo sapien
acattcttccaggtcaatttcagga

SEQ ID NO: 1873937 - DNA, 25 bp, Homo sapien
cacagtccttcgttactgttcttcc

SEQ ID NO: 1873938 - DNA, 25 bp, Homo sapien
gtccttcgttactgttcttccagcc

SEQ ID NO: 1873939 - DNA, 25 bp, Homo sapien
gaaacacagtccttcgttactgttc

SEQ ID NO: 1873940 - DNA, 25 bp, Homo sapien
aagctgttggaactctaattttaca

SEQ ID NO: 1873941 - DNA, 25 bp, Homo sapien
gcagatacgtgtgggcagagccacc

SEQ ID NO: 1873942 - DNA, 25 bp, Homo sapien
cagccatattgaggtggaggcaagt

SEQ ID NO: 1873943 - DNA, 25 bp, Homo sapien
gatattggcacagtcttcgtacact

SEQ ID NO: 1873944 - DNA, 25 bp, Homo sapien
gccacctgtggcttacttagaggaa

SEQ ID NO: 1873945 - DNA, 25 bp, Homo sapien
agatggtgcctagaatgctgtatcc

SEQ ID NO: 1873946 - DNA, 25 bp, Homo sapien
cagcccctgtgcgaagtctttgctc

SEQ ID NO: 1873947 - DNA, 25 bp, Homo sapien
taagctgcaaaatgtactgtgtccc

SEQ ID NO: 1873948 - DNA, 25 bp, Homo sapien
gatcacatttatgagagctccacca

SEQ ID NO: 1873949 - DNA, 25 bp, Homo sapien
tggttctccaatattgattcagttt

SEQ ID NO: 1873950 - DNA, 25 bp, Homo sapien
tgctttggttctccaatattgattc

SEQ ID NO: 1873951 - DNA, 25 bp, Homo sapien
tttggttctccaatattgattcagt

SEQ ID NO: 1873952 - DNA, 25 bp, Homo sapien
ctgctttggttctccaatattgatt

SEQ ID NO: 1873953 - DNA, 25 bp, Homo sapien
cttgtgcaagatgttgcagtccccc

SEQ ID NO: 1873954 - DNA, 25 bp, Homo sapien
gctctcctttgcaggacagcttgtg

SEQ ID NO: 1873955 - DNA, 25 bp, Homo sapien
gaaagcatgctttgagggtggtgga

SEQ ID NO: 1873956 - DNA, 25 bp, Homo sapien
aagatgttgcagtcccccctgagct

SEQ ID NO: 1873957 - DNA, 25 bp, Homo sapien
gaagcgtttctgttcgcggaacctg

SEQ ID NO: 1873958 - DNA, 25 bp, Homo sapien
gggcctgccaggtgttcacccctat

SEQ ID NO: 1873959 - DNA, 25 bp, Homo sapien
tgaacttcaggttcggagacgagga

SEQ ID NO: 1873960 - DNA, 25 bp, Homo sapien
ccccaacccgatgagggcgttgtca

SEQ ID NO: 1873961 - DNA, 25 bp, Homo sapien
aagattgttctggctttgtcagcag

SEQ ID NO: 1873962 - DNA, 25 bp, Homo sapien
tgcttaaatccgacctgcaacaaga

SEQ ID NO: 1873963 - DNA, 25 bp, Homo sapien
aataaatgcttaaatccgacctgca

SEQ ID NO: 1873964 - DNA, 25 bp, Homo sapien
tagaagactttgactggtagagaaa

SEQ ID NO: 1873965 - DNA, 25 bp, Homo sapien
cagctgtgtggcctccagagtccct

SEQ ID NO: 1873966 - DNA, 25 bp, Homo sapien
aaccagctgtgtggcctccagagtc

SEQ ID NO: 1873967 - DNA, 25 bp, Homo sapien
agctgtgtggcctccagagtccctt

SEQ ID NO: 1873968 - DNA, 25 bp, Homo sapien
ctgttgcttctagaaccagctgtgt

SEQ ID NO: 1873969 - DNA, 25 bp, Homo sapien
acactgaatactcacagggcaagct

SEQ ID NO: 1873970 - DNA, 25 bp, Homo sapien
aggaaggatgtggactgaaagacta

SEQ ID NO: 1873971 - DNA, 25 bp, Homo sapien
tggactgaaagactattggcacctg

SEQ ID NO: 1873972 - DNA, 25 bp, Homo sapien
tattggcacctgcaacactgaatac

SEQ ID NO: 1873973 - DNA, 25 bp, Homo sapien
ggctagagtgcagtggcacaatctc

SEQ ID NO: 1873974 - DNA, 25 bp, Homo sapien
gctcagccacccaagtagctgagac

SEQ ID NO: 1873975 - DNA, 25 bp, Homo sapien
gttcaagggattcccccggctcagc

SEQ ID NO: 1873976 - DNA, 25 bp, Homo sapien
ttgctctgtctccagccaggctaga

SEQ ID NO: 1873977 - DNA, 25 bp, Homo sapien
taaattatgatcttcctggagggca

SEQ ID NO: 1873978 - DNA, 25 bp, Homo sapien
cagcacttagctttgtaatcttgac

SEQ ID NO: 1873979 - DNA, 25 bp, Homo sapien
caagaaagccatttttacagcagag

SEQ ID NO: 1873980 - DNA, 25 bp, Homo sapien
caagtggctgtctcgattattaaat

SEQ ID NO: 1873981 - DNA, 25 bp, Homo sapien
tacttaggaggctgaggcaggagaa

SEQ ID NO: 1873982 - DNA, 25 bp, Homo sapien
tggtctcctcccttaggcatggtgg

SEQ ID NO: 1873983 - DNA, 25 bp, Homo sapien
cacgcctataatctcagctacttag

SEQ ID NO: 1873984 - DNA, 25 bp, Homo sapien
gtctcctcccttaggcatggtggca

SEQ ID NO: 1873985 - DNA, 25 bp, Homo sapien
cagggaagcttgtgtaaccccaaca

SEQ ID NO: 1873986 - DNA, 25 bp, Homo sapien
tgttgccatgtggaacccacgctaa

SEQ ID NO: 1873987 - DNA, 25 bp, Homo sapien
taaaaaatcctacttggacagctca

SEQ ID NO: 1873988 - DNA, 25 bp, Homo sapien
cctttgttcggagacttagtagctt

SEQ ID NO: 1873989 - DNA, 25 bp, Homo sapien
ggcctctcggagctgattgatgtct

SEQ ID NO: 1873990 - DNA, 25 bp, Homo sapien
cttgctaagttggagaaggaagtga

SEQ ID NO: 1873991 - DNA, 25 bp, Homo sapien
ggaagtgaatcccagactaatgggc

SEQ ID NO: 1873992 - DNA, 25 bp, Homo sapien
actaatgggcactgtctttaccacc

SEQ ID NO: 1873993 - DNA, 25 bp, Homo sapien
ataatcagggtaaatagcacaaaca

SEQ ID NO: 1873994 - DNA, 25 bp, Homo sapien
atgcaagaatattccagatttccat

SEQ ID NO: 1873995 - DNA, 25 bp, Homo sapien
gcacaaacaccaattcatatttgcc

SEQ ID NO: 1873996 - DNA, 25 bp, Homo sapien
cagggtaaatagcacaaacaccaat

SEQ ID NO: 1873997 - DNA, 25 bp, Homo sapien
cagagtagcttccagggttcttcct

SEQ ID NO: 1873998 - DNA, 25 bp, Homo sapien
agagtagcttccagggttcttcctg

SEQ ID NO: 1873999 - DNA, 25 bp, Homo sapien
ggctttcacactcagagtagcttcc

SEQ ID NO: 1874000 - DNA, 25 bp, Homo sapien
tcagagtagcttccagggttcttcc

SEQ ID NO: 1874001 - DNA, 25 bp, Homo sapien
ggaagacatgcttctctttaactgc

SEQ ID NO: 1874002 - DNA, 25 bp, Homo sapien
cttcctctcagattggaagacatgc

SEQ ID NO: 1874003 - DNA, 25 bp, Homo sapien
cctctcagattggaagacatgcttc

SEQ ID NO: 1874004 - DNA, 25 bp, Homo sapien
ctctcccttcctctcagattggaag

SEQ ID NO: 1874005 - DNA, 25 bp, Homo sapien
aaactctccggattttttgcagcta

SEQ ID NO: 1874006 - DNA, 25 bp, Homo sapien
ccctgagaggtgaattcttggaaag

SEQ ID NO: 1874007 - DNA, 25 bp, Homo sapien
gcggttaaggcgtctctgtctcaaa

SEQ ID NO: 1874008 - DNA, 25 bp, Homo sapien
tcttggaaagaatatgagggcggtt

SEQ ID NO: 1874009 - DNA, 25 bp, Homo sapien
gcgtcagtcaacttcctcgcagcgg

SEQ ID NO: 1874010 - DNA, 25 bp, Homo sapien
gaagcggcgtcagtcaacttcctcg

SEQ ID NO: 1874011 - DNA, 25 bp, Homo sapien
agtcaacttcctcgcagcggcggca

SEQ ID NO: 1874012 - DNA, 25 bp, Homo sapien
tgggtggaaggaagcggcgtcagtc

SEQ ID NO: 1874013 - DNA, 25 bp, Homo sapien
cagcggagcgcgcgggtctgcgcat

SEQ ID NO: 1874014 - DNA, 25 bp, Homo sapien
tgcagcggagcgcgcgggtctgcgc

SEQ ID NO: 1874015 - DNA, 25 bp, Homo sapien
gcagcggagcgcgcgggtctgcgca

SEQ ID NO: 1874016 - DNA, 25 bp, Homo sapien
ctgcagcggagcgcgcgggtctgcg

SEQ ID NO: 1874017 - DNA, 25 bp, Homo sapien
tcagaggggaggtccagagtcgcag

SEQ ID NO: 1874018 - DNA, 25 bp, Homo sapien
gggaggtccagagtcgcagcgttgg

SEQ ID NO: 1874019 - DNA, 25 bp, Homo sapien
ggtccagagtcgcagcgttgggaac

SEQ ID NO: 1874020 - DNA, 25 bp, Homo sapien
aggggaggtccagagtcgcagcgtt

SEQ ID NO: 1874021 - DNA, 25 bp, Homo sapien
gtttagggccccgatgttgagtctc

SEQ ID NO: 1874022 - DNA, 25 bp, Homo sapien
cctggagctctgaacggctgtagtg

SEQ ID NO: 1874023 - DNA, 25 bp, Homo sapien
gggaccgcgatgttgggaaggctga

SEQ ID NO: 1874024 - DNA, 25 bp, Homo sapien
gagtctccgaatccaagcccggaag

SEQ ID NO: 1874025 - DNA, 25 bp, Homo sapien
gacctggaggtagccgggcacagca

SEQ ID NO: 1874026 - DNA, 25 bp, Homo sapien
gctcattgtcttgacctaagttgca

SEQ ID NO: 1874027 - DNA, 25 bp, Homo sapien
agccttggcaggctcattgtcttga

SEQ ID NO: 1874028 - DNA, 25 bp, Homo sapien
gctgctgcaccttgccgacccggtg

SEQ ID NO: 1874029 - DNA, 25 bp, Homo sapien
tataccttattgagtggtcaggacc

SEQ ID NO: 1874030 - DNA, 25 bp, Homo sapien
gcaagttaacaggatagaaagcgat

SEQ ID NO: 1874031 - DNA, 25 bp, Homo sapien
cacttggacgtaacacttgctgatg

SEQ ID NO: 1874032 - DNA, 25 bp, Homo sapien
ccttctggtgcatataggtccatct

SEQ ID NO: 1874033 - DNA, 25 bp, Homo sapien
tacttgttactaggcagtctctgtc

SEQ ID NO: 1874034 - DNA, 25 bp, Homo sapien
tatgtaaagtaattggtcctgtcac

SEQ ID NO: 1874035 - DNA, 25 bp, Homo sapien
gatgtgaaaggatccacagaagtaa

SEQ ID NO: 1874036 - DNA, 25 bp, Homo sapien
gcttatggcttattgggctagaaaa

SEQ ID NO: 1874037 - DNA, 25 bp, Homo sapien
gatctcctcattcattgacattacc

SEQ ID NO: 1874038 - DNA, 25 bp, Homo sapien
tgacattaccacatagatgccaaac

SEQ ID NO: 1874039 - DNA, 25 bp, Homo sapien
tccctaacagctagggagcagatct

SEQ ID NO: 1874040 - DNA, 25 bp, Homo sapien
ttaccacatagatgccaaaccctct

SEQ ID NO: 1874041 - DNA, 25 bp, Homo sapien
ataactgtatctgctacattatagc

SEQ ID NO: 1874042 - DNA, 25 bp, Homo sapien
tgtatctgctacattatagctttga

SEQ ID NO: 1874043 - DNA, 25 bp, Homo sapien
aactgtatctgctacattatagctt

SEQ ID NO: 1874044 - DNA, 25 bp, Homo sapien
ctgtatctgctacattatagctttg

SEQ ID NO: 1874045 - DNA, 25 bp, Homo sapien
gtaagctttagttggcaaagaggaa

SEQ ID NO: 1874046 - DNA, 25 bp, Homo sapien
tgcagataaaggctaggtcctggaa

SEQ ID NO: 1874047 - DNA, 25 bp, Homo sapien
gataaaggctaggtcctggaaggct

SEQ ID NO: 1874048 - DNA, 25 bp, Homo sapien
taagctttagttggcaaagaggaaa

SEQ ID NO: 1874049 - DNA, 25 bp, Homo sapien
caatgatctattgacacattctggg

SEQ ID NO: 1874050 - DNA, 25 bp, Homo sapien
acaatgatctattgacacattctgg

SEQ ID NO: 1874051 - DNA, 25 bp, Homo sapien
tgatctattgacacattctggggac

SEQ ID NO: 1874052 - DNA, 25 bp, Homo sapien
tgaacaatgatctattgacacattc

SEQ ID NO: 1874053 - DNA, 25 bp, Homo sapien
ggacagatctttgcaaccctctcat

SEQ ID NO: 1874054 - DNA, 25 bp, Homo sapien
ggctattgggttacacactccaggg

SEQ ID NO: 1874055 - DNA, 25 bp, Homo sapien
tattctgagttagagcctatggtgg

SEQ ID NO: 1874056 - DNA, 25 bp, Homo sapien
catgaccttgcactaccaaagggaa

SEQ ID NO: 1874057 - DNA, 25 bp, Homo sapien
aatgcctcaatacagggttacaggg

SEQ ID NO: 1874058 - DNA, 25 bp, Homo sapien
ggtgctggctaaatgaatgcctcaa

SEQ ID NO: 1874059 - DNA, 25 bp, Homo sapien
tagaagaccactgtctgatgggtgc

SEQ ID NO: 1874060 - DNA, 25 bp, Homo sapien
taggccctgaactcatgaatgattc

SEQ ID NO: 1874061 - DNA, 25 bp, Homo sapien
ccccggatcgtggttccaatcacag

SEQ ID NO: 1874062 - DNA, 25 bp, Homo sapien
tccctctccccggatcgtggttcca

SEQ ID NO: 1874063 - DNA, 25 bp, Homo sapien
cctctccccggatcgtggttccaat

SEQ ID NO: 1874064 - DNA, 25 bp, Homo sapien
tctccccggatcgtggttccaatca

SEQ ID NO: 1874065 - DNA, 25 bp, Homo sapien
ctttacctccagaggttggaaacat

SEQ ID NO: 1874066 - DNA, 25 bp, Homo sapien
ttcataaggattaagccctctctcc

SEQ ID NO: 1874067 - DNA, 25 bp, Homo sapien
cagaacttcttcataaggattaagc

SEQ ID NO: 1874068 - DNA, 25 bp, Homo sapien
ggctgggacctggtttgggccagaa

SEQ ID NO: 1874069 - DNA, 25 bp, Homo sapien
tgataaaaggtgtagcagtgtcatg

SEQ ID NO: 1874070 - DNA, 25 bp, Homo sapien
taaaaggtgtagcagtgtcatgtaa

SEQ ID NO: 1874071 - DNA, 25 bp, Homo sapien
gtgtagcagtgtcatgtaaagattc

SEQ ID NO: 1874072 - DNA, 25 bp, Homo sapien
caatgataaaaggtgtagcagtgtc

SEQ ID NO: 1874073 - DNA, 25 bp, Homo sapien
tctctttctccgtactattgagagc

SEQ ID NO: 1874074 - DNA, 25 bp, Homo sapien
tattgagagctttattatgccagag

SEQ ID NO: 1874075 - DNA, 25 bp, Homo sapien
aactctagtcaatgttactaccaca

SEQ ID NO: 1874076 - DNA, 25 bp, Homo sapien
gatctgtcctgagctaaatgaggac

SEQ ID NO: 1874077 - DNA, 25 bp, Homo sapien
ctgcaaaacctgcaggtatgtaatt

SEQ ID NO: 1874078 - DNA, 25 bp, Homo sapien
caaaacctgcaggtatgtaattggt

SEQ ID NO: 1874079 - DNA, 25 bp, Homo sapien
cctgcaggtatgtaattggttgttt

SEQ ID NO: 1874080 - DNA, 25 bp, Homo sapien
gcaggtatgtaattggttgttttct

SEQ ID NO: 1874081 - DNA, 25 bp, Homo sapien
gagttccggatgtttagcgttacca

SEQ ID NO: 1874082 - DNA, 25 bp, Homo sapien
ttaccatggatcctggaggtgcccg

SEQ ID NO: 1874083 - DNA, 25 bp, Homo sapien
gccttccgctcgtgggagttccgga

SEQ ID NO: 1874084 - DNA, 25 bp, Homo sapien
cgaacactgcttgtcgcctgggcaa

SEQ ID NO: 1874085 - DNA, 25 bp, Homo sapien
tatgcttgcatccaaccccattctt

SEQ ID NO: 1874086 - DNA, 25 bp, Homo sapien
cttctgaatcctgtacccggtagta

SEQ ID NO: 1874087 - DNA, 25 bp, Homo sapien
tgtatatcgattccgctcctcttct

SEQ ID NO: 1874088 - DNA, 25 bp, Homo sapien
cctgttttgtatgtatatcgattcc

SEQ ID NO: 1874089 - DNA, 25 bp, Homo sapien
gagctacaggaacggctatgcaatt

SEQ ID NO: 1874090 - DNA, 25 bp, Homo sapien
aatgttggtaagcttcttgatgtaa

SEQ ID NO: 1874091 - DNA, 25 bp, Homo sapien
tgatgcttataagcaaagattcaag

SEQ ID NO: 1874092 - DNA, 25 bp, Homo sapien
ttccacagaagtcagacgctgagct

SEQ ID NO: 1874093 - DNA, 25 bp, Homo sapien
tgaccatgtagcagaatcactggcg

SEQ ID NO: 1874094 - DNA, 25 bp, Homo sapien
agttacgttattccaaccctcatca

SEQ ID NO: 1874095 - DNA, 25 bp, Homo sapien
taaagtgaagtagccctagccctga

SEQ ID NO: 1874096 - DNA, 25 bp, Homo sapien
tctgagaagtactgatcagttttga

SEQ ID NO: 1874097 - DNA, 25 bp, Homo sapien
aacagatagtcctccctaatgtggg

SEQ ID NO: 1874098 - DNA, 25 bp, Homo sapien
gaaggtatttttcgatgagataaac

SEQ ID NO: 1874099 - DNA, 25 bp, Homo sapien
ctcatgagctccagaaattctccca

SEQ ID NO: 1874100 - DNA, 25 bp, Homo sapien
gctaggttgcctgaacttgtctcaa

SEQ ID NO: 1874101 - DNA, 25 bp, Homo sapien
gccactcgggaggcttaaatgggag

SEQ ID NO: 1874102 - DNA, 25 bp, Homo sapien
catatatgtgcacacatctctacta

SEQ ID NO: 1874103 - DNA, 25 bp, Homo sapien
ttcatacacacacacgcttatatgt

SEQ ID NO: 1874104 - DNA, 25 bp, Homo sapien
tacacacacacgcttatatgtatac

SEQ ID NO: 1874105 - DNA, 25 bp, Homo sapien
taacactgaattaggagctcgaaca

SEQ ID NO: 1874106 - DNA, 25 bp, Homo sapien
tccacgtgaacaagtagctctagag

SEQ ID NO: 1874107 - DNA, 25 bp, Homo sapien
gagttattgcacaacccggaagagt

SEQ ID NO: 1874108 - DNA, 25 bp, Homo sapien
tgacttaagccccatcgtgagaatg

SEQ ID NO: 1874109 - DNA, 25 bp, Homo sapien
gctggccacggagtacaagttgaaa

SEQ ID NO: 1874110 - DNA, 25 bp, Homo sapien
tcagcgcccggatggtaaaaataac

SEQ ID NO: 1874111 - DNA, 25 bp, Homo sapien
aaccatttcggtctggtggcccaga

SEQ ID NO: 1874112 - DNA, 25 bp, Homo sapien
ttaatagtgcagctatcagcgcccg

SEQ ID NO: 1874113 - DNA, 25 bp, Homo sapien
caaatgtaagttagttagccagggc

SEQ ID NO: 1874114 - DNA, 25 bp, Homo sapien
ccagggctgtcgagaggccacagtt

SEQ ID NO: 1874115 - DNA, 25 bp, Homo sapien
tccccacaaatgtaagttagttagc

SEQ ID NO: 1874116 - DNA, 25 bp, Homo sapien
aagttagttagccagggctgtcgag

SEQ ID NO: 1874117 - DNA, 25 bp, Homo sapien
gtaatcaaaagcaaccacgggtagc

SEQ ID NO: 1874118 - DNA, 25 bp, Homo sapien
tctggcacgcaagtgtcctgggaca

SEQ ID NO: 1874119 - DNA, 25 bp, Homo sapien
taagggatcccatatcaggtctgct

SEQ ID NO: 1874120 - DNA, 25 bp, Homo sapien
tctgctgtgttgaaaccaaactgcc

SEQ ID NO: 1874121 - DNA, 25 bp, Homo sapien
aagaacactcaacaagggcggccag

SEQ ID NO: 1874122 - DNA, 25 bp, Homo sapien
gctgaagcccttgagacttagtgtt

SEQ ID NO: 1874123 - DNA, 25 bp, Homo sapien
gctgtagttgtgctcaaaaaacgac

SEQ ID NO: 1874124 - DNA, 25 bp, Homo sapien
gatgaacagcggtccaagtgaccct

SEQ ID NO: 1874125 - DNA, 25 bp, Homo sapien
tcaggcaggtatatgaactgctgtt

SEQ ID NO: 1874126 - DNA, 25 bp, Homo sapien
gaatggctgaaaaagcaatggcgac

SEQ ID NO: 1874127 - DNA, 25 bp, Homo sapien
gaggaccagcctatctcaggcaggt

SEQ ID NO: 1874128 - DNA, 25 bp, Homo sapien
tgaagtcaaggtagtaagtttggcc

SEQ ID NO: 1874129 - DNA, 25 bp, Homo sapien
cagccactggtaggagctcgagtca

SEQ ID NO: 1874130 - DNA, 25 bp, Homo sapien
gaggtgcctgctgcgcagtttgctc

SEQ ID NO: 1874131 - DNA, 25 bp, Homo sapien
gattgagttgtcacgtcccaaagcc

SEQ ID NO: 1874132 - DNA, 25 bp, Homo sapien
tctaagcagtgggaagacgtgtccc

SEQ ID NO: 1874133 - DNA, 25 bp, Homo sapien
tggcatttacaacgagcagtggctg

SEQ ID NO: 1874134 - DNA, 25 bp, Homo sapien
ctcaagatggtacatgcagaactgg

SEQ ID NO: 1874135 - DNA, 25 bp, Homo sapien
cagcaccaaggagattatgatccga

SEQ ID NO: 1874136 - DNA, 25 bp, Homo sapien
tggaatcatatatctcgtcagttaa

SEQ ID NO: 1874137 - DNA, 25 bp, Homo sapien
agccccaggcttctgaccggcaggc

SEQ ID NO: 1874138 - DNA, 25 bp, Homo sapien
gccccaggcttctgaccggcaggcc

SEQ ID NO: 1874139 - DNA, 25 bp, Homo sapien
cagccccaggcttctgaccggcagg

SEQ ID NO: 1874140 - DNA, 25 bp, Homo sapien
agccatgggcgcctggcgttccaga

SEQ ID NO: 1874141 - DNA, 25 bp, Homo sapien
cctggcgttccagaaaagccagcac

SEQ ID NO: 1874142 - DNA, 25 bp, Homo sapien
tgggcgcctggcgttccagaaaagc

SEQ ID NO: 1874143 - DNA, 25 bp, Homo sapien
aaggacaggactgcaatcttagctc

SEQ ID NO: 1874144 - DNA, 25 bp, Homo sapien
gctttattgagaatggtttgtggaa

SEQ ID NO: 1874145 - DNA, 25 bp, Homo sapien
acaggtttcggctgtttgagacgga

SEQ ID NO: 1874146 - DNA, 25 bp, Homo sapien
ccccattgcaagacaggtttcggct

SEQ ID NO: 1874147 - DNA, 25 bp, Homo sapien
ttgagacggagcatcacaggcagga

SEQ ID NO: 1874148 - DNA, 25 bp, Homo sapien
tccgtggggaggttccgttctctgc

SEQ ID NO: 1874149 - DNA, 25 bp, Homo sapien
ttagggagacttgagtttcttagtc

SEQ ID NO: 1874150 - DNA, 25 bp, Homo sapien
ggagacttgagtttcttagtccgtg

SEQ ID NO: 1874151 - DNA, 25 bp, Homo sapien
agacttgagtttcttagtccgtggg

SEQ ID NO: 1874152 - DNA, 25 bp, Homo sapien
gagacaagcatacatggtgtttctg

SEQ ID NO: 1874153 - DNA, 25 bp, Homo sapien
acaagcatacatggtgtttctgctg

SEQ ID NO: 1874154 - DNA, 25 bp, Homo sapien
gagagacaagcatacatggtgtttc

SEQ ID NO: 1874155 - DNA, 25 bp, Homo sapien
ggagagagacaagcatacatggtgt

SEQ ID NO: 1874156 - DNA, 25 bp, Homo sapien
tgcgcgcgtgtctggttcaaacaca

SEQ ID NO: 1874157 - DNA, 25 bp, Homo sapien
acacacataagcctttgccaagcag

SEQ ID NO: 1874158 - DNA, 25 bp, Homo sapien
cagctgcgcgcgtgtctggttcaaa

SEQ ID NO: 1874159 - DNA, 25 bp, Homo sapien
tgtctggttcaaacacacataagcc

SEQ ID NO: 1874160 - DNA, 25 bp, Homo sapien
tggctgggactctccgctttgcact

SEQ ID NO: 1874161 - DNA, 25 bp, Homo sapien
gtgtggctgggactctccgctttgc

SEQ ID NO: 1874162 - DNA, 25 bp, Homo sapien
gctcattccagtattcccgccagtg

SEQ ID NO: 1874163 - DNA, 25 bp, Homo sapien
gcctggctggtagtctgggtgtggc

SEQ ID NO: 1874164 - DNA, 25 bp, Homo sapien
gagtggatgaagcgccacatgagcc

SEQ ID NO: 1874165 - DNA, 25 bp, Homo sapien
tgaagcgccacatgagccaggcctg

SEQ ID NO: 1874166 - DNA, 25 bp, Homo sapien
ctgggagtggatgaagcgccacatg

SEQ ID NO: 1874167 - DNA, 25 bp, Homo sapien
tggatgaagcgccacatgagccagg

SEQ ID NO: 1874168 - DNA, 25 bp, Homo sapien
ttttccatgcgagccagtccaaagc

SEQ ID NO: 1874169 - DNA, 25 bp, Homo sapien
tgaggatgaagaggcgggtaacccc

SEQ ID NO: 1874170 - DNA, 25 bp, Homo sapien
agttccctttctcgggatcaaatgc

SEQ ID NO: 1874171 - DNA, 25 bp, Homo sapien
aaatgcctggttttccatgcgagcc

SEQ ID NO: 1874172 - DNA, 25 bp, Homo sapien
agccgtgtggaagaggaactcagtt

SEQ ID NO: 1874173 - DNA, 25 bp, Homo sapien
tagaagagtctagccgtgtggaaga

SEQ ID NO: 1874174 - DNA, 25 bp, Homo sapien
gcaaagtagaagagtctagccgtgt

SEQ ID NO: 1874175 - DNA, 25 bp, Homo sapien
tgtggaagaggaactcagttgagta

SEQ ID NO: 1874176 - DNA, 25 bp, Homo sapien
agcagcagcaagatcaggcccaggc

SEQ ID NO: 1874177 - DNA, 25 bp, Homo sapien
cagcagcaagatcaggcccaggcgg

SEQ ID NO: 1874178 - DNA, 25 bp, Homo sapien
gcagcaagatcaggcccaggcggct

SEQ ID NO: 1874179 - DNA, 25 bp, Homo sapien
gcagcagcaagatcaggcccaggcg

SEQ ID NO: 1874180 - DNA, 25 bp, Homo sapien
gggaagactagacttacattccctc

SEQ ID NO: 1874181 - DNA, 25 bp, Homo sapien
tggggaagactagacttacattccc

SEQ ID NO: 1874182 - DNA, 25 bp, Homo sapien
aagactagacttacattccctccaa

SEQ ID NO: 1874183 - DNA, 25 bp, Homo sapien
ggtggggaagactagacttacattc

SEQ ID NO: 1874184 - DNA, 25 bp, Homo sapien
tgcatcttggctcaggctgtcccct

SEQ ID NO: 1874185 - DNA, 25 bp, Homo sapien
gccattgcatcttggctcaggctgt

SEQ ID NO: 1874186 - DNA, 25 bp, Homo sapien
ttagctctcacacctttaagacatt

SEQ ID NO: 1874187 - DNA, 25 bp, Homo sapien
gaagccattgcatcttggctcaggc

SEQ ID NO: 1874188 - DNA, 25 bp, Homo sapien
tggccgttcagctgtcctgtctcag

SEQ ID NO: 1874189 - DNA, 25 bp, Homo sapien
aaacctcgcataggcccttcacagt

SEQ ID NO: 1874190 - DNA, 25 bp, Homo sapien
tgtctcagtcagatgcccttgcctg

SEQ ID NO: 1874191 - DNA, 25 bp, Homo sapien
gcataggcccttcacagtacttagc

SEQ ID NO: 1874192 - DNA, 25 bp, Homo sapien
tcagaacacatttgctgagctctga

SEQ ID NO: 1874193 - DNA, 25 bp, Homo sapien
ataaaaggtactcagaacacatttg

SEQ ID NO: 1874194 - DNA, 25 bp, Homo sapien
tgagtataggaatatgaaatgttcc

SEQ ID NO: 1874195 - DNA, 25 bp, Homo sapien
gctctgagtataggaatatgaaatg

SEQ ID NO: 1874196 - DNA, 25 bp, Homo sapien
tcaaagacccatccgggaactgacg

SEQ ID NO: 1874197 - DNA, 25 bp, Homo sapien
gacccgttatgcatgtgacacatga

SEQ ID NO: 1874198 - DNA, 25 bp, Homo sapien
cacagctccgaggtacatgcagaag

SEQ ID NO: 1874199 - DNA, 25 bp, Homo sapien
tcctcgccactgctacggtgacagt

SEQ ID NO: 1874200 - DNA, 25 bp, Homo sapien
gctttgggaggccttcaagctgcaa

SEQ ID NO: 1874201 - DNA, 25 bp, Homo sapien
ggaattccagggctacgagctctag

SEQ ID NO: 1874202 - DNA, 25 bp, Homo sapien
tcaaaggccgacatccactggaagt

SEQ ID NO: 1874203 - DNA, 25 bp, Homo sapien
tctgcctctagaacaaccaagagag

SEQ ID NO: 1874204 - DNA, 25 bp, Homo sapien
tatatgagtgtgtggacagatgcat

SEQ ID NO: 1874205 - DNA, 25 bp, Homo sapien
tgtggacagatgcatggacataaaa

SEQ ID NO: 1874206 - DNA, 25 bp, Homo sapien
gatgcatggacataaaagggcaagg

SEQ ID NO: 1874207 - DNA, 25 bp, Homo sapien
taattatatgagtgtgtggacagat

SEQ ID NO: 1874208 - DNA, 25 bp, Homo sapien
tttaagaggtatgctccagctatat

SEQ ID NO: 1874209 - DNA, 25 bp, Homo sapien
caggtacaggcaaatatactggagc

SEQ ID NO: 1874210 - DNA, 25 bp, Homo sapien
caggcaaatatactggagctggcgg

SEQ ID NO: 1874211 - DNA, 25 bp, Homo sapien
tccagctatatgcaccaggtacagg

SEQ ID NO: 1874212 - DNA, 25 bp, Homo sapien
ttgagaaataagagacagggactgg

SEQ ID NO: 1874213 - DNA, 25 bp, Homo sapien
cagcagccttgggtctagtgtcaga

SEQ ID NO: 1874214 - DNA, 25 bp, Homo sapien
tctgggctgctttaacacacagtcc

SEQ ID NO: 1874215 - DNA, 25 bp, Homo sapien
gctaattccctaactgaagattcag

SEQ ID NO: 1874216 - DNA, 25 bp, Homo sapien
cgtaccttctggaagtatagctcag

SEQ ID NO: 1874217 - DNA, 25 bp, Homo sapien
tatagctcaggaagtgcgtgcagcc

SEQ ID NO: 1874218 - DNA, 25 bp, Homo sapien
agtgcgtgcagccagtaggccagct

SEQ ID NO: 1874219 - DNA, 25 bp, Homo sapien
taggccagctggcataggtagaaaa

SEQ ID NO: 1874220 - DNA, 25 bp, Homo sapien
aagggggcaagtcacacgggcagga

SEQ ID NO: 1874221 - DNA, 25 bp, Homo sapien
gggcaagtcacacgggcaggataga

SEQ ID NO: 1874222 - DNA, 25 bp, Homo sapien
aagtcacacgggcaggatagagaaa

SEQ ID NO: 1874223 - DNA, 25 bp, Homo sapien
gcaagtcacacgggcaggatagaga

SEQ ID NO: 1874224 - DNA, 25 bp, Homo sapien
aagatctcgggaaaggcaaagggtg

SEQ ID NO: 1874225 - DNA, 25 bp, Homo sapien
caaagatctcgggaaaggcaaaggg

SEQ ID NO: 1874226 - DNA, 25 bp, Homo sapien
gatctcgggaaaggcaaagggtggc

SEQ ID NO: 1874227 - DNA, 25 bp, Homo sapien
aacaaagatctcgggaaaggcaaag

SEQ ID NO: 1874228 - DNA, 25 bp, Homo sapien
cacatgcgggtagtcttcccagagg

SEQ ID NO: 1874229 - DNA, 25 bp, Homo sapien
gtgcacatgcgggtagtcttcccag

SEQ ID NO: 1874230 - DNA, 25 bp, Homo sapien
gggaggtgcacatgcgggtagtctt

SEQ ID NO: 1874231 - DNA, 25 bp, Homo sapien
catgcgggtagtcttcccagaggct

SEQ ID NO: 1874232 - DNA, 25 bp, Homo sapien
gaccatttagagatgtggacgtgag

SEQ ID NO: 1874233 - DNA, 25 bp, Homo sapien
catttagagatgtggacgtgagacc

SEQ ID NO: 1874234 - DNA, 25 bp, Homo sapien
gagaccatttagagatgtggacgtg

SEQ ID NO: 1874235 - DNA, 25 bp, Homo sapien
ccatttagagatgtggacgtgagac

SEQ ID NO: 1874236 - DNA, 25 bp, Homo sapien
tgagaacagccttttccagacctct

SEQ ID NO: 1874237 - DNA, 25 bp, Homo sapien
aggcagctgtctgaaggaggactga

SEQ ID NO: 1874238 - DNA, 25 bp, Homo sapien
ctctgagctcaggcacgcaaagcac

SEQ ID NO: 1874239 - DNA, 25 bp, Homo sapien
gaggctggggcaccctctgagctca

SEQ ID NO: 1874240 - DNA, 25 bp, Homo sapien
tatttaggcagagacttggatggca

SEQ ID NO: 1874241 - DNA, 25 bp, Homo sapien
cagcaagattagcagggcccagatc

SEQ ID NO: 1874242 - DNA, 25 bp, Homo sapien
aatacacaatcaagagaagcaccag

SEQ ID NO: 1874243 - DNA, 25 bp, Homo sapien
tgctagcaggcagctcagaatctag

SEQ ID NO: 1874244 - DNA, 25 bp, Homo sapien
gcacagttccaacggaggagggcaa

SEQ ID NO: 1874245 - DNA, 25 bp, Homo sapien
taaaaaactgttatgtgcctcccca

SEQ ID NO: 1874246 - DNA, 25 bp, Homo sapien
gacctgccgatgaaatgactgtgga

SEQ ID NO: 1874247 - DNA, 25 bp, Homo sapien
tctcccctggtcaaaggtcactaga

SEQ ID NO: 1874248 - DNA, 25 bp, Homo sapien
ctttggtatcttgaggctgttctgc

SEQ ID NO: 1874249 - DNA, 25 bp, Homo sapien
aaatctggtcgccacgtgtcacagc

SEQ ID NO: 1874250 - DNA, 25 bp, Homo sapien
cctggaaggcgtgttaagcaacttg

SEQ ID NO: 1874251 - DNA, 25 bp, Homo sapien
gaggcaatcctcctgaacggcgtct

SEQ ID NO: 1874252 - DNA, 25 bp, Homo sapien
ttgccccttggtttgagctctcccg

SEQ ID NO: 1874253 - DNA, 25 bp, Homo sapien
taccatgaggatgcaaacatagctt

SEQ ID NO: 1874254 - DNA, 25 bp, Homo sapien
taacatgggtatcagaatgaacatc

SEQ ID NO: 1874255 - DNA, 25 bp, Homo sapien
ggacagtgtttgtagaagagccttg

SEQ ID NO: 1874256 - DNA, 25 bp, Homo sapien
agcaccaaatcaccgaggtgaaatg

SEQ ID NO: 1874257 - DNA, 25 bp, Homo sapien
tcaccaccacgtagaagcaccaaat

SEQ ID NO: 1874258 - DNA, 25 bp, Homo sapien
tggagagatgaagccgtttgctgat

SEQ ID NO: 1874259 - DNA, 25 bp, Homo sapien
gaccagctgtccagattcattgaac

SEQ ID NO: 1874260 - DNA, 25 bp, Homo sapien
ccttagggccatagtggtagtgcac

SEQ ID NO: 1874261 - DNA, 25 bp, Homo sapien
tgtgaccaggtccttagggccatag

SEQ ID NO: 1874262 - DNA, 25 bp, Homo sapien
tagtggtagtgcacggtctcactgt

SEQ ID NO: 1874263 - DNA, 25 bp, Homo sapien
gatgtagaacaagattgtgaccagg

SEQ ID NO: 1874264 - DNA, 25 bp, Homo sapien
ctgtggaggtaataaaagtcccatc

SEQ ID NO: 1874265 - DNA, 25 bp, Homo sapien
gaggtaataaaagtcccatcagcat

SEQ ID NO: 1874266 - DNA, 25 bp, Homo sapien
aggtaataaaagtcccatcagcatc

SEQ ID NO: 1874267 - DNA, 25 bp, Homo sapien
tggaggtaataaaagtcccatcagc

SEQ ID NO: 1874268 - DNA, 25 bp, Homo sapien
atcataaggaacagcttcatacaca

SEQ ID NO: 1874269 - DNA, 25 bp, Homo sapien
taatcaaaagctatattctgattcg

SEQ ID NO: 1874270 - DNA, 25 bp, Homo sapien
tctgattcgcacaaattatctccat

SEQ ID NO: 1874271 - DNA, 25 bp, Homo sapien
tcttactcctacaatcataaggaac

SEQ ID NO: 1874272 - DNA, 25 bp, Homo sapien
tcagctgtgctactgacgccagggc

SEQ ID NO: 1874273 - DNA, 25 bp, Homo sapien
catagaggtgagcagtcgctgtgcc

SEQ ID NO: 1874274 - DNA, 25 bp, Homo sapien
tactcttcagagtaatcccgggatt

SEQ ID NO: 1874275 - DNA, 25 bp, Homo sapien
gcgagaatgggcatgaaaagacctg

SEQ ID NO: 1874276 - DNA, 25 bp, Homo sapien
caatgttagatgctttggagaaagg

SEQ ID NO: 1874277 - DNA, 25 bp, Homo sapien
aagcaccacgtggtgcagcaggtcc

SEQ ID NO: 1874278 - DNA, 25 bp, Homo sapien
tcaatggtcatgatgcctcacatcc

SEQ ID NO: 1874279 - DNA, 25 bp, Homo sapien
tgtctccaacagaactcaatgttag

SEQ ID NO: 1874280 - DNA, 25 bp, Homo sapien
taggcacgctaatgttatactgagg

SEQ ID NO: 1874281 - DNA, 25 bp, Homo sapien
ctgctgtaggcacgctaatgttata

SEQ ID NO: 1874282 - DNA, 25 bp, Homo sapien
gctgtaggcacgctaatgttatact

SEQ ID NO: 1874283 - DNA, 25 bp, Homo sapien
cacgctaatgttatactgaggtaaa

SEQ ID NO: 1874284 - DNA, 25 bp, Homo sapien
cttcctgtccaactgcctgtatttt

SEQ ID NO: 1874285 - DNA, 25 bp, Homo sapien
gcactctgtgtcatgctctgctgta

SEQ ID NO: 1874286 - DNA, 25 bp, Homo sapien
catgatctctgcttgccggatgcac

SEQ ID NO: 1874287 - DNA, 25 bp, Homo sapien
tacccttgttcatagttctcatcag

SEQ ID NO: 1874288 - DNA, 25 bp, Homo sapien
gctctgctgtatttatcatttccat

SEQ ID NO: 1874289 - DNA, 25 bp, Homo sapien
gatgaaaccactaacaagtccctct

SEQ ID NO: 1874290 - DNA, 25 bp, Homo sapien
ggtcctttagcaccccaagtcttca

SEQ ID NO: 1874291 - DNA, 25 bp, Homo sapien
agtcttcactccatgaccctctccc

SEQ ID NO: 1874292 - DNA, 25 bp, Homo sapien
ctctcccgacctcagactagggatg

SEQ ID NO: 1874293 - DNA, 25 bp, Homo sapien
taatgacttctgtcccacggacacc

SEQ ID NO: 1874294 - DNA, 25 bp, Homo sapien
ggcagacagggtacagaaggcctta

SEQ ID NO: 1874295 - DNA, 25 bp, Homo sapien
atatgtcccacgactgacagtgagg

SEQ ID NO: 1874296 - DNA, 25 bp, Homo sapien
acagagacacatatgtcccacgact

SEQ ID NO: 1874297 - DNA, 25 bp, Homo sapien
aggctttccccagattgattttgca

SEQ ID NO: 1874298 - DNA, 25 bp, Homo sapien
gaagccaaagggtcttcactaaggc

SEQ ID NO: 1874299 - DNA, 25 bp, Homo sapien
agccaaagggtcttcactaaggctt

SEQ ID NO: 1874300 - DNA, 25 bp, Homo sapien
tttggaagccaaagggtcttcacta

SEQ ID NO: 1874301 - DNA, 25 bp, Homo sapien
tggagtgtttatgtcccaagcccac

SEQ ID NO: 1874302 - DNA, 25 bp, Homo sapien
ccctccactgctcgataaaaggcag

SEQ ID NO: 1874303 - DNA, 25 bp, Homo sapien
cagatacagctgaaacaaagatgct

SEQ ID NO: 1874304 - DNA, 25 bp, Homo sapien
gatggacgtgggtttgcagcccctc

SEQ ID NO: 1874305 - DNA, 25 bp, Homo sapien
aaatctccgttttgaagggccagag

SEQ ID NO: 1874306 - DNA, 25 bp, Homo sapien
caaacacgcacacaacagattctct

SEQ ID NO: 1874307 - DNA, 25 bp, Homo sapien
tctctacaagcctgtgatcacgatg

SEQ ID NO: 1874308 - DNA, 25 bp, Homo sapien
tttagcaacgcctagagattctggt

SEQ ID NO: 1874309 - DNA, 25 bp, Homo sapien
cacagggggcagagttatgacagta

SEQ ID NO: 1874310 - DNA, 25 bp, Homo sapien
ctgctgcaaccatttcaaattattc

SEQ ID NO: 1874311 - DNA, 25 bp, Homo sapien
caaattattctccaccaccttgaaa

SEQ ID NO: 1874312 - DNA, 25 bp, Homo sapien
attctccaccaccttgaaagtttca

SEQ ID NO: 1874313 - DNA, 25 bp, Homo sapien
aattattctccaccaccttgaaagt

SEQ ID NO: 1874314 - DNA, 25 bp, Homo sapien
caagacccctgctgcttgtgcagtt

SEQ ID NO: 1874315 - DNA, 25 bp, Homo sapien
caatccaacgggtatttcttcagga

SEQ ID NO: 1874316 - DNA, 25 bp, Homo sapien
tcggacaccttgtcttgatacacac

SEQ ID NO: 1874317 - DNA, 25 bp, Homo sapien
gcagcttttgttaagaccacgccct

SEQ ID NO: 1874318 - DNA, 25 bp, Homo sapien
gacgctcaataaacaccccatgaat

SEQ ID NO: 1874319 - DNA, 25 bp, Homo sapien
cagctatggagaagacgctcaataa

SEQ ID NO: 1874320 - DNA, 25 bp, Homo sapien
tggagaagacgctcaataaacaccc

SEQ ID NO: 1874321 - DNA, 25 bp, Homo sapien
taaacaccccatgaattaatgtact

SEQ ID NO: 1874322 - DNA, 25 bp, Homo sapien
catgggccaggatccatattcacac

SEQ ID NO: 1874323 - DNA, 25 bp, Homo sapien
ccaggatccatattcacactctaca

SEQ ID NO: 1874324 - DNA, 25 bp, Homo sapien
ggccaggatccatattcacactcta

SEQ ID NO: 1874325 - DNA, 25 bp, Homo sapien
ggccatgggccaggatccatattca

SEQ ID NO: 1874326 - DNA, 25 bp, Homo sapien
gccttggtaagaagacccctagata

SEQ ID NO: 1874327 - DNA, 25 bp, Homo sapien
gagatgaacagcacacaatggatcc

SEQ ID NO: 1874328 - DNA, 25 bp, Homo sapien
tagggagacccatgttcagctctgt

SEQ ID NO: 1874329 - DNA, 25 bp, Homo sapien
aacaaaagatcattagggcgagagg

SEQ ID NO: 1874330 - DNA, 25 bp, Homo sapien
aggaaagccgtcacgaggcaacgtg

SEQ ID NO: 1874331 - DNA, 25 bp, Homo sapien
ggtgaggcgagtgaagcatttcaca

SEQ ID NO: 1874332 - DNA, 25 bp, Homo sapien
gaggcgagtgaagcatttcacagat

SEQ ID NO: 1874333 - DNA, 25 bp, Homo sapien
aaatgaggaaagccgtcacgaggca

SEQ ID NO: 1874334 - DNA, 25 bp, Homo sapien
taaatagtggcagccctaagaccct

SEQ ID NO: 1874335 - DNA, 25 bp, Homo sapien
ttagatggctagcagtggagaactt

SEQ ID NO: 1874336 - DNA, 25 bp, Homo sapien
acaggtgttctccatggagcagctg

SEQ ID NO: 1874337 - DNA, 25 bp, Homo sapien
ccagtacccacggactgtgttctaa

SEQ ID NO: 1874338 - DNA, 25 bp, Homo sapien
caagatataccgcaacaaacccatg

SEQ ID NO: 1874339 - DNA, 25 bp, Homo sapien
tctgagacaagatataccgcaacaa

SEQ ID NO: 1874340 - DNA, 25 bp, Homo sapien
tataccgcaacaaacccatgccaag

SEQ ID NO: 1874341 - DNA, 25 bp, Homo sapien
gagacaagatataccgcaacaaacc

SEQ ID NO: 1874342 - DNA, 25 bp, Homo sapien
gctgcaggatacgatgagtgcccaa

SEQ ID NO: 1874343 - DNA, 25 bp, Homo sapien
cacgcgtcaagccatggtggcagcg

SEQ ID NO: 1874344 - DNA, 25 bp, Homo sapien
tgcagataacgtacacggcagccag

SEQ ID NO: 1874345 - DNA, 25 bp, Homo sapien
caatgactgcgggtctgggagtctc

SEQ ID NO: 1874346 - DNA, 25 bp, Homo sapien
tcctggctgaagagcgggtaacttt

SEQ ID NO: 1874347 - DNA, 25 bp, Homo sapien
ttgtggatgacgaactcctggctga

SEQ ID NO: 1874348 - DNA, 25 bp, Homo sapien
ccgatgtccgcatggttgtggatga

SEQ ID NO: 1874349 - DNA, 25 bp, Homo sapien
gaacataagcccgatgaggacgcag

SEQ ID NO: 1874350 - DNA, 25 bp, Homo sapien
gcgcagcggccggcggggcccgcac

SEQ ID NO: 1874351 - DNA, 25 bp, Homo sapien
ggcagcgggcgcgcagcggccggcg

SEQ ID NO: 1874352 - DNA, 25 bp, Homo sapien
cgcagcggccggcggggcccgcacc

SEQ ID NO: 1874353 - DNA, 25 bp, Homo sapien
agcgggcgcgcagcggccggcgggg

SEQ ID NO: 1874354 - DNA, 25 bp, Homo sapien
gaaccgcagcgcaaacttctccagc

SEQ ID NO: 1874355 - DNA, 25 bp, Homo sapien
ttctccagcaccggcccggtccgcc

SEQ ID NO: 1874356 - DNA, 25 bp, Homo sapien
ctgcgctcacgaaccgcagcgcaaa

SEQ ID NO: 1874357 - DNA, 25 bp, Homo sapien
tcacgaaccgcagcgcaaacttctc

SEQ ID NO: 1874358 - DNA, 25 bp, Homo sapien
ccattgctaacttgaagccattaga

SEQ ID NO: 1874359 - DNA, 25 bp, Homo sapien
atacagctctaaatgcaatgtacta

SEQ ID NO: 1874360 - DNA, 25 bp, Homo sapien
caatgtactatcctggacttagccc

SEQ ID NO: 1874361 - DNA, 25 bp, Homo sapien
caggcaatgagggattgtgaatctg

SEQ ID NO: 1874362 - DNA, 25 bp, Homo sapien
tgcttcaggactcccctagaattgc

SEQ ID NO: 1874363 - DNA, 25 bp, Homo sapien
ttgtcagtatgaagaaatcaggacc

SEQ ID NO: 1874364 - DNA, 25 bp, Homo sapien
catcttgggattaggtcatcattac

SEQ ID NO: 1874365 - DNA, 25 bp, Homo sapien
gattataccatatatggactcaggc

SEQ ID NO: 1874366 - DNA, 25 bp, Homo sapien
ttgatcccagctcgcctgattaggg

SEQ ID NO: 1874367 - DNA, 25 bp, Homo sapien
tcagacagacacgactgttttggct

SEQ ID NO: 1874368 - DNA, 25 bp, Homo sapien
gctcaagttcttgatcccagctcgc

SEQ ID NO: 1874369 - DNA, 25 bp, Homo sapien
cctccaggcgctcaagttcttgatc

SEQ ID NO: 1874370 - DNA, 25 bp, Homo sapien
cctctggagaggtagccctttggtt

SEQ ID NO: 1874371 - DNA, 25 bp, Homo sapien
tcactgaagaagaaggctaaacgac

SEQ ID NO: 1874372 - DNA, 25 bp, Homo sapien
tgatggatggaaggacacatactac

SEQ ID NO: 1874373 - DNA, 25 bp, Homo sapien
tggttaatggcaacccaatagggta

SEQ ID NO: 1874374 - DNA, 25 bp, Homo sapien
atgatcctgagacttgtcttgttgc

SEQ ID NO: 1874375 - DNA, 25 bp, Homo sapien
tgatcctgagacttgtcttgttgct

SEQ ID NO: 1874376 - DNA, 25 bp, Homo sapien
cattttaattgtattgctgccagtg

SEQ ID NO: 1874377 - DNA, 25 bp, Homo sapien
gaaaattccaaatactcatgtctca

SEQ ID NO: 1874378 - DNA, 25 bp, Homo sapien
tcctgctgtaatgggcagagcatat

SEQ ID NO: 1874379 - DNA, 25 bp, Homo sapien
taagcttaaactacaacttgtcaca

SEQ ID NO: 1874380 - DNA, 25 bp, Homo sapien
tcttcacagtctcaatggattcttc

SEQ ID NO: 1874381 - DNA, 25 bp, Homo sapien
tcagctactgtagtgctcatgtttt

SEQ ID NO: 1874382 - DNA, 25 bp, Homo sapien
tgtggctgattctggccttgaattt

SEQ ID NO: 1874383 - DNA, 25 bp, Homo sapien
ccaggttggagaaatttattaattg

SEQ ID NO: 1874384 - DNA, 25 bp, Homo sapien
gctcagccgattgcccacaagaaaa

SEQ ID NO: 1874385 - DNA, 25 bp, Homo sapien
cactcttcagtcattaagatgactt

SEQ ID NO: 1874386 - DNA, 25 bp, Homo sapien
gttgctgtgtatcagcccagctcag

SEQ ID NO: 1874387 - DNA, 25 bp, Homo sapien
tcattaagatgacttcaggttgctg

SEQ ID NO: 1874388 - DNA, 25 bp, Homo sapien
ggaaaaggtagaagatgaaggacac

SEQ ID NO: 1874389 - DNA, 25 bp, Homo sapien
gaaaaggtagaagatgaaggacaca

SEQ ID NO: 1874390 - DNA, 25 bp, Homo sapien
aaaaggtagaagatgaaggacacac

SEQ ID NO: 1874391 - DNA, 25 bp, Homo sapien
ggaacataatcatgtcactcaggtc

SEQ ID NO: 1874392 - DNA, 25 bp, Homo sapien
tcaggtccttcaagccttctacata

SEQ ID NO: 1874393 - DNA, 25 bp, Homo sapien
ctttcaaggatgtatgcaagattca

SEQ ID NO: 1874394 - DNA, 25 bp, Homo sapien
ttgtagtggctctttcaaggatgta

SEQ ID NO: 1874395 - DNA, 25 bp, Homo sapien
tatgtatcttaggaaggctctggtt

SEQ ID NO: 1874396 - DNA, 25 bp, Homo sapien
taattcattccatgagtttcgacca

SEQ ID NO: 1874397 - DNA, 25 bp, Homo sapien
tgggcacttgtccatacatcagggt

SEQ ID NO: 1874398 - DNA, 25 bp, Homo sapien
aagtcatattttgcagctatgtatc

SEQ ID NO: 1874399 - DNA, 25 bp, Homo sapien
caatccccagtactagatgttttct

SEQ ID NO: 1874400 - DNA, 25 bp, Homo sapien
tctgggtctgctttacaatccccag

SEQ ID NO: 1874401 - DNA, 25 bp, Homo sapien
tatggggagggagttcgtctttatc

SEQ ID NO: 1874402 - DNA, 25 bp, Homo sapien
aaataatctgtatgcaagggtagag

SEQ ID NO: 1874403 - DNA, 25 bp, Homo sapien
cttcgatgctccaaaacacttccat

SEQ ID NO: 1874404 - DNA, 25 bp, Homo sapien
cagagagttggtgggtctctttctc

SEQ ID NO: 1874405 - DNA, 25 bp, Homo sapien
agagagttggtgggtctctttctct

SEQ ID NO: 1874406 - DNA, 25 bp, Homo sapien
ttcagagagttggtgggtctctttc

SEQ ID NO: 1874407 - DNA, 25 bp, Homo sapien
tcagagagttggtgggtctctttct

SEQ ID NO: 1874408 - DNA, 25 bp, Homo sapien
cagccaagagccatcagatggattc

SEQ ID NO: 1874409 - DNA, 25 bp, Homo sapien
gagccatcagatggattccatcctg

SEQ ID NO: 1874410 - DNA, 25 bp, Homo sapien
cctgcctcttccattgaagtagtaa

SEQ ID NO: 1874411 - DNA, 25 bp, Homo sapien
catcttacctctactctagctgcag

SEQ ID NO: 1874412 - DNA, 25 bp, Homo sapien
ccactgccagtgcatctaccagggc

SEQ ID NO: 1874413 - DNA, 25 bp, Homo sapien
cactggactagtgcccaccagtatg

SEQ ID NO: 1874414 - DNA, 25 bp, Homo sapien
tgtgggaggagctactgactccaca

SEQ ID NO: 1874415 - DNA, 25 bp, Homo sapien
acagggctgggtgagatccactgga

SEQ ID NO: 1874416 - DNA, 25 bp, Homo sapien
acatcttcctgatgttcataagtag

SEQ ID NO: 1874417 - DNA, 25 bp, Homo sapien
tcttcctgatgttcataagtagaca

SEQ ID NO: 1874418 - DNA, 25 bp, Homo sapien
cttcctgatgttcataagtagacat

SEQ ID NO: 1874419 - DNA, 25 bp, Homo sapien
catcttcctgatgttcataagtaga

SEQ ID NO: 1874420 - DNA, 25 bp, Homo sapien
cactcaaggcacgaacagcttccat

SEQ ID NO: 1874421 - DNA, 25 bp, Homo sapien
acactcaaggcacgaacagcttcca

SEQ ID NO: 1874422 - DNA, 25 bp, Homo sapien
ccacactcaaggcacgaacagcttc

SEQ ID NO: 1874423 - DNA, 25 bp, Homo sapien
cacactcaaggcacgaacagcttcc

SEQ ID NO: 1874424 - DNA, 25 bp, Homo sapien
aaaactacaacccagcttctcagtg

SEQ ID NO: 1874425 - DNA, 25 bp, Homo sapien
tcagtgaggagagtcctatcaagag

SEQ ID NO: 1874426 - DNA, 25 bp, Homo sapien
gaaaactacaacccagcttctcagt

SEQ ID NO: 1874427 - DNA, 25 bp, Homo sapien
ttctcagtgaggagagtcctatcaa

SEQ ID NO: 1874428 - DNA, 25 bp, Homo sapien
ggccatcaatccaacccctaatagg

SEQ ID NO: 1874429 - DNA, 25 bp, Homo sapien
tttttctatggctgatgtaggtctg

SEQ ID NO: 1874430 - DNA, 25 bp, Homo sapien
aacagaatcctgtttttctatggct

SEQ ID NO: 1874431 - DNA, 25 bp, Homo sapien
actggcatatctccaggtagcggct

SEQ ID NO: 1874432 - DNA, 25 bp, Homo sapien
agctttcacatctacgggaggcctc

SEQ ID NO: 1874433 - DNA, 25 bp, Homo sapien
aaagctttcacatctacgggaggcc

SEQ ID NO: 1874434 - DNA, 25 bp, Homo sapien
aagctttcacatctacgggaggcct

SEQ ID NO: 1874435 - DNA, 25 bp, Homo sapien
gcagccctgacgttcaggacgtggc

SEQ ID NO: 1874436 - DNA, 25 bp, Homo sapien
gacgtggctctacgctctgcactgt

SEQ ID NO: 1874437 - DNA, 25 bp, Homo sapien
tgcatgttcggtttgccccaggctc

SEQ ID NO: 1874438 - DNA, 25 bp, Homo sapien
tgctgctgcatgttcggtttgcccc

SEQ ID NO: 1874439 - DNA, 25 bp, Homo sapien
attctctcttcgatcaaggcaagtt

SEQ ID NO: 1874440 - DNA, 25 bp, Homo sapien
tctcttcgatcaaggcaagtttgac

SEQ ID NO: 1874441 - DNA, 25 bp, Homo sapien
tctctcttcgatcaaggcaagtttg

SEQ ID NO: 1874442 - DNA, 25 bp, Homo sapien
tcattcaaatctgccataccttcta

SEQ ID NO: 1874443 - DNA, 25 bp, Homo sapien
catttcttaacttgtccaattcttc

SEQ ID NO: 1874444 - DNA, 25 bp, Homo sapien
tttcttaacttgtccaattcttctg

SEQ ID NO: 1874445 - DNA, 25 bp, Homo sapien
atttcttaacttgtccaattcttct

SEQ ID NO: 1874446 - DNA, 25 bp, Homo sapien
tgaggtcctaatgtggttgataacc

SEQ ID NO: 1874447 - DNA, 25 bp, Homo sapien
tgttaaaggttatcgccctcgtggc

SEQ ID NO: 1874448 - DNA, 25 bp, Homo sapien
catttcagtagctccctcccattga

SEQ ID NO: 1874449 - DNA, 25 bp, Homo sapien
tattgtactaaggacacatttaaaa

SEQ ID NO: 1874450 - DNA, 25 bp, Homo sapien
ggaccagcactcaggataccaagga

SEQ ID NO: 1874451 - DNA, 25 bp, Homo sapien
ccaggggaccagcactcaggatacc

SEQ ID NO: 1874452 - DNA, 25 bp, Homo sapien
gggaccagcactcaggataccaagg

SEQ ID NO: 1874453 - DNA, 25 bp, Homo sapien
aggggaccagcactcaggataccaa

SEQ ID NO: 1874454 - DNA, 25 bp, Homo sapien
ctgggaccccatggaggcttaagga

SEQ ID NO: 1874455 - DNA, 25 bp, Homo sapien
taccatctgtatcttggcagcccag

SEQ ID NO: 1874456 - DNA, 25 bp, Homo sapien
caaagtgaagctgcaggtaggaagc

SEQ ID NO: 1874457 - DNA, 25 bp, Homo sapien
cactgtaagagacaacaaggtggcc

SEQ ID NO: 1874458 - DNA, 25 bp, Homo sapien
aattcacatcagatcctaatgagaa

SEQ ID NO: 1874459 - DNA, 25 bp, Homo sapien
ttgtaattccaagaaaattgttggc

SEQ ID NO: 1874460 - DNA, 25 bp, Homo sapien
caagaaaattgttggctaggaggag

SEQ ID NO: 1874461 - DNA, 25 bp, Homo sapien
attgtatgacaaattgtatgttaca

SEQ ID NO: 1874462 - DNA, 25 bp, Homo sapien
catgttcttgacctctatggctggt

SEQ ID NO: 1874463 - DNA, 25 bp, Homo sapien
tgcatgttcttgacctctatggctg

SEQ ID NO: 1874464 - DNA, 25 bp, Homo sapien
cttgcatgttcttgacctctatggc

SEQ ID NO: 1874465 - DNA, 25 bp, Homo sapien
gttcttgacctctatggctggttta

SEQ ID NO: 1874466 - DNA, 25 bp, Homo sapien
ccaggctgtagaaacttcttcactg

SEQ ID NO: 1874467 - DNA, 25 bp, Homo sapien
ggctgccaggctgtagaaacttctt

SEQ ID NO: 1874468 - DNA, 25 bp, Homo sapien
tgccaggctgtagaaacttcttcac

SEQ ID NO: 1874469 - DNA, 25 bp, Homo sapien
gctgccaggctgtagaaacttcttc

SEQ ID NO: 1874470 - DNA, 25 bp, Homo sapien
gatatcagcacagatcagtctctaa

SEQ ID NO: 1874471 - DNA, 25 bp, Homo sapien
aaaggacatcacagagaactcagga

SEQ ID NO: 1874472 - DNA, 25 bp, Homo sapien
aggaaaccagatggaaagggctctg

SEQ ID NO: 1874473 - DNA, 25 bp, Homo sapien
cagactgactcaatgtgggcacata

SEQ ID NO: 1874474 - DNA, 25 bp, Homo sapien
ccggctcagcttgttgccaacaagg

SEQ ID NO: 1874475 - DNA, 25 bp, Homo sapien
caggtgaatgtcagcccggctcagc

SEQ ID NO: 1874476 - DNA, 25 bp, Homo sapien
gagtcaagctcttccacgtagtaga

SEQ ID NO: 1874477 - DNA, 25 bp, Homo sapien
ataaggctagagtcaagctcttcca

SEQ ID NO: 1874478 - DNA, 25 bp, Homo sapien
gtctcccgctccaatctcccttggg

SEQ ID NO: 1874479 - DNA, 25 bp, Homo sapien
tggctctacattctgctgtctcccg

SEQ ID NO: 1874480 - DNA, 25 bp, Homo sapien
ggcttagcacctgccgccgcatgtt

SEQ ID NO: 1874481 - DNA, 25 bp, Homo sapien
gggcagtgactccaccatcgtgaca

SEQ ID NO: 1874482 - DNA, 25 bp, Homo sapien
ctcaggttgactaaagggcagaaga

SEQ ID NO: 1874483 - DNA, 25 bp, Homo sapien
tgtgagtcaaatggccaaagacctg

SEQ ID NO: 1874484 - DNA, 25 bp, Homo sapien
taagtaatcctaagagagtccctgg

SEQ ID NO: 1874485 - DNA, 25 bp, Homo sapien
cctaatacaggaagaagatcatcgg

SEQ ID NO: 1874486 - DNA, 25 bp, Homo sapien
tgttgcccaactctagccatgtgtg

SEQ ID NO: 1874487 - DNA, 25 bp, Homo sapien
gtggatggaagaacagaaaatatac

SEQ ID NO: 1874488 - DNA, 25 bp, Homo sapien
tctgtggatggaagaacagaaaata

SEQ ID NO: 1874489 - DNA, 25 bp, Homo sapien
tctatgttctctgtggatggaagaa

SEQ ID NO: 1874490 - DNA, 25 bp, Homo sapien
ctatgttctctgtggatggaagaac

SEQ ID NO: 1874491 - DNA, 25 bp, Homo sapien
cccatagaggttgtatttgctggca

SEQ ID NO: 1874492 - DNA, 25 bp, Homo sapien
ctggcaatgtagttgagaatggctc

SEQ ID NO: 1874493 - DNA, 25 bp, Homo sapien
catcaatctcaaccattggcacttg

SEQ ID NO: 1874494 - DNA, 25 bp, Homo sapien
tttgctggcaatgtagttgagaatg

SEQ ID NO: 1874495 - DNA, 25 bp, Homo sapien
ccaaatcttctgcagattttataaa

SEQ ID NO: 1874496 - DNA, 25 bp, Homo sapien
ttcttaacttgtccaaatcttctgc

SEQ ID NO: 1874497 - DNA, 25 bp, Homo sapien
catttcttaacttgtccaaatcttc

SEQ ID NO: 1874498 - DNA, 25 bp, Homo sapien
tccaaatcttctgcagattttataa

SEQ ID NO: 1874499 - DNA, 25 bp, Homo sapien
agctgcagccaggagccaccggatg

SEQ ID NO: 1874500 - DNA, 25 bp, Homo sapien
ctgcagccaggagccaccggatgga

SEQ ID NO: 1874501 - DNA, 25 bp, Homo sapien
gcagccaggagccaccggatggact

SEQ ID NO: 1874502 - DNA, 25 bp, Homo sapien
agccaggagccaccggatggactcc

SEQ ID NO: 1874503 - DNA, 25 bp, Homo sapien
tctgccccgtatattggagtagtgg

SEQ ID NO: 1874504 - DNA, 25 bp, Homo sapien
tgccccgtatattggagtagtggag

SEQ ID NO: 1874505 - DNA, 25 bp, Homo sapien
agtagtggagcttgggcttctctgc

SEQ ID NO: 1874506 - DNA, 25 bp, Homo sapien
cccgtatattggagtagtggagctt

SEQ ID NO: 1874507 - DNA, 25 bp, Homo sapien
tctttgttcctctcaatagttccct

SEQ ID NO: 1874508 - DNA, 25 bp, Homo sapien
cacctttgtggctggacaaccgaat

SEQ ID NO: 1874509 - DNA, 25 bp, Homo sapien
ctttgtggctggacaaccgaattcc

SEQ ID NO: 1874510 - DNA, 25 bp, Homo sapien
ctctttgttcctctcaatagttccc

SEQ ID NO: 1874511 - DNA, 25 bp, Homo sapien
ttgcatctatgggaagcttcctcag

SEQ ID NO: 1874512 - DNA, 25 bp, Homo sapien
tcttgtaaaccttttgcatctatgg

SEQ ID NO: 1874513 - DNA, 25 bp, Homo sapien
agccaaggactgacaccaccattaa

SEQ ID NO: 1874514 - DNA, 25 bp, Homo sapien
ctgattttcagggcccgcaatgcac

SEQ ID NO: 1874515 - DNA, 25 bp, Homo sapien
agggcccgcaatgcacaaagcacag

SEQ ID NO: 1874516 - DNA, 25 bp, Homo sapien
aagcacagcctcagagtgaagccaa

SEQ ID NO: 1874517 - DNA, 25 bp, Homo sapien
tcttgaggactgggaaatgggtcac

SEQ ID NO: 1874518 - DNA, 25 bp, Homo sapien
agctgcctcttgaggactgggaaat

SEQ ID NO: 1874519 - DNA, 25 bp, Homo sapien
agatgaggagctgcctcttgaggac

SEQ ID NO: 1874520 - DNA, 25 bp, Homo sapien
tagatcccaagatgggagatgagga

SEQ ID NO: 1874521 - DNA, 25 bp, Homo sapien
cctggctcagcttgttgccaatgaa

SEQ ID NO: 1874522 - DNA, 25 bp, Homo sapien
tgaccaggtgaatgtcagcctggct

SEQ ID NO: 1874523 - DNA, 25 bp, Homo sapien
tttgaccaggtgaatgtcagcctgg

SEQ ID NO: 1874524 - DNA, 25 bp, Homo sapien
tgttgccaatgaagtagtcttgttc

SEQ ID NO: 1874525 - DNA, 25 bp, Homo sapien
gtgcagagatccagacctttctcca

SEQ ID NO: 1874526 - DNA, 25 bp, Homo sapien
ggtgcagagatccagacctttctcc

SEQ ID NO: 1874527 - DNA, 25 bp, Homo sapien
tcactccttgtttggagcccaggct

SEQ ID NO: 1874528 - DNA, 25 bp, Homo sapien
ttccacatcactatggcatccacag

SEQ ID NO: 1874529 - DNA, 25 bp, Homo sapien
ttacctgattcagtgagagagtaag

SEQ ID NO: 1874530 - DNA, 25 bp, Homo sapien
ggccaggggcttatcccctgctgca

SEQ ID NO: 1874531 - DNA, 25 bp, Homo sapien
gcttgttgttccctctttgatcagg

SEQ ID NO: 1874532 - DNA, 25 bp, Homo sapien
cctcaggtggatgcaatgagcaatg

SEQ ID NO: 1874533 - DNA, 25 bp, Homo sapien
tccctctttgatcagggcaagcttt

SEQ ID NO: 1874534 - DNA, 25 bp, Homo sapien
cctaccttctatatacatatcgacc

SEQ ID NO: 1874535 - DNA, 25 bp, Homo sapien
acatgatattggccaattctagtca

SEQ ID NO: 1874536 - DNA, 25 bp, Homo sapien
cacatgatattggccaattctagtc

SEQ ID NO: 1874537 - DNA, 25 bp, Homo sapien
ccacatgatattggccaattctagt

SEQ ID NO: 1874538 - DNA, 25 bp, Homo sapien
catgatattggccaattctagtcat

SEQ ID NO: 1874539 - DNA, 25 bp, Homo sapien
gttgattgaagaacagaaaatatac

SEQ ID NO: 1874540 - DNA, 25 bp, Homo sapien
tctgttgattgaagaacagaaaata

SEQ ID NO: 1874541 - DNA, 25 bp, Homo sapien
tctgtgttctctgttgattgaagaa

SEQ ID NO: 1874542 - DNA, 25 bp, Homo sapien
ctgtgttctctgttgattgaagaac

SEQ ID NO: 1874543 - DNA, 25 bp, Homo sapien
ctggcaatgtagttgagaatggctc

SEQ ID NO: 1874544 - DNA, 25 bp, Homo sapien
tgcaccagcttcatcccgtcaatct

SEQ ID NO: 1874545 - DNA, 25 bp, Homo sapien
atttgctggcaatgtagttgagaat

SEQ ID NO: 1874546 - DNA, 25 bp, Homo sapien
tatatggggctctctcctttatgtc

SEQ ID NO: 1874547 - DNA, 25 bp, Homo sapien
cacagaaataccattgctgcaaatt

SEQ ID NO: 1874548 - DNA, 25 bp, Homo sapien
cacacagaaataccattgctgcaaa

SEQ ID NO: 1874549 - DNA, 25 bp, Homo sapien
cacacacagaaataccattgctgca

SEQ ID NO: 1874550 - DNA, 25 bp, Homo sapien
agaaataccattgctgcaaattgca

SEQ ID NO: 1874551 - DNA, 25 bp, Homo sapien
ttttccaaatcttttgcagattcca

SEQ ID NO: 1874552 - DNA, 25 bp, Homo sapien
cttaacttttccaaatcttttgcag

SEQ ID NO: 1874553 - DNA, 25 bp, Homo sapien
tccaaatcttttgcagattccagaa

SEQ ID NO: 1874554 - DNA, 25 bp, Homo sapien
tcttttgcagattccagaaatttcc

SEQ ID NO: 1874555 - DNA, 25 bp, Homo sapien
tagaaaactgaggaatccacagcag

SEQ ID NO: 1874556 - DNA, 25 bp, Homo sapien
caggagcacacacactgtaagggac

SEQ ID NO: 1874557 - DNA, 25 bp, Homo sapien
catctgtatcgtggcagccaggcct

SEQ ID NO: 1874558 - DNA, 25 bp, Homo sapien
agaaggcttatgcctgggaccccac

SEQ ID NO: 1874559 - DNA, 25 bp, Homo sapien
cttctcctgtgcatacctgaaaatg

SEQ ID NO: 1874560 - DNA, 25 bp, Homo sapien
atgtctttatgccattatccaggat

SEQ ID NO: 1874561 - DNA, 25 bp, Homo sapien
tccaggatggtaactcttctcctgt

SEQ ID NO: 1874562 - DNA, 25 bp, Homo sapien
gattgtatgacaaattgtatgttac

SEQ ID NO: 1874563 - DNA, 25 bp, Homo sapien
aatcaattttaactaagtcagcgaa

SEQ ID NO: 1874564 - DNA, 25 bp, Homo sapien
ccaggaaaatggttggctaggagaa

SEQ ID NO: 1874565 - DNA, 25 bp, Homo sapien
aaatcaattttaactaagtcagcga

SEQ ID NO: 1874566 - DNA, 25 bp, Homo sapien
tccaggaaaatggttggctaggaga

SEQ ID NO: 1874567 - DNA, 25 bp, Homo sapien
tgaaagagttcattagcttcacaac

SEQ ID NO: 1874568 - DNA, 25 bp, Homo sapien
tagaacattggtattgcaagttctt

SEQ ID NO: 1874569 - DNA, 25 bp, Homo sapien
gttcttggcctccatgactgcgtta

SEQ ID NO: 1874570 - DNA, 25 bp, Homo sapien
gaacattggtattgcaagttcttgg

SEQ ID NO: 1874571 - DNA, 25 bp, Homo sapien
aagttcttggcctccatgactgcgt

SEQ ID NO: 1874572 - DNA, 25 bp, Homo sapien
ggctgccaggctgtagaaacttctt

SEQ ID NO: 1874573 - DNA, 25 bp, Homo sapien
ccaggctgtagaaacttcttcactg

SEQ ID NO: 1874574 - DNA, 25 bp, Homo sapien
tgccaggctgtagaaacttcttcac

SEQ ID NO: 1874575 - DNA, 25 bp, Homo sapien
gctgccaggctgtagaaacttcttc

SEQ ID NO: 1874576 - DNA, 25 bp, Homo sapien
aagcacagcctcagagtgaagccaa

SEQ ID NO: 1874577 - DNA, 25 bp, Homo sapien
acatgtagctcactttattttcccc

SEQ ID NO: 1874578 - DNA, 25 bp, Homo sapien
tgggaccaccttttctcagtgagag

SEQ ID NO: 1874579 - DNA, 25 bp, Homo sapien
catgggaccaccttttctcagtgag

SEQ ID NO: 1874580 - DNA, 25 bp, Homo sapien
gggaccaccttttctcagtgagaga

SEQ ID NO: 1874581 - DNA, 25 bp, Homo sapien
atgggaccaccttttctcagtgaga

SEQ ID NO: 1874582 - DNA, 25 bp, Homo sapien
ggcccagatacaagatcccaagatg

SEQ ID NO: 1874583 - DNA, 25 bp, Homo sapien
cagggcccagatacaagatcccaag

SEQ ID NO: 1874584 - DNA, 25 bp, Homo sapien
cagatacaagatcccaagatgggag

SEQ ID NO: 1874585 - DNA, 25 bp, Homo sapien
caagatcccaagatgggagatgtgg

SEQ ID NO: 1874586 - DNA, 25 bp, Homo sapien
actggagtcaagctcctcgacgtag

SEQ ID NO: 1874587 - DNA, 25 bp, Homo sapien
tggagtcaagctcctcgacgtagta

SEQ ID NO: 1874588 - DNA, 25 bp, Homo sapien
ggagtcaagctcctcgacgtagtag

SEQ ID NO: 1874589 - DNA, 25 bp, Homo sapien
agactggagtcaagctcctcgacgt

SEQ ID NO: 1874590 - DNA, 25 bp, Homo sapien
tctgctataccttctatatacatat

SEQ ID NO: 1874591 - DNA, 25 bp, Homo sapien
gctataccttctatatacatatcaa

SEQ ID NO: 1874592 - DNA, 25 bp, Homo sapien
aggcagggaagtagcgattttttat

SEQ ID NO: 1874593 - DNA, 25 bp, Homo sapien
caaatctgctataccttctatatac

SEQ ID NO: 1874594 - DNA, 25 bp, Homo sapien
ctgtgttctctgtggatggaagaac

SEQ ID NO: 1874595 - DNA, 25 bp, Homo sapien
ggatggaagaacagaaaatataccg

SEQ ID NO: 1874596 - DNA, 25 bp, Homo sapien
tctgtgttctctgtggatggaagaa

SEQ ID NO: 1874597 - DNA, 25 bp, Homo sapien
tggaagaacagaaaatataccgtac

SEQ ID NO: 1874598 - DNA, 25 bp, Homo sapien
ctggcaatgtagttgagaatggctc

SEQ ID NO: 1874599 - DNA, 25 bp, Homo sapien
tgctggcaatgtagttgagaatggc

SEQ ID NO: 1874600 - DNA, 25 bp, Homo sapien
ccatagaggttgtatttgctggcaa

SEQ ID NO: 1874601 - DNA, 25 bp, Homo sapien
atcaatctcaaccattggcacttgc

SEQ ID NO: 1874602 - DNA, 25 bp, Homo sapien
ttcttaacttgtccaaatcttctgc

SEQ ID NO: 1874603 - DNA, 25 bp, Homo sapien
ccaaatcttctgcagattttataaa

SEQ ID NO: 1874604 - DNA, 25 bp, Homo sapien
tccaaatcttctgcagattttataa

SEQ ID NO: 1874605 - DNA, 25 bp, Homo sapien
catttcttaacttgtccaaatcttc

SEQ ID NO: 1874606 - DNA, 25 bp, Homo sapien
aagtagtggagcttgggcttctctg

SEQ ID NO: 1874607 - DNA, 25 bp, Homo sapien
ggactccattctgccccgtgcattg

SEQ ID NO: 1874608 - DNA, 25 bp, Homo sapien
ccccgtgcattgaagtagtggagct

SEQ ID NO: 1874609 - DNA, 25 bp, Homo sapien
gagccaccgggtggactccattctg

SEQ ID NO: 1874610 - DNA, 25 bp, Homo sapien
tagcagtctcctggaggtttctcta

SEQ ID NO: 1874611 - DNA, 25 bp, Homo sapien
cagtctcctggaggtttctctaagc

SEQ ID NO: 1874612 - DNA, 25 bp, Homo sapien
gatagcagtctcctggaggtttctc

SEQ ID NO: 1874613 - DNA, 25 bp, Homo sapien
gcagtctcctggaggtttctctaag

SEQ ID NO: 1874614 - DNA, 25 bp, Homo sapien
gattgttaatccctgcagcttttgt

SEQ ID NO: 1874615 - DNA, 25 bp, Homo sapien
tggccatgaaaccagaggatgtcac

SEQ ID NO: 1874616 - DNA, 25 bp, Homo sapien
aaaaccagaaattaggcctcagact

SEQ ID NO: 1874617 - DNA, 25 bp, Homo sapien
gaccggcagggagctaagtcactct

SEQ ID NO: 1874618 - DNA, 25 bp, Homo sapien
ctggctcgacaactgaattccaggt

SEQ ID NO: 1874619 - DNA, 25 bp, Homo sapien
cgtcctggctcgacaactgaattcc

SEQ ID NO: 1874620 - DNA, 25 bp, Homo sapien
gtcctggctcgacaactgaattcca

SEQ ID NO: 1874621 - DNA, 25 bp, Homo sapien
tcttctaaacctttcgcatttatgg

SEQ ID NO: 1874622 - DNA, 25 bp, Homo sapien
aacctttcgcatttatgggaagctc

SEQ ID NO: 1874623 - DNA, 25 bp, Homo sapien
ttctaaacctttcgcatttatggga

SEQ ID NO: 1874624 - DNA, 25 bp, Homo sapien
cctttcgcatttatgggaagctccc

SEQ ID NO: 1874625 - DNA, 25 bp, Homo sapien
gctcttccacgtggtagagaagttt

SEQ ID NO: 1874626 - DNA, 25 bp, Homo sapien
accaggtgaatgtcagcccggctca

SEQ ID NO: 1874627 - DNA, 25 bp, Homo sapien
tggtagagaagtttgaccaggtgaa

SEQ ID NO: 1874628 - DNA, 25 bp, Homo sapien
caggtgaatgtcagcccggctcagc

SEQ ID NO: 1874629 - DNA, 25 bp, Homo sapien
ctggcaatgtagttgagaatggctc

SEQ ID NO: 1874630 - DNA, 25 bp, Homo sapien
tgctggcaatgtagttgagaatggc

SEQ ID NO: 1874631 - DNA, 25 bp, Homo sapien
tatatggggctctctcctttatgtc

SEQ ID NO: 1874632 - DNA, 25 bp, Homo sapien
atttgctggcaatgtagttgagaat

SEQ ID NO: 1874633 - DNA, 25 bp, Homo sapien
gaggcacttagagacttgatcttac

SEQ ID NO: 1874634 - DNA, 25 bp, Homo sapien
cagaggcacttagagacttgatctt

SEQ ID NO: 1874635 - DNA, 25 bp, Homo sapien
agaggcacttagagacttgatctta

SEQ ID NO: 1874636 - DNA, 25 bp, Homo sapien
tcagaggcacttagagacttgatct

SEQ ID NO: 1874637 - DNA, 25 bp, Homo sapien
tcttaacttttccaaatcttttgca

SEQ ID NO: 1874638 - DNA, 25 bp, Homo sapien
tccaaatcttttgcagattccagaa

SEQ ID NO: 1874639 - DNA, 25 bp, Homo sapien
taacttttccaaatcttttgcagat

SEQ ID NO: 1874640 - DNA, 25 bp, Homo sapien
ttttccaaatcttttgcagattcca

SEQ ID NO: 1874641 - DNA, 25 bp, Homo sapien
gaaccagagaggctcgaagatttgc

SEQ ID NO: 1874642 - DNA, 25 bp, Homo sapien
cagagaggctcgaagatttgccatg

SEQ ID NO: 1874643 - DNA, 25 bp, Homo sapien
gctttgttgggtcaacagaaaatga

SEQ ID NO: 1874644 - DNA, 25 bp, Homo sapien
gctcgaagatttgccatgggtcaca

SEQ ID NO: 1874645 - DNA, 25 bp, Homo sapien
agtttattagctttacaagaggcac

SEQ ID NO: 1874646 - DNA, 25 bp, Homo sapien
gagtttattagctttacaagaggca

SEQ ID NO: 1874647 - DNA, 25 bp, Homo sapien
tagctaagttgacagataagagtta

SEQ ID NO: 1874648 - DNA, 25 bp, Homo sapien
attttagctaagttgacagataaga

SEQ ID NO: 1874649 - DNA, 25 bp, Homo sapien
aacttcttcaccgtgggcaggttgc

SEQ ID NO: 1874650 - DNA, 25 bp, Homo sapien
cttcttcaccgtgggcaggttgctg

SEQ ID NO: 1874651 - DNA, 25 bp, Homo sapien
gcagaaacttcttcaccgtgggcag

SEQ ID NO: 1874652 - DNA, 25 bp, Homo sapien
agaaacttcttcaccgtgggcaggt

SEQ ID NO: 1874653 - DNA, 25 bp, Homo sapien
cattcttcaaaattggagcctggaa

SEQ ID NO: 1874654 - DNA, 25 bp, Homo sapien
tgggttagcatgcaccacaaatttc

SEQ ID NO: 1874655 - DNA, 25 bp, Homo sapien
ctggaagctcattttggagaccttg

SEQ ID NO: 1874656 - DNA, 25 bp, Homo sapien
ctcattttggagaccttgggggcac

SEQ ID NO: 1874657 - DNA, 25 bp, Homo sapien
gagtcaagctcttccacgtagtaga

SEQ ID NO: 1874658 - DNA, 25 bp, Homo sapien
gctcagcttgttgccaacaaggtag

SEQ ID NO: 1874659 - DNA, 25 bp, Homo sapien
tttcagtcaaatctactataccttc

SEQ ID NO: 1874660 - DNA, 25 bp, Homo sapien
tctctttcctctggttgacatatga

SEQ ID NO: 1874661 - DNA, 25 bp, Homo sapien
ctttcctctggttgacatatgagca

SEQ ID NO: 1874662 - DNA, 25 bp, Homo sapien
aatctactataccttctgtgtacat

SEQ ID NO: 1874663 - DNA, 25 bp, Homo sapien
ctgtgttctctgtggatggaagaac

SEQ ID NO: 1874664 - DNA, 25 bp, Homo sapien
tggaagaacagaaaatataccatac

SEQ ID NO: 1874665 - DNA, 25 bp, Homo sapien
tctgtgttctctgtggatggaagaa

SEQ ID NO: 1874666 - DNA, 25 bp, Homo sapien
ggatggaagaacagaaaatatacca

SEQ ID NO: 1874667 - DNA, 25 bp, Homo sapien
gttaagaatggctctggtctgcacc

SEQ ID NO: 1874668 - DNA, 25 bp, Homo sapien
cccataaaggttgtatttgctggca

SEQ ID NO: 1874669 - DNA, 25 bp, Homo sapien
gttgtatttgctggcaatgtagtta

SEQ ID NO: 1874670 - DNA, 25 bp, Homo sapien
tgcaccagcttcatcccgtcaatct

SEQ ID NO: 1874671 - DNA, 25 bp, Homo sapien
acttgctggaacagcaaactcccat

SEQ ID NO: 1874672 - DNA, 25 bp, Homo sapien
tacttgctggaacagcaaactccca

SEQ ID NO: 1874673 - DNA, 25 bp, Homo sapien
ggtacttgctggaacagcaaactcc

SEQ ID NO: 1874674 - DNA, 25 bp, Homo sapien
tggtacttgctggaacagcaaactc

SEQ ID NO: 1874675 - DNA, 25 bp, Homo sapien
cagattctagaaatttctcttccaa

SEQ ID NO: 1874676 - DNA, 25 bp, Homo sapien
cttctgcagattctagaaatttctc

SEQ ID NO: 1874677 - DNA, 25 bp, Homo sapien
catttcttaacttgtccaaatcttc

SEQ ID NO: 1874678 - DNA, 25 bp, Homo sapien
ccaaatcttctgcagattctagaaa

SEQ ID NO: 1874679 - DNA, 25 bp, Homo sapien
gaatggactccatactgccccgtgc

SEQ ID NO: 1874680 - DNA, 25 bp, Homo sapien
cgaatggactccatactgccccgtg

SEQ ID NO: 1874681 - DNA, 25 bp, Homo sapien
tagcagtctcctggaggtttctcta

SEQ ID NO: 1874682 - DNA, 25 bp, Homo sapien
gatagcagtctcctggaggtttctc

SEQ ID NO: 1874683 - DNA, 25 bp, Homo sapien
cagtctcctggaggtttctctaagc

SEQ ID NO: 1874684 - DNA, 25 bp, Homo sapien
gcagtctcctggaggtttctctaag

SEQ ID NO: 1874685 - DNA, 25 bp, Homo sapien
ctgtcactgtcgtggctgggcaact

SEQ ID NO: 1874686 - DNA, 25 bp, Homo sapien
catccatgagagacttccttgggct

SEQ ID NO: 1874687 - DNA, 25 bp, Homo sapien
tagaaatttcttcaccatgggcagg

SEQ ID NO: 1874688 - DNA, 25 bp, Homo sapien
ccttgggctgccaggctgtagaaat

SEQ ID NO: 1874689 - DNA, 25 bp, Homo sapien
ttctaaagatttctcatccatgaga

SEQ ID NO: 1874690 - DNA, 25 bp, Homo sapien
tacaagatcccaagatgggagatat

SEQ ID NO: 1874691 - DNA, 25 bp, Homo sapien
atacaagatcccaagatgggagata

SEQ ID NO: 1874692 - DNA, 25 bp, Homo sapien
acaagatcccaagatgggagatatg

SEQ ID NO: 1874693 - DNA, 25 bp, Homo sapien
ataaggctagagtcaagctcttcca

SEQ ID NO: 1874694 - DNA, 25 bp, Homo sapien
gctcagcttgttgccaacaaggtag

SEQ ID NO: 1874695 - DNA, 25 bp, Homo sapien
cgtcgagaattggaggaatcaaatc

SEQ ID NO: 1874696 - DNA, 25 bp, Homo sapien
cgagaattggaggaatcaaatcagg

SEQ ID NO: 1874697 - DNA, 25 bp, Homo sapien
ctttaagacgtcgagaattggagga

SEQ ID NO: 1874698 - DNA, 25 bp, Homo sapien
taagacgtcgagaattggaggaatc

SEQ ID NO: 1874699 - DNA, 25 bp, Homo sapien
tggaagaacagaaaatatactgtac

SEQ ID NO: 1874700 - DNA, 25 bp, Homo sapien
gatggaagaacagaaaatatactgt

SEQ ID NO: 1874701 - DNA, 25 bp, Homo sapien
tcactccgtgttatctgttgatgga

SEQ ID NO: 1874702 - DNA, 25 bp, Homo sapien
tgttgatggaagaacagaaaatata

SEQ ID NO: 1874703 - DNA, 25 bp, Homo sapien
gatagagattgtatttgctggcaac

SEQ ID NO: 1874704 - DNA, 25 bp, Homo sapien
agaaggaaaaaaggagagtgaaatg

SEQ ID NO: 1874705 - DNA, 25 bp, Homo sapien
ccaggagccaccaggtggactccat

SEQ ID NO: 1874706 - DNA, 25 bp, Homo sapien
ctctactccggctgcagccaggagc

SEQ ID NO: 1874707 - DNA, 25 bp, Homo sapien
cagccaggagccaccaggtggactc

SEQ ID NO: 1874708 - DNA, 25 bp, Homo sapien
gcagccaggagccaccaggtggact

SEQ ID NO: 1874709 - DNA, 25 bp, Homo sapien
gagtagtggagcttgggcttctctg

SEQ ID NO: 1874710 - DNA, 25 bp, Homo sapien
tctgccctgtgcattggagtagtgg

SEQ ID NO: 1874711 - DNA, 25 bp, Homo sapien
cctgtgcattggagtagtggagctt

SEQ ID NO: 1874712 - DNA, 25 bp, Homo sapien
agtagtggagcttgggcttctctgc

SEQ ID NO: 1874713 - DNA, 25 bp, Homo sapien
ttaggtaaagcacttcattgtgtaa

SEQ ID NO: 1874714 - DNA, 25 bp, Homo sapien
cacttcattgtgtaaaacgttagaa

SEQ ID NO: 1874715 - DNA, 25 bp, Homo sapien
ggtaaagcacttcattgtgtaaaac

SEQ ID NO: 1874716 - DNA, 25 bp, Homo sapien
taaagcacttcattgtgtaaaacgt

SEQ ID NO: 1874717 - DNA, 25 bp, Homo sapien
gcagaaacttcttcaccgtgggcag

SEQ ID NO: 1874718 - DNA, 25 bp, Homo sapien
agccaaggactgacaccaccattaa

SEQ ID NO: 1874719 - DNA, 25 bp, Homo sapien
gagtgaagccaaggactgacaccac

SEQ ID NO: 1874720 - DNA, 25 bp, Homo sapien
aagcacagcctcagagtgaagccaa

SEQ ID NO: 1874721 - DNA, 25 bp, Homo sapien
caccaccattaataccacccaggga

SEQ ID NO: 1874722 - DNA, 25 bp, Homo sapien
attcaggaacagaaaccacgttgaa

SEQ ID NO: 1874723 - DNA, 25 bp, Homo sapien
gaaaccacgttgaaatagaaggatg

SEQ ID NO: 1874724 - DNA, 25 bp, Homo sapien
cagacagacttggtgtgggaagaca

SEQ ID NO: 1874725 - DNA, 25 bp, Homo sapien
catgaggtagccacacatttcactg

SEQ ID NO: 1874726 - DNA, 25 bp, Homo sapien
tccctgattgtgaggaatcagggcc

SEQ ID NO: 1874727 - DNA, 25 bp, Homo sapien
ttccctgattgtgaggaatcagggc

SEQ ID NO: 1874728 - DNA, 25 bp, Homo sapien
cctgattgtgaggaatcagggcctg

SEQ ID NO: 1874729 - DNA, 25 bp, Homo sapien
ctttccctgattgtgaggaatcagg

SEQ ID NO: 1874730 - DNA, 25 bp, Homo sapien
acccagatccgagatcccaagatgg

SEQ ID NO: 1874731 - DNA, 25 bp, Homo sapien
ctctccgggctacgaaatgggtcac

SEQ ID NO: 1874732 - DNA, 25 bp, Homo sapien
gtcagaacatggctagtcccaggac

SEQ ID NO: 1874733 - DNA, 25 bp, Homo sapien
agaaggctggtgtcagaacatggct

SEQ ID NO: 1874734 - DNA, 25 bp, Homo sapien
tggagtcaagctcttccacatagta

SEQ ID NO: 1874735 - DNA, 25 bp, Homo sapien
caccaggtgaatgtcagcccggctc

SEQ ID NO: 1874736 - DNA, 25 bp, Homo sapien
gagataaggctggagtcaagctctt

SEQ ID NO: 1874737 - DNA, 25 bp, Homo sapien
tccaccaggtgaatgtcagcccggc

SEQ ID NO: 1874738 - DNA, 25 bp, Homo sapien
tccacaccacccactcggcttgcat

SEQ ID NO: 1874739 - DNA, 25 bp, Homo sapien
cacccactcggcttgcatcttccac

SEQ ID NO: 1874740 - DNA, 25 bp, Homo sapien
ccacccactcggcttgcatcttcca

SEQ ID NO: 1874741 - DNA, 25 bp, Homo sapien
acaccacccactcggcttgcatctt

SEQ ID NO: 1874742 - DNA, 25 bp, Homo sapien
ctctgttaatggaagaacagaaaat

SEQ ID NO: 1874743 - DNA, 25 bp, Homo sapien
ttctctgttaatggaagaacagaaa

SEQ ID NO: 1874744 - DNA, 25 bp, Homo sapien
tctgtattctctgttaatggaagaa

SEQ ID NO: 1874745 - DNA, 25 bp, Homo sapien
tgtattctctgttaatggaagaaca

SEQ ID NO: 1874746 - DNA, 25 bp, Homo sapien
catcaatctcaactattggcacttg

SEQ ID NO: 1874747 - DNA, 25 bp, Homo sapien
tggcacttgctggaacatcaaactc

SEQ ID NO: 1874748 - DNA, 25 bp, Homo sapien
tgagaacggctctggtctgcaccag

SEQ ID NO: 1874749 - DNA, 25 bp, Homo sapien
tgctggcaatgtagttgagaacggc

SEQ ID NO: 1874750 - DNA, 25 bp, Homo sapien
aaaaggagagtcagatgtctatgaa

SEQ ID NO: 1874751 - DNA, 25 bp, Homo sapien
gagtcagatgtctatgaatcccagt

SEQ ID NO: 1874752 - DNA, 25 bp, Homo sapien
ggaaaaaaaggagagtcagatgtct

SEQ ID NO: 1874753 - DNA, 25 bp, Homo sapien
ggagagtcagatgtctatgaatccc

SEQ ID NO: 1874754 - DNA, 25 bp, Homo sapien
tactccagatgcagctaggagcgac

SEQ ID NO: 1874755 - DNA, 25 bp, Homo sapien
ccgtactccagatgcagctaggagc

SEQ ID NO: 1874756 - DNA, 25 bp, Homo sapien
tccagatgcagctaggagcgactgg

SEQ ID NO: 1874757 - DNA, 25 bp, Homo sapien
cagatgcagctaggagcgactggat

SEQ ID NO: 1874758 - DNA, 25 bp, Homo sapien
tatgagaagatttacaagatcactg

SEQ ID NO: 1874759 - DNA, 25 bp, Homo sapien
aatgcgtttataagctacatggtcc

SEQ ID NO: 1874760 - DNA, 25 bp, Homo sapien
aagactgtcatgctcgtggttcaac

SEQ ID NO: 1874761 - DNA, 25 bp, Homo sapien
gaggtacagtcaatttagcaaaaag

SEQ ID NO: 1874762 - DNA, 25 bp, Homo sapien
tggattcaccgattgacaaaagcct

SEQ ID NO: 1874763 - DNA, 25 bp, Homo sapien
taagttgaaagtacccatgacctgg

SEQ ID NO: 1874764 - DNA, 25 bp, Homo sapien
cctggtcattgtaggagctcctaaa

SEQ ID NO: 1874765 - DNA, 25 bp, Homo sapien
aacccctggatcctgtaaatgtgac

SEQ ID NO: 1874766 - DNA, 25 bp, Homo sapien
ttgttgcaaaactttagaatattgg

SEQ ID NO: 1874767 - DNA, 25 bp, Homo sapien
attgttgcaaaactttagaatattg

SEQ ID NO: 1874768 - DNA, 25 bp, Homo sapien
agaaacttcttcaccgtgggcaggt

SEQ ID NO: 1874769 - DNA, 25 bp, Homo sapien
tgccaggctgtagaaacttcttcac

SEQ ID NO: 1874770 - DNA, 25 bp, Homo sapien
ggctgccaggctgtagaaacttctt

SEQ ID NO: 1874771 - DNA, 25 bp, Homo sapien
cttcttcaccgtgggcaggttgctg

SEQ ID NO: 1874772 - DNA, 25 bp, Homo sapien
aagcacagcctcagagtgaagccaa

SEQ ID NO: 1874773 - DNA, 25 bp, Homo sapien
caccaccattaataccacccaggga

SEQ ID NO: 1874774 - DNA, 25 bp, Homo sapien
ctttctccttacatatcaatcctgt

SEQ ID NO: 1874775 - DNA, 25 bp, Homo sapien
aagatgtcttaaagttttaatcaat

SEQ ID NO: 1874776 - DNA, 25 bp, Homo sapien
tgtagctcactttattttccgcaaa

SEQ ID NO: 1874777 - DNA, 25 bp, Homo sapien
ccttacatatcaatcctgtagatta

SEQ ID NO: 1874778 - DNA, 25 bp, Homo sapien
catagtagagaagttccaccaggct

SEQ ID NO: 1874779 - DNA, 25 bp, Homo sapien
atagtagagaagttccaccaggcta

SEQ ID NO: 1874780 - DNA, 25 bp, Homo sapien
aacaaggtagtcttgtccatggctc

SEQ ID NO: 1874781 - DNA, 25 bp, Homo sapien
caacaaggtagtcttgtccatggct

SEQ ID NO: 1874782 - DNA, 25 bp, Homo sapien
gctcagcttgttgccaacaaggtag

SEQ ID NO: 1874783 - DNA, 25 bp, Homo sapien
ttcaaatctgccataccttctgtat

SEQ ID NO: 1874784 - DNA, 25 bp, Homo sapien
attcaaatctgccataccttctgta

SEQ ID NO: 1874785 - DNA, 25 bp, Homo sapien
tcaaatctgccataccttctgtata

SEQ ID NO: 1874786 - DNA, 25 bp, Homo sapien
tcattcaaatctgccataccttctg

SEQ ID NO: 1874787 - DNA, 25 bp, Homo sapien
ctctgtggatggaagaacacaaaat

SEQ ID NO: 1874788 - DNA, 25 bp, Homo sapien
ctgtggatggaagaacacaaaatat

SEQ ID NO: 1874789 - DNA, 25 bp, Homo sapien
gttctctgtggatggaagaacacaa

SEQ ID NO: 1874790 - DNA, 25 bp, Homo sapien
tctgtgttctctgtggatggaagaa

SEQ ID NO: 1874791 - DNA, 25 bp, Homo sapien
ctcctttatgtctttcccgtagagg

SEQ ID NO: 1874792 - DNA, 25 bp, Homo sapien
gaggcacttagagacttgatcttac

SEQ ID NO: 1874793 - DNA, 25 bp, Homo sapien
cagaggcacttagagacttgatctt

SEQ ID NO: 1874794 - DNA, 25 bp, Homo sapien
tcagaggcacttagagacttgatct

SEQ ID NO: 1874795 - DNA, 25 bp, Homo sapien
agaggcacttagagacttgatctta

SEQ ID NO: 1874796 - DNA, 25 bp, Homo sapien
tcttaactttcccaaatcttctgca

SEQ ID NO: 1874797 - DNA, 25 bp, Homo sapien
cttctgcagatcctataaatttctc

SEQ ID NO: 1874798 - DNA, 25 bp, Homo sapien
tctgcagatcctataaatttctctt

SEQ ID NO: 1874799 - DNA, 25 bp, Homo sapien
aaatcttctgcagatcctataaatt

SEQ ID NO: 1874800 - DNA, 25 bp, Homo sapien
gctgcagccaagagccaccggatgg

SEQ ID NO: 1874801 - DNA, 25 bp, Homo sapien
tgcagccaagagccaccggatgggc

SEQ ID NO: 1874802 - DNA, 25 bp, Homo sapien
cagctgcagccaagagccaccggat

SEQ ID NO: 1874803 - DNA, 25 bp, Homo sapien
agccaagagccaccggatgggctcc

SEQ ID NO: 1874804 - DNA, 25 bp, Homo sapien
tgccccgtccattgaagtagtgaag

SEQ ID NO: 1874805 - DNA, 25 bp, Homo sapien
ccccgtccattgaagtagtgaagct

SEQ ID NO: 1874806 - DNA, 25 bp, Homo sapien
gtccattgaagtagtgaagcttggg

SEQ ID NO: 1874807 - DNA, 25 bp, Homo sapien
tctgccccgtccattgaagtagtga

SEQ ID NO: 1874808 - DNA, 25 bp, Homo sapien
tgctcccaaatgtgtgaccctgcca

SEQ ID NO: 1874809 - DNA, 25 bp, Homo sapien
gccagctctagaggaatacgaccat

SEQ ID NO: 1874810 - DNA, 25 bp, Homo sapien
tcaagcattggtgattggtttccca

SEQ ID NO: 1874811 - DNA, 25 bp, Homo sapien
gaccctgccagctttaaatctagta

SEQ ID NO: 1874812 - DNA, 25 bp, Homo sapien
gagtaaagtctagccggtctccgct

SEQ ID NO: 1874813 - DNA, 25 bp, Homo sapien
ttgagtaaagtctagccggtctccg

SEQ ID NO: 1874814 - DNA, 25 bp, Homo sapien
ccggtctccgctcagcttctcaagg

SEQ ID NO: 1874815 - DNA, 25 bp, Homo sapien
taaagtctagccggtctccgctcag

SEQ ID NO: 1874816 - DNA, 25 bp, Homo sapien
tctgtccagtcagcaggttgccctc

SEQ ID NO: 1874817 - DNA, 25 bp, Homo sapien
ctctgtccagtcagcaggttgccct

SEQ ID NO: 1874818 - DNA, 25 bp, Homo sapien
gccgtcaagttcagggactgtgtgt

SEQ ID NO: 1874819 - DNA, 25 bp, Homo sapien
agttcagggactgtgtgtcagctct

SEQ ID NO: 1874820 - DNA, 25 bp, Homo sapien
tcctgttgggccgtcaagttcaggg

SEQ ID NO: 1874821 - DNA, 25 bp, Homo sapien
gcaaagacggccacatcctgttggg

SEQ ID NO: 1874822 - DNA, 25 bp, Homo sapien
tttcctaactggaaactgaggagac

SEQ ID NO: 1874823 - DNA, 25 bp, Homo sapien
cacttggttacttttggctgcatca

SEQ ID NO: 1874824 - DNA, 25 bp, Homo sapien
tagacctttgtggttctgttggccc

SEQ ID NO: 1874825 - DNA, 25 bp, Homo sapien
tctggtaataccagccccactcttt

SEQ ID NO: 1874826 - DNA, 25 bp, Homo sapien
gagagatccttccctgcaaattgct

SEQ ID NO: 1874827 - DNA, 25 bp, Homo sapien
agtactcagcaattatggtgggtgt

SEQ ID NO: 1874828 - DNA, 25 bp, Homo sapien
tactcagcaattatggtgggtgttg

SEQ ID NO: 1874829 - DNA, 25 bp, Homo sapien
ctcagcaattatggtgggtgttgga

SEQ ID NO: 1874830 - DNA, 25 bp, Homo sapien
tgtttgtcatcacgcaacctgctgc

SEQ ID NO: 1874831 - DNA, 25 bp, Homo sapien
gccattagagcagcactatcttcct

SEQ ID NO: 1874832 - DNA, 25 bp, Homo sapien
tttgctcctgggatctacagtttgc

SEQ ID NO: 1874833 - DNA, 25 bp, Homo sapien
tggtgctgtgactggatcatcatgt

SEQ ID NO: 1874834 - DNA, 25 bp, Homo sapien
aaagcaggcagggttgtctggtagg

SEQ ID NO: 1874835 - DNA, 25 bp, Homo sapien
agcaggcagggttgtctggtaggac

SEQ ID NO: 1874836 - DNA, 25 bp, Homo sapien
ctaaaagcaggcagggttgtctggt

SEQ ID NO: 1874837 - DNA, 25 bp, Homo sapien
taaaagcaggcagggttgtctggta

SEQ ID NO: 1874838 - DNA, 25 bp, Homo sapien
atcgcttgaggccaagaggtcaagt

SEQ ID NO: 1874839 - DNA, 25 bp, Homo sapien
catgatcatgccactgcactcgaac

SEQ ID NO: 1874840 - DNA, 25 bp, Homo sapien
cagtgagccatgatcatgccactgc

SEQ ID NO: 1874841 - DNA, 25 bp, Homo sapien
gcttgaggccaagaggtcaagtctg

SEQ ID NO: 1874842 - DNA, 25 bp, Homo sapien
gcttctaacagctgtatgtctgccc

SEQ ID NO: 1874843 - DNA, 25 bp, Homo sapien
aaagaacagaagctttgagttcttc

SEQ ID NO: 1874844 - DNA, 25 bp, Homo sapien
tttgttgccaacaagaaaatcctct

SEQ ID NO: 1874845 - DNA, 25 bp, Homo sapien
aatttgttgccaacaagaaaatcct

SEQ ID NO: 1874846 - DNA, 25 bp, Homo sapien
taaagaaaaccagatcatctaccag

SEQ ID NO: 1874847 - DNA, 25 bp, Homo sapien
catagaagaaaagttgggaataaag

SEQ ID NO: 1874848 - DNA, 25 bp, Homo sapien
tgaaccatagaagaaaagttgggaa

SEQ ID NO: 1874849 - DNA, 25 bp, Homo sapien
cttctgaaccatagaagaaaagttg

SEQ ID NO: 1874850 - DNA, 25 bp, Homo sapien
atcaaatttctgatagtggttgcct

SEQ ID NO: 1874851 - DNA, 25 bp, Homo sapien
tctacatgatggaagcaagggtctc

SEQ ID NO: 1874852 - DNA, 25 bp, Homo sapien
ttcaaaggcaggcaagtactgagtt

SEQ ID NO: 1874853 - DNA, 25 bp, Homo sapien
caggtccagggtgccatcaacttac

SEQ ID NO: 1874854 - DNA, 25 bp, Homo sapien
caagtactgagttttagctttctac

SEQ ID NO: 1874855 - DNA, 25 bp, Homo sapien
ggatggctctagtctgcgtcagcac

SEQ ID NO: 1874856 - DNA, 25 bp, Homo sapien
catagaagttgtacttctcagcaag

SEQ ID NO: 1874857 - DNA, 25 bp, Homo sapien
atttcaaccaaagacacttggccga

SEQ ID NO: 1874858 - DNA, 25 bp, Homo sapien
gtacttctcagcaagatagttgagg

SEQ ID NO: 1874859 - DNA, 25 bp, Homo sapien
tttcatattattctcgtttcaagaa

SEQ ID NO: 1874860 - DNA, 25 bp, Homo sapien
gcaacttttcatattattctcgttt

SEQ ID NO: 1874861 - DNA, 25 bp, Homo sapien
ctgcaacttttcatattattctcgt

SEQ ID NO: 1874862 - DNA, 25 bp, Homo sapien
tattattctcgtttcaagaaattct

SEQ ID NO: 1874863 - DNA, 25 bp, Homo sapien
cttcccaatcccagtcaggaaccag

SEQ ID NO: 1874864 - DNA, 25 bp, Homo sapien
ccttcccaatcccagtcaggaacca

SEQ ID NO: 1874865 - DNA, 25 bp, Homo sapien
tgcagccagcagccagggggatgga

SEQ ID NO: 1874866 - DNA, 25 bp, Homo sapien
cagccagcagccagggggatggact

SEQ ID NO: 1874867 - DNA, 25 bp, Homo sapien
ccagcagccagggggatggactcca

SEQ ID NO: 1874868 - DNA, 25 bp, Homo sapien
cagcagccagggggatggactccat

SEQ ID NO: 1874869 - DNA, 25 bp, Homo sapien
gcccctgccatgaaagtagtagagc

SEQ ID NO: 1874870 - DNA, 25 bp, Homo sapien
tggctgccatgattcctggctcaaa

SEQ ID NO: 1874871 - DNA, 25 bp, Homo sapien
gccatgattcctggctcaaagtttt

SEQ ID NO: 1874872 - DNA, 25 bp, Homo sapien
ttgcccctgccatgaaagtagtaga

SEQ ID NO: 1874873 - DNA, 25 bp, Homo sapien
tgagccagccgtggggatgcattcc

SEQ ID NO: 1874874 - DNA, 25 bp, Homo sapien
ccacagccccgagtacatatctaag

SEQ ID NO: 1874875 - DNA, 25 bp, Homo sapien
gtacatatctaaggtgggctgagca

SEQ ID NO: 1874876 - DNA, 25 bp, Homo sapien
cccgagtacatatctaaggtgggct

SEQ ID NO: 1874877 - DNA, 25 bp, Homo sapien
tcatgggtgtgttgcactccaccac

SEQ ID NO: 1874878 - DNA, 25 bp, Homo sapien
caccaacatgccacaggggacatgc

SEQ ID NO: 1874879 - DNA, 25 bp, Homo sapien
acaaccacttgatcatgggtgtgtt

SEQ ID NO: 1874880 - DNA, 25 bp, Homo sapien
ccacttgatcatgggtgtgttgcac

SEQ ID NO: 1874881 - DNA, 25 bp, Homo sapien
tctctcttaggctcttatctccagg

SEQ ID NO: 1874882 - DNA, 25 bp, Homo sapien
cttctctcttaggctcttatctcca

SEQ ID NO: 1874883 - DNA, 25 bp, Homo sapien
ctcttaggctcttatctccagggtg

SEQ ID NO: 1874884 - DNA, 25 bp, Homo sapien
tctcttaggctcttatctccagggt

SEQ ID NO: 1874885 - DNA, 25 bp, Homo sapien
ctgaggggagattaagtgagggttt

SEQ ID NO: 1874886 - DNA, 25 bp, Homo sapien
tgaggggagattaagtgagggttta

SEQ ID NO: 1874887 - DNA, 25 bp, Homo sapien
ctgcagaactgcttcggccaggtga

SEQ ID NO: 1874888 - DNA, 25 bp, Homo sapien
tttctgctctgttccatcccctagg

SEQ ID NO: 1874889 - DNA, 25 bp, Homo sapien
ctgtcccgagggattcactttctgc

SEQ ID NO: 1874890 - DNA, 25 bp, Homo sapien
ggcacttctgtcctagacaccaggg

SEQ ID NO: 1874891 - DNA, 25 bp, Homo sapien
tcttttgttcctgacactgaagcct

SEQ ID NO: 1874892 - DNA, 25 bp, Homo sapien
ctcttttgttcctgacactgaagcc

SEQ ID NO: 1874893 - DNA, 25 bp, Homo sapien
tcctcttttgttcctgacactgaag

SEQ ID NO: 1874894 - DNA, 25 bp, Homo sapien
cctcttttgttcctgacactgaagc

SEQ ID NO: 1874895 - DNA, 25 bp, Homo sapien
aattctttattttggctaatactga

SEQ ID NO: 1874896 - DNA, 25 bp, Homo sapien
aaattctttattttggctaatactg

SEQ ID NO: 1874897 - DNA, 25 bp, Homo sapien
cataaattctttattttggctaata

SEQ ID NO: 1874898 - DNA, 25 bp, Homo sapien
gactcataaattctttattttggct

SEQ ID NO: 1874899 - DNA, 25 bp, Homo sapien
tacaggacatgagtagcccaatcag

SEQ ID NO: 1874900 - DNA, 25 bp, Homo sapien
tagatagcaccatgacagagctggg

SEQ ID NO: 1874901 - DNA, 25 bp, Homo sapien
tgaggatgaactggctacaggacat

SEQ ID NO: 1874902 - DNA, 25 bp, Homo sapien
tgacacaaaagacccaacttaggac

SEQ ID NO: 1874903 - DNA, 25 bp, Homo sapien
tatggcctaaagatgttgtagacgg

SEQ ID NO: 1874904 - DNA, 25 bp, Homo sapien
gttgtagacggttctcacataaatt

SEQ ID NO: 1874905 - DNA, 25 bp, Homo sapien
aaggaatctcttaattgtagggata

SEQ ID NO: 1874906 - DNA, 25 bp, Homo sapien
gggatattacttagtttcactgtgt

SEQ ID NO: 1874907 - DNA, 25 bp, Homo sapien
tctccaggttcacaaaaaggtaagc

SEQ ID NO: 1874908 - DNA, 25 bp, Homo sapien
tggacaaggctaggttaagatctga

SEQ ID NO: 1874909 - DNA, 25 bp, Homo sapien
tctgtcatcaatcaccggtatcaag

SEQ ID NO: 1874910 - DNA, 25 bp, Homo sapien
tcaagatcagagtttacacaaatct

SEQ ID NO: 1874911 - DNA, 25 bp, Homo sapien
gtagtcaatttgaagcagtgggagt

SEQ ID NO: 1874912 - DNA, 25 bp, Homo sapien
gctgtaaacaccactcggactagcc

SEQ ID NO: 1874913 - DNA, 25 bp, Homo sapien
tagctgtaaacaccactcggactag

SEQ ID NO: 1874914 - DNA, 25 bp, Homo sapien
caattagctgtaaacaccactcgga

SEQ ID NO: 1874915 - DNA, 25 bp, Homo sapien
tcttctaatacatagttttatttac

SEQ ID NO: 1874916 - DNA, 25 bp, Homo sapien
tggagtaaaatcacatctgcaaggc

SEQ ID NO: 1874917 - DNA, 25 bp, Homo sapien
caagaaagctttgtccgtgacccct

SEQ ID NO: 1874918 - DNA, 25 bp, Homo sapien
tcagctgattaccaacaagaaagct

SEQ ID NO: 1874919 - DNA, 25 bp, Homo sapien
gcaaggctcagctgattaccaacaa

SEQ ID NO: 1874920 - DNA, 25 bp, Homo sapien
tatctgctgtggatctgaatgagac

SEQ ID NO: 1874921 - DNA, 25 bp, Homo sapien
gaacgcaccctatatctgacagaga

SEQ ID NO: 1874922 - DNA, 25 bp, Homo sapien
gaggtgtagtcataaactcaaccca

SEQ ID NO: 1874923 - DNA, 25 bp, Homo sapien
tctgagaagaggtgaaactatgacc

SEQ ID NO: 1874924 - DNA, 25 bp, Homo sapien
gggacaacggttctcacctcatagg

SEQ ID NO: 1874925 - DNA, 25 bp, Homo sapien
cccttgggacctaagaatgagcagt

SEQ ID NO: 1874926 - DNA, 25 bp, Homo sapien
ctcataggcgtgttgcaagaaaccc

SEQ ID NO: 1874927 - DNA, 25 bp, Homo sapien
cagggactccgaacacaattccagg

SEQ ID NO: 1874928 - DNA, 25 bp, Homo sapien
taaagatggtcagaggaagcttgcc

SEQ ID NO: 1874929 - DNA, 25 bp, Homo sapien
gctactattcgctcttaggagtcca

SEQ ID NO: 1874930 - DNA, 25 bp, Homo sapien
tgaatcatgtggtcctagcagagtc

SEQ ID NO: 1874931 - DNA, 25 bp, Homo sapien
ccattagcgcttaggttagttcaac

SEQ ID NO: 1874932 - DNA, 25 bp, Homo sapien
ggccatgttaaccacttccttttgc

SEQ ID NO: 1874933 - DNA, 25 bp, Homo sapien
tctaattatagccttctgggccatg

SEQ ID NO: 1874934 - DNA, 25 bp, Homo sapien
tcaaacacaggaaagtatctaatta

SEQ ID NO: 1874935 - DNA, 25 bp, Homo sapien
tccttttgctgatcatctggtttta

SEQ ID NO: 1874936 - DNA, 25 bp, Homo sapien
tcttcgtatgggtcaaacttcaact

SEQ ID NO: 1874937 - DNA, 25 bp, Homo sapien
taatctaatgctcactctcccaggc

SEQ ID NO: 1874938 - DNA, 25 bp, Homo sapien
gcttgacagtcatgagtgctctctc

SEQ ID NO: 1874939 - DNA, 25 bp, Homo sapien
gatgctgcaacttaagtccctagaa

SEQ ID NO: 1874940 - DNA, 25 bp, Homo sapien
tgacaagtgacaacactcgagaggg

SEQ ID NO: 1874941 - DNA, 25 bp, Homo sapien
ctaaggcatcagtaagctgacaagt

SEQ ID NO: 1874942 - DNA, 25 bp, Homo sapien
taagctgacaagtgacaacactcga

SEQ ID NO: 1874943 - DNA, 25 bp, Homo sapien
caacactcgagaggggccacagtac

SEQ ID NO: 1874944 - DNA, 25 bp, Homo sapien
agggttctctccttgaggttcttgc

SEQ ID NO: 1874945 - DNA, 25 bp, Homo sapien
tgtctgctatgtagtggagaatgct

SEQ ID NO: 1874946 - DNA, 25 bp, Homo sapien
tatgtagtggagaatgcttcgggtc

SEQ ID NO: 1874947 - DNA, 25 bp, Homo sapien
tgctatgtagtggagaatgcttcgg

SEQ ID NO: 1874948 - DNA, 25 bp, Homo sapien
gcttgtctgctatgtagtggagaat

SEQ ID NO: 1874949 - DNA, 25 bp, Homo sapien
aatttcaaccatgggcacttgttgg

SEQ ID NO: 1874950 - DNA, 25 bp, Homo sapien
aacttcatcccgtcaatttcaacca

SEQ ID NO: 1874951 - DNA, 25 bp, Homo sapien
catgggcacttgttggaacagcagg

SEQ ID NO: 1874952 - DNA, 25 bp, Homo sapien
acttgttggaacagcaggtggttac

SEQ ID NO: 1874953 - DNA, 25 bp, Homo sapien
ccttaacttcattcaggagagcaga

SEQ ID NO: 1874954 - DNA, 25 bp, Homo sapien
gcttccagatgacagataaccttaa

SEQ ID NO: 1874955 - DNA, 25 bp, Homo sapien
gccttaggaaatagtgtaaagcttc

SEQ ID NO: 1874956 - DNA, 25 bp, Homo sapien
gaaaagaaacggtggaatcatggcc

SEQ ID NO: 1874957 - DNA, 25 bp, Homo sapien
cagaacagaccgtttactaccaagt

SEQ ID NO: 1874958 - DNA, 25 bp, Homo sapien
gctacactggccaatacagcagtca

SEQ ID NO: 1874959 - DNA, 25 bp, Homo sapien
tcagtccctaagttgcactagacat

SEQ ID NO: 1874960 - DNA, 25 bp, Homo sapien
gaaacctaagtaactagctgagact

SEQ ID NO: 1874961 - DNA, 25 bp, Homo sapien
catacttcaagcaggccaggatgcc

SEQ ID NO: 1874962 - DNA, 25 bp, Homo sapien
ccaggatgcctcagatagtgtgaag

SEQ ID NO: 1874963 - DNA, 25 bp, Homo sapien
tctttatgggtctgctggtggctcc

SEQ ID NO: 1874964 - DNA, 25 bp, Homo sapien
ctcacagggttgatgggcgcattct

SEQ ID NO: 1874965 - DNA, 25 bp, Homo sapien
gcaacttgtacaactgttcttttgt

SEQ ID NO: 1874966 - DNA, 25 bp, Homo sapien
tcttttgtttccagaaattcttcat

SEQ ID NO: 1874967 - DNA, 25 bp, Homo sapien
ttcttttgtttccagaaattcttca

SEQ ID NO: 1874968 - DNA, 25 bp, Homo sapien
catcctgcaacttgtacaactgttc

SEQ ID NO: 1874969 - DNA, 25 bp, Homo sapien
ggtaaatatcatacaggctcaggac

SEQ ID NO: 1874970 - DNA, 25 bp, Homo sapien
gaattggaatgttccgccataaagg

SEQ ID NO: 1874971 - DNA, 25 bp, Homo sapien
tctagtgttcgatagtacagtaggc

SEQ ID NO: 1874972 - DNA, 25 bp, Homo sapien
gaaagagcagacttagcatccacat

SEQ ID NO: 1874973 - DNA, 25 bp, Homo sapien
gcccttgggactgctctatagagta

SEQ ID NO: 1874974 - DNA, 25 bp, Homo sapien
gaggaaactgttataactgctaaac

SEQ ID NO: 1874975 - DNA, 25 bp, Homo sapien
cagacgtgtaaccattatatagaca

SEQ ID NO: 1874976 - DNA, 25 bp, Homo sapien
tcttggtggtgacaatggtattgtg

SEQ ID NO: 1874977 - DNA, 25 bp, Homo sapien
ccaccgtgccggctggttaatacca

SEQ ID NO: 1874978 - DNA, 25 bp, Homo sapien
ggtaaacctgaaagagcaccagtgg

SEQ ID NO: 1874979 - DNA, 25 bp, Homo sapien
caatttaggcaatttaagtcatcag

SEQ ID NO: 1874980 - DNA, 25 bp, Homo sapien
gtcatcagactataatctaaaatat

SEQ ID NO: 1874981 - DNA, 25 bp, Homo sapien
gataccaaggctgccagtttgaagc

SEQ ID NO: 1874982 - DNA, 25 bp, Homo sapien
ttcactggtgctagatcagaagcca

SEQ ID NO: 1874983 - DNA, 25 bp, Homo sapien
gctgaagtcgggtgatgagtacata

SEQ ID NO: 1874984 - DNA, 25 bp, Homo sapien
taaatgtaatgcgtagaccaatgtc

SEQ ID NO: 1874985 - DNA, 25 bp, Homo sapien
aaaatcccttcagggatggtatctg

SEQ ID NO: 1874986 - DNA, 25 bp, Homo sapien
agaaaaatcccttcagggatggtat

SEQ ID NO: 1874987 - DNA, 25 bp, Homo sapien
aatcccttcagggatggtatctgac

SEQ ID NO: 1874988 - DNA, 25 bp, Homo sapien
ataaagaaaaatcccttcagggatg

SEQ ID NO: 1874989 - DNA, 25 bp, Homo sapien
tttcaaaggtctcaaaagctgtatg

SEQ ID NO: 1874990 - DNA, 25 bp, Homo sapien
gacgagaactagaactgaacggtgc

SEQ ID NO: 1874991 - DNA, 25 bp, Homo sapien
cctgtgattttggtggacgagaact

SEQ ID NO: 1874992 - DNA, 25 bp, Homo sapien
gacaaatccgtgaagaaacagcata

SEQ ID NO: 1874993 - DNA, 25 bp, Homo sapien
tcttccgttgggatagtggagcttg

SEQ ID NO: 1874994 - DNA, 25 bp, Homo sapien
tccatccggcctcttccgttgggat

SEQ ID NO: 1874995 - DNA, 25 bp, Homo sapien
gactccggcggcagctaaaacccat

SEQ ID NO: 1874996 - DNA, 25 bp, Homo sapien
gcagctaaaacccatctcacggact

SEQ ID NO: 1874997 - DNA, 25 bp, Homo sapien
gaaggaaaatcgcacagccactgga

SEQ ID NO: 1874998 - DNA, 25 bp, Homo sapien
caatttcgcgtcttcaacccagtgc

SEQ ID NO: 1874999 - DNA, 25 bp, Homo sapien
tatgtgctagcagtacgggatttca

SEQ ID NO: 1875000 - DNA, 25 bp, Homo sapien
gcagaccaacagtcccaatttcgcg

SEQ ID NO: 1875001 - DNA, 25 bp, Homo sapien
tctgcccagactggatggagcagga

SEQ ID NO: 1875002 - DNA, 25 bp, Homo sapien
aatgcattcagactccgcagaaggg

SEQ ID NO: 1875003 - DNA, 25 bp, Homo sapien
gaagaatgcgagagtgagactcaga

SEQ ID NO: 1875004 - DNA, 25 bp, Homo sapien
atacgcacactgagccaagaaggac

SEQ ID NO: 1875005 - DNA, 25 bp, Homo sapien
aagcgccaggtcagcggtcccggct

SEQ ID NO: 1875006 - DNA, 25 bp, Homo sapien
cctggagccgcacaaagcgccaggt

SEQ ID NO: 1875007 - DNA, 25 bp, Homo sapien
caggcggctctagcgcgcgggagct

SEQ ID NO: 1875008 - DNA, 25 bp, Homo sapien
cgcacaaagcgccaggtcagcggtc

SEQ ID NO: 1875009 - DNA, 25 bp, Homo sapien
gacgtcacgtcccctctccacccgt

SEQ ID NO: 1875010 - DNA, 25 bp, Homo sapien
acgggtggagaggggacgtgacgtc

SEQ ID NO: 1875011 - DNA, 25 bp, Homo sapien
cgatagaggaggaccggtcttcggt

SEQ ID NO: 1875012 - DNA, 25 bp, Homo sapien
tgctaatcagatcaaagggaaggga

SEQ ID NO: 1875013 - DNA, 25 bp, Homo sapien
aaaagtctagaatgatgccctgtcc

SEQ ID NO: 1875014 - DNA, 25 bp, Homo sapien
tatagagtaggtattcagagaacac

SEQ ID NO: 1875015 - DNA, 25 bp, Homo sapien
gaatgtaaattccacgagatcgagg

SEQ ID NO: 1875016 - DNA, 25 bp, Homo sapien
accacatccggctaaattttgtaat

SEQ ID NO: 1875017 - DNA, 25 bp, Homo sapien
ctataacctctgtctcctgggctca

SEQ ID NO: 1875018 - DNA, 25 bp, Homo sapien
ggtggaggggggtgatctgggctca

SEQ ID NO: 1875019 - DNA, 25 bp, Homo sapien
gctggggtggaggggggtgatctgg

SEQ ID NO: 1875020 - DNA, 25 bp, Homo sapien
ttccttacataaggttgacatgttt

SEQ ID NO: 1875021 - DNA, 25 bp, Homo sapien
ttttccttacataaggttgacatgt

SEQ ID NO: 1875022 - DNA, 25 bp, Homo sapien
cttacataaggttgacatgttttaa

SEQ ID NO: 1875023 - DNA, 25 bp, Homo sapien
tccttacataaggttgacatgtttt

SEQ ID NO: 1875024 - DNA, 25 bp, Homo sapien
ttcatgagaaagcatggtgcccatc

SEQ ID NO: 1875025 - DNA, 25 bp, Homo sapien
taatggcttccatgagaaggtcctc

SEQ ID NO: 1875026 - DNA, 25 bp, Homo sapien
cataaatcctatcacacatgggctg

SEQ ID NO: 1875027 - DNA, 25 bp, Homo sapien
caatggcttgatggtagggaaatgc

SEQ ID NO: 1875028 - DNA, 25 bp, Homo sapien
cttcgtcactgaatttctgtctcat

SEQ ID NO: 1875029 - DNA, 25 bp, Homo sapien
gcacatcttgcaggtagaacaccag

SEQ ID NO: 1875030 - DNA, 25 bp, Homo sapien
tatagagatggatgagactggacct

SEQ ID NO: 1875031 - DNA, 25 bp, Homo sapien
tgagatctgcaaccacattaaaggg

SEQ ID NO: 1875032 - DNA, 25 bp, Homo sapien
ccagtcagctgagggaaagtatcct

SEQ ID NO: 1875033 - DNA, 25 bp, Homo sapien
gccgagatgcgtacttggaagccca

SEQ ID NO: 1875034 - DNA, 25 bp, Homo sapien
tctgtccggccatgcactggctggg

SEQ ID NO: 1875035 - DNA, 25 bp, Homo sapien
aatggtcgcccaggatgaggtctca

SEQ ID NO: 1875036 - DNA, 25 bp, Homo sapien
tatcaacccaggagtgcttctaggc

SEQ ID NO: 1875037 - DNA, 25 bp, Homo sapien
gacatagtttccagtcagtccacta

SEQ ID NO: 1875038 - DNA, 25 bp, Homo sapien
taggtgtaccctctgcatagcagaa

SEQ ID NO: 1875039 - DNA, 25 bp, Homo sapien
tagcagaaccgatttcttttttcag

SEQ ID NO: 1875040 - DNA, 25 bp, Homo sapien
tctggaataggtgctaggtgtaccc

SEQ ID NO: 1875041 - DNA, 25 bp, Homo sapien
gctcattattacaaagacatgtacc

SEQ ID NO: 1875042 - DNA, 25 bp, Homo sapien
tcctgtgaggggcaaccaaatagag

SEQ ID NO: 1875043 - DNA, 25 bp, Homo sapien
aagacatgtacccaggacaccaaca

SEQ ID NO: 1875044 - DNA, 25 bp, Homo sapien
atactaccctgtcagaaagactgcg

SEQ ID NO: 1875045 - DNA, 25 bp, Homo sapien
gaatttactttgctgattactgaca

SEQ ID NO: 1875046 - DNA, 25 bp, Homo sapien
taaattccttgcctggattcgagag

SEQ ID NO: 1875047 - DNA, 25 bp, Homo sapien
tgacattgtccctgaagattttcca

SEQ ID NO: 1875048 - DNA, 25 bp, Homo sapien
gccagaactagaccatggattaggt

SEQ ID NO: 1875049 - DNA, 25 bp, Homo sapien
agagggtgaggaatttcatgcatca

SEQ ID NO: 1875050 - DNA, 25 bp, Homo sapien
tcatgcatcaagagggcctgccatt

SEQ ID NO: 1875051 - DNA, 25 bp, Homo sapien
gtctagcaatatttagaagccacat

SEQ ID NO: 1875052 - DNA, 25 bp, Homo sapien
ggcctgtcaggccaatcttctaaga

SEQ ID NO: 1875053 - DNA, 25 bp, Homo sapien
agatctcagggtgggcgtgtctcgc

SEQ ID NO: 1875054 - DNA, 25 bp, Homo sapien
caggcaagtatcgagagtgcttcaa

SEQ ID NO: 1875055 - DNA, 25 bp, Homo sapien
tcgccgctgatatgacgtctgggtg

SEQ ID NO: 1875056 - DNA, 25 bp, Homo sapien
tatcgagagtgcttcaaatagtgct

SEQ ID NO: 1875057 - DNA, 25 bp, Homo sapien
cttcaggtccaaaacactctcaaac

SEQ ID NO: 1875058 - DNA, 25 bp, Homo sapien
cagcacgagagacagtatgtattct

SEQ ID NO: 1875059 - DNA, 25 bp, Homo sapien
ggatatgtacccataatctcatgaa

SEQ ID NO: 1875060 - DNA, 25 bp, Homo sapien
aatgaagagagcatggcttgggtca

SEQ ID NO: 1875061 - DNA, 25 bp, Homo sapien
aagagagcatggcttgggtcagcac

SEQ ID NO: 1875062 - DNA, 25 bp, Homo sapien
gaaatccaagtcatccaagtcagcc

SEQ ID NO: 1875063 - DNA, 25 bp, Homo sapien
tgagggatggactgaaatccaagtc

SEQ ID NO: 1875064 - DNA, 25 bp, Homo sapien
tttttcaggtcaatcctgctgaggg

SEQ ID NO: 1875065 - DNA, 25 bp, Homo sapien
gtcagcccaatcatctgaatccttt

SEQ ID NO: 1875066 - DNA, 25 bp, Homo sapien
tactctttggctttatctcaccatt

SEQ ID NO: 1875067 - DNA, 25 bp, Homo sapien
gctcctggggcataacattgcttat

SEQ ID NO: 1875068 - DNA, 25 bp, Homo sapien
tctctgctatgcaaaggaggctcct

SEQ ID NO: 1875069 - DNA, 25 bp, Homo sapien
catccatgagtaatctccatctgaa

SEQ ID NO: 1875070 - DNA, 25 bp, Homo sapien
tacttggcattaacagaactcatcc

SEQ ID NO: 1875071 - DNA, 25 bp, Homo sapien
aaagcaacgggcttggcttgtcctc

SEQ ID NO: 1875072 - DNA, 25 bp, Homo sapien
cgtgaagaaattcgtgtgtgtggct

SEQ ID NO: 1875073 - DNA, 25 bp, Homo sapien
tgcctagtgggtgtccaacttggaa

SEQ ID NO: 1875074 - DNA, 25 bp, Homo sapien
ggcaggtgggactggcttaatataa

SEQ ID NO: 1875075 - DNA, 25 bp, Homo sapien
gtcttgattactgggctatatttca

SEQ ID NO: 1875076 - DNA, 25 bp, Homo sapien
ctgtcttgattactgggctatattt

SEQ ID NO: 1875077 - DNA, 25 bp, Homo sapien
tgtcttgattactgggctatatttc

SEQ ID NO: 1875078 - DNA, 25 bp, Homo sapien
tcttgattactgggctatatttcat

SEQ ID NO: 1875079 - DNA, 25 bp, Homo sapien
cacactgtaaagtgctatgaaatac

SEQ ID NO: 1875080 - DNA, 25 bp, Homo sapien
gaaatactaagtgcagttactatcc

SEQ ID NO: 1875081 - DNA, 25 bp, Homo sapien
tcttcaggttatgagtcagttggac

SEQ ID NO: 1875082 - DNA, 25 bp, Homo sapien
tactatcctaggtctatctcatctg

SEQ ID NO: 1875083 - DNA, 25 bp, Homo sapien
gttagatatgaacgttataacaaga

SEQ ID NO: 1875084 - DNA, 25 bp, Homo sapien
tatgaacgttataacaagaaaatgg

SEQ ID NO: 1875085 - DNA, 25 bp, Homo sapien
tagatatgaacgttataacaagaaa

SEQ ID NO: 1875086 - DNA, 25 bp, Homo sapien
gagttagatatgaacgttataacaa

SEQ ID NO: 1875087 - DNA, 25 bp, Homo sapien
gctggactgcttcactgctagcatt

SEQ ID NO: 1875088 - DNA, 25 bp, Homo sapien
cacactgtggccaacggaagttcat

SEQ ID NO: 1875089 - DNA, 25 bp, Homo sapien
tggtcgtttcttgggatcccactga

SEQ ID NO: 1875090 - DNA, 25 bp, Homo sapien
gcattgggaatcaaggtctttaagt

SEQ ID NO: 1875091 - DNA, 25 bp, Homo sapien
cttgaaagttgatagccttcaggcc

SEQ ID NO: 1875092 - DNA, 25 bp, Homo sapien
tgaaagttgatagccttcaggccag

SEQ ID NO: 1875093 - DNA, 25 bp, Homo sapien
tgcacttgaaagttgatagccttca

SEQ ID NO: 1875094 - DNA, 25 bp, Homo sapien
gttgatagccttcaggccagtcagt

SEQ ID NO: 1875095 - DNA, 25 bp, Homo sapien
gggtgtaaacttctgccatgatgca

SEQ ID NO: 1875096 - DNA, 25 bp, Homo sapien
ttttttggtgtccccagcacttggc

SEQ ID NO: 1875097 - DNA, 25 bp, Homo sapien
attgtgtcaatttcactggctccag

SEQ ID NO: 1875098 - DNA, 25 bp, Homo sapien
gagctgtagttggtagacctcagga

SEQ ID NO: 1875099 - DNA, 25 bp, Homo sapien
tatatggaggttttgatcgtatttc

SEQ ID NO: 1875100 - DNA, 25 bp, Homo sapien
gatcgtatttctcgggccaaaccaa

SEQ ID NO: 1875101 - DNA, 25 bp, Homo sapien
ttcacaagttctggtcccatgcaga

SEQ ID NO: 1875102 - DNA, 25 bp, Homo sapien
aaccaaagtctgcaattttcacaag

SEQ ID NO: 1875103 - DNA, 25 bp, Homo sapien
tctaagacttagcataactgagtca

SEQ ID NO: 1875104 - DNA, 25 bp, Homo sapien
tgagtcattgtgtttggaccctctg

SEQ ID NO: 1875105 - DNA, 25 bp, Homo sapien
cagtgggtgacatctctaagactta

SEQ ID NO: 1875106 - DNA, 25 bp, Homo sapien
cagaaggcctgattgtgtgtttcca

SEQ ID NO: 1875107 - DNA, 25 bp, Homo sapien
tgattcgtagcagggttccagttct

SEQ ID NO: 1875108 - DNA, 25 bp, Homo sapien
gaattacatctgacatgctccatcg

SEQ ID NO: 1875109 - DNA, 25 bp, Homo sapien
gcaatgtgacctataacaataagcc

SEQ ID NO: 1875110 - DNA, 25 bp, Homo sapien
ctttgggcttctgattcacaatgga

SEQ ID NO: 1875111 - DNA, 25 bp, Homo sapien
tgcgagtccttgtaatatctgatac

SEQ ID NO: 1875112 - DNA, 25 bp, Homo sapien
aaatgcgagtccttgtaatatctga

SEQ ID NO: 1875113 - DNA, 25 bp, Homo sapien
tctgatacatgatattccttatagc

SEQ ID NO: 1875114 - DNA, 25 bp, Homo sapien
gatattccttatagcagactcagga

SEQ ID NO: 1875115 - DNA, 25 bp, Homo sapien
tctgaagctatcagagggcctctaa

SEQ ID NO: 1875116 - DNA, 25 bp, Homo sapien
cctaactggcagctttcaacatgaa

SEQ ID NO: 1875117 - DNA, 25 bp, Homo sapien
catgaaagcccagtagcgtgaatgt

SEQ ID NO: 1875118 - DNA, 25 bp, Homo sapien
tctaaagtagaaatatgggtgggcc

SEQ ID NO: 1875119 - DNA, 25 bp, Homo sapien
ctttaatgagctggtaaagattttc

SEQ ID NO: 1875120 - DNA, 25 bp, Homo sapien
aagattttccttcatgtactcgaag

SEQ ID NO: 1875121 - DNA, 25 bp, Homo sapien
taatttgactacattggcatggttg

SEQ ID NO: 1875122 - DNA, 25 bp, Homo sapien
cattggcatggttgagcttctttaa

SEQ ID NO: 1875123 - DNA, 25 bp, Homo sapien
tgtgcgtacatgtgagtatagccat

SEQ ID NO: 1875124 - DNA, 25 bp, Homo sapien
ccatgtgcacactgttttctgtttg

SEQ ID NO: 1875125 - DNA, 25 bp, Homo sapien
tcctggaacatgtgcgtacatgtga

SEQ ID NO: 1875126 - DNA, 25 bp, Homo sapien
gagtatagccatgtgcacactgttt

SEQ ID NO: 1875127 - DNA, 25 bp, Homo sapien
aattattccttggtatattaatata

SEQ ID NO: 1875128 - DNA, 25 bp, Homo sapien
taaattattccttggtatattaata

SEQ ID NO: 1875129 - DNA, 25 bp, Homo sapien
aaattattccttggtatattaatat

SEQ ID NO: 1875130 - DNA, 25 bp, Homo sapien
cgaaggttcatgcattcctcccagg

SEQ ID NO: 1875131 - DNA, 25 bp, Homo sapien
catgcattcctcccaggaataaaat

SEQ ID NO: 1875132 - DNA, 25 bp, Homo sapien
ttctcagtaataggttaaactttgc

SEQ ID NO: 1875133 - DNA, 25 bp, Homo sapien
caggcttattctatttagaccagag

SEQ ID NO: 1875134 - DNA, 25 bp, Homo sapien
cagcagtgcaataatcctaagtcac

SEQ ID NO: 1875135 - DNA, 25 bp, Homo sapien
aaacaaacagcacacttattctcag

SEQ ID NO: 1875136 - DNA, 25 bp, Homo sapien
aaccgtaggttccatccccgagctg

SEQ ID NO: 1875137 - DNA, 25 bp, Homo sapien
catccccgagctgcctgattgttgt

SEQ ID NO: 1875138 - DNA, 25 bp, Homo sapien
agcgatcagctccccagactcaatg

SEQ ID NO: 1875139 - DNA, 25 bp, Homo sapien
gcctgattgttgtgtatctattcat

SEQ ID NO: 1875140 - DNA, 25 bp, Homo sapien
ggtgtgcctgctcaggccggacact

SEQ ID NO: 1875141 - DNA, 25 bp, Homo sapien
tgcctgctcaggccggacactcatc

SEQ ID NO: 1875142 - DNA, 25 bp, Homo sapien
gtgtgcctgctcaggccggacactc

SEQ ID NO: 1875143 - DNA, 25 bp, Homo sapien
tgtgcctgctcaggccggacactca

SEQ ID NO: 1875144 - DNA, 25 bp, Homo sapien
cacggccgaagtggttcagttctgc

SEQ ID NO: 1875145 - DNA, 25 bp, Homo sapien
cagatttttcgatggcagcaccagc

SEQ ID NO: 1875146 - DNA, 25 bp, Homo sapien
cagtcctccccagagtgtaaccaga

SEQ ID NO: 1875147 - DNA, 25 bp, Homo sapien
cacaaggtattcaataggacgtgac

SEQ ID NO: 1875148 - DNA, 25 bp, Homo sapien
ctaagttgagacacatctgtgtatg

SEQ ID NO: 1875149 - DNA, 25 bp, Homo sapien
tctgtgtatgaatcctccatcattc

SEQ ID NO: 1875150 - DNA, 25 bp, Homo sapien
aagactcccaaaccatcgttgtatg

SEQ ID NO: 1875151 - DNA, 25 bp, Homo sapien
tatttcactttccaacaaattaaga

SEQ ID NO: 1875152 - DNA, 25 bp, Homo sapien
tcctctttcaatcccagcttctgaa

SEQ ID NO: 1875153 - DNA, 25 bp, Homo sapien
gcttctgaaaaaagaactcgtcctg

SEQ ID NO: 1875154 - DNA, 25 bp, Homo sapien
tccttaatcccatgagaagcttcca

SEQ ID NO: 1875155 - DNA, 25 bp, Homo sapien
gaactcgtcctgcactaggtcctta

SEQ ID NO: 1875156 - DNA, 25 bp, Homo sapien
tttggctgcaatcaaaggcatctct

SEQ ID NO: 1875157 - DNA, 25 bp, Homo sapien
catatcaaccttggttaccaccttg

SEQ ID NO: 1875158 - DNA, 25 bp, Homo sapien
agattgaatgaagatgcccatatca

SEQ ID NO: 1875159 - DNA, 25 bp, Homo sapien
tacttctttggctgcaatcaaaggc

SEQ ID NO: 1875160 - DNA, 25 bp, Homo sapien
gggcagacatcaatagaacggctag

SEQ ID NO: 1875161 - DNA, 25 bp, Homo sapien
cacagagaggtcattatatccagaa

SEQ ID NO: 1875162 - DNA, 25 bp, Homo sapien
ggctttcagatcaacatacacagag

SEQ ID NO: 1875163 - DNA, 25 bp, Homo sapien
cactcacatagatcccacaagcaga

SEQ ID NO: 1875164 - DNA, 25 bp, Homo sapien
aatccatcccgcttgtaaaattcag

SEQ ID NO: 1875165 - DNA, 25 bp, Homo sapien
cttagagaaatccatcccgcttgta

SEQ ID NO: 1875166 - DNA, 25 bp, Homo sapien
agagaaatccatcccgcttgtaaaa

SEQ ID NO: 1875167 - DNA, 25 bp, Homo sapien
cctcagcctagcacagctccagcaa

SEQ ID NO: 1875168 - DNA, 25 bp, Homo sapien
tacatataagtccttaatgttagtg

SEQ ID NO: 1875169 - DNA, 25 bp, Homo sapien
tccttaatgttagtgtcaaagtcaa

SEQ ID NO: 1875170 - DNA, 25 bp, Homo sapien
tagctatattacatataagtcctta

SEQ ID NO: 1875171 - DNA, 25 bp, Homo sapien
tgttctggaatatccgtcaatatcc

SEQ ID NO: 1875172 - DNA, 25 bp, Homo sapien
gggacaatccctgctaggaccggcc

SEQ ID NO: 1875173 - DNA, 25 bp, Homo sapien
taggaccggccgagggctccgtaca

SEQ ID NO: 1875174 - DNA, 25 bp, Homo sapien
atggtagtgcagcaggaacccggcc

SEQ ID NO: 1875175 - DNA, 25 bp, Homo sapien
tccgtacagggacgcccgcgaggtc

SEQ ID NO: 1875176 - DNA, 25 bp, Homo sapien
gctgaccgcaaggcgatctccgact

SEQ ID NO: 1875177 - DNA, 25 bp, Homo sapien
gttgcagatcggctcgatcaaccat

SEQ ID NO: 1875178 - DNA, 25 bp, Homo sapien
gcgtccctgcactgcgtcctgttcg

SEQ ID NO: 1875179 - DNA, 25 bp, Homo sapien
gactccgaacgaacgcctcgttgca

SEQ ID NO: 1875180 - DNA, 25 bp, Homo sapien
tgtaagttccggtgctcaaacctga

SEQ ID NO: 1875181 - DNA, 25 bp, Homo sapien
tctcagggcggcttgctttaagggc

SEQ ID NO: 1875182 - DNA, 25 bp, Homo sapien
gatctgtagtgagacatgccttgcg

SEQ ID NO: 1875183 - DNA, 25 bp, Homo sapien
tttcagggccatggaatcgcaagcc

SEQ ID NO: 1875184 - DNA, 25 bp, Homo sapien
cgtcggcgcaggtttccgcagctga

SEQ ID NO: 1875185 - DNA, 25 bp, Homo sapien
gcccgcagttattgccgctgcctgg

SEQ ID NO: 1875186 - DNA, 25 bp, Homo sapien
gggtctccagtagggctgacgctcc

SEQ ID NO: 1875187 - DNA, 25 bp, Homo sapien
tggtgcgcttctccgaccgagaact

SEQ ID NO: 1875188 - DNA, 25 bp, Homo sapien
acggagagcccctcgagcgcagcag

SEQ ID NO: 1875189 - DNA, 25 bp, Homo sapien
caggagtagacacccggacacccag

SEQ ID NO: 1875190 - DNA, 25 bp, Homo sapien
agacaggcaggagtagacacccgga

SEQ ID NO: 1875191 - DNA, 25 bp, Homo sapien
aggcaggagtagacacccggacacc

SEQ ID NO: 1875192 - DNA, 25 bp, Homo sapien
taagctgtcacagcgcctgaattcg

SEQ ID NO: 1875193 - DNA, 25 bp, Homo sapien
ttcacggctgccacccgttagaggg

SEQ ID NO: 1875194 - DNA, 25 bp, Homo sapien
gaaaatgtcccttctcggctcactg

SEQ ID NO: 1875195 - DNA, 25 bp, Homo sapien
aaccagtctcggtcctctcaaggga

SEQ ID NO: 1875196 - DNA, 25 bp, Homo sapien
taggacgcatctgccccgcgaggcg

SEQ ID NO: 1875197 - DNA, 25 bp, Homo sapien
ctgggtgtaggacgcatctgccccg

SEQ ID NO: 1875198 - DNA, 25 bp, Homo sapien
agccctgggtgtaggacgcatctgc

SEQ ID NO: 1875199 - DNA, 25 bp, Homo sapien
ctgccggcaccttgaggagccctgg

SEQ ID NO: 1875200 - DNA, 25 bp, Homo sapien
tggagggttcgtctccgcggcgtcg

SEQ ID NO: 1875201 - DNA, 25 bp, Homo sapien
tggcaggcggtcctggcggagtggg

SEQ ID NO: 1875202 - DNA, 25 bp, Homo sapien
ttggagggttcgtctccgcggcgtc

SEQ ID NO: 1875203 - DNA, 25 bp, Homo sapien
atgttggcaggcggtcctggcggag

SEQ ID NO: 1875204 - DNA, 25 bp, Homo sapien
ggagcgctccactggataagcattt

SEQ ID NO: 1875205 - DNA, 25 bp, Homo sapien
tcaagcagatttatgagcagatttc

SEQ ID NO: 1875206 - DNA, 25 bp, Homo sapien
agcattttatttcccgcatggcata

SEQ ID NO: 1875207 - DNA, 25 bp, Homo sapien
cactaaaggctcaaagtgtgagaac

SEQ ID NO: 1875208 - DNA, 25 bp, Homo sapien
gtagaggatcatgtaaacctgagcc

SEQ ID NO: 1875209 - DNA, 25 bp, Homo sapien
gagtgaatcccttaggactggaaca

SEQ ID NO: 1875210 - DNA, 25 bp, Homo sapien
ctcttgttccagtatgaaagttggg

SEQ ID NO: 1875211 - DNA, 25 bp, Homo sapien
gccacctaggaaaactgtatgttac

SEQ ID NO: 1875212 - DNA, 25 bp, Homo sapien
tttgagcactgcgatataaagagcc

SEQ ID NO: 1875213 - DNA, 25 bp, Homo sapien
gtcactatactcaaggcatggccag

SEQ ID NO: 1875214 - DNA, 25 bp, Homo sapien
cagcaagcataaatcgggaggctcc

SEQ ID NO: 1875215 - DNA, 25 bp, Homo sapien
tgaagtccctcggaatgctcactga

SEQ ID NO: 1875216 - DNA, 25 bp, Homo sapien
tcattcctacccttcagctcagtga

SEQ ID NO: 1875217 - DNA, 25 bp, Homo sapien
ttggtcctgtttccggtgcccatct

SEQ ID NO: 1875218 - DNA, 25 bp, Homo sapien
taactgtttgtattccctgggatgc

SEQ ID NO: 1875219 - DNA, 25 bp, Homo sapien
cagaaagactttcaagtattggtcc

SEQ ID NO: 1875220 - DNA, 25 bp, Homo sapien
tatgattctatttgttaggctcccc

SEQ ID NO: 1875221 - DNA, 25 bp, Homo sapien
tgcagtgccagtagatcctatttct

SEQ ID NO: 1875222 - DNA, 25 bp, Homo sapien
taaagagccagtctagtgatcacct

SEQ ID NO: 1875223 - DNA, 25 bp, Homo sapien
tacagctaccctcttatggatacaa

SEQ ID NO: 1875224 - DNA, 25 bp, Homo sapien
tcccaagaaggcatagatcaggtcc

SEQ ID NO: 1875225 - DNA, 25 bp, Homo sapien
caccccagacgggacaggtttccat

SEQ ID NO: 1875226 - DNA, 25 bp, Homo sapien
cattgccaggctaattgcacaagag

SEQ ID NO: 1875227 - DNA, 25 bp, Homo sapien
gaaaaaagccttgtcagccgggcac

SEQ ID NO: 1875228 - DNA, 25 bp, Homo sapien
caggttcagaagcatatcattgttg

SEQ ID NO: 1875229 - DNA, 25 bp, Homo sapien
agcatatcattgttgcagtgatcca

SEQ ID NO: 1875230 - DNA, 25 bp, Homo sapien
gcagtgatccaaacccaagtatgtc

SEQ ID NO: 1875231 - DNA, 25 bp, Homo sapien
gctgctcttgcttggcagtgaatat

SEQ ID NO: 1875232 - DNA, 25 bp, Homo sapien
ttgaggtgaatggtatgcaggagac

SEQ ID NO: 1875233 - DNA, 25 bp, Homo sapien
tcataaagattacccgctggatttg

SEQ ID NO: 1875234 - DNA, 25 bp, Homo sapien
tacccgctggatttggccataatgg

SEQ ID NO: 1875235 - DNA, 25 bp, Homo sapien
gagactggacgtagctgttaaaatc

SEQ ID NO: 1875236 - DNA, 25 bp, Homo sapien
tccacagtggaagtctggtcagtca

SEQ ID NO: 1875237 - DNA, 25 bp, Homo sapien
ggaagcaggtctccactactgtagg

SEQ ID NO: 1875238 - DNA, 25 bp, Homo sapien
tcagagtagactccggaggcagaag

SEQ ID NO: 1875239 - DNA, 25 bp, Homo sapien
tactccacgcttgtagatcgccatg

SEQ ID NO: 1875240 - DNA, 25 bp, Homo sapien
aactaccaggcaattggacgccttc

SEQ ID NO: 1875241 - DNA, 25 bp, Homo sapien
tgagttctgctgaggagtgttagct

SEQ ID NO: 1875242 - DNA, 25 bp, Homo sapien
ggagtgttagctattaaatgtccac

SEQ ID NO: 1875243 - DNA, 25 bp, Homo sapien
gctattaaatgtccactgtaactac

SEQ ID NO: 1875244 - DNA, 25 bp, Homo sapien
ccctgactttgtgtttcacctggaa

SEQ ID NO: 1875245 - DNA, 25 bp, Homo sapien
tcccctgactttgtgtttcacctgg

SEQ ID NO: 1875246 - DNA, 25 bp, Homo sapien
taaactcccctgactttgtgtttca

SEQ ID NO: 1875247 - DNA, 25 bp, Homo sapien
actcccctgactttgtgtttcacct

SEQ ID NO: 1875248 - DNA, 25 bp, Homo sapien
tcaatgagacggaggaaggtgctgt

SEQ ID NO: 1875249 - DNA, 25 bp, Homo sapien
tttctggttttggatgatcatgctc

SEQ ID NO: 1875250 - DNA, 25 bp, Homo sapien
ctggttttggatgatcatgctctcc

SEQ ID NO: 1875251 - DNA, 25 bp, Homo sapien
cttcaggctcaatgagacggaggaa

SEQ ID NO: 1875252 - DNA, 25 bp, Homo sapien
tcagaggcccgtcacagttgggaca

SEQ ID NO: 1875253 - DNA, 25 bp, Homo sapien
tccagaagttggtgaccgggaagcc

SEQ ID NO: 1875254 - DNA, 25 bp, Homo sapien
catgacctcggcaagggatgagctt

SEQ ID NO: 1875255 - DNA, 25 bp, Homo sapien
gaaaaatataaagcgtccgtcgtgc

SEQ ID NO: 1875256 - DNA, 25 bp, Homo sapien
gctcaggtgccgctgcgcattcttg

SEQ ID NO: 1875257 - DNA, 25 bp, Homo sapien
ggcataggaatctggccactcctgg

SEQ ID NO: 1875258 - DNA, 25 bp, Homo sapien
tctgcgagacagtcgcggccgcaca

SEQ ID NO: 1875259 - DNA, 25 bp, Homo sapien
cacagatggcaggtctcaggtagat

SEQ ID NO: 1875260 - DNA, 25 bp, Homo sapien
gctgcagggtaccagcagatgcaat

SEQ ID NO: 1875261 - DNA, 25 bp, Homo sapien
catgggagcccatataggtagagct

SEQ ID NO: 1875262 - DNA, 25 bp, Homo sapien
tgtatcacaccagaagcacagagtg

SEQ ID NO: 1875263 - DNA, 25 bp, Homo sapien
tggtccaaatagcagaggccccagt

SEQ ID NO: 1875264 - DNA, 25 bp, Homo sapien
tagtcaagacttcacagcccaatgt

SEQ ID NO: 1875265 - DNA, 25 bp, Homo sapien
tccaggtctccgcatgttaatagtc

SEQ ID NO: 1875266 - DNA, 25 bp, Homo sapien
ttcacagcccaatgttgaaggcaga

SEQ ID NO: 1875267 - DNA, 25 bp, Homo sapien
tccgcatgttaatagtcaagacttc

SEQ ID NO: 1875268 - DNA, 25 bp, Homo sapien
tatcccagcttaatatctctttgtc

SEQ ID NO: 1875269 - DNA, 25 bp, Homo sapien
taatatctctttgtcttcagaatca

SEQ ID NO: 1875270 - DNA, 25 bp, Homo sapien
cagaatcaaagtcgtcaggttccat

SEQ ID NO: 1875271 - DNA, 25 bp, Homo sapien
gtttcacatcattaatatcccagct

SEQ ID NO: 1875272 - DNA, 25 bp, Homo sapien
acctattcgactcccctcagaaatg

SEQ ID NO: 1875273 - DNA, 25 bp, Homo sapien
ggatcggcccactcaagcaccttgg

SEQ ID NO: 1875274 - DNA, 25 bp, Homo sapien
taaggtcaggccagccaaggttttc

SEQ ID NO: 1875275 - DNA, 25 bp, Homo sapien
tctcaaaggttcttgatatagctgg

SEQ ID NO: 1875276 - DNA, 25 bp, Homo sapien
cactgaactctaccaagggaaagtg

SEQ ID NO: 1875277 - DNA, 25 bp, Homo sapien
actgaactctaccaagggaaagtgt

SEQ ID NO: 1875278 - DNA, 25 bp, Homo sapien
ctaccaagggaaagtgtatgtatat

SEQ ID NO: 1875279 - DNA, 25 bp, Homo sapien
actctaccaagggaaagtgtatgta

SEQ ID NO: 1875280 - DNA, 25 bp, Homo sapien
ctgaacataagaatgaagttccttt

SEQ ID NO: 1875281 - DNA, 25 bp, Homo sapien
tttgtgtgtgctctagatgtccaga

SEQ ID NO: 1875282 - DNA, 25 bp, Homo sapien
gttgacctgaacataagaatgaagt

SEQ ID NO: 1875283 - DNA, 25 bp, Homo sapien
tgtgctctagatgtccagagaaatt

SEQ ID NO: 1875284 - DNA, 25 bp, Homo sapien
caacctagtggttgcagagcacgaa

SEQ ID NO: 1875285 - DNA, 25 bp, Homo sapien
gatgcagataccaagcagcagttcc

SEQ ID NO: 1875286 - DNA, 25 bp, Homo sapien
gtctgttccacatacccatactgag

SEQ ID NO: 1875287 - DNA, 25 bp, Homo sapien
tgtgttactgaagaaatgatgccgc

SEQ ID NO: 1875288 - DNA, 25 bp, Homo sapien
taacatttgctaagcgaatgagcat

SEQ ID NO: 1875289 - DNA, 25 bp, Homo sapien
atttgcctctccacgggatttctgg

SEQ ID NO: 1875290 - DNA, 25 bp, Homo sapien
aatagagtggtcgttgccacatccc

SEQ ID NO: 1875291 - DNA, 25 bp, Homo sapien
gcaacttgcgcaaagtatattcaat

SEQ ID NO: 1875292 - DNA, 25 bp, Homo sapien
ctgtgtcgtgaaaatcttactgctg

SEQ ID NO: 1875293 - DNA, 25 bp, Homo sapien
actgtgtcgtgaaaatcttactgct

SEQ ID NO: 1875294 - DNA, 25 bp, Homo sapien
gtgtcgtgaaaatcttactgctggt

SEQ ID NO: 1875295 - DNA, 25 bp, Homo sapien
tgtgtcgtgaaaatcttactgctgg

SEQ ID NO: 1875296 - DNA, 25 bp, Homo sapien
aaggcaaaaggcttggaaagcctca

SEQ ID NO: 1875297 - DNA, 25 bp, Homo sapien
cagagatgagaaggcgagaaggcaa

SEQ ID NO: 1875298 - DNA, 25 bp, Homo sapien
ctttcaaggatgaggcttaggaggc

SEQ ID NO: 1875299 - DNA, 25 bp, Homo sapien
gtcaggaaggtccagactttcaagg

SEQ ID NO: 1875300 - DNA, 25 bp, Homo sapien
tttagcgtatgtgctaaagggagta

SEQ ID NO: 1875301 - DNA, 25 bp, Homo sapien
atggaatgcttcactgacttgcatg

SEQ ID NO: 1875302 - DNA, 25 bp, Homo sapien
gcttcactgacttgcatgccatcct

SEQ ID NO: 1875303 - DNA, 25 bp, Homo sapien
ttagcgtatgtgctaaagggagtac

SEQ ID NO: 1875304 - DNA, 25 bp, Homo sapien
taaacacttcaggatacatctaacc

SEQ ID NO: 1875305 - DNA, 25 bp, Homo sapien
caatcacattaccaacataagtttt

SEQ ID NO: 1875306 - DNA, 25 bp, Homo sapien
aacaactttagtaaagcctcagaat

SEQ ID NO: 1875307 - DNA, 25 bp, Homo sapien
ctttagtaaagcctcagaatacaaa

SEQ ID NO: 1875308 - DNA, 25 bp, Homo sapien
gtggccgcacatcacagcctaacat

SEQ ID NO: 1875309 - DNA, 25 bp, Homo sapien
tactttttcttaagtggccgcacat

SEQ ID NO: 1875310 - DNA, 25 bp, Homo sapien
tttttcttaagtggccgcacatcac

SEQ ID NO: 1875311 - DNA, 25 bp, Homo sapien
cttaagtggccgcacatcacagcct

SEQ ID NO: 1875312 - DNA, 25 bp, Homo sapien
tgggcaatctcaatggcaccgcaag

SEQ ID NO: 1875313 - DNA, 25 bp, Homo sapien
ttattgggcaatctcaatggcaccg

SEQ ID NO: 1875314 - DNA, 25 bp, Homo sapien
ttgggcaatctcaatggcaccgcaa

SEQ ID NO: 1875315 - DNA, 25 bp, Homo sapien
tattgggcaatctcaatggcaccgc

SEQ ID NO: 1875316 - DNA, 25 bp, Homo sapien
tgaatcttcagtagacacattggcc

SEQ ID NO: 1875317 - DNA, 25 bp, Homo sapien
ttctggatcacccttgtacagccac

SEQ ID NO: 1875318 - DNA, 25 bp, Homo sapien
tgtacagccactgatggaatgatct

SEQ ID NO: 1875319 - DNA, 25 bp, Homo sapien
cagtgtttctcgtctttgtgctttc

SEQ ID NO: 1875320 - DNA, 25 bp, Homo sapien
tagtcaatcctataatgcgtcccga

SEQ ID NO: 1875321 - DNA, 25 bp, Homo sapien
cttctgtttaaagtggatggtgcca

SEQ ID NO: 1875322 - DNA, 25 bp, Homo sapien
aaactgatggacgtggaatctatgc

SEQ ID NO: 1875323 - DNA, 25 bp, Homo sapien
atggtgccagcacgaggccttaggc

SEQ ID NO: 1875324 - DNA, 25 bp, Homo sapien
ccactgtctggttgatagctttcat

SEQ ID NO: 1875325 - DNA, 25 bp, Homo sapien
cagatttgaagagccctttgaacta

SEQ ID NO: 1875326 - DNA, 25 bp, Homo sapien
ttgggccttgacatcacttacatca

SEQ ID NO: 1875327 - DNA, 25 bp, Homo sapien
acttacatcatcaccggactccagg

SEQ ID NO: 1875328 - DNA, 25 bp, Homo sapien
tgaagagccctttgaactagccaca

SEQ ID NO: 1875329 - DNA, 25 bp, Homo sapien
gaatccccgaagactgtatggtgct

SEQ ID NO: 1875330 - DNA, 25 bp, Homo sapien
tgaggccaacttcaccgtgggcatg

SEQ ID NO: 1875331 - DNA, 25 bp, Homo sapien
gacatggccatcttctgtgaggacc

SEQ ID NO: 1875332 - DNA, 25 bp, Homo sapien
tgatcacagtttaccctacagaggc

SEQ ID NO: 1875333 - DNA, 25 bp, Homo sapien
gctccagtgagcctacattgccctg

SEQ ID NO: 1875334 - DNA, 25 bp, Homo sapien
tggccccgtcaggttttctggtcag

SEQ ID NO: 1875335 - DNA, 25 bp, Homo sapien
gagctaaaagcatggcaaggaggca

SEQ ID NO: 1875336 - DNA, 25 bp, Homo sapien
actgtctgggtacaagtgtccttca

SEQ ID NO: 1875337 - DNA, 25 bp, Homo sapien
aaacactgcgcttttcctgagccca

SEQ ID NO: 1875338 - DNA, 25 bp, Homo sapien
taggcacatggcagcgttaactcat

SEQ ID NO: 1875339 - DNA, 25 bp, Homo sapien
ctgagcccagagaatggtgggtcct

SEQ ID NO: 1875340 - DNA, 25 bp, Homo sapien
gactgaagatcagccacggagaagc

SEQ ID NO: 1875341 - DNA, 25 bp, Homo sapien
aggaggtgggatgaatttgcaacat

SEQ ID NO: 1875342 - DNA, 25 bp, Homo sapien
caggaggtgggatgaatttgcaaca

SEQ ID NO: 1875343 - DNA, 25 bp, Homo sapien
tgagtatcatagctgcagcaggagg

SEQ ID NO: 1875344 - DNA, 25 bp, Homo sapien
tccaatatgagctgtgtcgctgtca

SEQ ID NO: 1875345 - DNA, 25 bp, Homo sapien
cacagtttccgtcttcatttgactg

SEQ ID NO: 1875346 - DNA, 25 bp, Homo sapien
gtcgctgtcacaaatggctttatta

SEQ ID NO: 1875347 - DNA, 25 bp, Homo sapien
tgagaataattcaacgacagagaat

SEQ ID NO: 1875348 - DNA, 25 bp, Homo sapien
taattgtatttaggccaagtgtggt

SEQ ID NO: 1875349 - DNA, 25 bp, Homo sapien
gattctctggcacgaactgaaggtg

SEQ ID NO: 1875350 - DNA, 25 bp, Homo sapien
tggctcttgacaggataatactttc

SEQ ID NO: 1875351 - DNA, 25 bp, Homo sapien
tactgagtctggttagggtggctct

SEQ ID NO: 1875352 - DNA, 25 bp, Homo sapien
gcagcaagacccttttcgcattttt

SEQ ID NO: 1875353 - DNA, 25 bp, Homo sapien
gtttgcacaaaaatgcgtacgatga

SEQ ID NO: 1875354 - DNA, 25 bp, Homo sapien
gtacgatgacatttcgcctcttggc

SEQ ID NO: 1875355 - DNA, 25 bp, Homo sapien
aaaatgcgtacgatgacatttcgcc

SEQ ID NO: 1875356 - DNA, 25 bp, Homo sapien
gcctgtctggctttcactttccctg

SEQ ID NO: 1875357 - DNA, 25 bp, Homo sapien
ggctttcactttccctggtgctgtc

SEQ ID NO: 1875358 - DNA, 25 bp, Homo sapien
gtctggctttcactttccctggtgc

SEQ ID NO: 1875359 - DNA, 25 bp, Homo sapien
gagtcgcccagtgcctgtctggctt

SEQ ID NO: 1875360 - DNA, 25 bp, Homo sapien
ttccacatttagttccgacatcacc

SEQ ID NO: 1875361 - DNA, 25 bp, Homo sapien
acatttagttccgacatcacctcct

SEQ ID NO: 1875362 - DNA, 25 bp, Homo sapien
caagactggtgcctcgccagtgtgt

SEQ ID NO: 1875363 - DNA, 25 bp, Homo sapien
tctccttgctcacaccaagactggt

SEQ ID NO: 1875364 - DNA, 25 bp, Homo sapien
gcttagcagaacctaagggagctca

SEQ ID NO: 1875365 - DNA, 25 bp, Homo sapien
tatgtccgctacaaatatgggcttc

SEQ ID NO: 1875366 - DNA, 25 bp, Homo sapien
gggaaggctatagaaccaggcttag

SEQ ID NO: 1875367 - DNA, 25 bp, Homo sapien
caccggatattgtggccagagctaa

SEQ ID NO: 1875368 - DNA, 25 bp, Homo sapien
agactagaagctgtgataggctggt

SEQ ID NO: 1875369 - DNA, 25 bp, Homo sapien
gaaatgacttcacctcatcaggggt

SEQ ID NO: 1875370 - DNA, 25 bp, Homo sapien
gcatctccatgtattgcctctgcac

SEQ ID NO: 1875371 - DNA, 25 bp, Homo sapien
catcaggggtcaaggctcttgctaa

SEQ ID NO: 1875372 - DNA, 25 bp, Homo sapien
taaacaattttctccatggcgactc

SEQ ID NO: 1875373 - DNA, 25 bp, Homo sapien
tttagtgggttacaggaatgcaagc

SEQ ID NO: 1875374 - DNA, 25 bp, Homo sapien
gagacagggattcaaagttgcacac

SEQ ID NO: 1875375 - DNA, 25 bp, Homo sapien
aattttaaagcaagtcatgtgtccc

SEQ ID NO: 1875376 - DNA, 25 bp, Homo sapien
tgcacccggccccctatataccaca

SEQ ID NO: 1875377 - DNA, 25 bp, Homo sapien
cacccggccccctatataccacatt

SEQ ID NO: 1875378 - DNA, 25 bp, Homo sapien
gcacccggccccctatataccacat

SEQ ID NO: 1875379 - DNA, 25 bp, Homo sapien
ggtaccttggcgtctcatgcttgag

SEQ ID NO: 1875380 - DNA, 25 bp, Homo sapien
tagtgagctccaatgcctggcatca

SEQ ID NO: 1875381 - DNA, 25 bp, Homo sapien
tctagaacaccttctgagccagcag

SEQ ID NO: 1875382 - DNA, 25 bp, Homo sapien
tgaatccctggtgagcctgctagtg

SEQ ID NO: 1875383 - DNA, 25 bp, Homo sapien
ccggccgcagtcctagacagaagtt

SEQ ID NO: 1875384 - DNA, 25 bp, Homo sapien
tgtggtccacacaggaaggtcttac

SEQ ID NO: 1875385 - DNA, 25 bp, Homo sapien
tgaatacggttgcagagagtctcgc

SEQ ID NO: 1875386 - DNA, 25 bp, Homo sapien
caggcctccttgcattgactgtacg

SEQ ID NO: 1875387 - DNA, 25 bp, Homo sapien
aattctaacattctcagggtaaggg

SEQ ID NO: 1875388 - DNA, 25 bp, Homo sapien
gacctatggtctagacctaggaaag

SEQ ID NO: 1875389 - DNA, 25 bp, Homo sapien
cacgatggcacagtcaagtggctgc

SEQ ID NO: 1875390 - DNA, 25 bp, Homo sapien
atgggttcaggcgatctttggcctc

SEQ ID NO: 1875391 - DNA, 25 bp, Homo sapien
caatagtacaaaactgaaggtgccg

SEQ ID NO: 1875392 - DNA, 25 bp, Homo sapien
tatacatcctctctcgcactggtgg

SEQ ID NO: 1875393 - DNA, 25 bp, Homo sapien
taggctccctatagtacgaatgtgc

SEQ ID NO: 1875394 - DNA, 25 bp, Homo sapien
taaactaataagctttgggccctgc

SEQ ID NO: 1875395 - DNA, 25 bp, Homo sapien
gatgacgtggtttggagggtttcaa

SEQ ID NO: 1875396 - DNA, 25 bp, Homo sapien
cagatgacgtggtttggagggtttc

SEQ ID NO: 1875397 - DNA, 25 bp, Homo sapien
aatcagatgacgtggtttggagggt

SEQ ID NO: 1875398 - DNA, 25 bp, Homo sapien
tcagatgacgtggtttggagggttt

SEQ ID NO: 1875399 - DNA, 25 bp, Homo sapien
tgaaaagctgttggtgtgtccattc

SEQ ID NO: 1875400 - DNA, 25 bp, Homo sapien
gaaaagctgttggtgtgtccattca

SEQ ID NO: 1875401 - DNA, 25 bp, Homo sapien
gcttcacattgttttccaggggtga

SEQ ID NO: 1875402 - DNA, 25 bp, Homo sapien
atggacccattctggtggtccttca

SEQ ID NO: 1875403 - DNA, 25 bp, Homo sapien
gcaacatagggtcctgctgcacagt

SEQ ID NO: 1875404 - DNA, 25 bp, Homo sapien
cgtgttttgcccagatcagcaggcc

SEQ ID NO: 1875405 - DNA, 25 bp, Homo sapien
ggacaaatgtctgagcctcgggact

SEQ ID NO: 1875406 - DNA, 25 bp, Homo sapien
catttggccatgacgttcagggtag

SEQ ID NO: 1875407 - DNA, 25 bp, Homo sapien
ccgcagctggtctggatgattgtca

SEQ ID NO: 1875408 - DNA, 25 bp, Homo sapien
tatccaatctggaaatacaaccaac

SEQ ID NO: 1875409 - DNA, 25 bp, Homo sapien
ggatgattgtcagcacaaactgaag

SEQ ID NO: 1875410 - DNA, 25 bp, Homo sapien
ccaaccaagagggaatgtgcacggc

SEQ ID NO: 1875411 - DNA, 25 bp, Homo sapien
aaaaaagggctaggctctgcacact

SEQ ID NO: 1875412 - DNA, 25 bp, Homo sapien
taaaccttgaaacgcatgtgaactg

SEQ ID NO: 1875413 - DNA, 25 bp, Homo sapien
ttaacacttactacccttgctgcag

SEQ ID NO: 1875414 - DNA, 25 bp, Homo sapien
gatgcagctgaacagggacagtgca

SEQ ID NO: 1875415 - DNA, 25 bp, Homo sapien
cctgagtgatgtacttcttccacca

SEQ ID NO: 1875416 - DNA, 25 bp, Homo sapien
tcttccaccagaggtatggacgcat

SEQ ID NO: 1875417 - DNA, 25 bp, Homo sapien
ttcttccaccagaggtatggacgca

SEQ ID NO: 1875418 - DNA, 25 bp, Homo sapien
cccctgagtgatgtacttcttccac

SEQ ID NO: 1875419 - DNA, 25 bp, Homo sapien
gactgacgacaaaccatagtaagag

SEQ ID NO: 1875420 - DNA, 25 bp, Homo sapien
ggaagggactgacgacaaaccatag

SEQ ID NO: 1875421 - DNA, 25 bp, Homo sapien
gggactgacgacaaaccatagtaag

SEQ ID NO: 1875422 - DNA, 25 bp, Homo sapien
gacgacaaaccatagtaagagtaca

SEQ ID NO: 1875423 - DNA, 25 bp, Homo sapien
gacgtggatgaagctattaagtgtg

SEQ ID NO: 1875424 - DNA, 25 bp, Homo sapien
tgaagctattaagtgtggcaccaaa

SEQ ID NO: 1875425 - DNA, 25 bp, Homo sapien
cgtggatgaagctattaagtgtggc

SEQ ID NO: 1875426 - DNA, 25 bp, Homo sapien
gatgaagctattaagtgtggcacca

SEQ ID NO: 1875427 - DNA, 25 bp, Homo sapien
ttctttacatgcacaactgcccaaa

SEQ ID NO: 1875428 - DNA, 25 bp, Homo sapien
actgcccaaatatgctctctgaagg

SEQ ID NO: 1875429 - DNA, 25 bp, Homo sapien
agagacagctgtttttctttacatg

SEQ ID NO: 1875430 - DNA, 25 bp, Homo sapien
tgcacaactgcccaaatatgctctc

SEQ ID NO: 1875431 - DNA, 25 bp, Homo sapien
tagacgtgcaggaccgtgatctggt

SEQ ID NO: 1875432 - DNA, 25 bp, Homo sapien
tcacaaaccaccagatgttcagcat

SEQ ID NO: 1875433 - DNA, 25 bp, Homo sapien
gtttggagaagtagtaccaccagag

SEQ ID NO: 1875434 - DNA, 25 bp, Homo sapien
tcagcatcgaggcatggtggtagac

SEQ ID NO: 1875435 - DNA, 25 bp, Homo sapien
cctgcggtgcgtgtgccctgacaga

SEQ ID NO: 1875436 - DNA, 25 bp, Homo sapien
atatctgattctcctgcggtgcgtg

SEQ ID NO: 1875437 - DNA, 25 bp, Homo sapien
tctgattctcctgcggtgcgtgtgc

SEQ ID NO: 1875438 - DNA, 25 bp, Homo sapien
tgtgccctgacagaagaagttgtat

SEQ ID NO: 1875439 - DNA, 25 bp, Homo sapien
gaacaagaggtgattacaaggatct

SEQ ID NO: 1875440 - DNA, 25 bp, Homo sapien
tcaatgggcccgtgataactgcagg

SEQ ID NO: 1875441 - DNA, 25 bp, Homo sapien
tagcttggcgagcaacacagattcc

SEQ ID NO: 1875442 - DNA, 25 bp, Homo sapien
tgtgatgtagagtctgcaccccaat

SEQ ID NO: 1875443 - DNA, 25 bp, Homo sapien
gggtatcctgccttctatctgattt

SEQ ID NO: 1875444 - DNA, 25 bp, Homo sapien
tatcctgccttctatctgatttttc

SEQ ID NO: 1875445 - DNA, 25 bp, Homo sapien
tctttggttatctttcttcttgcca

SEQ ID NO: 1875446 - DNA, 25 bp, Homo sapien
gctgggtatcctgccttctatctga

SEQ ID NO: 1875447 - DNA, 25 bp, Homo sapien
tcattagaaggtgtattaacttttc

SEQ ID NO: 1875448 - DNA, 25 bp, Homo sapien
cagtcaagcaggatccatgcaggct

SEQ ID NO: 1875449 - DNA, 25 bp, Homo sapien
taaagtcatggccagtcaagcagga

SEQ ID NO: 1875450 - DNA, 25 bp, Homo sapien
tactactctctaaagtcatggccag

SEQ ID NO: 1875451 - DNA, 25 bp, Homo sapien
tttcactcctgaagcataaaccagg

SEQ ID NO: 1875452 - DNA, 25 bp, Homo sapien
cagaagggactcttggacacaggct

SEQ ID NO: 1875453 - DNA, 25 bp, Homo sapien
gcaggcgcctcaatcccaaagatga

SEQ ID NO: 1875454 - DNA, 25 bp, Homo sapien
cctcagtattgggtggtgaactttt

SEQ ID NO: 1875455 - DNA, 25 bp, Homo sapien
taatgggcctgttgtgtgctcttct

SEQ ID NO: 1875456 - DNA, 25 bp, Homo sapien
tgcatcaacatattccagcacaggg

SEQ ID NO: 1875457 - DNA, 25 bp, Homo sapien
cacatgctccctttgttaatgggcc

SEQ ID NO: 1875458 - DNA, 25 bp, Homo sapien
ctgtaagatttcgaagggtggtgac

SEQ ID NO: 1875459 - DNA, 25 bp, Homo sapien
tcagatcgaaagaggacaggactat

SEQ ID NO: 1875460 - DNA, 25 bp, Homo sapien
gagataaagtcaataaccctgatgg

SEQ ID NO: 1875461 - DNA, 25 bp, Homo sapien
ttaattaggccaagaggatgtgcag

SEQ ID NO: 1875462 - DNA, 25 bp, Homo sapien
tcaagttgcgtgttaagtagacacc

SEQ ID NO: 1875463 - DNA, 25 bp, Homo sapien
ctcaaacagcagttccaagcatctt

SEQ ID NO: 1875464 - DNA, 25 bp, Homo sapien
tcaaacagcagttccaagcatcttt

SEQ ID NO: 1875465 - DNA, 25 bp, Homo sapien
caaacagcagttccaagcatctttg

SEQ ID NO: 1875466 - DNA, 25 bp, Homo sapien
ccactttagttgaggatctgtagag

SEQ ID NO: 1875467 - DNA, 25 bp, Homo sapien
tctctgtagaaagtattcccttccc

SEQ ID NO: 1875468 - DNA, 25 bp, Homo sapien
gctcctagctacaccagctgcagag

SEQ ID NO: 1875469 - DNA, 25 bp, Homo sapien
gatgtttgagctgcatccttctctc

SEQ ID NO: 1875470 - DNA, 25 bp, Homo sapien
gggagatgctttcacagcccacaat

SEQ ID NO: 1875471 - DNA, 25 bp, Homo sapien
tgccaggttgcttaagtgtttttcc

SEQ ID NO: 1875472 - DNA, 25 bp, Homo sapien
tgctctatacctctgctaaatggga

SEQ ID NO: 1875473 - DNA, 25 bp, Homo sapien
tgatcaggcatttcttgtaagtact

SEQ ID NO: 1875474 - DNA, 25 bp, Homo sapien
tgtcggattcagtcattaaacccct

SEQ ID NO: 1875475 - DNA, 25 bp, Homo sapien
aagaagattcttggcacactgttaa

SEQ ID NO: 1875476 - DNA, 25 bp, Homo sapien
ttgaacaacttgcataaacccacat

SEQ ID NO: 1875477 - DNA, 25 bp, Homo sapien
cccattaaagacaagagactgtcgg

SEQ ID NO: 1875478 - DNA, 25 bp, Homo sapien
tcttagaacgtactatgtgttgtca

SEQ ID NO: 1875479 - DNA, 25 bp, Homo sapien
gtacaaatttccgaagaagtctgga

SEQ ID NO: 1875480 - DNA, 25 bp, Homo sapien
taattagtataccattcacgtatgg

SEQ ID NO: 1875481 - DNA, 25 bp, Homo sapien
tacgactcaagatgaattggtcaaa

SEQ ID NO: 1875482 - DNA, 25 bp, Homo sapien
ggttgctcccttttggactgtaaca

SEQ ID NO: 1875483 - DNA, 25 bp, Homo sapien
caattagatcctctctgcttagggt

SEQ ID NO: 1875484 - DNA, 25 bp, Homo sapien
tcgaaggatcagttcgtgaggcaca

SEQ ID NO: 1875485 - DNA, 25 bp, Homo sapien
cacaggcagatcgacggggttgctc

SEQ ID NO: 1875486 - DNA, 25 bp, Homo sapien
ggaggcgagaagcagtgagcaccac

SEQ ID NO: 1875487 - DNA, 25 bp, Homo sapien
aaactatgagcaagtctatattcct

SEQ ID NO: 1875488 - DNA, 25 bp, Homo sapien
aactatgagcaagtctatattcctt

SEQ ID NO: 1875489 - DNA, 25 bp, Homo sapien
caggaggcgagaagcagtgagcacc

SEQ ID NO: 1875490 - DNA, 25 bp, Homo sapien
ttacaatgtgttcagaaccccccac

SEQ ID NO: 1875491 - DNA, 25 bp, Homo sapien
tacaatgtgttcagaaccccccaca

SEQ ID NO: 1875492 - DNA, 25 bp, Homo sapien
ctcagatgcacacagctgtacttta

SEQ ID NO: 1875493 - DNA, 25 bp, Homo sapien
gatgcacacagctgtactttataca

SEQ ID NO: 1875494 - DNA, 25 bp, Homo sapien
cctgaactctccatcttggagtcta

SEQ ID NO: 1875495 - DNA, 25 bp, Homo sapien
actctccatcttggagtctaattaa

SEQ ID NO: 1875496 - DNA, 25 bp, Homo sapien
tggggccaggagtcactcctgtgca

SEQ ID NO: 1875497 - DNA, 25 bp, Homo sapien
ctggctccagtcctgaactctccat

SEQ ID NO: 1875498 - DNA, 25 bp, Homo sapien
cacaccaccacacgtagacagggag

SEQ ID NO: 1875499 - DNA, 25 bp, Homo sapien
accacacgtagacagggagacacca

SEQ ID NO: 1875500 - DNA, 25 bp, Homo sapien
ctgataatcaaatatgcctgcacac

SEQ ID NO: 1875501 - DNA, 25 bp, Homo sapien
aatcaaatatgcctgcacacgccca

SEQ ID NO: 1875502 - DNA, 25 bp, Homo sapien
ccccggcaagagaatggctgtttat

SEQ ID NO: 1875503 - DNA, 25 bp, Homo sapien
tagtaaatatatgacagagcagata

SEQ ID NO: 1875504 - DNA, 25 bp, Homo sapien
tggtcccagccatacaattagtaaa

SEQ ID NO: 1875505 - DNA, 25 bp, Homo sapien
agcagtgtgagtccaaggttataca

SEQ ID NO: 1875506 - DNA, 25 bp, Homo sapien
ggtataccagattacacatagggtg

SEQ ID NO: 1875507 - DNA, 25 bp, Homo sapien
ctcagctgtgtgtcagtcggcaagt

SEQ ID NO: 1875508 - DNA, 25 bp, Homo sapien
gactcagaaaacgtgctgcttagcc

SEQ ID NO: 1875509 - DNA, 25 bp, Homo sapien
tgcttagccacgttagtgaaactgg

SEQ ID NO: 1875510 - DNA, 25 bp, Homo sapien
ttgacccctcccagactggaccatc

SEQ ID NO: 1875511 - DNA, 25 bp, Homo sapien
tcccagactggaccatcttgctact

SEQ ID NO: 1875512 - DNA, 25 bp, Homo sapien
cagactggaccatcttgctactctc

SEQ ID NO: 1875513 - DNA, 25 bp, Homo sapien
gactggaccatcttgctactctctc

SEQ ID NO: 1875514 - DNA, 25 bp, Homo sapien
ccaggtagagaatccttaggatcta

SEQ ID NO: 1875515 - DNA, 25 bp, Homo sapien
cacaaatactcatctttccaaattg

SEQ ID NO: 1875516 - DNA, 25 bp, Homo sapien
atctagtcaatctgtggtggtccta

SEQ ID NO: 1875517 - DNA, 25 bp, Homo sapien
caaattggcacatattcatcctccc

SEQ ID NO: 1875518 - DNA, 25 bp, Homo sapien
aagtgggggacccattctgaggaca

SEQ ID NO: 1875519 - DNA, 25 bp, Homo sapien
tagccatcctacaactgtgtgaagt

SEQ ID NO: 1875520 - DNA, 25 bp, Homo sapien
gctggcaaagagctctgggaaacaa

SEQ ID NO: 1875521 - DNA, 25 bp, Homo sapien
catgtgaagcaattgtggccagtga

SEQ ID NO: 1875522 - DNA, 25 bp, Homo sapien
ctcgagggcctagcaatgccttgaa

SEQ ID NO: 1875523 - DNA, 25 bp, Homo sapien
taggtactaagtgatgcatcaaaat

SEQ ID NO: 1875524 - DNA, 25 bp, Homo sapien
cctagcaatgccttgaaataggtac

SEQ ID NO: 1875525 - DNA, 25 bp, Homo sapien
cttgaaataggtactaagtgatgca

SEQ ID NO: 1875526 - DNA, 25 bp, Homo sapien
attccaacaaattctgcagcaattc

SEQ ID NO: 1875527 - DNA, 25 bp, Homo sapien
aaattctgcagcaattccctgtttc

SEQ ID NO: 1875528 - DNA, 25 bp, Homo sapien
caacaaattctgcagcaattccctg

SEQ ID NO: 1875529 - DNA, 25 bp, Homo sapien
caaattctgcagcaattccctgttt

SEQ ID NO: 1875530 - DNA, 25 bp, Homo sapien
gcaagtaccaaaattcaactctagg

SEQ ID NO: 1875531 - DNA, 25 bp, Homo sapien
tcatttcaattctctgcaagtacca

SEQ ID NO: 1875532 - DNA, 25 bp, Homo sapien
caaaattcaactctaggctgtcata

SEQ ID NO: 1875533 - DNA, 25 bp, Homo sapien
tctaggctgtcatagagccatttag

SEQ ID NO: 1875534 - DNA, 25 bp, Homo sapien
taatcaccagacaagagatccctgc

SEQ ID NO: 1875535 - DNA, 25 bp, Homo sapien
tcatccatgcttgtgataatcacca

SEQ ID NO: 1875536 - DNA, 25 bp, Homo sapien
ttgtgataatcaccagacaagagat

SEQ ID NO: 1875537 - DNA, 25 bp, Homo sapien
catgcttgtgataatcaccagacaa

SEQ ID NO: 1875538 - DNA, 25 bp, Homo sapien
catgccataccaaagagtatgtgta

SEQ ID NO: 1875539 - DNA, 25 bp, Homo sapien
ggtcatactcgcaattgacagccca

SEQ ID NO: 1875540 - DNA, 25 bp, Homo sapien
aattgacagcccatgccataccaaa

SEQ ID NO: 1875541 - DNA, 25 bp, Homo sapien
tctgttgggtatgaagcaagaggtc

SEQ ID NO: 1875542 - DNA, 25 bp, Homo sapien
cagagacatttccaaataacgttac

SEQ ID NO: 1875543 - DNA, 25 bp, Homo sapien
tgcagagacatttccaaataacgtt

SEQ ID NO: 1875544 - DNA, 25 bp, Homo sapien
ctgcagagacatttccaaataacgt

SEQ ID NO: 1875545 - DNA, 25 bp, Homo sapien
gcagagacatttccaaataacgtta

SEQ ID NO: 1875546 - DNA, 25 bp, Homo sapien
tgcagacatcatgcgcatcaccatc

SEQ ID NO: 1875547 - DNA, 25 bp, Homo sapien
tcctgcagacatcatgcgcatcacc

SEQ ID NO: 1875548 - DNA, 25 bp, Homo sapien
agacatcatgcgcatcaccatccac

SEQ ID NO: 1875549 - DNA, 25 bp, Homo sapien
ctgcagacatcatgcgcatcaccat

SEQ ID NO: 1875550 - DNA, 25 bp, Homo sapien
ttcacatgtgaaggtgacacacata

SEQ ID NO: 1875551 - DNA, 25 bp, Homo sapien
agttcacatgtgaaggtgacacaca

SEQ ID NO: 1875552 - DNA, 25 bp, Homo sapien
tcacatgtgaaggtgacacacatag

SEQ ID NO: 1875553 - DNA, 25 bp, Homo sapien
gttcacatgtgaaggtgacacacat

SEQ ID NO: 1875554 - DNA, 25 bp, Homo sapien
ttcaacccaatcagccaaacaggag

SEQ ID NO: 1875555 - DNA, 25 bp, Homo sapien
aaagacctgccggaagctgtttcac

SEQ ID NO: 1875556 - DNA, 25 bp, Homo sapien
catatacacagaacggagcaggagg

SEQ ID NO: 1875557 - DNA, 25 bp, Homo sapien
gaactctttaccatgagatggcacc

SEQ ID NO: 1875558 - DNA, 25 bp, Homo sapien
ctccccaaaagggtacagctacagg

SEQ ID NO: 1875559 - DNA, 25 bp, Homo sapien
cccaaaagggtacagctacagggtg

SEQ ID NO: 1875560 - DNA, 25 bp, Homo sapien
aaagggtacagctacagggtggctt

SEQ ID NO: 1875561 - DNA, 25 bp, Homo sapien
ttgggccactatgtgcccccagcat

SEQ ID NO: 1875562 - DNA, 25 bp, Homo sapien
gaaatgatatctggtgctgctccac

SEQ ID NO: 1875563 - DNA, 25 bp, Homo sapien
gagtatccctttgcaagagaacggt

SEQ ID NO: 1875564 - DNA, 25 bp, Homo sapien
tacagtatgaaaacccaagagacag

SEQ ID NO: 1875565 - DNA, 25 bp, Homo sapien
gattagtacactctctcccagtgga

SEQ ID NO: 1875566 - DNA, 25 bp, Homo sapien
ctccagaaaccagtcaaaggctccg

SEQ ID NO: 1875567 - DNA, 25 bp, Homo sapien
ccagaaaccagtcaaaggctccggg

SEQ ID NO: 1875568 - DNA, 25 bp, Homo sapien
cagtcaaaggctccggggaaaatga

SEQ ID NO: 1875569 - DNA, 25 bp, Homo sapien
tcaaaggctccggggaaaatgacca

SEQ ID NO: 1875570 - DNA, 25 bp, Homo sapien
tgtttactcgcagggcacacctttg

SEQ ID NO: 1875571 - DNA, 25 bp, Homo sapien
taagcctgacagacgtatgatgagc

SEQ ID NO: 1875572 - DNA, 25 bp, Homo sapien
tattccgtccttgggaacagtgcca

SEQ ID NO: 1875573 - DNA, 25 bp, Homo sapien
gtaatatgcaggtaagcaaggccct

SEQ ID NO: 1875574 - DNA, 25 bp, Homo sapien
cttcaaccattgtttactataaagg

SEQ ID NO: 1875575 - DNA, 25 bp, Homo sapien
ccttcaaccattgtttactataaag

SEQ ID NO: 1875576 - DNA, 25 bp, Homo sapien
tcaaccattgtttactataaaggta

SEQ ID NO: 1875577 - DNA, 25 bp, Homo sapien
tgatttctggtagtgagcacaggca

SEQ ID NO: 1875578 - DNA, 25 bp, Homo sapien
agggcctgcaaatttcttggattca

SEQ ID NO: 1875579 - DNA, 25 bp, Homo sapien
cagcaaggtctggtgagggtgtctt

SEQ ID NO: 1875580 - DNA, 25 bp, Homo sapien
tcctcggaagcctcatctacatatt

SEQ ID NO: 1875581 - DNA, 25 bp, Homo sapien
tacccttcacacgaacatggatgtc

SEQ ID NO: 1875582 - DNA, 25 bp, Homo sapien
gggcccctcgttcatcctgatgaag

SEQ ID NO: 1875583 - DNA, 25 bp, Homo sapien
gcagacctaattccagtagcttgta

SEQ ID NO: 1875584 - DNA, 25 bp, Homo sapien
gaaggacagcataaatctgaaccac

SEQ ID NO: 1875585 - DNA, 25 bp, Homo sapien
ctccttgtatgtgaagatctgcaca

SEQ ID NO: 1875586 - DNA, 25 bp, Homo sapien
caacgagtccttagatggcatgtct

SEQ ID NO: 1875587 - DNA, 25 bp, Homo sapien
ccaggcataggtaagagctcctcat

SEQ ID NO: 1875588 - DNA, 25 bp, Homo sapien
ctgcagccaacgagtccttagatgg

SEQ ID NO: 1875589 - DNA, 25 bp, Homo sapien
catgtctccaggcataggtaagagc

SEQ ID NO: 1875590 - DNA, 25 bp, Homo sapien
ttctaaagtctcctgcccaggtaag

SEQ ID NO: 1875591 - DNA, 25 bp, Homo sapien
catgccacaacaggaaaaggtgtct

SEQ ID NO: 1875592 - DNA, 25 bp, Homo sapien
cttcagctggaagcaaggcaactgg

SEQ ID NO: 1875593 - DNA, 25 bp, Homo sapien
tatgtattctcaggctatcaaggca

SEQ ID NO: 1875594 - DNA, 25 bp, Homo sapien
agacctgagtggccaattcgccagc

SEQ ID NO: 1875595 - DNA, 25 bp, Homo sapien
gaccaaagaggaacaagtactactc

SEQ ID NO: 1875596 - DNA, 25 bp, Homo sapien
catttgctgtgccaagaccaaagag

SEQ ID NO: 1875597 - DNA, 25 bp, Homo sapien
attcgccagcatggcttcaattagg

SEQ ID NO: 1875598 - DNA, 25 bp, Homo sapien
aaaaccgcctgtttctatctgtaga

SEQ ID NO: 1875599 - DNA, 25 bp, Homo sapien
tgtccacggccatctaatgcaaaac

SEQ ID NO: 1875600 - DNA, 25 bp, Homo sapien
tgtagattctgcacgaaatgctttt

SEQ ID NO: 1875601 - DNA, 25 bp, Homo sapien
aatgcttttggctgagacgtgcaag

SEQ ID NO: 1875602 - DNA, 25 bp, Homo sapien
agaacaactcttgctctaggcattg

SEQ ID NO: 1875603 - DNA, 25 bp, Homo sapien
gggaaccgccaagtgcaagaacacg

SEQ ID NO: 1875604 - DNA, 25 bp, Homo sapien
tgctctaggcattgctccgtcgacc

SEQ ID NO: 1875605 - DNA, 25 bp, Homo sapien
ggttgcaagacgcagttcagcaaga

SEQ ID NO: 1875606 - DNA, 25 bp, Homo sapien
tcaataaaaactgaagcggtcccga

SEQ ID NO: 1875607 - DNA, 25 bp, Homo sapien
gcagggttaacggaagcggagagaa

SEQ ID NO: 1875608 - DNA, 25 bp, Homo sapien
aagcggtcccgagctagcaggcttc

SEQ ID NO: 1875609 - DNA, 25 bp, Homo sapien
gaccctcgcacaggctcttcgaact

SEQ ID NO: 1875610 - DNA, 25 bp, Homo sapien
aagcgcgctccctccgagagcgctc

SEQ ID NO: 1875611 - DNA, 25 bp, Homo sapien
gtttcgccgactccaaagaaagcgc

SEQ ID NO: 1875612 - DNA, 25 bp, Homo sapien
ctccgagagcgctcccccggctctc

SEQ ID NO: 1875613 - DNA, 25 bp, Homo sapien
tcgccgactccaaagaaagcgcgct

SEQ ID NO: 1875614 - DNA, 25 bp, Homo sapien
gctctttctcggcaccaggtccgag

SEQ ID NO: 1875615 - DNA, 25 bp, Homo sapien
cgctcgcgcgggtgtcatggccgag

SEQ ID NO: 1875616 - DNA, 25 bp, Homo sapien
caggtccgagacctaacggcagttc

SEQ ID NO: 1875617 - DNA, 25 bp, Homo sapien
cggcgcctgtcagcgcgcacaggtg

SEQ ID NO: 1875618 - DNA, 25 bp, Homo sapien
taaattccagaatccgatgcggtgg

SEQ ID NO: 1875619 - DNA, 25 bp, Homo sapien
aaggcgccggctatctacaatcaga

SEQ ID NO: 1875620 - DNA, 25 bp, Homo sapien
tcgggacccgaaggatgaatcaagc

SEQ ID NO: 1875621 - DNA, 25 bp, Homo sapien
caatcgcgggacaatagaactttcg

SEQ ID NO: 1875622 - DNA, 25 bp, Homo sapien
ggatgatatgagtgtggccaccatt

SEQ ID NO: 1875623 - DNA, 25 bp, Homo sapien
tgatttgtgcccatggcattgagag

SEQ ID NO: 1875624 - DNA, 25 bp, Homo sapien
ctcctccaagaaaagtcagtggatg

SEQ ID NO: 1875625 - DNA, 25 bp, Homo sapien
ttgattcggcaacccaaggtggatg

SEQ ID NO: 1875626 - DNA, 25 bp, Homo sapien
ctggagcgagagatttctgaaaaac

SEQ ID NO: 1875627 - DNA, 25 bp, Homo sapien
tctacttgtagtgaaatgaatcaca

SEQ ID NO: 1875628 - DNA, 25 bp, Homo sapien
tcgaggatctcagttacttatttgt

SEQ ID NO: 1875629 - DNA, 25 bp, Homo sapien
cagttctttggagatttgtgatcga

SEQ ID NO: 1875630 - DNA, 25 bp, Homo sapien
gtaaatgttctaaatcaagacaaaa

SEQ ID NO: 1875631 - DNA, 25 bp, Homo sapien
aatgacagatgctgctgtcaaatca

SEQ ID NO: 1875632 - DNA, 25 bp, Homo sapien
agatgatagcacctcatcagccaga

SEQ ID NO: 1875633 - DNA, 25 bp, Homo sapien
ttcagaaagatgatgagtggtgatg

SEQ ID NO: 1875634 - DNA, 25 bp, Homo sapien
gggcagtatcaattctggtgatcaa

SEQ ID NO: 1875635 - DNA, 25 bp, Homo sapien
ctgtttgtagctaaggctcaggata

SEQ ID NO: 1875636 - DNA, 25 bp, Homo sapien
gtttgtagctaaggctcaggatatt

SEQ ID NO: 1875637 - DNA, 25 bp, Homo sapien
tagctaaggctcaggatattggaaa

SEQ ID NO: 1875638 - DNA, 25 bp, Homo sapien
taaggctcaggatattggaaagttc

SEQ ID NO: 1875639 - DNA, 25 bp, Homo sapien
tgagcaagcgagtcgtactgttttc

SEQ ID NO: 1875640 - DNA, 25 bp, Homo sapien
gttttaatgagcaagcgagtcgtac

SEQ ID NO: 1875641 - DNA, 25 bp, Homo sapien
taatgagcaagcgagtcgtactgtt

SEQ ID NO: 1875642 - DNA, 25 bp, Homo sapien
agcgagtcgtactgttttcttggtt

SEQ ID NO: 1875643 - DNA, 25 bp, Homo sapien
ggcaggggatggcatatgatctatt

SEQ ID NO: 1875644 - DNA, 25 bp, Homo sapien
gcatatgatctatttgcctacactt

SEQ ID NO: 1875645 - DNA, 25 bp, Homo sapien
atatgatctatttgcctacactttg

SEQ ID NO: 1875646 - DNA, 25 bp, Homo sapien
tgcctacactttgcttcagctgaca

SEQ ID NO: 1875647 - DNA, 25 bp, Homo sapien
cctcgggtagctcttgcttccagat

SEQ ID NO: 1875648 - DNA, 25 bp, Homo sapien
attttattaacccacacatcccagc

SEQ ID NO: 1875649 - DNA, 25 bp, Homo sapien
ttagcctgtcctcgggtagctcttg

SEQ ID NO: 1875650 - DNA, 25 bp, Homo sapien
tcactccttagcctgtcctcgggta

SEQ ID NO: 1875651 - DNA, 25 bp, Homo sapien
actgctgacgttgctgatgactgtg

SEQ ID NO: 1875652 - DNA, 25 bp, Homo sapien
ccaccctgtgaactgctgacgttgc

SEQ ID NO: 1875653 - DNA, 25 bp, Homo sapien
ctgacgttgctgatgactgtgggca

SEQ ID NO: 1875654 - DNA, 25 bp, Homo sapien
gtgaactgctgacgttgctgatgac

SEQ ID NO: 1875655 - DNA, 25 bp, Homo sapien
cccactgtggatctttttaatgctg

SEQ ID NO: 1875656 - DNA, 25 bp, Homo sapien
tcaataacacattctgtccaatatt

SEQ ID NO: 1875657 - DNA, 25 bp, Homo sapien
cccctttctaaagtctatggtacag

SEQ ID NO: 1875658 - DNA, 25 bp, Homo sapien
taatgctgtgtagatacagaaatat

SEQ ID NO: 1875659 - DNA, 25 bp, Homo sapien
atctttgacttctttccgaatgtcc

SEQ ID NO: 1875660 - DNA, 25 bp, Homo sapien
gctgctgagattggcatgcaatctt

SEQ ID NO: 1875661 - DNA, 25 bp, Homo sapien
tcttcttcaacagaagggcagttag

SEQ ID NO: 1875662 - DNA, 25 bp, Homo sapien
cacactaacgatttctagctgctga

SEQ ID NO: 1875663 - DNA, 25 bp, Homo sapien
ggtgagactccaagcacacactaac

SEQ ID NO: 1875664 - DNA, 25 bp, Homo sapien
gatgtcgggtcttgagatcccttga

SEQ ID NO: 1875665 - DNA, 25 bp, Homo sapien
ggacatatttgatgtcgggtcttga

SEQ ID NO: 1875666 - DNA, 25 bp, Homo sapien
cagtaactttgggacatatttgatg

SEQ ID NO: 1875667 - DNA, 25 bp, Homo sapien
gtgttcagtaactttgggacatatt

SEQ ID NO: 1875668 - DNA, 25 bp, Homo sapien
gaactgtcttgcagctggagaagag

SEQ ID NO: 1875669 - DNA, 25 bp, Homo sapien
gcctgctctccgaactgtcttgcag

SEQ ID NO: 1875670 - DNA, 25 bp, Homo sapien
gagaagagcagccaaagctcctgca

SEQ ID NO: 1875671 - DNA, 25 bp, Homo sapien
tccgaactgtcttgcagctggagaa

SEQ ID NO: 1875672 - DNA, 25 bp, Homo sapien
acaggaagagatctgccttactcct

SEQ ID NO: 1875673 - DNA, 25 bp, Homo sapien
cttgtttctaaagggctgaggtgtg

SEQ ID NO: 1875674 - DNA, 25 bp, Homo sapien
catatagaacgtttgaaagtttctg

SEQ ID NO: 1875675 - DNA, 25 bp, Homo sapien
tgagagaggcgactggaacactgcc

SEQ ID NO: 1875676 - DNA, 25 bp, Homo sapien
cagcaagtctctgtaatacctcggt

SEQ ID NO: 1875677 - DNA, 25 bp, Homo sapien
gttttgttggccttgcttcacagca

SEQ ID NO: 1875678 - DNA, 25 bp, Homo sapien
taatacctcggtatgttgccagtgg

SEQ ID NO: 1875679 - DNA, 25 bp, Homo sapien
ccatacttgtctgacctgggcagcc

SEQ ID NO: 1875680 - DNA, 25 bp, Homo sapien
gacatttctccgatggtgcctgaag

SEQ ID NO: 1875681 - DNA, 25 bp, Homo sapien
aagttcgatgcatagaggtttttct

SEQ ID NO: 1875682 - DNA, 25 bp, Homo sapien
gcctgaagttcgatgcatagaggtt

SEQ ID NO: 1875683 - DNA, 25 bp, Homo sapien
ccgatggtgcctgaagttcgatgca

SEQ ID NO: 1875684 - DNA, 25 bp, Homo sapien
gcccttgtgcttcacgagaataagt

SEQ ID NO: 1875685 - DNA, 25 bp, Homo sapien
tgtgcttcacgagaataagttgatc

SEQ ID NO: 1875686 - DNA, 25 bp, Homo sapien
agaaggggtgttcatatcaggccct

SEQ ID NO: 1875687 - DNA, 25 bp, Homo sapien
cacgagaataagttgatcgggtaaa

SEQ ID NO: 1875688 - DNA, 25 bp, Homo sapien
gataaaaacatatgaagagcttctc

SEQ ID NO: 1875689 - DNA, 25 bp, Homo sapien
caggactgtttgagaggtgataaaa

SEQ ID NO: 1875690 - DNA, 25 bp, Homo sapien
acatatgaagagcttctcatgtttc

SEQ ID NO: 1875691 - DNA, 25 bp, Homo sapien
aaaacatatgaagagcttctcatgt

SEQ ID NO: 1875692 - DNA, 25 bp, Homo sapien
caaattgcaaacgaaaaccaggcat

SEQ ID NO: 1875693 - DNA, 25 bp, Homo sapien
gatttacacaagcaaattgcaaacg

SEQ ID NO: 1875694 - DNA, 25 bp, Homo sapien
gcaaacgaaaaccaggcattcttta

SEQ ID NO: 1875695 - DNA, 25 bp, Homo sapien
ttttatttcctcataccacaaacat

SEQ ID NO: 1875696 - DNA, 25 bp, Homo sapien
gccacaagagaagaacgccattttt

SEQ ID NO: 1875697 - DNA, 25 bp, Homo sapien
caatcagaataacaggccacaagag

SEQ ID NO: 1875698 - DNA, 25 bp, Homo sapien
gaatattccccaggtaaaatctgga

SEQ ID NO: 1875699 - DNA, 25 bp, Homo sapien
caaaactgtatacagcagcaatcag

SEQ ID NO: 1875700 - DNA, 25 bp, Homo sapien
gataaggtgctagaaacccaagatt

SEQ ID NO: 1875701 - DNA, 25 bp, Homo sapien
aacatcatagataaggtgctagaaa

SEQ ID NO: 1875702 - DNA, 25 bp, Homo sapien
gaaacccaagattacccttgaagca

SEQ ID NO: 1875703 - DNA, 25 bp, Homo sapien
caatgggtatttattcagaggggaa

SEQ ID NO: 1875704 - DNA, 25 bp, Homo sapien
tgtagccagttcgtcaataatgcat

SEQ ID NO: 1875705 - DNA, 25 bp, Homo sapien
ttcatattatacacacgggctggct

SEQ ID NO: 1875706 - DNA, 25 bp, Homo sapien
tgcttagacagtaggttgctccaga

SEQ ID NO: 1875707 - DNA, 25 bp, Homo sapien
gctgagaggcatggtactgtagcca

SEQ ID NO: 1875708 - DNA, 25 bp, Homo sapien
tcatttcatcagttatgacactgtc

SEQ ID NO: 1875709 - DNA, 25 bp, Homo sapien
aatgctgatccaagtaactctgggc

SEQ ID NO: 1875710 - DNA, 25 bp, Homo sapien
agttatgacactgtcttgcttgtag

SEQ ID NO: 1875711 - DNA, 25 bp, Homo sapien
tcaggatggtttgcgataaactccc

SEQ ID NO: 1875712 - DNA, 25 bp, Homo sapien
tacggctatcctttgtgactccaga

SEQ ID NO: 1875713 - DNA, 25 bp, Homo sapien
gccagtgtcatgagactgcctcaga

SEQ ID NO: 1875714 - DNA, 25 bp, Homo sapien
tggccagagggctaggactacaaat

SEQ ID NO: 1875715 - DNA, 25 bp, Homo sapien
tgttagatgccacccatatgctgac

SEQ ID NO: 1875716 - DNA, 25 bp, Homo sapien
ttcttaattagctttaggtagttca

SEQ ID NO: 1875717 - DNA, 25 bp, Homo sapien
agttcagaatactacatctggtgtc

SEQ ID NO: 1875718 - DNA, 25 bp, Homo sapien
tttcaaggtaagagttcagaattgg

SEQ ID NO: 1875719 - DNA, 25 bp, Homo sapien
gaattgggatcagtccaggaaacac

SEQ ID NO: 1875720 - DNA, 25 bp, Homo sapien
gacactttatgaactccctgccggg

SEQ ID NO: 1875721 - DNA, 25 bp, Homo sapien
agcaggacactttatgaactccctg

SEQ ID NO: 1875722 - DNA, 25 bp, Homo sapien
agaagcaggacactttatgaactcc

SEQ ID NO: 1875723 - DNA, 25 bp, Homo sapien
tgaggggtactgtacagggccaccc

SEQ ID NO: 1875724 - DNA, 25 bp, Homo sapien
tgatggtgtctatgctcatgagggt

SEQ ID NO: 1875725 - DNA, 25 bp, Homo sapien
gagggtgtactcctctgcagcgagc

SEQ ID NO: 1875726 - DNA, 25 bp, Homo sapien
tctatgctcatgagggtgtactcct

SEQ ID NO: 1875727 - DNA, 25 bp, Homo sapien
cattgatgatggtgtctatgctcat

SEQ ID NO: 1875728 - DNA, 25 bp, Homo sapien
ggccttgccacaaccatccaccact

SEQ ID NO: 1875729 - DNA, 25 bp, Homo sapien
cttgccacaaccatccaccactgca

SEQ ID NO: 1875730 - DNA, 25 bp, Homo sapien
caaccatccaccactgcattgccac

SEQ ID NO: 1875731 - DNA, 25 bp, Homo sapien
tgggccttgccacaaccatccacca

SEQ ID NO: 1875732 - DNA, 25 bp, Homo sapien
aggggagctttagcagcttgttgca

SEQ ID NO: 1875733 - DNA, 25 bp, Homo sapien
cttgttgcagcataagctgacatta

SEQ ID NO: 1875734 - DNA, 25 bp, Homo sapien
cagcataagctgacattagaaatct

SEQ ID NO: 1875735 - DNA, 25 bp, Homo sapien
cataagctgacattagaaatctaag

SEQ ID NO: 1875736 - DNA, 25 bp, Homo sapien
ttttctgtgctaccttcatgttctc

SEQ ID NO: 1875737 - DNA, 25 bp, Homo sapien
aataaaacattccctgcaagacagc

SEQ ID NO: 1875738 - DNA, 25 bp, Homo sapien
tctggaataaggttacagccctccc

SEQ ID NO: 1875739 - DNA, 25 bp, Homo sapien
gagtcccagggtaacgaaggcagaa

SEQ ID NO: 1875740 - DNA, 25 bp, Homo sapien
tgagccttgcaacagatatacagtg

SEQ ID NO: 1875741 - DNA, 25 bp, Homo sapien
tatatagcagtgtctcaccaggagt

SEQ ID NO: 1875742 - DNA, 25 bp, Homo sapien
gtattacccatcacactaaactctt

SEQ ID NO: 1875743 - DNA, 25 bp, Homo sapien
atttagttctcacatcaaagccatg

SEQ ID NO: 1875744 - DNA, 25 bp, Homo sapien
taccagggatttatgcatttagttc

SEQ ID NO: 1875745 - DNA, 25 bp, Homo sapien
tacaaaaaggaccacagctttcaca

SEQ ID NO: 1875746 - DNA, 25 bp, Homo sapien
ggaggtcatgaaggccctaccctca

SEQ ID NO: 1875747 - DNA, 25 bp, Homo sapien
actggtattacgaagagacatctga

SEQ ID NO: 1875748 - DNA, 25 bp, Homo sapien
cccttacaaggtgctatggtctgaa

SEQ ID NO: 1875749 - DNA, 25 bp, Homo sapien
gaaactgccggtgacttgatcgtga

SEQ ID NO: 1875750 - DNA, 25 bp, Homo sapien
tatctacagatagatctatacccat

SEQ ID NO: 1875751 - DNA, 25 bp, Homo sapien
atctacagatagatctatacccatc

SEQ ID NO: 1875752 - DNA, 25 bp, Homo sapien
atatctacagatagatctataccca

SEQ ID NO: 1875753 - DNA, 25 bp, Homo sapien
tcaaatgaaattaggtgggaaataa

SEQ ID NO: 1875754 - DNA, 25 bp, Homo sapien
gagcagtaccacaaacaccacatag

SEQ ID NO: 1875755 - DNA, 25 bp, Homo sapien
tccaatttgtaggaaaggatcactc

SEQ ID NO: 1875756 - DNA, 25 bp, Homo sapien
agttctcaaagtctgttaattgcac

SEQ ID NO: 1875757 - DNA, 25 bp, Homo sapien
gatcactctggtgagcagtaccaca

SEQ ID NO: 1875758 - DNA, 25 bp, Homo sapien
tgtcattcccaagccatctcctaat

SEQ ID NO: 1875759 - DNA, 25 bp, Homo sapien
aagttatgaaccaactacacaaaca

SEQ ID NO: 1875760 - DNA, 25 bp, Homo sapien
gaaccaactacacaaacatgctctt

SEQ ID NO: 1875761 - DNA, 25 bp, Homo sapien
atgctcttccctgacccaggccctt

SEQ ID NO: 1875762 - DNA, 25 bp, Homo sapien
gggcttaaatctcattgtctgccaa

SEQ ID NO: 1875763 - DNA, 25 bp, Homo sapien
tgtctgccaatttgtggactgaata

SEQ ID NO: 1875764 - DNA, 25 bp, Homo sapien
ccatccaatgtctgagtttggagga

SEQ ID NO: 1875765 - DNA, 25 bp, Homo sapien
tccatgggtcgaaattctactctcc

SEQ ID NO: 1875766 - DNA, 25 bp, Homo sapien
caaacagtgtcagtgggtctctaat

SEQ ID NO: 1875767 - DNA, 25 bp, Homo sapien
cagtgggtctctaataaagagatga

SEQ ID NO: 1875768 - DNA, 25 bp, Homo sapien
cagtgtcagtgggtctctaataaag

SEQ ID NO: 1875769 - DNA, 25 bp, Homo sapien
tcttcaaacagtgtcagtgggtctc

SEQ ID NO: 1875770 - DNA, 25 bp, Homo sapien
gcactggtgtggacctagacacaga

SEQ ID NO: 1875771 - DNA, 25 bp, Homo sapien
gaaactttaggaacaagtagcctca

SEQ ID NO: 1875772 - DNA, 25 bp, Homo sapien
cccagaaagatggagtagaaaccca

SEQ ID NO: 1875773 - DNA, 25 bp, Homo sapien
taaaggcgtacattcaaacccagaa

SEQ ID NO: 1875774 - DNA, 25 bp, Homo sapien
ctcaccacacttagataaatagctg

SEQ ID NO: 1875775 - DNA, 25 bp, Homo sapien
gcaacagctgttcgtagatctcttt

SEQ ID NO: 1875776 - DNA, 25 bp, Homo sapien
gatctctttatctatcgtcaagtcg

SEQ ID NO: 1875777 - DNA, 25 bp, Homo sapien
tagctgtctattgagtcatatcggg

SEQ ID NO: 1875778 - DNA, 25 bp, Homo sapien
atgctatataaaatgagtggaatat

SEQ ID NO: 1875779 - DNA, 25 bp, Homo sapien
tatgctatataaaatgagtggaata

SEQ ID NO: 1875780 - DNA, 25 bp, Homo sapien
gagacatcctgaaattgcaagtagt

SEQ ID NO: 1875781 - DNA, 25 bp, Homo sapien
tgcaagtagttacaaaagatccatt

SEQ ID NO: 1875782 - DNA, 25 bp, Homo sapien
gatccattttacctgcttgacttaa

SEQ ID NO: 1875783 - DNA, 25 bp, Homo sapien
gataaaaattgcagggagacatcct

SEQ ID NO: 1875784 - DNA, 25 bp, Homo sapien
actccccagcgacaatcaatgtctg

SEQ ID NO: 1875785 - DNA, 25 bp, Homo sapien
tcaatgtctgacacatagcctcggt

SEQ ID NO: 1875786 - DNA, 25 bp, Homo sapien
agatgcagaaatcactccccagcga

SEQ ID NO: 1875787 - DNA, 25 bp, Homo sapien
tcggtaaaagggagatgcagcactc

SEQ ID NO: 1875788 - DNA, 25 bp, Homo sapien
catgctaaaaaaagctccatgcagt

SEQ ID NO: 1875789 - DNA, 25 bp, Homo sapien
aaagtgtcacttacatgctaaaaaa

SEQ ID NO: 1875790 - DNA, 25 bp, Homo sapien
caaagtgtcacttacatgctaaaaa

SEQ ID NO: 1875791 - DNA, 25 bp, Homo sapien
tcacttacatgctaaaaaaagctcc

SEQ ID NO: 1875792 - DNA, 25 bp, Homo sapien
atatactgcaggcttggaatgtcac

SEQ ID NO: 1875793 - DNA, 25 bp, Homo sapien
caattggacagatagtagccaactg

SEQ ID NO: 1875794 - DNA, 25 bp, Homo sapien
tgatcataaaggtatctggcctcag

SEQ ID NO: 1875795 - DNA, 25 bp, Homo sapien
gatcataaaggtatctggcctcaga

SEQ ID NO: 1875796 - DNA, 25 bp, Homo sapien
gcacaaggatggtaggtaggacact

SEQ ID NO: 1875797 - DNA, 25 bp, Homo sapien
ctaaagtcaaagtagcaggcactgg

SEQ ID NO: 1875798 - DNA, 25 bp, Homo sapien
tactgcacctgtcaaggaaaaggct

SEQ ID NO: 1875799 - DNA, 25 bp, Homo sapien
tctaagtggctaggtcttcagggct

SEQ ID NO: 1875800 - DNA, 25 bp, Homo sapien
ctattggagactcaagtttgcctgc

SEQ ID NO: 1875801 - DNA, 25 bp, Homo sapien
cagcttgaatttagtgttggtacac

SEQ ID NO: 1875802 - DNA, 25 bp, Homo sapien
aatctcaacctgttagttccaatgg

SEQ ID NO: 1875803 - DNA, 25 bp, Homo sapien
ccaatggttttagctagatctcaac

SEQ ID NO: 1875804 - DNA, 25 bp, Homo sapien
tgctaaagaggatgacatgcggtca

SEQ ID NO: 1875805 - DNA, 25 bp, Homo sapien
caagtgcgcaggacagcatctgata

SEQ ID NO: 1875806 - DNA, 25 bp, Homo sapien
taaccaaaccaagggcagtttctgc

SEQ ID NO: 1875807 - DNA, 25 bp, Homo sapien
tagtgagaaacctgaaagaccggga

SEQ ID NO: 1875808 - DNA, 25 bp, Homo sapien
gagttgcccaaaaacctgagtagtg

SEQ ID NO: 1875809 - DNA, 25 bp, Homo sapien
tcactagcctgtcacgagatggcag

SEQ ID NO: 1875810 - DNA, 25 bp, Homo sapien
tcttacatgggtccaggctctgcac

SEQ ID NO: 1875811 - DNA, 25 bp, Homo sapien
cagagaaactatgcggtcttcggca

SEQ ID NO: 1875812 - DNA, 25 bp, Homo sapien
tctataaatggagatggtgtattct

SEQ ID NO: 1875813 - DNA, 25 bp, Homo sapien
catggcatccatgtaaatatgatcc

SEQ ID NO: 1875814 - DNA, 25 bp, Homo sapien
tgtaaatatgatccggcttagaagc

SEQ ID NO: 1875815 - DNA, 25 bp, Homo sapien
tggagacagcaattgcccattccaa

SEQ ID NO: 1875816 - DNA, 25 bp, Homo sapien
ttggtacattgatgacaaccttttc

SEQ ID NO: 1875817 - DNA, 25 bp, Homo sapien
ctatgtcggatatttcttgttaagg

SEQ ID NO: 1875818 - DNA, 25 bp, Homo sapien
ccttttctcctctcctatgtcggat

SEQ ID NO: 1875819 - DNA, 25 bp, Homo sapien
ggtacattgatgacaaccttttctc

SEQ ID NO: 1875820 - DNA, 25 bp, Homo sapien
ctaaaacagacaaccaaacgtcata

SEQ ID NO: 1875821 - DNA, 25 bp, Homo sapien
acagacaaccaaacgtcataaattg

SEQ ID NO: 1875822 - DNA, 25 bp, Homo sapien
caaccaaacgtcataaattggtcac

SEQ ID NO: 1875823 - DNA, 25 bp, Homo sapien
gacaaccaaacgtcataaattggtc

SEQ ID NO: 1875824 - DNA, 25 bp, Homo sapien
acaggtgcacatctgctatcttctc

SEQ ID NO: 1875825 - DNA, 25 bp, Homo sapien
tcaagcctggtgcacgcatcaacaa

SEQ ID NO: 1875826 - DNA, 25 bp, Homo sapien
tctggttacttaggaagagagccaa

SEQ ID NO: 1875827 - DNA, 25 bp, Homo sapien
aatactatactctcagaagtcaggg

SEQ ID NO: 1875828 - DNA, 25 bp, Homo sapien
tgaagcgagggtgcttgtttattgc

SEQ ID NO: 1875829 - DNA, 25 bp, Homo sapien
ctgaagcgagggtgcttgtttattg

SEQ ID NO: 1875830 - DNA, 25 bp, Homo sapien
acctcgggcagtgtgaacccaggac

SEQ ID NO: 1875831 - DNA, 25 bp, Homo sapien
ttgggtttgacctcgggcagtgtga

SEQ ID NO: 1875832 - DNA, 25 bp, Homo sapien
tcgggcagtgtgaacccaggacagc

SEQ ID NO: 1875833 - DNA, 25 bp, Homo sapien
tttgacctcgggcagtgtgaaccca

SEQ ID NO: 1875834 - DNA, 25 bp, Homo sapien
catctaataggaaggactgatagca

SEQ ID NO: 1875835 - DNA, 25 bp, Homo sapien
taattccagcccactactaacttta

SEQ ID NO: 1875836 - DNA, 25 bp, Homo sapien
ttggtcacatcagctgtcatgggtg

SEQ ID NO: 1875837 - DNA, 25 bp, Homo sapien
aatactgtgcccctttacaaccact

SEQ ID NO: 1875838 - DNA, 25 bp, Homo sapien
agttcccagctacaagggttcttga

SEQ ID NO: 1875839 - DNA, 25 bp, Homo sapien
tactatgagcctagaaccttaggaa

SEQ ID NO: 1875840 - DNA, 25 bp, Homo sapien
gaatcagaacttgcatcttcggaca

SEQ ID NO: 1875841 - DNA, 25 bp, Homo sapien
ataaagtatctgttgcctgcccaaa

SEQ ID NO: 1875842 - DNA, 25 bp, Homo sapien
tagtcactaaccacgtggctactga

SEQ ID NO: 1875843 - DNA, 25 bp, Homo sapien
tccaaaccgatgtggtagtcactaa

SEQ ID NO: 1875844 - DNA, 25 bp, Homo sapien
gaaatgaggctagttcctcagtcac

SEQ ID NO: 1875845 - DNA, 25 bp, Homo sapien
gatgtatagggaggcttctaaccac

SEQ ID NO: 1875846 - DNA, 25 bp, Homo sapien
ttttccagttcactagaagttgtca

SEQ ID NO: 1875847 - DNA, 25 bp, Homo sapien
tggaaccattctcaaggtaaagggc

SEQ ID NO: 1875848 - DNA, 25 bp, Homo sapien
taaaaaggcaactatcccatatgga

SEQ ID NO: 1875849 - DNA, 25 bp, Homo sapien
tgctaagtgaaatgtacaaccctct

SEQ ID NO: 1875850 - DNA, 25 bp, Homo sapien
agctactctcacactacagcccaag

SEQ ID NO: 1875851 - DNA, 25 bp, Homo sapien
acagctactctcacactacagccca

SEQ ID NO: 1875852 - DNA, 25 bp, Homo sapien
gctactctcacactacagcccaagt

SEQ ID NO: 1875853 - DNA, 25 bp, Homo sapien
cagctactctcacactacagcccaa

SEQ ID NO: 1875854 - DNA, 25 bp, Homo sapien
gaagctggcatgcaactgtgtctgc

SEQ ID NO: 1875855 - DNA, 25 bp, Homo sapien
tgtgtctgcagctctactgttacag

SEQ ID NO: 1875856 - DNA, 25 bp, Homo sapien
tggtctgtcatcacagtatcctggt

SEQ ID NO: 1875857 - DNA, 25 bp, Homo sapien
gcagacacggccacactgctggtct

SEQ ID NO: 1875858 - DNA, 25 bp, Homo sapien
ggggcatgttaatataggaactaac

SEQ ID NO: 1875859 - DNA, 25 bp, Homo sapien
tgctggggcatgttaatataggaac

SEQ ID NO: 1875860 - DNA, 25 bp, Homo sapien
ctggggcatgttaatataggaacta

SEQ ID NO: 1875861 - DNA, 25 bp, Homo sapien
tctgctggggcatgttaatatagga

SEQ ID NO: 1875862 - DNA, 25 bp, Homo sapien
tattgaactcggacattgttcctcc

SEQ ID NO: 1875863 - DNA, 25 bp, Homo sapien
ttgttcctccgtagggctgtcctgg

SEQ ID NO: 1875864 - DNA, 25 bp, Homo sapien
ttccggcgttttcgcatgttggcct

SEQ ID NO: 1875865 - DNA, 25 bp, Homo sapien
tatagaagtagcctccttccggcgt

SEQ ID NO: 1875866 - DNA, 25 bp, Homo sapien
gtaactcccatactctggtctccaa

SEQ ID NO: 1875867 - DNA, 25 bp, Homo sapien
ctccccagacaggaccaaccggact

SEQ ID NO: 1875868 - DNA, 25 bp, Homo sapien
ccccttctcttgcagagtttcaaga

SEQ ID NO: 1875869 - DNA, 25 bp, Homo sapien
ttttcatgatcaaaagataccaaca

SEQ ID NO: 1875870 - DNA, 25 bp, Homo sapien
tcaagaactttctccccagacagga

SEQ ID NO: 1875871 - DNA, 25 bp, Homo sapien
aaaaggcagggaaacgtgaagtctg

SEQ ID NO: 1875872 - DNA, 25 bp, Homo sapien
gaaaggatcagtcagtagtgccact

SEQ ID NO: 1875873 - DNA, 25 bp, Homo sapien
tctgtaaaggatccacagtaactcc

SEQ ID NO: 1875874 - DNA, 25 bp, Homo sapien
tttacagtacagcacataagtgttc

SEQ ID NO: 1875875 - DNA, 25 bp, Homo sapien
tatgtaacagcacagtctaagccgg

SEQ ID NO: 1875876 - DNA, 25 bp, Homo sapien
tgctgaattatctgaacgagtgctc

SEQ ID NO: 1875877 - DNA, 25 bp, Homo sapien
ggactgacagccaataacacgctat

SEQ ID NO: 1875878 - DNA, 25 bp, Homo sapien
taagccggtctagaagatcagaagg

SEQ ID NO: 1875879 - DNA, 25 bp, Homo sapien
gaagctgctttggatcaactgccct

SEQ ID NO: 1875880 - DNA, 25 bp, Homo sapien
ctagtcaccacgtggttgacaagaa

SEQ ID NO: 1875881 - DNA, 25 bp, Homo sapien
gggcactgtagtgggtgagaatcat

SEQ ID NO: 1875882 - DNA, 25 bp, Homo sapien
cagtatcctgatccccagacagaag

SEQ ID NO: 1875883 - DNA, 25 bp, Homo sapien
ccaaaaaatgcttaagcgtggatct

SEQ ID NO: 1875884 - DNA, 25 bp, Homo sapien
aaatgcttaagcgtggatctgtggc

SEQ ID NO: 1875885 - DNA, 25 bp, Homo sapien
cttaagcgtggatctgtggctgatg

SEQ ID NO: 1875886 - DNA, 25 bp, Homo sapien
tgcttaagcgtggatctgtggctga

SEQ ID NO: 1875887 - DNA, 25 bp, Homo sapien
cagtttgaatcttggtaacttctcg

SEQ ID NO: 1875888 - DNA, 25 bp, Homo sapien
gcagtgatacactgattgacacaga

SEQ ID NO: 1875889 - DNA, 25 bp, Homo sapien
tcctgcctatttgggcggtaatagg

SEQ ID NO: 1875890 - DNA, 25 bp, Homo sapien
gcctattaaaactgtcacagagctc

SEQ ID NO: 1875891 - DNA, 25 bp, Homo sapien
ttactagtttcctggaaaagcgtca

SEQ ID NO: 1875892 - DNA, 25 bp, Homo sapien
tcctacacacagcaatactactaac

SEQ ID NO: 1875893 - DNA, 25 bp, Homo sapien
acagcaatactactaactcccacat

SEQ ID NO: 1875894 - DNA, 25 bp, Homo sapien
ctcttgaaagcctgccatcattctt

SEQ ID NO: 1875895 - DNA, 25 bp, Homo sapien
cacctcttgaaagcctgccatcatt

SEQ ID NO: 1875896 - DNA, 25 bp, Homo sapien
caggtcttcgactctgatcttcaga

SEQ ID NO: 1875897 - DNA, 25 bp, Homo sapien
acttggctaaatcttgggtgctggc

SEQ ID NO: 1875898 - DNA, 25 bp, Homo sapien
ttataaaccacaatgatagccagct

SEQ ID NO: 1875899 - DNA, 25 bp, Homo sapien
tttttaccaaatatccagtcacagg

SEQ ID NO: 1875900 - DNA, 25 bp, Homo sapien
ggttaacggacaataaatgctgttg

SEQ ID NO: 1875901 - DNA, 25 bp, Homo sapien
caaagggcacaagggaacttctggg

SEQ ID NO: 1875902 - DNA, 25 bp, Homo sapien
tctctctctagcatacacgcatgca

SEQ ID NO: 1875903 - DNA, 25 bp, Homo sapien
tacgctatgacctatagaaggaacc

SEQ ID NO: 1875904 - DNA, 25 bp, Homo sapien
taggcaaattggaagttcaaactca

SEQ ID NO: 1875905 - DNA, 25 bp, Homo sapien
tcaaactcaatggatgatatatcag

SEQ ID NO: 1875906 - DNA, 25 bp, Homo sapien
tcagcattctgaacctagcataggc

SEQ ID NO: 1875907 - DNA, 25 bp, Homo sapien
caatggatgatatatcagcccttaa

SEQ ID NO: 1875908 - DNA, 25 bp, Homo sapien
tctggcaggcagctaacactggagt

SEQ ID NO: 1875909 - DNA, 25 bp, Homo sapien
ggacctggagtcagacagatttcaa

SEQ ID NO: 1875910 - DNA, 25 bp, Homo sapien
cactaagtagctgaaaaggtctggc

SEQ ID NO: 1875911 - DNA, 25 bp, Homo sapien
tcaatgctgatgatatgtctgccac

SEQ ID NO: 1875912 - DNA, 25 bp, Homo sapien
tacaataccaaagtctaattctcca

SEQ ID NO: 1875913 - DNA, 25 bp, Homo sapien
gccattattagagtcttaatacaat

SEQ ID NO: 1875914 - DNA, 25 bp, Homo sapien
cacagatctgctcagcgtaattttt

SEQ ID NO: 1875915 - DNA, 25 bp, Homo sapien
ccacagatctgctcagcgtaatttt

SEQ ID NO: 1875916 - DNA, 25 bp, Homo sapien
tctcctttatagatgcataatacaa

SEQ ID NO: 1875917 - DNA, 25 bp, Homo sapien
ctggctgaaatgctgggtccaattt

SEQ ID NO: 1875918 - DNA, 25 bp, Homo sapien
atacaagtttgcattatggccactc

SEQ ID NO: 1875919 - DNA, 25 bp, Homo sapien
gaaggaggtaaacctattgcaaatc

SEQ ID NO: 1875920 - DNA, 25 bp, Homo sapien
tggagaacgcggaccgcgatagggc

SEQ ID NO: 1875921 - DNA, 25 bp, Homo sapien
taggcgaaagcagggacgatgctcc

SEQ ID NO: 1875922 - DNA, 25 bp, Homo sapien
gaggatggccctggacgcggactag

SEQ ID NO: 1875923 - DNA, 25 bp, Homo sapien
ggcgtagggcaagacaaaggcagcg

SEQ ID NO: 1875924 - DNA, 25 bp, Homo sapien
tcggcatggcgcttggtttcctccc

SEQ ID NO: 1875925 - DNA, 25 bp, Homo sapien
tccttgacggcgtggtagatgtgca

SEQ ID NO: 1875926 - DNA, 25 bp, Homo sapien
agaacgtccttgtgccggtccttga

SEQ ID NO: 1875927 - DNA, 25 bp, Homo sapien
tgcaggaactggaggatcccgtgcc

SEQ ID NO: 1875928 - DNA, 25 bp, Homo sapien
gcagtcggcggagggagggtcctgc

SEQ ID NO: 1875929 - DNA, 25 bp, Homo sapien
tccgggcgcgagacggacactcagc

SEQ ID NO: 1875930 - DNA, 25 bp, Homo sapien
gctctcgggccgcagtcggcggagg

SEQ ID NO: 1875931 - DNA, 25 bp, Homo sapien
gtgacagaccctgggtccgacgcac

SEQ ID NO: 1875932 - DNA, 25 bp, Homo sapien
atgcccagtctttgcgtccgctagc

SEQ ID NO: 1875933 - DNA, 25 bp, Homo sapien
ctacttgtgaccaaaacctgcgccg

SEQ ID NO: 1875934 - DNA, 25 bp, Homo sapien
gcgatcctgcgctccaggttttata

SEQ ID NO: 1875935 - DNA, 25 bp, Homo sapien
gccggtctggtgcactggcttcttc

SEQ ID NO: 1875936 - DNA, 25 bp, Homo sapien
caatcccaaaaagggcgccggcgct

SEQ ID NO: 1875937 - DNA, 25 bp, Homo sapien
tgcaccacagggcagttatgcccaa

SEQ ID NO: 1875938 - DNA, 25 bp, Homo sapien
tcccagagctttggacaatcccaaa

SEQ ID NO: 1875939 - DNA, 25 bp, Homo sapien
atttaaaccttgatctctcagtgtc

SEQ ID NO: 1875940 - DNA, 25 bp, Homo sapien
ccagggccaggtttcgacatctgga

SEQ ID NO: 1875941 - DNA, 25 bp, Homo sapien
agggccaggtttcgacatctggaag

SEQ ID NO: 1875942 - DNA, 25 bp, Homo sapien
gaagtgagttttcagcagacagctc

SEQ ID NO: 1875943 - DNA, 25 bp, Homo sapien
agctccatcagggctgtaacgatag

SEQ ID NO: 1875944 - DNA, 25 bp, Homo sapien
aaacctggaccgtggagatccgcat

SEQ ID NO: 1875945 - DNA, 25 bp, Homo sapien
tgcagtcgtgaggccaagctgagca

SEQ ID NO: 1875946 - DNA, 25 bp, Homo sapien
agtcgtgaggccaagctgagcatgc

SEQ ID NO: 1875947 - DNA, 25 bp, Homo sapien
gggggacgccgtgcagtcgtgaggc

SEQ ID NO: 1875948 - DNA, 25 bp, Homo sapien
caagctgagcatgctcggagagccg

SEQ ID NO: 1875949 - DNA, 25 bp, Homo sapien
gattgccgcagtcgtttcagacacg

SEQ ID NO: 1875950 - DNA, 25 bp, Homo sapien
tcgtttcagacacgatgggtttcgg

SEQ ID NO: 1875951 - DNA, 25 bp, Homo sapien
tgctgctaggattgccgcagtcgtt

SEQ ID NO: 1875952 - DNA, 25 bp, Homo sapien
cacgatgggtttcgggcctccaagg

SEQ ID NO: 1875953 - DNA, 25 bp, Homo sapien
tagaagataaagacgccatgataat

SEQ ID NO: 1875954 - DNA, 25 bp, Homo sapien
ccatgataatgtgttgggacagggc

SEQ ID NO: 1875955 - DNA, 25 bp, Homo sapien
gacagggcgagtgatatctgagtcc

SEQ ID NO: 1875956 - DNA, 25 bp, Homo sapien
tgttgggatccagaacacatgggaa

SEQ ID NO: 1875957 - DNA, 25 bp, Homo sapien
tgagactgtgtcatgggtacccatc

SEQ ID NO: 1875958 - DNA, 25 bp, Homo sapien
tagtgtactcctctctaatgtgctg

SEQ ID NO: 1875959 - DNA, 25 bp, Homo sapien
tgcttgaattgtcccacctcaccag

SEQ ID NO: 1875960 - DNA, 25 bp, Homo sapien
ttttggcaaccatgaagggattctg

SEQ ID NO: 1875961 - DNA, 25 bp, Homo sapien
tcttgtggccttagggagtctagtc

SEQ ID NO: 1875962 - DNA, 25 bp, Homo sapien
cttgtatggtaaatttattctggaa

SEQ ID NO: 1875963 - DNA, 25 bp, Homo sapien
cagtcagttcggcctatgcccagga

SEQ ID NO: 1875964 - DNA, 25 bp, Homo sapien
gaatctaaggttgcattaaattaaa

SEQ ID NO: 1875965 - DNA, 25 bp, Homo sapien
attaaagctaatcaactcctcaagg

SEQ ID NO: 1875966 - DNA, 25 bp, Homo sapien
tgctttttggtaactgactaacaga

SEQ ID NO: 1875967 - DNA, 25 bp, Homo sapien
gctaacaatacaggtctaaaggaaa

SEQ ID NO: 1875968 - DNA, 25 bp, Homo sapien
tgtttaagattgtaaggactgatta

SEQ ID NO: 1875969 - DNA, 25 bp, Homo sapien
gcttggaaaacactagccgtggatg

SEQ ID NO: 1875970 - DNA, 25 bp, Homo sapien
gaatttcaggagacacaacactgct

SEQ ID NO: 1875971 - DNA, 25 bp, Homo sapien
tattagaactgagggagaatcccaa

SEQ ID NO: 1875972 - DNA, 25 bp, Homo sapien
gaagctttgttactactcgacagga

SEQ ID NO: 1875973 - DNA, 25 bp, Homo sapien
ggcacagccaaactgtcatccttca

SEQ ID NO: 1875974 - DNA, 25 bp, Homo sapien
gagttcctcatcagatagttgctat

SEQ ID NO: 1875975 - DNA, 25 bp, Homo sapien
tgctatgaaggctcatttggtgtcg

SEQ ID NO: 1875976 - DNA, 25 bp, Homo sapien
ccagctgtcaaggaaaggtaggcca

SEQ ID NO: 1875977 - DNA, 25 bp, Homo sapien
gcaccagacaagtaggtttccctgt

SEQ ID NO: 1875978 - DNA, 25 bp, Homo sapien
tgggcaccagacaagtaggtttccc

SEQ ID NO: 1875979 - DNA, 25 bp, Homo sapien
ggcaccagacaagtaggtttccctg

SEQ ID NO: 1875980 - DNA, 25 bp, Homo sapien
gagccagtatttgattccaggttag

SEQ ID NO: 1875981 - DNA, 25 bp, Homo sapien
caaagatcacacttgcaaacagcag

SEQ ID NO: 1875982 - DNA, 25 bp, Homo sapien
cacagattaggaagcatacccaaag

SEQ ID NO: 1875983 - DNA, 25 bp, Homo sapien
ggaagttgaagctcacagattagga

SEQ ID NO: 1875984 - DNA, 25 bp, Homo sapien
gggctctcctgcaaagttagctgtt

SEQ ID NO: 1875985 - DNA, 25 bp, Homo sapien
gcaaagttagctgttggctctgaga

SEQ ID NO: 1875986 - DNA, 25 bp, Homo sapien
tatctagtaattggctcagggctct

SEQ ID NO: 1875987 - DNA, 25 bp, Homo sapien
aataaattttgatgacttaagcatt

SEQ ID NO: 1875988 - DNA, 25 bp, Homo sapien
caccccgtccctatttactgtagca

SEQ ID NO: 1875989 - DNA, 25 bp, Homo sapien
ctgcaccccgtccctatttactgta

SEQ ID NO: 1875990 - DNA, 25 bp, Homo sapien
tgcaccccgtccctatttactgtag

SEQ ID NO: 1875991 - DNA, 25 bp, Homo sapien
cccgtccctatttactgtagcattt

SEQ ID NO: 1875992 - DNA, 25 bp, Homo sapien
ttcagcagtcagtgaatactctgca

SEQ ID NO: 1875993 - DNA, 25 bp, Homo sapien
taggtcagtctatctcttgcttctc

SEQ ID NO: 1875994 - DNA, 25 bp, Homo sapien
ttctcagtgatgctctagtttcagc

SEQ ID NO: 1875995 - DNA, 25 bp, Homo sapien
gcagctctccctctagttaggtcag

SEQ ID NO: 1875996 - DNA, 25 bp, Homo sapien
attaatggcattttagaattggcat

SEQ ID NO: 1875997 - DNA, 25 bp, Homo sapien
cattttagaattggcatcatatggc

SEQ ID NO: 1875998 - DNA, 25 bp, Homo sapien
tagaattggcatcatatggcatgat

SEQ ID NO: 1875999 - DNA, 25 bp, Homo sapien
ttggcatcatatggcatgatttata

SEQ ID NO: 1876000 - DNA, 25 bp, Homo sapien
tcagcagcaagccttgatttcatcc

SEQ ID NO: 1876001 - DNA, 25 bp, Homo sapien
cagcagcaagccttgatttcatcca

SEQ ID NO: 1876002 - DNA, 25 bp, Homo sapien
agcagcaagccttgatttcatccac

SEQ ID NO: 1876003 - DNA, 25 bp, Homo sapien
gattctcgttcggtatttctgggag

SEQ ID NO: 1876004 - DNA, 25 bp, Homo sapien
cctggacggcgtgccttacaccagg

SEQ ID NO: 1876005 - DNA, 25 bp, Homo sapien
ggagtcctggacggcgtgccttaca

SEQ ID NO: 1876006 - DNA, 25 bp, Homo sapien
tctcgttcggtatttctgggagtcc

SEQ ID NO: 1876007 - DNA, 25 bp, Homo sapien
cgggttctcggcgacttcagtctag

SEQ ID NO: 1876008 - DNA, 25 bp, Homo sapien
actgcacttccggtggcctgaagga

SEQ ID NO: 1876009 - DNA, 25 bp, Homo sapien
cagtctagtccccaaggcttgctct

SEQ ID NO: 1876010 - DNA, 25 bp, Homo sapien
gcactgtttagtagtcgggttctcg

SEQ ID NO: 1876011 - DNA, 25 bp, Homo sapien
cctatcagctgaggtacgtagggta

SEQ ID NO: 1876012 - DNA, 25 bp, Homo sapien
ctcttgctgagcctatcagctgagg

SEQ ID NO: 1876013 - DNA, 25 bp, Homo sapien
tatcagctgaggtacgtagggtaag

SEQ ID NO: 1876014 - DNA, 25 bp, Homo sapien
ctgaggtacgtagggtaaggtgtgg

SEQ ID NO: 1876015 - DNA, 25 bp, Homo sapien
gtgcaatgggttgaaacacctattc

SEQ ID NO: 1876016 - DNA, 25 bp, Homo sapien
tgcaatgggttgaaacacctattcc

SEQ ID NO: 1876017 - DNA, 25 bp, Homo sapien
tctgttcttgctgtgtgggtgtcct

SEQ ID NO: 1876018 - DNA, 25 bp, Homo sapien
tacttctctgttcttgctgtgtggg

SEQ ID NO: 1876019 - DNA, 25 bp, Homo sapien
caaaagaataacactccagggggca

SEQ ID NO: 1876020 - DNA, 25 bp, Homo sapien
gaataacactccagggggcaatctg

SEQ ID NO: 1876021 - DNA, 25 bp, Homo sapien
gtttatcaataactgatgctctttg

SEQ ID NO: 1876022 - DNA, 25 bp, Homo sapien
ttatcaataactgatgctctttggt

SEQ ID NO: 1876023 - DNA, 25 bp, Homo sapien
ttttccttcaagtacttgtttatca

SEQ ID NO: 1876024 - DNA, 25 bp, Homo sapien
cttcaagtacttgtttatcaataac

SEQ ID NO: 1876025 - DNA, 25 bp, Homo sapien
caattcagacccaaggttgaagatc

SEQ ID NO: 1876026 - DNA, 25 bp, Homo sapien
tattttgccaatggtacatttgtaa

SEQ ID NO: 1876027 - DNA, 25 bp, Homo sapien
tttattttgccaatggtacatttgt

SEQ ID NO: 1876028 - DNA, 25 bp, Homo sapien
ttcagacccaaggttgaagatccta

SEQ ID NO: 1876029 - DNA, 25 bp, Homo sapien
tattccatcgtaaccttctccccca

SEQ ID NO: 1876030 - DNA, 25 bp, Homo sapien
ttctacccttgtgatatcctgcagc

SEQ ID NO: 1876031 - DNA, 25 bp, Homo sapien
cttctacccttgtgatatcctgcag

SEQ ID NO: 1876032 - DNA, 25 bp, Homo sapien
cttgtgatatcctgcagcaaggatg

SEQ ID NO: 1876033 - DNA, 25 bp, Homo sapien
gtgatatcctgcagcaaggatgccc

SEQ ID NO: 1876034 - DNA, 25 bp, Homo sapien
acagcagggatgcaactgcagcaat

SEQ ID NO: 1876035 - DNA, 25 bp, Homo sapien
gcagggatgcaactgcagcaatcaa

SEQ ID NO: 1876036 - DNA, 25 bp, Homo sapien
agggatgcaactgcagcaatcaatg

SEQ ID NO: 1876037 - DNA, 25 bp, Homo sapien
cagcagggatgcaactgcagcaatc

SEQ ID NO: 1876038 - DNA, 25 bp, Homo sapien
cagtgcccagaatgccaaagagcag

SEQ ID NO: 1876039 - DNA, 25 bp, Homo sapien
gcacagtgcccagaatgccaaagag

SEQ ID NO: 1876040 - DNA, 25 bp, Homo sapien
gcccagaatgccaaagagcagcagg

SEQ ID NO: 1876041 - DNA, 25 bp, Homo sapien
agagcagcaggatggatccagcatc

SEQ ID NO: 1876042 - DNA, 25 bp, Homo sapien
taactcattgttccaagggcaggac

SEQ ID NO: 1876043 - DNA, 25 bp, Homo sapien
cacactctttaactaccagatctga

SEQ ID NO: 1876044 - DNA, 25 bp, Homo sapien
taccagatctgacagataactcatt

SEQ ID NO: 1876045 - DNA, 25 bp, Homo sapien
ggacaaaggggatgctgctaaacca

SEQ ID NO: 1876046 - DNA, 25 bp, Homo sapien
ttctgaccttgagccagtgggctgt

SEQ ID NO: 1876047 - DNA, 25 bp, Homo sapien
tctaaagcctcccacgctttccttc

SEQ ID NO: 1876048 - DNA, 25 bp, Homo sapien
ttctctaaagcctcccacgctttcc

SEQ ID NO: 1876049 - DNA, 25 bp, Homo sapien
gaccttgagccagtgggctgttttc

SEQ ID NO: 1876050 - DNA, 25 bp, Homo sapien
cagagcacggcacagatactcagga

SEQ ID NO: 1876051 - DNA, 25 bp, Homo sapien
ttttgaggcagtcagcaagctctcc

SEQ ID NO: 1876052 - DNA, 25 bp, Homo sapien
cacggttttaatgagtactgcagct

SEQ ID NO: 1876053 - DNA, 25 bp, Homo sapien
gcattcagacactagcagagcacgg

SEQ ID NO: 1876054 - DNA, 25 bp, Homo sapien
cactgaaccttgctgagtgttctgt

SEQ ID NO: 1876055 - DNA, 25 bp, Homo sapien
agccaaccacactgaaccttgctga

SEQ ID NO: 1876056 - DNA, 25 bp, Homo sapien
ccaaacatgtgactaagcaaaaggc

SEQ ID NO: 1876057 - DNA, 25 bp, Homo sapien
catgtgactaagcaaaaggcatcag

SEQ ID NO: 1876058 - DNA, 25 bp, Homo sapien
tcagggagtgacagtggcacatgct

SEQ ID NO: 1876059 - DNA, 25 bp, Homo sapien
gtcagggagtgacagtggcacatgc

SEQ ID NO: 1876060 - DNA, 25 bp, Homo sapien
gtggcacatgctgcagcggaggacc

SEQ ID NO: 1876061 - DNA, 25 bp, Homo sapien
tgacagtggcacatgctgcagcgga

SEQ ID NO: 1876062 - DNA, 25 bp, Homo sapien
catgactctagacaccggaggtaca

SEQ ID NO: 1876063 - DNA, 25 bp, Homo sapien
ccggaggtacatctgtgaacgagac

SEQ ID NO: 1876064 - DNA, 25 bp, Homo sapien
catctgtgaacgagacaaaattttc

SEQ ID NO: 1876065 - DNA, 25 bp, Homo sapien
gatctcctgctatacaccaggcatg

SEQ ID NO: 1876066 - DNA, 25 bp, Homo sapien
gaatcatcacgaaaactaagtagag

SEQ ID NO: 1876067 - DNA, 25 bp, Homo sapien
cacttaacctacgacttctaaatag

SEQ ID NO: 1876068 - DNA, 25 bp, Homo sapien
aaacaaacaccccaatcatcagaga

SEQ ID NO: 1876069 - DNA, 25 bp, Homo sapien
tctttcactagtcttcaagctgttg

SEQ ID NO: 1876070 - DNA, 25 bp, Homo sapien
aaacatgccgccttgggagagtgcc

SEQ ID NO: 1876071 - DNA, 25 bp, Homo sapien
gagagtgcctataacgaattccgtc

SEQ ID NO: 1876072 - DNA, 25 bp, Homo sapien
gagaacatattcatcagcggctgga

SEQ ID NO: 1876073 - DNA, 25 bp, Homo sapien
tttgtgtgggataaggaaacagccc

SEQ ID NO: 1876074 - DNA, 25 bp, Homo sapien
tcgtaggcgcacacagagcgcgagt

SEQ ID NO: 1876075 - DNA, 25 bp, Homo sapien
agaagataccgaactggcccgggat

SEQ ID NO: 1876076 - DNA, 25 bp, Homo sapien
gattcccgagtcacgttgttgggca

SEQ ID NO: 1876077 - DNA, 25 bp, Homo sapien
tgtagcactccacggtgagcacgtc

SEQ ID NO: 1876078 - DNA, 25 bp, Homo sapien
tgatagagaaggtgtaacagctttg

SEQ ID NO: 1876079 - DNA, 25 bp, Homo sapien
tggaaatgatagagaaggtgtaaca

SEQ ID NO: 1876080 - DNA, 25 bp, Homo sapien
atagagaaggtgtaacagctttgtc

SEQ ID NO: 1876081 - DNA, 25 bp, Homo sapien
aaatgatagagaaggtgtaacagct

SEQ ID NO: 1876082 - DNA, 25 bp, Homo sapien
tgttactttgcaaatcatgagtggg

SEQ ID NO: 1876083 - DNA, 25 bp, Homo sapien
gagtgggaagcctgacactacccct

SEQ ID NO: 1876084 - DNA, 25 bp, Homo sapien
ctctctcagccagtaaaaatgtgtg

SEQ ID NO: 1876085 - DNA, 25 bp, Homo sapien
taagcctctcctccgtttataagca

SEQ ID NO: 1876086 - DNA, 25 bp, Homo sapien
tacggattgaacataattgaccagg

SEQ ID NO: 1876087 - DNA, 25 bp, Homo sapien
gagctttccagtgtaggcatatgca

SEQ ID NO: 1876088 - DNA, 25 bp, Homo sapien
taagggacttctcagtaaggcctgg

SEQ ID NO: 1876089 - DNA, 25 bp, Homo sapien
gatggtaccaaagcgaatattgctc

SEQ ID NO: 1876090 - DNA, 25 bp, Homo sapien
atacactgttacaggcaagagcttg

SEQ ID NO: 1876091 - DNA, 25 bp, Homo sapien
gttggcaaatacactgttacaggca

SEQ ID NO: 1876092 - DNA, 25 bp, Homo sapien
gcaaatacactgttacaggcaagag

SEQ ID NO: 1876093 - DNA, 25 bp, Homo sapien
aaatacactgttacaggcaagagct

SEQ ID NO: 1876094 - DNA, 25 bp, Homo sapien
tgtggccgaattttcctatgtaaac

SEQ ID NO: 1876095 - DNA, 25 bp, Homo sapien
tgcaaacaactttcttgtggccgaa

SEQ ID NO: 1876096 - DNA, 25 bp, Homo sapien
gaaaccgttgaaatcaaagcctgca

SEQ ID NO: 1876097 - DNA, 25 bp, Homo sapien
catgatatctcattgccgggtctgc

SEQ ID NO: 1876098 - DNA, 25 bp, Homo sapien
cactgttttattctacgatgataca

SEQ ID NO: 1876099 - DNA, 25 bp, Homo sapien
caaatgttcactgtgcacttctagg

SEQ ID NO: 1876100 - DNA, 25 bp, Homo sapien
gtgcacttctaggtcatcatcaatg

SEQ ID NO: 1876101 - DNA, 25 bp, Homo sapien
tattctacgatgatacaaatgttca

SEQ ID NO: 1876102 - DNA, 25 bp, Homo sapien
tgttggtggcttgcacttttcacac

SEQ ID NO: 1876103 - DNA, 25 bp, Homo sapien
gaagaactttacaagcttccgccag

SEQ ID NO: 1876104 - DNA, 25 bp, Homo sapien
aactttacaagcttccgccaggact

SEQ ID NO: 1876105 - DNA, 25 bp, Homo sapien
tttcacactgttcctgccagtagga

SEQ ID NO: 1876106 - DNA, 25 bp, Homo sapien
tagcagaacgtccaacctatcagga

SEQ ID NO: 1876107 - DNA, 25 bp, Homo sapien
tagggatgaacgaactgagacaagg

SEQ ID NO: 1876108 - DNA, 25 bp, Homo sapien
cattcctgatcagggctgggtatca

SEQ ID NO: 1876109 - DNA, 25 bp, Homo sapien
gagtcctgcggaatagtctgaaaca

SEQ ID NO: 1876110 - DNA, 25 bp, Homo sapien
tgactggactgagaataatgctgcc

SEQ ID NO: 1876111 - DNA, 25 bp, Homo sapien
caagcaatggtacataattggaccc

SEQ ID NO: 1876112 - DNA, 25 bp, Homo sapien
tcatgagatccataacccgaaatag

SEQ ID NO: 1876113 - DNA, 25 bp, Homo sapien
cacactgggctcagcgttttcatga

SEQ ID NO: 1876114 - DNA, 25 bp, Homo sapien
caggaattggcgactctggtcccag

SEQ ID NO: 1876115 - DNA, 25 bp, Homo sapien
ggcaggaattggcgactctggtccc

SEQ ID NO: 1876116 - DNA, 25 bp, Homo sapien
aggaattggcgactctggtcccagc

SEQ ID NO: 1876117 - DNA, 25 bp, Homo sapien
gaaggcaggaattggcgactctggt

SEQ ID NO: 1876118 - DNA, 25 bp, Homo sapien
caggtcaacttgagatgatgaagtt

SEQ ID NO: 1876119 - DNA, 25 bp, Homo sapien
tggcaggtcaacttgagatgatgaa

SEQ ID NO: 1876120 - DNA, 25 bp, Homo sapien
gaagtggcaggtcaacttgagatga

SEQ ID NO: 1876121 - DNA, 25 bp, Homo sapien
agtggcaggtcaacttgagatgatg

SEQ ID NO: 1876122 - DNA, 25 bp, Homo sapien
caaggccctgagtgattttacttct

SEQ ID NO: 1876123 - DNA, 25 bp, Homo sapien
attttacttcttcttgcctggtcat

SEQ ID NO: 1876124 - DNA, 25 bp, Homo sapien
cgacggtttgtactgcaccaaggcc

SEQ ID NO: 1876125 - DNA, 25 bp, Homo sapien
ggtttgtactgcaccaaggccctga

SEQ ID NO: 1876126 - DNA, 25 bp, Homo sapien
cactgggttgagcttgcaccacggg

SEQ ID NO: 1876127 - DNA, 25 bp, Homo sapien
agggcctaacgaggaattcagcagg

SEQ ID NO: 1876128 - DNA, 25 bp, Homo sapien
ggacaagggcctaacgaggaattca

SEQ ID NO: 1876129 - DNA, 25 bp, Homo sapien
aagaggtggtctggccactgggttg

SEQ ID NO: 1876130 - DNA, 25 bp, Homo sapien
tgtatcctgccacgccaaatggtgg

SEQ ID NO: 1876131 - DNA, 25 bp, Homo sapien
cagtcagtcctagtaaacttccacg

SEQ ID NO: 1876132 - DNA, 25 bp, Homo sapien
caccattcaagggatacttatgtat

SEQ ID NO: 1876133 - DNA, 25 bp, Homo sapien
gatgtgtagggtgttcctctgctgc

SEQ ID NO: 1876134 - DNA, 25 bp, Homo sapien
ctggcttcagctgctagatgtaggg

SEQ ID NO: 1876135 - DNA, 25 bp, Homo sapien
gatgtagggtgtagtagtgcctttt

SEQ ID NO: 1876136 - DNA, 25 bp, Homo sapien
gattgtcttcgtataatgattggga

SEQ ID NO: 1876137 - DNA, 25 bp, Homo sapien
tcaattggtgttactctatcagatc

SEQ ID NO: 1876138 - DNA, 25 bp, Homo sapien
caggagtaaacttgggatgtgagcc

SEQ ID NO: 1876139 - DNA, 25 bp, Homo sapien
tcacacaagggactaacaccaggag

SEQ ID NO: 1876140 - DNA, 25 bp, Homo sapien
gaagagtccttagaatctgtgccgc

SEQ ID NO: 1876141 - DNA, 25 bp, Homo sapien
catttctaaggagctgactggactg

SEQ ID NO: 1876142 - DNA, 25 bp, Homo sapien
atatttatgagataagcagggagat

SEQ ID NO: 1876143 - DNA, 25 bp, Homo sapien
tttcctcaaacatgacctgtggcct

SEQ ID NO: 1876144 - DNA, 25 bp, Homo sapien
tcacacgcacttagcagacacatag

SEQ ID NO: 1876145 - DNA, 25 bp, Homo sapien
cagtggtcctattgtcagggtccgc

SEQ ID NO: 1876146 - DNA, 25 bp, Homo sapien
gactagcatgctttactctccacag

SEQ ID NO: 1876147 - DNA, 25 bp, Homo sapien
cttgttcctcctgatgtaccctcat

SEQ ID NO: 1876148 - DNA, 25 bp, Homo sapien
ggggtaaccctgcatgaatgttgat

SEQ ID NO: 1876149 - DNA, 25 bp, Homo sapien
taggggtaaccctgcatgaatgttg

SEQ ID NO: 1876150 - DNA, 25 bp, Homo sapien
taaccctgcatgaatgttgatattc

SEQ ID NO: 1876151 - DNA, 25 bp, Homo sapien
ggtaaccctgcatgaatgttgatat

SEQ ID NO: 1876152 - DNA, 25 bp, Homo sapien
agagtcgtggatcttgtggatagac

SEQ ID NO: 1876153 - DNA, 25 bp, Homo sapien
tcgtggatcttgtggatagacttca

SEQ ID NO: 1876154 - DNA, 25 bp, Homo sapien
atcttgtggatagacttcagaggca

SEQ ID NO: 1876155 - DNA, 25 bp, Homo sapien
tggatcttgtggatagacttcagag

SEQ ID NO: 1876156 - DNA, 25 bp, Homo sapien
tgcaggttgggttaccaaacaccca

SEQ ID NO: 1876157 - DNA, 25 bp, Homo sapien
acccagcaaggggagtacacgtcct

SEQ ID NO: 1876158 - DNA, 25 bp, Homo sapien
cccagcaaggggagtacacgtcctc

SEQ ID NO: 1876159 - DNA, 25 bp, Homo sapien
caagagagaagtgcaggttgggtta

SEQ ID NO: 1876160 - DNA, 25 bp, Homo sapien
tattaccacggtaaaaactgagcat

SEQ ID NO: 1876161 - DNA, 25 bp, Homo sapien
gtattaccacggtaaaaactgagca

SEQ ID NO: 1876162 - DNA, 25 bp, Homo sapien
caggcccactgtcaaagcagctcat

SEQ ID NO: 1876163 - DNA, 25 bp, Homo sapien
tggcaacctctgagaatgtccctgt

SEQ ID NO: 1876164 - DNA, 25 bp, Homo sapien
tatccacaagtccttcttatcttct

SEQ ID NO: 1876165 - DNA, 25 bp, Homo sapien
ctctctccttgcactgtagactcag

SEQ ID NO: 1876166 - DNA, 25 bp, Homo sapien
gactcagcctttcttatccacaagt

SEQ ID NO: 1876167 - DNA, 25 bp, Homo sapien
ccatgcctagccctattgtgagcaa

SEQ ID NO: 1876168 - DNA, 25 bp, Homo sapien
tgcctagccctattgtgagcaataa

SEQ ID NO: 1876169 - DNA, 25 bp, Homo sapien
aataggtagcctccaagttttcgtg

SEQ ID NO: 1876170 - DNA, 25 bp, Homo sapien
tccaagttttcgtgcttgccttaat

SEQ ID NO: 1876171 - DNA, 25 bp, Homo sapien
catgactaaatcttcttcatttgca

SEQ ID NO: 1876172 - DNA, 25 bp, Homo sapien
gtttagtgtccaaggtaatgtcttg

SEQ ID NO: 1876173 - DNA, 25 bp, Homo sapien
tggtccaccagacagcgctttccta

SEQ ID NO: 1876174 - DNA, 25 bp, Homo sapien
caaggtaatgtcttggtccaccaga

SEQ ID NO: 1876175 - DNA, 25 bp, Homo sapien
tctatgacttcaactgggtgcccaa

SEQ ID NO: 1876176 - DNA, 25 bp, Homo sapien
tgacatcagccaccaatctcaggta

SEQ ID NO: 1876177 - DNA, 25 bp, Homo sapien
tacctgtacttctgcctagctgact

SEQ ID NO: 1876178 - DNA, 25 bp, Homo sapien
tatgctctgacactgattctatgac

SEQ ID NO: 1876179 - DNA, 25 bp, Homo sapien
attccatgattgacctccactttga

SEQ ID NO: 1876180 - DNA, 25 bp, Homo sapien
taggctttctggctatgtagtgtcc

SEQ ID NO: 1876181 - DNA, 25 bp, Homo sapien
ctggctatgtagtgtccactagagg

SEQ ID NO: 1876182 - DNA, 25 bp, Homo sapien
tccactttgagcattaggctttctg

SEQ ID NO: 1876183 - DNA, 25 bp, Homo sapien
ggtgtgctgttccatagatccagga

SEQ ID NO: 1876184 - DNA, 25 bp, Homo sapien
agaaacaattgtacgctcacccctc

SEQ ID NO: 1876185 - DNA, 25 bp, Homo sapien
gatggactgaacaacagattaggtg

SEQ ID NO: 1876186 - DNA, 25 bp, Homo sapien
tacacagactatagtacgaagacac

SEQ ID NO: 1876187 - DNA, 25 bp, Homo sapien
ggctgaaatgctaatgatgaaaaca

SEQ ID NO: 1876188 - DNA, 25 bp, Homo sapien
ctggagagattaaaatgttatgaca

SEQ ID NO: 1876189 - DNA, 25 bp, Homo sapien
tttttgcagcattaaggctttggct

SEQ ID NO: 1876190 - DNA, 25 bp, Homo sapien
tcagaataggccaaagcaggaactc

SEQ ID NO: 1876191 - DNA, 25 bp, Homo sapien
tactggcatctgttacctttctact

SEQ ID NO: 1876192 - DNA, 25 bp, Homo sapien
cttcctccctttactggcatctgtt

SEQ ID NO: 1876193 - DNA, 25 bp, Homo sapien
tgttacctttctactcttgaaggaa

SEQ ID NO: 1876194 - DNA, 25 bp, Homo sapien
caaactaaacccactctcagctcct

SEQ ID NO: 1876195 - DNA, 25 bp, Homo sapien
gccaagatacccaagagcagagagg

SEQ ID NO: 1876196 - DNA, 25 bp, Homo sapien
gaggaggcataggaaattgacccaa

SEQ ID NO: 1876197 - DNA, 25 bp, Homo sapien
tgtcaaaggatggaacaaacctgga

SEQ ID NO: 1876198 - DNA, 25 bp, Homo sapien
gaaattggccattacacttgctcta

SEQ ID NO: 1876199 - DNA, 25 bp, Homo sapien
tattttaatgatggtttagttggac

SEQ ID NO: 1876200 - DNA, 25 bp, Homo sapien
cctttaggggtgtactctcaattat

SEQ ID NO: 1876201 - DNA, 25 bp, Homo sapien
ggactagaactttagtcaagatcta

SEQ ID NO: 1876202 - DNA, 25 bp, Homo sapien
tgaattgcatccactagtagggtcc

SEQ ID NO: 1876203 - DNA, 25 bp, Homo sapien
tcttgatcaggaacactcagggcag

SEQ ID NO: 1876204 - DNA, 25 bp, Homo sapien
tttacaactgcctccgtcgaatgcc

SEQ ID NO: 1876205 - DNA, 25 bp, Homo sapien
tattgcctatgtctgactcaccgga

SEQ ID NO: 1876206 - DNA, 25 bp, Homo sapien
cacgcatgcattggctctgagctag

SEQ ID NO: 1876207 - DNA, 25 bp, Homo sapien
tagacggtgataaaagctgcacact

SEQ ID NO: 1876208 - DNA, 25 bp, Homo sapien
caagatcatcttctgtagcacacgg

SEQ ID NO: 1876209 - DNA, 25 bp, Homo sapien
cagttacctgatgcatgcctatgac

SEQ ID NO: 1876210 - DNA, 25 bp, Homo sapien
gaagcagcacctagacggaaaggca

SEQ ID NO: 1876211 - DNA, 25 bp, Homo sapien
tccaaggccatacagtcaggaagga

SEQ ID NO: 1876212 - DNA, 25 bp, Homo sapien
tattctagtcaggaagtaagtcacc

SEQ ID NO: 1876213 - DNA, 25 bp, Homo sapien
gtaagtcaccagtctaggaggagga

SEQ ID NO: 1876214 - DNA, 25 bp, Homo sapien
ccagggccggagtgtttagtcacca

SEQ ID NO: 1876215 - DNA, 25 bp, Homo sapien
tacatcctaatgcaattaccttggg

SEQ ID NO: 1876216 - DNA, 25 bp, Homo sapien
tctttggaatcctatcactctagtt

SEQ ID NO: 1876217 - DNA, 25 bp, Homo sapien
gagaatgggaagacaatgctcaacc

SEQ ID NO: 1876218 - DNA, 25 bp, Homo sapien
gaggacacagacattgagacaacag

SEQ ID NO: 1876219 - DNA, 25 bp, Homo sapien
cccaacaagagcagactagaatttt

SEQ ID NO: 1876220 - DNA, 25 bp, Homo sapien
tagaatgaatagaccaaaaaatagt

SEQ ID NO: 1876221 - DNA, 25 bp, Homo sapien
caaacttgatctaattgatacacgc

SEQ ID NO: 1876222 - DNA, 25 bp, Homo sapien
attgatacacgcatgttgaaaactg

SEQ ID NO: 1876223 - DNA, 25 bp, Homo sapien
gatgcttccctagtgaagtttacca

SEQ ID NO: 1876224 - DNA, 25 bp, Homo sapien
gagaatctcaatgtgccaaaatcag

SEQ ID NO: 1876225 - DNA, 25 bp, Homo sapien
gagccttaaattgacaaacatctgg

SEQ ID NO: 1876226 - DNA, 25 bp, Homo sapien
ggtgggctgaatccgagtctatgat

SEQ ID NO: 1876227 - DNA, 25 bp, Homo sapien
tcttcaccggtgaaatacacttaca

SEQ ID NO: 1876228 - DNA, 25 bp, Homo sapien
gggactatgcaaggacatgaattcc

SEQ ID NO: 1876229 - DNA, 25 bp, Homo sapien
agtcacaaagttaacccagattcag

SEQ ID NO: 1876230 - DNA, 25 bp, Homo sapien
agatgtgttccctctggtactgctc

SEQ ID NO: 1876231 - DNA, 25 bp, Homo sapien
gctctcttagataaaagcccctctg

SEQ ID NO: 1876232 - DNA, 25 bp, Homo sapien
gaacgacccatgcttgcaactgaga

SEQ ID NO: 1876233 - DNA, 25 bp, Homo sapien
gctcaagctgatacagttcttttgg

SEQ ID NO: 1876234 - DNA, 25 bp, Homo sapien
gatatccaatgataaatcagctctc

SEQ ID NO: 1876235 - DNA, 25 bp, Homo sapien
aattgatacagtcaccacttcggga

SEQ ID NO: 1876236 - DNA, 25 bp, Homo sapien
agtataaattgatacagtcaccact

SEQ ID NO: 1876237 - DNA, 25 bp, Homo sapien
gatacagtcaccacttcgggaaact

SEQ ID NO: 1876238 - DNA, 25 bp, Homo sapien
ccacttcgggaaactgtcagtatct

SEQ ID NO: 1876239 - DNA, 25 bp, Homo sapien
taagagaatgagaggtcagatcatg

SEQ ID NO: 1876240 - DNA, 25 bp, Homo sapien
catggaggcactcagcctcttcatg

SEQ ID NO: 1876241 - DNA, 25 bp, Homo sapien
tgaagctcatggaggcactcagcct

SEQ ID NO: 1876242 - DNA, 25 bp, Homo sapien
tccaaagcttaagagaatgagaggt

SEQ ID NO: 1876243 - DNA, 25 bp, Homo sapien
taaaaactgggatacctcacagact

SEQ ID NO: 1876244 - DNA, 25 bp, Homo sapien
taggcatagacagataaacttaacc

SEQ ID NO: 1876245 - DNA, 25 bp, Homo sapien
tggctagaatacacataggcataga

SEQ ID NO: 1876246 - DNA, 25 bp, Homo sapien
gatgatggaaaagctatccccaggt

SEQ ID NO: 1876247 - DNA, 25 bp, Homo sapien
cttcgaagtcaatcaggtcttgctg

SEQ ID NO: 1876248 - DNA, 25 bp, Homo sapien
gggaaagaccactgacttcgaagtc

SEQ ID NO: 1876249 - DNA, 25 bp, Homo sapien
tgatcttgggcccaggtttacttac

SEQ ID NO: 1876250 - DNA, 25 bp, Homo sapien
agcaggggaaagaccactgacttcg

SEQ ID NO: 1876251 - DNA, 25 bp, Homo sapien
gaaccctcatattcggaaatgtcag

SEQ ID NO: 1876252 - DNA, 25 bp, Homo sapien
ggactgccagcacaacagtaatgat

SEQ ID NO: 1876253 - DNA, 25 bp, Homo sapien
cagggagttggcttaaaccatatgc

SEQ ID NO: 1876254 - DNA, 25 bp, Homo sapien
cctgaaactttaggtcactgcagat

SEQ ID NO: 1876255 - DNA, 25 bp, Homo sapien
tctactctatcatcgattggcattt

SEQ ID NO: 1876256 - DNA, 25 bp, Homo sapien
ccatcaacggtataaaagtgtttct

SEQ ID NO: 1876257 - DNA, 25 bp, Homo sapien
tctttatctactctatcatcgattg

SEQ ID NO: 1876258 - DNA, 25 bp, Homo sapien
tacattaccatcaacggtataaaag

SEQ ID NO: 1876259 - DNA, 25 bp, Homo sapien
gctccttttagttgaatgctagtcc

SEQ ID NO: 1876260 - DNA, 25 bp, Homo sapien
taaacaatccttgcttggacatatg

SEQ ID NO: 1876261 - DNA, 25 bp, Homo sapien
tactacactgtatccgtctgttgat

SEQ ID NO: 1876262 - DNA, 25 bp, Homo sapien
gtgtttgccttgtacacaacatagt

SEQ ID NO: 1876263 - DNA, 25 bp, Homo sapien
atggagggaactagccttctttaat

SEQ ID NO: 1876264 - DNA, 25 bp, Homo sapien
aataatctagtgtgataacctctgg

SEQ ID NO: 1876265 - DNA, 25 bp, Homo sapien
gtgttcgttaaaataatctagtgtg

SEQ ID NO: 1876266 - DNA, 25 bp, Homo sapien
tagtgtgataacctctggaaatcac

SEQ ID NO: 1876267 - DNA, 25 bp, Homo sapien
ccagttttctaggaagggtggcaga

SEQ ID NO: 1876268 - DNA, 25 bp, Homo sapien
ctttccacatgtctctgtcaggaac

SEQ ID NO: 1876269 - DNA, 25 bp, Homo sapien
tctctgtcaggaaccagttttctag

SEQ ID NO: 1876270 - DNA, 25 bp, Homo sapien
tggcagaaatgagcttcatatgttt

SEQ ID NO: 1876271 - DNA, 25 bp, Homo sapien
ggtggaaatgaaagtcagacccctc

SEQ ID NO: 1876272 - DNA, 25 bp, Homo sapien
tcgggattgactggaatgagagtta

SEQ ID NO: 1876273 - DNA, 25 bp, Homo sapien
ggtagccctctgtgagaacgcagga

SEQ ID NO: 1876274 - DNA, 25 bp, Homo sapien
atgagagttaaggtgataatgctgg

SEQ ID NO: 1876275 - DNA, 25 bp, Homo sapien
tgggaagaaaggagccctcctagta

SEQ ID NO: 1876276 - DNA, 25 bp, Homo sapien
cgctcctgtgcctagtcgtaaggta

SEQ ID NO: 1876277 - DNA, 25 bp, Homo sapien
aagttgaaaagaccaagtgtcctct

SEQ ID NO: 1876278 - DNA, 25 bp, Homo sapien
atttcaccggggaaacgctcctgtg

SEQ ID NO: 1876279 - DNA, 25 bp, Homo sapien
gaaaagtgaactccgtggctccaga

SEQ ID NO: 1876280 - DNA, 25 bp, Homo sapien
tgagcatgctcagctttgtcttcta

SEQ ID NO: 1876281 - DNA, 25 bp, Homo sapien
tcttctatagaaaagtgaactccgt

SEQ ID NO: 1876282 - DNA, 25 bp, Homo sapien
gattttagctatagcagctggaggg

SEQ ID NO: 1876283 - DNA, 25 bp, Homo sapien
aatagtgagcctccccggtcatccg

SEQ ID NO: 1876284 - DNA, 25 bp, Homo sapien
gcagttcaggattccggccgtggtc

SEQ ID NO: 1876285 - DNA, 25 bp, Homo sapien
gcgagggaatggttgttataaccca

SEQ ID NO: 1876286 - DNA, 25 bp, Homo sapien
cattgtgattgaccttgactttagc

SEQ ID NO: 1876287 - DNA, 25 bp, Homo sapien
gaactggctcagaaactcgcgtttg

SEQ ID NO: 1876288 - DNA, 25 bp, Homo sapien
tgccaggtgcaaccacatctatgag

SEQ ID NO: 1876289 - DNA, 25 bp, Homo sapien
gcaccagccacagctagttgtcagg

SEQ ID NO: 1876290 - DNA, 25 bp, Homo sapien
tgtgctcccaagttacaaagcctgc

SEQ ID NO: 1876291 - DNA, 25 bp, Homo sapien
ccccggcgcgcaaggtacgctttgg

SEQ ID NO: 1876292 - DNA, 25 bp, Homo sapien
tacaccgaatccagtagcgcctggc

SEQ ID NO: 1876293 - DNA, 25 bp, Homo sapien
gcagcgagggtggtgcaaacacctc

SEQ ID NO: 1876294 - DNA, 25 bp, Homo sapien
acacgggcagccacgaaagcagcag

SEQ ID NO: 1876295 - DNA, 25 bp, Homo sapien
tatgttgtgcgttgctggttgtctt

SEQ ID NO: 1876296 - DNA, 25 bp, Homo sapien
tcatctggatttatgttgtgcgttg

SEQ ID NO: 1876297 - DNA, 25 bp, Homo sapien
gctggttgtcttctgctgaggctct

SEQ ID NO: 1876298 - DNA, 25 bp, Homo sapien
ctggatttatgttgtgcgttgctgg

SEQ ID NO: 1876299 - DNA, 25 bp, Homo sapien
gtttgagcattcctttaattgtctc

SEQ ID NO: 1876300 - DNA, 25 bp, Homo sapien
attgactgtgtttgagcattccttt

SEQ ID NO: 1876301 - DNA, 25 bp, Homo sapien
tgagcattcctttaattgtctctag

SEQ ID NO: 1876302 - DNA, 25 bp, Homo sapien
ttattgactgtgtttgagcattcct

SEQ ID NO: 1876303 - DNA, 25 bp, Homo sapien
taaatttgtgggacgccaaatacaa

SEQ ID NO: 1876304 - DNA, 25 bp, Homo sapien
gggtgcccttgtaagatgctcaaca

SEQ ID NO: 1876305 - DNA, 25 bp, Homo sapien
tactatgccgccttgtgttgtgctg

SEQ ID NO: 1876306 - DNA, 25 bp, Homo sapien
atacaaagcattgtcctcccttctg

SEQ ID NO: 1876307 - DNA, 25 bp, Homo sapien
cagtccacccccgcttcttgggaag

SEQ ID NO: 1876308 - DNA, 25 bp, Homo sapien
tctttccgcagtccacccccgcttc

SEQ ID NO: 1876309 - DNA, 25 bp, Homo sapien
cacccccgcttcttgggaagagata

SEQ ID NO: 1876310 - DNA, 25 bp, Homo sapien
ttccgcagtccacccccgcttcttg

SEQ ID NO: 1876311 - DNA, 25 bp, Homo sapien
cagagcgagtttcttaaagctacac

SEQ ID NO: 1876312 - DNA, 25 bp, Homo sapien
ggtgcagagcagaccttgaatacat

SEQ ID NO: 1876313 - DNA, 25 bp, Homo sapien
tctggagctaacattcctgcaggaa

SEQ ID NO: 1876314 - DNA, 25 bp, Homo sapien
ggagacacttctgactttatcgttg

SEQ ID NO: 1876315 - DNA, 25 bp, Homo sapien
aagtttttctcttttgtcagttgca

SEQ ID NO: 1876316 - DNA, 25 bp, Homo sapien
cctttgaacactgaagtttttctct

SEQ ID NO: 1876317 - DNA, 25 bp, Homo sapien
caacaacctttgaacactgaagttt

SEQ ID NO: 1876318 - DNA, 25 bp, Homo sapien
ccccaacaacctttgaacactgaag

SEQ ID NO: 1876319 - DNA, 25 bp, Homo sapien
gattctatagtcttgaaacaccttg

SEQ ID NO: 1876320 - DNA, 25 bp, Homo sapien
agtcttgaaacaccttgccttcttg

SEQ ID NO: 1876321 - DNA, 25 bp, Homo sapien
ggaggtgattttgaattggattcta

SEQ ID NO: 1876322 - DNA, 25 bp, Homo sapien
tggacaccttgacaggtcctaggac

SEQ ID NO: 1876323 - DNA, 25 bp, Homo sapien
gtgtataaggaactaggctgtcttt

SEQ ID NO: 1876324 - DNA, 25 bp, Homo sapien
gggagcacaacagtcgtttggactg

SEQ ID NO: 1876325 - DNA, 25 bp, Homo sapien
tctttggctggtcacttgttgcggg

SEQ ID NO: 1876326 - DNA, 25 bp, Homo sapien
tgttgcggggagcacaacagtcgtt

SEQ ID NO: 1876327 - DNA, 25 bp, Homo sapien
gggatcggaaactataaatgccaag

SEQ ID NO: 1876328 - DNA, 25 bp, Homo sapien
gagttaaagctctatgggatcggaa

SEQ ID NO: 1876329 - DNA, 25 bp, Homo sapien
cctcataagagtacaggactgtggg

SEQ ID NO: 1876330 - DNA, 25 bp, Homo sapien
ggagaggcagtagcattgacccatg

SEQ ID NO: 1876331 - DNA, 25 bp, Homo sapien
agtgtccttgaagatttttcaagca

SEQ ID NO: 1876332 - DNA, 25 bp, Homo sapien
tggctgagtgtccttgaagattttt

SEQ ID NO: 1876333 - DNA, 25 bp, Homo sapien
gctgagtgtccttgaagatttttca

SEQ ID NO: 1876334 - DNA, 25 bp, Homo sapien
tgtccttgaagatttttcaagcaga

SEQ ID NO: 1876335 - DNA, 25 bp, Homo sapien
gtctccgactagaatttgacaacaa

SEQ ID NO: 1876336 - DNA, 25 bp, Homo sapien
ctgtgaatactgtgtctccgactag

SEQ ID NO: 1876337 - DNA, 25 bp, Homo sapien
tatctactgccttctcaatctttgt

SEQ ID NO: 1876338 - DNA, 25 bp, Homo sapien
gaccacggattcctgacagccaggc

SEQ ID NO: 1876339 - DNA, 25 bp, Homo sapien
aaagccttctttgagcaatcgatag

SEQ ID NO: 1876340 - DNA, 25 bp, Homo sapien
caatcgatagttggaaagcaattcc

SEQ ID NO: 1876341 - DNA, 25 bp, Homo sapien
tatgtctaaagtggcagtgacacca

SEQ ID NO: 1876342 - DNA, 25 bp, Homo sapien
caggtgactaattttaacaaagcct

SEQ ID NO: 1876343 - DNA, 25 bp, Homo sapien
tatggctgaaaggaggcgattgcgt

SEQ ID NO: 1876344 - DNA, 25 bp, Homo sapien
cgattgcgtgtgcactcttgatacc

SEQ ID NO: 1876345 - DNA, 25 bp, Homo sapien
gaggcgattgcgtgtgcactcttga

SEQ ID NO: 1876346 - DNA, 25 bp, Homo sapien
aaaggaggcgattgcgtgtgcactc

SEQ ID NO: 1876347 - DNA, 25 bp, Homo sapien
cagatccctttcacaaggaaacaga

SEQ ID NO: 1876348 - DNA, 25 bp, Homo sapien
ggaggagacagagattccagatccc

SEQ ID NO: 1876349 - DNA, 25 bp, Homo sapien
gcccaaagtggttgaagtttgactg

SEQ ID NO: 1876350 - DNA, 25 bp, Homo sapien
tgtatttaatgaagatgctggctgt

SEQ ID NO: 1876351 - DNA, 25 bp, Homo sapien
tttgttatcctctgatcgctgaatt

SEQ ID NO: 1876352 - DNA, 25 bp, Homo sapien
cctctgatcgctgaattccagacca

SEQ ID NO: 1876353 - DNA, 25 bp, Homo sapien
ctctaggtctgctatgtctggactt

SEQ ID NO: 1876354 - DNA, 25 bp, Homo sapien
gaccagctcgaccagaatttcttac

SEQ ID NO: 1876355 - DNA, 25 bp, Homo sapien
ggcttccaggcatcttgttactagg

SEQ ID NO: 1876356 - DNA, 25 bp, Homo sapien
tcttgttactaggataactgaattg

SEQ ID NO: 1876357 - DNA, 25 bp, Homo sapien
gcaatgcagagatagcccttgggca

SEQ ID NO: 1876358 - DNA, 25 bp, Homo sapien
taactgaattgtgcccacgtgcaat

SEQ ID NO: 1876359 - DNA, 25 bp, Homo sapien
ctggctggggtgtttcatttaatga

SEQ ID NO: 1876360 - DNA, 25 bp, Homo sapien
actggctggggtgtttcatttaatg

SEQ ID NO: 1876361 - DNA, 25 bp, Homo sapien
aactggctggggtgtttcatttaat

SEQ ID NO: 1876362 - DNA, 25 bp, Homo sapien
gcaacttaaatgctttgacaccgca

SEQ ID NO: 1876363 - DNA, 25 bp, Homo sapien
caacttaaatgctttgacaccgcag

SEQ ID NO: 1876364 - DNA, 25 bp, Homo sapien
aacttaaatgctttgacaccgcagg

SEQ ID NO: 1876365 - DNA, 25 bp, Homo sapien
acttaaatgctttgacaccgcaggc

SEQ ID NO: 1876366 - DNA, 25 bp, Homo sapien
tgaaggctctgtggctatctgacaa

SEQ ID NO: 1876367 - DNA, 25 bp, Homo sapien
gcacaggaacctactgaggaatcca

SEQ ID NO: 1876368 - DNA, 25 bp, Homo sapien
gaggaatccacttgcaaagagtatg

SEQ ID NO: 1876369 - DNA, 25 bp, Homo sapien
cacagactacaccacaggagagaag

SEQ ID NO: 1876370 - DNA, 25 bp, Homo sapien
ccctggtcctccgtatagattctac

SEQ ID NO: 1876371 - DNA, 25 bp, Homo sapien
tatttctggtgttctacccctggtc

SEQ ID NO: 1876372 - DNA, 25 bp, Homo sapien
aagccaaacttgcaacagaacaccc

SEQ ID NO: 1876373 - DNA, 25 bp, Homo sapien
cagaacaccccccttatttctggtg

SEQ ID NO: 1876374 - DNA, 25 bp, Homo sapien
cttgtcagccgcaaagttcatagca

SEQ ID NO: 1876375 - DNA, 25 bp, Homo sapien
catagcatttactgatcacatgaaa

SEQ ID NO: 1876376 - DNA, 25 bp, Homo sapien
tgaaacgcaattccctgcttatgtg

SEQ ID NO: 1876377 - DNA, 25 bp, Homo sapien
tgtcagccgcaaagttcatagcatt

SEQ ID NO: 1876378 - DNA, 25 bp, Homo sapien
gaatctgcctcgctgtggtgcactg

SEQ ID NO: 1876379 - DNA, 25 bp, Homo sapien
tcaacagagtcagtgcgatccgatt

SEQ ID NO: 1876380 - DNA, 25 bp, Homo sapien
ggaacgagcgtgctgtcaacagagt

SEQ ID NO: 1876381 - DNA, 25 bp, Homo sapien
gaagaagacaatgagacggtatgga

SEQ ID NO: 1876382 - DNA, 25 bp, Homo sapien
tactgtatcctgtgtcatgtccaat

SEQ ID NO: 1876383 - DNA, 25 bp, Homo sapien
tttaatcagtaatctacctggtgga

SEQ ID NO: 1876384 - DNA, 25 bp, Homo sapien
ccttggacctactgatgagagatag

SEQ ID NO: 1876385 - DNA, 25 bp, Homo sapien
cttttttggcagctcagatggtgta

SEQ ID NO: 1876386 - DNA, 25 bp, Homo sapien
tggcgttcatgttcccacacctggc

SEQ ID NO: 1876387 - DNA, 25 bp, Homo sapien
ggagactgtctggatcccgagtgtc

SEQ ID NO: 1876388 - DNA, 25 bp, Homo sapien
tcccgagtgtctggcgttcatgttc

SEQ ID NO: 1876389 - DNA, 25 bp, Homo sapien
tctggatcccgagtgtctggcgttc

SEQ ID NO: 1876390 - DNA, 25 bp, Homo sapien
gtatagaaaagtcacgagctagatg

SEQ ID NO: 1876391 - DNA, 25 bp, Homo sapien
cttgatgtcgactccctccccaaca

SEQ ID NO: 1876392 - DNA, 25 bp, Homo sapien
aagtcacgagctagatgagatacca

SEQ ID NO: 1876393 - DNA, 25 bp, Homo sapien
tagatgagataccagcttgatgtcg

SEQ ID NO: 1876394 - DNA, 25 bp, Homo sapien
gagttatagggtcagcatggcctga

SEQ ID NO: 1876395 - DNA, 25 bp, Homo sapien
gccctgcagaagcttcaacagacca

SEQ ID NO: 1876396 - DNA, 25 bp, Homo sapien
gcctcttcgagttatagggtcagca

SEQ ID NO: 1876397 - DNA, 25 bp, Homo sapien
gagagctagatatgtgcctcttcga

SEQ ID NO: 1876398 - DNA, 25 bp, Homo sapien
gagtgaaggtccagatagtggctgg

SEQ ID NO: 1876399 - DNA, 25 bp, Homo sapien
ctgagtgaaggtccagatagtggct

SEQ ID NO: 1876400 - DNA, 25 bp, Homo sapien
gtgaaggtccagatagtggctgggc

SEQ ID NO: 1876401 - DNA, 25 bp, Homo sapien
gaaggtccagatagtggctgggcag

SEQ ID NO: 1876402 - DNA, 25 bp, Homo sapien
cgataaagtcccgtagtttcagatt

SEQ ID NO: 1876403 - DNA, 25 bp, Homo sapien
gcctgcttggattccgataaagtcc

SEQ ID NO: 1876404 - DNA, 25 bp, Homo sapien
agaaggcacaattgtacatcctgtg

SEQ ID NO: 1876405 - DNA, 25 bp, Homo sapien
gaaggcacaattgtacatcctgtgc

SEQ ID NO: 1876406 - DNA, 25 bp, Homo sapien
tattcggaccttagaaaactgcctc

SEQ ID NO: 1876407 - DNA, 25 bp, Homo sapien
gaacattgcctgaagcttgctgagt

SEQ ID NO: 1876408 - DNA, 25 bp, Homo sapien
cactgctcaggttaagaaacagaac

SEQ ID NO: 1876409 - DNA, 25 bp, Homo sapien
gctgagtgcctctgcctgttcacaa

SEQ ID NO: 1876410 - DNA, 25 bp, Homo sapien
tctgaatccctattcctggtgacca

SEQ ID NO: 1876411 - DNA, 25 bp, Homo sapien
ttgcctttctgaatccctattcctg

SEQ ID NO: 1876412 - DNA, 25 bp, Homo sapien
ctttctgaatccctattcctggtga

SEQ ID NO: 1876413 - DNA, 25 bp, Homo sapien
gcctttctgaatccctattcctggt

SEQ ID NO: 1876414 - DNA, 25 bp, Homo sapien
tccctttccaactttcctggaggca

SEQ ID NO: 1876415 - DNA, 25 bp, Homo sapien
gctgtgtgacagctgggaagtccct

SEQ ID NO: 1876416 - DNA, 25 bp, Homo sapien
gacagctgggaagtccctattacct

SEQ ID NO: 1876417 - DNA, 25 bp, Homo sapien
tgggaagtccctattaccttgctgt

SEQ ID NO: 1876418 - DNA, 25 bp, Homo sapien
tctcctatgtgtccttcttgacttg

SEQ ID NO: 1876419 - DNA, 25 bp, Homo sapien
gctctggtgcttggccaattaattt

SEQ ID NO: 1876420 - DNA, 25 bp, Homo sapien
ggctctggtgcttggccaattaatt

SEQ ID NO: 1876421 - DNA, 25 bp, Homo sapien
ctcctatgtgtccttcttgacttgg

SEQ ID NO: 1876422 - DNA, 25 bp, Homo sapien
ggatctgcacgcagttagtgttcaa

SEQ ID NO: 1876423 - DNA, 25 bp, Homo sapien
gggatctgcacgcagttagtgttca

SEQ ID NO: 1876424 - DNA, 25 bp, Homo sapien
tgccattcactcttctaaggtccag

SEQ ID NO: 1876425 - DNA, 25 bp, Homo sapien
atgccattcactcttctaaggtcca

SEQ ID NO: 1876426 - DNA, 25 bp, Homo sapien
gccattcactcttctaaggtccaga

SEQ ID NO: 1876427 - DNA, 25 bp, Homo sapien
accaacattccattagggtctagcg

SEQ ID NO: 1876428 - DNA, 25 bp, Homo sapien
gtcttgagctagtattaaactttga

SEQ ID NO: 1876429 - DNA, 25 bp, Homo sapien
ttctcggcgaaggagagtcttgagc

SEQ ID NO: 1876430 - DNA, 25 bp, Homo sapien
gcgaaggagagtcttgagctagtat

SEQ ID NO: 1876431 - DNA, 25 bp, Homo sapien
ggagagtcttgagctagtattaaac

SEQ ID NO: 1876432 - DNA, 25 bp, Homo sapien
ctgattttgccgatgagtcaacttt

SEQ ID NO: 1876433 - DNA, 25 bp, Homo sapien
tgattttgccgatgagtcaactttg

SEQ ID NO: 1876434 - DNA, 25 bp, Homo sapien
attttgccgatgagtcaactttgaa

SEQ ID NO: 1876435 - DNA, 25 bp, Homo sapien
gattttgccgatgagtcaactttga

SEQ ID NO: 1876436 - DNA, 25 bp, Homo sapien
attccctatggacagtgtggtttct

SEQ ID NO: 1876437 - DNA, 25 bp, Homo sapien
tggtttctaaccgaagtggacagtg

SEQ ID NO: 1876438 - DNA, 25 bp, Homo sapien
tatggacagtgtggtttctaaccga

SEQ ID NO: 1876439 - DNA, 25 bp, Homo sapien
atactgtgttccaaacaaaacatag

SEQ ID NO: 1876440 - DNA, 25 bp, Homo sapien
agttaggccaataaatactccctgt

SEQ ID NO: 1876441 - DNA, 25 bp, Homo sapien
ttaggccaataaatactccctgtta

SEQ ID NO: 1876442 - DNA, 25 bp, Homo sapien
tgcagattggatcatgatggacacc

SEQ ID NO: 1876443 - DNA, 25 bp, Homo sapien
ctcccactacccgttgcagattgga

SEQ ID NO: 1876444 - DNA, 25 bp, Homo sapien
tacccgttgcagattggatcatgat

SEQ ID NO: 1876445 - DNA, 25 bp, Homo sapien
ggatcatgatggacacctgactcat

SEQ ID NO: 1876446 - DNA, 25 bp, Homo sapien
tgccttggattgagagacatgaaca

SEQ ID NO: 1876447 - DNA, 25 bp, Homo sapien
catgaacattttggactggaggtgc

SEQ ID NO: 1876448 - DNA, 25 bp, Homo sapien
ccaatcattaaggtgggttgtgtcc

SEQ ID NO: 1876449 - DNA, 25 bp, Homo sapien
agtcagtttgtatgcatgccttgga

SEQ ID NO: 1876450 - DNA, 25 bp, Homo sapien
gaggtctgccagatcgtccataaaa

SEQ ID NO: 1876451 - DNA, 25 bp, Homo sapien
tcaaagattcatagtcagcctcagt

SEQ ID NO: 1876452 - DNA, 25 bp, Homo sapien
gcatgtctgggtattagctcgctaa

SEQ ID NO: 1876453 - DNA, 25 bp, Homo sapien
ctgttgggactgctgactcaggagc

SEQ ID NO: 1876454 - DNA, 25 bp, Homo sapien
aataatcaactgatagtatgaagag

SEQ ID NO: 1876455 - DNA, 25 bp, Homo sapien
gaggtgatgaagctgtgaggttgga

SEQ ID NO: 1876456 - DNA, 25 bp, Homo sapien
ttaataatcaactgatagtatgaag

SEQ ID NO: 1876457 - DNA, 25 bp, Homo sapien
agggatgctacggtctggatgtgtc

SEQ ID NO: 1876458 - DNA, 25 bp, Homo sapien
tacgtggtagatggatcagaaactt

SEQ ID NO: 1876459 - DNA, 25 bp, Homo sapien
gttcactgcacttgagattagctgc

SEQ ID NO: 1876460 - DNA, 25 bp, Homo sapien
gagctaatttggcactcactgaggg

SEQ ID NO: 1876461 - DNA, 25 bp, Homo sapien
tcttggtcagcgtcaaagttacgtg

SEQ ID NO: 1876462 - DNA, 25 bp, Homo sapien
tctgttgcaggcacttagactgagc

SEQ ID NO: 1876463 - DNA, 25 bp, Homo sapien
ggttgaagcaaaaaactatgatggc

SEQ ID NO: 1876464 - DNA, 25 bp, Homo sapien
aattggagctagaacagtaagtgca

SEQ ID NO: 1876465 - DNA, 25 bp, Homo sapien
gaggatgattctcccatttgttgtg

SEQ ID NO: 1876466 - DNA, 25 bp, Homo sapien
tgaagtcttgcccaactttcaaact

SEQ ID NO: 1876467 - DNA, 25 bp, Homo sapien
ccctgaagtcttgcccaactttcaa

SEQ ID NO: 1876468 - DNA, 25 bp, Homo sapien
gatgggacccattccctgcaactcc

SEQ ID NO: 1876469 - DNA, 25 bp, Homo sapien
tgatgggacccattccctgcaactc

SEQ ID NO: 1876470 - DNA, 25 bp, Homo sapien
tgtctacacagagtctcatttggta

SEQ ID NO: 1876471 - DNA, 25 bp, Homo sapien
tgtagacccaattcaaaccagactg

SEQ ID NO: 1876472 - DNA, 25 bp, Homo sapien
gactctggacctataatttggaaag

SEQ ID NO: 1876473 - DNA, 25 bp, Homo sapien
catgctgattgtgcaaacattggca

SEQ ID NO: 1876474 - DNA, 25 bp, Homo sapien
ccctaaaatacccgcaggtctccat

SEQ ID NO: 1876475 - DNA, 25 bp, Homo sapien
cttcacaaccctaaaatacccgcag

SEQ ID NO: 1876476 - DNA, 25 bp, Homo sapien
taggaattgcatccacgacaggctt

SEQ ID NO: 1876477 - DNA, 25 bp, Homo sapien
gaaggccttttgagatgattccagg

SEQ ID NO: 1876478 - DNA, 25 bp, Homo sapien
tgtatatgtcgagacttgaaggcct

SEQ ID NO: 1876479 - DNA, 25 bp, Homo sapien
caggtgttactctaggaatgtgttc

SEQ ID NO: 1876480 - DNA, 25 bp, Homo sapien
gggcttcaactgagagttccttaaa

SEQ ID NO: 1876481 - DNA, 25 bp, Homo sapien
gtcatgggcttcaactgagagttcc

SEQ ID NO: 1876482 - DNA, 25 bp, Homo sapien
caagtcatgggcttcaactgagagt

SEQ ID NO: 1876483 - DNA, 25 bp, Homo sapien
ctttagcaagtcatgggcttcaact

SEQ ID NO: 1876484 - DNA, 25 bp, Homo sapien
ggattgtattcatctattgcaagct

SEQ ID NO: 1876485 - DNA, 25 bp, Homo sapien
tattcatctattgcaagctttgaca

SEQ ID NO: 1876486 - DNA, 25 bp, Homo sapien
gattgtattcatctattgcaagctt

SEQ ID NO: 1876487 - DNA, 25 bp, Homo sapien
tgtattcatctattgcaagctttga

SEQ ID NO: 1876488 - DNA, 25 bp, Homo sapien
tcttctaagtgcagcccaaatgcca

SEQ ID NO: 1876489 - DNA, 25 bp, Homo sapien
ctaagtgcagcccaaatgccaccat

SEQ ID NO: 1876490 - DNA, 25 bp, Homo sapien
cctttccccgttcttctaagtgcag

SEQ ID NO: 1876491 - DNA, 25 bp, Homo sapien
tttccccgttcttctaagtgcagcc

SEQ ID NO: 1876492 - DNA, 25 bp, Homo sapien
gccaaatgtcatctagtggaaatct

SEQ ID NO: 1876493 - DNA, 25 bp, Homo sapien
gtacataccagtccgcattgtcacg

SEQ ID NO: 1876494 - DNA, 25 bp, Homo sapien
tgaagtcgaattcggcctcgtacat

SEQ ID NO: 1876495 - DNA, 25 bp, Homo sapien
ttgtcacgcattcactctctccgag

SEQ ID NO: 1876496 - DNA, 25 bp, Homo sapien
cttcccatatctctaacaaggacag

SEQ ID NO: 1876497 - DNA, 25 bp, Homo sapien
catatctctaacaaggacagaggag

SEQ ID NO: 1876498 - DNA, 25 bp, Homo sapien
ggtcacctgtttcaaccccatcact

SEQ ID NO: 1876499 - DNA, 25 bp, Homo sapien
cacaggtcacctgtttcaaccccat

SEQ ID NO: 1876500 - DNA, 25 bp, Homo sapien
ggatcagggcttggttgagctttca

SEQ ID NO: 1876501 - DNA, 25 bp, Homo sapien
tgtgctctgccagtaatccagatat

SEQ ID NO: 1876502 - DNA, 25 bp, Homo sapien
gctttgccaggcagtttttgacagt

SEQ ID NO: 1876503 - DNA, 25 bp, Homo sapien
gaagtgtctgggcaatccctatgaa

SEQ ID NO: 1876504 - DNA, 25 bp, Homo sapien
tctgcttattttggatggcgatttc

SEQ ID NO: 1876505 - DNA, 25 bp, Homo sapien
tctggaacctggtcacaagtgtgtg

SEQ ID NO: 1876506 - DNA, 25 bp, Homo sapien
tcgtctttccctcatacttgtctcg

SEQ ID NO: 1876507 - DNA, 25 bp, Homo sapien
gacttctggaggttgtggaaaggga

SEQ ID NO: 1876508 - DNA, 25 bp, Homo sapien
tactgatattttccaaaagctccat

SEQ ID NO: 1876509 - DNA, 25 bp, Homo sapien
ttgtctaataacattttactgatat

SEQ ID NO: 1876510 - DNA, 25 bp, Homo sapien
tgtctaataacattttactgatatt

SEQ ID NO: 1876511 - DNA, 25 bp, Homo sapien
ttttactgatattttccaaaagctc

SEQ ID NO: 1876512 - DNA, 25 bp, Homo sapien
tctttcatggtaagctcaatggact

SEQ ID NO: 1876513 - DNA, 25 bp, Homo sapien
ccattctgaacgatgttaaagcaag

SEQ ID NO: 1876514 - DNA, 25 bp, Homo sapien
gacacagttcctacatacgtttcag

SEQ ID NO: 1876515 - DNA, 25 bp, Homo sapien
gcttcaataattgtgactggcctca

SEQ ID NO: 1876516 - DNA, 25 bp, Homo sapien
tcttcctaggcaccataagtatgtg

SEQ ID NO: 1876517 - DNA, 25 bp, Homo sapien
ggcacatgtgtctcagcttacttac

SEQ ID NO: 1876518 - DNA, 25 bp, Homo sapien
gcttacttacctggccctaaggtga

SEQ ID NO: 1876519 - DNA, 25 bp, Homo sapien
tagattaaggcctactggagtccat

SEQ ID NO: 1876520 - DNA, 25 bp, Homo sapien
gccagcatagaagagatttacctac

SEQ ID NO: 1876521 - DNA, 25 bp, Homo sapien
tgagtgctccctttatgagctgcag

SEQ ID NO: 1876522 - DNA, 25 bp, Homo sapien
taagctgaccgcaatactaacgtgc

SEQ ID NO: 1876523 - DNA, 25 bp, Homo sapien
tcacagtgctctgctaacagccagc

SEQ ID NO: 1876524 - DNA, 25 bp, Homo sapien
tgatttgctgccacacccaaacgga

SEQ ID NO: 1876525 - DNA, 25 bp, Homo sapien
tcctggaagagtcctagcctttgat

SEQ ID NO: 1876526 - DNA, 25 bp, Homo sapien
gagaaagctgtaatgtaggagatga

SEQ ID NO: 1876527 - DNA, 25 bp, Homo sapien
gagagaaagctgtaatgtaggagat

SEQ ID NO: 1876528 - DNA, 25 bp, Homo sapien
ggtgagaaacaaggagccctgtcct

SEQ ID NO: 1876529 - DNA, 25 bp, Homo sapien
ctctgtaataacatgcccaaagttg

SEQ ID NO: 1876530 - DNA, 25 bp, Homo sapien
taataacatgcccaaagttgcctgc

SEQ ID NO: 1876531 - DNA, 25 bp, Homo sapien
aaacaaggagccctgtccttgtctg

SEQ ID NO: 1876532 - DNA, 25 bp, Homo sapien
gagatgaacagatccccaaagaaag

SEQ ID NO: 1876533 - DNA, 25 bp, Homo sapien
actggcttagcttatgtcatgtgca

SEQ ID NO: 1876534 - DNA, 25 bp, Homo sapien
tcaagacccaaaatgatctggcccc

SEQ ID NO: 1876535 - DNA, 25 bp, Homo sapien
tactgatggtctcaccaggactttg

SEQ ID NO: 1876536 - DNA, 25 bp, Homo sapien
gatgcatcatctcggcccattagaa

SEQ ID NO: 1876537 - DNA, 25 bp, Homo sapien
tattcccagaatatagcatagggcc

SEQ ID NO: 1876538 - DNA, 25 bp, Homo sapien
gcatagggcctgaaatacatgtgga

SEQ ID NO: 1876539 - DNA, 25 bp, Homo sapien
ccttgaaccagagtggagattgatc

SEQ ID NO: 1876540 - DNA, 25 bp, Homo sapien
ggtgccagaagaaaacgacacaatg

SEQ ID NO: 1876541 - DNA, 25 bp, Homo sapien
aaataaacagcaaggtcaaggaaca

SEQ ID NO: 1876542 - DNA, 25 bp, Homo sapien
tggtgaacccaaggttatagaacca

SEQ ID NO: 1876543 - DNA, 25 bp, Homo sapien
tttcatagacaaataactgaggacc

SEQ ID NO: 1876544 - DNA, 25 bp, Homo sapien
aatagtttaggatgggtgcttttag

SEQ ID NO: 1876545 - DNA, 25 bp, Homo sapien
tcttcccattttcttgatctatcat

SEQ ID NO: 1876546 - DNA, 25 bp, Homo sapien
gactctcctttatatggtttcaggg

SEQ ID NO: 1876547 - DNA, 25 bp, Homo sapien
ggtcacatgttgtgatctcatccag

SEQ ID NO: 1876548 - DNA, 25 bp, Homo sapien
ccctgtctctgagttttctttacat

SEQ ID NO: 1876549 - DNA, 25 bp, Homo sapien
ctgtctctgagttttctttacattc

SEQ ID NO: 1876550 - DNA, 25 bp, Homo sapien
tgatcttggagcctatcctggcttt

SEQ ID NO: 1876551 - DNA, 25 bp, Homo sapien
tcttggagcctatcctggctttctt

SEQ ID NO: 1876552 - DNA, 25 bp, Homo sapien
cgtgttcatgtgacatctcttttcc

SEQ ID NO: 1876553 - DNA, 25 bp, Homo sapien
taacttacatgcctttgcagcaaca

SEQ ID NO: 1876554 - DNA, 25 bp, Homo sapien
aacattgtttgatttacagtgtaaa

SEQ ID NO: 1876555 - DNA, 25 bp, Homo sapien
tttacagtgtaaattctaagacgtg

SEQ ID NO: 1876556 - DNA, 25 bp, Homo sapien
ttataattacctccagaagatttta

SEQ ID NO: 1876557 - DNA, 25 bp, Homo sapien
tataattacctccagaagattttaa

SEQ ID NO: 1876558 - DNA, 25 bp, Homo sapien
tcactccctacaatcacatcctgca

SEQ ID NO: 1876559 - DNA, 25 bp, Homo sapien
cctgtgtgaggtcagcgtccacatt

SEQ ID NO: 1876560 - DNA, 25 bp, Homo sapien
tcctgtgtgaggtcagcgtccacat

SEQ ID NO: 1876561 - DNA, 25 bp, Homo sapien
ctgtgtgaggtcagcgtccacattt

SEQ ID NO: 1876562 - DNA, 25 bp, Homo sapien
gccattagggtcaggagaatcctcc

SEQ ID NO: 1876563 - DNA, 25 bp, Homo sapien
ttaggaatctcaactgtggcagagc

SEQ ID NO: 1876564 - DNA, 25 bp, Homo sapien
tggtagtgggtaatgcgacagcttc

SEQ ID NO: 1876565 - DNA, 25 bp, Homo sapien
tgttctggtgccattagggtcagga

SEQ ID NO: 1876566 - DNA, 25 bp, Homo sapien
ttttccacaggaagatatttctcct

SEQ ID NO: 1876567 - DNA, 25 bp, Homo sapien
gtcattaacagggaatgtttttcca

SEQ ID NO: 1876568 - DNA, 25 bp, Homo sapien
cattaacagggaatgtttttccaca

SEQ ID NO: 1876569 - DNA, 25 bp, Homo sapien
catgtcattaacagggaatgttttt

SEQ ID NO: 1876570 - DNA, 25 bp, Homo sapien
tcttttttctgttccgtgaagccca

SEQ ID NO: 1876571 - DNA, 25 bp, Homo sapien
tgttctctataacttgatgcccgtt

SEQ ID NO: 1876572 - DNA, 25 bp, Homo sapien
gatgcccgttggacttcctgattag

SEQ ID NO: 1876573 - DNA, 25 bp, Homo sapien
tccgtgaagcccatatcaatcccat

SEQ ID NO: 1876574 - DNA, 25 bp, Homo sapien
ctggtaaaacatgatgaaagagccc

SEQ ID NO: 1876575 - DNA, 25 bp, Homo sapien
tacagaagacgcatacaatgaaggc

SEQ ID NO: 1876576 - DNA, 25 bp, Homo sapien
ctcaccacaataggagcagaatctt

SEQ ID NO: 1876577 - DNA, 25 bp, Homo sapien
tgtcattcaccgtagcatacaaatg

SEQ ID NO: 1876578 - DNA, 25 bp, Homo sapien
ggtaccagtgcggaggaccttcctg

SEQ ID NO: 1876579 - DNA, 25 bp, Homo sapien
gtaccagtgcggaggaccttcctgt

SEQ ID NO: 1876580 - DNA, 25 bp, Homo sapien
atgctggcttttttgggaaaaactg

SEQ ID NO: 1876581 - DNA, 25 bp, Homo sapien
gtctgaatccagtttgaagaaaatg

SEQ ID NO: 1876582 - DNA, 25 bp, Homo sapien
ctgctgtctgaatccagtttgaaga

SEQ ID NO: 1876583 - DNA, 25 bp, Homo sapien
tgaagaaaatgctggcttttttggg

SEQ ID NO: 1876584 - DNA, 25 bp, Homo sapien
gactccacatcaccaaagcactttg

SEQ ID NO: 1876585 - DNA, 25 bp, Homo sapien
gcactttgggactgatgtctgtatc

SEQ ID NO: 1876586 - DNA, 25 bp, Homo sapien
tcttcaggggaaagacatagtgacc

SEQ ID NO: 1876587 - DNA, 25 bp, Homo sapien
gcagttagggtagtttggctttctc

SEQ ID NO: 1876588 - DNA, 25 bp, Homo sapien
tccaacgctgctactctaatctgag

SEQ ID NO: 1876589 - DNA, 25 bp, Homo sapien
tgttctcaacttagatgtcagggtg

SEQ ID NO: 1876590 - DNA, 25 bp, Homo sapien
taaatggcctacagagcaccacatg

SEQ ID NO: 1876591 - DNA, 25 bp, Homo sapien
aatcgatgatccaccaagtctgccc

SEQ ID NO: 1876592 - DNA, 25 bp, Homo sapien
gttttattcctagaatgcaaggttg

SEQ ID NO: 1876593 - DNA, 25 bp, Homo sapien
aaatgacttaccacatagaaagaac

SEQ ID NO: 1876594 - DNA, 25 bp, Homo sapien
ggcatgcagttttcgtttggttgtg

SEQ ID NO: 1876595 - DNA, 25 bp, Homo sapien
aatcaaatctggcagcacgtcaaaa

SEQ ID NO: 1876596 - DNA, 25 bp, Homo sapien
ctagacatagattctggcaaatatt

SEQ ID NO: 1876597 - DNA, 25 bp, Homo sapien
tctagacatagattctggcaaatat

SEQ ID NO: 1876598 - DNA, 25 bp, Homo sapien
attctagacatagattctggcaaat

SEQ ID NO: 1876599 - DNA, 25 bp, Homo sapien
ccattctagacatagattctggcaa

SEQ ID NO: 1876600 - DNA, 25 bp, Homo sapien
tcttctcagcgtcacatagcatgta

SEQ ID NO: 1876601 - DNA, 25 bp, Homo sapien
ctgaatgattactggacaaataatg

SEQ ID NO: 1876602 - DNA, 25 bp, Homo sapien
acaaattagaacacaagattgagaa

SEQ ID NO: 1876603 - DNA, 25 bp, Homo sapien
tctggatcaaatggacctagtagac

SEQ ID NO: 1876604 - DNA, 25 bp, Homo sapien
ttcacaagatgactcctgagcagtt

SEQ ID NO: 1876605 - DNA, 25 bp, Homo sapien
tttcacaagatgactcctgagcagt

SEQ ID NO: 1876606 - DNA, 25 bp, Homo sapien
ctgagcagttaggaagaagtgtgta

SEQ ID NO: 1876607 - DNA, 25 bp, Homo sapien
cacaagatgactcctgagcagttag

SEQ ID NO: 1876608 - DNA, 25 bp, Homo sapien
ttggatactgcggacactccctgag

SEQ ID NO: 1876609 - DNA, 25 bp, Homo sapien
tctcctttggatactgcggacactc

SEQ ID NO: 1876610 - DNA, 25 bp, Homo sapien
ttggtctcctttggatactgcggac

SEQ ID NO: 1876611 - DNA, 25 bp, Homo sapien
atactgcggacactccctgagggct

SEQ ID NO: 1876612 - DNA, 25 bp, Homo sapien
ggaggccacagttgaggatgtatta

SEQ ID NO: 1876613 - DNA, 25 bp, Homo sapien
ccacagttgaggatgtattagggcg

SEQ ID NO: 1876614 - DNA, 25 bp, Homo sapien
caggaggccacagttgaggatgtat

SEQ ID NO: 1876615 - DNA, 25 bp, Homo sapien
aggccacagttgaggatgtattagg

SEQ ID NO: 1876616 - DNA, 25 bp, Homo sapien
catgccttcaaattcatctgacttg

SEQ ID NO: 1876617 - DNA, 25 bp, Homo sapien
tgaatcatttgctggtgaggcgact

SEQ ID NO: 1876618 - DNA, 25 bp, Homo sapien
atgtgaatcatttgctggtgaggcg

SEQ ID NO: 1876619 - DNA, 25 bp, Homo sapien
catttgctggtgaggcgacttgaac

SEQ ID NO: 1876620 - DNA, 25 bp, Homo sapien
tgttctgcagtttggagtgaatgga

SEQ ID NO: 1876621 - DNA, 25 bp, Homo sapien
tctgcagtttggagtgaatggacat

SEQ ID NO: 1876622 - DNA, 25 bp, Homo sapien
ttctgcagtttggagtgaatggaca

SEQ ID NO: 1876623 - DNA, 25 bp, Homo sapien
cttgttctgcagtttggagtgaatg

SEQ ID NO: 1876624 - DNA, 25 bp, Homo sapien
tagcgcaggacaacatcttactgtt

SEQ ID NO: 1876625 - DNA, 25 bp, Homo sapien
tctgttggcccaaatgtgggcatcc

SEQ ID NO: 1876626 - DNA, 25 bp, Homo sapien
ggagcctgtcagctctagcgcagga

SEQ ID NO: 1876627 - DNA, 25 bp, Homo sapien
tgaattggctcatgcgaaccctggc

SEQ ID NO: 1876628 - DNA, 25 bp, Homo sapien
tgcattgatgtacaaaacacatgtg

SEQ ID NO: 1876629 - DNA, 25 bp, Homo sapien
taagggctctataccaagctatgcc

SEQ ID NO: 1876630 - DNA, 25 bp, Homo sapien
gacctgactggataaggcatctctc

SEQ ID NO: 1876631 - DNA, 25 bp, Homo sapien
cacatgtgtttcaaggtaagtcaac

SEQ ID NO: 1876632 - DNA, 25 bp, Homo sapien
tgctgatgtccgcgtcatatcctcc

SEQ ID NO: 1876633 - DNA, 25 bp, Homo sapien
gctgatgtccgcgtcatatcctcca

SEQ ID NO: 1876634 - DNA, 25 bp, Homo sapien
ctgatgtccgcgtcatatcctccag

SEQ ID NO: 1876635 - DNA, 25 bp, Homo sapien
tgatgtccgcgtcatatcctccagg

SEQ ID NO: 1876636 - DNA, 25 bp, Homo sapien
cttttcgaatttcactgtgtaggca

SEQ ID NO: 1876637 - DNA, 25 bp, Homo sapien
cagctgaatgactatagttgttgct

SEQ ID NO: 1876638 - DNA, 25 bp, Homo sapien
tctcttaaggacacagctgaatgac

SEQ ID NO: 1876639 - DNA, 25 bp, Homo sapien
caggcactgtagcagactggcagga

SEQ ID NO: 1876640 - DNA, 25 bp, Homo sapien
gttgccaaaggccatttggtaagag

SEQ ID NO: 1876641 - DNA, 25 bp, Homo sapien
gattattagctgtcaagatctccca

SEQ ID NO: 1876642 - DNA, 25 bp, Homo sapien
gtagaaggcttgcactagacacaca

SEQ ID NO: 1876643 - DNA, 25 bp, Homo sapien
gctctagactgggtgaagaactcat

SEQ ID NO: 1876644 - DNA, 25 bp, Homo sapien
ccccaaaactgtaaggatagattca

SEQ ID NO: 1876645 - DNA, 25 bp, Homo sapien
ccattgtagggaggctgtccagtgc

SEQ ID NO: 1876646 - DNA, 25 bp, Homo sapien
cagttcatagccgatgcatcatccc

SEQ ID NO: 1876647 - DNA, 25 bp, Homo sapien
gaaaagaggtcgcagcagctgatgc

SEQ ID NO: 1876648 - DNA, 25 bp, Homo sapien
tttcagtgcctgatccattgtaggg

SEQ ID NO: 1876649 - DNA, 25 bp, Homo sapien
tttatgtaagcatcagcccctgtgc

SEQ ID NO: 1876650 - DNA, 25 bp, Homo sapien
gccccactactgcacgtttttaaga

SEQ ID NO: 1876651 - DNA, 25 bp, Homo sapien
gagtgcctactgatccataagatgt

SEQ ID NO: 1876652 - DNA, 25 bp, Homo sapien
gaattccatgtgtctagtctgcctc

SEQ ID NO: 1876653 - DNA, 25 bp, Homo sapien
gatactataggctgggtctgcaacc

SEQ ID NO: 1876654 - DNA, 25 bp, Homo sapien
tacaggctactttcccacaggtaca

SEQ ID NO: 1876655 - DNA, 25 bp, Homo sapien
cagaagcttcttatcaggctccaca

SEQ ID NO: 1876656 - DNA, 25 bp, Homo sapien
taatactttaaatctggtgacccag

SEQ ID NO: 1876657 - DNA, 25 bp, Homo sapien
gactcttgcaaacagacagggatac

SEQ ID NO: 1876658 - DNA, 25 bp, Homo sapien
tgcaaacagacagggatacatccat

SEQ ID NO: 1876659 - DNA, 25 bp, Homo sapien
tcttgcaaacagacagggatacatc

SEQ ID NO: 1876660 - DNA, 25 bp, Homo sapien
tcttgactcttgcaaacagacaggg

SEQ ID NO: 1876661 - DNA, 25 bp, Homo sapien
gcactgaatcttaaccccacaggtg

SEQ ID NO: 1876662 - DNA, 25 bp, Homo sapien
tagtgctctgctagtctcctgaggc

SEQ ID NO: 1876663 - DNA, 25 bp, Homo sapien
cccacaggtgtatgtctcagtaatt

SEQ ID NO: 1876664 - DNA, 25 bp, Homo sapien
gaaatcttggatctagagcactgaa

SEQ ID NO: 1876665 - DNA, 25 bp, Homo sapien
ggcttaagaacctcagcatgaccac

SEQ ID NO: 1876666 - DNA, 25 bp, Homo sapien
cagataactggcttaagaacctcag

SEQ ID NO: 1876667 - DNA, 25 bp, Homo sapien
catgaccacttcttgcaggatctta

SEQ ID NO: 1876668 - DNA, 25 bp, Homo sapien
gaacctcagcatgaccacttcttgc

SEQ ID NO: 1876669 - DNA, 25 bp, Homo sapien
tccaatctccagtgcagagatacag

SEQ ID NO: 1876670 - DNA, 25 bp, Homo sapien
ctgaagaaggcatatcagaaacata

SEQ ID NO: 1876671 - DNA, 25 bp, Homo sapien
cagtatttgccaacattctcatcta

SEQ ID NO: 1876672 - DNA, 25 bp, Homo sapien
tgcagagatacagggatcattgctg

SEQ ID NO: 1876673 - DNA, 25 bp, Homo sapien
tgtcacattgtaccaggagacttca

SEQ ID NO: 1876674 - DNA, 25 bp, Homo sapien
aatgttccttatcagttggtccact

SEQ ID NO: 1876675 - DNA, 25 bp, Homo sapien
aaacaagacgctggaaatgtcacat

SEQ ID NO: 1876676 - DNA, 25 bp, Homo sapien
gagagaagctctgaacttaggcaat

SEQ ID NO: 1876677 - DNA, 25 bp, Homo sapien
aacaagggaggcattttaggctgga

SEQ ID NO: 1876678 - DNA, 25 bp, Homo sapien
gacatcttcaaattaggccttccag

SEQ ID NO: 1876679 - DNA, 25 bp, Homo sapien
ctgggagccagtgatacagaatttc

SEQ ID NO: 1876680 - DNA, 25 bp, Homo sapien
aataaacatgatatgtctgggagcc

SEQ ID NO: 1876681 - DNA, 25 bp, Homo sapien
tagagggacctgctttcacgcacat

SEQ ID NO: 1876682 - DNA, 25 bp, Homo sapien
ttgctccgcagtatcccacctagag

SEQ ID NO: 1876683 - DNA, 25 bp, Homo sapien
gcactgcgggatgcccactggaatt

SEQ ID NO: 1876684 - DNA, 25 bp, Homo sapien
ctaggacagttgagagtcagtacca

SEQ ID NO: 1876685 - DNA, 25 bp, Homo sapien
gaaggtgctacaacccttgctctca

SEQ ID NO: 1876686 - DNA, 25 bp, Homo sapien
tactgtgggctgaatccgccccaca

SEQ ID NO: 1876687 - DNA, 25 bp, Homo sapien
ttcttcccaggtgagcgtcgctgtc

SEQ ID NO: 1876688 - DNA, 25 bp, Homo sapien
cagggtgtcgggacttgtaattgcc

SEQ ID NO: 1876689 - DNA, 25 bp, Homo sapien
gaagcgggaggagagaccgctggga

SEQ ID NO: 1876690 - DNA, 25 bp, Homo sapien
ttgaaaagttgtctcgggcggagtc

SEQ ID NO: 1876691 - DNA, 25 bp, Homo sapien
cttttccagtgtaggagtgcgccga

SEQ ID NO: 1876692 - DNA, 25 bp, Homo sapien
gaaaagtctcgtgggaggaagtcca

SEQ ID NO: 1876693 - DNA, 25 bp, Homo sapien
ggacaggcagagaatgcctgtgttc

SEQ ID NO: 1876694 - DNA, 25 bp, Homo sapien
ctgtgtaaggttaatggacaggcag

SEQ ID NO: 1876695 - DNA, 25 bp, Homo sapien
tgtaaggttaatggacaggcagaga

SEQ ID NO: 1876696 - DNA, 25 bp, Homo sapien
acaggcagagaatgcctgtgttcat

SEQ ID NO: 1876697 - DNA, 25 bp, Homo sapien
gagacaacagcgctttctttatagg

SEQ ID NO: 1876698 - DNA, 25 bp, Homo sapien
gtatgtaaagagacaacagcgcttt

SEQ ID NO: 1876699 - DNA, 25 bp, Homo sapien
tgtaaagagacaacagcgctttctt

SEQ ID NO: 1876700 - DNA, 25 bp, Homo sapien
caacagcgctttctttataggagga

SEQ ID NO: 1876701 - DNA, 25 bp, Homo sapien
atgttgtctatgctcggagcggtga

SEQ ID NO: 1876702 - DNA, 25 bp, Homo sapien
cggtgaagttatagggtctctctga

SEQ ID NO: 1876703 - DNA, 25 bp, Homo sapien
gagcggtgaagttatagggtctctc

SEQ ID NO: 1876704 - DNA, 25 bp, Homo sapien
tctatgctcggagcggtgaagttat

SEQ ID NO: 1876705 - DNA, 25 bp, Homo sapien
gctctataagaattatcaaactttg

SEQ ID NO: 1876706 - DNA, 25 bp, Homo sapien
tctgtacttgttcatgtgttgctct

SEQ ID NO: 1876707 - DNA, 25 bp, Homo sapien
gatatgcagggttttgaatcaccaa

SEQ ID NO: 1876708 - DNA, 25 bp, Homo sapien
ccatatggctttagtttggatattc

SEQ ID NO: 1876709 - DNA, 25 bp, Homo sapien
cctctccaggacttgaggatattgt

SEQ ID NO: 1876710 - DNA, 25 bp, Homo sapien
tccaggacttgaggatattgtggtt

SEQ ID NO: 1876711 - DNA, 25 bp, Homo sapien
tctccaggacttgaggatattgtgg

SEQ ID NO: 1876712 - DNA, 25 bp, Homo sapien
gacttgaggatattgtggttgttca

SEQ ID NO: 1876713 - DNA, 25 bp, Homo sapien
ttatacataattcaaagttctctga

SEQ ID NO: 1876714 - DNA, 25 bp, Homo sapien
tctctgatcttctttccacacccac

SEQ ID NO: 1876715 - DNA, 25 bp, Homo sapien
tctgatcttctttccacacccacat

SEQ ID NO: 1876716 - DNA, 25 bp, Homo sapien
tacataattcaaagttctctgatct

SEQ ID NO: 1876717 - DNA, 25 bp, Homo sapien
ctgataagagaaggaagggttagct

SEQ ID NO: 1876718 - DNA, 25 bp, Homo sapien
tgaaattggaacacaagaggccagt

SEQ ID NO: 1876719 - DNA, 25 bp, Homo sapien
aattggaacacaagaggccagtcca

SEQ ID NO: 1876720 - DNA, 25 bp, Homo sapien
tggaacacaagaggccagtccacac

SEQ ID NO: 1876721 - DNA, 25 bp, Homo sapien
gctacactggtatggcagtaaccca

SEQ ID NO: 1876722 - DNA, 25 bp, Homo sapien
tgctacactggtatggcagtaaccc

SEQ ID NO: 1876723 - DNA, 25 bp, Homo sapien
ctgctgctacactggtatggcagta

SEQ ID NO: 1876724 - DNA, 25 bp, Homo sapien
gctgctacactggtatggcagtaac

SEQ ID NO: 1876725 - DNA, 25 bp, Homo sapien
aagttcaccatcagtaatgcttttg

SEQ ID NO: 1876726 - DNA, 25 bp, Homo sapien
tcaccatcagtaatgcttttggcaa

SEQ ID NO: 1876727 - DNA, 25 bp, Homo sapien
caccatcagtaatgcttttggcaag

SEQ ID NO: 1876728 - DNA, 25 bp, Homo sapien
atgcaagttcaccatcagtaatgct

SEQ ID NO: 1876729 - DNA, 25 bp, Homo sapien
tctctttggatgctgtttggtcatt

SEQ ID NO: 1876730 - DNA, 25 bp, Homo sapien
tgagtcaaacccacttcctgctgcc

SEQ ID NO: 1876731 - DNA, 25 bp, Homo sapien
gaggaacccctaatcctgagtcaaa

SEQ ID NO: 1876732 - DNA, 25 bp, Homo sapien
agaacccatctctctattaacctga

SEQ ID NO: 1876733 - DNA, 25 bp, Homo sapien
ttgactgactgacccttgatgccgt

SEQ ID NO: 1876734 - DNA, 25 bp, Homo sapien
gactgacccttgatgccgtccaagt

SEQ ID NO: 1876735 - DNA, 25 bp, Homo sapien
gactgactgacccttgatgccgtcc

SEQ ID NO: 1876736 - DNA, 25 bp, Homo sapien
tgactgacccttgatgccgtccaag

SEQ ID NO: 1876737 - DNA, 25 bp, Homo sapien
ctaggtttgtttgccaaaatctttg

SEQ ID NO: 1876738 - DNA, 25 bp, Homo sapien
taggtttgtttgccaaaatctttga

SEQ ID NO: 1876739 - DNA, 25 bp, Homo sapien
cacatgaatccacacgtttaactac

SEQ ID NO: 1876740 - DNA, 25 bp, Homo sapien
tttcttgaccatggataaggtgacc

SEQ ID NO: 1876741 - DNA, 25 bp, Homo sapien
gcttcttaacaattcgtagtcatca

SEQ ID NO: 1876742 - DNA, 25 bp, Homo sapien
aaacctgctgttgtacataaccctt

SEQ ID NO: 1876743 - DNA, 25 bp, Homo sapien
caagcctaggttgcctgactcaggg

SEQ ID NO: 1876744 - DNA, 25 bp, Homo sapien
tgcatccatgctgtcaaccttaatt

SEQ ID NO: 1876745 - DNA, 25 bp, Homo sapien
ttcagacacagcctgacacgtggag

SEQ ID NO: 1876746 - DNA, 25 bp, Homo sapien
tctgcatttacttggtaccaggtaa

SEQ ID NO: 1876747 - DNA, 25 bp, Homo sapien
acacttcgtgctttcttgtttccaa

SEQ ID NO: 1876748 - DNA, 25 bp, Homo sapien
cttcaacacttcgtgctttcttgtt

SEQ ID NO: 1876749 - DNA, 25 bp, Homo sapien
gcatgattgtagaccattgttacca

SEQ ID NO: 1876750 - DNA, 25 bp, Homo sapien
gataataatattagcatgattgtag

SEQ ID NO: 1876751 - DNA, 25 bp, Homo sapien
catgtttaagcttattccattcctg

SEQ ID NO: 1876752 - DNA, 25 bp, Homo sapien
tcttacttatataggcagtttctct

SEQ ID NO: 1876753 - DNA, 25 bp, Homo sapien
cctgtagcaatgtgtgttctacaat

SEQ ID NO: 1876754 - DNA, 25 bp, Homo sapien
tctacaatgaggagcctgttttttc

SEQ ID NO: 1876755 - DNA, 25 bp, Homo sapien
gccaaaatatgaacgcaggtagcct

SEQ ID NO: 1876756 - DNA, 25 bp, Homo sapien
cacttatgtactgtgggtagagcca

SEQ ID NO: 1876757 - DNA, 25 bp, Homo sapien
cactgcagcttttctatgatatgga

SEQ ID NO: 1876758 - DNA, 25 bp, Homo sapien
ggattgaagccaagttttaggcagc

SEQ ID NO: 1876759 - DNA, 25 bp, Homo sapien
gatatgtcaattgtgtaacagaccc

SEQ ID NO: 1876760 - DNA, 25 bp, Homo sapien
tgtaacagaccctaaatggtcttag

SEQ ID NO: 1876761 - DNA, 25 bp, Homo sapien
caattgtgtaacagaccctaaatgg

SEQ ID NO: 1876762 - DNA, 25 bp, Homo sapien
tcttcatattctgatatgtcaattg

SEQ ID NO: 1876763 - DNA, 25 bp, Homo sapien
tgattggttctgagcttattatcat

SEQ ID NO: 1876764 - DNA, 25 bp, Homo sapien
atgattggttctgagcttattatca

SEQ ID NO: 1876765 - DNA, 25 bp, Homo sapien
gatacaaaggcatatgagttatcat

SEQ ID NO: 1876766 - DNA, 25 bp, Homo sapien
tatcataagcatggtctgtgtaggc

SEQ ID NO: 1876767 - DNA, 25 bp, Homo sapien
gtgtaggcaaagcatgtaactccac

SEQ ID NO: 1876768 - DNA, 25 bp, Homo sapien
cagaccatatggtgatacaaaggca

SEQ ID NO: 1876769 - DNA, 25 bp, Homo sapien
gggagaaatcatgccattcagagac

SEQ ID NO: 1876770 - DNA, 25 bp, Homo sapien
gccaatttgtggttgagcccctcct

SEQ ID NO: 1876771 - DNA, 25 bp, Homo sapien
cagagacagctgataagtcaagcct

SEQ ID NO: 1876772 - DNA, 25 bp, Homo sapien
gccttaaaggcctgtgaagatctat

SEQ ID NO: 1876773 - DNA, 25 bp, Homo sapien
ccacgtgagagttagaggacaatgt

SEQ ID NO: 1876774 - DNA, 25 bp, Homo sapien
cacctgagttttggatattaccacg

SEQ ID NO: 1876775 - DNA, 25 bp, Homo sapien
gacatctgttggtagctgacagcca

SEQ ID NO: 1876776 - DNA, 25 bp, Homo sapien
tcagcttcaggaactagtaagaaca

SEQ ID NO: 1876777 - DNA, 25 bp, Homo sapien
ccatggcaggtcagtagggagatta

SEQ ID NO: 1876778 - DNA, 25 bp, Homo sapien
ggaatcccagttttgagtcttgtgt

SEQ ID NO: 1876779 - DNA, 25 bp, Homo sapien
gagattatctgaggaggtaccgctt

SEQ ID NO: 1876780 - DNA, 25 bp, Homo sapien
ggtaccgcttgtgacaccttcagaa

SEQ ID NO: 1876781 - DNA, 25 bp, Homo sapien
ggagtgagatcatagaattaagagg

SEQ ID NO: 1876782 - DNA, 25 bp, Homo sapien
tagaattaagaggattgagaaagaa

SEQ ID NO: 1876783 - DNA, 25 bp, Homo sapien
taccatgtattcttgtaggagattc

SEQ ID NO: 1876784 - DNA, 25 bp, Homo sapien
tgcacataaccataatggagtgaga

SEQ ID NO: 1876785 - DNA, 25 bp, Homo sapien
ggtgagtcttctgtaggcccatata

SEQ ID NO: 1876786 - DNA, 25 bp, Homo sapien
tttgactcaatagtttttcaggagc

SEQ ID NO: 1876787 - DNA, 25 bp, Homo sapien
tgtataggtctattaactccattgg

SEQ ID NO: 1876788 - DNA, 25 bp, Homo sapien
tccattggtatacgtatagttcaag

SEQ ID NO: 1876789 - DNA, 25 bp, Homo sapien
tggaaggggtccatgctcaagtatg

SEQ ID NO: 1876790 - DNA, 25 bp, Homo sapien
ggtccatgctcaagtatgcctcaga

SEQ ID NO: 1876791 - DNA, 25 bp, Homo sapien
gaaggggtccatgctcaagtatgcc

SEQ ID NO: 1876792 - DNA, 25 bp, Homo sapien
aagtatgcctcagatttgtctaccc

SEQ ID NO: 1876793 - DNA, 25 bp, Homo sapien
cttgaccgtatttttccacggccat

SEQ ID NO: 1876794 - DNA, 25 bp, Homo sapien
aatcagatatctgtgaagaaccacc

SEQ ID NO: 1876795 - DNA, 25 bp, Homo sapien
cctgaatcagatatctgtgaagaac

SEQ ID NO: 1876796 - DNA, 25 bp, Homo sapien
tgaaataggtttggcggagtacacc

SEQ ID NO: 1876797 - DNA, 25 bp, Homo sapien
atgttacatttcacagggaacacag

SEQ ID NO: 1876798 - DNA, 25 bp, Homo sapien
tacctccaccaggttgtgtagagga

SEQ ID NO: 1876799 - DNA, 25 bp, Homo sapien
ggcaccagaagctgtgattttattc

SEQ ID NO: 1876800 - DNA, 25 bp, Homo sapien
gcctaagaagccagttctatcccta

SEQ ID NO: 1876801 - DNA, 25 bp, Homo sapien
aaactggcttagcagttaccgtcat

SEQ ID NO: 1876802 - DNA, 25 bp, Homo sapien
aaaactggcttagcagttaccgtca

SEQ ID NO: 1876803 - DNA, 25 bp, Homo sapien
taaaactggcttagcagttaccgtc

SEQ ID NO: 1876804 - DNA, 25 bp, Homo sapien
tggtaaaactggcttagcagttacc

SEQ ID NO: 1876805 - DNA, 25 bp, Homo sapien
tctgaatcacatgtatgaggtggaa

SEQ ID NO: 1876806 - DNA, 25 bp, Homo sapien
acattatgtagtttaagtctgacac

SEQ ID NO: 1876807 - DNA, 25 bp, Homo sapien
ggtaactgaggacagatatatcata

SEQ ID NO: 1876808 - DNA, 25 bp, Homo sapien
taagctttatcaccagccatctcca

SEQ ID NO: 1876809 - DNA, 25 bp, Homo sapien
gcagaagctttctaggtagtccacc

SEQ ID NO: 1876810 - DNA, 25 bp, Homo sapien
tacttcaactaagcacacggttcta

SEQ ID NO: 1876811 - DNA, 25 bp, Homo sapien
ggaaagacaaccctcatggaagaaa

SEQ ID NO: 1876812 - DNA, 25 bp, Homo sapien
aattcctagaggagcataatccctt

SEQ ID NO: 1876813 - DNA, 25 bp, Homo sapien
caatagttgagtaacaccatgctgg

SEQ ID NO: 1876814 - DNA, 25 bp, Homo sapien
tcacatatcagagcaagttggcatt

SEQ ID NO: 1876815 - DNA, 25 bp, Homo sapien
aatgagtagttgagatccagaggca

SEQ ID NO: 1876816 - DNA, 25 bp, Homo sapien
cacccggtattattagagaagtctc

SEQ ID NO: 1876817 - DNA, 25 bp, Homo sapien
tttattcacagctttgcaaataaag

SEQ ID NO: 1876818 - DNA, 25 bp, Homo sapien
gcttgtgctactttagagtttgtgg

SEQ ID NO: 1876819 - DNA, 25 bp, Homo sapien
gaggcttgtgctactttagagtttg

SEQ ID NO: 1876820 - DNA, 25 bp, Homo sapien
aaggaggcttgtgctactttagagt

SEQ ID NO: 1876821 - DNA, 25 bp, Homo sapien
taagggcagccacctaatccggata

SEQ ID NO: 1876822 - DNA, 25 bp, Homo sapien
tcagtggctacattcccagaagcac

SEQ ID NO: 1876823 - DNA, 25 bp, Homo sapien
ccagaagcaccttttgcataagggc

SEQ ID NO: 1876824 - DNA, 25 bp, Homo sapien
ccaggccattaagcatatatatcaa

SEQ ID NO: 1876825 - DNA, 25 bp, Homo sapien
gaggctaacagaaattctgctaagg

SEQ ID NO: 1876826 - DNA, 25 bp, Homo sapien
tagaatggtccccagggtgcttatt

SEQ ID NO: 1876827 - DNA, 25 bp, Homo sapien
ctaaggctctctggagctagaataa

SEQ ID NO: 1876828 - DNA, 25 bp, Homo sapien
ttatgtctaatctcgtctttgaggc

SEQ ID NO: 1876829 - DNA, 25 bp, Homo sapien
gaggagagacctaatcagatcgggc

SEQ ID NO: 1876830 - DNA, 25 bp, Homo sapien
cagacatgaccttcgggttggtaga

SEQ ID NO: 1876831 - DNA, 25 bp, Homo sapien
tatggaagacatgagtacaacaggg

SEQ ID NO: 1876832 - DNA, 25 bp, Homo sapien
taatccgattcttcactcttgggca

SEQ ID NO: 1876833 - DNA, 25 bp, Homo sapien
tattactcgtagttcagtggccacg

SEQ ID NO: 1876834 - DNA, 25 bp, Homo sapien
tgagctactgtaccacctgagagag

SEQ ID NO: 1876835 - DNA, 25 bp, Homo sapien
aaagctattaactcaatggcccagg

SEQ ID NO: 1876836 - DNA, 25 bp, Homo sapien
gagagaaccctacttgccattgatg

SEQ ID NO: 1876837 - DNA, 25 bp, Homo sapien
ttgcctgttgttgattggataatgc

SEQ ID NO: 1876838 - DNA, 25 bp, Homo sapien
ttggataatgctcctatcactttac

SEQ ID NO: 1876839 - DNA, 25 bp, Homo sapien
tgttgattggataatgctcctatca

SEQ ID NO: 1876840 - DNA, 25 bp, Homo sapien
cctgttgttgattggataatgctcc

SEQ ID NO: 1876841 - DNA, 25 bp, Homo sapien
ccggccccagtctttagctgagaag

SEQ ID NO: 1876842 - DNA, 25 bp, Homo sapien
tggcccttacaatgtgaaaattgca

SEQ ID NO: 1876843 - DNA, 25 bp, Homo sapien
agtggcccttacaatgtgaaaattg

SEQ ID NO: 1876844 - DNA, 25 bp, Homo sapien
gccccagtctttagctgagaagaga

SEQ ID NO: 1876845 - DNA, 25 bp, Homo sapien
gtaacccctaggcatctctccagat

SEQ ID NO: 1876846 - DNA, 25 bp, Homo sapien
ccagggcaatactttgtatgcacag

SEQ ID NO: 1876847 - DNA, 25 bp, Homo sapien
gaaaccacccaacgctttagactga

SEQ ID NO: 1876848 - DNA, 25 bp, Homo sapien
tccacgtattcctgctttcctgaga

SEQ ID NO: 1876849 - DNA, 25 bp, Homo sapien
tgagaatccgctttgagaatccgct

SEQ ID NO: 1876850 - DNA, 25 bp, Homo sapien
tattgagatccagaaccctacaagc

SEQ ID NO: 1876851 - DNA, 25 bp, Homo sapien
cctacaagcctctatgggaagtggg

SEQ ID NO: 1876852 - DNA, 25 bp, Homo sapien
aaagcttgctgaaagtatgccagac

SEQ ID NO: 1876853 - DNA, 25 bp, Homo sapien
tagaacaaatattaatgctgcaaga

SEQ ID NO: 1876854 - DNA, 25 bp, Homo sapien
gaacaaatattaatgctgcaagagg

SEQ ID NO: 1876855 - DNA, 25 bp, Homo sapien
agaacaaatattaatgctgcaagag

SEQ ID NO: 1876856 - DNA, 25 bp, Homo sapien
ttatcatcatgaagtataaagccaa

SEQ ID NO: 1876857 - DNA, 25 bp, Homo sapien
tatcatcatgaagtataaagccaaa

SEQ ID NO: 1876858 - DNA, 25 bp, Homo sapien
atcatcatgaagtataaagccaaat

SEQ ID NO: 1876859 - DNA, 25 bp, Homo sapien
atttatcatcatgaagtataaagcc

SEQ ID NO: 1876860 - DNA, 25 bp, Homo sapien
gtctaagagtcgttccttgctgaag

SEQ ID NO: 1876861 - DNA, 25 bp, Homo sapien
cagggatcactttaatgtctaagag

SEQ ID NO: 1876862 - DNA, 25 bp, Homo sapien
tcatttccactgtacgtttccggtc

SEQ ID NO: 1876863 - DNA, 25 bp, Homo sapien
gaaatatgctgacttggttgaacca

SEQ ID NO: 1876864 - DNA, 25 bp, Homo sapien
atttaccatacaacaggaaagtcct

SEQ ID NO: 1876865 - DNA, 25 bp, Homo sapien
catttaccatacaacaggaaagtcc

SEQ ID NO: 1876866 - DNA, 25 bp, Homo sapien
ccagttgcagctgaacacaggatac

SEQ ID NO: 1876867 - DNA, 25 bp, Homo sapien
gcaactgtatactttaggactgtga

SEQ ID NO: 1876868 - DNA, 25 bp, Homo sapien
tgccccaaagaccatggaataacat

SEQ ID NO: 1876869 - DNA, 25 bp, Homo sapien
taagcccttgtggaacttgatcttc

SEQ ID NO: 1876870 - DNA, 25 bp, Homo sapien
tcaaactaacagtaataagagatct

SEQ ID NO: 1876871 - DNA, 25 bp, Homo sapien
aactaacagtaataagagatcttca

SEQ ID NO: 1876872 - DNA, 25 bp, Homo sapien
taacagtaataagagatcttcattg

SEQ ID NO: 1876873 - DNA, 25 bp, Homo sapien
acagtaataagagatcttcattgcc

SEQ ID NO: 1876874 - DNA, 25 bp, Homo sapien
ctgaagggccgtaaggatatttgct

SEQ ID NO: 1876875 - DNA, 25 bp, Homo sapien
ctagagagatctcataacaacccat

SEQ ID NO: 1876876 - DNA, 25 bp, Homo sapien
cccactccaattgtgtctcctagag

SEQ ID NO: 1876877 - DNA, 25 bp, Homo sapien
aaggcttgtccgtatgtgtcatgac

SEQ ID NO: 1876878 - DNA, 25 bp, Homo sapien
aaaccctcttgtgccacaactaaca

SEQ ID NO: 1876879 - DNA, 25 bp, Homo sapien
ggtgaagtgctagtaaaataatgga

SEQ ID NO: 1876880 - DNA, 25 bp, Homo sapien
gagactcaaaccctcttgtgccaca

SEQ ID NO: 1876881 - DNA, 25 bp, Homo sapien
atgaagagactcaaaccctcttgtg

SEQ ID NO: 1876882 - DNA, 25 bp, Homo sapien
ttccttcatatggacagcccagagc

SEQ ID NO: 1876883 - DNA, 25 bp, Homo sapien
tctgtcactttttgcggtgtaatac

SEQ ID NO: 1876884 - DNA, 25 bp, Homo sapien
gcggtgtaatacttccttcatatgg

SEQ ID NO: 1876885 - DNA, 25 bp, Homo sapien
tcactttttgcggtgtaatacttcc

SEQ ID NO: 1876886 - DNA, 25 bp, Homo sapien
caattatcccatgttcctccaatca

SEQ ID NO: 1876887 - DNA, 25 bp, Homo sapien
aattatcccatgttcctccaatcat

SEQ ID NO: 1876888 - DNA, 25 bp, Homo sapien
acaattatcccatgttcctccaatc

SEQ ID NO: 1876889 - DNA, 25 bp, Homo sapien
caactaagggaagtacagcctgcac

SEQ ID NO: 1876890 - DNA, 25 bp, Homo sapien
gaagcagacaagcaccaaggcagat

SEQ ID NO: 1876891 - DNA, 25 bp, Homo sapien
taggtttcacaacccataggcctgg

SEQ ID NO: 1876892 - DNA, 25 bp, Homo sapien
gaactttgctcacctcaactaaggg

SEQ ID NO: 1876893 - DNA, 25 bp, Homo sapien
tggaacagttaatattcttcttgct

SEQ ID NO: 1876894 - DNA, 25 bp, Homo sapien
tgtgtcttgcagacttaacaacctc

SEQ ID NO: 1876895 - DNA, 25 bp, Homo sapien
gatgcagctccaaaaactgatatct

SEQ ID NO: 1876896 - DNA, 25 bp, Homo sapien
tactttcttcaatggaacagttaat

SEQ ID NO: 1876897 - DNA, 25 bp, Homo sapien
tcattacttcagtgtgatcagccat

SEQ ID NO: 1876898 - DNA, 25 bp, Homo sapien
taggagtaaggacaggatagcgaac

SEQ ID NO: 1876899 - DNA, 25 bp, Homo sapien
tagcgaactcctggatattgatgaa

SEQ ID NO: 1876900 - DNA, 25 bp, Homo sapien
ccctgaagattaggagtaaggacag

SEQ ID NO: 1876901 - DNA, 25 bp, Homo sapien
gtaaatgtgtcttcagtgccaataa

SEQ ID NO: 1876902 - DNA, 25 bp, Homo sapien
tgcatctcatcaacgtaaatctgaa

SEQ ID NO: 1876903 - DNA, 25 bp, Homo sapien
gacttggtagcagaaggtatagcct

SEQ ID NO: 1876904 - DNA, 25 bp, Homo sapien
gagacatcaggactggacttggtag

SEQ ID NO: 1876905 - DNA, 25 bp, Homo sapien
tgtggtacccatctggaagacacaa

SEQ ID NO: 1876906 - DNA, 25 bp, Homo sapien
aagctagtcacttctattacagaca

SEQ ID NO: 1876907 - DNA, 25 bp, Homo sapien
cagtttgggaaagtcgattgataaa

SEQ ID NO: 1876908 - DNA, 25 bp, Homo sapien
tattacagacaagccagtttgggaa

SEQ ID NO: 1876909 - DNA, 25 bp, Homo sapien
tcattctgcaatccatccctaggcc

SEQ ID NO: 1876910 - DNA, 25 bp, Homo sapien
tttcattctgcaatccatccctagg

SEQ ID NO: 1876911 - DNA, 25 bp, Homo sapien
ggagtccagataactgggatgtttc

SEQ ID NO: 1876912 - DNA, 25 bp, Homo sapien
agggagtccagataactgggatgtt

SEQ ID NO: 1876913 - DNA, 25 bp, Homo sapien
tggagacattatcccattttggaac

SEQ ID NO: 1876914 - DNA, 25 bp, Homo sapien
aggagctcaaaacactttggagaca

SEQ ID NO: 1876915 - DNA, 25 bp, Homo sapien
cccattttggaacctgccaacattt

SEQ ID NO: 1876916 - DNA, 25 bp, Homo sapien
gttctttcagcaaggagctcaaaac

SEQ ID NO: 1876917 - DNA, 25 bp, Homo sapien
cacccatcctgttccacttggcaat

SEQ ID NO: 1876918 - DNA, 25 bp, Homo sapien
catcctgttccacttggcaatgtca

SEQ ID NO: 1876919 - DNA, 25 bp, Homo sapien
atcctgttccacttggcaatgtcaa

SEQ ID NO: 1876920 - DNA, 25 bp, Homo sapien
cccatcctgttccacttggcaatgt

SEQ ID NO: 1876921 - DNA, 25 bp, Homo sapien
gatttccatttccaaaggccagcgt

SEQ ID NO: 1876922 - DNA, 25 bp, Homo sapien
ttgatcaaagccttggatttccatt

SEQ ID NO: 1876923 - DNA, 25 bp, Homo sapien
tgatcaaagccttggatttccattt

SEQ ID NO: 1876924 - DNA, 25 bp, Homo sapien
tccaaaggccagcgttttcttagga

SEQ ID NO: 1876925 - DNA, 25 bp, Homo sapien
gctaacaccattatttcctcacaaa

SEQ ID NO: 1876926 - DNA, 25 bp, Homo sapien
ctttccaagaaaactcatagctaac

SEQ ID NO: 1876927 - DNA, 25 bp, Homo sapien
gtgcagactgtgattccagcacacc

SEQ ID NO: 1876928 - DNA, 25 bp, Homo sapien
gtgattccagcacaccaaagctttt

SEQ ID NO: 1876929 - DNA, 25 bp, Homo sapien
cagggcttcctgagaggtccatggt

SEQ ID NO: 1876930 - DNA, 25 bp, Homo sapien
gccctcaaatatgatggggatcagg

SEQ ID NO: 1876931 - DNA, 25 bp, Homo sapien
tagtaaaagagggagaggtgccctc

SEQ ID NO: 1876932 - DNA, 25 bp, Homo sapien
agcatcagcatcacagactgaagct

SEQ ID NO: 1876933 - DNA, 25 bp, Homo sapien
aaaagagcccgaacactgaatccta

SEQ ID NO: 1876934 - DNA, 25 bp, Homo sapien
aaaaagagcccgaacactgaatcct

SEQ ID NO: 1876935 - DNA, 25 bp, Homo sapien
gaaaaaagagcccgaacactgaatc

SEQ ID NO: 1876936 - DNA, 25 bp, Homo sapien
gtggaaaaaagagcccgaacactga

SEQ ID NO: 1876937 - DNA, 25 bp, Homo sapien
agacatcgggctgaaagcagtgaag

SEQ ID NO: 1876938 - DNA, 25 bp, Homo sapien
gaagccagagacatcgggctgaaag

SEQ ID NO: 1876939 - DNA, 25 bp, Homo sapien
agccagagacatcgggctgaaagca

SEQ ID NO: 1876940 - DNA, 25 bp, Homo sapien
agagacatcgggctgaaagcagtga

SEQ ID NO: 1876941 - DNA, 25 bp, Homo sapien
gggtgcggcctaacacgacagaact

SEQ ID NO: 1876942 - DNA, 25 bp, Homo sapien
cattcaccgaagagagataacggga

SEQ ID NO: 1876943 - DNA, 25 bp, Homo sapien
tctgatctgtagaggcgggtcgata

SEQ ID NO: 1876944 - DNA, 25 bp, Homo sapien
cagggattttgcagggtctgatctg

SEQ ID NO: 1876945 - DNA, 25 bp, Homo sapien
ccgatccagagatgctcccggagaa

SEQ ID NO: 1876946 - DNA, 25 bp, Homo sapien
gcttcaccgcggatggcacattccc

SEQ ID NO: 1876947 - DNA, 25 bp, Homo sapien
gccactgaatccccgatccagagat

SEQ ID NO: 1876948 - DNA, 25 bp, Homo sapien
gggtcgagcgcccctgccactgaat

SEQ ID NO: 1876949 - DNA, 25 bp, Homo sapien
accgcgctgggaaactgcgccagct

SEQ ID NO: 1876950 - DNA, 25 bp, Homo sapien
gggcacctgcgggaatcgacagaaa

SEQ ID NO: 1876951 - DNA, 25 bp, Homo sapien
cctccggtgcactggctgtgaggac

SEQ ID NO: 1876952 - DNA, 25 bp, Homo sapien
ggcgtggcaggtggccgcgcctggg

SEQ ID NO: 1876953 - DNA, 25 bp, Homo sapien
tggcatagatcaggtgtagaagaaa

SEQ ID NO: 1876954 - DNA, 25 bp, Homo sapien
ctggcatagatcaggtgtagaagaa

SEQ ID NO: 1876955 - DNA, 25 bp, Homo sapien
tatattgaataatctgccaggcacc

SEQ ID NO: 1876956 - DNA, 25 bp, Homo sapien
gtggagaaggtgctgcattatattg

SEQ ID NO: 1876957 - DNA, 25 bp, Homo sapien
tgctttcgcttaagtttgtggagaa

SEQ ID NO: 1876958 - DNA, 25 bp, Homo sapien
tctgccaggcaccttcagcaggatt

SEQ ID NO: 1876959 - DNA, 25 bp, Homo sapien
ggcaattgtgaatgtctcttggctg

SEQ ID NO: 1876960 - DNA, 25 bp, Homo sapien
gctgcattcgtaggtatattctttt

SEQ ID NO: 1876961 - DNA, 25 bp, Homo sapien
ctgattagctgcattcgtaggtata

SEQ ID NO: 1876962 - DNA, 25 bp, Homo sapien
gcaattgtgaatgtctcttggctgt

SEQ ID NO: 1876963 - DNA, 25 bp, Homo sapien
ttatccttgttggaaaattctcttg

SEQ ID NO: 1876964 - DNA, 25 bp, Homo sapien
catttagatgtgagtgacttgagca

SEQ ID NO: 1876965 - DNA, 25 bp, Homo sapien
tgtagcaggtgttccctgatccagc

SEQ ID NO: 1876966 - DNA, 25 bp, Homo sapien
gtttctggcaaatgccaactttgtt

SEQ ID NO: 1876967 - DNA, 25 bp, Homo sapien
gcaagaaggcatttcgggctaaaat

SEQ ID NO: 1876968 - DNA, 25 bp, Homo sapien
gctggtgtggccggcttaaggcttc

SEQ ID NO: 1876969 - DNA, 25 bp, Homo sapien
ccggcttaaggcttctcggagggca

SEQ ID NO: 1876970 - DNA, 25 bp, Homo sapien
tggtgtggccggcttaaggcttctc

SEQ ID NO: 1876971 - DNA, 25 bp, Homo sapien
tgtggccggcttaaggcttctcgga

SEQ ID NO: 1876972 - DNA, 25 bp, Homo sapien
tttagtttgtaaccagccaagtggc

SEQ ID NO: 1876973 - DNA, 25 bp, Homo sapien
attttagtttgtaaccagccaagtg

SEQ ID NO: 1876974 - DNA, 25 bp, Homo sapien
aagtggccttagttgcatcctcagc

SEQ ID NO: 1876975 - DNA, 25 bp, Homo sapien
cagccaagtggccttagttgcatcc

SEQ ID NO: 1876976 - DNA, 25 bp, Homo sapien
tgtttttgagggtataggcttcctc

SEQ ID NO: 1876977 - DNA, 25 bp, Homo sapien
tcacccggtcagtggctaacgggct

SEQ ID NO: 1876978 - DNA, 25 bp, Homo sapien
tattctttttcacccggtcagtggc

SEQ ID NO: 1876979 - DNA, 25 bp, Homo sapien
ctaacgggctggaggcaactgcaga

SEQ ID NO: 1876980 - DNA, 25 bp, Homo sapien
tccacaatcttcccctttttgtcca

SEQ ID NO: 1876981 - DNA, 25 bp, Homo sapien
caatcttcccctttttgtccacttg

SEQ ID NO: 1876982 - DNA, 25 bp, Homo sapien
cacaatcttcccctttttgtccact

SEQ ID NO: 1876983 - DNA, 25 bp, Homo sapien
tattttatcacctcatgctgaagcc

SEQ ID NO: 1876984 - DNA, 25 bp, Homo sapien
aatccaattccaatatttttagatg

SEQ ID NO: 1876985 - DNA, 25 bp, Homo sapien
tgctgaagcccacaccaatccaatt

SEQ ID NO: 1876986 - DNA, 25 bp, Homo sapien
gatgtcttatcatgggacaccacat

SEQ ID NO: 1876987 - DNA, 25 bp, Homo sapien
ggccatggtgctgtgaagtgctgag

SEQ ID NO: 1876988 - DNA, 25 bp, Homo sapien
gcatccatgatattaaacaggccat

SEQ ID NO: 1876989 - DNA, 25 bp, Homo sapien
agtggtcatgccgagcaacaggcca

SEQ ID NO: 1876990 - DNA, 25 bp, Homo sapien
caaagccaagagtggagctagcagg

SEQ ID NO: 1876991 - DNA, 25 bp, Homo sapien
tctacatcatagagttccattccag

SEQ ID NO: 1876992 - DNA, 25 bp, Homo sapien
gatctacatcatagagttccattcc

SEQ ID NO: 1876993 - DNA, 25 bp, Homo sapien
atctacatcatagagttccattcca

SEQ ID NO: 1876994 - DNA, 25 bp, Homo sapien
taaatgagagggccaaccactgatt

SEQ ID NO: 1876995 - DNA, 25 bp, Homo sapien
tttaaatgagagggccaaccactga

SEQ ID NO: 1876996 - DNA, 25 bp, Homo sapien
tcctttaaatgagagggccaaccac

SEQ ID NO: 1876997 - DNA, 25 bp, Homo sapien
ctcctttaaatgagagggccaacca

SEQ ID NO: 1876998 - DNA, 25 bp, Homo sapien
tagtgagataattattaacaacaca

SEQ ID NO: 1876999 - DNA, 25 bp, Homo sapien
tattgtctcaatttatgatatactt

SEQ ID NO: 1877000 - DNA, 25 bp, Homo sapien
gagataattattaacaacacaaaaa

SEQ ID NO: 1877001 - DNA, 25 bp, Homo sapien
taatagtgagataattattaacaac

SEQ ID NO: 1877002 - DNA, 25 bp, Homo sapien
taacttggaaagctatggacacagg

SEQ ID NO: 1877003 - DNA, 25 bp, Homo sapien
cacagagtcaccataaatagcaagt

SEQ ID NO: 1877004 - DNA, 25 bp, Homo sapien
gtaaataagcctaaccacagagtca

SEQ ID NO: 1877005 - DNA, 25 bp, Homo sapien
gaattgaatggactcagcataaccc

SEQ ID NO: 1877006 - DNA, 25 bp, Homo sapien
gccataaaccttaatacagatcttt

SEQ ID NO: 1877007 - DNA, 25 bp, Homo sapien
cataaaccttaatacagatcttttt

SEQ ID NO: 1877008 - DNA, 25 bp, Homo sapien
gcagccataaaccttaatacagatc

SEQ ID NO: 1877009 - DNA, 25 bp, Homo sapien
cagccataaaccttaatacagatct

SEQ ID NO: 1877010 - DNA, 25 bp, Homo sapien
gtggcagccacatgagcgtactacc

SEQ ID NO: 1877011 - DNA, 25 bp, Homo sapien
taatttggttggagcacaacaaggc

SEQ ID NO: 1877012 - DNA, 25 bp, Homo sapien
ggagctgtcatcaaagtacagaaca

SEQ ID NO: 1877013 - DNA, 25 bp, Homo sapien
ggtacgtggtcaggaaacatcagat

SEQ ID NO: 1877014 - DNA, 25 bp, Homo sapien
tccttcatcagctttatcttccata

SEQ ID NO: 1877015 - DNA, 25 bp, Homo sapien
tcttccataacccacacatacatga

SEQ ID NO: 1877016 - DNA, 25 bp, Homo sapien
catgattgataatcctgctgtttca

SEQ ID NO: 1877017 - DNA, 25 bp, Homo sapien
cccacacatacatgattgataatcc

SEQ ID NO: 1877018 - DNA, 25 bp, Homo sapien
gcagcgtatccttctggtgctataa

SEQ ID NO: 1877019 - DNA, 25 bp, Homo sapien
tatgggcgttaagtggaaaagaaca

SEQ ID NO: 1877020 - DNA, 25 bp, Homo sapien
cagagtctgaactatagcgtggttg

SEQ ID NO: 1877021 - DNA, 25 bp, Homo sapien
cacaataaaatgcagcgtatccttc

SEQ ID NO: 1877022 - DNA, 25 bp, Homo sapien
tcccagatcccggaagctcacatag

SEQ ID NO: 1877023 - DNA, 25 bp, Homo sapien
cggaagctcacatagagttcgtgct

SEQ ID NO: 1877024 - DNA, 25 bp, Homo sapien
gcttgtttttgctcacttgtgttat

SEQ ID NO: 1877025 - DNA, 25 bp, Homo sapien
cacatagagttcgtgcttcttacag

SEQ ID NO: 1877026 - DNA, 25 bp, Homo sapien
tttacctgatgaagctctaacatgg

SEQ ID NO: 1877027 - DNA, 25 bp, Homo sapien
catcttccatgaggcagatactggg

SEQ ID NO: 1877028 - DNA, 25 bp, Homo sapien
tcaggataccacaagttgagcttct

SEQ ID NO: 1877029 - DNA, 25 bp, Homo sapien
tgttaagccatctacttgacagggc

SEQ ID NO: 1877030 - DNA, 25 bp, Homo sapien
ggttcttcttcagggaaatatctcc

SEQ ID NO: 1877031 - DNA, 25 bp, Homo sapien
ataaactccttgatatacaaaacgg

SEQ ID NO: 1877032 - DNA, 25 bp, Homo sapien
aaatggttaaatttcctcgatcgtg

SEQ ID NO: 1877033 - DNA, 25 bp, Homo sapien
gcagctaactttgttcaggcaatgg

SEQ ID NO: 1877034 - DNA, 25 bp, Homo sapien
gtttgttggctgctctcacggatcg

SEQ ID NO: 1877035 - DNA, 25 bp, Homo sapien
gaagtacctcactcgccttgaagaa

SEQ ID NO: 1877036 - DNA, 25 bp, Homo sapien
aatggttgttttgactgaggtccct

SEQ ID NO: 1877037 - DNA, 25 bp, Homo sapien
caacactggacattctggaggagtc

SEQ ID NO: 1877038 - DNA, 25 bp, Homo sapien
tctggcttgccccatgagagatgtg

SEQ ID NO: 1877039 - DNA, 25 bp, Homo sapien
tgcacagagctgtaagcccaaatta

SEQ ID NO: 1877040 - DNA, 25 bp, Homo sapien
tgctggtcacagtgatatcaaagac

SEQ ID NO: 1877041 - DNA, 25 bp, Homo sapien
agccaacccacatctaaagcttggg

SEQ ID NO: 1877042 - DNA, 25 bp, Homo sapien
ttgtgtctaacaagaacagatctgc

SEQ ID NO: 1877043 - DNA, 25 bp, Homo sapien
cttctgaagtatgtccgcagaagaa

SEQ ID NO: 1877044 - DNA, 25 bp, Homo sapien
aagtatgtccgcagaagaatcacaa

SEQ ID NO: 1877045 - DNA, 25 bp, Homo sapien
tctgaagtatgtccgcagaagaatc

SEQ ID NO: 1877046 - DNA, 25 bp, Homo sapien
tgaagtatgtccgcagaagaatcac

SEQ ID NO: 1877047 - DNA, 25 bp, Homo sapien
tcattttcaaatcggttgttgctcc

SEQ ID NO: 1877048 - DNA, 25 bp, Homo sapien
ccttcgctggtgagaaaaatccttg

SEQ ID NO: 1877049 - DNA, 25 bp, Homo sapien
tgctccggtccttgtatatccggaa

SEQ ID NO: 1877050 - DNA, 25 bp, Homo sapien
ttgggtaagatcaaatcgaaattct

SEQ ID NO: 1877051 - DNA, 25 bp, Homo sapien
cctgacatgtcttcatgaagttctt

SEQ ID NO: 1877052 - DNA, 25 bp, Homo sapien
gctctcctgacatgtcttcatgaag

SEQ ID NO: 1877053 - DNA, 25 bp, Homo sapien
aagtagctctcctgacatgtcttca

SEQ ID NO: 1877054 - DNA, 25 bp, Homo sapien
ctacaagtagctctcctgacatgtc

SEQ ID NO: 1877055 - DNA, 25 bp, Homo sapien
gtatttaaatatctagctttgtgct

SEQ ID NO: 1877056 - DNA, 25 bp, Homo sapien
atttaaatatctagctttgtgcttc

SEQ ID NO: 1877057 - DNA, 25 bp, Homo sapien
ctgtatttaaatatctagctttgtg

SEQ ID NO: 1877058 - DNA, 25 bp, Homo sapien
taaatatctagctttgtgcttctca

SEQ ID NO: 1877059 - DNA, 25 bp, Homo sapien
tcttgagacatagtgaaatgcacag

SEQ ID NO: 1877060 - DNA, 25 bp, Homo sapien
cattaatcccttgccaggtgggtag

SEQ ID NO: 1877061 - DNA, 25 bp, Homo sapien
gattcattcatgttctcaggtctat

SEQ ID NO: 1877062 - DNA, 25 bp, Homo sapien
gcttttgctgccatgcttatctaga

SEQ ID NO: 1877063 - DNA, 25 bp, Homo sapien
tactttatcccacaaagttcctctg

SEQ ID NO: 1877064 - DNA, 25 bp, Homo sapien
actttatcccacaaagttcctctgt

SEQ ID NO: 1877065 - DNA, 25 bp, Homo sapien
tttatcccacaaagttcctctgtca

SEQ ID NO: 1877066 - DNA, 25 bp, Homo sapien
ttatcccacaaagttcctctgtcac

SEQ ID NO: 1877067 - DNA, 25 bp, Homo sapien
tcttctggcaaagcattcacagtaa

SEQ ID NO: 1877068 - DNA, 25 bp, Homo sapien
ctcttctggcaaagcattcacagta

SEQ ID NO: 1877069 - DNA, 25 bp, Homo sapien
caatgtcatggagtgaggaatacgc

SEQ ID NO: 1877070 - DNA, 25 bp, Homo sapien
cagtggatgattgcgctttaaaaca

SEQ ID NO: 1877071 - DNA, 25 bp, Homo sapien
gagcttacttgtacacaacttccct

SEQ ID NO: 1877072 - DNA, 25 bp, Homo sapien
ctaagcagctagacaggtctctgtg

SEQ ID NO: 1877073 - DNA, 25 bp, Homo sapien
tagagcggttgtccagagccagttc

SEQ ID NO: 1877074 - DNA, 25 bp, Homo sapien
caggtggtagtacctctggaagaag

SEQ ID NO: 1877075 - DNA, 25 bp, Homo sapien
ccccagggaatattactagaacatt

SEQ ID NO: 1877076 - DNA, 25 bp, Homo sapien
taggcaggagcagtagacaaagcaa

SEQ ID NO: 1877077 - DNA, 25 bp, Homo sapien
taggccatgtgcaagtataacttcg

SEQ ID NO: 1877078 - DNA, 25 bp, Homo sapien
catccttttaagtatgggccatgtc

SEQ ID NO: 1877079 - DNA, 25 bp, Homo sapien
ttttaaacacttgtcatggccacag

SEQ ID NO: 1877080 - DNA, 25 bp, Homo sapien
gtagaaccactgaactgcaaaggaa

SEQ ID NO: 1877081 - DNA, 25 bp, Homo sapien
tcatgaaggctctgacatagactga

SEQ ID NO: 1877082 - DNA, 25 bp, Homo sapien
tctgacatagactgaccttttccaa

SEQ ID NO: 1877083 - DNA, 25 bp, Homo sapien
catgaaggctctgacatagactgac

SEQ ID NO: 1877084 - DNA, 25 bp, Homo sapien
gacatagactgaccttttccaaagc

SEQ ID NO: 1877085 - DNA, 25 bp, Homo sapien
tctgtcaatgggatccttagggaga

SEQ ID NO: 1877086 - DNA, 25 bp, Homo sapien
caatgggatccttagggagagatga

SEQ ID NO: 1877087 - DNA, 25 bp, Homo sapien
aattctgtcaatgggatccttaggg

SEQ ID NO: 1877088 - DNA, 25 bp, Homo sapien
ttaaattctgtcaatgggatcctta

SEQ ID NO: 1877089 - DNA, 25 bp, Homo sapien
gcagttggcacatcataaccttttc

SEQ ID NO: 1877090 - DNA, 25 bp, Homo sapien
tggaggctgcagttggcacatcata

SEQ ID NO: 1877091 - DNA, 25 bp, Homo sapien
agctctgatgccctggggagctttt

SEQ ID NO: 1877092 - DNA, 25 bp, Homo sapien
agcttttctcccagtgggtggaggc

SEQ ID NO: 1877093 - DNA, 25 bp, Homo sapien
aggacgaaaggcagaccccaggaag

SEQ ID NO: 1877094 - DNA, 25 bp, Homo sapien
taagcctctagcaaaccaggacgaa

SEQ ID NO: 1877095 - DNA, 25 bp, Homo sapien
taatttaagcctctagcaaaccagg

SEQ ID NO: 1877096 - DNA, 25 bp, Homo sapien
tagcaaaccaggacgaaaggcagac

SEQ ID NO: 1877097 - DNA, 25 bp, Homo sapien
tcagaaagttggtatcatggaggct

SEQ ID NO: 1877098 - DNA, 25 bp, Homo sapien
tcagaggagtcgtccgagataactg

SEQ ID NO: 1877099 - DNA, 25 bp, Homo sapien
tatgcgacgaggatacccattggga

SEQ ID NO: 1877100 - DNA, 25 bp, Homo sapien
tctgccaaggatgcccttactgagt

SEQ ID NO: 1877101 - DNA, 25 bp, Homo sapien
ctgtgaggcaaacccaagatagaga

SEQ ID NO: 1877102 - DNA, 25 bp, Homo sapien
cgtggttccgtagtcttctataaat

SEQ ID NO: 1877103 - DNA, 25 bp, Homo sapien
ggcaaacccaagatagagagaattt

SEQ ID NO: 1877104 - DNA, 25 bp, Homo sapien
tctttcgtggttccgtagtcttcta

SEQ ID NO: 1877105 - DNA, 25 bp, Homo sapien
cagctccagaggaaacccacaatac

SEQ ID NO: 1877106 - DNA, 25 bp, Homo sapien
agctccagaggaaacccacaatacc

SEQ ID NO: 1877107 - DNA, 25 bp, Homo sapien
ctccagaggaaacccacaataccct

SEQ ID NO: 1877108 - DNA, 25 bp, Homo sapien
gctccagaggaaacccacaataccc

SEQ ID NO: 1877109 - DNA, 25 bp, Homo sapien
tctatgctgatctgcaccttggtgt

SEQ ID NO: 1877110 - DNA, 25 bp, Homo sapien
gaatatatatctgtccggcagcttg

SEQ ID NO: 1877111 - DNA, 25 bp, Homo sapien
tgcattgatgtagcagaagacggct

SEQ ID NO: 1877112 - DNA, 25 bp, Homo sapien
cggcagcttggtgataactttaaca

SEQ ID NO: 1877113 - DNA, 25 bp, Homo sapien
cttgaaacacatagtagaccctggg

SEQ ID NO: 1877114 - DNA, 25 bp, Homo sapien
tctggagcatggaagaatacactaa

SEQ ID NO: 1877115 - DNA, 25 bp, Homo sapien
tgctaaggctcagtaggtacatgca

SEQ ID NO: 1877116 - DNA, 25 bp, Homo sapien
ggagcatggaagaatacactaaagg

SEQ ID NO: 1877117 - DNA, 25 bp, Homo sapien
tcttgaactttagaacctggaaaca

SEQ ID NO: 1877118 - DNA, 25 bp, Homo sapien
ttttgtaaagaatggcaagtaatga

SEQ ID NO: 1877119 - DNA, 25 bp, Homo sapien
tattttgtaaagaatggcaagtaat

SEQ ID NO: 1877120 - DNA, 25 bp, Homo sapien
tttgtaaagaatggcaagtaatgac

SEQ ID NO: 1877121 - DNA, 25 bp, Homo sapien
tttattttgtaaagaatggcaagta

SEQ ID NO: 1877122 - DNA, 25 bp, Homo sapien
ttcacttcgtacctgttaggatggc

SEQ ID NO: 1877123 - DNA, 25 bp, Homo sapien
tagagacagccatatggtaaacagt

SEQ ID NO: 1877124 - DNA, 25 bp, Homo sapien
tgaaataagggagcatgatgcatcc

SEQ ID NO: 1877125 - DNA, 25 bp, Homo sapien
gaaaacaacctgtgcccatcagtgg

SEQ ID NO: 1877126 - DNA, 25 bp, Homo sapien
cctgcgtgcttattatcctgaaggg

SEQ ID NO: 1877127 - DNA, 25 bp, Homo sapien
agaggtaacgggtcctgcgtgctta

SEQ ID NO: 1877128 - DNA, 25 bp, Homo sapien
cttctggccagtgctagagaggtaa

SEQ ID NO: 1877129 - DNA, 25 bp, Homo sapien
ccagtgctagagaggtaacgggtcc

SEQ ID NO: 1877130 - DNA, 25 bp, Homo sapien
taaagaataagatactggtcctggc

SEQ ID NO: 1877131 - DNA, 25 bp, Homo sapien
aagaataagatactggtcctggccc

SEQ ID NO: 1877132 - DNA, 25 bp, Homo sapien
gccagtttaatgctagaaattgtta

SEQ ID NO: 1877133 - DNA, 25 bp, Homo sapien
gaataagatactggtcctggcccag

SEQ ID NO: 1877134 - DNA, 25 bp, Homo sapien
aacaattttccatatttgaggttgc

SEQ ID NO: 1877135 - DNA, 25 bp, Homo sapien
agaaacaattttccatatttgaggt

SEQ ID NO: 1877136 - DNA, 25 bp, Homo sapien
aattttccatatttgaggttgcata

SEQ ID NO: 1877137 - DNA, 25 bp, Homo sapien
gtagaaacaattttccatatttgag

SEQ ID NO: 1877138 - DNA, 25 bp, Homo sapien
tagttggtccaacagcaagtttggc

SEQ ID NO: 1877139 - DNA, 25 bp, Homo sapien
ctacttataagtttggaggcacagg

SEQ ID NO: 1877140 - DNA, 25 bp, Homo sapien
tcacaaagggtcttcacacagctag

SEQ ID NO: 1877141 - DNA, 25 bp, Homo sapien
tttggcagactcagataaaccctgt

SEQ ID NO: 1877142 - DNA, 25 bp, Homo sapien
tgaattcgagcccataaagccaaga

SEQ ID NO: 1877143 - DNA, 25 bp, Homo sapien
aaaattttctgcagtgtcacatcac

SEQ ID NO: 1877144 - DNA, 25 bp, Homo sapien
tcatatgtggctacccagggaagaa

SEQ ID NO: 1877145 - DNA, 25 bp, Homo sapien
ggaagaagctatccctaaagcttga

SEQ ID NO: 1877146 - DNA, 25 bp, Homo sapien
ttattccgtagagatacaggattgt

SEQ ID NO: 1877147 - DNA, 25 bp, Homo sapien
attccgtagagatacaggattgttc

SEQ ID NO: 1877148 - DNA, 25 bp, Homo sapien
tattccgtagagatacaggattgtt

SEQ ID NO: 1877149 - DNA, 25 bp, Homo sapien
cttgaatagtcttctgatcagtcac

SEQ ID NO: 1877150 - DNA, 25 bp, Homo sapien
tagtcttctgatcagtcacctggaa

SEQ ID NO: 1877151 - DNA, 25 bp, Homo sapien
aatagtcttctgatcagtcacctgg

SEQ ID NO: 1877152 - DNA, 25 bp, Homo sapien
tgaatagtcttctgatcagtcacct

SEQ ID NO: 1877153 - DNA, 25 bp, Homo sapien
ttgaccttttgatcttagctttgat

SEQ ID NO: 1877154 - DNA, 25 bp, Homo sapien
ttggctggaatatcttctacagatt

SEQ ID NO: 1877155 - DNA, 25 bp, Homo sapien
atcaaaatcatcatcttcattatca

SEQ ID NO: 1877156 - DNA, 25 bp, Homo sapien
tcatcatcatcttcagcagcatcaa

SEQ ID NO: 1877157 - DNA, 25 bp, Homo sapien
cagtttcctcatcatcaaaatcatc

SEQ ID NO: 1877158 - DNA, 25 bp, Homo sapien
atcatcatcatcttcagcagcatca

SEQ ID NO: 1877159 - DNA, 25 bp, Homo sapien
ttgccagtgttacttaattcgactg

SEQ ID NO: 1877160 - DNA, 25 bp, Homo sapien
cttcctcctcagctactaatatgca

SEQ ID NO: 1877161 - DNA, 25 bp, Homo sapien
ttcgactgccttcataactctctgc

SEQ ID NO: 1877162 - DNA, 25 bp, Homo sapien
tcagctactaatatgcacgggccct

SEQ ID NO: 1877163 - DNA, 25 bp, Homo sapien
agataactggtaatcattttcacca

SEQ ID NO: 1877164 - DNA, 25 bp, Homo sapien
tagagccttgcaaggacagcttctg

SEQ ID NO: 1877165 - DNA, 25 bp, Homo sapien
ctggatgacaaagggccagtagagc

SEQ ID NO: 1877166 - DNA, 25 bp, Homo sapien
aagggccagtagagccttgcaagga

SEQ ID NO: 1877167 - DNA, 25 bp, Homo sapien
agtcaagccattgcctaaaggcttc

SEQ ID NO: 1877168 - DNA, 25 bp, Homo sapien
tgaaaccagattgctcgtcttctga

SEQ ID NO: 1877169 - DNA, 25 bp, Homo sapien
aggtgcgtagcacaggaaacctgca

SEQ ID NO: 1877170 - DNA, 25 bp, Homo sapien
cttctgaagacaatctttgccaagg

SEQ ID NO: 1877171 - DNA, 25 bp, Homo sapien
ttttcacagctcttaaggtgcgtag

SEQ ID NO: 1877172 - DNA, 25 bp, Homo sapien
cttcctaactgcataagccaatatt

SEQ ID NO: 1877173 - DNA, 25 bp, Homo sapien
ccttcctaactgcataagccaatat

SEQ ID NO: 1877174 - DNA, 25 bp, Homo sapien
ttcctaactgcataagccaatattt

SEQ ID NO: 1877175 - DNA, 25 bp, Homo sapien
tcctaactgcataagccaatatttc

SEQ ID NO: 1877176 - DNA, 25 bp, Homo sapien
aatatggttcacccatttgattttc

SEQ ID NO: 1877177 - DNA, 25 bp, Homo sapien
tgcttctgaatatggttcacccatt

SEQ ID NO: 1877178 - DNA, 25 bp, Homo sapien
cttctgaatatggttcacccatttg

SEQ ID NO: 1877179 - DNA, 25 bp, Homo sapien
tgaatatggttcacccatttgattt

SEQ ID NO: 1877180 - DNA, 25 bp, Homo sapien
gtccagcgtggccacatgcctgcac

SEQ ID NO: 1877181 - DNA, 25 bp, Homo sapien
caatcaaggttagaaggtccagcgt

SEQ ID NO: 1877182 - DNA, 25 bp, Homo sapien
gtggccacatgcctgcaccacatct

SEQ ID NO: 1877183 - DNA, 25 bp, Homo sapien
tgcaccacatctgtctctccaggtt

SEQ ID NO: 1877184 - DNA, 25 bp, Homo sapien
gaatgactgtaaactgaagggctac

SEQ ID NO: 1877185 - DNA, 25 bp, Homo sapien
cacaggtactctagaagataatcac

SEQ ID NO: 1877186 - DNA, 25 bp, Homo sapien
ctaacattttgggaacctggagtag

SEQ ID NO: 1877187 - DNA, 25 bp, Homo sapien
tcaaaacctgtgctataatcgccct

SEQ ID NO: 1877188 - DNA, 25 bp, Homo sapien
gactcagtttattgtaataactcaa

SEQ ID NO: 1877189 - DNA, 25 bp, Homo sapien
atggacaggactcagtttattgtaa

SEQ ID NO: 1877190 - DNA, 25 bp, Homo sapien
ggacaggactcagtttattgtaata

SEQ ID NO: 1877191 - DNA, 25 bp, Homo sapien
acaggactcagtttattgtaataac

SEQ ID NO: 1877192 - DNA, 25 bp, Homo sapien
tcagtgaactgtcagagtgaagtca

SEQ ID NO: 1877193 - DNA, 25 bp, Homo sapien
gtgaactgtcagagtgaagtcagag

SEQ ID NO: 1877194 - DNA, 25 bp, Homo sapien
cagtgaactgtcagagtgaagtcag

SEQ ID NO: 1877195 - DNA, 25 bp, Homo sapien
gaactgtcagagtgaagtcagagag

SEQ ID NO: 1877196 - DNA, 25 bp, Homo sapien
ctttcctctggcatatactgcagac

SEQ ID NO: 1877197 - DNA, 25 bp, Homo sapien
tcctctggcatatactgcagacttc

SEQ ID NO: 1877198 - DNA, 25 bp, Homo sapien
tggcatatactgcagacttcccctg

SEQ ID NO: 1877199 - DNA, 25 bp, Homo sapien
tctggcatatactgcagacttcccc

SEQ ID NO: 1877200 - DNA, 25 bp, Homo sapien
tgcccaggataccaactgacccatt

SEQ ID NO: 1877201 - DNA, 25 bp, Homo sapien
tttgacagtcttgatgagccatctg

SEQ ID NO: 1877202 - DNA, 25 bp, Homo sapien
gatgtgatgcccaggataccaactg

SEQ ID NO: 1877203 - DNA, 25 bp, Homo sapien
tgatgcccaggataccaactgaccc

SEQ ID NO: 1877204 - DNA, 25 bp, Homo sapien
ctccttttatctggtacttttatag

SEQ ID NO: 1877205 - DNA, 25 bp, Homo sapien
aattcatcatcagaggactgatgtc

SEQ ID NO: 1877206 - DNA, 25 bp, Homo sapien
catcatcagaggactgatgtcatct

SEQ ID NO: 1877207 - DNA, 25 bp, Homo sapien
ttcaaatgtaaaatcagaattcatc

SEQ ID NO: 1877208 - DNA, 25 bp, Homo sapien
ttttgaattcaaatgtaaaatcaga

SEQ ID NO: 1877209 - DNA, 25 bp, Homo sapien
atttctgattcagcttgcactggca

SEQ ID NO: 1877210 - DNA, 25 bp, Homo sapien
cagctgcatgtatttctgattcagc

SEQ ID NO: 1877211 - DNA, 25 bp, Homo sapien
catgcatgcacagctgcatgtattt

SEQ ID NO: 1877212 - DNA, 25 bp, Homo sapien
cttgcactggcagctgttttcttcc

SEQ ID NO: 1877213 - DNA, 25 bp, Homo sapien
tctatcccaggtgaatatcagccct

SEQ ID NO: 1877214 - DNA, 25 bp, Homo sapien
gctattcacaacaccgaacaacagg

SEQ ID NO: 1877215 - DNA, 25 bp, Homo sapien
tgactaaaactgactggctaacagg

SEQ ID NO: 1877216 - DNA, 25 bp, Homo sapien
gctgctaatccaagggctccaaatg

SEQ ID NO: 1877217 - DNA, 25 bp, Homo sapien
ggtccttttctgaacggatctcttc

SEQ ID NO: 1877218 - DNA, 25 bp, Homo sapien
catagtgatgggtcgcagatgcctg

SEQ ID NO: 1877219 - DNA, 25 bp, Homo sapien
ttctggcaattacactaaaacatag

SEQ ID NO: 1877220 - DNA, 25 bp, Homo sapien
ctggttgcccttggattccaggttt

SEQ ID NO: 1877221 - DNA, 25 bp, Homo sapien
cctggaggaccttctttgcttattc

SEQ ID NO: 1877222 - DNA, 25 bp, Homo sapien
catggtctccatctttgccagggag

SEQ ID NO: 1877223 - DNA, 25 bp, Homo sapien
ggaccttctttgcttattccaggag

SEQ ID NO: 1877224 - DNA, 25 bp, Homo sapien
tttgcttattccaggagggccctct

SEQ ID NO: 1877225 - DNA, 25 bp, Homo sapien
accaggaggaccttgttctccagga

SEQ ID NO: 1877226 - DNA, 25 bp, Homo sapien
gaccttgttctccaggatacccaaa

SEQ ID NO: 1877227 - DNA, 25 bp, Homo sapien
gaggaccttgttctccaggataccc

SEQ ID NO: 1877228 - DNA, 25 bp, Homo sapien
aggaggaccttgttctccaggatac

SEQ ID NO: 1877229 - DNA, 25 bp, Homo sapien
tctctttaattcagttggcaaatta

SEQ ID NO: 1877230 - DNA, 25 bp, Homo sapien
aagttaactcgactattaaatggat

SEQ ID NO: 1877231 - DNA, 25 bp, Homo sapien
taaagacgagcatttacagattttt

SEQ ID NO: 1877232 - DNA, 25 bp, Homo sapien
aattatttaaagacgagcatttaca

SEQ ID NO: 1877233 - DNA, 25 bp, Homo sapien
cgtccagggacacccactaatccag

SEQ ID NO: 1877234 - DNA, 25 bp, Homo sapien
ggacgtccagggacacccactaatc

SEQ ID NO: 1877235 - DNA, 25 bp, Homo sapien
acgtccagggacacccactaatcca

SEQ ID NO: 1877236 - DNA, 25 bp, Homo sapien
ctggacgtccagggacacccactaa

SEQ ID NO: 1877237 - DNA, 25 bp, Homo sapien
aggtaatcctctgggaccctctggg

SEQ ID NO: 1877238 - DNA, 25 bp, Homo sapien
caggtaatcctctgggaccctctgg

SEQ ID NO: 1877239 - DNA, 25 bp, Homo sapien
ctggcaaaccaggtaatcctctggg

SEQ ID NO: 1877240 - DNA, 25 bp, Homo sapien
gcaaaccaggtaatcctctgggacc

SEQ ID NO: 1877241 - DNA, 25 bp, Homo sapien
gttgggacaggcaatgatcacaatt

SEQ ID NO: 1877242 - DNA, 25 bp, Homo sapien
gacaggcaatgatcacaatttctaa

SEQ ID NO: 1877243 - DNA, 25 bp, Homo sapien
ggcaatgatcacaatttctaattct

SEQ ID NO: 1877244 - DNA, 25 bp, Homo sapien
tacccggggagccatgttgggacag

SEQ ID NO: 1877245 - DNA, 25 bp, Homo sapien
ccatcccttatgtttaaatggtgag

SEQ ID NO: 1877246 - DNA, 25 bp, Homo sapien
cccatcccttatgtttaaatggtga

SEQ ID NO: 1877247 - DNA, 25 bp, Homo sapien
ccccatcccttatgtttaaatggtg

SEQ ID NO: 1877248 - DNA, 25 bp, Homo sapien
atctgtgcaaacttgtcgaataaat

SEQ ID NO: 1877249 - DNA, 25 bp, Homo sapien
tgtcgaataaattgttctgaaaact

SEQ ID NO: 1877250 - DNA, 25 bp, Homo sapien
caaacttgtcgaataaattgttctg

SEQ ID NO: 1877251 - DNA, 25 bp, Homo sapien
tgtgcaaacttgtcgaataaattgt

SEQ ID NO: 1877252 - DNA, 25 bp, Homo sapien
gtgttaggggttataacatgcacat

SEQ ID NO: 1877253 - DNA, 25 bp, Homo sapien
agtgttaggggttataacatgcaca

SEQ ID NO: 1877254 - DNA, 25 bp, Homo sapien
aaagtgttaggggttataacatgca

SEQ ID NO: 1877255 - DNA, 25 bp, Homo sapien
tcaaagtgttaggggttataacatg

SEQ ID NO: 1877256 - DNA, 25 bp, Homo sapien
tgaggacctggatccccaggttgcc

SEQ ID NO: 1877257 - DNA, 25 bp, Homo sapien
ctgcgggccccatcaagccatccac

SEQ ID NO: 1877258 - DNA, 25 bp, Homo sapien
ctccttttgatccaatggcacctcg

SEQ ID NO: 1877259 - DNA, 25 bp, Homo sapien
aatggcacctcggacaccaggttct

SEQ ID NO: 1877260 - DNA, 25 bp, Homo sapien
tgtcattgaccagaagggaaatttc

SEQ ID NO: 1877261 - DNA, 25 bp, Homo sapien
gagcttgcattttagtgggtccgac

SEQ ID NO: 1877262 - DNA, 25 bp, Homo sapien
taggtaatacgcatactgccagaga

SEQ ID NO: 1877263 - DNA, 25 bp, Homo sapien
aattgcatcatgaagctcgttaagg

SEQ ID NO: 1877264 - DNA, 25 bp, Homo sapien
tccttttgcaccatgatggccttga

SEQ ID NO: 1877265 - DNA, 25 bp, Homo sapien
tttgcaccatgatggccttgaattc

SEQ ID NO: 1877266 - DNA, 25 bp, Homo sapien
ctctccttttgcaccatgatggcct

SEQ ID NO: 1877267 - DNA, 25 bp, Homo sapien
cttttgcaccatgatggccttgaat

SEQ ID NO: 1877268 - DNA, 25 bp, Homo sapien
ctggaattccctgtcttccattttc

SEQ ID NO: 1877269 - DNA, 25 bp, Homo sapien
ccctggaattccctgtcttccattt

SEQ ID NO: 1877270 - DNA, 25 bp, Homo sapien
gttgccctggaattccctgtcttcc

SEQ ID NO: 1877271 - DNA, 25 bp, Homo sapien
ctgttgccctggaattccctgtctt

SEQ ID NO: 1877272 - DNA, 25 bp, Homo sapien
ctgaatacctttttcaccttgattt

SEQ ID NO: 1877273 - DNA, 25 bp, Homo sapien
tgaatacctttttcaccttgatttc

SEQ ID NO: 1877274 - DNA, 25 bp, Homo sapien
gaactgtatctcctaaccaatgcat

SEQ ID NO: 1877275 - DNA, 25 bp, Homo sapien
agcgaactgtatctcctaaccaatg

SEQ ID NO: 1877276 - DNA, 25 bp, Homo sapien
aactggttaaaagcgaactgtatct

SEQ ID NO: 1877277 - DNA, 25 bp, Homo sapien
taaaagcgaactgtatctcctaacc

SEQ ID NO: 1877278 - DNA, 25 bp, Homo sapien
atcccgggtaaacccatgtatcctg

SEQ ID NO: 1877279 - DNA, 25 bp, Homo sapien
tgaatcccgggtaaacccatgtatc

SEQ ID NO: 1877280 - DNA, 25 bp, Homo sapien
cagaagccccaggcatcccttgaat

SEQ ID NO: 1877281 - DNA, 25 bp, Homo sapien
gaagccccaggcatcccttgaattc

SEQ ID NO: 1877282 - DNA, 25 bp, Homo sapien
cccaggcatcccttgaattccaggt

SEQ ID NO: 1877283 - DNA, 25 bp, Homo sapien
cttgagcccagaagccccaggcatc

SEQ ID NO: 1877284 - DNA, 25 bp, Homo sapien
tcctccgggctgagatcctcatcat

SEQ ID NO: 1877285 - DNA, 25 bp, Homo sapien
gcatcctccgggctgagatcctcat

SEQ ID NO: 1877286 - DNA, 25 bp, Homo sapien
atcctccgggctgagatcctcatca

SEQ ID NO: 1877287 - DNA, 25 bp, Homo sapien
catcctccgggctgagatcctcatc

SEQ ID NO: 1877288 - DNA, 25 bp, Homo sapien
cttagatcccggtgttccaggctgg

SEQ ID NO: 1877289 - DNA, 25 bp, Homo sapien
tttttttccttgctgtcctggaggc

SEQ ID NO: 1877290 - DNA, 25 bp, Homo sapien
cttgctgtcctggaggcccaatttc

SEQ ID NO: 1877291 - DNA, 25 bp, Homo sapien
tttccttgctgtcctggaggcccaa

SEQ ID NO: 1877292 - DNA, 25 bp, Homo sapien
gctgtcctggaggcccaatttctcc

SEQ ID NO: 1877293 - DNA, 25 bp, Homo sapien
aatcctcggtttccaggaaatcctg

SEQ ID NO: 1877294 - DNA, 25 bp, Homo sapien
ttggcccattaatcctcggtttcca

SEQ ID NO: 1877295 - DNA, 25 bp, Homo sapien
cattaatcctcggtttccaggaaat

SEQ ID NO: 1877296 - DNA, 25 bp, Homo sapien
gcccattaatcctcggtttccagga

SEQ ID NO: 1877297 - DNA, 25 bp, Homo sapien
taatgaatcatgcaagaaaatctgt

SEQ ID NO: 1877298 - DNA, 25 bp, Homo sapien
ggaaattcatctcagttcttgcacc

SEQ ID NO: 1877299 - DNA, 25 bp, Homo sapien
gacaacttaggagatatagcattat

SEQ ID NO: 1877300 - DNA, 25 bp, Homo sapien
tgatttagcgcaacagttccacaag

SEQ ID NO: 1877301 - DNA, 25 bp, Homo sapien
gacataaagaagtacaggtcactct

SEQ ID NO: 1877302 - DNA, 25 bp, Homo sapien
ggtcactctttcacgtggctgaact

SEQ ID NO: 1877303 - DNA, 25 bp, Homo sapien
ccacagtttgtgaagagacataaag

SEQ ID NO: 1877304 - DNA, 25 bp, Homo sapien
acgtggctgaactcatatgcacatg

SEQ ID NO: 1877305 - DNA, 25 bp, Homo sapien
gcatgcacagaataccagcttattg

SEQ ID NO: 1877306 - DNA, 25 bp, Homo sapien
cctgggctcccaatatgtgtattga

SEQ ID NO: 1877307 - DNA, 25 bp, Homo sapien
gcttattgagggagaggttaaccag

SEQ ID NO: 1877308 - DNA, 25 bp, Homo sapien
tcaggcaactgtgacaatgtccaag

SEQ ID NO: 1877309 - DNA, 25 bp, Homo sapien
agtatcattctcattaactaaaaag

SEQ ID NO: 1877310 - DNA, 25 bp, Homo sapien
atgtcctaatagcagatccactcca

SEQ ID NO: 1877311 - DNA, 25 bp, Homo sapien
aaagagcatagtagaagccatagga

SEQ ID NO: 1877312 - DNA, 25 bp, Homo sapien
aaagattccaatctgattatcagta

SEQ ID NO: 1877313 - DNA, 25 bp, Homo sapien
tgtgtgtgaggtcaaaattaatgac

SEQ ID NO: 1877314 - DNA, 25 bp, Homo sapien
cacagtcactacattgccaactgtc

SEQ ID NO: 1877315 - DNA, 25 bp, Homo sapien
cagatattgcttacaaatttagtca

SEQ ID NO: 1877316 - DNA, 25 bp, Homo sapien
tacagataatgagccaacatttgtg

SEQ ID NO: 1877317 - DNA, 25 bp, Homo sapien
atccaggaaacacggcattcttttt

SEQ ID NO: 1877318 - DNA, 25 bp, Homo sapien
caggaaacacggcattctttttctc

SEQ ID NO: 1877319 - DNA, 25 bp, Homo sapien
agatccaggaaacacggcattcttt

SEQ ID NO: 1877320 - DNA, 25 bp, Homo sapien
tcatggagctccagggatctcagct

SEQ ID NO: 1877321 - DNA, 25 bp, Homo sapien
ttttcactgtgagccataaggctcc

SEQ ID NO: 1877322 - DNA, 25 bp, Homo sapien
cataaggctccctgtacacaatggg

SEQ ID NO: 1877323 - DNA, 25 bp, Homo sapien
ctacaaattttcactgtgagccata

SEQ ID NO: 1877324 - DNA, 25 bp, Homo sapien
acacaatggggctagctggtgagca

SEQ ID NO: 1877325 - DNA, 25 bp, Homo sapien
ccatccatgcagtaagacttttgaa

SEQ ID NO: 1877326 - DNA, 25 bp, Homo sapien
tcacttgcactagccaaaactggtt

SEQ ID NO: 1877327 - DNA, 25 bp, Homo sapien
tttgtgttctattccctgtttactg

SEQ ID NO: 1877328 - DNA, 25 bp, Homo sapien
ttactgtgtggtgttcctctgtatc

SEQ ID NO: 1877329 - DNA, 25 bp, Homo sapien
acaatgcctacagcctcatgtaagg

SEQ ID NO: 1877330 - DNA, 25 bp, Homo sapien
cctcaattagtacaatgtctggcac

SEQ ID NO: 1877331 - DNA, 25 bp, Homo sapien
taggattgacaaatactagctttca

SEQ ID NO: 1877332 - DNA, 25 bp, Homo sapien
gatggccaggccatgattaattaat

SEQ ID NO: 1877333 - DNA, 25 bp, Homo sapien
cccgtgttccatcctgccccggagc

SEQ ID NO: 1877334 - DNA, 25 bp, Homo sapien
cgtgttccatcctgccccggagcac

SEQ ID NO: 1877335 - DNA, 25 bp, Homo sapien
ccgtgttccatcctgccccggagca

SEQ ID NO: 1877336 - DNA, 25 bp, Homo sapien
tgagactgctagtcttggacaacac

SEQ ID NO: 1877337 - DNA, 25 bp, Homo sapien
tacaatacttagactagtgccaaac

SEQ ID NO: 1877338 - DNA, 25 bp, Homo sapien
tatgctaagttgttcagcaggtgtc

SEQ ID NO: 1877339 - DNA, 25 bp, Homo sapien
gaaacactactctagcccagatctc

SEQ ID NO: 1877340 - DNA, 25 bp, Homo sapien
cttctcatatgcacagggaacattc

SEQ ID NO: 1877341 - DNA, 25 bp, Homo sapien
ttctaaaaattgactctaatgaggt

SEQ ID NO: 1877342 - DNA, 25 bp, Homo sapien
tctaatgaggtttcataactctgta

SEQ ID NO: 1877343 - DNA, 25 bp, Homo sapien
tgactctaatgaggtttcataactc

SEQ ID NO: 1877344 - DNA, 25 bp, Homo sapien
aaaaattgactctaatgaggtttca

SEQ ID NO: 1877345 - DNA, 25 bp, Homo sapien
ccgggactacccattaatccatcct

SEQ ID NO: 1877346 - DNA, 25 bp, Homo sapien
cgggactacccattaatccatcctt

SEQ ID NO: 1877347 - DNA, 25 bp, Homo sapien
tacccattaatccatcctttccatg

SEQ ID NO: 1877348 - DNA, 25 bp, Homo sapien
ggccagggaagccagcattcccctt

SEQ ID NO: 1877349 - DNA, 25 bp, Homo sapien
gggaagccagcattccccttttcac

SEQ ID NO: 1877350 - DNA, 25 bp, Homo sapien
gccagggaagccagcattccccttt

SEQ ID NO: 1877351 - DNA, 25 bp, Homo sapien
cagggaagccagcattccccttttc

SEQ ID NO: 1877352 - DNA, 25 bp, Homo sapien
tggacacggtttttaagcagctact

SEQ ID NO: 1877353 - DNA, 25 bp, Homo sapien
tcagtgtgaggaactagaaaggccc

SEQ ID NO: 1877354 - DNA, 25 bp, Homo sapien
ccaacccagtggatgcaatatcaag

SEQ ID NO: 1877355 - DNA, 25 bp, Homo sapien
ggaatctctcactgtaaatctgtaa

SEQ ID NO: 1877356 - DNA, 25 bp, Homo sapien
gaatactttgttgtgtgatctatac

SEQ ID NO: 1877357 - DNA, 25 bp, Homo sapien
gctgggttagaactgcaattctagt

SEQ ID NO: 1877358 - DNA, 25 bp, Homo sapien
cagagctaactgttctaatgctggg

SEQ ID NO: 1877359 - DNA, 25 bp, Homo sapien
taatcccctaagaagggtgaacaga

SEQ ID NO: 1877360 - DNA, 25 bp, Homo sapien
tttttgccataaaatccaggtgatc

SEQ ID NO: 1877361 - DNA, 25 bp, Homo sapien
cataaaatccaggtgatcctttgtc

SEQ ID NO: 1877362 - DNA, 25 bp, Homo sapien
tttgccataaaatccaggtgatcct

SEQ ID NO: 1877363 - DNA, 25 bp, Homo sapien
aatccaggtgatcctttgtctcctt

SEQ ID NO: 1877364 - DNA, 25 bp, Homo sapien
tgatcctggcatgccatgaagccca

SEQ ID NO: 1877365 - DNA, 25 bp, Homo sapien
tttgatcctggcatgccatgaagcc

SEQ ID NO: 1877366 - DNA, 25 bp, Homo sapien
ctttgatcctggcatgccatgaagc

SEQ ID NO: 1877367 - DNA, 25 bp, Homo sapien
ttgatcctggcatgccatgaagccc

SEQ ID NO: 1877368 - DNA, 25 bp, Homo sapien
catatgtgtctatgaacatgaaggc

SEQ ID NO: 1877369 - DNA, 25 bp, Homo sapien
ggcaaaatttgggtcagattcactt

SEQ ID NO: 1877370 - DNA, 25 bp, Homo sapien
gaaaggccctaagcataaagtctaa

SEQ ID NO: 1877371 - DNA, 25 bp, Homo sapien
caggaaacagttaacctctgaggtc

SEQ ID NO: 1877372 - DNA, 25 bp, Homo sapien
accattggttatagctacattttcc

SEQ ID NO: 1877373 - DNA, 25 bp, Homo sapien
tatagaaccctccaaaggcaactct

SEQ ID NO: 1877374 - DNA, 25 bp, Homo sapien
tttgttaagacttgcagataagcta

SEQ ID NO: 1877375 - DNA, 25 bp, Homo sapien
agaggattaatctctcatagcatcc

SEQ ID NO: 1877376 - DNA, 25 bp, Homo sapien
tgtaacctggtagtcctcgagctcc

SEQ ID NO: 1877377 - DNA, 25 bp, Homo sapien
cctttgtaacctggtagtcctcgag

SEQ ID NO: 1877378 - DNA, 25 bp, Homo sapien
ttgtaacctggtagtcctcgagctc

SEQ ID NO: 1877379 - DNA, 25 bp, Homo sapien
tttgtaacctggtagtcctcgagct

SEQ ID NO: 1877380 - DNA, 25 bp, Homo sapien
ctggagatcctggaacacctggtgt

SEQ ID NO: 1877381 - DNA, 25 bp, Homo sapien
gatcctggaacacctggtgtccctg

SEQ ID NO: 1877382 - DNA, 25 bp, Homo sapien
ctggaacacctggtgtccctgcaat

SEQ ID NO: 1877383 - DNA, 25 bp, Homo sapien
gaacacctggtgtccctgcaattcc

SEQ ID NO: 1877384 - DNA, 25 bp, Homo sapien
ttgaccaggttgtccagggtagcca

SEQ ID NO: 1877385 - DNA, 25 bp, Homo sapien
atcttgaccaggttgtccagggtag

SEQ ID NO: 1877386 - DNA, 25 bp, Homo sapien
agccagggttcccaggcagtccagg

SEQ ID NO: 1877387 - DNA, 25 bp, Homo sapien
ggtagccagggttcccaggcagtcc

SEQ ID NO: 1877388 - DNA, 25 bp, Homo sapien
catatattgagttagcgaattctcg

SEQ ID NO: 1877389 - DNA, 25 bp, Homo sapien
gggtccaagctcctaaacactacca

SEQ ID NO: 1877390 - DNA, 25 bp, Homo sapien
tctcgtaataatcctatgaagcaga

SEQ ID NO: 1877391 - DNA, 25 bp, Homo sapien
tcacacagcagtgatagagatggga

SEQ ID NO: 1877392 - DNA, 25 bp, Homo sapien
cccggaggacaaatacagggagctg

SEQ ID NO: 1877393 - DNA, 25 bp, Homo sapien
agttgaacctacatcactgggacca

SEQ ID NO: 1877394 - DNA, 25 bp, Homo sapien
ttcccggaggacaaatacagggagc

SEQ ID NO: 1877395 - DNA, 25 bp, Homo sapien
gagctggagttgaacctacatcact

SEQ ID NO: 1877396 - DNA, 25 bp, Homo sapien
tagattcgcaacttttggacatcaa

SEQ ID NO: 1877397 - DNA, 25 bp, Homo sapien
ctgggtcacagtagattcgcaactt

SEQ ID NO: 1877398 - DNA, 25 bp, Homo sapien
ggaatctcacatgctgtctcccggt

SEQ ID NO: 1877399 - DNA, 25 bp, Homo sapien
ctcccggttgttctgttctgggtca

SEQ ID NO: 1877400 - DNA, 25 bp, Homo sapien
gagacgaatttggtgccagccttca

SEQ ID NO: 1877401 - DNA, 25 bp, Homo sapien
attgatcaagatccctaaaactgga

SEQ ID NO: 1877402 - DNA, 25 bp, Homo sapien
aatttgggtttgcccattgatcaag

SEQ ID NO: 1877403 - DNA, 25 bp, Homo sapien
gatgtaagggcttgttttcaatttg

SEQ ID NO: 1877404 - DNA, 25 bp, Homo sapien
caaaggtaaccacttgtgagccatt

SEQ ID NO: 1877405 - DNA, 25 bp, Homo sapien
ggtaactgctatttgtggccttcca

SEQ ID NO: 1877406 - DNA, 25 bp, Homo sapien
cgctggttgttgtaaataataagat

SEQ ID NO: 1877407 - DNA, 25 bp, Homo sapien
tgtccacaccatttaaggtaactgc

SEQ ID NO: 1877408 - DNA, 25 bp, Homo sapien
ctttgagtagacacaaatacatatg

SEQ ID NO: 1877409 - DNA, 25 bp, Homo sapien
atcccctttcatcacgagctgccac

SEQ ID NO: 1877410 - DNA, 25 bp, Homo sapien
cgagctgccactggaattcgtgttg

SEQ ID NO: 1877411 - DNA, 25 bp, Homo sapien
aaagaatatcaaatcccctttcatc

SEQ ID NO: 1877412 - DNA, 25 bp, Homo sapien
tggaattcgtgttggacagacagat

SEQ ID NO: 1877413 - DNA, 25 bp, Homo sapien
gcacatcgaaaacatcatacaccat

SEQ ID NO: 1877414 - DNA, 25 bp, Homo sapien
ccaaatgggaattatccacaggatg

SEQ ID NO: 1877415 - DNA, 25 bp, Homo sapien
aatgggaattatccacaggatgaaa

SEQ ID NO: 1877416 - DNA, 25 bp, Homo sapien
aatttaacagcacatcgaaaacatc

SEQ ID NO: 1877417 - DNA, 25 bp, Homo sapien
taatcgagcgcaaactggatggcct

SEQ ID NO: 1877418 - DNA, 25 bp, Homo sapien
gatttgccatccgtaagtaccactg

SEQ ID NO: 1877419 - DNA, 25 bp, Homo sapien
tatggattccactgctgccgtcaaa

SEQ ID NO: 1877420 - DNA, 25 bp, Homo sapien
cagaaatcgtgaggacttggcaaaa

SEQ ID NO: 1877421 - DNA, 25 bp, Homo sapien
tgcaaaagaaaaccatcatagcaca

SEQ ID NO: 1877422 - DNA, 25 bp, Homo sapien
ctaagtgcaaaagaaaaccatcata

SEQ ID NO: 1877423 - DNA, 25 bp, Homo sapien
gcaaaagaaaaccatcatagcacat

SEQ ID NO: 1877424 - DNA, 25 bp, Homo sapien
aagtgcaaaagaaaaccatcatagc

SEQ ID NO: 1877425 - DNA, 25 bp, Homo sapien
tccccatcttcagctaacacagaat

SEQ ID NO: 1877426 - DNA, 25 bp, Homo sapien
ccatcttcagctaacacagaattct

SEQ ID NO: 1877427 - DNA, 25 bp, Homo sapien
tcttcagctaacacagaattctgaa

SEQ ID NO: 1877428 - DNA, 25 bp, Homo sapien
tcagctaacacagaattctgaagaa

SEQ ID NO: 1877429 - DNA, 25 bp, Homo sapien
cagagaaatgtaatatagtgagcca

SEQ ID NO: 1877430 - DNA, 25 bp, Homo sapien
gcagagaaatgtaatatagtgagcc

SEQ ID NO: 1877431 - DNA, 25 bp, Homo sapien
agagaaatgtaatatagtgagccat

SEQ ID NO: 1877432 - DNA, 25 bp, Homo sapien
cagaagcatgaaggcacctgctgag

SEQ ID NO: 1877433 - DNA, 25 bp, Homo sapien
ttacaagcgagacctgaggataccc

SEQ ID NO: 1877434 - DNA, 25 bp, Homo sapien
tgactacaactgtgccattacagca

SEQ ID NO: 1877435 - DNA, 25 bp, Homo sapien
tcatggaccccagaatcaacaccta

SEQ ID NO: 1877436 - DNA, 25 bp, Homo sapien
tcagctggctttcccttagtcttcc

SEQ ID NO: 1877437 - DNA, 25 bp, Homo sapien
aactctatatagagatgctctcaga

SEQ ID NO: 1877438 - DNA, 25 bp, Homo sapien
gaactgagatatacctcaataggaa

SEQ ID NO: 1877439 - DNA, 25 bp, Homo sapien
tcctaaaggatccaatgacttcatg

SEQ ID NO: 1877440 - DNA, 25 bp, Homo sapien
atcaatagggaaacggtggagagca

SEQ ID NO: 1877441 - DNA, 25 bp, Homo sapien
tgtcaaacgacaatcaaaaatggtt

SEQ ID NO: 1877442 - DNA, 25 bp, Homo sapien
aaaatgatccaaaggcaaactgcca

SEQ ID NO: 1877443 - DNA, 25 bp, Homo sapien
gctaacaaggaatctgaacagggag

SEQ ID NO: 1877444 - DNA, 25 bp, Homo sapien
aacccgagcaagacctgcgctgaaa

SEQ ID NO: 1877445 - DNA, 25 bp, Homo sapien
ccggagtccgttctccctgcagcgg

SEQ ID NO: 1877446 - DNA, 25 bp, Homo sapien
ccgtcgcagccagctgagtgttgcg

SEQ ID NO: 1877447 - DNA, 25 bp, Homo sapien
tgcgctgaaacggattggctgccct

SEQ ID NO: 1877448 - DNA, 25 bp, Homo sapien
tctcctaggatcctactgaagatta

SEQ ID NO: 1877449 - DNA, 25 bp, Homo sapien
aatgtatcaatttctcctaggatcc

SEQ ID NO: 1877450 - DNA, 25 bp, Homo sapien
tcaatttctcctaggatcctactga

SEQ ID NO: 1877451 - DNA, 25 bp, Homo sapien
cctactgaagattacaagatgtagc

SEQ ID NO: 1877452 - DNA, 25 bp, Homo sapien
tcaagaaagccgcaatgtacctggt

SEQ ID NO: 1877453 - DNA, 25 bp, Homo sapien
gccgcaatgtacctggtaaggtcca

SEQ ID NO: 1877454 - DNA, 25 bp, Homo sapien
aggatgccaagttattaaaacagag

SEQ ID NO: 1877455 - DNA, 25 bp, Homo sapien
agctcatgtctgataagcctttggg

SEQ ID NO: 1877456 - DNA, 25 bp, Homo sapien
gccatcaagtatccaaatcatctct

SEQ ID NO: 1877457 - DNA, 25 bp, Homo sapien
tgccatcaagtatccaaatcatctc

SEQ ID NO: 1877458 - DNA, 25 bp, Homo sapien
catcaagtatccaaatcatctctac

SEQ ID NO: 1877459 - DNA, 25 bp, Homo sapien
actgccatcaagtatccaaatcatc

SEQ ID NO: 1877460 - DNA, 25 bp, Homo sapien
cagcatgcagaacattgcacagcct

SEQ ID NO: 1877461 - DNA, 25 bp, Homo sapien
ctcctctgtggtcagaacagcatgc

SEQ ID NO: 1877462 - DNA, 25 bp, Homo sapien
tcctctgtggtcagaacagcatgca

SEQ ID NO: 1877463 - DNA, 25 bp, Homo sapien
tctttgagctttgccccagttgcat

SEQ ID NO: 1877464 - DNA, 25 bp, Homo sapien
cctggttctttgagctttgccccag

SEQ ID NO: 1877465 - DNA, 25 bp, Homo sapien
ggttctttgagctttgccccagttg

SEQ ID NO: 1877466 - DNA, 25 bp, Homo sapien
ttctttgagctttgccccagttgca

SEQ ID NO: 1877467 - DNA, 25 bp, Homo sapien
aagtgatgttaccagacaagcttca

SEQ ID NO: 1877468 - DNA, 25 bp, Homo sapien
aagctaggattgaacactgcaataa

SEQ ID NO: 1877469 - DNA, 25 bp, Homo sapien
taaaagctaggattgaacactgcaa

SEQ ID NO: 1877470 - DNA, 25 bp, Homo sapien
aaaataaaagctaggattgaacact

SEQ ID NO: 1877471 - DNA, 25 bp, Homo sapien
ctggtctcttgggtgtcatgatgtc

SEQ ID NO: 1877472 - DNA, 25 bp, Homo sapien
tcgctgtagcactcagcagtccctg

SEQ ID NO: 1877473 - DNA, 25 bp, Homo sapien
ggtgagcctctatcctctgcgagga

SEQ ID NO: 1877474 - DNA, 25 bp, Homo sapien
aaaacaatgttcaggtttgtgctgg

SEQ ID NO: 1877475 - DNA, 25 bp, Homo sapien
gctcccatctgaaattcgtaatata

SEQ ID NO: 1877476 - DNA, 25 bp, Homo sapien
agtctccggaagcatgggagggttc

SEQ ID NO: 1877477 - DNA, 25 bp, Homo sapien
gaggagtctccggaagcatgggagg

SEQ ID NO: 1877478 - DNA, 25 bp, Homo sapien
tctccggaagcatgggagggttcgg

SEQ ID NO: 1877479 - DNA, 25 bp, Homo sapien
cggaggagtctccggaagcatggga

SEQ ID NO: 1877480 - DNA, 25 bp, Homo sapien
ccagttccccgaaggtcggtgatag

SEQ ID NO: 1877481 - DNA, 25 bp, Homo sapien
cagttccccgaaggtcggtgatagg

SEQ ID NO: 1877482 - DNA, 25 bp, Homo sapien
ctgatggcgctctcgtcggcggcca

SEQ ID NO: 1877483 - DNA, 25 bp, Homo sapien
atggcgctctcgtcggcggccacaa

SEQ ID NO: 1877484 - DNA, 25 bp, Homo sapien
gtcggcggccacaatgatactgctc

SEQ ID NO: 1877485 - DNA, 25 bp, Homo sapien
ctcgtcggcggccacaatgatactg

SEQ ID NO: 1877486 - DNA, 25 bp, Homo sapien
gcagattcacgggaggtagtggtgg

SEQ ID NO: 1877487 - DNA, 25 bp, Homo sapien
ggcagattcacgggaggtagtggtg

SEQ ID NO: 1877488 - DNA, 25 bp, Homo sapien
cagattcacgggaggtagtggtggc

SEQ ID NO: 1877489 - DNA, 25 bp, Homo sapien
gacgcaccacgccaagggaagtcaa

SEQ ID NO: 1877490 - DNA, 25 bp, Homo sapien
acgcaccacgccaagggaagtcaaa

SEQ ID NO: 1877491 - DNA, 25 bp, Homo sapien
cgcaccacgccaagggaagtcaaac

SEQ ID NO: 1877492 - DNA, 25 bp, Homo sapien
tctgcgtggccgagccggccatagc

SEQ ID NO: 1877493 - DNA, 25 bp, Homo sapien
catagccaccgaagccccaggagaa

SEQ ID NO: 1877494 - DNA, 25 bp, Homo sapien
cttctgctctgcgtggccgagccgg

SEQ ID NO: 1877495 - DNA, 25 bp, Homo sapien
cgaagccccaggagaagactcgctt

SEQ ID NO: 1877496 - DNA, 25 bp, Homo sapien
ggaccacgtgtggttagcaccacag

SEQ ID NO: 1877497 - DNA, 25 bp, Homo sapien
gaccacgtgtggttagcaccacagg

SEQ ID NO: 1877498 - DNA, 25 bp, Homo sapien
aggaccacgtgtggttagcaccaca

SEQ ID NO: 1877499 - DNA, 25 bp, Homo sapien
ccagtcgcgggggaaccagttcgca

SEQ ID NO: 1877500 - DNA, 25 bp, Homo sapien
tctatccgccgtgccccaaagatga

SEQ ID NO: 1877501 - DNA, 25 bp, Homo sapien
tcgcagtcgtactctatccgccgtg

SEQ ID NO: 1877502 - DNA, 25 bp, Homo sapien
ttctcaatgaatatggccagtcgcg

SEQ ID NO: 1877503 - DNA, 25 bp, Homo sapien
ttcagggcacccaaaggaatagagg

SEQ ID NO: 1877504 - DNA, 25 bp, Homo sapien
ccatattcagggcacccaaaggaat

SEQ ID NO: 1877505 - DNA, 25 bp, Homo sapien
ggccatattcagggcacccaaagga

SEQ ID NO: 1877506 - DNA, 25 bp, Homo sapien
cagggcacccaaaggaatagaggtt

SEQ ID NO: 1877507 - DNA, 25 bp, Homo sapien
atcatactgaattcagccccacagg

SEQ ID NO: 1877508 - DNA, 25 bp, Homo sapien
cttttcagtccattatcatactgaa

SEQ ID NO: 1877509 - DNA, 25 bp, Homo sapien
ggccattttggtaattggctggccg

SEQ ID NO: 1877510 - DNA, 25 bp, Homo sapien
ttatcatactgaattcagccccaca

SEQ ID NO: 1877511 - DNA, 25 bp, Homo sapien
tcatggcagagaccctcgatgaatc

SEQ ID NO: 1877512 - DNA, 25 bp, Homo sapien
tgtgcagcacaggaacctgagatca

SEQ ID NO: 1877513 - DNA, 25 bp, Homo sapien
ctgcagacatggtcacttcatggca

SEQ ID NO: 1877514 - DNA, 25 bp, Homo sapien
tgagatcactgtccgtatccggacc

SEQ ID NO: 1877515 - DNA, 25 bp, Homo sapien
gagatcgcggtaagcagtttgctgt

SEQ ID NO: 1877516 - DNA, 25 bp, Homo sapien
accgagatcgcggtaagcagtttgc

SEQ ID NO: 1877517 - DNA, 25 bp, Homo sapien
ccgagatcgcggtaagcagtttgct

SEQ ID NO: 1877518 - DNA, 25 bp, Homo sapien
tgaccgagatcgcggtaagcagttt

SEQ ID NO: 1877519 - DNA, 25 bp, Homo sapien
gggtcccagtcgagctccacgcggt

SEQ ID NO: 1877520 - DNA, 25 bp, Homo sapien
agtcgagctccacgcggtcctagtc

SEQ ID NO: 1877521 - DNA, 25 bp, Homo sapien
cgcgcgcttgtccccgcacgggtcc

SEQ ID NO: 1877522 - DNA, 25 bp, Homo sapien
ccccgcacgggtcccagtcgagctc

SEQ ID NO: 1877523 - DNA, 25 bp, Homo sapien
ctcgcccttcctgcccgccggacct

SEQ ID NO: 1877524 - DNA, 25 bp, Homo sapien
tcgcccttcctgcccgccggacctc

SEQ ID NO: 1877525 - DNA, 25 bp, Homo sapien
gtgccgttgtccgagctcggctcct

SEQ ID NO: 1877526 - DNA, 25 bp, Homo sapien
gcgggcagtgccgttgtccgagctc

SEQ ID NO: 1877527 - DNA, 25 bp, Homo sapien
gcagtgccgttgtccgagctcggct

SEQ ID NO: 1877528 - DNA, 25 bp, Homo sapien
ccggcgcgggcagtgccgttgtccg

SEQ ID NO: 1877529 - DNA, 25 bp, Homo sapien
taacaaccataagagccagacttac

SEQ ID NO: 1877530 - DNA, 25 bp, Homo sapien
tcatccccgcatcagttttaacaac

SEQ ID NO: 1877531 - DNA, 25 bp, Homo sapien
tgaaataaatttggtggtcatcccc

SEQ ID NO: 1877532 - DNA, 25 bp, Homo sapien
ttttaacaaccataagagccagact

SEQ ID NO: 1877533 - DNA, 25 bp, Homo sapien
ttttgcagcctcaggacatttcatc

SEQ ID NO: 1877534 - DNA, 25 bp, Homo sapien
tacagaataaccttaagttgcacct

SEQ ID NO: 1877535 - DNA, 25 bp, Homo sapien
caacctctagttctttgatgacatg

SEQ ID NO: 1877536 - DNA, 25 bp, Homo sapien
tactttacaatgcaagaagcgagcc

SEQ ID NO: 1877537 - DNA, 25 bp, Homo sapien
ttgtttggtaaccatcattcgggtc

SEQ ID NO: 1877538 - DNA, 25 bp, Homo sapien
tgtttggtaaccatcattcgggtcc

SEQ ID NO: 1877539 - DNA, 25 bp, Homo sapien
tttggtaaccatcattcgggtccat

SEQ ID NO: 1877540 - DNA, 25 bp, Homo sapien
gtttggtaaccatcattcgggtcca

SEQ ID NO: 1877541 - DNA, 25 bp, Homo sapien
ggaacaaacaggcaagaaactaatc

SEQ ID NO: 1877542 - DNA, 25 bp, Homo sapien
gaaactaatcaataagatacgggcc

SEQ ID NO: 1877543 - DNA, 25 bp, Homo sapien
agatacgggccaggacagaaaataa

SEQ ID NO: 1877544 - DNA, 25 bp, Homo sapien
aattgctaaagcactcacattagga

SEQ ID NO: 1877545 - DNA, 25 bp, Homo sapien
tgcatactaatatctttctatagta

SEQ ID NO: 1877546 - DNA, 25 bp, Homo sapien
atatctttctatagtatgtgagtac

SEQ ID NO: 1877547 - DNA, 25 bp, Homo sapien
tctttctatagtatgtgagtacaca

SEQ ID NO: 1877548 - DNA, 25 bp, Homo sapien
ctaatatctttctatagtatgtgag

SEQ ID NO: 1877549 - DNA, 25 bp, Homo sapien
gtcactccaaattgatattgctcat

SEQ ID NO: 1877550 - DNA, 25 bp, Homo sapien
ggtcactccaaattgatattgctca

SEQ ID NO: 1877551 - DNA, 25 bp, Homo sapien
tggtcactccaaattgatattgctc

SEQ ID NO: 1877552 - DNA, 25 bp, Homo sapien
cactccaaattgatattgctcataa

SEQ ID NO: 1877553 - DNA, 25 bp, Homo sapien
tgaacgcactttatacttatattct

SEQ ID NO: 1877554 - DNA, 25 bp, Homo sapien
gaaaacctcacatgtatatgaacgc

SEQ ID NO: 1877555 - DNA, 25 bp, Homo sapien
gtgctactgtccactcaagcaaaag

SEQ ID NO: 1877556 - DNA, 25 bp, Homo sapien
gagttcaatgatacaggtgctactg

SEQ ID NO: 1877557 - DNA, 25 bp, Homo sapien
tgtcagatactgcaaagactgcgtg

SEQ ID NO: 1877558 - DNA, 25 bp, Homo sapien
tgtgcccggcacgttacagtgcaga

SEQ ID NO: 1877559 - DNA, 25 bp, Homo sapien
tgtcatgaggtatccctaacgtcag

SEQ ID NO: 1877560 - DNA, 25 bp, Homo sapien
taactgagtttagtgtgtgcccggc

SEQ ID NO: 1877561 - DNA, 25 bp, Homo sapien
tctgagcacacggactggatttctg

SEQ ID NO: 1877562 - DNA, 25 bp, Homo sapien
ttttgaaggcttcgctgtggatggc

SEQ ID NO: 1877563 - DNA, 25 bp, Homo sapien
tgaggacttgtccaatttgctggca

SEQ ID NO: 1877564 - DNA, 25 bp, Homo sapien
aaagtctgatgcatcactgcctcgg

SEQ ID NO: 1877565 - DNA, 25 bp, Homo sapien
cgatgccacctttaatcttaacttt

SEQ ID NO: 1877566 - DNA, 25 bp, Homo sapien
tattattgggtccatctgcaactaa

SEQ ID NO: 1877567 - DNA, 25 bp, Homo sapien
ttgggtccatctgcaactaattttt

SEQ ID NO: 1877568 - DNA, 25 bp, Homo sapien
ttgaaacccgatgccacctttaatc

SEQ ID NO: 1877569 - DNA, 25 bp, Homo sapien
tatcctggaagtcgaagcttgcttc

SEQ ID NO: 1877570 - DNA, 25 bp, Homo sapien
ggcagctgcagttgttatcaagcca

SEQ ID NO: 1877571 - DNA, 25 bp, Homo sapien
gcagttgttatcaagccactgtcct

SEQ ID NO: 1877572 - DNA, 25 bp, Homo sapien
cagcaaactgtgttcggactctggc

SEQ ID NO: 1877573 - DNA, 25 bp, Homo sapien
acaacacgagggagtgagaagccac

SEQ ID NO: 1877574 - DNA, 25 bp, Homo sapien
ttatgaaacataccactcaaggtgg

SEQ ID NO: 1877575 - DNA, 25 bp, Homo sapien
tacatatgggtggaaactctctact

SEQ ID NO: 1877576 - DNA, 25 bp, Homo sapien
gcctgaggaggcacatgatttgccc

SEQ ID NO: 1877577 - DNA, 25 bp, Homo sapien
gggaatgtgttgcacttcttgccca

SEQ ID NO: 1877578 - DNA, 25 bp, Homo sapien
gatgctcttgcaaatcatactgcct

SEQ ID NO: 1877579 - DNA, 25 bp, Homo sapien
catcttccaagaactgctcggttga

SEQ ID NO: 1877580 - DNA, 25 bp, Homo sapien
caaaaaggaggtagtctgcaggagt

SEQ ID NO: 1877581 - DNA, 25 bp, Homo sapien
tgctgtttgtcaaccatggtttacc

SEQ ID NO: 1877582 - DNA, 25 bp, Homo sapien
cataattgcgtgttaaaggatggag

SEQ ID NO: 1877583 - DNA, 25 bp, Homo sapien
ctctgcagatggcacgggaaagtct

SEQ ID NO: 1877584 - DNA, 25 bp, Homo sapien
gctgctttacaaggagttgacattt

SEQ ID NO: 1877585 - DNA, 25 bp, Homo sapien
gcctgcgcagcctgactggacacag

SEQ ID NO: 1877586 - DNA, 25 bp, Homo sapien
cgcctgcgcagcctgactggacaca

SEQ ID NO: 1877587 - DNA, 25 bp, Homo sapien
tctgttgggtgaagcgcctcgtgat

SEQ ID NO: 1877588 - DNA, 25 bp, Homo sapien
cctcgtgatgatggccgggatcttc

SEQ ID NO: 1877589 - DNA, 25 bp, Homo sapien
tcttcggcctcggggtcggaaagca

SEQ ID NO: 1877590 - DNA, 25 bp, Homo sapien
cggggtcggaaagcagccataccct

SEQ ID NO: 1877591 - DNA, 25 bp, Homo sapien
ccagagatcacgttgagaatttcaa

SEQ ID NO: 1877592 - DNA, 25 bp, Homo sapien
agaggcgctcaatcgttaatgggaa

SEQ ID NO: 1877593 - DNA, 25 bp, Homo sapien
ttaatgggaagaacggccacctggc

SEQ ID NO: 1877594 - DNA, 25 bp, Homo sapien
gaagacagaccagtaaggcagggac

SEQ ID NO: 1877595 - DNA, 25 bp, Homo sapien
agtgatgcagcactcatacaaacac

SEQ ID NO: 1877596 - DNA, 25 bp, Homo sapien
tgtgaggtagtcagtgatgcagcac

SEQ ID NO: 1877597 - DNA, 25 bp, Homo sapien
gatctgtgaggtagtcagtgatgca

SEQ ID NO: 1877598 - DNA, 25 bp, Homo sapien
cagtgatgcagcactcatacaaaca

SEQ ID NO: 1877599 - DNA, 25 bp, Homo sapien
cacaagaacccggtgagcaacgtgt

SEQ ID NO: 1877600 - DNA, 25 bp, Homo sapien
gcatgtgtttgatcacttataacac

SEQ ID NO: 1877601 - DNA, 25 bp, Homo sapien
acggagaacactccacaagaacccg

SEQ ID NO: 1877602 - DNA, 25 bp, Homo sapien
caacgtgttagcatgtgtttgatca

SEQ ID NO: 1877603 - DNA, 25 bp, Homo sapien
ctcagctggatatgagttaagccat

SEQ ID NO: 1877604 - DNA, 25 bp, Homo sapien
gatatgagttaagccatacgcgatg

SEQ ID NO: 1877605 - DNA, 25 bp, Homo sapien
taagccatacgcgatggatgaagca

SEQ ID NO: 1877606 - DNA, 25 bp, Homo sapien
ctgcatgtgtaacacaaccaaagtc

SEQ ID NO: 1877607 - DNA, 25 bp, Homo sapien
taacattttactcccatgatgatga

SEQ ID NO: 1877608 - DNA, 25 bp, Homo sapien
gaagagtttgattccgaacgtaaca

SEQ ID NO: 1877609 - DNA, 25 bp, Homo sapien
aattgaagagtttgattccgaacgt

SEQ ID NO: 1877610 - DNA, 25 bp, Homo sapien
tgattccgaacgtaacattttactc

SEQ ID NO: 1877611 - DNA, 25 bp, Homo sapien
acttgggctggaagatatgtagaga

SEQ ID NO: 1877612 - DNA, 25 bp, Homo sapien
aatgttctaatctgcaacttcaaag

SEQ ID NO: 1877613 - DNA, 25 bp, Homo sapien
caagttagcattggattattattta

SEQ ID NO: 1877614 - DNA, 25 bp, Homo sapien
gtattttcggtcttcatcacctcaa

SEQ ID NO: 1877615 - DNA, 25 bp, Homo sapien
tcatgatgttatcatgataagcatc

SEQ ID NO: 1877616 - DNA, 25 bp, Homo sapien
catgatgttatcatgataagcatct

SEQ ID NO: 1877617 - DNA, 25 bp, Homo sapien
tgatgttatcatgataagcatctcc

SEQ ID NO: 1877618 - DNA, 25 bp, Homo sapien
gatgttatcatgataagcatctcct

SEQ ID NO: 1877619 - DNA, 25 bp, Homo sapien
tcactaagaactcatcaagtgccat

SEQ ID NO: 1877620 - DNA, 25 bp, Homo sapien
cagtcgcagttgctgggagtctcca

SEQ ID NO: 1877621 - DNA, 25 bp, Homo sapien
acagtactccgcaggatccggacca

SEQ ID NO: 1877622 - DNA, 25 bp, Homo sapien
taagaactcatcaagtgccatccat

SEQ ID NO: 1877623 - DNA, 25 bp, Homo sapien
ctgttcagtgaagaaagaaagaacc

SEQ ID NO: 1877624 - DNA, 25 bp, Homo sapien
tgttcagtgaagaaagaaagaacct

SEQ ID NO: 1877625 - DNA, 25 bp, Homo sapien
caatttgcagtagctaaagcaaccg

SEQ ID NO: 1877626 - DNA, 25 bp, Homo sapien
gatacagctgccaaatctaaaaggt

SEQ ID NO: 1877627 - DNA, 25 bp, Homo sapien
gaaagtaagcactggcccacttgcc

SEQ ID NO: 1877628 - DNA, 25 bp, Homo sapien
gatttgtgttagacggctgcatgct

SEQ ID NO: 1877629 - DNA, 25 bp, Homo sapien
gattccaggtttctgatcacaggtt

SEQ ID NO: 1877630 - DNA, 25 bp, Homo sapien
tatgctacaaattctgcaagtcctg

SEQ ID NO: 1877631 - DNA, 25 bp, Homo sapien
tagaaagcatgtaaaatgcaccagc

SEQ ID NO: 1877632 - DNA, 25 bp, Homo sapien
ggttgtcatcccagcagacaagaaa

SEQ ID NO: 1877633 - DNA, 25 bp, Homo sapien
catttctactcagagatgccaagcc

SEQ ID NO: 1877634 - DNA, 25 bp, Homo sapien
aattctgatcatgatgtagtgccac

SEQ ID NO: 1877635 - DNA, 25 bp, Homo sapien
ccatttgctgactccgaaaatagca

SEQ ID NO: 1877636 - DNA, 25 bp, Homo sapien
tagtgccactacacaggttatactg

SEQ ID NO: 1877637 - DNA, 25 bp, Homo sapien
cctgtatttattatcaccaatctgc

SEQ ID NO: 1877638 - DNA, 25 bp, Homo sapien
tctgctcaacttgaaatcgctttgc

SEQ ID NO: 1877639 - DNA, 25 bp, Homo sapien
ttgcacatttacacttagctacctg

SEQ ID NO: 1877640 - DNA, 25 bp, Homo sapien
tacacttagctacctgccttgtcac

SEQ ID NO: 1877641 - DNA, 25 bp, Homo sapien
tcagtgttgtacgcaatgggaagat

SEQ ID NO: 1877642 - DNA, 25 bp, Homo sapien
tatcagtgttgtacgcaatgggaag

SEQ ID NO: 1877643 - DNA, 25 bp, Homo sapien
cagtgttgtacgcaatgggaagata

SEQ ID NO: 1877644 - DNA, 25 bp, Homo sapien
atcagtgttgtacgcaatgggaaga

SEQ ID NO: 1877645 - DNA, 25 bp, Homo sapien
gaagggctgctacaaattcatagta

SEQ ID NO: 1877646 - DNA, 25 bp, Homo sapien
gctcatctccaagcgactggttgga

SEQ ID NO: 1877647 - DNA, 25 bp, Homo sapien
tagtagtcaatatatccatcgccat

SEQ ID NO: 1877648 - DNA, 25 bp, Homo sapien
aaagatgtctgcaactgcgctcatc

SEQ ID NO: 1877649 - DNA, 25 bp, Homo sapien
gaagtccatcactcgagatttcttg

SEQ ID NO: 1877650 - DNA, 25 bp, Homo sapien
catcaataaattcctgccgcgttat

SEQ ID NO: 1877651 - DNA, 25 bp, Homo sapien
aatcaaagttagcaaattccctcag

SEQ ID NO: 1877652 - DNA, 25 bp, Homo sapien
catcgcatgtattttttgcgccaga

SEQ ID NO: 1877653 - DNA, 25 bp, Homo sapien
aatggcaatgtgttatgaggaatga

SEQ ID NO: 1877654 - DNA, 25 bp, Homo sapien
taaaaatgtactcaaatagcaagag

SEQ ID NO: 1877655 - DNA, 25 bp, Homo sapien
gcaagagtttgcttattatcagaaa

SEQ ID NO: 1877656 - DNA, 25 bp, Homo sapien
gaggaatgagggcaaatgacaatgt

SEQ ID NO: 1877657 - DNA, 25 bp, Homo sapien
ctcctctagtctgtccaaggcatca

SEQ ID NO: 1877658 - DNA, 25 bp, Homo sapien
tcctctagtctgtccaaggcatcat

SEQ ID NO: 1877659 - DNA, 25 bp, Homo sapien
cctctagtctgtccaaggcatcatt

SEQ ID NO: 1877660 - DNA, 25 bp, Homo sapien
caagcttgatgctggaaagcgtttt

SEQ ID NO: 1877661 - DNA, 25 bp, Homo sapien
gatacaagcttgatgctggaaagcg

SEQ ID NO: 1877662 - DNA, 25 bp, Homo sapien
gtgacccagagggatacaagcttga

SEQ ID NO: 1877663 - DNA, 25 bp, Homo sapien
cccagagggatacaagcttgatgct

SEQ ID NO: 1877664 - DNA, 25 bp, Homo sapien
tcaagtgctcatgtaaaatcaccaa

SEQ ID NO: 1877665 - DNA, 25 bp, Homo sapien
tgtaaaatcaccaattgcccccaaa

SEQ ID NO: 1877666 - DNA, 25 bp, Homo sapien
tacaatacttgagcacacgtattcc

SEQ ID NO: 1877667 - DNA, 25 bp, Homo sapien
agaaaattagctcccttatttattg

SEQ ID NO: 1877668 - DNA, 25 bp, Homo sapien
cgttactttatcaacatcaggctgt

SEQ ID NO: 1877669 - DNA, 25 bp, Homo sapien
ccttatccaagactggaatatggga

SEQ ID NO: 1877670 - DNA, 25 bp, Homo sapien
attgtaatgaggaaggatcagcagc

SEQ ID NO: 1877671 - DNA, 25 bp, Homo sapien
tataggtcttcgttactttatcaac

SEQ ID NO: 1877672 - DNA, 25 bp, Homo sapien
tcaaataagagttactacagaaaac

SEQ ID NO: 1877673 - DNA, 25 bp, Homo sapien
aaaatctaaaccatcatactgcagg

SEQ ID NO: 1877674 - DNA, 25 bp, Homo sapien
tactgcaggcatttactaatttcta

SEQ ID NO: 1877675 - DNA, 25 bp, Homo sapien
tcatatgctttatctttagggtaaa

SEQ ID NO: 1877676 - DNA, 25 bp, Homo sapien
gctttcacctcttcgatctcctggg

SEQ ID NO: 1877677 - DNA, 25 bp, Homo sapien
tatcagtaagtgtagtttcagccca

SEQ ID NO: 1877678 - DNA, 25 bp, Homo sapien
cctgtttggcaataagcccagccag

SEQ ID NO: 1877679 - DNA, 25 bp, Homo sapien
ggtgttctgcaatgagtgctttcac

SEQ ID NO: 1877680 - DNA, 25 bp, Homo sapien
aaacctcgcccggatgattgttatc

SEQ ID NO: 1877681 - DNA, 25 bp, Homo sapien
cgcccatagtggtggctttatttag

SEQ ID NO: 1877682 - DNA, 25 bp, Homo sapien
tagccaaaacggtgtcgcccatagt

SEQ ID NO: 1877683 - DNA, 25 bp, Homo sapien
gattgttatccagtgcttaatggta

SEQ ID NO: 1877684 - DNA, 25 bp, Homo sapien
caccctgagatatcatattacacaa

SEQ ID NO: 1877685 - DNA, 25 bp, Homo sapien
taaagccaccctgagatatcatatt

SEQ ID NO: 1877686 - DNA, 25 bp, Homo sapien
gatgctgagaaaagggcgtgcttat

SEQ ID NO: 1877687 - DNA, 25 bp, Homo sapien
atcatattacacaagtcaggatgac

SEQ ID NO: 1877688 - DNA, 25 bp, Homo sapien
tatgctgatcaatgagagtccggag

SEQ ID NO: 1877689 - DNA, 25 bp, Homo sapien
tggaaacgcagggtttgctccgcct

SEQ ID NO: 1877690 - DNA, 25 bp, Homo sapien
tgtaccaccgagtggaattcctctg

SEQ ID NO: 1877691 - DNA, 25 bp, Homo sapien
gaggacaccatggaaacgcagggtt

SEQ ID NO: 1877692 - DNA, 25 bp, Homo sapien
gaagattagaatgcctccctctagc

SEQ ID NO: 1877693 - DNA, 25 bp, Homo sapien
gagacattactcacgcagcacttgt

SEQ ID NO: 1877694 - DNA, 25 bp, Homo sapien
tcctgattgagacacgagggcctca

SEQ ID NO: 1877695 - DNA, 25 bp, Homo sapien
caaaactgtatagtggattcatccc

SEQ ID NO: 1877696 - DNA, 25 bp, Homo sapien
tgagttctcgggctgagcgcttcag

SEQ ID NO: 1877697 - DNA, 25 bp, Homo sapien
tgacccaggaggagtcatcccgact

SEQ ID NO: 1877698 - DNA, 25 bp, Homo sapien
tcccagcgtgtgcttaattcctgca

SEQ ID NO: 1877699 - DNA, 25 bp, Homo sapien
gacgcagggctgcttctaaccgtgt

SEQ ID NO: 1877700 - DNA, 25 bp, Homo sapien
gaagataaatgacacactgctccta

SEQ ID NO: 1877701 - DNA, 25 bp, Homo sapien
ggctttggcactactctaagagatg

SEQ ID NO: 1877702 - DNA, 25 bp, Homo sapien
cacggatgtcttagagataatggca

SEQ ID NO: 1877703 - DNA, 25 bp, Homo sapien
tgtatctaagaacctaacagaggac

SEQ ID NO: 1877704 - DNA, 25 bp, Homo sapien
ttaaaagcagttggtcatgaccacc

SEQ ID NO: 1877705 - DNA, 25 bp, Homo sapien
aattttgacaaactgatgtgccagg

SEQ ID NO: 1877706 - DNA, 25 bp, Homo sapien
tatcaggagatttcaaggaagccag

SEQ ID NO: 1877707 - DNA, 25 bp, Homo sapien
cagactgatctaagaagtgagccca

SEQ ID NO: 1877708 - DNA, 25 bp, Homo sapien
gattatcgatcagattcatcaccaa

SEQ ID NO: 1877709 - DNA, 25 bp, Homo sapien
cctgtagggcatctgtgaattgtcc

SEQ ID NO: 1877710 - DNA, 25 bp, Homo sapien
ccagctggggttcaactctatataa

SEQ ID NO: 1877711 - DNA, 25 bp, Homo sapien
tataaccaatcaatgagagcctgta

SEQ ID NO: 1877712 - DNA, 25 bp, Homo sapien
ttatcaggcagtaaacttgacattt

SEQ ID NO: 1877713 - DNA, 25 bp, Homo sapien
aattgatgaaggttgagtggtactc

SEQ ID NO: 1877714 - DNA, 25 bp, Homo sapien
ttggaaaccatggacccttcatgtt

SEQ ID NO: 1877715 - DNA, 25 bp, Homo sapien
gatccagaacagttcaaccatccca

SEQ ID NO: 1877716 - DNA, 25 bp, Homo sapien
tgtcgtagacagaatgcttggctcc

SEQ ID NO: 1877717 - DNA, 25 bp, Homo sapien
tctccttcagagaacgtccagtcct

SEQ ID NO: 1877718 - DNA, 25 bp, Homo sapien
gattttccacatatggtatcccatt

SEQ ID NO: 1877719 - DNA, 25 bp, Homo sapien
cttggctccgagtgatttctgaaac

SEQ ID NO: 1877720 - DNA, 25 bp, Homo sapien
tcttctagccactccataagtttac

SEQ ID NO: 1877721 - DNA, 25 bp, Homo sapien
gatcatttgcgatttccagttcaga

SEQ ID NO: 1877722 - DNA, 25 bp, Homo sapien
cataagtttactccaagcttcatgg

SEQ ID NO: 1877723 - DNA, 25 bp, Homo sapien
tttattttgtctggatcatttgcga

SEQ ID NO: 1877724 - DNA, 25 bp, Homo sapien
gctctattatctgctcacgatgaga

SEQ ID NO: 1877725 - DNA, 25 bp, Homo sapien
cactttttcccatcgactttgtaca

SEQ ID NO: 1877726 - DNA, 25 bp, Homo sapien
ttgtacactgataagtagattcttg

SEQ ID NO: 1877727 - DNA, 25 bp, Homo sapien
ccagttttgtccagctctattatct

SEQ ID NO: 1877728 - DNA, 25 bp, Homo sapien
tcaatttgaaataagactgtgtcca

SEQ ID NO: 1877729 - DNA, 25 bp, Homo sapien
gtctgttcagcctgagtaagccagt

SEQ ID NO: 1877730 - DNA, 25 bp, Homo sapien
tggccgagaagctacatttagggtc

SEQ ID NO: 1877731 - DNA, 25 bp, Homo sapien
gagaattgtggaactccattgccaa

SEQ ID NO: 1877732 - DNA, 25 bp, Homo sapien
gcagattttgggcatcttgcaagca

SEQ ID NO: 1877733 - DNA, 25 bp, Homo sapien
tgcaagcatctgctggcctttctgc

SEQ ID NO: 1877734 - DNA, 25 bp, Homo sapien
tgagtttggtttccaccgattccca

SEQ ID NO: 1877735 - DNA, 25 bp, Homo sapien
tctgcatcagactcttatatgtttc

SEQ ID NO: 1877736 - DNA, 25 bp, Homo sapien
tgccaacagatgacgctccgtgtca

SEQ ID NO: 1877737 - DNA, 25 bp, Homo sapien
gctccgtgtcagtcagccactgctg

SEQ ID NO: 1877738 - DNA, 25 bp, Homo sapien
tcccagcggtttagatgccaacaga

SEQ ID NO: 1877739 - DNA, 25 bp, Homo sapien
gcaaatcctcaatttcgccatggaa

SEQ ID NO: 1877740 - DNA, 25 bp, Homo sapien
gcaggaaataagcttcaaacaatcc

SEQ ID NO: 1877741 - DNA, 25 bp, Homo sapien
taggcagttttaagttggggccata

SEQ ID NO: 1877742 - DNA, 25 bp, Homo sapien
tgtcagtttcaagcaggaaataagc

SEQ ID NO: 1877743 - DNA, 25 bp, Homo sapien
aaataagcttcaaacaatcccagcc

SEQ ID NO: 1877744 - DNA, 25 bp, Homo sapien
ccagcgttgatttaaaacctctagc

SEQ ID NO: 1877745 - DNA, 25 bp, Homo sapien
ctggcgcaaggcaccatccagctgc

SEQ ID NO: 1877746 - DNA, 25 bp, Homo sapien
gcacttgattcaattagatcatttc

SEQ ID NO: 1877747 - DNA, 25 bp, Homo sapien
ggactgatgggctaatacatcattt

SEQ ID NO: 1877748 - DNA, 25 bp, Homo sapien
ccagggcatgttggaactgacccaa

SEQ ID NO: 1877749 - DNA, 25 bp, Homo sapien
tgctcacttagcaagccctcggtgt

SEQ ID NO: 1877750 - DNA, 25 bp, Homo sapien
cctcggtgtgtgtcagccatgccag

SEQ ID NO: 1877751 - DNA, 25 bp, Homo sapien
tttcaatggctttagggtctcctcc

SEQ ID NO: 1877752 - DNA, 25 bp, Homo sapien
cattaatgggtcttgaacagtgtgt

SEQ ID NO: 1877753 - DNA, 25 bp, Homo sapien
catttctatctgctgttgataggcc

SEQ ID NO: 1877754 - DNA, 25 bp, Homo sapien
ctccaggctatcccatatcaatttc

SEQ ID NO: 1877755 - DNA, 25 bp, Homo sapien
gttgataggcctcagacttaaattg

SEQ ID NO: 1877756 - DNA, 25 bp, Homo sapien
tgctgcttgacagtttcgagatctg

SEQ ID NO: 1877757 - DNA, 25 bp, Homo sapien
tgttccaattggagacattgaagct

SEQ ID NO: 1877758 - DNA, 25 bp, Homo sapien
gaagctaatttaccacctgcaatat

SEQ ID NO: 1877759 - DNA, 25 bp, Homo sapien
gcaatatctacccagtcaaataccg

SEQ ID NO: 1877760 - DNA, 25 bp, Homo sapien
cactggcagatcttgaggtggtgcc

SEQ ID NO: 1877761 - DNA, 25 bp, Homo sapien
ggtgccaatatgtagacatcaatta

SEQ ID NO: 1877762 - DNA, 25 bp, Homo sapien
agcacatacactgtaatccccttac

SEQ ID NO: 1877763 - DNA, 25 bp, Homo sapien
gattcctccttccagctaagaccag

SEQ ID NO: 1877764 - DNA, 25 bp, Homo sapien
tgcagtccatcctggtactgaacgg

SEQ ID NO: 1877765 - DNA, 25 bp, Homo sapien
gtactgaacggcagcctgcattgcc

SEQ ID NO: 1877766 - DNA, 25 bp, Homo sapien
tgcctcctcaagtttgtcaatccgg

SEQ ID NO: 1877767 - DNA, 25 bp, Homo sapien
tttgtcaatccggtctttccaagct

SEQ ID NO: 1877768 - DNA, 25 bp, Homo sapien
atttagagaatcccatgctgaattt

SEQ ID NO: 1877769 - DNA, 25 bp, Homo sapien
tttagagaatcccatgctgaattta

SEQ ID NO: 1877770 - DNA, 25 bp, Homo sapien
ctacaagatgtatgttagaattctt

SEQ ID NO: 1877771 - DNA, 25 bp, Homo sapien
attctgataagtaagccagttgtac

SEQ ID NO: 1877772 - DNA, 25 bp, Homo sapien
cattctgataagtaagccagttgta

SEQ ID NO: 1877773 - DNA, 25 bp, Homo sapien
aatgggtttatcaggctccccacat

SEQ ID NO: 1877774 - DNA, 25 bp, Homo sapien
ggttaataactatatccagctcctc

SEQ ID NO: 1877775 - DNA, 25 bp, Homo sapien
tgagttcagaacctaggttaataac

SEQ ID NO: 1877776 - DNA, 25 bp, Homo sapien
catctatactcttcttgacaatggg

SEQ ID NO: 1877777 - DNA, 25 bp, Homo sapien
tactactgaaggatcaattccagga

SEQ ID NO: 1877778 - DNA, 25 bp, Homo sapien
tatcaatgacatgtgatcacaccag

SEQ ID NO: 1877779 - DNA, 25 bp, Homo sapien
caggtcccggatgaaatcttgagta

SEQ ID NO: 1877780 - DNA, 25 bp, Homo sapien
gaacttttctgctagctccatcaca

SEQ ID NO: 1877781 - DNA, 25 bp, Homo sapien
tcagacgttccacgatgcgttccag

SEQ ID NO: 1877782 - DNA, 25 bp, Homo sapien
ccagatctagcaatcatttcctctc

SEQ ID NO: 1877783 - DNA, 25 bp, Homo sapien
caacctctgcagagatagagggtgg

SEQ ID NO: 1877784 - DNA, 25 bp, Homo sapien
tgtttaagagtttcatacaacggct

SEQ ID NO: 1877785 - DNA, 25 bp, Homo sapien
tcttatctatatgaggcttgtgttc

SEQ ID NO: 1877786 - DNA, 25 bp, Homo sapien
tttgactgtaaagggtgtcggctgc

SEQ ID NO: 1877787 - DNA, 25 bp, Homo sapien
tgttcagctatcaactcacgcagtt

SEQ ID NO: 1877788 - DNA, 25 bp, Homo sapien
aatggcttcatccagtgccacagca

SEQ ID NO: 1877789 - DNA, 25 bp, Homo sapien
tagagtttcatattcaagggctggg

SEQ ID NO: 1877790 - DNA, 25 bp, Homo sapien
aatctggcagatggtatcatagttc

SEQ ID NO: 1877791 - DNA, 25 bp, Homo sapien
gccaaagttcttcatatgtttccca

SEQ ID NO: 1877792 - DNA, 25 bp, Homo sapien
gattgtgtttctgtcagccatggcc

SEQ ID NO: 1877793 - DNA, 25 bp, Homo sapien
gcggtcatgattttatgcccagatt

SEQ ID NO: 1877794 - DNA, 25 bp, Homo sapien
ctcttcactgcatgcggtcatgatt

SEQ ID NO: 1877795 - DNA, 25 bp, Homo sapien
tcaataatatccttgtgtctcaaaa

SEQ ID NO: 1877796 - DNA, 25 bp, Homo sapien
tttaacaaggtcatcaataatatcc

SEQ ID NO: 1877797 - DNA, 25 bp, Homo sapien
aataattcatatggcaattggaaat

SEQ ID NO: 1877798 - DNA, 25 bp, Homo sapien
cagcaaataattcatatggcaattg

SEQ ID NO: 1877799 - DNA, 25 bp, Homo sapien
tcatatggcaattggaaatgtattt

SEQ ID NO: 1877800 - DNA, 25 bp, Homo sapien
atatggcaattggaaatgtatttct

SEQ ID NO: 1877801 - DNA, 25 bp, Homo sapien
gtcacccagagacatcaattttttt

SEQ ID NO: 1877802 - DNA, 25 bp, Homo sapien
tcttgctcaagcctgatgtcaccca

SEQ ID NO: 1877803 - DNA, 25 bp, Homo sapien
ttgaacttgaagctgagcagaagtc

SEQ ID NO: 1877804 - DNA, 25 bp, Homo sapien
cttgaagctgagcagaagtctggtc

SEQ ID NO: 1877805 - DNA, 25 bp, Homo sapien
caaatctcatttccgtaggagatgt

SEQ ID NO: 1877806 - DNA, 25 bp, Homo sapien
tctcatttccgtaggagatgtttcc

SEQ ID NO: 1877807 - DNA, 25 bp, Homo sapien
acaaatctcatttccgtaggagatg

SEQ ID NO: 1877808 - DNA, 25 bp, Homo sapien
catttccgtaggagatgtttccttc

SEQ ID NO: 1877809 - DNA, 25 bp, Homo sapien
atatgtgtagacaaaagcattttgt

SEQ ID NO: 1877810 - DNA, 25 bp, Homo sapien
aattaatatcagcaatatgcatatg

SEQ ID NO: 1877811 - DNA, 25 bp, Homo sapien
gctgatcttcgcagtgtctgacttg

SEQ ID NO: 1877812 - DNA, 25 bp, Homo sapien
tacagattagacttagtcaatacat

SEQ ID NO: 1877813 - DNA, 25 bp, Homo sapien
gatggtgtcgctcactaatcggtag

SEQ ID NO: 1877814 - DNA, 25 bp, Homo sapien
taatcggtagcgctcattgtcctca

SEQ ID NO: 1877815 - DNA, 25 bp, Homo sapien
gaatggctgcatcgatctcctccac

SEQ ID NO: 1877816 - DNA, 25 bp, Homo sapien
tgtcctcagctaccattttctcaag

SEQ ID NO: 1877817 - DNA, 25 bp, Homo sapien
agcactgctcacttcattaagggag

SEQ ID NO: 1877818 - DNA, 25 bp, Homo sapien
tgctcacttcattaagggagtccag

SEQ ID NO: 1877819 - DNA, 25 bp, Homo sapien
ctccatggtaccagttccagcaaag

SEQ ID NO: 1877820 - DNA, 25 bp, Homo sapien
tcacttcattaagggagtccagtaa

SEQ ID NO: 1877821 - DNA, 25 bp, Homo sapien
catcagtgctcagtttagtaatgtc

SEQ ID NO: 1877822 - DNA, 25 bp, Homo sapien
tttgtccagccaggtacacagctct

SEQ ID NO: 1877823 - DNA, 25 bp, Homo sapien
tgtgtggagtgcagccgccttgcaa

SEQ ID NO: 1877824 - DNA, 25 bp, Homo sapien
agcgcctgttccagagtcttggcca

SEQ ID NO: 1877825 - DNA, 25 bp, Homo sapien
tagtaaagcctgatctacattttgt

SEQ ID NO: 1877826 - DNA, 25 bp, Homo sapien
gtaaagcctgatctacattttgttt

SEQ ID NO: 1877827 - DNA, 25 bp, Homo sapien
agtaaagcctgatctacattttgtt

SEQ ID NO: 1877828 - DNA, 25 bp, Homo sapien
ttagtaaagcctgatctacattttg

SEQ ID NO: 1877829 - DNA, 25 bp, Homo sapien
gcccctcagtgctgtaatcctggac

SEQ ID NO: 1877830 - DNA, 25 bp, Homo sapien
ccctcagtgctgtaatcctggactg

SEQ ID NO: 1877831 - DNA, 25 bp, Homo sapien
cccctcagtgctgtaatcctggact

SEQ ID NO: 1877832 - DNA, 25 bp, Homo sapien
cttccccaaaaatcttagcattaca

SEQ ID NO: 1877833 - DNA, 25 bp, Homo sapien
ttacataaggcctgctggaggagct

SEQ ID NO: 1877834 - DNA, 25 bp, Homo sapien
tctcttgaatctcaatgtaccatac

SEQ ID NO: 1877835 - DNA, 25 bp, Homo sapien
ggagctcagacctgctgtgactttt

SEQ ID NO: 1877836 - DNA, 25 bp, Homo sapien
ctggagctcaaaacctttaaggact

SEQ ID NO: 1877837 - DNA, 25 bp, Homo sapien
gtctaatttactctgcaccatatct

SEQ ID NO: 1877838 - DNA, 25 bp, Homo sapien
tactctgcaccatatctttatcctc

SEQ ID NO: 1877839 - DNA, 25 bp, Homo sapien
gccaatgctaacagcctggtgtaaa

SEQ ID NO: 1877840 - DNA, 25 bp, Homo sapien
cgttcagtggttctaaggtttcatg

SEQ ID NO: 1877841 - DNA, 25 bp, Homo sapien
tgctgtgctaccaccgagatacctt

SEQ ID NO: 1877842 - DNA, 25 bp, Homo sapien
cagcctcttttctatggttgtaagc

SEQ ID NO: 1877843 - DNA, 25 bp, Homo sapien
tgcttgggttcctatgggttcacaa

SEQ ID NO: 1877844 - DNA, 25 bp, Homo sapien
tcttcactttatctgcgggctctgc

SEQ ID NO: 1877845 - DNA, 25 bp, Homo sapien
cgtagattttcggtcatccaacaat

SEQ ID NO: 1877846 - DNA, 25 bp, Homo sapien
caagagactgagctgtttcaaaatc

SEQ ID NO: 1877847 - DNA, 25 bp, Homo sapien
tctccttctcgtttgattacctcca

SEQ ID NO: 1877848 - DNA, 25 bp, Homo sapien
ttgtatctgggcctttaccactttg

SEQ ID NO: 1877849 - DNA, 25 bp, Homo sapien
gggcctttaccactttgaactcagc

SEQ ID NO: 1877850 - DNA, 25 bp, Homo sapien
taccactttgaactcagccgacggg

SEQ ID NO: 1877851 - DNA, 25 bp, Homo sapien
tatctgggcctttaccactttgaac

SEQ ID NO: 1877852 - DNA, 25 bp, Homo sapien
ctcctgcagctgggctgctcgctga

SEQ ID NO: 1877853 - DNA, 25 bp, Homo sapien
gcagctgggctgctcgctgagccac

SEQ ID NO: 1877854 - DNA, 25 bp, Homo sapien
cctgcagctgggctgctcgctgagc

SEQ ID NO: 1877855 - DNA, 25 bp, Homo sapien
tgcagctgggctgctcgctgagcca

SEQ ID NO: 1877856 - DNA, 25 bp, Homo sapien
cccaaagtatcgatagtaggcagga

SEQ ID NO: 1877857 - DNA, 25 bp, Homo sapien
gcttattttcccgtgtggtcacaaa

SEQ ID NO: 1877858 - DNA, 25 bp, Homo sapien
gttaccatcacagtcaacatagagc

SEQ ID NO: 1877859 - DNA, 25 bp, Homo sapien
gagttatcgtaaaaaacagcacatt

SEQ ID NO: 1877860 - DNA, 25 bp, Homo sapien
tcttattgagagtcttccaccgtgc

SEQ ID NO: 1877861 - DNA, 25 bp, Homo sapien
tccaccgtgcattgacatcatccag

SEQ ID NO: 1877862 - DNA, 25 bp, Homo sapien
tgaataaggccttgacctaaccagt

SEQ ID NO: 1877863 - DNA, 25 bp, Homo sapien
cctgagtgctagtgcttttggcagc

SEQ ID NO: 1877864 - DNA, 25 bp, Homo sapien
catgggcaaggcaatcctaataggc

SEQ ID NO: 1877865 - DNA, 25 bp, Homo sapien
taataggctctcctaagaatggctg

SEQ ID NO: 1877866 - DNA, 25 bp, Homo sapien
tgctagctggcaactgaagcttgag

SEQ ID NO: 1877867 - DNA, 25 bp, Homo sapien
taaaaccaagaagacagtacatgtc

SEQ ID NO: 1877868 - DNA, 25 bp, Homo sapien
cagcacagcaactctggttactctg

SEQ ID NO: 1877869 - DNA, 25 bp, Homo sapien
gcacagcaactctggttactctgta

SEQ ID NO: 1877870 - DNA, 25 bp, Homo sapien
cagcaactctggttactctgtagtc

SEQ ID NO: 1877871 - DNA, 25 bp, Homo sapien
aactctggttactctgtagtcattg

SEQ ID NO: 1877872 - DNA, 25 bp, Homo sapien
agcagaaccgcaaacttttgacact

SEQ ID NO: 1877873 - DNA, 25 bp, Homo sapien
gacactgcagagtttcatatttcca

SEQ ID NO: 1877874 - DNA, 25 bp, Homo sapien
tagcagaaccgcaaacttttgacac

SEQ ID NO: 1877875 - DNA, 25 bp, Homo sapien
ttagcagaaccgcaaacttttgaca

SEQ ID NO: 1877876 - DNA, 25 bp, Homo sapien
ccaactgaaagccattgcagactgt

SEQ ID NO: 1877877 - DNA, 25 bp, Homo sapien
cccctgtttttctgggtgctgcttt

SEQ ID NO: 1877878 - DNA, 25 bp, Homo sapien
ctgggcccctgtttttctgggtgct

SEQ ID NO: 1877879 - DNA, 25 bp, Homo sapien
tgggcccctgtttttctgggtgctg

SEQ ID NO: 1877880 - DNA, 25 bp, Homo sapien
ggcccctgtttttctgggtgctgct

SEQ ID NO: 1877881 - DNA, 25 bp, Homo sapien
tcaagagttccctactttgtgctgt

SEQ ID NO: 1877882 - DNA, 25 bp, Homo sapien
gcaggcaacaattttcatcgtggat

SEQ ID NO: 1877883 - DNA, 25 bp, Homo sapien
ttgaaattttcatcagggtgggcac

SEQ ID NO: 1877884 - DNA, 25 bp, Homo sapien
ggcataattaatgggtcacacttca

SEQ ID NO: 1877885 - DNA, 25 bp, Homo sapien
tcctcctccgaagtgagagaattag

SEQ ID NO: 1877886 - DNA, 25 bp, Homo sapien
ctctctgctggagggctacataaac

SEQ ID NO: 1877887 - DNA, 25 bp, Homo sapien
caaacttttaattcgtgactggtct

SEQ ID NO: 1877888 - DNA, 25 bp, Homo sapien
gaaagcagtgggattttctgttcgc

SEQ ID NO: 1877889 - DNA, 25 bp, Homo sapien
taaaatgcctggaagatagactacc

SEQ ID NO: 1877890 - DNA, 25 bp, Homo sapien
gtttgttagcttcccgacctctcag

SEQ ID NO: 1877891 - DNA, 25 bp, Homo sapien
cataatccataaaattggccgggac

SEQ ID NO: 1877892 - DNA, 25 bp, Homo sapien
tatcatagattgaccgctgtgggac

SEQ ID NO: 1877893 - DNA, 25 bp, Homo sapien
ttgcagatagttaaaacaaatattg

SEQ ID NO: 1877894 - DNA, 25 bp, Homo sapien
tgcagctcttgacacagataagaaa

SEQ ID NO: 1877895 - DNA, 25 bp, Homo sapien
aaatattgcagctcttgacacagat

SEQ ID NO: 1877896 - DNA, 25 bp, Homo sapien
tttgcagatagttaaaacaaatatt

SEQ ID NO: 1877897 - DNA, 25 bp, Homo sapien
taacagtggctcaaacactcagaac

SEQ ID NO: 1877898 - DNA, 25 bp, Homo sapien
taaagatggcttgcagaactccacc

SEQ ID NO: 1877899 - DNA, 25 bp, Homo sapien
gcagagctctggttaactgtaatcc

SEQ ID NO: 1877900 - DNA, 25 bp, Homo sapien
tgaatgttaatttcggcagagctct

SEQ ID NO: 1877901 - DNA, 25 bp, Homo sapien
accagacttttagacacccagggca

SEQ ID NO: 1877902 - DNA, 25 bp, Homo sapien
taaggcacaggcagcgtaattcaca

SEQ ID NO: 1877903 - DNA, 25 bp, Homo sapien
aattgcagcaacgaagagctccgcg

SEQ ID NO: 1877904 - DNA, 25 bp, Homo sapien
tgaaccaagttctgtggccgcggta

SEQ ID NO: 1877905 - DNA, 25 bp, Homo sapien
ccgagaggctgcaatgtaacagctt

SEQ ID NO: 1877906 - DNA, 25 bp, Homo sapien
taacagcttgtggtgacatcagcgc

SEQ ID NO: 1877907 - DNA, 25 bp, Homo sapien
tgcaatgtaacagcttgtggtgaca

SEQ ID NO: 1877908 - DNA, 25 bp, Homo sapien
tgacatcagcgcaaagcaggccgag

SEQ ID NO: 1877909 - DNA, 25 bp, Homo sapien
ttgctgaatttcaataaaatcaatc

SEQ ID NO: 1877910 - DNA, 25 bp, Homo sapien
gggagacacccgcaaatagcagcac

SEQ ID NO: 1877911 - DNA, 25 bp, Homo sapien
catttttcactgtacttgggaacac

SEQ ID NO: 1877912 - DNA, 25 bp, Homo sapien
actttgtccattgtcttacaagtag

SEQ ID NO: 1877913 - DNA, 25 bp, Homo sapien
tagcagcaccagtattattactttg

SEQ ID NO: 1877914 - DNA, 25 bp, Homo sapien
ggctcaaatattgtatgacaatcat

SEQ ID NO: 1877915 - DNA, 25 bp, Homo sapien
caaatattgtatgacaatcattatt

SEQ ID NO: 1877916 - DNA, 25 bp, Homo sapien
aattagaaacttcattgacaataaa

SEQ ID NO: 1877917 - DNA, 25 bp, Homo sapien
tcattctggctcaaatattgtatga

SEQ ID NO: 1877918 - DNA, 25 bp, Homo sapien
gcattgtttgcttaaggcctccaag

SEQ ID NO: 1877919 - DNA, 25 bp, Homo sapien
ttcatacatatgagactgagcggtc

SEQ ID NO: 1877920 - DNA, 25 bp, Homo sapien
aattgatgagagcttgcacaggccg

SEQ ID NO: 1877921 - DNA, 25 bp, Homo sapien
catttgtctatccatggccagagag

SEQ ID NO: 1877922 - DNA, 25 bp, Homo sapien
tctgtcactcaattgccctgttagg

SEQ ID NO: 1877923 - DNA, 25 bp, Homo sapien
tcacaatcccacgtaaagaagggtc

SEQ ID NO: 1877924 - DNA, 25 bp, Homo sapien
catagcatcagggtgcgtgctcaca

SEQ ID NO: 1877925 - DNA, 25 bp, Homo sapien
tccgagtggcgaattcttgcagcaa

SEQ ID NO: 1877926 - DNA, 25 bp, Homo sapien
cagtctggaactgggttagattatt

SEQ ID NO: 1877927 - DNA, 25 bp, Homo sapien
cccaagaacactgaccataagttct

SEQ ID NO: 1877928 - DNA, 25 bp, Homo sapien
caagccactgtttcaattgggcctc

SEQ ID NO: 1877929 - DNA, 25 bp, Homo sapien
gtcaattgacaagggcccaagaaca

SEQ ID NO: 1877930 - DNA, 25 bp, Homo sapien
tcaactcctgtactttgtttacatt

SEQ ID NO: 1877931 - DNA, 25 bp, Homo sapien
ttcaactcctgtactttgtttacat

SEQ ID NO: 1877932 - DNA, 25 bp, Homo sapien
tttcaactcctgtactttgtttaca

SEQ ID NO: 1877933 - DNA, 25 bp, Homo sapien
caactcctgtactttgtttacattc

SEQ ID NO: 1877934 - DNA, 25 bp, Homo sapien
atcattgcacttgattcttcctgag

SEQ ID NO: 1877935 - DNA, 25 bp, Homo sapien
tggagagtttagtgttcagttccgc

SEQ ID NO: 1877936 - DNA, 25 bp, Homo sapien
taagaggccaagatcttcataacca

SEQ ID NO: 1877937 - DNA, 25 bp, Homo sapien
cctgagccttttgcaatttggagag

SEQ ID NO: 1877938 - DNA, 25 bp, Homo sapien
aattcctcagtatttgtggctgttc

SEQ ID NO: 1877939 - DNA, 25 bp, Homo sapien
cctcagtatttgtggctgttccttc

SEQ ID NO: 1877940 - DNA, 25 bp, Homo sapien
ctttatttgcccaaaattcctcagt

SEQ ID NO: 1877941 - DNA, 25 bp, Homo sapien
tatttgtggctgttccttcaccatt

SEQ ID NO: 1877942 - DNA, 25 bp, Homo sapien
gtacagatacattcccagcacagtg

SEQ ID NO: 1877943 - DNA, 25 bp, Homo sapien
caaaattgacatgagtaaacctgat

SEQ ID NO: 1877944 - DNA, 25 bp, Homo sapien
ttgaatatgatctgttcccttcccc

SEQ ID NO: 1877945 - DNA, 25 bp, Homo sapien
cagcacagtgtgcttacagatgcca

SEQ ID NO: 1877946 - DNA, 25 bp, Homo sapien
tcacagcacttattaagttacatag

SEQ ID NO: 1877947 - DNA, 25 bp, Homo sapien
gatcccactgttgtttactttctga

SEQ ID NO: 1877948 - DNA, 25 bp, Homo sapien
ttattaagttacatagtgagatccc

SEQ ID NO: 1877949 - DNA, 25 bp, Homo sapien
tttaactgctgctattgcctttgca

SEQ ID NO: 1877950 - DNA, 25 bp, Homo sapien
ttaacggttgggtatgtatggccca

SEQ ID NO: 1877951 - DNA, 25 bp, Homo sapien
cagcccaggtgactgttatctcagt

SEQ ID NO: 1877952 - DNA, 25 bp, Homo sapien
taaaatcctagccaaagtgggagtc

SEQ ID NO: 1877953 - DNA, 25 bp, Homo sapien
caaaggtttcagaagtggcaagtaa

SEQ ID NO: 1877954 - DNA, 25 bp, Homo sapien
tatccatgacttcaatgatttaaca

SEQ ID NO: 1877955 - DNA, 25 bp, Homo sapien
gttcttgacaagaagttacagcttc

SEQ ID NO: 1877956 - DNA, 25 bp, Homo sapien
tttcctaaatcctctgcaccaaaag

SEQ ID NO: 1877957 - DNA, 25 bp, Homo sapien
tgcaccaaaagaaggctgtacaatg

SEQ ID NO: 1877958 - DNA, 25 bp, Homo sapien
cagataagaatgcactgcagctgga

SEQ ID NO: 1877959 - DNA, 25 bp, Homo sapien
gatgacacgtacatatatgcaagcg

SEQ ID NO: 1877960 - DNA, 25 bp, Homo sapien
tacatctggcatgtggatgacacgt

SEQ ID NO: 1877961 - DNA, 25 bp, Homo sapien
tatgcaagcgtgcagaatactggca

SEQ ID NO: 1877962 - DNA, 25 bp, Homo sapien
ttttcaaggaccaaagccttatcac

SEQ ID NO: 1877963 - DNA, 25 bp, Homo sapien
tttctttgatggtatcctccatttc

SEQ ID NO: 1877964 - DNA, 25 bp, Homo sapien
taagccatggctggatatctccttc

SEQ ID NO: 1877965 - DNA, 25 bp, Homo sapien
cttcaagagactatgcaaaacttca

SEQ ID NO: 1877966 - DNA, 25 bp, Homo sapien
gcagtggatggatctgttgtttcca

SEQ ID NO: 1877967 - DNA, 25 bp, Homo sapien
tgaaaaccgagcagacaagtctttc

SEQ ID NO: 1877968 - DNA, 25 bp, Homo sapien
tcattttggcttgcagtgaggatgc

SEQ ID NO: 1877969 - DNA, 25 bp, Homo sapien
gacgacctgcaatatcctgttccaa

SEQ ID NO: 1877970 - DNA, 25 bp, Homo sapien
gcagtagagtttaaaggcacttgac

SEQ ID NO: 1877971 - DNA, 25 bp, Homo sapien
tgaagagcagtagagtttaaaggca

SEQ ID NO: 1877972 - DNA, 25 bp, Homo sapien
aatatcctgaagagcagtagagttt

SEQ ID NO: 1877973 - DNA, 25 bp, Homo sapien
tcctgaagagcagtagagtttaaag

SEQ ID NO: 1877974 - DNA, 25 bp, Homo sapien
ttcgttcattaacagacttggacag

SEQ ID NO: 1877975 - DNA, 25 bp, Homo sapien
gcatttcatccaagccatcctgcac

SEQ ID NO: 1877976 - DNA, 25 bp, Homo sapien
tgcacactcagtgaacgggtcaagg

SEQ ID NO: 1877977 - DNA, 25 bp, Homo sapien
cttggacagatcctcatatctccca

SEQ ID NO: 1877978 - DNA, 25 bp, Homo sapien
actccaaacagatcaggaatattaa

SEQ ID NO: 1877979 - DNA, 25 bp, Homo sapien
ctactccaaacagatcaggaatatt

SEQ ID NO: 1877980 - DNA, 25 bp, Homo sapien
tactccaaacagatcaggaatatta

SEQ ID NO: 1877981 - DNA, 25 bp, Homo sapien
ctccaaacagatcaggaatattaac

SEQ ID NO: 1877982 - DNA, 25 bp, Homo sapien
gacaggaagcaaggacatgaatatc

SEQ ID NO: 1877983 - DNA, 25 bp, Homo sapien
tgagacaggaagcaaggacatgaat

SEQ ID NO: 1877984 - DNA, 25 bp, Homo sapien
ctgtgagacaggaagcaaggacatg

SEQ ID NO: 1877985 - DNA, 25 bp, Homo sapien
tgtgagacaggaagcaaggacatga

SEQ ID NO: 1877986 - DNA, 25 bp, Homo sapien
tggatatcattcttggctggaagta

SEQ ID NO: 1877987 - DNA, 25 bp, Homo sapien
gacttgatatctgtccttgcaaagc

SEQ ID NO: 1877988 - DNA, 25 bp, Homo sapien
ttcttggctggaagtaaagatcccc

SEQ ID NO: 1877989 - DNA, 25 bp, Homo sapien
acagcaacctgctgacttgatatct

SEQ ID NO: 1877990 - DNA, 25 bp, Homo sapien
aatgcaatcctcaatgttcaaggga

SEQ ID NO: 1877991 - DNA, 25 bp, Homo sapien
attgaaatgcaatcctcaatgttca

SEQ ID NO: 1877992 - DNA, 25 bp, Homo sapien
gaaatgcaatcctcaatgttcaagg

SEQ ID NO: 1877993 - DNA, 25 bp, Homo sapien
gcaatcctcaatgttcaagggagaa

SEQ ID NO: 1877994 - DNA, 25 bp, Homo sapien
attgcttttgtcaggtttatcaaag

SEQ ID NO: 1877995 - DNA, 25 bp, Homo sapien
cttttgtcaggtttatcaaagatcg

SEQ ID NO: 1877996 - DNA, 25 bp, Homo sapien
ggatagttgtagatacgcggtgtta

SEQ ID NO: 1877997 - DNA, 25 bp, Homo sapien
tgcttttgtcaggtttatcaaagat

SEQ ID NO: 1877998 - DNA, 25 bp, Homo sapien
ggagcatttagagaacgggcagatt

SEQ ID NO: 1877999 - DNA, 25 bp, Homo sapien
gacgatcaaactactccgagctaca

SEQ ID NO: 1878000 - DNA, 25 bp, Homo sapien
ccgagctacaggaggaaattcaaac

SEQ ID NO: 1878001 - DNA, 25 bp, Homo sapien
aactctaaaaagtggagtgcctctc

SEQ ID NO: 1878002 - DNA, 25 bp, Homo sapien
gaaactctaaaaagtggagtgcctc

SEQ ID NO: 1878003 - DNA, 25 bp, Homo sapien
gggtccaccgcaataggttcagata

SEQ ID NO: 1878004 - DNA, 25 bp, Homo sapien
cttcatagtgttgatatttatccac

SEQ ID NO: 1878005 - DNA, 25 bp, Homo sapien
accgcaataggttcagataagtgtt

SEQ ID NO: 1878006 - DNA, 25 bp, Homo sapien
gataagtgtttgctcgctgtggcct

SEQ ID NO: 1878007 - DNA, 25 bp, Homo sapien
cactgcttggtgctgagagatgatc

SEQ ID NO: 1878008 - DNA, 25 bp, Homo sapien
tagccagtgctcaaactcggtatag

SEQ ID NO: 1878009 - DNA, 25 bp, Homo sapien
gagagacctgaaccgatcagtagca

SEQ ID NO: 1878010 - DNA, 25 bp, Homo sapien
tgcagaagtatcaaccttgccaccg

SEQ ID NO: 1878011 - DNA, 25 bp, Homo sapien
gattcagattctcctgagtggttcc

SEQ ID NO: 1878012 - DNA, 25 bp, Homo sapien
tccaattgctgacttgccatcacct

SEQ ID NO: 1878013 - DNA, 25 bp, Homo sapien
gagtggttccaacttgcccatcaac

SEQ ID NO: 1878014 - DNA, 25 bp, Homo sapien
catttgacaaccagtccaaaaggtt

SEQ ID NO: 1878015 - DNA, 25 bp, Homo sapien
tgttgtcacaactttatccagctcc

SEQ ID NO: 1878016 - DNA, 25 bp, Homo sapien
tatcttcctgtgacagcttttcacc

SEQ ID NO: 1878017 - DNA, 25 bp, Homo sapien
tgcctgtgcacttccttgcatatct

SEQ ID NO: 1878018 - DNA, 25 bp, Homo sapien
tgtttttcactacttcagccaatgc

SEQ ID NO: 1878019 - DNA, 25 bp, Homo sapien
catctccaatcatgaaggcttcttg

SEQ ID NO: 1878020 - DNA, 25 bp, Homo sapien
tatactcctgctgacgctctgctac

SEQ ID NO: 1878021 - DNA, 25 bp, Homo sapien
ggtaagaagatcacatatcccttgg

SEQ ID NO: 1878022 - DNA, 25 bp, Homo sapien
aggcttcttggtgaccaattaggcg

SEQ ID NO: 1878023 - DNA, 25 bp, Homo sapien
tgagtctctaaacgttccacctggg

SEQ ID NO: 1878024 - DNA, 25 bp, Homo sapien
tccacctgggtagttactgactcct

SEQ ID NO: 1878025 - DNA, 25 bp, Homo sapien
gagttgtatttaagagcctcagcag

SEQ ID NO: 1878026 - DNA, 25 bp, Homo sapien
tctccagctgcattttggtatgtcc

SEQ ID NO: 1878027 - DNA, 25 bp, Homo sapien
gaatcttgaacattcacaatctcaa

SEQ ID NO: 1878028 - DNA, 25 bp, Homo sapien
tcttctctgatacccaatctgagaa

SEQ ID NO: 1878029 - DNA, 25 bp, Homo sapien
tctgatacccaatctgagaatgact

SEQ ID NO: 1878030 - DNA, 25 bp, Homo sapien
ttctctgatacccaatctgagaatg

SEQ ID NO: 1878031 - DNA, 25 bp, Homo sapien
ggtggctaatactcaattcttcaac

SEQ ID NO: 1878032 - DNA, 25 bp, Homo sapien
cagcaattggagctaatcccaattc

SEQ ID NO: 1878033 - DNA, 25 bp, Homo sapien
ctgtttcgttctttctgaagacacg

SEQ ID NO: 1878034 - DNA, 25 bp, Homo sapien
catttcagagtcgatcgcaagcatg

SEQ ID NO: 1878035 - DNA, 25 bp, Homo sapien
tgtaaacactgctgtaattcactgg

SEQ ID NO: 1878036 - DNA, 25 bp, Homo sapien
taaggggggtttcatatcttgaagc

SEQ ID NO: 1878037 - DNA, 25 bp, Homo sapien
taaacactgctgtaattcactggaa

SEQ ID NO: 1878038 - DNA, 25 bp, Homo sapien
gtgctgtaaacactgctgtaattca

SEQ ID NO: 1878039 - DNA, 25 bp, Homo sapien
atgtatgggattattctcacatggt

SEQ ID NO: 1878040 - DNA, 25 bp, Homo sapien
tatgggattattctcacatggttca

SEQ ID NO: 1878041 - DNA, 25 bp, Homo sapien
tgtatgggattattctcacatggtt

SEQ ID NO: 1878042 - DNA, 25 bp, Homo sapien
gtatgggattattctcacatggttc

SEQ ID NO: 1878043 - DNA, 25 bp, Homo sapien
tgttcggttgagctatctccagaag

SEQ ID NO: 1878044 - DNA, 25 bp, Homo sapien
tctctaggtcatactccatatgagt

SEQ ID NO: 1878045 - DNA, 25 bp, Homo sapien
caagctgcagtggaagtactttaga

SEQ ID NO: 1878046 - DNA, 25 bp, Homo sapien
tgattaaagtctccaacatgttcta

SEQ ID NO: 1878047 - DNA, 25 bp, Homo sapien
gctgggcacagtagatgcctcattt

SEQ ID NO: 1878048 - DNA, 25 bp, Homo sapien
atttgagagtcgctgggcacagtag

SEQ ID NO: 1878049 - DNA, 25 bp, Homo sapien
tatattaaggagaagctcagactta

SEQ ID NO: 1878050 - DNA, 25 bp, Homo sapien
aggagaagctcagacttaagatttc

SEQ ID NO: 1878051 - DNA, 25 bp, Homo sapien
tcatatgaccttctttcaacctgct

SEQ ID NO: 1878052 - DNA, 25 bp, Homo sapien
cctcttgagggttcatatgaccttc

SEQ ID NO: 1878053 - DNA, 25 bp, Homo sapien
ggttcttcaacctcttgagggttca

SEQ ID NO: 1878054 - DNA, 25 bp, Homo sapien
ttctttcaacctgctttttaagata

SEQ ID NO: 1878055 - DNA, 25 bp, Homo sapien
ctgagacaattcaggaatctgaacc

SEQ ID NO: 1878056 - DNA, 25 bp, Homo sapien
aggaatctgaacctccttttcttgg

SEQ ID NO: 1878057 - DNA, 25 bp, Homo sapien
gttcttttggtagctgttgctcaat

SEQ ID NO: 1878058 - DNA, 25 bp, Homo sapien
gggatcttggagacaaggcttgttc

SEQ ID NO: 1878059 - DNA, 25 bp, Homo sapien
caatactttctggtgtgaactgaga

SEQ ID NO: 1878060 - DNA, 25 bp, Homo sapien
tgtgtattcccttcccacgatgtaa

SEQ ID NO: 1878061 - DNA, 25 bp, Homo sapien
ttaaaacatggcttgggacatcttc

SEQ ID NO: 1878062 - DNA, 25 bp, Homo sapien
cagttacagaggctatcaatgacaa

SEQ ID NO: 1878063 - DNA, 25 bp, Homo sapien
gatcaagagatgagtcaacttttgg

SEQ ID NO: 1878064 - DNA, 25 bp, Homo sapien
tgtgatcaagagatgagtcaacttt

SEQ ID NO: 1878065 - DNA, 25 bp, Homo sapien
agagatgagtcaacttttggtgtca

SEQ ID NO: 1878066 - DNA, 25 bp, Homo sapien
cagtacaaatgatgtgatcaagaga

SEQ ID NO: 1878067 - DNA, 25 bp, Homo sapien
acctttgtgtttgctagatcagtac

SEQ ID NO: 1878068 - DNA, 25 bp, Homo sapien
taacctttgtgtttgctagatcagt

SEQ ID NO: 1878069 - DNA, 25 bp, Homo sapien
cccttgaatcaacttaacctttgtg

SEQ ID NO: 1878070 - DNA, 25 bp, Homo sapien
cttgaatcaacttaacctttgtgtt

SEQ ID NO: 1878071 - DNA, 25 bp, Homo sapien
tcagtgtctttaatgataggcggca

SEQ ID NO: 1878072 - DNA, 25 bp, Homo sapien
ctaattcagaagttgaactgatatt

SEQ ID NO: 1878073 - DNA, 25 bp, Homo sapien
tcatgtgaaatacttgcagggccaa

SEQ ID NO: 1878074 - DNA, 25 bp, Homo sapien
taagtaccatctcatggttcaacag

SEQ ID NO: 1878075 - DNA, 25 bp, Homo sapien
ctggatatccatatcttcagccaca

SEQ ID NO: 1878076 - DNA, 25 bp, Homo sapien
atatcttcagccacattttggcacc

SEQ ID NO: 1878077 - DNA, 25 bp, Homo sapien
ggatatccatatcttcagccacatt

SEQ ID NO: 1878078 - DNA, 25 bp, Homo sapien
gccacattttggcacctgggctttc

SEQ ID NO: 1878079 - DNA, 25 bp, Homo sapien
tcgtcatcctgatcattactgtcat

SEQ ID NO: 1878080 - DNA, 25 bp, Homo sapien
cattactgtcatatatataatcccc

SEQ ID NO: 1878081 - DNA, 25 bp, Homo sapien
catcatcgtcatcctgatcattact

SEQ ID NO: 1878082 - DNA, 25 bp, Homo sapien
ctgtcatatatataatccccataac

SEQ ID NO: 1878083 - DNA, 25 bp, Homo sapien
gaatctaaatgatcagtatcggagt

SEQ ID NO: 1878084 - DNA, 25 bp, Homo sapien
caccttcaaggatatttgtgcattc

SEQ ID NO: 1878085 - DNA, 25 bp, Homo sapien
gtatcggagtgaaattcctgtccag

SEQ ID NO: 1878086 - DNA, 25 bp, Homo sapien
tcagtcaatgagtcagattcatcac

SEQ ID NO: 1878087 - DNA, 25 bp, Homo sapien
taaggaaatcctgaagacaatgtgc

SEQ ID NO: 1878088 - DNA, 25 bp, Homo sapien
tcacacttaagctaccaactggtgc

SEQ ID NO: 1878089 - DNA, 25 bp, Homo sapien
tttctcaacatccataaggaaatcc

SEQ ID NO: 1878090 - DNA, 25 bp, Homo sapien
acacttaagctaccaactggtgccc

SEQ ID NO: 1878091 - DNA, 25 bp, Homo sapien
agtgtgtcgtagtcctcagggtgca

SEQ ID NO: 1878092 - DNA, 25 bp, Homo sapien
catcatcttcaaacaagggagtatc

SEQ ID NO: 1878093 - DNA, 25 bp, Homo sapien
tcagggtgcaggcaatcacgatcat

SEQ ID NO: 1878094 - DNA, 25 bp, Homo sapien
catcagcaggagaagccgtctcatc

SEQ ID NO: 1878095 - DNA, 25 bp, Homo sapien
gatgttaatagctgcaattcccaga

SEQ ID NO: 1878096 - DNA, 25 bp, Homo sapien
tagcacaagtaagagacacaatggc

SEQ ID NO: 1878097 - DNA, 25 bp, Homo sapien
gatttctgtccatactgctctcctg

SEQ ID NO: 1878098 - DNA, 25 bp, Homo sapien
tcatcaagcaatggtgtagcacaag

SEQ ID NO: 1878099 - DNA, 25 bp, Homo sapien
aatgagtccaacatagcctcgctga

SEQ ID NO: 1878100 - DNA, 25 bp, Homo sapien
ttgagctagagcatccagtactgga

SEQ ID NO: 1878101 - DNA, 25 bp, Homo sapien
tctacagttaaacgcttggcagggt

SEQ ID NO: 1878102 - DNA, 25 bp, Homo sapien
tcagacctccagaaagaagctgtgc

SEQ ID NO: 1878103 - DNA, 25 bp, Homo sapien
ctttacatctcctgaggtttgtgat

SEQ ID NO: 1878104 - DNA, 25 bp, Homo sapien
catctcctgaggtttgtgattcttg

SEQ ID NO: 1878105 - DNA, 25 bp, Homo sapien
ttacatctcctgaggtttgtgattc

SEQ ID NO: 1878106 - DNA, 25 bp, Homo sapien
tacatctcctgaggtttgtgattct

SEQ ID NO: 1878107 - DNA, 25 bp, Homo sapien
tagtttgaagtgcttccgataattg

SEQ ID NO: 1878108 - DNA, 25 bp, Homo sapien
agtgcttccgataattgttccttct

SEQ ID NO: 1878109 - DNA, 25 bp, Homo sapien
gtctccatgttttgccaaaaaaagc

SEQ ID NO: 1878110 - DNA, 25 bp, Homo sapien
tccttcttggttgatatttcctcac

SEQ ID NO: 1878111 - DNA, 25 bp, Homo sapien
gataaaggtggcctccacccgcagg

SEQ ID NO: 1878112 - DNA, 25 bp, Homo sapien
tgcatctgtcctagtccagccgtgg

SEQ ID NO: 1878113 - DNA, 25 bp, Homo sapien
tgcgcactgcagtcctcaaaaagac

SEQ ID NO: 1878114 - DNA, 25 bp, Homo sapien
tgtgggacactacttccaaagggca

SEQ ID NO: 1878115 - DNA, 25 bp, Homo sapien
tggctttttcaacatgttctttctt

SEQ ID NO: 1878116 - DNA, 25 bp, Homo sapien
tatttgatacccatttttgcaattc

SEQ ID NO: 1878117 - DNA, 25 bp, Homo sapien
tgatatttgatacccatttttgcaa

SEQ ID NO: 1878118 - DNA, 25 bp, Homo sapien
tgctgatatttgatacccatttttg

SEQ ID NO: 1878119 - DNA, 25 bp, Homo sapien
aacattttattcattcacttaacca

SEQ ID NO: 1878120 - DNA, 25 bp, Homo sapien
tattcattcacttaaccatatttac

SEQ ID NO: 1878121 - DNA, 25 bp, Homo sapien
cattttattcattcacttaaccata

SEQ ID NO: 1878122 - DNA, 25 bp, Homo sapien
ttttattcattcacttaaccatatt

SEQ ID NO: 1878123 - DNA, 25 bp, Homo sapien
tgtcacatagcagatgcacctccaa

SEQ ID NO: 1878124 - DNA, 25 bp, Homo sapien
gacaaaaaggtaccatagaaggctg

SEQ ID NO: 1878125 - DNA, 25 bp, Homo sapien
tgcgaagacttaactagaaatggga

SEQ ID NO: 1878126 - DNA, 25 bp, Homo sapien
gagaacgtctactgtacatgtaagg

SEQ ID NO: 1878127 - DNA, 25 bp, Homo sapien
ttgaagcaatctaaaacactgcagc

SEQ ID NO: 1878128 - DNA, 25 bp, Homo sapien
tccatggtgcttcatgacgtgctct

SEQ ID NO: 1878129 - DNA, 25 bp, Homo sapien
cgtgctctttcagcgagtgcaattt

SEQ ID NO: 1878130 - DNA, 25 bp, Homo sapien
cacagactgcatatgtagccgatat

SEQ ID NO: 1878131 - DNA, 25 bp, Homo sapien
aagaatagtagaggctagaaattcc

SEQ ID NO: 1878132 - DNA, 25 bp, Homo sapien
ggaagaatagtagaggctagaaatt

SEQ ID NO: 1878133 - DNA, 25 bp, Homo sapien
taggaagaatagtagaggctagaaa

SEQ ID NO: 1878134 - DNA, 25 bp, Homo sapien
ttaggaagaatagtagaggctagaa

SEQ ID NO: 1878135 - DNA, 25 bp, Homo sapien
gatctttgagttttgtggcaatgag

SEQ ID NO: 1878136 - DNA, 25 bp, Homo sapien
ttctaacagtttaagtcctgtgtgg

SEQ ID NO: 1878137 - DNA, 25 bp, Homo sapien
tatttctgacatatgacttttgatc

SEQ ID NO: 1878138 - DNA, 25 bp, Homo sapien
ctaacagtttaagtcctgtgtggaa

SEQ ID NO: 1878139 - DNA, 25 bp, Homo sapien
gcttcaaggcatcggagggcagtaa

SEQ ID NO: 1878140 - DNA, 25 bp, Homo sapien
taattcacactgtcgcagctgctgg

SEQ ID NO: 1878141 - DNA, 25 bp, Homo sapien
caatttctggaggaacacgaatgcc

SEQ ID NO: 1878142 - DNA, 25 bp, Homo sapien
tattgataaccgagagtgaacctgt

SEQ ID NO: 1878143 - DNA, 25 bp, Homo sapien
tgacttctgtatgcatatcatactg

SEQ ID NO: 1878144 - DNA, 25 bp, Homo sapien
gcatatcatactgcttgttcttagc

SEQ ID NO: 1878145 - DNA, 25 bp, Homo sapien
taatgttgtgacttctgtatgcata

SEQ ID NO: 1878146 - DNA, 25 bp, Homo sapien
tctgtatgcatatcatactgcttgt

SEQ ID NO: 1878147 - DNA, 25 bp, Homo sapien
gactaagacaaagtctagccacaga

SEQ ID NO: 1878148 - DNA, 25 bp, Homo sapien
tttcctgtcagaactacaatgagcc

SEQ ID NO: 1878149 - DNA, 25 bp, Homo sapien
gacattaggtagctgataaggtctc

SEQ ID NO: 1878150 - DNA, 25 bp, Homo sapien
tcaaaccaaggagggttcaggaata

SEQ ID NO: 1878151 - DNA, 25 bp, Homo sapien
tctttctcgagtggagcccctggtg

SEQ ID NO: 1878152 - DNA, 25 bp, Homo sapien
gatcggacacactggcaatgcattt

SEQ ID NO: 1878153 - DNA, 25 bp, Homo sapien
tgttcttgctggagacccgttactg

SEQ ID NO: 1878154 - DNA, 25 bp, Homo sapien
ggttttcaacctcacgcttctgggc

SEQ ID NO: 1878155 - DNA, 25 bp, Homo sapien
taattcaatatttatttgtacatct

SEQ ID NO: 1878156 - DNA, 25 bp, Homo sapien
aattcaatatttatttgtacatctg

SEQ ID NO: 1878157 - DNA, 25 bp, Homo sapien
ctaccggccacataaatttatcatg

SEQ ID NO: 1878158 - DNA, 25 bp, Homo sapien
tgaaacatgttttgctttcccaaac

SEQ ID NO: 1878159 - DNA, 25 bp, Homo sapien
accggccacataaatttatcatgaa

SEQ ID NO: 1878160 - DNA, 25 bp, Homo sapien
aatttatcatgaaacatgttttgct

SEQ ID NO: 1878161 - DNA, 25 bp, Homo sapien
cagggtgctcactgttaatgattac

SEQ ID NO: 1878162 - DNA, 25 bp, Homo sapien
tagttactgctcatctctagctcct

SEQ ID NO: 1878163 - DNA, 25 bp, Homo sapien
ctttatatttacagggtgctcactg

SEQ ID NO: 1878164 - DNA, 25 bp, Homo sapien
cactgtagttactgctcatctctag

SEQ ID NO: 1878165 - DNA, 25 bp, Homo sapien
aatttaatatattgtgtcatgagag

SEQ ID NO: 1878166 - DNA, 25 bp, Homo sapien
ttaatatattgtgtcatgagagtga

SEQ ID NO: 1878167 - DNA, 25 bp, Homo sapien
ccagggcagtatatcgagtccttag

SEQ ID NO: 1878168 - DNA, 25 bp, Homo sapien
cagggcagtatatcgagtccttagg

SEQ ID NO: 1878169 - DNA, 25 bp, Homo sapien
gcattcttcggcgtttcactggaga

SEQ ID NO: 1878170 - DNA, 25 bp, Homo sapien
aataatgagatctgctgaactctgc

SEQ ID NO: 1878171 - DNA, 25 bp, Homo sapien
catggcccggtaggtcattgtttgt

SEQ ID NO: 1878172 - DNA, 25 bp, Homo sapien
ttgttgtgaatctaccatggcccgg

SEQ ID NO: 1878173 - DNA, 25 bp, Homo sapien
tatttttgacactcgtccattttgc

SEQ ID NO: 1878174 - DNA, 25 bp, Homo sapien
tttcatttctatttcggacaccagc

SEQ ID NO: 1878175 - DNA, 25 bp, Homo sapien
gacactcgtccattttgctctgttt

SEQ ID NO: 1878176 - DNA, 25 bp, Homo sapien
tcatttctatttcggacaccagcat

SEQ ID NO: 1878177 - DNA, 25 bp, Homo sapien
catctaaaggatggtaagtgtctct

SEQ ID NO: 1878178 - DNA, 25 bp, Homo sapien
tgttgattcaactgtgtggctaggg

SEQ ID NO: 1878179 - DNA, 25 bp, Homo sapien
tgagtagtttcaacctgctggatcc

SEQ ID NO: 1878180 - DNA, 25 bp, Homo sapien
ttgccaatgccctctaagtcccgta

SEQ ID NO: 1878181 - DNA, 25 bp, Homo sapien
catcctctaaggcatggaatacctg

SEQ ID NO: 1878182 - DNA, 25 bp, Homo sapien
gttgtcaatctgcacatgaacattt

SEQ ID NO: 1878183 - DNA, 25 bp, Homo sapien
gccagtcaaaatcaaggtcccgttc

SEQ ID NO: 1878184 - DNA, 25 bp, Homo sapien
tgccacctttcaactaattgatctg

SEQ ID NO: 1878185 - DNA, 25 bp, Homo sapien
cacacagtttagtttcatagagttt

SEQ ID NO: 1878186 - DNA, 25 bp, Homo sapien
tagtttcatagagttttacgagggc

SEQ ID NO: 1878187 - DNA, 25 bp, Homo sapien
aaagtacttattagattctcaatat

SEQ ID NO: 1878188 - DNA, 25 bp, Homo sapien
catagagttttacgagggcttctgc

SEQ ID NO: 1878189 - DNA, 25 bp, Homo sapien
ttatatattgagatagcagttacat

SEQ ID NO: 1878190 - DNA, 25 bp, Homo sapien
tttatatattgagatagcagttaca

SEQ ID NO: 1878191 - DNA, 25 bp, Homo sapien
ggtagggactgatgaagaggctgct

SEQ ID NO: 1878192 - DNA, 25 bp, Homo sapien
gaatagacttggttcatgttctgaa

SEQ ID NO: 1878193 - DNA, 25 bp, Homo sapien
taagctctgatcgtagggtagggac

SEQ ID NO: 1878194 - DNA, 25 bp, Homo sapien
tgttctgaaggaccacattaagctc

SEQ ID NO: 1878195 - DNA, 25 bp, Homo sapien
cacagttctctaaccgaagtctaat

SEQ ID NO: 1878196 - DNA, 25 bp, Homo sapien
gggagttcgaatctgtctaatcagc

SEQ ID NO: 1878197 - DNA, 25 bp, Homo sapien
gaatctgtctaatcagccgatcttc

SEQ ID NO: 1878198 - DNA, 25 bp, Homo sapien
tctaatgtttcgaacttcagagatg

SEQ ID NO: 1878199 - DNA, 25 bp, Homo sapien
aagaattcgttgtttgtccaaccag

SEQ ID NO: 1878200 - DNA, 25 bp, Homo sapien
ttcccattgagagcaaaaaatagcc

SEQ ID NO: 1878201 - DNA, 25 bp, Homo sapien
cataggctgggtgatacaatatacc

SEQ ID NO: 1878202 - DNA, 25 bp, Homo sapien
aatgctgtccaaagtaatacgttgc

SEQ ID NO: 1878203 - DNA, 25 bp, Homo sapien
gaagttcttgataatactgcttaca

SEQ ID NO: 1878204 - DNA, 25 bp, Homo sapien
ccagttgtgttatatctgagcctga

SEQ ID NO: 1878205 - DNA, 25 bp, Homo sapien
gggattcctggctatcttccagaaa

SEQ ID NO: 1878206 - DNA, 25 bp, Homo sapien
gtagattacttagaacttgctgatg

SEQ ID NO: 1878207 - DNA, 25 bp, Homo sapien
tgaagccacattgctagctcgaatt

SEQ ID NO: 1878208 - DNA, 25 bp, Homo sapien
gagtcaggacattctgatactgttg

SEQ ID NO: 1878209 - DNA, 25 bp, Homo sapien
cattgatgagataatgccaggatac

SEQ ID NO: 1878210 - DNA, 25 bp, Homo sapien
tgtttatgtgagactcatgccaaag

SEQ ID NO: 1878211 - DNA, 25 bp, Homo sapien
tgaccttccatttagcacgatgaga

SEQ ID NO: 1878212 - DNA, 25 bp, Homo sapien
ggaccatagcctcattcccagtagg

SEQ ID NO: 1878213 - DNA, 25 bp, Homo sapien
tgttggcaaggtccaccgcttcttt

SEQ ID NO: 1878214 - DNA, 25 bp, Homo sapien
tggaggaacggtgaagcacacagat

SEQ ID NO: 1878215 - DNA, 25 bp, Homo sapien
aactggtctgtttctaggagttaca

SEQ ID NO: 1878216 - DNA, 25 bp, Homo sapien
gtctgtttctaggagttacaagtac

SEQ ID NO: 1878217 - DNA, 25 bp, Homo sapien
tggtctgtttctaggagttacaagt

SEQ ID NO: 1878218 - DNA, 25 bp, Homo sapien
agaaactggtctgtttctaggagtt

SEQ ID NO: 1878219 - DNA, 25 bp, Homo sapien
tgatcggaatagaagttttgagtgg

SEQ ID NO: 1878220 - DNA, 25 bp, Homo sapien
ttgagtggacagtcagaattccttg

SEQ ID NO: 1878221 - DNA, 25 bp, Homo sapien
tgtagtcacagatagctttgatcgg

SEQ ID NO: 1878222 - DNA, 25 bp, Homo sapien
attccttggcttcagttgaattatt

SEQ ID NO: 1878223 - DNA, 25 bp, Homo sapien
tgtgaatgctgcttgatctatcaca

SEQ ID NO: 1878224 - DNA, 25 bp, Homo sapien
cttccgctgaatggcatcttttaga

SEQ ID NO: 1878225 - DNA, 25 bp, Homo sapien
aaggtcttctagcttgtgaatgctg

SEQ ID NO: 1878226 - DNA, 25 bp, Homo sapien
tcacagctgtacttccgctgaatgg

SEQ ID NO: 1878227 - DNA, 25 bp, Homo sapien
gagctgtaagatccagctccactgc

SEQ ID NO: 1878228 - DNA, 25 bp, Homo sapien
ctcgaaatacgctgtgttctccttt

SEQ ID NO: 1878229 - DNA, 25 bp, Homo sapien
cactgcgtctgcattgccgctctgt

SEQ ID NO: 1878230 - DNA, 25 bp, Homo sapien
atacgctgtgttctcctttatgtgc

SEQ ID NO: 1878231 - DNA, 25 bp, Homo sapien
gcatgacaactttcaggaccagcat

SEQ ID NO: 1878232 - DNA, 25 bp, Homo sapien
tgtcccaactgcataggcaacctga

SEQ ID NO: 1878233 - DNA, 25 bp, Homo sapien
tagtgtacaaaaccacatcccaggc

SEQ ID NO: 1878234 - DNA, 25 bp, Homo sapien
tcctgatgagcctagaattgtacta

SEQ ID NO: 1878235 - DNA, 25 bp, Homo sapien
caacaccattacactttccagcttt

SEQ ID NO: 1878236 - DNA, 25 bp, Homo sapien
aaccaacaccattacactttccagc

SEQ ID NO: 1878237 - DNA, 25 bp, Homo sapien
ttcaaccaacaccattacactttcc

SEQ ID NO: 1878238 - DNA, 25 bp, Homo sapien
acaccattacactttccagctttac

SEQ ID NO: 1878239 - DNA, 25 bp, Homo sapien
aaccgggctggatgattttctagaa

SEQ ID NO: 1878240 - DNA, 25 bp, Homo sapien
gatgattttctagaagtagctgctc

SEQ ID NO: 1878241 - DNA, 25 bp, Homo sapien
tagttaaccgggctggatgattttc

SEQ ID NO: 1878242 - DNA, 25 bp, Homo sapien
ctcaatagttaaccgggctggatga

SEQ ID NO: 1878243 - DNA, 25 bp, Homo sapien
gtcgcacgacttacaaaattatgga

SEQ ID NO: 1878244 - DNA, 25 bp, Homo sapien
tcattcaaccaaataagttcattag

SEQ ID NO: 1878245 - DNA, 25 bp, Homo sapien
caaataagttcattagtcgcacgac

SEQ ID NO: 1878246 - DNA, 25 bp, Homo sapien
aaattatggagtgtatcaaggtgcc

SEQ ID NO: 1878247 - DNA, 25 bp, Homo sapien
tctctaatctgtgcaacttttctgc

SEQ ID NO: 1878248 - DNA, 25 bp, Homo sapien
agtcagtttaagaggtgctgtcatt

SEQ ID NO: 1878249 - DNA, 25 bp, Homo sapien
ttgcatactgactctctaatctgtg

SEQ ID NO: 1878250 - DNA, 25 bp, Homo sapien
caagagttttgcatactgactctct

SEQ ID NO: 1878251 - DNA, 25 bp, Homo sapien
gcttctttgagactagattcaaatt

SEQ ID NO: 1878252 - DNA, 25 bp, Homo sapien
gccccactcagtgcggtccagttgt

SEQ ID NO: 1878253 - DNA, 25 bp, Homo sapien
tcaacacttggcaaatctgagcccc

SEQ ID NO: 1878254 - DNA, 25 bp, Homo sapien
tctaaatggctttcaacacttggca

SEQ ID NO: 1878255 - DNA, 25 bp, Homo sapien
tatgcgtcctttgctgtacacagaa

SEQ ID NO: 1878256 - DNA, 25 bp, Homo sapien
tcatccctgatgacaggccagaagt

SEQ ID NO: 1878257 - DNA, 25 bp, Homo sapien
gaagaacattcgttccttaaggcca

SEQ ID NO: 1878258 - DNA, 25 bp, Homo sapien
taaggccataatttcgtcacgcagt

SEQ ID NO: 1878259 - DNA, 25 bp, Homo sapien
ggcgtaaaaggttctcacattcaag

SEQ ID NO: 1878260 - DNA, 25 bp, Homo sapien
ttcaagtatatacccagcaatttct

SEQ ID NO: 1878261 - DNA, 25 bp, Homo sapien
attgatctgcctggtagtattttcc

SEQ ID NO: 1878262 - DNA, 25 bp, Homo sapien
tctgtacatcaattacatgctggcg

SEQ ID NO: 1878263 - DNA, 25 bp, Homo sapien
atttccagcaagaatcagtttgtct

SEQ ID NO: 1878264 - DNA, 25 bp, Homo sapien
catttccagcaagaatcagtttgtc

SEQ ID NO: 1878265 - DNA, 25 bp, Homo sapien
gcatttccagcaagaatcagtttgt

SEQ ID NO: 1878266 - DNA, 25 bp, Homo sapien
catcaaaggattcactgccgaagct

SEQ ID NO: 1878267 - DNA, 25 bp, Homo sapien
caagagttgatcagtgttggaccac

SEQ ID NO: 1878268 - DNA, 25 bp, Homo sapien
caatgaaccaagagaagattttcat

SEQ ID NO: 1878269 - DNA, 25 bp, Homo sapien
caagactggttcgagtgctggtagt

SEQ ID NO: 1878270 - DNA, 25 bp, Homo sapien
gaatcactgctacggtaactataac

SEQ ID NO: 1878271 - DNA, 25 bp, Homo sapien
ctaaacacagaatcactgctacggt

SEQ ID NO: 1878272 - DNA, 25 bp, Homo sapien
tcactgctacggtaactataactac

SEQ ID NO: 1878273 - DNA, 25 bp, Homo sapien
cacagaatcactgctacggtaacta

SEQ ID NO: 1878274 - DNA, 25 bp, Homo sapien
ctacttctaacggtgaaaagtggca

SEQ ID NO: 1878275 - DNA, 25 bp, Homo sapien
aagctctacttctaacggtgaaaag

SEQ ID NO: 1878276 - DNA, 25 bp, Homo sapien
ttctaacggtgaaaagtggcagctg

SEQ ID NO: 1878277 - DNA, 25 bp, Homo sapien
gctctacttctaacggtgaaaagtg

SEQ ID NO: 1878278 - DNA, 25 bp, Homo sapien
tgaaggagcttgatgcgtccaaatt

SEQ ID NO: 1878279 - DNA, 25 bp, Homo sapien
tttggatgataaccttgaaggagct

SEQ ID NO: 1878280 - DNA, 25 bp, Homo sapien
tctacttctggacgaagggccttct

SEQ ID NO: 1878281 - DNA, 25 bp, Homo sapien
tgatgcgtccaaattctatccaaat

SEQ ID NO: 1878282 - DNA, 25 bp, Homo sapien
ctaataatttatatagacgtttaat

SEQ ID NO: 1878283 - DNA, 25 bp, Homo sapien
taaactgtaaatactgattataaag

SEQ ID NO: 1878284 - DNA, 25 bp, Homo sapien
ctcctttggtggaatttctgtttct

SEQ ID NO: 1878285 - DNA, 25 bp, Homo sapien
actgtaaatactgattataaagtgc

SEQ ID NO: 1878286 - DNA, 25 bp, Homo sapien
tctctcagacattgtggtcacatgg

SEQ ID NO: 1878287 - DNA, 25 bp, Homo sapien
gaggtagttcaccatattctggtat

SEQ ID NO: 1878288 - DNA, 25 bp, Homo sapien
cttcagttctacaggattattagga

SEQ ID NO: 1878289 - DNA, 25 bp, Homo sapien
catggtgtctaatccattggatgag

SEQ ID NO: 1878290 - DNA, 25 bp, Homo sapien
gaaagctgtaggaaagctatcggcc

SEQ ID NO: 1878291 - DNA, 25 bp, Homo sapien
gaaatgtcctggctaccagtaaaca

SEQ ID NO: 1878292 - DNA, 25 bp, Homo sapien
tttggcaacagtgtgccgaggcagt

SEQ ID NO: 1878293 - DNA, 25 bp, Homo sapien
caagtactcagtaggcaaactcttt

SEQ ID NO: 1878294 - DNA, 25 bp, Homo sapien
ttttcatcaggtgaggagacatcga

SEQ ID NO: 1878295 - DNA, 25 bp, Homo sapien
gagatgacacgtaagttattactga

SEQ ID NO: 1878296 - DNA, 25 bp, Homo sapien
tcatcaggtgaggagacatcgacat

SEQ ID NO: 1878297 - DNA, 25 bp, Homo sapien
cagggactttaggaaatgcatcata

SEQ ID NO: 1878298 - DNA, 25 bp, Homo sapien
tttttctgctacgtaaaaagcatgc

SEQ ID NO: 1878299 - DNA, 25 bp, Homo sapien
ggtccagaagtcttataacaccaat

SEQ ID NO: 1878300 - DNA, 25 bp, Homo sapien
tgctacgtaaaaagcatgctctaaa

SEQ ID NO: 1878301 - DNA, 25 bp, Homo sapien
cttcagggtccagaagtcttataac

SEQ ID NO: 1878302 - DNA, 25 bp, Homo sapien
ctttgtcttctataatcctagtcat

SEQ ID NO: 1878303 - DNA, 25 bp, Homo sapien
atcatctttgtcttctataatccta

SEQ ID NO: 1878304 - DNA, 25 bp, Homo sapien
tctttgtcttctataatcctagtca

SEQ ID NO: 1878305 - DNA, 25 bp, Homo sapien
catctttgtcttctataatcctagt

SEQ ID NO: 1878306 - DNA, 25 bp, Homo sapien
gactaacagcttgcacatcaaactg

SEQ ID NO: 1878307 - DNA, 25 bp, Homo sapien
ttagactaacagcttgcacatcaaa

SEQ ID NO: 1878308 - DNA, 25 bp, Homo sapien
agtgaaacataggccttcaatttca

SEQ ID NO: 1878309 - DNA, 25 bp, Homo sapien
cagcttgcacatcaaactgagtgaa

SEQ ID NO: 1878310 - DNA, 25 bp, Homo sapien
attaaaaacaagcataagacaggca

SEQ ID NO: 1878311 - DNA, 25 bp, Homo sapien
caagcataagacaggcagaaactag

SEQ ID NO: 1878312 - DNA, 25 bp, Homo sapien
aagacaggcagaaactagtaagcag

SEQ ID NO: 1878313 - DNA, 25 bp, Homo sapien
ggcagaaactagtaagcagaaataa

SEQ ID NO: 1878314 - DNA, 25 bp, Homo sapien
ctttccatagagccacctcagattt

SEQ ID NO: 1878315 - DNA, 25 bp, Homo sapien
gttttagtcttgacatacttagtgt

SEQ ID NO: 1878316 - DNA, 25 bp, Homo sapien
atacttagtgtctttccatagagcc

SEQ ID NO: 1878317 - DNA, 25 bp, Homo sapien
tcttgacatacttagtgtctttcca

SEQ ID NO: 1878318 - DNA, 25 bp, Homo sapien
gaggaacaagcactactgtctggga

SEQ ID NO: 1878319 - DNA, 25 bp, Homo sapien
caattttactgtgatgcctcggcaa

SEQ ID NO: 1878320 - DNA, 25 bp, Homo sapien
ggcagacttgtttgcacacagagca

SEQ ID NO: 1878321 - DNA, 25 bp, Homo sapien
ccttaaataagaggagagctgaacc

SEQ ID NO: 1878322 - DNA, 25 bp, Homo sapien
tcctctttaggataatgtgacatac

SEQ ID NO: 1878323 - DNA, 25 bp, Homo sapien
tagaagctatagaactatcccttgc

SEQ ID NO: 1878324 - DNA, 25 bp, Homo sapien
cctaatacagatttaacagaaagac

SEQ ID NO: 1878325 - DNA, 25 bp, Homo sapien
tactaccccattacataatccaggc

SEQ ID NO: 1878326 - DNA, 25 bp, Homo sapien
ttctaattttttgccatgcttttgc

SEQ ID NO: 1878327 - DNA, 25 bp, Homo sapien
tacagttgtataaggaaaaaataca

SEQ ID NO: 1878328 - DNA, 25 bp, Homo sapien
ttttgccatgcttttgcttctataa

SEQ ID NO: 1878329 - DNA, 25 bp, Homo sapien
gaaagaaatgtgtcttacagttgta

SEQ ID NO: 1878330 - DNA, 25 bp, Homo sapien
gagtagcaatctctcttttgcagac

SEQ ID NO: 1878331 - DNA, 25 bp, Homo sapien
tttcacaccgaattccagcataacc

SEQ ID NO: 1878332 - DNA, 25 bp, Homo sapien
tctccagcaggtagtgaaattttca

SEQ ID NO: 1878333 - DNA, 25 bp, Homo sapien
tgcctgctgcgtccagagtagcaat

SEQ ID NO: 1878334 - DNA, 25 bp, Homo sapien
gaaggaagctaactcagattaagaa

SEQ ID NO: 1878335 - DNA, 25 bp, Homo sapien
cccgcttcatgagattgttaagaga

SEQ ID NO: 1878336 - DNA, 25 bp, Homo sapien
gataataacaattcccgcttcatga

SEQ ID NO: 1878337 - DNA, 25 bp, Homo sapien
gataacatgtgtacagcacttaaga

SEQ ID NO: 1878338 - DNA, 25 bp, Homo sapien
caagggatcaacaagacaggctgca

SEQ ID NO: 1878339 - DNA, 25 bp, Homo sapien
tgcaagacgcaaagccaagggatca

SEQ ID NO: 1878340 - DNA, 25 bp, Homo sapien
tgttccctcaatcagtgcaagacgc

SEQ ID NO: 1878341 - DNA, 25 bp, Homo sapien
gcagagcagaatttgatccaacagg

SEQ ID NO: 1878342 - DNA, 25 bp, Homo sapien
gagagagcaatgctccatctcaata

SEQ ID NO: 1878343 - DNA, 25 bp, Homo sapien
cctggtgagagagcaatgctccatc

SEQ ID NO: 1878344 - DNA, 25 bp, Homo sapien
tatcactaagcagcgaagaaatgca

SEQ ID NO: 1878345 - DNA, 25 bp, Homo sapien
aatgatcaatatcactaagcagcga

SEQ ID NO: 1878346 - DNA, 25 bp, Homo sapien
aggtgcagaggattgcggttgagaa

SEQ ID NO: 1878347 - DNA, 25 bp, Homo sapien
aaggtgcagaggattgcggttgaga

SEQ ID NO: 1878348 - DNA, 25 bp, Homo sapien
gaaggtgcagaggattgcggttgag

SEQ ID NO: 1878349 - DNA, 25 bp, Homo sapien
cattcacagcttattactaaatgac

SEQ ID NO: 1878350 - DNA, 25 bp, Homo sapien
ctatctcatcttatagcacactgat

SEQ ID NO: 1878351 - DNA, 25 bp, Homo sapien
cacagcttattactaaatgacccac

SEQ ID NO: 1878352 - DNA, 25 bp, Homo sapien
cctatctcatcttatagcacactga

SEQ ID NO: 1878353 - DNA, 25 bp, Homo sapien
tgctaaatgaattgcaacagcctca

SEQ ID NO: 1878354 - DNA, 25 bp, Homo sapien
gctaaatgaattgcaacagcctcac

SEQ ID NO: 1878355 - DNA, 25 bp, Homo sapien
atgagcaaagtcaatgccaccagac

SEQ ID NO: 1878356 - DNA, 25 bp, Homo sapien
gccaccagacaactgggcaacagaa

SEQ ID NO: 1878357 - DNA, 25 bp, Homo sapien
aatgccaccagacaactgggcaaca

SEQ ID NO: 1878358 - DNA, 25 bp, Homo sapien
gatttaaactgtgcatgtccttcat

SEQ ID NO: 1878359 - DNA, 25 bp, Homo sapien
agccaaggatttaaactgtgcatgt

SEQ ID NO: 1878360 - DNA, 25 bp, Homo sapien
caaggatttaaactgtgcatgtcct

SEQ ID NO: 1878361 - DNA, 25 bp, Homo sapien
ggatttaaactgtgcatgtccttca

SEQ ID NO: 1878362 - DNA, 25 bp, Homo sapien
tgcttacagcactcggcagaagttt

SEQ ID NO: 1878363 - DNA, 25 bp, Homo sapien
tactagtataaagggaatggcatct

SEQ ID NO: 1878364 - DNA, 25 bp, Homo sapien
tcccctggataaaggagctggctgt

SEQ ID NO: 1878365 - DNA, 25 bp, Homo sapien
gagtgatctttctatacccgaggga

SEQ ID NO: 1878366 - DNA, 25 bp, Homo sapien
ttagatgctgaaattaagaaaattt

SEQ ID NO: 1878367 - DNA, 25 bp, Homo sapien
tagatgctgaaattaagaaaatttg

SEQ ID NO: 1878368 - DNA, 25 bp, Homo sapien
tgctgaaattaagaaaatttgggct

SEQ ID NO: 1878369 - DNA, 25 bp, Homo sapien
gatgctgaaattaagaaaatttggg

SEQ ID NO: 1878370 - DNA, 25 bp, Homo sapien
tgtccagattaatcccaaagtcaat

SEQ ID NO: 1878371 - DNA, 25 bp, Homo sapien
gattaatcccaaagtcaatttggga

SEQ ID NO: 1878372 - DNA, 25 bp, Homo sapien
tattgtccagattaatcccaaagtc

SEQ ID NO: 1878373 - DNA, 25 bp, Homo sapien
aattattgtccagattaatcccaaa

SEQ ID NO: 1878374 - DNA, 25 bp, Homo sapien
atggctcaacacatcctcaatttcc

SEQ ID NO: 1878375 - DNA, 25 bp, Homo sapien
tgtcttcaataattttgaactctcc

SEQ ID NO: 1878376 - DNA, 25 bp, Homo sapien
caataattttgaactctcctgcatt

SEQ ID NO: 1878377 - DNA, 25 bp, Homo sapien
ctctgactctcactgtcttcaataa

SEQ ID NO: 1878378 - DNA, 25 bp, Homo sapien
cacaagttcttacatagatggaaat

SEQ ID NO: 1878379 - DNA, 25 bp, Homo sapien
gtagtcacttataattcctctgggc

SEQ ID NO: 1878380 - DNA, 25 bp, Homo sapien
gaagtattgcttccccacaattaag

SEQ ID NO: 1878381 - DNA, 25 bp, Homo sapien
taacttcctaggcaaatgcaatcca

SEQ ID NO: 1878382 - DNA, 25 bp, Homo sapien
aacgcatccgacctttttctctggg

SEQ ID NO: 1878383 - DNA, 25 bp, Homo sapien
tctgtagtctgtgaaaacgcatccg

SEQ ID NO: 1878384 - DNA, 25 bp, Homo sapien
agtcaagtgcaatttgtacattctg

SEQ ID NO: 1878385 - DNA, 25 bp, Homo sapien
tgcaatttgtacattctgtagtctg

SEQ ID NO: 1878386 - DNA, 25 bp, Homo sapien
tcaaattgtgtccatcccttaagtc

SEQ ID NO: 1878387 - DNA, 25 bp, Homo sapien
caaattgtgtccatcccttaagtct

SEQ ID NO: 1878388 - DNA, 25 bp, Homo sapien
aaatcaaattgtgtccatcccttaa

SEQ ID NO: 1878389 - DNA, 25 bp, Homo sapien
atcccttaagtcttcatagagatca

SEQ ID NO: 1878390 - DNA, 25 bp, Homo sapien
catagctgtacagatcttggtgtgg

SEQ ID NO: 1878391 - DNA, 25 bp, Homo sapien
tctcttgcatagctgtacagatctt

SEQ ID NO: 1878392 - DNA, 25 bp, Homo sapien
ttgcatagctgtacagatcttggtg

SEQ ID NO: 1878393 - DNA, 25 bp, Homo sapien
cttggtgtggggtaattataatgta

SEQ ID NO: 1878394 - DNA, 25 bp, Homo sapien
caaattctaacgtcatccaggcagt

SEQ ID NO: 1878395 - DNA, 25 bp, Homo sapien
ggtcaaattctaacgtcatccaggc

SEQ ID NO: 1878396 - DNA, 25 bp, Homo sapien
catccaggcagtgatggtttccttc

SEQ ID NO: 1878397 - DNA, 25 bp, Homo sapien
tcctactaggtcaaattctaacgtc

SEQ ID NO: 1878398 - DNA, 25 bp, Homo sapien
agagaacgtcagcagataaacatgt

SEQ ID NO: 1878399 - DNA, 25 bp, Homo sapien
ggagagaacgtcagcagataaacat

SEQ ID NO: 1878400 - DNA, 25 bp, Homo sapien
gagagaacgtcagcagataaacatg

SEQ ID NO: 1878401 - DNA, 25 bp, Homo sapien
gagaacgtcagcagataaacatgtg

SEQ ID NO: 1878402 - DNA, 25 bp, Homo sapien
gcacattagtcattatcagccctta

SEQ ID NO: 1878403 - DNA, 25 bp, Homo sapien
caaaggctccttggttagaatgcaa

SEQ ID NO: 1878404 - DNA, 25 bp, Homo sapien
gaattatccaattgccttgccctgg

SEQ ID NO: 1878405 - DNA, 25 bp, Homo sapien
tacacttaggaggaattagcacatt

SEQ ID NO: 1878406 - DNA, 25 bp, Homo sapien
tcatgagatgctgatttatccattt

SEQ ID NO: 1878407 - DNA, 25 bp, Homo sapien
atgttttcttctgaactttgtcccg

SEQ ID NO: 1878408 - DNA, 25 bp, Homo sapien
ttcttctgaactttgtcccgttcat

SEQ ID NO: 1878409 - DNA, 25 bp, Homo sapien
cttcatgagatgctgatttatccat

SEQ ID NO: 1878410 - DNA, 25 bp, Homo sapien
ggtaagatatgtctcggtctctttc

SEQ ID NO: 1878411 - DNA, 25 bp, Homo sapien
tttccctgggggtaagatatgtctc

SEQ ID NO: 1878412 - DNA, 25 bp, Homo sapien
cctgggggtaagatatgtctcggtc

SEQ ID NO: 1878413 - DNA, 25 bp, Homo sapien
catcctttccctgggggtaagatat

SEQ ID NO: 1878414 - DNA, 25 bp, Homo sapien
gagaaggaccaacctcatccagggc

SEQ ID NO: 1878415 - DNA, 25 bp, Homo sapien
agaaggaccaacctcatccagggca

SEQ ID NO: 1878416 - DNA, 25 bp, Homo sapien
agagaaggaccaacctcatccaggg

SEQ ID NO: 1878417 - DNA, 25 bp, Homo sapien
gagagaaggaccaacctcatccagg

SEQ ID NO: 1878418 - DNA, 25 bp, Homo sapien
gctttgcgttccaatcttgatcatt

SEQ ID NO: 1878419 - DNA, 25 bp, Homo sapien
agctttgcgttccaatcttgatcat

SEQ ID NO: 1878420 - DNA, 25 bp, Homo sapien
tttgcgttccaatcttgatcatttt

SEQ ID NO: 1878421 - DNA, 25 bp, Homo sapien
cagctttgcgttccaatcttgatca

SEQ ID NO: 1878422 - DNA, 25 bp, Homo sapien
cagttccctaaactctctccgtaca

SEQ ID NO: 1878423 - DNA, 25 bp, Homo sapien
tctgtgcagcagttccctaaactct

SEQ ID NO: 1878424 - DNA, 25 bp, Homo sapien
gcagcagttccctaaactctctccg

SEQ ID NO: 1878425 - DNA, 25 bp, Homo sapien
atctgtgcagcagttccctaaactc

SEQ ID NO: 1878426 - DNA, 25 bp, Homo sapien
cacctacaaagatatgccatgctaa

SEQ ID NO: 1878427 - DNA, 25 bp, Homo sapien
tgggagtctatcaggaaggcaacag

SEQ ID NO: 1878428 - DNA, 25 bp, Homo sapien
tggttttacgtaggaggcagtgata

SEQ ID NO: 1878429 - DNA, 25 bp, Homo sapien
gccatgctaaaaagctgggagtcta

SEQ ID NO: 1878430 - DNA, 25 bp, Homo sapien
gtgtaaccctgagtacttgtaacag

SEQ ID NO: 1878431 - DNA, 25 bp, Homo sapien
tgtaaccctgagtacttgtaacaga

SEQ ID NO: 1878432 - DNA, 25 bp, Homo sapien
cagtgtaaccctgagtacttgtaac

SEQ ID NO: 1878433 - DNA, 25 bp, Homo sapien
gtaaccctgagtacttgtaacagac

SEQ ID NO: 1878434 - DNA, 25 bp, Homo sapien
tttgcactagtagcctgggatcccc

SEQ ID NO: 1878435 - DNA, 25 bp, Homo sapien
ggagccccacgacatgctgcttgat

SEQ ID NO: 1878436 - DNA, 25 bp, Homo sapien
tacactacagcctcatgggaccaaa

SEQ ID NO: 1878437 - DNA, 25 bp, Homo sapien
tctggaagagacatcaaccctggtc

SEQ ID NO: 1878438 - DNA, 25 bp, Homo sapien
tctcttaacctagaaacacaagtgg

SEQ ID NO: 1878439 - DNA, 25 bp, Homo sapien
cgcacacagccttgcagtaccttta

SEQ ID NO: 1878440 - DNA, 25 bp, Homo sapien
gccttgcagtacctttaatagttct

SEQ ID NO: 1878441 - DNA, 25 bp, Homo sapien
tagttctgattatatgggaaacccc

SEQ ID NO: 1878442 - DNA, 25 bp, Homo sapien
cttgggagagtgcatgtgttgagga

SEQ ID NO: 1878443 - DNA, 25 bp, Homo sapien
gggagagtgcatgtgttgaggaatt

SEQ ID NO: 1878444 - DNA, 25 bp, Homo sapien
gtcttgggagagtgcatgtgttgag

SEQ ID NO: 1878445 - DNA, 25 bp, Homo sapien
tgggagagtgcatgtgttgaggaat

SEQ ID NO: 1878446 - DNA, 25 bp, Homo sapien
acatgttttcctttgctgacactgg

SEQ ID NO: 1878447 - DNA, 25 bp, Homo sapien
ttcccattatttctccagagccgga

SEQ ID NO: 1878448 - DNA, 25 bp, Homo sapien
cctttgctgacactggggactttcc

SEQ ID NO: 1878449 - DNA, 25 bp, Homo sapien
cattatttctccagagccggaattt

SEQ ID NO: 1878450 - DNA, 25 bp, Homo sapien
caagtatttcgactgaacctcagag

SEQ ID NO: 1878451 - DNA, 25 bp, Homo sapien
tctgcagacattatacacaccaagt

SEQ ID NO: 1878452 - DNA, 25 bp, Homo sapien
gggtacatacttaccaacaaggaga

SEQ ID NO: 1878453 - DNA, 25 bp, Homo sapien
tgccaccaaccaaagaacaccaagt

SEQ ID NO: 1878454 - DNA, 25 bp, Homo sapien
ccggagcgcgatggtatgatctcag

SEQ ID NO: 1878455 - DNA, 25 bp, Homo sapien
gccggagcgcgatggtatgatctca

SEQ ID NO: 1878456 - DNA, 25 bp, Homo sapien
cacccagccgtccacataataatta

SEQ ID NO: 1878457 - DNA, 25 bp, Homo sapien
taattccttaatatctactaccatt

SEQ ID NO: 1878458 - DNA, 25 bp, Homo sapien
cacacccagccgtccacataataat

SEQ ID NO: 1878459 - DNA, 25 bp, Homo sapien
ttccttaatatctactaccatttct

SEQ ID NO: 1878460 - DNA, 25 bp, Homo sapien
ggcagagctccctttcaataaaaaa

SEQ ID NO: 1878461 - DNA, 25 bp, Homo sapien
gaatcttacaggcagaccaggctgg

SEQ ID NO: 1878462 - DNA, 25 bp, Homo sapien
aagcttagaacaactccctagggag

SEQ ID NO: 1878463 - DNA, 25 bp, Homo sapien
caatagaatagcctttaatgggacc

SEQ ID NO: 1878464 - DNA, 25 bp, Homo sapien
tccccagatcttgttagagtaagcc

SEQ ID NO: 1878465 - DNA, 25 bp, Homo sapien
taacgaccacgctaaagaagttcca

SEQ ID NO: 1878466 - DNA, 25 bp, Homo sapien
aagaacacttctcgcccattactga

SEQ ID NO: 1878467 - DNA, 25 bp, Homo sapien
actatagtgtcatttcaagctgtca

SEQ ID NO: 1878468 - DNA, 25 bp, Homo sapien
taactatttggcagaggtggatcca

SEQ ID NO: 1878469 - DNA, 25 bp, Homo sapien
tatagacaaggaagatgacgctcac

SEQ ID NO: 1878470 - DNA, 25 bp, Homo sapien
gagaggccctaaaagcaagcgtgtg

SEQ ID NO: 1878471 - DNA, 25 bp, Homo sapien
tcagccatgctgaccataaagggag

SEQ ID NO: 1878472 - DNA, 25 bp, Homo sapien
taaaaggacaaactgggactcacat

SEQ ID NO: 1878473 - DNA, 25 bp, Homo sapien
cccagaggtgccaagttaattcaac

SEQ ID NO: 1878474 - DNA, 25 bp, Homo sapien
ttaaacacacgggtcaatggaactg

SEQ ID NO: 1878475 - DNA, 25 bp, Homo sapien
tggaactgaacagggtccagacaga

SEQ ID NO: 1878476 - DNA, 25 bp, Homo sapien
taatgtgaatcccacagtgcggtgc

SEQ ID NO: 1878477 - DNA, 25 bp, Homo sapien
taaagaagactacggatgtggctac

SEQ ID NO: 1878478 - DNA, 25 bp, Homo sapien
ccccgagtgaggcataacttctgaa

SEQ ID NO: 1878479 - DNA, 25 bp, Homo sapien
tctgtcagggcatcagtcagggtgc

SEQ ID NO: 1878480 - DNA, 25 bp, Homo sapien
ttcaatcacaagggtataactttta

SEQ ID NO: 1878481 - DNA, 25 bp, Homo sapien
tcaatcacaagggtataacttttaa

SEQ ID NO: 1878482 - DNA, 25 bp, Homo sapien
ttttttcgcttcctgtagcgccaaa

SEQ ID NO: 1878483 - DNA, 25 bp, Homo sapien
cctgtagcgccaaactaatgcaaaa

SEQ ID NO: 1878484 - DNA, 25 bp, Homo sapien
tatttttttcgcttcctgtagcgcc

SEQ ID NO: 1878485 - DNA, 25 bp, Homo sapien
tcgcttcctgtagcgccaaactaat

SEQ ID NO: 1878486 - DNA, 25 bp, Homo sapien
taaaatggagtgatgcaggtaaaca

SEQ ID NO: 1878487 - DNA, 25 bp, Homo sapien
gctctggaaacaactaattacaaac

SEQ ID NO: 1878488 - DNA, 25 bp, Homo sapien
gctttagcctaaaatatcactgcac

SEQ ID NO: 1878489 - DNA, 25 bp, Homo sapien
taaggtttgttggtctatattgcaa

SEQ ID NO: 1878490 - DNA, 25 bp, Homo sapien
aatcctacctatgaaatgggtcact

SEQ ID NO: 1878491 - DNA, 25 bp, Homo sapien
tcaactatgaagtccaagtaaacat

SEQ ID NO: 1878492 - DNA, 25 bp, Homo sapien
tactgacattgagttaccaaaccca

SEQ ID NO: 1878493 - DNA, 25 bp, Homo sapien
agttcggagtgttttgggagccaca

SEQ ID NO: 1878494 - DNA, 25 bp, Homo sapien
ctgaacataaaggatgggcagaaaa

SEQ ID NO: 1878495 - DNA, 25 bp, Homo sapien
tttttacaatatatcagagtaagta

SEQ ID NO: 1878496 - DNA, 25 bp, Homo sapien
tatccatcacgctataaaataattt

SEQ ID NO: 1878497 - DNA, 25 bp, Homo sapien
tcagagtaagtatatagtcacaaac

SEQ ID NO: 1878498 - DNA, 25 bp, Homo sapien
ctcctccacgtacaggtaagcagca

SEQ ID NO: 1878499 - DNA, 25 bp, Homo sapien
ctgctcctccacgtacaggtaagca

SEQ ID NO: 1878500 - DNA, 25 bp, Homo sapien
cagcaggggagaggtaacccgccat

SEQ ID NO: 1878501 - DNA, 25 bp, Homo sapien
tctccaggacatcctcgtaggcctg

SEQ ID NO: 1878502 - DNA, 25 bp, Homo sapien
agaagcacggaagccgaagacgcag

SEQ ID NO: 1878503 - DNA, 25 bp, Homo sapien
tatcgcagtcagcaagacacagcct

SEQ ID NO: 1878504 - DNA, 25 bp, Homo sapien
gccgaagtttatctaagcgatgact

SEQ ID NO: 1878505 - DNA, 25 bp, Homo sapien
tctcgggtttcagcagcggcaaatc

SEQ ID NO: 1878506 - DNA, 25 bp, Homo sapien
aatgaccactatagacatcctcaca

SEQ ID NO: 1878507 - DNA, 25 bp, Homo sapien
taagtaatgaccactatagacatcc

SEQ ID NO: 1878508 - DNA, 25 bp, Homo sapien
gtaatgaccactatagacatcctca

SEQ ID NO: 1878509 - DNA, 25 bp, Homo sapien
ctaagtaatgaccactatagacatc

SEQ ID NO: 1878510 - DNA, 25 bp, Homo sapien
catagagttcttcaatatcttcccc

SEQ ID NO: 1878511 - DNA, 25 bp, Homo sapien
tgactccacagtctactaatagcat

SEQ ID NO: 1878512 - DNA, 25 bp, Homo sapien
tgcatcccattagaacatagagttc

SEQ ID NO: 1878513 - DNA, 25 bp, Homo sapien
tcagcaccttcatgtacactgcatc

SEQ ID NO: 1878514 - DNA, 25 bp, Homo sapien
ccagaaaccctgactagagaatggc

SEQ ID NO: 1878515 - DNA, 25 bp, Homo sapien
acagcggaagccagaagaagctcaa

SEQ ID NO: 1878516 - DNA, 25 bp, Homo sapien
ggaagccagaagaagctcaaggctg

SEQ ID NO: 1878517 - DNA, 25 bp, Homo sapien
aatggctggctaggcactgtttgtt

SEQ ID NO: 1878518 - DNA, 25 bp, Homo sapien
agctgccttgatggccggaatctgg

SEQ ID NO: 1878519 - DNA, 25 bp, Homo sapien
ctcagctgccttgatggccggaatc

SEQ ID NO: 1878520 - DNA, 25 bp, Homo sapien
tgccttgatggccggaatctgggct

SEQ ID NO: 1878521 - DNA, 25 bp, Homo sapien
tcagctgccttgatggccggaatct

SEQ ID NO: 1878522 - DNA, 25 bp, Homo sapien
tcaccagcaggcagggcaaatggct

SEQ ID NO: 1878523 - DNA, 25 bp, Homo sapien
gtcaccagcaggcagggcaaatggc

SEQ ID NO: 1878524 - DNA, 25 bp, Homo sapien
tagtcaccagcaggcagggcaaatg

SEQ ID NO: 1878525 - DNA, 25 bp, Homo sapien
ttagtcaccagcaggcagggcaaat

SEQ ID NO: 1878526 - DNA, 25 bp, Homo sapien
tcatcggaaaaatccgcagaggaag

SEQ ID NO: 1878527 - DNA, 25 bp, Homo sapien
tagagcagcgataggacgcgttccc

SEQ ID NO: 1878528 - DNA, 25 bp, Homo sapien
gcaaattccagggtaaggtgtctcc

SEQ ID NO: 1878529 - DNA, 25 bp, Homo sapien
tttctggctgaaatcatcctcatcg

SEQ ID NO: 1878530 - DNA, 25 bp, Homo sapien
tacacaggcagtttcaatacatgaa

SEQ ID NO: 1878531 - DNA, 25 bp, Homo sapien
aagatttgcacggaagaagtgtgtg

SEQ ID NO: 1878532 - DNA, 25 bp, Homo sapien
ggccaagtctccaatcgtaaaaaca

SEQ ID NO: 1878533 - DNA, 25 bp, Homo sapien
tacatgaagatttgcacggaagaag

SEQ ID NO: 1878534 - DNA, 25 bp, Homo sapien
aggaacccttaactccaagaggcag

SEQ ID NO: 1878535 - DNA, 25 bp, Homo sapien
cacctttaggtagtaagtgtggaag

SEQ ID NO: 1878536 - DNA, 25 bp, Homo sapien
tagtggtgaggccattagctggctc

SEQ ID NO: 1878537 - DNA, 25 bp, Homo sapien
tgttaggggagatatgcaggaaccc

SEQ ID NO: 1878538 - DNA, 25 bp, Homo sapien
aagtccatgagttccgtatctatcc

SEQ ID NO: 1878539 - DNA, 25 bp, Homo sapien
gagatgtccctgtatctttccaata

SEQ ID NO: 1878540 - DNA, 25 bp, Homo sapien
tgttaaacctcctttgagatgtccc

SEQ ID NO: 1878541 - DNA, 25 bp, Homo sapien
cttaataacagctctcaggatacaa

SEQ ID NO: 1878542 - DNA, 25 bp, Homo sapien
cactaaaggccccagtagatttcat

SEQ ID NO: 1878543 - DNA, 25 bp, Homo sapien
gatccatctggaacaactgtgtggc

SEQ ID NO: 1878544 - DNA, 25 bp, Homo sapien
caaagcccccgtatctgcactaaag

SEQ ID NO: 1878545 - DNA, 25 bp, Homo sapien
agatccatctggaacaactgtgtgg

SEQ ID NO: 1878546 - DNA, 25 bp, Homo sapien
tcctgaggtgatctggacctgtccc

SEQ ID NO: 1878547 - DNA, 25 bp, Homo sapien
caacgggatcagcacagcagctact

SEQ ID NO: 1878548 - DNA, 25 bp, Homo sapien
cagcacagcagctacttccttcctc

SEQ ID NO: 1878549 - DNA, 25 bp, Homo sapien
acgggatcagcacagcagctacttc

SEQ ID NO: 1878550 - DNA, 25 bp, Homo sapien
gggatcagcacagcagctacttcct

SEQ ID NO: 1878551 - DNA, 25 bp, Homo sapien
tgccttcctgattctctaggtagaa

SEQ ID NO: 1878552 - DNA, 25 bp, Homo sapien
tgttcccattagagcatttctaagg

SEQ ID NO: 1878553 - DNA, 25 bp, Homo sapien
tataatctttgatgggatctgatgg

SEQ ID NO: 1878554 - DNA, 25 bp, Homo sapien
aaaaactgctgccacaatgtctgaa

SEQ ID NO: 1878555 - DNA, 25 bp, Homo sapien
tattctagaacccttgatatgggcc

SEQ ID NO: 1878556 - DNA, 25 bp, Homo sapien
tgccaaacgccagatgccaggagat

SEQ ID NO: 1878557 - DNA, 25 bp, Homo sapien
tgatatgggcctcaaagaattcatg

SEQ ID NO: 1878558 - DNA, 25 bp, Homo sapien
agatgccaaatgccaaacgccagat

SEQ ID NO: 1878559 - DNA, 25 bp, Homo sapien
cgtcttctaagatgccgagggcttg

SEQ ID NO: 1878560 - DNA, 25 bp, Homo sapien
tgaacttccaccacgggcttcactt

SEQ ID NO: 1878561 - DNA, 25 bp, Homo sapien
taaaattctggctggactcggctgc

SEQ ID NO: 1878562 - DNA, 25 bp, Homo sapien
ctcggctgctcttcttgattcttcg

SEQ ID NO: 1878563 - DNA, 25 bp, Homo sapien
tgctcggaccaggtatttctcagaa

SEQ ID NO: 1878564 - DNA, 25 bp, Homo sapien
gctcggaccaggtatttctcagaaa

SEQ ID NO: 1878565 - DNA, 25 bp, Homo sapien
ctcggaccaggtatttctcagaaac

SEQ ID NO: 1878566 - DNA, 25 bp, Homo sapien
tttgacttatcatggatatgaaggg

SEQ ID NO: 1878567 - DNA, 25 bp, Homo sapien
ggatatgaaggggagggacagcttc

SEQ ID NO: 1878568 - DNA, 25 bp, Homo sapien
cacagtttgacttatcatggatatg

SEQ ID NO: 1878569 - DNA, 25 bp, Homo sapien
cagtttgacttatcatggatatgaa

SEQ ID NO: 1878570 - DNA, 25 bp, Homo sapien
tgagagatactacaggtaccaactt

SEQ ID NO: 1878571 - DNA, 25 bp, Homo sapien
tatctgttgcctatgtgatggacaa

SEQ ID NO: 1878572 - DNA, 25 bp, Homo sapien
agaattgcttaacccgggcgacaga

SEQ ID NO: 1878573 - DNA, 25 bp, Homo sapien
ttacttagaagtggtatttccagtc

SEQ ID NO: 1878574 - DNA, 25 bp, Homo sapien
gtgatttgatcagtctagctacaag

SEQ ID NO: 1878575 - DNA, 25 bp, Homo sapien
tatagtctgtcttcgtgaatgagtc

SEQ ID NO: 1878576 - DNA, 25 bp, Homo sapien
ccttctaatgtctgtgggttccata

SEQ ID NO: 1878577 - DNA, 25 bp, Homo sapien
aaagctatatgtttccctctgagca

SEQ ID NO: 1878578 - DNA, 25 bp, Homo sapien
gcttataaactctgttgatcaccaa

SEQ ID NO: 1878579 - DNA, 25 bp, Homo sapien
ctatcaattgctgaaagaggtatgc

SEQ ID NO: 1878580 - DNA, 25 bp, Homo sapien
tgatcaccaactatgattacagcat

SEQ ID NO: 1878581 - DNA, 25 bp, Homo sapien
ggccaatgagtgtggtgtttctaga

SEQ ID NO: 1878582 - DNA, 25 bp, Homo sapien
tagaagttctagttgggtttatctc

SEQ ID NO: 1878583 - DNA, 25 bp, Homo sapien
tataggaattccattactcccctgc

SEQ ID NO: 1878584 - DNA, 25 bp, Homo sapien
gctctgagagttaaaatatgcatcc

SEQ ID NO: 1878585 - DNA, 25 bp, Homo sapien
gccattctttacactaaaggtgtca

SEQ ID NO: 1878586 - DNA, 25 bp, Homo sapien
gatctcagctcagctcaccgtaacc

SEQ ID NO: 1878587 - DNA, 25 bp, Homo sapien
tccacctcccaggctcaagtgactc

SEQ ID NO: 1878588 - DNA, 25 bp, Homo sapien
tgatttgccctcctcggcctcccaa

SEQ ID NO: 1878589 - DNA, 25 bp, Homo sapien
gactctcccacctcagcctcccaag

SEQ ID NO: 1878590 - DNA, 25 bp, Homo sapien
tggtacctcaattacccatatcact

SEQ ID NO: 1878591 - DNA, 25 bp, Homo sapien
ttaaaatcaggattgtcacagcctg

SEQ ID NO: 1878592 - DNA, 25 bp, Homo sapien
cacagcctgactttcaccacaggaa

SEQ ID NO: 1878593 - DNA, 25 bp, Homo sapien
ccattctactgaagtactcccaaga

SEQ ID NO: 1878594 - DNA, 25 bp, Homo sapien
caccttccagggctatatacagtag

SEQ ID NO: 1878595 - DNA, 25 bp, Homo sapien
ggcaccgagatgtatcacacagcta

SEQ ID NO: 1878596 - DNA, 25 bp, Homo sapien
taaccctgcaaggtactaatggccc

SEQ ID NO: 1878597 - DNA, 25 bp, Homo sapien
caataaaacatctagggtggcataa

SEQ ID NO: 1878598 - DNA, 25 bp, Homo sapien
gtctttgccaacatgagtaaactgc

SEQ ID NO: 1878599 - DNA, 25 bp, Homo sapien
tccaagcctggcggcgtgcaacttt

SEQ ID NO: 1878600 - DNA, 25 bp, Homo sapien
tggagggcgtttaactatgaagtct

SEQ ID NO: 1878601 - DNA, 25 bp, Homo sapien
catgagtaaactgcaccaagcagca

SEQ ID NO: 1878602 - DNA, 25 bp, Homo sapien
gaaatcctaggtcaaggagcgcttg

SEQ ID NO: 1878603 - DNA, 25 bp, Homo sapien
cacgttttgagagtggagactagca

SEQ ID NO: 1878604 - DNA, 25 bp, Homo sapien
tgcagtgattaggagttacttgccc

SEQ ID NO: 1878605 - DNA, 25 bp, Homo sapien
ccctagagggatggtccacgttttg

SEQ ID NO: 1878606 - DNA, 25 bp, Homo sapien
ttgagcgtgcgcgctaaataaatta

SEQ ID NO: 1878607 - DNA, 25 bp, Homo sapien
cttgagcgtgcgcgctaaataaatt

SEQ ID NO: 1878608 - DNA, 25 bp, Homo sapien
tgagcgtgcgcgctaaataaattac

SEQ ID NO: 1878609 - DNA, 25 bp, Homo sapien
aagtggtgcgatctcaaaacagcat

SEQ ID NO: 1878610 - DNA, 25 bp, Homo sapien
gaaagtggtgcgatctcaaaacagc

SEQ ID NO: 1878611 - DNA, 25 bp, Homo sapien
acgaaagtggtgcgatctcaaaaca

SEQ ID NO: 1878612 - DNA, 25 bp, Homo sapien
ctcagaacgaaagtggtgcgatctc

SEQ ID NO: 1878613 - DNA, 25 bp, Homo sapien
catcgcagactcctggaattcggtg

SEQ ID NO: 1878614 - DNA, 25 bp, Homo sapien
gactcctggaattcggtgggacatc

SEQ ID NO: 1878615 - DNA, 25 bp, Homo sapien
cagggttgggaaagcacatcgcaga

SEQ ID NO: 1878616 - DNA, 25 bp, Homo sapien
gaaagcacatcgcagactcctggaa

SEQ ID NO: 1878617 - DNA, 25 bp, Homo sapien
cttgaacgacccgagaagaccgatt

SEQ ID NO: 1878618 - DNA, 25 bp, Homo sapien
gatgcctccctttctggagcttgcg

SEQ ID NO: 1878619 - DNA, 25 bp, Homo sapien
aagacgaggaaagccgcggcgatca

SEQ ID NO: 1878620 - DNA, 25 bp, Homo sapien
gcacattggatgctgtagggtctca

SEQ ID NO: 1878621 - DNA, 25 bp, Homo sapien
aggcgagggcgactcgacggcgggg

SEQ ID NO: 1878622 - DNA, 25 bp, Homo sapien
gaggcgagggcgactcgacggcggg

SEQ ID NO: 1878623 - DNA, 25 bp, Homo sapien
cgaggcgagggcgactcgacggcgg

SEQ ID NO: 1878624 - DNA, 25 bp, Homo sapien
ggctgatgacatcacggccaggctg

SEQ ID NO: 1878625 - DNA, 25 bp, Homo sapien
tgcattggccgggtgcctctagctt

SEQ ID NO: 1878626 - DNA, 25 bp, Homo sapien
agtccgcgccgtccgcgggtgcatt

SEQ ID NO: 1878627 - DNA, 25 bp, Homo sapien
tcggccaaattgctgcggagcccgt

SEQ ID NO: 1878628 - DNA, 25 bp, Homo sapien
ggagtgtgaggcaatagtgatctct

SEQ ID NO: 1878629 - DNA, 25 bp, Homo sapien
ttagggagtgtgaggcaatagtgat

SEQ ID NO: 1878630 - DNA, 25 bp, Homo sapien
tagggagtgtgaggcaatagtgatc

SEQ ID NO: 1878631 - DNA, 25 bp, Homo sapien
gtgtgaggcaatagtgatctctcac

SEQ ID NO: 1878632 - DNA, 25 bp, Homo sapien
taacactgatgcaatgccagcacgg

SEQ ID NO: 1878633 - DNA, 25 bp, Homo sapien
attctgcggcatcttgcggccttgg

SEQ ID NO: 1878634 - DNA, 25 bp, Homo sapien
cagtgtgcctttctgcggacggcca

SEQ ID NO: 1878635 - DNA, 25 bp, Homo sapien
ccagcacggaaggtatagcgagagc

SEQ ID NO: 1878636 - DNA, 25 bp, Homo sapien
agaaattctagtccacactccaata

SEQ ID NO: 1878637 - DNA, 25 bp, Homo sapien
cagtaggacacacatgaatttaatg

SEQ ID NO: 1878638 - DNA, 25 bp, Homo sapien
tctcgaaagcactctagcccatcag

SEQ ID NO: 1878639 - DNA, 25 bp, Homo sapien
gaaaaaactcagtaggacacacatg

SEQ ID NO: 1878640 - DNA, 25 bp, Homo sapien
catagagccaacacttgcaggttca

SEQ ID NO: 1878641 - DNA, 25 bp, Homo sapien
cagtcatagagccaacacttgcagg

SEQ ID NO: 1878642 - DNA, 25 bp, Homo sapien
cataaattattcctccagtggtgag

SEQ ID NO: 1878643 - DNA, 25 bp, Homo sapien
ctaatgcctatgttcatcagtcata

SEQ ID NO: 1878644 - DNA, 25 bp, Homo sapien
gacagcaagggccattctcagcctc

SEQ ID NO: 1878645 - DNA, 25 bp, Homo sapien
tcaagcactaagaacaggacacgat

SEQ ID NO: 1878646 - DNA, 25 bp, Homo sapien
ggacattcagggacattcaagcact

SEQ ID NO: 1878647 - DNA, 25 bp, Homo sapien
gtgcagtcatggtggcttcttcagc

SEQ ID NO: 1878648 - DNA, 25 bp, Homo sapien
tagatgccttccattacgtcttctc

SEQ ID NO: 1878649 - DNA, 25 bp, Homo sapien
gggcatctcctatgacattcatata

SEQ ID NO: 1878650 - DNA, 25 bp, Homo sapien
ccttgggcatctcctatgacattca

SEQ ID NO: 1878651 - DNA, 25 bp, Homo sapien
atgtcctgtgagtagatgccttcca

SEQ ID NO: 1878652 - DNA, 25 bp, Homo sapien
gctgcggcagtagggacagcaggag

SEQ ID NO: 1878653 - DNA, 25 bp, Homo sapien
ctgcggcagtagggacagcaggagc

SEQ ID NO: 1878654 - DNA, 25 bp, Homo sapien
tggcggctgcggcagtagggacagc

SEQ ID NO: 1878655 - DNA, 25 bp, Homo sapien
gcggctgcggcagtagggacagcag

SEQ ID NO: 1878656 - DNA, 25 bp, Homo sapien
tgctaatacaatcctgggaagaaag

SEQ ID NO: 1878657 - DNA, 25 bp, Homo sapien
cttctaggaactgtagctaaagaac

SEQ ID NO: 1878658 - DNA, 25 bp, Homo sapien
aagaaagtctggagtagctacaaaa

SEQ ID NO: 1878659 - DNA, 25 bp, Homo sapien
taaaaatcaaaccaagcttctagga

SEQ ID NO: 1878660 - DNA, 25 bp, Homo sapien
gggagggtcctgctatgtcacccaa

SEQ ID NO: 1878661 - DNA, 25 bp, Homo sapien
ggggagggtcctgctatgtcaccca

SEQ ID NO: 1878662 - DNA, 25 bp, Homo sapien
tcccagcactttatgggaggccgag

SEQ ID NO: 1878663 - DNA, 25 bp, Homo sapien
gttcgagaccagcctgaccaacaag

SEQ ID NO: 1878664 - DNA, 25 bp, Homo sapien
ccaggtgcagtggttcacacgtgta

SEQ ID NO: 1878665 - DNA, 25 bp, Homo sapien
gcaggtggatcacctgaggtcagga

SEQ ID NO: 1878666 - DNA, 25 bp, Homo sapien
aatcgggaaacaacctagatgtcct

SEQ ID NO: 1878667 - DNA, 25 bp, Homo sapien
ggatctttggaattatgtgacacac

SEQ ID NO: 1878668 - DNA, 25 bp, Homo sapien
tacattctggtaacaccaaatgccg

SEQ ID NO: 1878669 - DNA, 25 bp, Homo sapien
gaatcaagctgaactcgtgaacagt

SEQ ID NO: 1878670 - DNA, 25 bp, Homo sapien
gctaaaaatgagttgaccgtggatg

SEQ ID NO: 1878671 - DNA, 25 bp, Homo sapien
taaaactggtgagtcctcctacttg

SEQ ID NO: 1878672 - DNA, 25 bp, Homo sapien
cattcatttgtatgtggctgtccag

SEQ ID NO: 1878673 - DNA, 25 bp, Homo sapien
cattggacagtcttggcacccttgc

SEQ ID NO: 1878674 - DNA, 25 bp, Homo sapien
tatgtcatgtatgaatagttttact

SEQ ID NO: 1878675 - DNA, 25 bp, Homo sapien
ttcaatatggatgccttttgtatct

SEQ ID NO: 1878676 - DNA, 25 bp, Homo sapien
ttatgtcatgtatgaatagttttac

SEQ ID NO: 1878677 - DNA, 25 bp, Homo sapien
tttcctctagacagcctatactttg

SEQ ID NO: 1878678 - DNA, 25 bp, Homo sapien
tataggattattgttggatatagga

SEQ ID NO: 1878679 - DNA, 25 bp, Homo sapien
gagtcttgactcacagttgttggtt

SEQ ID NO: 1878680 - DNA, 25 bp, Homo sapien
tctagacagcctatactttggatca

SEQ ID NO: 1878681 - DNA, 25 bp, Homo sapien
gacgaggttccctcttattgctcag

SEQ ID NO: 1878682 - DNA, 25 bp, Homo sapien
cataaagcacttggtggaaatgcag

SEQ ID NO: 1878683 - DNA, 25 bp, Homo sapien
gcttttgaagaactccccatgcacg

SEQ ID NO: 1878684 - DNA, 25 bp, Homo sapien
caatcagatggtagttttgcataca

SEQ ID NO: 1878685 - DNA, 25 bp, Homo sapien
tttagtgatagttaggtagacctcg

SEQ ID NO: 1878686 - DNA, 25 bp, Homo sapien
gactggtttatgagtgtgaacacac

SEQ ID NO: 1878687 - DNA, 25 bp, Homo sapien
gtgtattaatactggcagggcctgg

SEQ ID NO: 1878688 - DNA, 25 bp, Homo sapien
caatgagctgcgcttcacaaccata

SEQ ID NO: 1878689 - DNA, 25 bp, Homo sapien
actgcagctggcgtcttttaggcgc

SEQ ID NO: 1878690 - DNA, 25 bp, Homo sapien
tctttccgccggtggcgtcggcgct

SEQ ID NO: 1878691 - DNA, 25 bp, Homo sapien
aaggaagcccgggagtgagagaaag

SEQ ID NO: 1878692 - DNA, 25 bp, Homo sapien
catagcgggccagtaagggccgctc

SEQ ID NO: 1878693 - DNA, 25 bp, Homo sapien
tgtgagaggctggtaactaacgcgt

SEQ ID NO: 1878694 - DNA, 25 bp, Homo sapien
tcctggcgttctcagaggcgaaccg

SEQ ID NO: 1878695 - DNA, 25 bp, Homo sapien
tgttgagcttgcgttcctcctggag

SEQ ID NO: 1878696 - DNA, 25 bp, Homo sapien
ccagtgggagcgacgttttaaggca

SEQ ID NO: 1878697 - DNA, 25 bp, Homo sapien
tggaagtggtcatagtccaaccatg

SEQ ID NO: 1878698 - DNA, 25 bp, Homo sapien
tcaatagactagatcgattctgtgt

SEQ ID NO: 1878699 - DNA, 25 bp, Homo sapien
tatttaatgttagtggctagtccaa

SEQ ID NO: 1878700 - DNA, 25 bp, Homo sapien
gtctcgcactgtttaggttctcttg

SEQ ID NO: 1878701 - DNA, 25 bp, Homo sapien
tttgacaacacactaaagcctgatg

SEQ ID NO: 1878702 - DNA, 25 bp, Homo sapien
caaagcacatggtatttgaattcca

SEQ ID NO: 1878703 - DNA, 25 bp, Homo sapien
caaatgaggtaatatccgaaagtac

SEQ ID NO: 1878704 - DNA, 25 bp, Homo sapien
gaccttgaccctcagcattagcaag

SEQ ID NO: 1878705 - DNA, 25 bp, Homo sapien
taaaaactgcaagtgttgcttggca

SEQ ID NO: 1878706 - DNA, 25 bp, Homo sapien
ttgctgggagtgttggtacatgcct

SEQ ID NO: 1878707 - DNA, 25 bp, Homo sapien
aactgcaagtgttgcttggcacagt

SEQ ID NO: 1878708 - DNA, 25 bp, Homo sapien
attgcttaaaagtgagctcaggagg

SEQ ID NO: 1878709 - DNA, 25 bp, Homo sapien
gtatcctcaatatggctatcatttc

SEQ ID NO: 1878710 - DNA, 25 bp, Homo sapien
gcttaactttcatggagatgtttcg

SEQ ID NO: 1878711 - DNA, 25 bp, Homo sapien
gatgtttcgtcaggtgtaaccagta

SEQ ID NO: 1878712 - DNA, 25 bp, Homo sapien
gatacaaccgaaatttgctctgtgc

SEQ ID NO: 1878713 - DNA, 25 bp, Homo sapien
tctactcctagcagatttctcccaa

SEQ ID NO: 1878714 - DNA, 25 bp, Homo sapien
gcctcatatacctaatcttttccca

SEQ ID NO: 1878715 - DNA, 25 bp, Homo sapien
tcagtattggtagccagagttcctt

SEQ ID NO: 1878716 - DNA, 25 bp, Homo sapien
tatcatatgactaatagtctgcctc

SEQ ID NO: 1878717 - DNA, 25 bp, Homo sapien
tacatagaaattcctagaggtagcc

SEQ ID NO: 1878718 - DNA, 25 bp, Homo sapien
cagtttggcgacctacttgatatcc

SEQ ID NO: 1878719 - DNA, 25 bp, Homo sapien
cactggtatacacatcttagagcgt

SEQ ID NO: 1878720 - DNA, 25 bp, Homo sapien
cagatacagttgcacatggatttga

SEQ ID NO: 1878721 - DNA, 25 bp, Homo sapien
gctcctggccaagtatgccatattt

SEQ ID NO: 1878722 - DNA, 25 bp, Homo sapien
tgctcctggccaagtatgccatatt

SEQ ID NO: 1878723 - DNA, 25 bp, Homo sapien
catttataactcacaattaaactaa

SEQ ID NO: 1878724 - DNA, 25 bp, Homo sapien
tgagttcatttataactcacaatta

SEQ ID NO: 1878725 - DNA, 25 bp, Homo sapien
gattggaaagctgggtttaaatgga

SEQ ID NO: 1878726 - DNA, 25 bp, Homo sapien
agattggaaagctgggtttaaatgg

SEQ ID NO: 1878727 - DNA, 25 bp, Homo sapien
aagattggaaagctgggtttaaatg

SEQ ID NO: 1878728 - DNA, 25 bp, Homo sapien
caagattggaaagctgggtttaaat

SEQ ID NO: 1878729 - DNA, 25 bp, Homo sapien
aaatgttagctctatctggtgactc

SEQ ID NO: 1878730 - DNA, 25 bp, Homo sapien
gaatcgttttctttacatgcctctg

SEQ ID NO: 1878731 - DNA, 25 bp, Homo sapien
agtttatggatcttttggccgggcg

SEQ ID NO: 1878732 - DNA, 25 bp, Homo sapien
taaaccttcctggatagaacatagg

SEQ ID NO: 1878733 - DNA, 25 bp, Homo sapien
ctagcagcgcgatttcaggcatgtt

SEQ ID NO: 1878734 - DNA, 25 bp, Homo sapien
atttgaactaactactctctggagg

SEQ ID NO: 1878735 - DNA, 25 bp, Homo sapien
gcactgcatgaagaaggatatgggc

SEQ ID NO: 1878736 - DNA, 25 bp, Homo sapien
tgtgacatacagagattgtgcactg

SEQ ID NO: 1878737 - DNA, 25 bp, Homo sapien
tggagttcctggttctgtatatcgg

SEQ ID NO: 1878738 - DNA, 25 bp, Homo sapien
cctaaggcattgttttagcatggtg

SEQ ID NO: 1878739 - DNA, 25 bp, Homo sapien
tctctgacttggttagttagggtaa

SEQ ID NO: 1878740 - DNA, 25 bp, Homo sapien
tcggtgtccagtcatttgttcctaa

SEQ ID NO: 1878741 - DNA, 25 bp, Homo sapien
gactataacacgtctcagtgtgggt

SEQ ID NO: 1878742 - DNA, 25 bp, Homo sapien
ggatatgtagattcacctctttcat

SEQ ID NO: 1878743 - DNA, 25 bp, Homo sapien
cagatatagaattcttgatcgacat

SEQ ID NO: 1878744 - DNA, 25 bp, Homo sapien
tagggcaggtctactagtaaattct

SEQ ID NO: 1878745 - DNA, 25 bp, Homo sapien
tctaatataggtgtaacagtttccc

SEQ ID NO: 1878746 - DNA, 25 bp, Homo sapien
aaaaaggaaagctcttgacagttgt

SEQ ID NO: 1878747 - DNA, 25 bp, Homo sapien
tgtttcccaaatagcattagttctt

SEQ ID NO: 1878748 - DNA, 25 bp, Homo sapien
gtatttttgtgctaatgtgcaaaca

SEQ ID NO: 1878749 - DNA, 25 bp, Homo sapien
gacagcaccttgttgccagagattc

SEQ ID NO: 1878750 - DNA, 25 bp, Homo sapien
gattctacacaaaggtgtgatggac

SEQ ID NO: 1878751 - DNA, 25 bp, Homo sapien
taagtggtcaagcaaggctctagga

SEQ ID NO: 1878752 - DNA, 25 bp, Homo sapien
tctttccgaaatgaccacattgtgc

SEQ ID NO: 1878753 - DNA, 25 bp, Homo sapien
caggtagcttgaaccagaatggtgg

SEQ ID NO: 1878754 - DNA, 25 bp, Homo sapien
gtggcggtagaattgggaagaatct

SEQ ID NO: 1878755 - DNA, 25 bp, Homo sapien
aaccagaatggtggcggtagaattg

SEQ ID NO: 1878756 - DNA, 25 bp, Homo sapien
gggaagaatctggatatattctgaa

SEQ ID NO: 1878757 - DNA, 25 bp, Homo sapien
tgggagaaactaaacgaagccgtca

SEQ ID NO: 1878758 - DNA, 25 bp, Homo sapien
tacttttaggttgcatgaagaggcg

SEQ ID NO: 1878759 - DNA, 25 bp, Homo sapien
cacattaggcgctcggtctctgcgt

SEQ ID NO: 1878760 - DNA, 25 bp, Homo sapien
cagacgatccgctagccacattagg

SEQ ID NO: 1878761 - DNA, 25 bp, Homo sapien
tgtcagttcattacagcagccactt

SEQ ID NO: 1878762 - DNA, 25 bp, Homo sapien
gatcagtgacggtgagagccatctc

SEQ ID NO: 1878763 - DNA, 25 bp, Homo sapien
gacttttggtatgcgtacaccaggc

SEQ ID NO: 1878764 - DNA, 25 bp, Homo sapien
ccctggctaggagagataggaaaaa

SEQ ID NO: 1878765 - DNA, 25 bp, Homo sapien
caccttgggcatttagtttactaga

SEQ ID NO: 1878766 - DNA, 25 bp, Homo sapien
ggtataaccacttagttgacactga

SEQ ID NO: 1878767 - DNA, 25 bp, Homo sapien
ttctttaccttaagcagcacacaca

SEQ ID NO: 1878768 - DNA, 25 bp, Homo sapien
catggaatcacgcagtcaccttggg

SEQ ID NO: 1878769 - DNA, 25 bp, Homo sapien
tataaagtctgcttaattgtcaact

SEQ ID NO: 1878770 - DNA, 25 bp, Homo sapien
tatagacgttttcatggcctcacac

SEQ ID NO: 1878771 - DNA, 25 bp, Homo sapien
tgtgagaaaaccacctataatttac

SEQ ID NO: 1878772 - DNA, 25 bp, Homo sapien
taaaattcctatattgtaacttgcc

SEQ ID NO: 1878773 - DNA, 25 bp, Homo sapien
ctttaaagaagttgcattatatatt

SEQ ID NO: 1878774 - DNA, 25 bp, Homo sapien
tgatacaatcatacatatcacacaa

SEQ ID NO: 1878775 - DNA, 25 bp, Homo sapien
tttactatttagatccacactgttg

SEQ ID NO: 1878776 - DNA, 25 bp, Homo sapien
tctttaaagaagttgcattatatat

SEQ ID NO: 1878777 - DNA, 25 bp, Homo sapien
taagctccagagtgtaactgcaacc

SEQ ID NO: 1878778 - DNA, 25 bp, Homo sapien
taggtaggtgccatgtggaacaagc

SEQ ID NO: 1878779 - DNA, 25 bp, Homo sapien
taacgtgtgctatcaactttgggca

SEQ ID NO: 1878780 - DNA, 25 bp, Homo sapien
ctcacaggtccaaggagtacatgtt

SEQ ID NO: 1878781 - DNA, 25 bp, Homo sapien
tatgtctacgcaaaagattagccgt

SEQ ID NO: 1878782 - DNA, 25 bp, Homo sapien
gagcacaaatgcacaatcacctgga

SEQ ID NO: 1878783 - DNA, 25 bp, Homo sapien
tatcagcaatgggagtggtgacaac

SEQ ID NO: 1878784 - DNA, 25 bp, Homo sapien
ggtaacacgcttttagccacacagc

SEQ ID NO: 1878785 - DNA, 25 bp, Homo sapien
gctggaaagctactgtcccaagtga

SEQ ID NO: 1878786 - DNA, 25 bp, Homo sapien
tatgtgggactgacagctcttgaga

SEQ ID NO: 1878787 - DNA, 25 bp, Homo sapien
tctgcaataaggctcacctgggaga

SEQ ID NO: 1878788 - DNA, 25 bp, Homo sapien
gctgaccttatgagagcaggagctc

SEQ ID NO: 1878789 - DNA, 25 bp, Homo sapien
gagtgacttccaccagatgtattaa

SEQ ID NO: 1878790 - DNA, 25 bp, Homo sapien
cattgagggtacctgaattctgacc

SEQ ID NO: 1878791 - DNA, 25 bp, Homo sapien
gctacagctgctaaaaggatttctg

SEQ ID NO: 1878792 - DNA, 25 bp, Homo sapien
tgatgacatctccaccattgagggt

SEQ ID NO: 1878793 - DNA, 25 bp, Homo sapien
tactacttgaatgcgttagttctgg

SEQ ID NO: 1878794 - DNA, 25 bp, Homo sapien
ttgaatgcgttagttctggatcctc

SEQ ID NO: 1878795 - DNA, 25 bp, Homo sapien
tcctcagctatttgttgtttgagtt

SEQ ID NO: 1878796 - DNA, 25 bp, Homo sapien
caatcttgttactacttgaatgcgt

SEQ ID NO: 1878797 - DNA, 25 bp, Homo sapien
actgatgttctgtagaatcttaact

SEQ ID NO: 1878798 - DNA, 25 bp, Homo sapien
gatgttctgtagaatcttaacttta

SEQ ID NO: 1878799 - DNA, 25 bp, Homo sapien
ctgatgttctgtagaatcttaactt

SEQ ID NO: 1878800 - DNA, 25 bp, Homo sapien
tgttctgtagaatcttaactttaac

SEQ ID NO: 1878801 - DNA, 25 bp, Homo sapien
ccagaagatcaatcttgttttgcac

SEQ ID NO: 1878802 - DNA, 25 bp, Homo sapien
ttctttatacaagaatcatccagaa

SEQ ID NO: 1878803 - DNA, 25 bp, Homo sapien
gaaactgcttcaaaagattccctat

SEQ ID NO: 1878804 - DNA, 25 bp, Homo sapien
tgttttgcacaagtacagttggtat

SEQ ID NO: 1878805 - DNA, 25 bp, Homo sapien
agagaacacgagcacacaagcctgg

SEQ ID NO: 1878806 - DNA, 25 bp, Homo sapien
tggtagagaacacgagcacacaagc

SEQ ID NO: 1878807 - DNA, 25 bp, Homo sapien
ctgtggtagagaacacgagcacaca

SEQ ID NO: 1878808 - DNA, 25 bp, Homo sapien
aacacgagcacacaagcctgggctc

SEQ ID NO: 1878809 - DNA, 25 bp, Homo sapien
actaatttttctatacttttagcag

SEQ ID NO: 1878810 - DNA, 25 bp, Homo sapien
cactgtgcccaaccagttttgcctt

SEQ ID NO: 1878811 - DNA, 25 bp, Homo sapien
ctcaggtgacctgccggccgcagcc

SEQ ID NO: 1878812 - DNA, 25 bp, Homo sapien
ctgtgcccaaccagttttgcctttt

SEQ ID NO: 1878813 - DNA, 25 bp, Homo sapien
caggtgacctgccggccgcagcctc

SEQ ID NO: 1878814 - DNA, 25 bp, Homo sapien
cactattggcagttgagttacagga

SEQ ID NO: 1878815 - DNA, 25 bp, Homo sapien
gacttcatgtgtcgtaacaaatgcc

SEQ ID NO: 1878816 - DNA, 25 bp, Homo sapien
taatgccacatggtattccaccaag

SEQ ID NO: 1878817 - DNA, 25 bp, Homo sapien
gatttggtctgggaatgcctacatg

SEQ ID NO: 1878818 - DNA, 25 bp, Homo sapien
atagtaggcctttgtaattgcatca

SEQ ID NO: 1878819 - DNA, 25 bp, Homo sapien
ctgacctgcagtgtcccataacatt

SEQ ID NO: 1878820 - DNA, 25 bp, Homo sapien
cagtgtcccataacattagtctgac

SEQ ID NO: 1878821 - DNA, 25 bp, Homo sapien
taacattagtctgacatcttcatca

SEQ ID NO: 1878822 - DNA, 25 bp, Homo sapien
tgcagcactacacttaggagccttc

SEQ ID NO: 1878823 - DNA, 25 bp, Homo sapien
gaattcacgaccaacagcactataa

SEQ ID NO: 1878824 - DNA, 25 bp, Homo sapien
cctatacttaggaatgctagacagc

SEQ ID NO: 1878825 - DNA, 25 bp, Homo sapien
tatgaggtactgaaacaagaaagca

SEQ ID NO: 1878826 - DNA, 25 bp, Homo sapien
tgaatttgtcgctccaaaaaatcaa

SEQ ID NO: 1878827 - DNA, 25 bp, Homo sapien
ttgcaatatcgctgaatcatacttg

SEQ ID NO: 1878828 - DNA, 25 bp, Homo sapien
gaatttgtcgctccaaaaaatcaac

SEQ ID NO: 1878829 - DNA, 25 bp, Homo sapien
atgcctttgcaatatcgctgaatca

SEQ ID NO: 1878830 - DNA, 25 bp, Homo sapien
tctaattctaggagatcagatcttc

SEQ ID NO: 1878831 - DNA, 25 bp, Homo sapien
ggtttctgtaccaactctaattcta

SEQ ID NO: 1878832 - DNA, 25 bp, Homo sapien
ttctaggagatcagatcttccctct

SEQ ID NO: 1878833 - DNA, 25 bp, Homo sapien
ttttggagctgaaatggtttctgta

SEQ ID NO: 1878834 - DNA, 25 bp, Homo sapien
cacactggttcagttcctagaaagc

SEQ ID NO: 1878835 - DNA, 25 bp, Homo sapien
gacccttgttcatccagctgtatct

SEQ ID NO: 1878836 - DNA, 25 bp, Homo sapien
tgacccttgttcatccagctgtatc

SEQ ID NO: 1878837 - DNA, 25 bp, Homo sapien
tctcacactggttcagttcctagaa

SEQ ID NO: 1878838 - DNA, 25 bp, Homo sapien
tagcaaccagtgtcaatggaacagc

SEQ ID NO: 1878839 - DNA, 25 bp, Homo sapien
gctgaggactctcttcgccatcaaa

SEQ ID NO: 1878840 - DNA, 25 bp, Homo sapien
actgcagggaggagtctaaatgcca

SEQ ID NO: 1878841 - DNA, 25 bp, Homo sapien
cggatctccgagtaaagttaattct

SEQ ID NO: 1878842 - DNA, 25 bp, Homo sapien
gagcggctagttcgcaccctctttc

SEQ ID NO: 1878843 - DNA, 25 bp, Homo sapien
tagctggaacttgggatcggtgctc

SEQ ID NO: 1878844 - DNA, 25 bp, Homo sapien
cccactccggagagtaaggcacaac

SEQ ID NO: 1878845 - DNA, 25 bp, Homo sapien
gagggcgagtgagtgcagcgccgct

SEQ ID NO: 1878846 - DNA, 25 bp, Homo sapien
ggcgcgggagtctcgactcccctca

SEQ ID NO: 1878847 - DNA, 25 bp, Homo sapien
tttattagtagccagggctcagatt

SEQ ID NO: 1878848 - DNA, 25 bp, Homo sapien
ggagtctcgactcccctcatctgtg

SEQ ID NO: 1878849 - DNA, 25 bp, Homo sapien
tattagtagccagggctcagattga

SEQ ID NO: 1878850 - DNA, 25 bp, Homo sapien
ggaactgcaactcatgtccaccttt

SEQ ID NO: 1878851 - DNA, 25 bp, Homo sapien
cactggaggtgccagtaaactcgca

SEQ ID NO: 1878852 - DNA, 25 bp, Homo sapien
ccaaattgccaagttagctcaggga

SEQ ID NO: 1878853 - DNA, 25 bp, Homo sapien
taaactcgcaaggtagcctttgtgt

SEQ ID NO: 1878854 - DNA, 25 bp, Homo sapien
gttttgtagattttgagcctagatt

SEQ ID NO: 1878855 - DNA, 25 bp, Homo sapien
agttttgtagattttgagcctagat

SEQ ID NO: 1878856 - DNA, 25 bp, Homo sapien
cagttttgtagattttgagcctaga

SEQ ID NO: 1878857 - DNA, 25 bp, Homo sapien
gctcctggtctggtgtaactgcttc

SEQ ID NO: 1878858 - DNA, 25 bp, Homo sapien
gcattttgatagtctaagctcctgg

SEQ ID NO: 1878859 - DNA, 25 bp, Homo sapien
gagcacaacctaagatagcattttg

SEQ ID NO: 1878860 - DNA, 25 bp, Homo sapien
ggtctggtgtaactgcttccactca

SEQ ID NO: 1878861 - DNA, 25 bp, Homo sapien
tccaatctccaggagatacgccgtc

SEQ ID NO: 1878862 - DNA, 25 bp, Homo sapien
tctccaatctccaggagatacgccg

SEQ ID NO: 1878863 - DNA, 25 bp, Homo sapien
tcctctccaatctccaggagatacg

SEQ ID NO: 1878864 - DNA, 25 bp, Homo sapien
agctcctctccaatctccaggagat

SEQ ID NO: 1878865 - DNA, 25 bp, Homo sapien
ttatggatgcctcatctcatcctgt

SEQ ID NO: 1878866 - DNA, 25 bp, Homo sapien
tttccactgtgggttgtattgatca

SEQ ID NO: 1878867 - DNA, 25 bp, Homo sapien
ccactgtgggttgtattgatcagaa

SEQ ID NO: 1878868 - DNA, 25 bp, Homo sapien
atggatgcctcatctcatcctgttg

SEQ ID NO: 1878869 - DNA, 25 bp, Homo sapien
cttctccatactgccgaggatccat

SEQ ID NO: 1878870 - DNA, 25 bp, Homo sapien
gatctcttcttggcttctaggcctt

SEQ ID NO: 1878871 - DNA, 25 bp, Homo sapien
gccttctccatactgccgaggatcc

SEQ ID NO: 1878872 - DNA, 25 bp, Homo sapien
ccttctccatactgccgaggatcca

SEQ ID NO: 1878873 - DNA, 25 bp, Homo sapien
gaaattttggccaggtcatgttcct

SEQ ID NO: 1878874 - DNA, 25 bp, Homo sapien
caatggatataagtagccgggcaga

SEQ ID NO: 1878875 - DNA, 25 bp, Homo sapien
ccttggtggatttcctttgcataaa

SEQ ID NO: 1878876 - DNA, 25 bp, Homo sapien
ggcagacaaacatcccaggagaaga

SEQ ID NO: 1878877 - DNA, 25 bp, Homo sapien
tgaactgacccagaaaccagagggc

SEQ ID NO: 1878878 - DNA, 25 bp, Homo sapien
ggacaagactagcacatggcctcaa

SEQ ID NO: 1878879 - DNA, 25 bp, Homo sapien
ggtccatagaagagatggccgctgc

SEQ ID NO: 1878880 - DNA, 25 bp, Homo sapien
ggaataggcacacagcagtgacaga

SEQ ID NO: 1878881 - DNA, 25 bp, Homo sapien
gtttccaaagaagttcccttgctca

SEQ ID NO: 1878882 - DNA, 25 bp, Homo sapien
tttccaaagaagttcccttgctcac

SEQ ID NO: 1878883 - DNA, 25 bp, Homo sapien
ttgccgaggctgaaacttttccagg

SEQ ID NO: 1878884 - DNA, 25 bp, Homo sapien
gctttgccgaggctgaaacttttcc

SEQ ID NO: 1878885 - DNA, 25 bp, Homo sapien
tctttcacagttgccatcgtcttct

SEQ ID NO: 1878886 - DNA, 25 bp, Homo sapien
gccatcgtcttctgccctgttattt

SEQ ID NO: 1878887 - DNA, 25 bp, Homo sapien
caagggtgttgcctcttagtgttcc

SEQ ID NO: 1878888 - DNA, 25 bp, Homo sapien
tgttcccaaagagtctggtccttgg

SEQ ID NO: 1878889 - DNA, 25 bp, Homo sapien
gggtgttgcctcttagtgttcccaa

SEQ ID NO: 1878890 - DNA, 25 bp, Homo sapien
ttagtgttcccaaagagtctggtcc

SEQ ID NO: 1878891 - DNA, 25 bp, Homo sapien
gcctcctgatttatcgcactgattt

SEQ ID NO: 1878892 - DNA, 25 bp, Homo sapien
tcattttagtggtagctttcttgct

SEQ ID NO: 1878893 - DNA, 25 bp, Homo sapien
taatgacaccaagccatgaatttca

SEQ ID NO: 1878894 - DNA, 25 bp, Homo sapien
tgcttaataactggttgtcgtcggg

SEQ ID NO: 1878895 - DNA, 25 bp, Homo sapien
ggtggtggtttagcatatgagtctc

SEQ ID NO: 1878896 - DNA, 25 bp, Homo sapien
ttcttttgccaagcaccacttggca

SEQ ID NO: 1878897 - DNA, 25 bp, Homo sapien
gattgacgttctttgtctgctaaaa

SEQ ID NO: 1878898 - DNA, 25 bp, Homo sapien
tccacagaaggattgacgttctttg

SEQ ID NO: 1878899 - DNA, 25 bp, Homo sapien
gacaagtgttgaagtttaagccctc

SEQ ID NO: 1878900 - DNA, 25 bp, Homo sapien
tgttgaagtttaagccctcttggac

SEQ ID NO: 1878901 - DNA, 25 bp, Homo sapien
caagtgttgaagtttaagccctctt

SEQ ID NO: 1878902 - DNA, 25 bp, Homo sapien
gagggacaagtgttgaagtttaagc

SEQ ID NO: 1878903 - DNA, 25 bp, Homo sapien
aactgaagcatttgatctggggctg

SEQ ID NO: 1878904 - DNA, 25 bp, Homo sapien
ggttctgtgtgtgggttaggtgagg

SEQ ID NO: 1878905 - DNA, 25 bp, Homo sapien
cttggttctaagagttgcttgtgtg

SEQ ID NO: 1878906 - DNA, 25 bp, Homo sapien
agttgcttgtgtggcctggttctgt

SEQ ID NO: 1878907 - DNA, 25 bp, Homo sapien
tggaaagaaagcagtaggtgagatg

SEQ ID NO: 1878908 - DNA, 25 bp, Homo sapien
ggaaagaaagcagtaggtgagatgc

SEQ ID NO: 1878909 - DNA, 25 bp, Homo sapien
ctggaaagaaagcagtaggtgagat

SEQ ID NO: 1878910 - DNA, 25 bp, Homo sapien
catatggataaacttgaagcaaaga

SEQ ID NO: 1878911 - DNA, 25 bp, Homo sapien
gaagcaaagatattggattaaaccc

SEQ ID NO: 1878912 - DNA, 25 bp, Homo sapien
cttgaagcaaagatattggattaaa

SEQ ID NO: 1878913 - DNA, 25 bp, Homo sapien
gcaaagatattggattaaaccccat

SEQ ID NO: 1878914 - DNA, 25 bp, Homo sapien
tggttcctatcctgtgtgtctcttc

SEQ ID NO: 1878915 - DNA, 25 bp, Homo sapien
atggttcctatcctgtgtgtctctt

SEQ ID NO: 1878916 - DNA, 25 bp, Homo sapien
aactttcatggcgatgtctgcacct

SEQ ID NO: 1878917 - DNA, 25 bp, Homo sapien
catgtaactttgtgtcctttgccag

SEQ ID NO: 1878918 - DNA, 25 bp, Homo sapien
gccagtcccactctcttgtgtagtg

SEQ ID NO: 1878919 - DNA, 25 bp, Homo sapien
tctagagttgctcttgagaagcctg

SEQ ID NO: 1878920 - DNA, 25 bp, Homo sapien
caggcaccagttcatttggtctccc

SEQ ID NO: 1878921 - DNA, 25 bp, Homo sapien
caaatccatcaatatgcaagtagca

SEQ ID NO: 1878922 - DNA, 25 bp, Homo sapien
gcatatcacgatatgcaagcataac

SEQ ID NO: 1878923 - DNA, 25 bp, Homo sapien
tttcacttccaccattactgtcagg

SEQ ID NO: 1878924 - DNA, 25 bp, Homo sapien
gattataggcactaggcggcatgcc

SEQ ID NO: 1878925 - DNA, 25 bp, Homo sapien
caggatgtctgaactgtatgaccag

SEQ ID NO: 1878926 - DNA, 25 bp, Homo sapien
tgtgagcaccacagaatttggtgag

SEQ ID NO: 1878927 - DNA, 25 bp, Homo sapien
taggactccggaggaataacattcg

SEQ ID NO: 1878928 - DNA, 25 bp, Homo sapien
gcattgtagcgtaatcagctgtgaa

SEQ ID NO: 1878929 - DNA, 25 bp, Homo sapien
taatggcagatttaatggatgggac

SEQ ID NO: 1878930 - DNA, 25 bp, Homo sapien
tgcagctacttgagtgaactacagt

SEQ ID NO: 1878931 - DNA, 25 bp, Homo sapien
gatgggacactttgtagcttctgca

SEQ ID NO: 1878932 - DNA, 25 bp, Homo sapien
tatgtgtccggtacattgttgtgtt

SEQ ID NO: 1878933 - DNA, 25 bp, Homo sapien
gcagatgcaaactgtgatagatctt

SEQ ID NO: 1878934 - DNA, 25 bp, Homo sapien
tgcaaactgtgatagatcttccttc

SEQ ID NO: 1878935 - DNA, 25 bp, Homo sapien
ttggtgatttatgtgtccggtacat

SEQ ID NO: 1878936 - DNA, 25 bp, Homo sapien
tagctttctagttgtagaggaaatg

SEQ ID NO: 1878937 - DNA, 25 bp, Homo sapien
ctggatagatatagctttctagttg

SEQ ID NO: 1878938 - DNA, 25 bp, Homo sapien
tagatatagctttctagttgtagag

SEQ ID NO: 1878939 - DNA, 25 bp, Homo sapien
tatagctttctagttgtagaggaaa

SEQ ID NO: 1878940 - DNA, 25 bp, Homo sapien
gacatagagatactgttgtgatcct

SEQ ID NO: 1878941 - DNA, 25 bp, Homo sapien
gatagggcagtcaaaaccgttgcta

SEQ ID NO: 1878942 - DNA, 25 bp, Homo sapien
taactatactctgaacaagataggg

SEQ ID NO: 1878943 - DNA, 25 bp, Homo sapien
ccgttgctaataggttagacataga

SEQ ID NO: 1878944 - DNA, 25 bp, Homo sapien
tactggtggggattttgcctctgta

SEQ ID NO: 1878945 - DNA, 25 bp, Homo sapien
actggtggggattttgcctctgtac

SEQ ID NO: 1878946 - DNA, 25 bp, Homo sapien
ctactggtggggattttgcctctgt

SEQ ID NO: 1878947 - DNA, 25 bp, Homo sapien
tctactggtggggattttgcctctg

SEQ ID NO: 1878948 - DNA, 25 bp, Homo sapien
ggtctatggcatagtcatgtgagtc

SEQ ID NO: 1878949 - DNA, 25 bp, Homo sapien
tccacctgtgcaggactgtggtaag

SEQ ID NO: 1878950 - DNA, 25 bp, Homo sapien
ccagctagcaagctgtgattcctgt

SEQ ID NO: 1878951 - DNA, 25 bp, Homo sapien
ccatggaagaggaatacttgaagct

SEQ ID NO: 1878952 - DNA, 25 bp, Homo sapien
cctaacttctagcgcagctctgttc

SEQ ID NO: 1878953 - DNA, 25 bp, Homo sapien
tgcctgatcggtatctgtctcttcc

SEQ ID NO: 1878954 - DNA, 25 bp, Homo sapien
gaattgactgcctgatcggtatctg

SEQ ID NO: 1878955 - DNA, 25 bp, Homo sapien
tcttgaattgactgcctgatcggta

SEQ ID NO: 1878956 - DNA, 25 bp, Homo sapien
taggtatagagggtgactgtgccaa

SEQ ID NO: 1878957 - DNA, 25 bp, Homo sapien
gtaaaactcatggaaatggaggatg

SEQ ID NO: 1878958 - DNA, 25 bp, Homo sapien
ctcatggaaatggaggatgtgctga

SEQ ID NO: 1878959 - DNA, 25 bp, Homo sapien
ggtgggcaggagcagtaaaactcat

SEQ ID NO: 1878960 - DNA, 25 bp, Homo sapien
ggctaagccagcactattatgttgc

SEQ ID NO: 1878961 - DNA, 25 bp, Homo sapien
tacagtttgagttcctagcatatgc

SEQ ID NO: 1878962 - DNA, 25 bp, Homo sapien
tactcgcagaaggaagactagactt

SEQ ID NO: 1878963 - DNA, 25 bp, Homo sapien
gcagtgtcttatggccttagagcaa

SEQ ID NO: 1878964 - DNA, 25 bp, Homo sapien
tgcactgccaatgggagtcagtcag

SEQ ID NO: 1878965 - DNA, 25 bp, Homo sapien
tgttgttgtacgtatagctttaaaa

SEQ ID NO: 1878966 - DNA, 25 bp, Homo sapien
gatgatttaggataagcccctttcc

SEQ ID NO: 1878967 - DNA, 25 bp, Homo sapien
tgacatcgtaacaggttcttctttg

SEQ ID NO: 1878968 - DNA, 25 bp, Homo sapien
cagtggcattcatatcaatgaataa

SEQ ID NO: 1878969 - DNA, 25 bp, Homo sapien
atcagtggcattcatatcaatgaat

SEQ ID NO: 1878970 - DNA, 25 bp, Homo sapien
tcagtggcattcatatcaatgaata

SEQ ID NO: 1878971 - DNA, 25 bp, Homo sapien
tttgatctattgacatcactgaaag

SEQ ID NO: 1878972 - DNA, 25 bp, Homo sapien
tggtctgcttaatgagtggccgcat

SEQ ID NO: 1878973 - DNA, 25 bp, Homo sapien
cactgaaagtggtctgcttaatgag

SEQ ID NO: 1878974 - DNA, 25 bp, Homo sapien
ctttcttttgatctattgacatcac

SEQ ID NO: 1878975 - DNA, 25 bp, Homo sapien
ttgacctttacgaggtcccatagag

SEQ ID NO: 1878976 - DNA, 25 bp, Homo sapien
tatgaggatgagctgagggcaaagc

SEQ ID NO: 1878977 - DNA, 25 bp, Homo sapien
tagtggagctgagtagaaaattatg

SEQ ID NO: 1878978 - DNA, 25 bp, Homo sapien
tacgaggtcccatagagatatgagg

SEQ ID NO: 1878979 - DNA, 25 bp, Homo sapien
ttgggaacaggtactggctgatcct

SEQ ID NO: 1878980 - DNA, 25 bp, Homo sapien
aggtactggctgatcctgggcttca

SEQ ID NO: 1878981 - DNA, 25 bp, Homo sapien
tgatcctgggcttcatctgaaggag

SEQ ID NO: 1878982 - DNA, 25 bp, Homo sapien
ctgggcttcatctgaaggagatgga

SEQ ID NO: 1878983 - DNA, 25 bp, Homo sapien
tgcatattggtgtattgccagtgcc

SEQ ID NO: 1878984 - DNA, 25 bp, Homo sapien
caccttcagacctgtcttgactttc

SEQ ID NO: 1878985 - DNA, 25 bp, Homo sapien
tgggatgtctggactaacttggaag

SEQ ID NO: 1878986 - DNA, 25 bp, Homo sapien
ttgcaaactgccacgtgcccacctt

SEQ ID NO: 1878987 - DNA, 25 bp, Homo sapien
tcttgtcaaaggtacattgtctgct

SEQ ID NO: 1878988 - DNA, 25 bp, Homo sapien
tgtctgcttttggttgaccaacggg

SEQ ID NO: 1878989 - DNA, 25 bp, Homo sapien
gtattgaatatttgctcttgccaga

SEQ ID NO: 1878990 - DNA, 25 bp, Homo sapien
gtatgggttgttatgccagatgagt

SEQ ID NO: 1878991 - DNA, 25 bp, Homo sapien
agcatcataggattgttcatttctg

SEQ ID NO: 1878992 - DNA, 25 bp, Homo sapien
aagcatcataggattgttcatttct

SEQ ID NO: 1878993 - DNA, 25 bp, Homo sapien
gcatcataggattgttcatttctgg

SEQ ID NO: 1878994 - DNA, 25 bp, Homo sapien
catcataggattgttcatttctggg

SEQ ID NO: 1878995 - DNA, 25 bp, Homo sapien
gttacccaacaacaggagacatgaa

SEQ ID NO: 1878996 - DNA, 25 bp, Homo sapien
taaaccaggtagatcatagtctagg

SEQ ID NO: 1878997 - DNA, 25 bp, Homo sapien
gtttgctgcaaacataattgtggct

SEQ ID NO: 1878998 - DNA, 25 bp, Homo sapien
taataccatatacagcagtaccaga

SEQ ID NO: 1878999 - DNA, 25 bp, Homo sapien
tcatctgaacctcgctggcaggcat

SEQ ID NO: 1879000 - DNA, 25 bp, Homo sapien
gctgccaggtaatcatctgaacctc

SEQ ID NO: 1879001 - DNA, 25 bp, Homo sapien
caggtaatcatctgaacctcgctgg

SEQ ID NO: 1879002 - DNA, 25 bp, Homo sapien
taatcatctgaacctcgctggcagg

SEQ ID NO: 1879003 - DNA, 25 bp, Homo sapien
ctgtcacttgagtgatgtcattcaa

SEQ ID NO: 1879004 - DNA, 25 bp, Homo sapien
caggtttgaggtaacgagactttca

SEQ ID NO: 1879005 - DNA, 25 bp, Homo sapien
gcatcccaatccatctacaggcatg

SEQ ID NO: 1879006 - DNA, 25 bp, Homo sapien
caggcatgcacacttattaggaaag

SEQ ID NO: 1879007 - DNA, 25 bp, Homo sapien
tgagagtttgacagcagttctgaat

SEQ ID NO: 1879008 - DNA, 25 bp, Homo sapien
gagagtttgacagcagttctgaatg

SEQ ID NO: 1879009 - DNA, 25 bp, Homo sapien
agtgagagtttgacagcagttctga

SEQ ID NO: 1879010 - DNA, 25 bp, Homo sapien
aagtgagagtttgacagcagttctg

SEQ ID NO: 1879011 - DNA, 25 bp, Homo sapien
attggcattgtaggcaattagcttc

SEQ ID NO: 1879012 - DNA, 25 bp, Homo sapien
cataattggcattgtaggcaattag

SEQ ID NO: 1879013 - DNA, 25 bp, Homo sapien
tggcattgtaggcaattagcttcat

SEQ ID NO: 1879014 - DNA, 25 bp, Homo sapien
cattgtaggcaattagcttcatgga

SEQ ID NO: 1879015 - DNA, 25 bp, Homo sapien
tcaaatcaagcataattcaggttca

SEQ ID NO: 1879016 - DNA, 25 bp, Homo sapien
aattcgccatgaccaaactgctgct

SEQ ID NO: 1879017 - DNA, 25 bp, Homo sapien
caggttcatgaacatatggagataa

SEQ ID NO: 1879018 - DNA, 25 bp, Homo sapien
taatgatggcttagaaaattcgcca

SEQ ID NO: 1879019 - DNA, 25 bp, Homo sapien
tgtgaatcagcaaatatctaatggg

SEQ ID NO: 1879020 - DNA, 25 bp, Homo sapien
cagtgtactttctatcccaatgctc

SEQ ID NO: 1879021 - DNA, 25 bp, Homo sapien
tgggttgaaaggatgccatgtcccc

SEQ ID NO: 1879022 - DNA, 25 bp, Homo sapien
ccattgttcggcctttaaacttgct

SEQ ID NO: 1879023 - DNA, 25 bp, Homo sapien
atccagaatgcggacaaggccagca

SEQ ID NO: 1879024 - DNA, 25 bp, Homo sapien
gatgatggcaagatggacatccagc

SEQ ID NO: 1879025 - DNA, 25 bp, Homo sapien
cagacatccagaatgcggacaaggc

SEQ ID NO: 1879026 - DNA, 25 bp, Homo sapien
cagaatgcggacaaggccagcagga

SEQ ID NO: 1879027 - DNA, 25 bp, Homo sapien
ctaggttgtacctgcatgaagctgg

SEQ ID NO: 1879028 - DNA, 25 bp, Homo sapien
tgtacctgcatgaagctggtcaaag

SEQ ID NO: 1879029 - DNA, 25 bp, Homo sapien
taggttgtacctgcatgaagctggt

SEQ ID NO: 1879030 - DNA, 25 bp, Homo sapien
ggttgtacctgcatgaagctggtca

SEQ ID NO: 1879031 - DNA, 25 bp, Homo sapien
gctgatgcatacagccaaggagtct

SEQ ID NO: 1879032 - DNA, 25 bp, Homo sapien
atgcatacagccaaggagtctgctt

SEQ ID NO: 1879033 - DNA, 25 bp, Homo sapien
ctgatgcatacagccaaggagtctg

SEQ ID NO: 1879034 - DNA, 25 bp, Homo sapien
gatgcatacagccaaggagtctgct

SEQ ID NO: 1879035 - DNA, 25 bp, Homo sapien
taagggtagagatgcactagacaaa

SEQ ID NO: 1879036 - DNA, 25 bp, Homo sapien
tacaaatacgcagctgatggagaag

SEQ ID NO: 1879037 - DNA, 25 bp, Homo sapien
ttcagagtattgttctagacactgg

SEQ ID NO: 1879038 - DNA, 25 bp, Homo sapien
caaaagactggctggttaacttata

SEQ ID NO: 1879039 - DNA, 25 bp, Homo sapien
caggagcgggggtggctgagacttg

SEQ ID NO: 1879040 - DNA, 25 bp, Homo sapien
gagcgggggtggctgagacttgaca

SEQ ID NO: 1879041 - DNA, 25 bp, Homo sapien
ggagcgggggtggctgagacttgac

SEQ ID NO: 1879042 - DNA, 25 bp, Homo sapien
aggagcgggggtggctgagacttga

SEQ ID NO: 1879043 - DNA, 25 bp, Homo sapien
cccatccagggctctatattgcaga

SEQ ID NO: 1879044 - DNA, 25 bp, Homo sapien
cagggctctatattgcagatcccca

SEQ ID NO: 1879045 - DNA, 25 bp, Homo sapien
tccagggctctatattgcagatccc

SEQ ID NO: 1879046 - DNA, 25 bp, Homo sapien
catccagggctctatattgcagatc

SEQ ID NO: 1879047 - DNA, 25 bp, Homo sapien
tcaagggattctgccaggataaata

SEQ ID NO: 1879048 - DNA, 25 bp, Homo sapien
gattctgccaggataaatagctatg

SEQ ID NO: 1879049 - DNA, 25 bp, Homo sapien
aagggattctgccaggataaatagc

SEQ ID NO: 1879050 - DNA, 25 bp, Homo sapien
ctgccaggataaatagctatgggcc

SEQ ID NO: 1879051 - DNA, 25 bp, Homo sapien
gaagagtgacagctacagtattcca

SEQ ID NO: 1879052 - DNA, 25 bp, Homo sapien
ccttgtgcattgtagcatgcagaag

SEQ ID NO: 1879053 - DNA, 25 bp, Homo sapien
agaagagtgacagctacagtattcc

SEQ ID NO: 1879054 - DNA, 25 bp, Homo sapien
ttgtagcatgcagaagaagagtgac

SEQ ID NO: 1879055 - DNA, 25 bp, Homo sapien
aagccaaagatgctgtgcactgcag

SEQ ID NO: 1879056 - DNA, 25 bp, Homo sapien
ctgtgcactgcagctaccacttgcc

SEQ ID NO: 1879057 - DNA, 25 bp, Homo sapien
ccagactgctgtggcttctagagga

SEQ ID NO: 1879058 - DNA, 25 bp, Homo sapien
tcccagactgctgtggcttctagag

SEQ ID NO: 1879059 - DNA, 25 bp, Homo sapien
cagagttatcgctgaggacaatgcc

SEQ ID NO: 1879060 - DNA, 25 bp, Homo sapien
tcagaatatgagcttgacagagtta

SEQ ID NO: 1879061 - DNA, 25 bp, Homo sapien
gaaggtcgatgtcactgttatagtt

SEQ ID NO: 1879062 - DNA, 25 bp, Homo sapien
ccaacgtcgaaagtggaaggtcgat

SEQ ID NO: 1879063 - DNA, 25 bp, Homo sapien
ctaagcagttggtggaacagaaagc

SEQ ID NO: 1879064 - DNA, 25 bp, Homo sapien
tgtctgtggagctccatagctgtca

SEQ ID NO: 1879065 - DNA, 25 bp, Homo sapien
ttggcaacactagttaattgcaggg

SEQ ID NO: 1879066 - DNA, 25 bp, Homo sapien
tagctgtcatcccagtttccgagag

SEQ ID NO: 1879067 - DNA, 25 bp, Homo sapien
cttttccaaggtagtgatgatgctg

SEQ ID NO: 1879068 - DNA, 25 bp, Homo sapien
gtcttttccaaggtagtgatgatgc

SEQ ID NO: 1879069 - DNA, 25 bp, Homo sapien
ctagtcttttccaaggtagtgatga

SEQ ID NO: 1879070 - DNA, 25 bp, Homo sapien
ttccaaggtagtgatgatgctggtg

SEQ ID NO: 1879071 - DNA, 25 bp, Homo sapien
ctggcatccccttgtttgatttgga

SEQ ID NO: 1879072 - DNA, 25 bp, Homo sapien
ttgtttgatttggatgggatcttgc

SEQ ID NO: 1879073 - DNA, 25 bp, Homo sapien
aagataatcagcactggcatcccct

SEQ ID NO: 1879074 - DNA, 25 bp, Homo sapien
tcagcactggcatccccttgtttga

SEQ ID NO: 1879075 - DNA, 25 bp, Homo sapien
taattgaggtcaatgaagaggtcac

SEQ ID NO: 1879076 - DNA, 25 bp, Homo sapien
tgtggaccatgtaattgaggtcaat

SEQ ID NO: 1879077 - DNA, 25 bp, Homo sapien
catgtaattgaggtcaatgaagagg

SEQ ID NO: 1879078 - DNA, 25 bp, Homo sapien
ctggaacatgtggaccatgtaattg

SEQ ID NO: 1879079 - DNA, 25 bp, Homo sapien
accactttgctacagttaaaactgt

SEQ ID NO: 1879080 - DNA, 25 bp, Homo sapien
tggtgacaataaccactttgctaca

SEQ ID NO: 1879081 - DNA, 25 bp, Homo sapien
tgatggtgacaataaccactttgct

SEQ ID NO: 1879082 - DNA, 25 bp, Homo sapien
ccactttgctacagttaaaactgtc

SEQ ID NO: 1879083 - DNA, 25 bp, Homo sapien
ctagtgatcaggcacccagtaaggc

SEQ ID NO: 1879084 - DNA, 25 bp, Homo sapien
agtgatcaggcacccagtaaggcca

SEQ ID NO: 1879085 - DNA, 25 bp, Homo sapien
tcaggcacccagtaaggccaaatcc

SEQ ID NO: 1879086 - DNA, 25 bp, Homo sapien
tgatcaggcacccagtaaggccaaa

SEQ ID NO: 1879087 - DNA, 25 bp, Homo sapien
ccaggggtctcctagtccttgctgc

SEQ ID NO: 1879088 - DNA, 25 bp, Homo sapien
ggggtctcctagtccttgctgcatc

SEQ ID NO: 1879089 - DNA, 25 bp, Homo sapien
ggtctcctagtccttgctgcatcat

SEQ ID NO: 1879090 - DNA, 25 bp, Homo sapien
caggggtctcctagtccttgctgca

SEQ ID NO: 1879091 - DNA, 25 bp, Homo sapien
tgctgtcaaacttcaaaattgatcc

SEQ ID NO: 1879092 - DNA, 25 bp, Homo sapien
cagtctttgtactattaaggaagca

SEQ ID NO: 1879093 - DNA, 25 bp, Homo sapien
ggccagtctttgtactattaaggaa

SEQ ID NO: 1879094 - DNA, 25 bp, Homo sapien
gaaggtggatcaggcccagtctgct

SEQ ID NO: 1879095 - DNA, 25 bp, Homo sapien
tgatgtgataccaagataatgatgt

SEQ ID NO: 1879096 - DNA, 25 bp, Homo sapien
tgtgatgtgataccaagataatgat

SEQ ID NO: 1879097 - DNA, 25 bp, Homo sapien
gatgtgatgtgataccaagataatg

SEQ ID NO: 1879098 - DNA, 25 bp, Homo sapien
gtgatgtgatgtgataccaagataa

SEQ ID NO: 1879099 - DNA, 25 bp, Homo sapien
ctacactcagtgtggatccaaggac

SEQ ID NO: 1879100 - DNA, 25 bp, Homo sapien
actcagtgtggatccaaggaccaca

SEQ ID NO: 1879101 - DNA, 25 bp, Homo sapien
tcagtgtggatccaaggaccacatt

SEQ ID NO: 1879102 - DNA, 25 bp, Homo sapien
cagtgtggatccaaggaccacattt

SEQ ID NO: 1879103 - DNA, 25 bp, Homo sapien
gagtggaccgtatgcttgtgaacct

SEQ ID NO: 1879104 - DNA, 25 bp, Homo sapien
gaacctgccttctgtatcatcctca

SEQ ID NO: 1879105 - DNA, 25 bp, Homo sapien
gcttgtgaacctgccttctgtatca

SEQ ID NO: 1879106 - DNA, 25 bp, Homo sapien
atggcaaagagtggaccgtatgctt

SEQ ID NO: 1879107 - DNA, 25 bp, Homo sapien
aatctcagtcatgactatgataatc

SEQ ID NO: 1879108 - DNA, 25 bp, Homo sapien
tttcagccttgccaaagattcccac

SEQ ID NO: 1879109 - DNA, 25 bp, Homo sapien
cggacatgaggactaatctcagtca

SEQ ID NO: 1879110 - DNA, 25 bp, Homo sapien
catggaggaaggcttccctttgggc

SEQ ID NO: 1879111 - DNA, 25 bp, Homo sapien
ttcaccaagtcatatgatacaaaac

SEQ ID NO: 1879112 - DNA, 25 bp, Homo sapien
ggtacagaggtataaccatatccct

SEQ ID NO: 1879113 - DNA, 25 bp, Homo sapien
catatcccttcaccaagtcatatga

SEQ ID NO: 1879114 - DNA, 25 bp, Homo sapien
tgcaccaactgaatactgtcactca

SEQ ID NO: 1879115 - DNA, 25 bp, Homo sapien
catcttctgttaggcacccttgctg

SEQ ID NO: 1879116 - DNA, 25 bp, Homo sapien
tacacatttgagtctatcttctctc

SEQ ID NO: 1879117 - DNA, 25 bp, Homo sapien
gatgtggaagctacacatttgagtc

SEQ ID NO: 1879118 - DNA, 25 bp, Homo sapien
aggtgtccatttagacttaaaagtg

SEQ ID NO: 1879119 - DNA, 25 bp, Homo sapien
tggagagctagtgcctgcagaagat

SEQ ID NO: 1879120 - DNA, 25 bp, Homo sapien
tctactgctctatctggataatggc

SEQ ID NO: 1879121 - DNA, 25 bp, Homo sapien
agcagccgtctgtggtttgagtacc

SEQ ID NO: 1879122 - DNA, 25 bp, Homo sapien
tgagctcttgttcggaagcagccgt

SEQ ID NO: 1879123 - DNA, 25 bp, Homo sapien
tataagcaatatggttcagctgaac

SEQ ID NO: 1879124 - DNA, 25 bp, Homo sapien
cagctgaacttccatgagcctttcc

SEQ ID NO: 1879125 - DNA, 25 bp, Homo sapien
catcatataagcaatatggttcagc

SEQ ID NO: 1879126 - DNA, 25 bp, Homo sapien
gattatttgacatccactctgcaga

SEQ ID NO: 1879127 - DNA, 25 bp, Homo sapien
cactgtgggcagagctgtgatttca

SEQ ID NO: 1879128 - DNA, 25 bp, Homo sapien
gcactgtgggcagagctgtgatttc

SEQ ID NO: 1879129 - DNA, 25 bp, Homo sapien
tgggcagagctgtgatttcaagcat

SEQ ID NO: 1879130 - DNA, 25 bp, Homo sapien
tgtgggcagagctgtgatttcaagc

SEQ ID NO: 1879131 - DNA, 25 bp, Homo sapien
cctgattttctactggcttagtttt

SEQ ID NO: 1879132 - DNA, 25 bp, Homo sapien
agcctgattttctactggcttagtt

SEQ ID NO: 1879133 - DNA, 25 bp, Homo sapien
ctgattttctactggcttagttttc

SEQ ID NO: 1879134 - DNA, 25 bp, Homo sapien
gcctgattttctactggcttagttt

SEQ ID NO: 1879135 - DNA, 25 bp, Homo sapien
caaggtcagcaggtgtgtcatactc

SEQ ID NO: 1879136 - DNA, 25 bp, Homo sapien
gatgcgggcaccttgagaagaagat

SEQ ID NO: 1879137 - DNA, 25 bp, Homo sapien
gatctacaaccttggtgccaggcaa

SEQ ID NO: 1879138 - DNA, 25 bp, Homo sapien
tctttgccaattctgggatgcgggc

SEQ ID NO: 1879139 - DNA, 25 bp, Homo sapien
ctgccattgcttattctttcgagct

SEQ ID NO: 1879140 - DNA, 25 bp, Homo sapien
ttgcttattctttcgagctattccc

SEQ ID NO: 1879141 - DNA, 25 bp, Homo sapien
gcttttctgtgctgccattgcttat

SEQ ID NO: 1879142 - DNA, 25 bp, Homo sapien
gccattgcttattctttcgagctat

SEQ ID NO: 1879143 - DNA, 25 bp, Homo sapien
gcagcattaatagtccagtccctag

SEQ ID NO: 1879144 - DNA, 25 bp, Homo sapien
ccaggtgtgattcaggttagaccaa

SEQ ID NO: 1879145 - DNA, 25 bp, Homo sapien
ctttgcactaaagttccaggtgtga

SEQ ID NO: 1879146 - DNA, 25 bp, Homo sapien
aaaaagctgcagtattgcacaaggc

SEQ ID NO: 1879147 - DNA, 25 bp, Homo sapien
caaagtctgtgtcttgaaaccagtg

SEQ ID NO: 1879148 - DNA, 25 bp, Homo sapien
tcagtctgtgattggtaccactgga

SEQ ID NO: 1879149 - DNA, 25 bp, Homo sapien
cagacattcagtctgtgattggtac

SEQ ID NO: 1879150 - DNA, 25 bp, Homo sapien
gacattcagtctgtgattggtacca

SEQ ID NO: 1879151 - DNA, 25 bp, Homo sapien
cattcagtctgtgattggtaccact

SEQ ID NO: 1879152 - DNA, 25 bp, Homo sapien
ctgtgtgaacaagtaccccaaatca

SEQ ID NO: 1879153 - DNA, 25 bp, Homo sapien
gaagcactgtgtgaacaagtacccc

SEQ ID NO: 1879154 - DNA, 25 bp, Homo sapien
cttggtttggaagcactgtgtgaac

SEQ ID NO: 1879155 - DNA, 25 bp, Homo sapien
gcagtgtgagcgtcacttcagcagt

SEQ ID NO: 1879156 - DNA, 25 bp, Homo sapien
aggaaacatctactactgctgtatg

SEQ ID NO: 1879157 - DNA, 25 bp, Homo sapien
tatgccctgtaaacatggtcttcac

SEQ ID NO: 1879158 - DNA, 25 bp, Homo sapien
aacatctactactgctgtatgccct

SEQ ID NO: 1879159 - DNA, 25 bp, Homo sapien
gaaacatctactactgctgtatgcc

SEQ ID NO: 1879160 - DNA, 25 bp, Homo sapien
ccctcctttggaacagcactgatgt

SEQ ID NO: 1879161 - DNA, 25 bp, Homo sapien
ttttccctcctttggaacagcactg

SEQ ID NO: 1879162 - DNA, 25 bp, Homo sapien
ctcctttggaacagcactgatgtcc

SEQ ID NO: 1879163 - DNA, 25 bp, Homo sapien
ttccctcctttggaacagcactgat

SEQ ID NO: 1879164 - DNA, 25 bp, Homo sapien
tcaatttttcctctaactgaataaa

SEQ ID NO: 1879165 - DNA, 25 bp, Homo sapien
tccacggagacacaagtctggatca

SEQ ID NO: 1879166 - DNA, 25 bp, Homo sapien
gagtcttagttgagatgatacaaga

SEQ ID NO: 1879167 - DNA, 25 bp, Homo sapien
gtctggatcacactctccagaagga

SEQ ID NO: 1879168 - DNA, 25 bp, Homo sapien
gagttgcacactggttataacgaga

SEQ ID NO: 1879169 - DNA, 25 bp, Homo sapien
tctcagtgttgtagtgtgacgcatc

SEQ ID NO: 1879170 - DNA, 25 bp, Homo sapien
tgtgtatgtccccaggacaagctga

SEQ ID NO: 1879171 - DNA, 25 bp, Homo sapien
tgagtgtcatcattagggagttgca

SEQ ID NO: 1879172 - DNA, 25 bp, Homo sapien
ctggaagccactgggcagttaggct

SEQ ID NO: 1879173 - DNA, 25 bp, Homo sapien
ccactgggcagttaggctgggccac

SEQ ID NO: 1879174 - DNA, 25 bp, Homo sapien
aagccactgggcagttaggctgggc

SEQ ID NO: 1879175 - DNA, 25 bp, Homo sapien
ggaagccactgggcagttaggctgg

SEQ ID NO: 1879176 - DNA, 25 bp, Homo sapien
cagcatgggtcaacaccaaatcata

SEQ ID NO: 1879177 - DNA, 25 bp, Homo sapien
tcgttcttccactgtgtcgtcaaag

SEQ ID NO: 1879178 - DNA, 25 bp, Homo sapien
ccacagcatgggtcaacaccaaatc

SEQ ID NO: 1879179 - DNA, 25 bp, Homo sapien
tgtactcctcgttgatcactcgttc

SEQ ID NO: 1879180 - DNA, 25 bp, Homo sapien
tatttagtatgctcgtcaagtcaga

SEQ ID NO: 1879181 - DNA, 25 bp, Homo sapien
taaattatacagcactctggagagg

SEQ ID NO: 1879182 - DNA, 25 bp, Homo sapien
gagagagcgaccttagttctgaggc

SEQ ID NO: 1879183 - DNA, 25 bp, Homo sapien
cccagcctggatgtagtgatgactt

SEQ ID NO: 1879184 - DNA, 25 bp, Homo sapien
tagatttttatccacaggaggcctg

SEQ ID NO: 1879185 - DNA, 25 bp, Homo sapien
cactcagctggaacaagtgggaaag

SEQ ID NO: 1879186 - DNA, 25 bp, Homo sapien
tgataacaacgttagagccagaacg

SEQ ID NO: 1879187 - DNA, 25 bp, Homo sapien
gccagaacgtctagagtcattttca

SEQ ID NO: 1879188 - DNA, 25 bp, Homo sapien
ctgcgcctcagtaaatttctgtttt

SEQ ID NO: 1879189 - DNA, 25 bp, Homo sapien
tctgcgcctcagtaaatttctgttt

SEQ ID NO: 1879190 - DNA, 25 bp, Homo sapien
cagttgtgcattgtgttaatagtca

SEQ ID NO: 1879191 - DNA, 25 bp, Homo sapien
tagcatcattgatagtaaacgaaga

SEQ ID NO: 1879192 - DNA, 25 bp, Homo sapien
tgttctcaaaatgtgtactgtggca

SEQ ID NO: 1879193 - DNA, 25 bp, Homo sapien
tagtaaacgaagaggccacgattgg

SEQ ID NO: 1879194 - DNA, 25 bp, Homo sapien
catggagactgttatctcttgctaa

SEQ ID NO: 1879195 - DNA, 25 bp, Homo sapien
gactgttatctcttgctaaaccctc

SEQ ID NO: 1879196 - DNA, 25 bp, Homo sapien
ctgttatctcttgctaaaccctctg

SEQ ID NO: 1879197 - DNA, 25 bp, Homo sapien
tatctcttgctaaaccctctgccat

SEQ ID NO: 1879198 - DNA, 25 bp, Homo sapien
gaagtaggatgaatcttagcaatgg

SEQ ID NO: 1879199 - DNA, 25 bp, Homo sapien
aagtaggatgaatcttagcaatgga

SEQ ID NO: 1879200 - DNA, 25 bp, Homo sapien
atttggcccgttgagtctttttgct

SEQ ID NO: 1879201 - DNA, 25 bp, Homo sapien
ccagtatttggcccgttgagtcttt

SEQ ID NO: 1879202 - DNA, 25 bp, Homo sapien
cccgttgagtctttttgctcctcga

SEQ ID NO: 1879203 - DNA, 25 bp, Homo sapien
gtctttttgctcctcgattagccat

SEQ ID NO: 1879204 - DNA, 25 bp, Homo sapien
ttggcagttagcattagggcaaagc

SEQ ID NO: 1879205 - DNA, 25 bp, Homo sapien
ggcagttagcattagggcaaagcaa

SEQ ID NO: 1879206 - DNA, 25 bp, Homo sapien
tggcagttagcattagggcaaagca

SEQ ID NO: 1879207 - DNA, 25 bp, Homo sapien
ttttggcagttagcattagggcaaa

SEQ ID NO: 1879208 - DNA, 25 bp, Homo sapien
cataatagcagtggttgttttctct

SEQ ID NO: 1879209 - DNA, 25 bp, Homo sapien
taatgacctgggctaccaacctgta

SEQ ID NO: 1879210 - DNA, 25 bp, Homo sapien
tctctggagcatagccatgcttata

SEQ ID NO: 1879211 - DNA, 25 bp, Homo sapien
ccatagtattggctgaaatttcata

SEQ ID NO: 1879212 - DNA, 25 bp, Homo sapien
ggtaaatgcattttgacgaatagcc

SEQ ID NO: 1879213 - DNA, 25 bp, Homo sapien
gattggcagttgtggtaaatgcatt

SEQ ID NO: 1879214 - DNA, 25 bp, Homo sapien
cagttgtggtaaatgcattttgacg

SEQ ID NO: 1879215 - DNA, 25 bp, Homo sapien
aaagattggcagttgtggtaaatgc

SEQ ID NO: 1879216 - DNA, 25 bp, Homo sapien
gaagatgctgatagtacattacata

SEQ ID NO: 1879217 - DNA, 25 bp, Homo sapien
tccaagtgcacatagtcactaattc

SEQ ID NO: 1879218 - DNA, 25 bp, Homo sapien
gtacattacatatggagatccaagt

SEQ ID NO: 1879219 - DNA, 25 bp, Homo sapien
catatggagatccaagtgcacatag

SEQ ID NO: 1879220 - DNA, 25 bp, Homo sapien
gctgtacttgtctaaagacgggaaa

SEQ ID NO: 1879221 - DNA, 25 bp, Homo sapien
tagctgtacttgtctaaagacggga

SEQ ID NO: 1879222 - DNA, 25 bp, Homo sapien
gcgctgacacctgagtacctagaag

SEQ ID NO: 1879223 - DNA, 25 bp, Homo sapien
gggaaatttgcgctgacacctgagt

SEQ ID NO: 1879224 - DNA, 25 bp, Homo sapien
gggatcaataaaacacgggctctag

SEQ ID NO: 1879225 - DNA, 25 bp, Homo sapien
cacagatgtcgtcaacaggagaaac

SEQ ID NO: 1879226 - DNA, 25 bp, Homo sapien
tagggaggcggcagtttcctctgat

SEQ ID NO: 1879227 - DNA, 25 bp, Homo sapien
ttctcccagataagaggcacagatg

SEQ ID NO: 1879228 - DNA, 25 bp, Homo sapien
aagggagcgctctaccgcttgagct

SEQ ID NO: 1879229 - DNA, 25 bp, Homo sapien
gctaagggagcgctctaccgcttga

SEQ ID NO: 1879230 - DNA, 25 bp, Homo sapien
tacctctcgcatgctaagggagcgc

SEQ ID NO: 1879231 - DNA, 25 bp, Homo sapien
ctagagaatgggggcgtcgatcccg

SEQ ID NO: 1879232 - DNA, 25 bp, Homo sapien
ccagagcttcacggcatagccgcat

SEQ ID NO: 1879233 - DNA, 25 bp, Homo sapien
cacgctctagagttgtgatcgtcac

SEQ ID NO: 1879234 - DNA, 25 bp, Homo sapien
cagctattccagcacgctctagagt

SEQ ID NO: 1879235 - DNA, 25 bp, Homo sapien
ccagccccagagcttcacggcatag

SEQ ID NO: 1879236 - DNA, 25 bp, Homo sapien
cctcctgtaggactcagaaagtgat

SEQ ID NO: 1879237 - DNA, 25 bp, Homo sapien
aatagcactttcctcctgtaggact

SEQ ID NO: 1879238 - DNA, 25 bp, Homo sapien
tagcactttcctcctgtaggactca

SEQ ID NO: 1879239 - DNA, 25 bp, Homo sapien
tttcctcctgtaggactcagaaagt

SEQ ID NO: 1879240 - DNA, 25 bp, Homo sapien
aggagttgagaaagagaaagcttga

SEQ ID NO: 1879241 - DNA, 25 bp, Homo sapien
tacctcttgcatgctaagcaggcgc

SEQ ID NO: 1879242 - DNA, 25 bp, Homo sapien
gaatgcaggcatcgatcctgctacc

SEQ ID NO: 1879243 - DNA, 25 bp, Homo sapien
aggcatcgatcctgctacctcttgc

SEQ ID NO: 1879244 - DNA, 25 bp, Homo sapien
ggagaatgcaggcatcgatcctgct

SEQ ID NO: 1879245 - DNA, 25 bp, Homo sapien
aaggcagtgaccatcctctgctttt

SEQ ID NO: 1879246 - DNA, 25 bp, Homo sapien
gaaggcagtgaccatcctctgcttt

SEQ ID NO: 1879247 - DNA, 25 bp, Homo sapien
ggaaggcagtgaccatcctctgctt

SEQ ID NO: 1879248 - DNA, 25 bp, Homo sapien
cctcgcccttgggcaagtgcagaat

SEQ ID NO: 1879249 - DNA, 25 bp, Homo sapien
ctcgcccttgggcaagtgcagaatc

SEQ ID NO: 1879250 - DNA, 25 bp, Homo sapien
taacccctttgtcccagtccgcaga

SEQ ID NO: 1879251 - DNA, 25 bp, Homo sapien
aaaatcaaggaacccaggtatgagc

SEQ ID NO: 1879252 - DNA, 25 bp, Homo sapien
tggccttgacggcccgtggaaagga

SEQ ID NO: 1879253 - DNA, 25 bp, Homo sapien
aggaactggcggcaattccttccgt

SEQ ID NO: 1879254 - DNA, 25 bp, Homo sapien
aaggaactggcggcaattccttccg

SEQ ID NO: 1879255 - DNA, 25 bp, Homo sapien
gaaaggaactggcggcaattccttc

SEQ ID NO: 1879256 - DNA, 25 bp, Homo sapien
gatccaggtacgcatttgttttagc

SEQ ID NO: 1879257 - DNA, 25 bp, Homo sapien
tccaggtacgcatttgttttagcgg

SEQ ID NO: 1879258 - DNA, 25 bp, Homo sapien
ggagatccaggtacgcatttgtttt

SEQ ID NO: 1879259 - DNA, 25 bp, Homo sapien
gagatccaggtacgcatttgtttta

SEQ ID NO: 1879260 - DNA, 25 bp, Homo sapien
cacatgctaagcgagcactcgacca

SEQ ID NO: 1879261 - DNA, 25 bp, Homo sapien
gagcactcgaccacttgagctactt

SEQ ID NO: 1879262 - DNA, 25 bp, Homo sapien
gcgagcactcgaccacttgagctac

SEQ ID NO: 1879263 - DNA, 25 bp, Homo sapien
ctctcacatgctaagcgagcactcg

SEQ ID NO: 1879264 - DNA, 25 bp, Homo sapien
gcaagcgctctaccgcttgagctaa

SEQ ID NO: 1879265 - DNA, 25 bp, Homo sapien
aatgtgggcatcgatcccactacct

SEQ ID NO: 1879266 - DNA, 25 bp, Homo sapien
ccactacctcttgcatgctaagcaa

SEQ ID NO: 1879267 - DNA, 25 bp, Homo sapien
gagaatgtgggcatcgatcccacta

SEQ ID NO: 1879268 - DNA, 25 bp, Homo sapien
gagaaagcgctatggcagttgctgg

SEQ ID NO: 1879269 - DNA, 25 bp, Homo sapien
aagcgctatggcagttgctggaaga

SEQ ID NO: 1879270 - DNA, 25 bp, Homo sapien
gaactcaggactttcagattatgaa

SEQ ID NO: 1879271 - DNA, 25 bp, Homo sapien
aaactgacgcgctgccagctgcact

SEQ ID NO: 1879272 - DNA, 25 bp, Homo sapien
tgaaactgacgcgctgccagctgca

SEQ ID NO: 1879273 - DNA, 25 bp, Homo sapien
attatgaaactgacgcgctgccagc

SEQ ID NO: 1879274 - DNA, 25 bp, Homo sapien
tgcgttaccaggatcaattgtacct

SEQ ID NO: 1879275 - DNA, 25 bp, Homo sapien
cagaaaccttagtcactcttacact

SEQ ID NO: 1879276 - DNA, 25 bp, Homo sapien
ttccctcagaaaccttagtcactct

SEQ ID NO: 1879277 - DNA, 25 bp, Homo sapien
tccagtatttcataggaccgtctgg

SEQ ID NO: 1879278 - DNA, 25 bp, Homo sapien
gagtactctaccacttgagctcatt

SEQ ID NO: 1879279 - DNA, 25 bp, Homo sapien
acatcgatcccactacctctcacat

SEQ ID NO: 1879280 - DNA, 25 bp, Homo sapien
cctctcacatgctaagcgagtactc

SEQ ID NO: 1879281 - DNA, 25 bp, Homo sapien
gcgagtactctaccacttgagctca

SEQ ID NO: 1879282 - DNA, 25 bp, Homo sapien
caaggaaccacttgcgctggtgcgt

SEQ ID NO: 1879283 - DNA, 25 bp, Homo sapien
tacacttgactagggttcccggtgc

SEQ ID NO: 1879284 - DNA, 25 bp, Homo sapien
acatcgtccccgttcctgagtgaag

SEQ ID NO: 1879285 - DNA, 25 bp, Homo sapien
tgagtgaaggtctcgtctcccacga

SEQ ID NO: 1879286 - DNA, 25 bp, Homo sapien
cttcggaagaaattaggcaggattc

SEQ ID NO: 1879287 - DNA, 25 bp, Homo sapien
ttcggaagaaattaggcaggattcc

SEQ ID NO: 1879288 - DNA, 25 bp, Homo sapien
gctgctcctacgtcttgaaccaaag

SEQ ID NO: 1879289 - DNA, 25 bp, Homo sapien
gatctacactatactgaatgccaag

SEQ ID NO: 1879290 - DNA, 25 bp, Homo sapien
tgttctcagacactaacttgggttt

SEQ ID NO: 1879291 - DNA, 25 bp, Homo sapien
tatatgtcccttggtttcacagctc

SEQ ID NO: 1879292 - DNA, 25 bp, Homo sapien
ccactacctcttgcatgctaagcaa

SEQ ID NO: 1879293 - DNA, 25 bp, Homo sapien
aatgtgggcatcgatcccactacct

SEQ ID NO: 1879294 - DNA, 25 bp, Homo sapien
gagaatgtgggcatcgatcccacta

SEQ ID NO: 1879295 - DNA, 25 bp, Homo sapien
actacctcttgcatgctaagcaagc

SEQ ID NO: 1879296 - DNA, 25 bp, Homo sapien
ggaaagcagggctctaagagcagat

SEQ ID NO: 1879297 - DNA, 25 bp, Homo sapien
ctaagagcagatcttctcattgatg

SEQ ID NO: 1879298 - DNA, 25 bp, Homo sapien
tcttctcattgatgggccagggcaa

SEQ ID NO: 1879299 - DNA, 25 bp, Homo sapien
gggcaaacagcagtggctactcatt

SEQ ID NO: 1879300 - DNA, 25 bp, Homo sapien
aagcaagcactctaccacttgcgct

SEQ ID NO: 1879301 - DNA, 25 bp, Homo sapien
tacctcttgcatgctaagcaagcac

SEQ ID NO: 1879302 - DNA, 25 bp, Homo sapien
aagcactctaccacttgcgctaatt

SEQ ID NO: 1879303 - DNA, 25 bp, Homo sapien
gctaagcaagcactctaccacttgc

SEQ ID NO: 1879304 - DNA, 25 bp, Homo sapien
gcatttatcgtgtcagctcccgagg

SEQ ID NO: 1879305 - DNA, 25 bp, Homo sapien
tttatcgtgtcagctcccgaggtgg

SEQ ID NO: 1879306 - DNA, 25 bp, Homo sapien
tatcgtgtcagctcccgaggtggac

SEQ ID NO: 1879307 - DNA, 25 bp, Homo sapien
ccgcatttatcgtgtcagctcccga

SEQ ID NO: 1879308 - DNA, 25 bp, Homo sapien
tttttttcctcttgtggcccagtca

SEQ ID NO: 1879309 - DNA, 25 bp, Homo sapien
ttttttcctcttgtggcccagtcat

SEQ ID NO: 1879310 - DNA, 25 bp, Homo sapien
tgctttttttcctcttgtggcccag

SEQ ID NO: 1879311 - DNA, 25 bp, Homo sapien
agagatcttagtcactcttcttttc

SEQ ID NO: 1879312 - DNA, 25 bp, Homo sapien
cagagatcttagtcactcttctttt

SEQ ID NO: 1879313 - DNA, 25 bp, Homo sapien
gggaaagcccaaattgagaagcaga

SEQ ID NO: 1879314 - DNA, 25 bp, Homo sapien
taaggtgccaaagctgctaagtggg

SEQ ID NO: 1879315 - DNA, 25 bp, Homo sapien
tgtaccagctcagttattctgcctg

SEQ ID NO: 1879316 - DNA, 25 bp, Homo sapien
gcctgttcttttgcactttagccca

SEQ ID NO: 1879317 - DNA, 25 bp, Homo sapien
ccactacctcttgcatgctaagcaa

SEQ ID NO: 1879318 - DNA, 25 bp, Homo sapien
caagcgctctaccacttgggctaat

SEQ ID NO: 1879319 - DNA, 25 bp, Homo sapien
gagaatgtgggcatcgatcccacta

SEQ ID NO: 1879320 - DNA, 25 bp, Homo sapien
ctaagcaagcgctctaccacttggg

SEQ ID NO: 1879321 - DNA, 25 bp, Homo sapien
taggtaaaagtattcttatgacagt

SEQ ID NO: 1879322 - DNA, 25 bp, Homo sapien
aggtaaaagtattcttatgacagtg

SEQ ID NO: 1879323 - DNA, 25 bp, Homo sapien
cagttgccttgataggtaaaagtat

SEQ ID NO: 1879324 - DNA, 25 bp, Homo sapien
ccccagttgccttgataggtaaaag

SEQ ID NO: 1879325 - DNA, 25 bp, Homo sapien
ctgaactttataggtcatgatatct

SEQ ID NO: 1879326 - DNA, 25 bp, Homo sapien
ttataggtcatgatatctctgtagc

SEQ ID NO: 1879327 - DNA, 25 bp, Homo sapien
ctttataggtcatgatatctctgta

SEQ ID NO: 1879328 - DNA, 25 bp, Homo sapien
aactttataggtcatgatatctctg

SEQ ID NO: 1879329 - DNA, 25 bp, Homo sapien
ggatatagccattgaagttgtgcgc

SEQ ID NO: 1879330 - DNA, 25 bp, Homo sapien
ggttatagcttaatctagaagtaca

SEQ ID NO: 1879331 - DNA, 25 bp, Homo sapien
gattttactctctgcaccagcacat

SEQ ID NO: 1879332 - DNA, 25 bp, Homo sapien
cactgtcacattggaggatatagcc

SEQ ID NO: 1879333 - DNA, 25 bp, Homo sapien
ctgacatttgaattcacgcacaaag

SEQ ID NO: 1879334 - DNA, 25 bp, Homo sapien
ttgaattcacgcacaaagtcatcat

SEQ ID NO: 1879335 - DNA, 25 bp, Homo sapien
gctttttgatattgcaatagactta

SEQ ID NO: 1879336 - DNA, 25 bp, Homo sapien
ttgcaatagacttaatttctctgac

SEQ ID NO: 1879337 - DNA, 25 bp, Homo sapien
aaataatccctgaccgatgacagac

SEQ ID NO: 1879338 - DNA, 25 bp, Homo sapien
ccctgaccgctctcagacaaagaga

SEQ ID NO: 1879339 - DNA, 25 bp, Homo sapien
gctccctatctgctaaaaccactgt

SEQ ID NO: 1879340 - DNA, 25 bp, Homo sapien
cagactgataataatccctgaccgc

SEQ ID NO: 1879341 - DNA, 25 bp, Homo sapien
ttgacaggaattattacactcttta

SEQ ID NO: 1879342 - DNA, 25 bp, Homo sapien
gacaggaattattacactctttatc

SEQ ID NO: 1879343 - DNA, 25 bp, Homo sapien
tgacaggaattattacactctttat

SEQ ID NO: 1879344 - DNA, 25 bp, Homo sapien
caggaattattacactctttatctt

SEQ ID NO: 1879345 - DNA, 25 bp, Homo sapien
ttttctttgcagctgaaatttcaat

SEQ ID NO: 1879346 - DNA, 25 bp, Homo sapien
ccttttctttgcagctgaaatttca

SEQ ID NO: 1879347 - DNA, 25 bp, Homo sapien
cttttctttgcagctgaaatttcaa

SEQ ID NO: 1879348 - DNA, 25 bp, Homo sapien
tttctttgcagctgaaatttcaatg

SEQ ID NO: 1879349 - DNA, 25 bp, Homo sapien
ggacatagaaagactctcaccacat

SEQ ID NO: 1879350 - DNA, 25 bp, Homo sapien
ttgattatcatccaaaggctatggg

SEQ ID NO: 1879351 - DNA, 25 bp, Homo sapien
tcaccacattgacaaaaggtcccta

SEQ ID NO: 1879352 - DNA, 25 bp, Homo sapien
ctatgggtaaaaaagcaaggagtgc

SEQ ID NO: 1879353 - DNA, 25 bp, Homo sapien
caacacatcgctaatctgtgccagg

SEQ ID NO: 1879354 - DNA, 25 bp, Homo sapien
gttttagacccagaaagactgttgc

SEQ ID NO: 1879355 - DNA, 25 bp, Homo sapien
tagtcccagtctctgctcatagaac

SEQ ID NO: 1879356 - DNA, 25 bp, Homo sapien
catcatcacgttttggctagtccca

SEQ ID NO: 1879357 - DNA, 25 bp, Homo sapien
gggaatttggaacctctatacactg

SEQ ID NO: 1879358 - DNA, 25 bp, Homo sapien
aattaccaggcgatccagcactctt

SEQ ID NO: 1879359 - DNA, 25 bp, Homo sapien
tagtttgatatagtccaacttgcct

SEQ ID NO: 1879360 - DNA, 25 bp, Homo sapien
gaaagttctactaatctgcatgccc

SEQ ID NO: 1879361 - DNA, 25 bp, Homo sapien
cgggtacattatcccatgcgctaaa

SEQ ID NO: 1879362 - DNA, 25 bp, Homo sapien
acgggtacattatcccatgcgctaa

SEQ ID NO: 1879363 - DNA, 25 bp, Homo sapien
ggtacattatcccatgcgctaaact

SEQ ID NO: 1879364 - DNA, 25 bp, Homo sapien
tacattatcccatgcgctaaactgc

SEQ ID NO: 1879365 - DNA, 25 bp, Homo sapien
attccagatgagctttcctaccacg

SEQ ID NO: 1879366 - DNA, 25 bp, Homo sapien
aatcggcaaaattccagatgagctt

SEQ ID NO: 1879367 - DNA, 25 bp, Homo sapien
caaaattccagatgagctttcctac

SEQ ID NO: 1879368 - DNA, 25 bp, Homo sapien
gatgagctttcctaccacgtatttt

SEQ ID NO: 1879369 - DNA, 25 bp, Homo sapien
gattcaaggcaaagagaattacgag

SEQ ID NO: 1879370 - DNA, 25 bp, Homo sapien
tcaaggcaaagagaattacgagtaa

SEQ ID NO: 1879371 - DNA, 25 bp, Homo sapien
tgggattcaaggcaaagagaattac

SEQ ID NO: 1879372 - DNA, 25 bp, Homo sapien
aggcaaagagaattacgagtaagaa

SEQ ID NO: 1879373 - DNA, 25 bp, Homo sapien
ataaagatccacttgatggtgacca

SEQ ID NO: 1879374 - DNA, 25 bp, Homo sapien
aataaagatccacttgatggtgacc

SEQ ID NO: 1879375 - DNA, 25 bp, Homo sapien
ttgatggtgaccaaaatatctgtcc

SEQ ID NO: 1879376 - DNA, 25 bp, Homo sapien
tctatctgctgatacagtcttaagg

SEQ ID NO: 1879377 - DNA, 25 bp, Homo sapien
tcaagactagcctacaaaaagtaca

SEQ ID NO: 1879378 - DNA, 25 bp, Homo sapien
ttcagtcccggaggtcaaagctgtg

SEQ ID NO: 1879379 - DNA, 25 bp, Homo sapien
taaggctgaactacactagaaggaa

SEQ ID NO: 1879380 - DNA, 25 bp, Homo sapien
gagagaggtggtctcaaaaacacac

SEQ ID NO: 1879381 - DNA, 25 bp, Homo sapien
acacacaaaaatttggatttgttag

SEQ ID NO: 1879382 - DNA, 25 bp, Homo sapien
agagagagaggtggtctcaaaaaca

SEQ ID NO: 1879383 - DNA, 25 bp, Homo sapien
cacacaaaaatttggatttgttaga

SEQ ID NO: 1879384 - DNA, 25 bp, Homo sapien
ctgtctggaaacaaggccagtaagg

SEQ ID NO: 1879385 - DNA, 25 bp, Homo sapien
aggctgtctggaaacaaggccagta

SEQ ID NO: 1879386 - DNA, 25 bp, Homo sapien
ggctgtctggaaacaaggccagtaa

SEQ ID NO: 1879387 - DNA, 25 bp, Homo sapien
ggagcactgcagtgggcgcacggca

SEQ ID NO: 1879388 - DNA, 25 bp, Homo sapien
tgcagtgggcgcacggcagggtggg

SEQ ID NO: 1879389 - DNA, 25 bp, Homo sapien
ctgaagcgaggggagcactgcagtg

SEQ ID NO: 1879390 - DNA, 25 bp, Homo sapien
cgaggggagcactgcagtgggcgca

SEQ ID NO: 1879391 - DNA, 25 bp, Homo sapien
ccctacaagcgtttccactccatac

SEQ ID NO: 1879392 - DNA, 25 bp, Homo sapien
tgaaaccctacaagcgtttccactc

SEQ ID NO: 1879393 - DNA, 25 bp, Homo sapien
aaccctacaagcgtttccactccat

SEQ ID NO: 1879394 - DNA, 25 bp, Homo sapien
tggtgaaaccctacaagcgtttcca

SEQ ID NO: 1879395 - DNA, 25 bp, Homo sapien
aataatgggattgtgatgtcttaca

SEQ ID NO: 1879396 - DNA, 25 bp, Homo sapien
gaataatgggattgtgatgtcttac

SEQ ID NO: 1879397 - DNA, 25 bp, Homo sapien
gaatcaactccaggtgcccgtagtt

SEQ ID NO: 1879398 - DNA, 25 bp, Homo sapien
agtagtagctgttcacacggatcac

SEQ ID NO: 1879399 - DNA, 25 bp, Homo sapien
tagttgcgataccaagagtagtagc

SEQ ID NO: 1879400 - DNA, 25 bp, Homo sapien
cacggatcacatccacatacagagc

SEQ ID NO: 1879401 - DNA, 25 bp, Homo sapien
tgtctgctgcataggtgacgttggt

SEQ ID NO: 1879402 - DNA, 25 bp, Homo sapien
tctgctgcataggtgacgttggtca

SEQ ID NO: 1879403 - DNA, 25 bp, Homo sapien
ctgctgcataggtgacgttggtcac

SEQ ID NO: 1879404 - DNA, 25 bp, Homo sapien
ttgtctgctgcataggtgacgttgg

SEQ ID NO: 1879405 - DNA, 25 bp, Homo sapien
gaacactgccaaaaatgaggtttgc

SEQ ID NO: 1879406 - DNA, 25 bp, Homo sapien
gccaaaaatgaggtttgcttcctga

SEQ ID NO: 1879407 - DNA, 25 bp, Homo sapien
cactgccaaaaatgaggtttgcttc

SEQ ID NO: 1879408 - DNA, 25 bp, Homo sapien
caaaaatgaggtttgcttcctgaaa

SEQ ID NO: 1879409 - DNA, 25 bp, Homo sapien
gtgacgggcacagtgcggagcccca

SEQ ID NO: 1879410 - DNA, 25 bp, Homo sapien
gggcacagtgcggagccccacaggg

SEQ ID NO: 1879411 - DNA, 25 bp, Homo sapien
ctcggtgacgggcacagtgcggagc

SEQ ID NO: 1879412 - DNA, 25 bp, Homo sapien
tggctctcggtgacgggcacagtgc

SEQ ID NO: 1879413 - DNA, 25 bp, Homo sapien
aggtgtgagcgccccgacagcctga

SEQ ID NO: 1879414 - DNA, 25 bp, Homo sapien
ccaggtgtgagcgccccgacagcct

SEQ ID NO: 1879415 - DNA, 25 bp, Homo sapien
atgacagccaaagcgccaggtgtga

SEQ ID NO: 1879416 - DNA, 25 bp, Homo sapien
ctatgacagccaaagcgccaggtgt

SEQ ID NO: 1879417 - DNA, 25 bp, Homo sapien
ggtgttcgtgcatcaggtacggcca

SEQ ID NO: 1879418 - DNA, 25 bp, Homo sapien
acggccaccagaggttggcacccag

SEQ ID NO: 1879419 - DNA, 25 bp, Homo sapien
ccacgagtacaggtaggcggggtgt

SEQ ID NO: 1879420 - DNA, 25 bp, Homo sapien
tcaggtacggccaccagaggttggc

SEQ ID NO: 1879421 - DNA, 25 bp, Homo sapien
ttactgcacttgatggagatctggt

SEQ ID NO: 1879422 - DNA, 25 bp, Homo sapien
gcacttgatggagatctggtaattc

SEQ ID NO: 1879423 - DNA, 25 bp, Homo sapien
tcccagcctggttgtccacgacttt

SEQ ID NO: 1879424 - DNA, 25 bp, Homo sapien
acttgaactggttactgcacttgat

SEQ ID NO: 1879425 - DNA, 25 bp, Homo sapien
ggaggcaagagagaccagggcttag

SEQ ID NO: 1879426 - DNA, 25 bp, Homo sapien
caagagagaccagggcttagggagg

SEQ ID NO: 1879427 - DNA, 25 bp, Homo sapien
gagagaccagggcttagggagggac

SEQ ID NO: 1879428 - DNA, 25 bp, Homo sapien
ggcaagagagaccagggcttaggga

SEQ ID NO: 1879429 - DNA, 25 bp, Homo sapien
aaagattttataacagtatcctatg

SEQ ID NO: 1879430 - DNA, 25 bp, Homo sapien
gtatcctatgaaatctactactttc

SEQ ID NO: 1879431 - DNA, 25 bp, Homo sapien
gcttcctttaacaccctattcattg

SEQ ID NO: 1879432 - DNA, 25 bp, Homo sapien
aattactaattactcctgaaatcag

SEQ ID NO: 1879433 - DNA, 25 bp, Homo sapien
tctggccagacctcaattgaatttt

SEQ ID NO: 1879434 - DNA, 25 bp, Homo sapien
gtccaagattaaagtgtcaaagcag

SEQ ID NO: 1879435 - DNA, 25 bp, Homo sapien
gtactaattccaatggccaagaaaa

SEQ ID NO: 1879436 - DNA, 25 bp, Homo sapien
tctctgagattagaatgtgtgacaa

SEQ ID NO: 1879437 - DNA, 25 bp, Homo sapien
cccgtggacttggaaaggaccgcag

SEQ ID NO: 1879438 - DNA, 25 bp, Homo sapien
aggaccgcagcgcaagcatcagggt

SEQ ID NO: 1879439 - DNA, 25 bp, Homo sapien
ccatgtgagggtccctggtattata

SEQ ID NO: 1879440 - DNA, 25 bp, Homo sapien
ggaaggaatcagtaacggtctttgc

SEQ ID NO: 1879441 - DNA, 25 bp, Homo sapien
tgttcatatgatcagaaaaaataca

SEQ ID NO: 1879442 - DNA, 25 bp, Homo sapien
aaattatatttgtggtgttcatatg

SEQ ID NO: 1879443 - DNA, 25 bp, Homo sapien
tgtggtgttcatatgatcagaaaaa

SEQ ID NO: 1879444 - DNA, 25 bp, Homo sapien
tatttgtggtgttcatatgatcaga

SEQ ID NO: 1879445 - DNA, 25 bp, Homo sapien
aaagaactgtctacctatgaggcgc

SEQ ID NO: 1879446 - DNA, 25 bp, Homo sapien
agagggcaggcttgtccattccaac

SEQ ID NO: 1879447 - DNA, 25 bp, Homo sapien
tcagggcggtgaaccagaagcctct

SEQ ID NO: 1879448 - DNA, 25 bp, Homo sapien
ccgtagattctttgagaccagtgac

SEQ ID NO: 1879449 - DNA, 25 bp, Homo sapien
atgcagcctggaagagccggaagct

SEQ ID NO: 1879450 - DNA, 25 bp, Homo sapien
gacatgcagcctggaagagccggaa

SEQ ID NO: 1879451 - DNA, 25 bp, Homo sapien
gatattgagggggacatgcagcctg

SEQ ID NO: 1879452 - DNA, 25 bp, Homo sapien
gggacatgcagcctggaagagccgg

SEQ ID NO: 1879453 - DNA, 25 bp, Homo sapien
tgccttgatggactcctatggacac

SEQ ID NO: 1879454 - DNA, 25 bp, Homo sapien
tctgccttgatggactcctatggac

SEQ ID NO: 1879455 - DNA, 25 bp, Homo sapien
gggcaaggcaaatcaatacccctct

SEQ ID NO: 1879456 - DNA, 25 bp, Homo sapien
aaatcaatacccctctgtaatctgg

SEQ ID NO: 1879457 - DNA, 25 bp, Homo sapien
ccttccaggacaattaagacattca

SEQ ID NO: 1879458 - DNA, 25 bp, Homo sapien
acatcaattgtagcaccagcctcat

SEQ ID NO: 1879459 - DNA, 25 bp, Homo sapien
tcagggttctctaaacggatagaac

SEQ ID NO: 1879460 - DNA, 25 bp, Homo sapien
agacagcactccatctgagcatggc

SEQ ID NO: 1879461 - DNA, 25 bp, Homo sapien
ctgagtcccaaacttcaaaggtagg

SEQ ID NO: 1879462 - DNA, 25 bp, Homo sapien
ccttcagtctgcggctagaggcctg

SEQ ID NO: 1879463 - DNA, 25 bp, Homo sapien
cttcagtctgcggctagaggcctgg

SEQ ID NO: 1879464 - DNA, 25 bp, Homo sapien
ttcagtctgcggctagaggcctggg

SEQ ID NO: 1879465 - DNA, 25 bp, Homo sapien
tatacacccaggaacaatcctttgc

SEQ ID NO: 1879466 - DNA, 25 bp, Homo sapien
taaccatcacagcctgtttccttga

SEQ ID NO: 1879467 - DNA, 25 bp, Homo sapien
ctcacatatacacccaggaacaatc

SEQ ID NO: 1879468 - DNA, 25 bp, Homo sapien
gctttattttagctgctgtggcagc

SEQ ID NO: 1879469 - DNA, 25 bp, Homo sapien
caagtctttcccaaggccctctcac

SEQ ID NO: 1879470 - DNA, 25 bp, Homo sapien
cttgtataagccaaaccctccaagt

SEQ ID NO: 1879471 - DNA, 25 bp, Homo sapien
ctccaagtctttcccaaggccctct

SEQ ID NO: 1879472 - DNA, 25 bp, Homo sapien
tgtataagccaaaccctccaagtct

SEQ ID NO: 1879473 - DNA, 25 bp, Homo sapien
ccttccttgttgtgatgagccagtc

SEQ ID NO: 1879474 - DNA, 25 bp, Homo sapien
agtcgatggcctcaactttgctggg

SEQ ID NO: 1879475 - DNA, 25 bp, Homo sapien
tgtgatgagccagtcgatggcctca

SEQ ID NO: 1879476 - DNA, 25 bp, Homo sapien
cccagtggtgcacagccttccttgt

SEQ ID NO: 1879477 - DNA, 25 bp, Homo sapien
tcaaaatcagggcatattagtaggt

SEQ ID NO: 1879478 - DNA, 25 bp, Homo sapien
gattatgaccaagataattttgatg

SEQ ID NO: 1879479 - DNA, 25 bp, Homo sapien
tacaatcaaaatcagggcatattag

SEQ ID NO: 1879480 - DNA, 25 bp, Homo sapien
gataattttgatgcatcctagtttc

SEQ ID NO: 1879481 - DNA, 25 bp, Homo sapien
gacaaacttgctattaaaagggtca

SEQ ID NO: 1879482 - DNA, 25 bp, Homo sapien
tcatcctttccactagtgcacttag

SEQ ID NO: 1879483 - DNA, 25 bp, Homo sapien
cagcacatattttatcggggtttta

SEQ ID NO: 1879484 - DNA, 25 bp, Homo sapien
catacagacaaacttgctattaaaa

SEQ ID NO: 1879485 - DNA, 25 bp, Homo sapien
tacctatactgtgatagtacaaaca

SEQ ID NO: 1879486 - DNA, 25 bp, Homo sapien
caaaacatgttgtattatatgctta

SEQ ID NO: 1879487 - DNA, 25 bp, Homo sapien
taacaacaaaaagccgacatagcca

SEQ ID NO: 1879488 - DNA, 25 bp, Homo sapien
catgtctttgtctatcgtttgagga

SEQ ID NO: 1879489 - DNA, 25 bp, Homo sapien
tgagttaccggatacccagttggag

SEQ ID NO: 1879490 - DNA, 25 bp, Homo sapien
gggaaaactcctacatatctggtgt

SEQ ID NO: 1879491 - DNA, 25 bp, Homo sapien
gaaggcagtcttgtggtagtctcca

SEQ ID NO: 1879492 - DNA, 25 bp, Homo sapien
tagcttcagggtagttgaacacagg

SEQ ID NO: 1879493 - DNA, 25 bp, Homo sapien
aacgacaaatatctgaacttcttac

SEQ ID NO: 1879494 - DNA, 25 bp, Homo sapien
aaccaataaaacgacaaatatctga

SEQ ID NO: 1879495 - DNA, 25 bp, Homo sapien
ataaaacgacaaatatctgaacttc

SEQ ID NO: 1879496 - DNA, 25 bp, Homo sapien
aaaccaataaaacgacaaatatctg

SEQ ID NO: 1879497 - DNA, 25 bp, Homo sapien
gtgacttctttccacagctgttctt

SEQ ID NO: 1879498 - DNA, 25 bp, Homo sapien
gctgttctttgagtttgttcaaaca

SEQ ID NO: 1879499 - DNA, 25 bp, Homo sapien
cagctgttctttgagtttgttcaaa

SEQ ID NO: 1879500 - DNA, 25 bp, Homo sapien
ccagtgttttgtgacttctttccac

SEQ ID NO: 1879501 - DNA, 25 bp, Homo sapien
tagatccctaccctacgaaacaaca

SEQ ID NO: 1879502 - DNA, 25 bp, Homo sapien
agttggccaaactttaggtgatcaa

SEQ ID NO: 1879503 - DNA, 25 bp, Homo sapien
gattgtcttgcagtaagttggccaa

SEQ ID NO: 1879504 - DNA, 25 bp, Homo sapien
tagcatggctccaatataaccataa

SEQ ID NO: 1879505 - DNA, 25 bp, Homo sapien
gaggatggcttaagtctgggaggag

SEQ ID NO: 1879506 - DNA, 25 bp, Homo sapien
gccaagatcgcactagtacactcca

SEQ ID NO: 1879507 - DNA, 25 bp, Homo sapien
tggcttaagtctgggaggaggaggc

SEQ ID NO: 1879508 - DNA, 25 bp, Homo sapien
gatggcttaagtctgggaggaggag

SEQ ID NO: 1879509 - DNA, 25 bp, Homo sapien
cgaaccccgtgaagcccatggtgac

SEQ ID NO: 1879510 - DNA, 25 bp, Homo sapien
gaaccccgtgaagcccatggtgacc

SEQ ID NO: 1879511 - DNA, 25 bp, Homo sapien
cttcgctgggcccagagcgctccat

SEQ ID NO: 1879512 - DNA, 25 bp, Homo sapien
gcaaatgctggaggaagtaccgcct

SEQ ID NO: 1879513 - DNA, 25 bp, Homo sapien
aacttgccaataactcgcggcaaat

SEQ ID NO: 1879514 - DNA, 25 bp, Homo sapien
cgccgaagccaagagcggcgccttc

SEQ ID NO: 1879515 - DNA, 25 bp, Homo sapien
aagtaccgcctccaagctacagcgg

SEQ ID NO: 1879516 - DNA, 25 bp, Homo sapien
gtaccataaagtctatcaccctgtt

SEQ ID NO: 1879517 - DNA, 25 bp, Homo sapien
tgtgtaccataaagtctatcaccct

SEQ ID NO: 1879518 - DNA, 25 bp, Homo sapien
gccatgtgtaccataaagtctatca

SEQ ID NO: 1879519 - DNA, 25 bp, Homo sapien
catgtgtaccataaagtctatcacc

SEQ ID NO: 1879520 - DNA, 25 bp, Homo sapien
caacgtcgaaagtggaagggtcgat

SEQ ID NO: 1879521 - DNA, 25 bp, Homo sapien
cagccccaacgtcgaaagtggaagg

SEQ ID NO: 1879522 - DNA, 25 bp, Homo sapien
tcagaatatgagcttgacagagtga

SEQ ID NO: 1879523 - DNA, 25 bp, Homo sapien
tgatcactgaggacaatgccagccc

SEQ ID NO: 1879524 - DNA, 25 bp, Homo sapien
ggcaggtttctttatatggcaggtc

SEQ ID NO: 1879525 - DNA, 25 bp, Homo sapien
gggcccttccgtgcctccttcatta

SEQ ID NO: 1879526 - DNA, 25 bp, Homo sapien
tgctcagtgtagccccacgatgttc

SEQ ID NO: 1879527 - DNA, 25 bp, Homo sapien
gtgcctccttcattaccttcttggt

SEQ ID NO: 1879528 - DNA, 25 bp, Homo sapien
cagtgaggttctcattcagtgtggg

SEQ ID NO: 1879529 - DNA, 25 bp, Homo sapien
gatgttctgtagagttccatagctg

SEQ ID NO: 1879530 - DNA, 25 bp, Homo sapien
ggtgatgttctgtagagttccatag

SEQ ID NO: 1879531 - DNA, 25 bp, Homo sapien
tgatgttctgtagagttccatagct

SEQ ID NO: 1879532 - DNA, 25 bp, Homo sapien
aggggtgatgttctgtagagttcca

SEQ ID NO: 1879533 - DNA, 25 bp, Homo sapien
tgattcacaaccatcacaaacatgg

SEQ ID NO: 1879534 - DNA, 25 bp, Homo sapien
tcatgattcacaaccatcacaaaca

SEQ ID NO: 1879535 - DNA, 25 bp, Homo sapien
ttttctcatgattcacaaccatcac

SEQ ID NO: 1879536 - DNA, 25 bp, Homo sapien
ctgatgattgtgaagttgtttttgt

SEQ ID NO: 1879537 - DNA, 25 bp, Homo sapien
tgagccctagtcttttccaaggtag

SEQ ID NO: 1879538 - DNA, 25 bp, Homo sapien
ccctagtcttttccaaggtagtgat

SEQ ID NO: 1879539 - DNA, 25 bp, Homo sapien
aagtgagccctagtcttttccaagg

SEQ ID NO: 1879540 - DNA, 25 bp, Homo sapien
tttaagtgagccctagtcttttcca

SEQ ID NO: 1879541 - DNA, 25 bp, Homo sapien
ctatttgatttggatgggatcttgc

SEQ ID NO: 1879542 - DNA, 25 bp, Homo sapien
tgtaactgaggtcaatgaagaggtc

SEQ ID NO: 1879543 - DNA, 25 bp, Homo sapien
aagataatcagcactggcatccccc

SEQ ID NO: 1879544 - DNA, 25 bp, Homo sapien
gatggtgacaataatcactttgcta

SEQ ID NO: 1879545 - DNA, 25 bp, Homo sapien
ctagtgatcaggcacccagtaaggc

SEQ ID NO: 1879546 - DNA, 25 bp, Homo sapien
agtgatcaggcacccagtaaggcca

SEQ ID NO: 1879547 - DNA, 25 bp, Homo sapien
tgatcaggcacccagtaaggccaaa

SEQ ID NO: 1879548 - DNA, 25 bp, Homo sapien
tcaggcacccagtaaggccaaatcc

SEQ ID NO: 1879549 - DNA, 25 bp, Homo sapien
gattttgaaaatctcgtgggctgaa

SEQ ID NO: 1879550 - DNA, 25 bp, Homo sapien
acagtcttcctgttcatagagtgat

SEQ ID NO: 1879551 - DNA, 25 bp, Homo sapien
ttaaattccaagaggatggcgaaga

SEQ ID NO: 1879552 - DNA, 25 bp, Homo sapien
tggcgaagatctgcgtcagtaacag

SEQ ID NO: 1879553 - DNA, 25 bp, Homo sapien
tctttcctcattcccttggccctca

SEQ ID NO: 1879554 - DNA, 25 bp, Homo sapien
agcgtccaccctggcagtctttcct

SEQ ID NO: 1879555 - DNA, 25 bp, Homo sapien
ctactggcccagccttcccagcgtc

SEQ ID NO: 1879556 - DNA, 25 bp, Homo sapien
ccagccttcccagcgtccaccctgg

SEQ ID NO: 1879557 - DNA, 25 bp, Homo sapien
ctcaggtgctcagacgtttttatgg

SEQ ID NO: 1879558 - DNA, 25 bp, Homo sapien
agctgcactgctattgtaggctgct

SEQ ID NO: 1879559 - DNA, 25 bp, Homo sapien
gctcagacgtttttatggtctggct

SEQ ID NO: 1879560 - DNA, 25 bp, Homo sapien
gctctttctcgacaatctcctctta

SEQ ID NO: 1879561 - DNA, 25 bp, Homo sapien
actcttagtcttcagcggcttcttg

SEQ ID NO: 1879562 - DNA, 25 bp, Homo sapien
gaagatactcttagtcttcagcggc

SEQ ID NO: 1879563 - DNA, 25 bp, Homo sapien
gggaagtgccaaagaagatactctt

SEQ ID NO: 1879564 - DNA, 25 bp, Homo sapien
cagcggcttcttgatccttacacca

SEQ ID NO: 1879565 - DNA, 25 bp, Homo sapien
tctttgtcataagtttcacttcctt

SEQ ID NO: 1879566 - DNA, 25 bp, Homo sapien
tagctactgttctttgtcataagtt

SEQ ID NO: 1879567 - DNA, 25 bp, Homo sapien
tactgttctttgtcataagtttcac

SEQ ID NO: 1879568 - DNA, 25 bp, Homo sapien
ttctttgtcataagtttcacttcct

SEQ ID NO: 1879569 - DNA, 25 bp, Homo sapien
ggccagtctttgtactattaaggaa

SEQ ID NO: 1879570 - DNA, 25 bp, Homo sapien
tgctgtcaaacttcaaaattgatcc

SEQ ID NO: 1879571 - DNA, 25 bp, Homo sapien
cagtctttgtactattaaggaagca

SEQ ID NO: 1879572 - DNA, 25 bp, Homo sapien
gaaggtggatcaggcccagtctgct

SEQ ID NO: 1879573 - DNA, 25 bp, Homo sapien
tgtgatgtgataccaagataatgat

SEQ ID NO: 1879574 - DNA, 25 bp, Homo sapien
gatgtgatgtgataccaagataatg

SEQ ID NO: 1879575 - DNA, 25 bp, Homo sapien
gtgatgtgatgtgataccaagataa

SEQ ID NO: 1879576 - DNA, 25 bp, Homo sapien
tgatgtgataccaagataatgatgt

SEQ ID NO: 1879577 - DNA, 25 bp, Homo sapien
cagtgtggatccaaggaccacattt

SEQ ID NO: 1879578 - DNA, 25 bp, Homo sapien
tcagtgtggatccaaggaccacatt

SEQ ID NO: 1879579 - DNA, 25 bp, Homo sapien
actcagtgtggatccaaggaccaca

SEQ ID NO: 1879580 - DNA, 25 bp, Homo sapien
ctacactcagtgtggatccaaggac

SEQ ID NO: 1879581 - DNA, 25 bp, Homo sapien
gaacctgccttctgtatcatcctca

SEQ ID NO: 1879582 - DNA, 25 bp, Homo sapien
gagtggaccgtatgcttgtgaacct

SEQ ID NO: 1879583 - DNA, 25 bp, Homo sapien
atggcaaagagtggaccgtatgctt

SEQ ID NO: 1879584 - DNA, 25 bp, Homo sapien
gcttgtgaacctgccttctgtatca

SEQ ID NO: 1879585 - DNA, 25 bp, Homo sapien
cggatcttgtttcatatctggaaca

SEQ ID NO: 1879586 - DNA, 25 bp, Homo sapien
tctccggatcttgtttcatatctgg

SEQ ID NO: 1879587 - DNA, 25 bp, Homo sapien
tcttataacgcttttcacgtagtag

SEQ ID NO: 1879588 - DNA, 25 bp, Homo sapien
cgtagtagtttgtattctccggatc

SEQ ID NO: 1879589 - DNA, 25 bp, Homo sapien
cacggcattgcgctaacaagggata

SEQ ID NO: 1879590 - DNA, 25 bp, Homo sapien
gaaatagtttccacggcattgcgct

SEQ ID NO: 1879591 - DNA, 25 bp, Homo sapien
tagtttccacggcattgcgctaaca

SEQ ID NO: 1879592 - DNA, 25 bp, Homo sapien
tctgtgaaatagtttccacggcatt

SEQ ID NO: 1879593 - DNA, 25 bp, Homo sapien
tttcagccttgccaaagattcccac

SEQ ID NO: 1879594 - DNA, 25 bp, Homo sapien
catggaggaaggcttccctttgggc

SEQ ID NO: 1879595 - DNA, 25 bp, Homo sapien
aatctcagtcatgactatgataatc

SEQ ID NO: 1879596 - DNA, 25 bp, Homo sapien
cggacatgaggactaatctcagtca

SEQ ID NO: 1879597 - DNA, 25 bp, Homo sapien
gtgtcccaacttcaccacctgagag

SEQ ID NO: 1879598 - DNA, 25 bp, Homo sapien
tgactggctcaaccctgtaggtgac

SEQ ID NO: 1879599 - DNA, 25 bp, Homo sapien
tggtccacttcgctggccagggtgt

SEQ ID NO: 1879600 - DNA, 25 bp, Homo sapien
agagagaccctcttcctaaacctgg

SEQ ID NO: 1879601 - DNA, 25 bp, Homo sapien
gtgttgtgtatagcaacttctctct

SEQ ID NO: 1879602 - DNA, 25 bp, Homo sapien
aggtgtccatttagacttaaaagtg

SEQ ID NO: 1879603 - DNA, 25 bp, Homo sapien
catcttctgttaggcacccttgctg

SEQ ID NO: 1879604 - DNA, 25 bp, Homo sapien
tacacatttgagtctatcttctctc

SEQ ID NO: 1879605 - DNA, 25 bp, Homo sapien
gatgtggaagctacacatttgagtc

SEQ ID NO: 1879606 - DNA, 25 bp, Homo sapien
catcatataagcaatatggttcagc

SEQ ID NO: 1879607 - DNA, 25 bp, Homo sapien
cagctgaacttccatgagcctttcc

SEQ ID NO: 1879608 - DNA, 25 bp, Homo sapien
tataagcaatatggttcagctgaac

SEQ ID NO: 1879609 - DNA, 25 bp, Homo sapien
gattatttgacatccactctgcaga

SEQ ID NO: 1879610 - DNA, 25 bp, Homo sapien
caccccaggcactgtgggcagagct

SEQ ID NO: 1879611 - DNA, 25 bp, Homo sapien
tgggcagagctgtgattccaagcat

SEQ ID NO: 1879612 - DNA, 25 bp, Homo sapien
cactgtgggcagagctgtgattcca

SEQ ID NO: 1879613 - DNA, 25 bp, Homo sapien
tgtgggcagagctgtgattccaagc

SEQ ID NO: 1879614 - DNA, 25 bp, Homo sapien
tcagaccgtattacaacagacaagg

SEQ ID NO: 1879615 - DNA, 25 bp, Homo sapien
cctaataaatgactggtaacatggc

SEQ ID NO: 1879616 - DNA, 25 bp, Homo sapien
taagctaccttgtagatggctgcag

SEQ ID NO: 1879617 - DNA, 25 bp, Homo sapien
caatcatcttgggtgatcagaccgt

SEQ ID NO: 1879618 - DNA, 25 bp, Homo sapien
tagactaatgtgtactacagcgacg

SEQ ID NO: 1879619 - DNA, 25 bp, Homo sapien
ttatgcattgaacaccttgaggcca

SEQ ID NO: 1879620 - DNA, 25 bp, Homo sapien
tcattcacatttagtttggccagag

SEQ ID NO: 1879621 - DNA, 25 bp, Homo sapien
cagacttagtcccagcctttgaaaa

SEQ ID NO: 1879622 - DNA, 25 bp, Homo sapien
cagagaatggcgcactgaggcgctc

SEQ ID NO: 1879623 - DNA, 25 bp, Homo sapien
gggcgcgaagaacagtgacagcaac

SEQ ID NO: 1879624 - DNA, 25 bp, Homo sapien
ccaaacgtcctacaccaaggcagga

SEQ ID NO: 1879625 - DNA, 25 bp, Homo sapien
tccactccttactgcggagaaggtt

SEQ ID NO: 1879626 - DNA, 25 bp, Homo sapien
tccaggtaagacaactttcaaaatc

SEQ ID NO: 1879627 - DNA, 25 bp, Homo sapien
caggcaaacttatactcagcatgaa

SEQ ID NO: 1879628 - DNA, 25 bp, Homo sapien
tctccttcactaacaaaagtccagg

SEQ ID NO: 1879629 - DNA, 25 bp, Homo sapien
ggcaaacttatactcagcatgaatt

SEQ ID NO: 1879630 - DNA, 25 bp, Homo sapien
gcttttctgtgctgccattgcttat

SEQ ID NO: 1879631 - DNA, 25 bp, Homo sapien
gccattgcttattctttcgagctat

SEQ ID NO: 1879632 - DNA, 25 bp, Homo sapien
ttgcttattctttcgagctattccc

SEQ ID NO: 1879633 - DNA, 25 bp, Homo sapien
ctgccattgcttattctttcgagct

SEQ ID NO: 1879634 - DNA, 25 bp, Homo sapien
ctctgcctctgctgtaattacctgc

SEQ ID NO: 1879635 - DNA, 25 bp, Homo sapien
tcattggttctcactactggggaat

SEQ ID NO: 1879636 - DNA, 25 bp, Homo sapien
gaaggaagaaatggactccaccgat

SEQ ID NO: 1879637 - DNA, 25 bp, Homo sapien
ggaatagtcgttgtgcctcgaagga

SEQ ID NO: 1879638 - DNA, 25 bp, Homo sapien
ccaagtggtagaccgtcagctcagg

SEQ ID NO: 1879639 - DNA, 25 bp, Homo sapien
ctgttcccaagtggtagaccgtcag

SEQ ID NO: 1879640 - DNA, 25 bp, Homo sapien
agtggtagaccgtcagctcagggcc

SEQ ID NO: 1879641 - DNA, 25 bp, Homo sapien
gttcccaagtggtagaccgtcagct

SEQ ID NO: 1879642 - DNA, 25 bp, Homo sapien
ggaaaaagctgcagtattgcacaag

SEQ ID NO: 1879643 - DNA, 25 bp, Homo sapien
tttgcactaaagttccaggtgtgat

SEQ ID NO: 1879644 - DNA, 25 bp, Homo sapien
aaaaagctgcagtattgcacaaggc

SEQ ID NO: 1879645 - DNA, 25 bp, Homo sapien
gtgattcaggttagaccaatcaaat

SEQ ID NO: 1879646 - DNA, 25 bp, Homo sapien
gcagcattaatagtccagtccctag

SEQ ID NO: 1879647 - DNA, 25 bp, Homo sapien
catccattttgccagcacactttct

SEQ ID NO: 1879648 - DNA, 25 bp, Homo sapien
attaatagtccagtccctagcttca

SEQ ID NO: 1879649 - DNA, 25 bp, Homo sapien
agcacagtcatgaaggaccttagtt

SEQ ID NO: 1879650 - DNA, 25 bp, Homo sapien
aaactgactatcatctaaatctctc

SEQ ID NO: 1879651 - DNA, 25 bp, Homo sapien
tgcaggcaatgataaaagggcacat

SEQ ID NO: 1879652 - DNA, 25 bp, Homo sapien
gataagcaggctaggttctaaccac

SEQ ID NO: 1879653 - DNA, 25 bp, Homo sapien
tctgccacttagtcttgtgtgtgac

SEQ ID NO: 1879654 - DNA, 25 bp, Homo sapien
aaggcagagaagcaccatgaacaag

SEQ ID NO: 1879655 - DNA, 25 bp, Homo sapien
caaagtctgtgtcttgaaaccagtg

SEQ ID NO: 1879656 - DNA, 25 bp, Homo sapien
gacattcagtctgtgattggtacca

SEQ ID NO: 1879657 - DNA, 25 bp, Homo sapien
tcagtctgtgattggtaccactgga

SEQ ID NO: 1879658 - DNA, 25 bp, Homo sapien
cagacattcagtctgtgattggtac

SEQ ID NO: 1879659 - DNA, 25 bp, Homo sapien
cattcagtctgtgattggtaccact

SEQ ID NO: 1879660 - DNA, 25 bp, Homo sapien
gcactgtttgaacaagtatcccaaa

SEQ ID NO: 1879661 - DNA, 25 bp, Homo sapien
cagtgtgagcgtcacttcagcagtg

SEQ ID NO: 1879662 - DNA, 25 bp, Homo sapien
tggaagcactgtttgaacaagtatc

SEQ ID NO: 1879663 - DNA, 25 bp, Homo sapien
aggcagcagtgtgagcgtcacttca

SEQ ID NO: 1879664 - DNA, 25 bp, Homo sapien
gcagatgccaggaaacatcttctac

SEQ ID NO: 1879665 - DNA, 25 bp, Homo sapien
ggaaacatcttctactactgctgta

SEQ ID NO: 1879666 - DNA, 25 bp, Homo sapien
caaacagagactcatggagcagatg

SEQ ID NO: 1879667 - DNA, 25 bp, Homo sapien
acagagactcatggagcagatgcca

SEQ ID NO: 1879668 - DNA, 25 bp, Homo sapien
acagagacacaagtctggattgcac

SEQ ID NO: 1879669 - DNA, 25 bp, Homo sapien
cctcctttgggacagcactgctgtc

SEQ ID NO: 1879670 - DNA, 25 bp, Homo sapien
ctgaagcaccaagtaagtgcccaca

SEQ ID NO: 1879671 - DNA, 25 bp, Homo sapien
gcagctggtgtggtcatctgaagca

SEQ ID NO: 1879672 - DNA, 25 bp, Homo sapien
actggaaggagtcttagttgagatg

SEQ ID NO: 1879673 - DNA, 25 bp, Homo sapien
agttgagatgatacaagggttctgg

SEQ ID NO: 1879674 - DNA, 25 bp, Homo sapien
cttagttgagatgatacaagggttc

SEQ ID NO: 1879675 - DNA, 25 bp, Homo sapien
aaggagtcttagttgagatgataca

SEQ ID NO: 1879676 - DNA, 25 bp, Homo sapien
tcaatttttcctctaactgaataaa

SEQ ID NO: 1879677 - DNA, 25 bp, Homo sapien
cacttctccttcatggttgatgttg

SEQ ID NO: 1879678 - DNA, 25 bp, Homo sapien
gttcacttctccttcatggttgatg

SEQ ID NO: 1879679 - DNA, 25 bp, Homo sapien
cttgttcacttctccttcatggttg

SEQ ID NO: 1879680 - DNA, 25 bp, Homo sapien
tcatccaatgtgcatgtccccagga

SEQ ID NO: 1879681 - DNA, 25 bp, Homo sapien
tctcagtgttgtagtgtgacgcatc

SEQ ID NO: 1879682 - DNA, 25 bp, Homo sapien
gtgtcatcattagggagttgcacac

SEQ ID NO: 1879683 - DNA, 25 bp, Homo sapien
tgtgacgcatcaaactgagtgtcat

SEQ ID NO: 1879684 - DNA, 25 bp, Homo sapien
ctggaagccactgggcagttaggct

SEQ ID NO: 1879685 - DNA, 25 bp, Homo sapien
ccactgggcagttaggctgggccac

SEQ ID NO: 1879686 - DNA, 25 bp, Homo sapien
ggaagccactgggcagttaggctgg

SEQ ID NO: 1879687 - DNA, 25 bp, Homo sapien
aagccactgggcagttaggctgggc

SEQ ID NO: 1879688 - DNA, 25 bp, Homo sapien
tgatcactcgttcttccactgcgtc

SEQ ID NO: 1879689 - DNA, 25 bp, Homo sapien
tgtactcctcgttgatcactcgttc

SEQ ID NO: 1879690 - DNA, 25 bp, Homo sapien
tcgttcttccactgcgtcgtcaaag

SEQ ID NO: 1879691 - DNA, 25 bp, Homo sapien
gggtcaacaccaaatcataaagaaa

SEQ ID NO: 1879692 - DNA, 25 bp, Homo sapien
tcatacgtcatcgaccacgtaagga

SEQ ID NO: 1879693 - DNA, 25 bp, Homo sapien
atcgaccacgtaaggagatggagga

SEQ ID NO: 1879694 - DNA, 25 bp, Homo sapien
ctgcaattaagtgttgatagtttct

SEQ ID NO: 1879695 - DNA, 25 bp, Homo sapien
tacgtcatcgaccacgtaaggagat

SEQ ID NO: 1879696 - DNA, 25 bp, Homo sapien
tttgagcctcgatagaatgatggag

SEQ ID NO: 1879697 - DNA, 25 bp, Homo sapien
gcaaaatggctacagcctatttgga

SEQ ID NO: 1879698 - DNA, 25 bp, Homo sapien
atggagagagcaaaatggctacagc

SEQ ID NO: 1879699 - DNA, 25 bp, Homo sapien
ggatttttgagcctcgatagaatga

SEQ ID NO: 1879700 - DNA, 25 bp, Homo sapien
cattgctgtcatggtctaggactaa

SEQ ID NO: 1879701 - DNA, 25 bp, Homo sapien
tgttctgtatccttagttcacaggg

SEQ ID NO: 1879702 - DNA, 25 bp, Homo sapien
tctcctgtagagatgcactatttca

SEQ ID NO: 1879703 - DNA, 25 bp, Homo sapien
taggactaatgagacatctgacagt

SEQ ID NO: 1879704 - DNA, 25 bp, Homo sapien
attccagtgttgaagtgtgaaggtg

SEQ ID NO: 1879705 - DNA, 25 bp, Homo sapien
ccagtgttgaagtgtgaaggtgtga

SEQ ID NO: 1879706 - DNA, 25 bp, Homo sapien
ttccagtgttgaagtgtgaaggtgt

SEQ ID NO: 1879707 - DNA, 25 bp, Homo sapien
cagtgttgaagtgtgaaggtgtgag

SEQ ID NO: 1879708 - DNA, 25 bp, Homo sapien
ctgccttgcatatgttgtccagtca

SEQ ID NO: 1879709 - DNA, 25 bp, Homo sapien
tgccttgcatatgttgtccagtcat

SEQ ID NO: 1879710 - DNA, 25 bp, Homo sapien
tgatgttagatacccataagaagcg

SEQ ID NO: 1879711 - DNA, 25 bp, Homo sapien
ttagatacccataagaagcgataaa

SEQ ID NO: 1879712 - DNA, 25 bp, Homo sapien
tgttagatacccataagaagcgata

SEQ ID NO: 1879713 - DNA, 25 bp, Homo sapien
gtgatgttagatacccataagaagc

SEQ ID NO: 1879714 - DNA, 25 bp, Homo sapien
cgtatttggaattgccttagcccca

SEQ ID NO: 1879715 - DNA, 25 bp, Homo sapien
gtatttggaattgccttagccccat

SEQ ID NO: 1879716 - DNA, 25 bp, Homo sapien
taaatagattgggtgtgaaatcacc

SEQ ID NO: 1879717 - DNA, 25 bp, Homo sapien
tgaaatcacctctcgagagagccct

SEQ ID NO: 1879718 - DNA, 25 bp, Homo sapien
tcagctcaaaagacctagtacctat

SEQ ID NO: 1879719 - DNA, 25 bp, Homo sapien
gctactacagggcaggcactatttt

SEQ ID NO: 1879720 - DNA, 25 bp, Homo sapien
tagataaggatgtatggaggccagt

SEQ ID NO: 1879721 - DNA, 25 bp, Homo sapien
ccagttctggagcatagatcaggaa

SEQ ID NO: 1879722 - DNA, 25 bp, Homo sapien
tgcagcaccattaactcggatagat

SEQ ID NO: 1879723 - DNA, 25 bp, Homo sapien
ggatttggcctgatcaactgcagca

SEQ ID NO: 1879724 - DNA, 25 bp, Homo sapien
tggataattggacctcctagaggcc

SEQ ID NO: 1879725 - DNA, 25 bp, Homo sapien
gaagtctctgctagaaaaggaaaca

SEQ ID NO: 1879726 - DNA, 25 bp, Homo sapien
gatttctccatctaaacctacagag

SEQ ID NO: 1879727 - DNA, 25 bp, Homo sapien
catcggatgtgtgcattcgactcac

SEQ ID NO: 1879728 - DNA, 25 bp, Homo sapien
tgtatttggaccaccttgaggcctt

SEQ ID NO: 1879729 - DNA, 25 bp, Homo sapien
tcaactcaccgagataaagatttct

SEQ ID NO: 1879730 - DNA, 25 bp, Homo sapien
tgtagaatttgcaagggtaccctga

SEQ ID NO: 1879731 - DNA, 25 bp, Homo sapien
aactcaccgagtgcaacattcctct

SEQ ID NO: 1879732 - DNA, 25 bp, Homo sapien
agatttgaactcattatgaaataga

SEQ ID NO: 1879733 - DNA, 25 bp, Homo sapien
gaactgggtaccatatgtcttcctt

SEQ ID NO: 1879734 - DNA, 25 bp, Homo sapien
agaactgggtaccatatgtcttcct

SEQ ID NO: 1879735 - DNA, 25 bp, Homo sapien
cctggagcttacatagggtgctgca

SEQ ID NO: 1879736 - DNA, 25 bp, Homo sapien
tgctatggaatgtagacgaatcctc

SEQ ID NO: 1879737 - DNA, 25 bp, Homo sapien
gccatgcagtgagagctaaatttgt

SEQ ID NO: 1879738 - DNA, 25 bp, Homo sapien
tcatggaacatctttcacgagtctc

SEQ ID NO: 1879739 - DNA, 25 bp, Homo sapien
taaaattctccaaaagatgcctgtg

SEQ ID NO: 1879740 - DNA, 25 bp, Homo sapien
gcttgtgcatagcaatgaaacatca

SEQ ID NO: 1879741 - DNA, 25 bp, Homo sapien
tattcaacttggtagaagtggcctt

SEQ ID NO: 1879742 - DNA, 25 bp, Homo sapien
aactgctcacaggagttggctctta

SEQ ID NO: 1879743 - DNA, 25 bp, Homo sapien
tagctggctatagttagtgatgtag

SEQ ID NO: 1879744 - DNA, 25 bp, Homo sapien
aggatcctgaggtagctggctatag

SEQ ID NO: 1879745 - DNA, 25 bp, Homo sapien
caatagttcaggatcctgaggtagc

SEQ ID NO: 1879746 - DNA, 25 bp, Homo sapien
gtaaccaatagttcaggatcctgag

SEQ ID NO: 1879747 - DNA, 25 bp, Homo sapien
ttccagtgttgaagtgtgaaggtgt

SEQ ID NO: 1879748 - DNA, 25 bp, Homo sapien
cagtgttgaagtgtgaaggtgtgag

SEQ ID NO: 1879749 - DNA, 25 bp, Homo sapien
ccagtgttgaagtgtgaaggtgtga

SEQ ID NO: 1879750 - DNA, 25 bp, Homo sapien
attccagtgttgaagtgtgaaggtg

SEQ ID NO: 1879751 - DNA, 25 bp, Homo sapien
ctgccttgcatatgttgtccagtca

SEQ ID NO: 1879752 - DNA, 25 bp, Homo sapien
tgccttgcatatgttgtccagtcat

SEQ ID NO: 1879753 - DNA, 25 bp, Homo sapien
atacatacccataagaagtgataaa

SEQ ID NO: 1879754 - DNA, 25 bp, Homo sapien
gatacatacccataagaagtgataa

SEQ ID NO: 1879755 - DNA, 25 bp, Homo sapien
gctactcagatctgtgtctatagaa

SEQ ID NO: 1879756 - DNA, 25 bp, Homo sapien
ctactcagatctgtgtctatagaaa

SEQ ID NO: 1879757 - DNA, 25 bp, Homo sapien
cctctgttccaggtggtgtgcttcc

SEQ ID NO: 1879758 - DNA, 25 bp, Homo sapien
tgctactcagatctgtgtctataga

SEQ ID NO: 1879759 - DNA, 25 bp, Homo sapien
ttgttttgactgagcaacaatatcc

SEQ ID NO: 1879760 - DNA, 25 bp, Homo sapien
tgttttgactgagcaacaatatcca

SEQ ID NO: 1879761 - DNA, 25 bp, Homo sapien
gttttgactgagcaacaatatccat

SEQ ID NO: 1879762 - DNA, 25 bp, Homo sapien
cttgttttgactgagcaacaatatc

SEQ ID NO: 1879763 - DNA, 25 bp, Homo sapien
aagtaatgcttaaacgagggcatga

SEQ ID NO: 1879764 - DNA, 25 bp, Homo sapien
tgtgtgctagttttgtcagtattgg

SEQ ID NO: 1879765 - DNA, 25 bp, Homo sapien
tatggtaatagctcccataagagag

SEQ ID NO: 1879766 - DNA, 25 bp, Homo sapien
gaagtccagggttaacatcttcaca

SEQ ID NO: 1879767 - DNA, 25 bp, Homo sapien
cattatttaccaaaaagttattctg

SEQ ID NO: 1879768 - DNA, 25 bp, Homo sapien
ccagggactttcttagtactgattc

SEQ ID NO: 1879769 - DNA, 25 bp, Homo sapien
tgtgtaattataggtttccagggac

SEQ ID NO: 1879770 - DNA, 25 bp, Homo sapien
ccctcttgtcaccttagctgtgtcc

SEQ ID NO: 1879771 - DNA, 25 bp, Homo sapien
ttctgctcctaaaatggtacctggc

SEQ ID NO: 1879772 - DNA, 25 bp, Homo sapien
cccagccaaaatgtagctttttacg

SEQ ID NO: 1879773 - DNA, 25 bp, Homo sapien
tcaggagaccaagaaccttgtgtgg

SEQ ID NO: 1879774 - DNA, 25 bp, Homo sapien
tatttcctgcgataacttctgctcc

SEQ ID NO: 1879775 - DNA, 25 bp, Homo sapien
tctcaagtagcaggcacacatgtat

SEQ ID NO: 1879776 - DNA, 25 bp, Homo sapien
tgttgtccaaactccgcagctgcag

SEQ ID NO: 1879777 - DNA, 25 bp, Homo sapien
tctgtatttcccagtgaagttcatc

SEQ ID NO: 1879778 - DNA, 25 bp, Homo sapien
ggaacctgcaattgtctcctacgta

SEQ ID NO: 1879779 - DNA, 25 bp, Homo sapien
caaccatttacaggtttgtgggtca

SEQ ID NO: 1879780 - DNA, 25 bp, Homo sapien
tatattcctacacctgagctaatga

SEQ ID NO: 1879781 - DNA, 25 bp, Homo sapien
tgtagaacacctaatctgtgaatag

SEQ ID NO: 1879782 - DNA, 25 bp, Homo sapien
gggtcaatacgcattttaaaatgtc

SEQ ID NO: 1879783 - DNA, 25 bp, Homo sapien
tgacctcgggagtgagccaatgaac

SEQ ID NO: 1879784 - DNA, 25 bp, Homo sapien
cagtcatgtgataaggtttggtaac

SEQ ID NO: 1879785 - DNA, 25 bp, Homo sapien
tccatggtgaacaggattgtatttg

SEQ ID NO: 1879786 - DNA, 25 bp, Homo sapien
gactatctttgaatcaaagttgacc

SEQ ID NO: 1879787 - DNA, 25 bp, Homo sapien
aacacaaatcgtctgaatgtgagtc

SEQ ID NO: 1879788 - DNA, 25 bp, Homo sapien
acacaaatcgtctgaatgtgagtct

SEQ ID NO: 1879789 - DNA, 25 bp, Homo sapien
ttaacattgcttctgctactgtttt

SEQ ID NO: 1879790 - DNA, 25 bp, Homo sapien
tttgtttaacattgcttctgctact

SEQ ID NO: 1879791 - DNA, 25 bp, Homo sapien
gtttaacattgcttctgctactgtt

SEQ ID NO: 1879792 - DNA, 25 bp, Homo sapien
ttgtttaacattgcttctgctactg

SEQ ID NO: 1879793 - DNA, 25 bp, Homo sapien
ggtcaatccctatgaagatggttaa

SEQ ID NO: 1879794 - DNA, 25 bp, Homo sapien
caggcaattgattgtgaatggcata

SEQ ID NO: 1879795 - DNA, 25 bp, Homo sapien
ttatatgtaattctgttgttgccta

SEQ ID NO: 1879796 - DNA, 25 bp, Homo sapien
tgaagctacttcttctggcagggtc

SEQ ID NO: 1879797 - DNA, 25 bp, Homo sapien
tggtgactgacaaaaatagagcctt

SEQ ID NO: 1879798 - DNA, 25 bp, Homo sapien
gacactggtgttgtttaactccgaa

SEQ ID NO: 1879799 - DNA, 25 bp, Homo sapien
ttccctgtcctaatagacactggtg

SEQ ID NO: 1879800 - DNA, 25 bp, Homo sapien
gatgaaacctgtggtgttgcattgc

SEQ ID NO: 1879801 - DNA, 25 bp, Homo sapien
tctttgaatcacactcagcacctag

SEQ ID NO: 1879802 - DNA, 25 bp, Homo sapien
cagcacctagtagtacactgtcctg

SEQ ID NO: 1879803 - DNA, 25 bp, Homo sapien
ggtgtgacaacctggttataaaaca

SEQ ID NO: 1879804 - DNA, 25 bp, Homo sapien
ttgaacaaactaactgtaaatgggc

SEQ ID NO: 1879805 - DNA, 25 bp, Homo sapien
gagatgcatggctcacaaaggtggc

SEQ ID NO: 1879806 - DNA, 25 bp, Homo sapien
aaatgtggtttttacatccagtgcc

SEQ ID NO: 1879807 - DNA, 25 bp, Homo sapien
catgtcatgagcctatgtgcctaca

SEQ ID NO: 1879808 - DNA, 25 bp, Homo sapien
caccctgaaaggataaaaccattgt

SEQ ID NO: 1879809 - DNA, 25 bp, Homo sapien
ccctagttatagcttatatcagaaa

SEQ ID NO: 1879810 - DNA, 25 bp, Homo sapien
gggtattgaatgaatatgcctcaga

SEQ ID NO: 1879811 - DNA, 25 bp, Homo sapien
actgggtattgaatgaatatgcctc

SEQ ID NO: 1879812 - DNA, 25 bp, Homo sapien
aaactgggtattgaatgaatatgcc

SEQ ID NO: 1879813 - DNA, 25 bp, Homo sapien
ctgtgtcaggcttggatccgtagtg

SEQ ID NO: 1879814 - DNA, 25 bp, Homo sapien
tagtggtgaggtgagttgagatgaa

SEQ ID NO: 1879815 - DNA, 25 bp, Homo sapien
ttctgttaggctctgtgtcaggctt

SEQ ID NO: 1879816 - DNA, 25 bp, Homo sapien
gatccgtagtggtgaggtgagttga

SEQ ID NO: 1879817 - DNA, 25 bp, Homo sapien
caccctatgaaactgtttccaaaag

SEQ ID NO: 1879818 - DNA, 25 bp, Homo sapien
gtattgtaaaattccactgggaaca

SEQ ID NO: 1879819 - DNA, 25 bp, Homo sapien
tccactgggaacatatgaacatctg

SEQ ID NO: 1879820 - DNA, 25 bp, Homo sapien
gaacatctgacatcgtttccacgac

SEQ ID NO: 1879821 - DNA, 25 bp, Homo sapien
ttggttcaaatccaaattatcttct

SEQ ID NO: 1879822 - DNA, 25 bp, Homo sapien
tggttcaaatccaaattatcttctt

SEQ ID NO: 1879823 - DNA, 25 bp, Homo sapien
caaatccaaattatcttcttttttg

SEQ ID NO: 1879824 - DNA, 25 bp, Homo sapien
attggttcaaatccaaattatcttc

SEQ ID NO: 1879825 - DNA, 25 bp, Homo sapien
ccagattccatgtcttatatcctga

SEQ ID NO: 1879826 - DNA, 25 bp, Homo sapien
aatttttcctagcatccagattcca

SEQ ID NO: 1879827 - DNA, 25 bp, Homo sapien
taaacatgaggtgctgagtaagtcc

SEQ ID NO: 1879828 - DNA, 25 bp, Homo sapien
tcctgataatcaagtactcctagag

SEQ ID NO: 1879829 - DNA, 25 bp, Homo sapien
taaacctccaaacagccagtcttgg

SEQ ID NO: 1879830 - DNA, 25 bp, Homo sapien
cctccaaacagccagtcttgggttt

SEQ ID NO: 1879831 - DNA, 25 bp, Homo sapien
aacctccaaacagccagtcttgggt

SEQ ID NO: 1879832 - DNA, 25 bp, Homo sapien
aaacctccaaacagccagtcttggg

SEQ ID NO: 1879833 - DNA, 25 bp, Homo sapien
tcacatcggttattcaattatgtgt

SEQ ID NO: 1879834 - DNA, 25 bp, Homo sapien
catcggttattcaattatgtgttct

SEQ ID NO: 1879835 - DNA, 25 bp, Homo sapien
aaatcacatcggttattcaattatg

SEQ ID NO: 1879836 - DNA, 25 bp, Homo sapien
ttagcaaatcacatcggttattcaa

SEQ ID NO: 1879837 - DNA, 25 bp, Homo sapien
aatgtcacgccaacagtacagaggg

SEQ ID NO: 1879838 - DNA, 25 bp, Homo sapien
catgagcagttatccctagaataga

SEQ ID NO: 1879839 - DNA, 25 bp, Homo sapien
cctatttagagaagcttacacatgg

SEQ ID NO: 1879840 - DNA, 25 bp, Homo sapien
caaagtttctgctagttggttgaga

SEQ ID NO: 1879841 - DNA, 25 bp, Homo sapien
gttgctgtttatgtggagaccacag

SEQ ID NO: 1879842 - DNA, 25 bp, Homo sapien
tgttgctgtttatgtggagaccaca

SEQ ID NO: 1879843 - DNA, 25 bp, Homo sapien
ttgctgtttatgtggagaccacagg

SEQ ID NO: 1879844 - DNA, 25 bp, Homo sapien
atatctaccataggggtgttccctg

SEQ ID NO: 1879845 - DNA, 25 bp, Homo sapien
taccataggggtgttccctgtatcc

SEQ ID NO: 1879846 - DNA, 25 bp, Homo sapien
tcaatatctaccataggggtgttcc

SEQ ID NO: 1879847 - DNA, 25 bp, Homo sapien
tctaccataggggtgttccctgtat

SEQ ID NO: 1879848 - DNA, 25 bp, Homo sapien
gctagagcgggttgtggcccattct

SEQ ID NO: 1879849 - DNA, 25 bp, Homo sapien
aagctagagcgggttgtggcccatt

SEQ ID NO: 1879850 - DNA, 25 bp, Homo sapien
ctagagcgggttgtggcccattctt

SEQ ID NO: 1879851 - DNA, 25 bp, Homo sapien
tcaagctagagcgggttgtggccca

SEQ ID NO: 1879852 - DNA, 25 bp, Homo sapien
catggaaccttgagcatggaagagg

SEQ ID NO: 1879853 - DNA, 25 bp, Homo sapien
tagaagggattctaacctgagtccc

SEQ ID NO: 1879854 - DNA, 25 bp, Homo sapien
tgcaagtaccacatatagaagggat

SEQ ID NO: 1879855 - DNA, 25 bp, Homo sapien
tggaagaggcccaaacatagggaga

SEQ ID NO: 1879856 - DNA, 25 bp, Homo sapien
catgagggagcttctactgggatct

SEQ ID NO: 1879857 - DNA, 25 bp, Homo sapien
ctgagcatgagggagcttctactgg

SEQ ID NO: 1879858 - DNA, 25 bp, Homo sapien
tgctgcactcccctgagcatgaggg

SEQ ID NO: 1879859 - DNA, 25 bp, Homo sapien
cctggacaatcgcaaacttcagaga

SEQ ID NO: 1879860 - DNA, 25 bp, Homo sapien
catcccaagagttcgacaataagtc

SEQ ID NO: 1879861 - DNA, 25 bp, Homo sapien
gattgtgccattaactcagcagaaa

SEQ ID NO: 1879862 - DNA, 25 bp, Homo sapien
tcataggatcctttgaatgtgcccc

SEQ ID NO: 1879863 - DNA, 25 bp, Homo sapien
catcctttcagtagtcatgagaagc

SEQ ID NO: 1879864 - DNA, 25 bp, Homo sapien
tcacttactccatgaccgtagtcat

SEQ ID NO: 1879865 - DNA, 25 bp, Homo sapien
accgtagtcatagtattcaggcaca

SEQ ID NO: 1879866 - DNA, 25 bp, Homo sapien
tactccatgaccgtagtcatagtat

SEQ ID NO: 1879867 - DNA, 25 bp, Homo sapien
ccatgaccgtagtcatagtattcag

SEQ ID NO: 1879868 - DNA, 25 bp, Homo sapien
tttcactttgaaacactaaactgta

SEQ ID NO: 1879869 - DNA, 25 bp, Homo sapien
gacaatctggtcaatcatgtatagc

SEQ ID NO: 1879870 - DNA, 25 bp, Homo sapien
acatcatgtctgtgcactccccaaa

SEQ ID NO: 1879871 - DNA, 25 bp, Homo sapien
gtataacacttcaaaatctgtcaag

SEQ ID NO: 1879872 - DNA, 25 bp, Homo sapien
catagaggaaaatgctggcattaag

SEQ ID NO: 1879873 - DNA, 25 bp, Homo sapien
tgtcatcatcaatacattttctatg

SEQ ID NO: 1879874 - DNA, 25 bp, Homo sapien
gcagcagtcccacttatagcagcat

SEQ ID NO: 1879875 - DNA, 25 bp, Homo sapien
tgagtaagccccgatcatgttcccc

SEQ ID NO: 1879876 - DNA, 25 bp, Homo sapien
tacaccctttcagctagatgtgcca

SEQ ID NO: 1879877 - DNA, 25 bp, Homo sapien
taatctcctcatcctgggcttgtgc

SEQ ID NO: 1879878 - DNA, 25 bp, Homo sapien
tgtttacttggacaaatggctgcac

SEQ ID NO: 1879879 - DNA, 25 bp, Homo sapien
cctttcagctagatgtgccctcgtg

SEQ ID NO: 1879880 - DNA, 25 bp, Homo sapien
ttctcagttggtagaaggcattcaa

SEQ ID NO: 1879881 - DNA, 25 bp, Homo sapien
cttctcagttggtagaaggcattca

SEQ ID NO: 1879882 - DNA, 25 bp, Homo sapien
ctcagttggtagaaggcattcaaag

SEQ ID NO: 1879883 - DNA, 25 bp, Homo sapien
tctcagttggtagaaggcattcaaa

SEQ ID NO: 1879884 - DNA, 25 bp, Homo sapien
ctgtaattgtaacaatgtgtttaga

SEQ ID NO: 1879885 - DNA, 25 bp, Homo sapien
ctgctataaccaccgaagtaattaa

SEQ ID NO: 1879886 - DNA, 25 bp, Homo sapien
tctctgtaattgtaacaatgtgttt

SEQ ID NO: 1879887 - DNA, 25 bp, Homo sapien
atctctgtaattgtaacaatgtgtt

SEQ ID NO: 1879888 - DNA, 25 bp, Homo sapien
ctttgccatcaggtccattcctaag

SEQ ID NO: 1879889 - DNA, 25 bp, Homo sapien
cattcctaagccttcattgaccaca

SEQ ID NO: 1879890 - DNA, 25 bp, Homo sapien
gccttcattgaccacaaactctgta

SEQ ID NO: 1879891 - DNA, 25 bp, Homo sapien
ggtccattcctaagccttcattgac

SEQ ID NO: 1879892 - DNA, 25 bp, Homo sapien
ggagctcttttcacggcaatggcaa

SEQ ID NO: 1879893 - DNA, 25 bp, Homo sapien
caatggcaagaagacaagcggaaac

SEQ ID NO: 1879894 - DNA, 25 bp, Homo sapien
cacagcaaaggtcatgaaagtaggg

SEQ ID NO: 1879895 - DNA, 25 bp, Homo sapien
tgacatgtggatgcaaaaacaacct

SEQ ID NO: 1879896 - DNA, 25 bp, Homo sapien
tccaattctaaattaacctggtgag

SEQ ID NO: 1879897 - DNA, 25 bp, Homo sapien
caattctaaattaacctggtgagga

SEQ ID NO: 1879898 - DNA, 25 bp, Homo sapien
ttccaattctaaattaacctggtga

SEQ ID NO: 1879899 - DNA, 25 bp, Homo sapien
ccaattctaaattaacctggtgagg

SEQ ID NO: 1879900 - DNA, 25 bp, Homo sapien
tattaggctcgacattcacatactc

SEQ ID NO: 1879901 - DNA, 25 bp, Homo sapien
tccccatggtgtagaacatattagg

SEQ ID NO: 1879902 - DNA, 25 bp, Homo sapien
tgaggctcttattttgtatccccat

SEQ ID NO: 1879903 - DNA, 25 bp, Homo sapien
tactcaacaattatcccttcagtgc

SEQ ID NO: 1879904 - DNA, 25 bp, Homo sapien
gctgttatcataagtctcataggtc

SEQ ID NO: 1879905 - DNA, 25 bp, Homo sapien
tgtttgggtcgcatagctgttatca

SEQ ID NO: 1879906 - DNA, 25 bp, Homo sapien
ctttgtgtttgggtcgcatagctgt

SEQ ID NO: 1879907 - DNA, 25 bp, Homo sapien
taagtctcataggtctggtcatcat

SEQ ID NO: 1879908 - DNA, 25 bp, Homo sapien
caagatcaagttttagaagccaact

SEQ ID NO: 1879909 - DNA, 25 bp, Homo sapien
gctgtcatgactaagaacaagatca

SEQ ID NO: 1879910 - DNA, 25 bp, Homo sapien
ggttaaagatgaataaaagggcata

SEQ ID NO: 1879911 - DNA, 25 bp, Homo sapien
aattgttaatgctgtcatgactaag

SEQ ID NO: 1879912 - DNA, 25 bp, Homo sapien
ccatattggacatagaataactagt

SEQ ID NO: 1879913 - DNA, 25 bp, Homo sapien
tactgtagaagcataaaaagccaaa

SEQ ID NO: 1879914 - DNA, 25 bp, Homo sapien
taaatgagatgaactagtagcttgg

SEQ ID NO: 1879915 - DNA, 25 bp, Homo sapien
caatttaagtaggtacaagtggcta

SEQ ID NO: 1879916 - DNA, 25 bp, Homo sapien
tgcagagtatatatttgagcaacag

SEQ ID NO: 1879917 - DNA, 25 bp, Homo sapien
gcaggttttacttgccacaattttc

SEQ ID NO: 1879918 - DNA, 25 bp, Homo sapien
gatcaatgcaacttataatttgttc

SEQ ID NO: 1879919 - DNA, 25 bp, Homo sapien
tttcttatgtgagtatgcctgctcc

SEQ ID NO: 1879920 - DNA, 25 bp, Homo sapien
tcctgatagtgcacttgaatttcca

SEQ ID NO: 1879921 - DNA, 25 bp, Homo sapien
aatacccctgaggaacctagctgaa

SEQ ID NO: 1879922 - DNA, 25 bp, Homo sapien
tatcatgtagtatgaagactgccca

SEQ ID NO: 1879923 - DNA, 25 bp, Homo sapien
cagaataaaacgaagtagtctggtc

SEQ ID NO: 1879924 - DNA, 25 bp, Homo sapien
tagcacagttaatggctctccacat

SEQ ID NO: 1879925 - DNA, 25 bp, Homo sapien
tgaaacagccatgagtaaaagaggt

SEQ ID NO: 1879926 - DNA, 25 bp, Homo sapien
aaaagaggtagcacagttaatggct

SEQ ID NO: 1879927 - DNA, 25 bp, Homo sapien
ctaaggcctgaaagggtcacagagg

SEQ ID NO: 1879928 - DNA, 25 bp, Homo sapien
tcctgatgaacaactcagtcccact

SEQ ID NO: 1879929 - DNA, 25 bp, Homo sapien
tcgtcctgggttaagtctggttgaa

SEQ ID NO: 1879930 - DNA, 25 bp, Homo sapien
tccatgccagtaaaaaaagcttcgt

SEQ ID NO: 1879931 - DNA, 25 bp, Homo sapien
ctcttattattgttcagaatcctga

SEQ ID NO: 1879932 - DNA, 25 bp, Homo sapien
tttgtggtacttcgttatcacaatg

SEQ ID NO: 1879933 - DNA, 25 bp, Homo sapien
cagtttgtggtacttcgttatcaca

SEQ ID NO: 1879934 - DNA, 25 bp, Homo sapien
ccagtttgtggtacttcgttatcac

SEQ ID NO: 1879935 - DNA, 25 bp, Homo sapien
agtttgtggtacttcgttatcacaa

SEQ ID NO: 1879936 - DNA, 25 bp, Homo sapien
ctggtgagattttgccaccgtatca

SEQ ID NO: 1879937 - DNA, 25 bp, Homo sapien
gagattttgccaccgtatcaaaaaa

SEQ ID NO: 1879938 - DNA, 25 bp, Homo sapien
gtgagattttgccaccgtatcaaaa

SEQ ID NO: 1879939 - DNA, 25 bp, Homo sapien
gattttgccaccgtatcaaaaaaca

SEQ ID NO: 1879940 - DNA, 25 bp, Homo sapien
tggagagaatttttagttcataaac

SEQ ID NO: 1879941 - DNA, 25 bp, Homo sapien
ttttggagagaatttttagttcata

SEQ ID NO: 1879942 - DNA, 25 bp, Homo sapien
cttcgattttggagagaatttttag

SEQ ID NO: 1879943 - DNA, 25 bp, Homo sapien
gattttggagagaatttttagttca

SEQ ID NO: 1879944 - DNA, 25 bp, Homo sapien
gatgaagaagtggttctaactttat

SEQ ID NO: 1879945 - DNA, 25 bp, Homo sapien
tgaagaagtggttctaactttatct

SEQ ID NO: 1879946 - DNA, 25 bp, Homo sapien
atgaagaagtggttctaactttatc

SEQ ID NO: 1879947 - DNA, 25 bp, Homo sapien
ccttgcatcctgctgacattgtgga

SEQ ID NO: 1879948 - DNA, 25 bp, Homo sapien
gacattgtggaatctcctgaatgta

SEQ ID NO: 1879949 - DNA, 25 bp, Homo sapien
aggaaaggttgcttaagccagcatt

SEQ ID NO: 1879950 - DNA, 25 bp, Homo sapien
aaaggaaaggttgcttaagccagca

SEQ ID NO: 1879951 - DNA, 25 bp, Homo sapien
ccacgcagctcagtaaggctgctgt

SEQ ID NO: 1879952 - DNA, 25 bp, Homo sapien
cacagaagcagtctgagatggacct

SEQ ID NO: 1879953 - DNA, 25 bp, Homo sapien
gggtgggcatttgccattgctgagg

SEQ ID NO: 1879954 - DNA, 25 bp, Homo sapien
gttcgaacgggacggagcccacgca

SEQ ID NO: 1879955 - DNA, 25 bp, Homo sapien
tgccgaaatatgttccttgtaaatt

SEQ ID NO: 1879956 - DNA, 25 bp, Homo sapien
tatgttccttgtaaatttgattctg

SEQ ID NO: 1879957 - DNA, 25 bp, Homo sapien
ccatcattgccgaaatatgttcctt

SEQ ID NO: 1879958 - DNA, 25 bp, Homo sapien
cattgccgaaatatgttccttgtaa

SEQ ID NO: 1879959 - DNA, 25 bp, Homo sapien
cctgaactcatttatggaactttta

SEQ ID NO: 1879960 - DNA, 25 bp, Homo sapien
tccctctcctgtcaaaaaatgttcc

SEQ ID NO: 1879961 - DNA, 25 bp, Homo sapien
taaggactattgatttaccagtgaa

SEQ ID NO: 1879962 - DNA, 25 bp, Homo sapien
taatacctatttccctctcctgtca

SEQ ID NO: 1879963 - DNA, 25 bp, Homo sapien
ccgatacacctccttgatgtctggg

SEQ ID NO: 1879964 - DNA, 25 bp, Homo sapien
gctttgttgtgtcccgatacacctc

SEQ ID NO: 1879965 - DNA, 25 bp, Homo sapien
ttgctttgttgtgtcccgatacacc

SEQ ID NO: 1879966 - DNA, 25 bp, Homo sapien
cctccttgatgtctgggtgttaacc

SEQ ID NO: 1879967 - DNA, 25 bp, Homo sapien
tggctgatgagtggtagatcccaga

SEQ ID NO: 1879968 - DNA, 25 bp, Homo sapien
tcttccctatggttagaggtgaccg

SEQ ID NO: 1879969 - DNA, 25 bp, Homo sapien
ctaatttcagttgacttcttcccta

SEQ ID NO: 1879970 - DNA, 25 bp, Homo sapien
gaggtgaccgattagtgctagacac

SEQ ID NO: 1879971 - DNA, 25 bp, Homo sapien
gttacagtgcttccccgaggggtga

SEQ ID NO: 1879972 - DNA, 25 bp, Homo sapien
ggaagcgctccacgggttacagtgc

SEQ ID NO: 1879973 - DNA, 25 bp, Homo sapien
aggggtgagaacacctcgtccaggt

SEQ ID NO: 1879974 - DNA, 25 bp, Homo sapien
tgtatcctggcactgttggtgcccc

SEQ ID NO: 1879975 - DNA, 25 bp, Homo sapien
gtaagataattcacgtagttgttcc

SEQ ID NO: 1879976 - DNA, 25 bp, Homo sapien
cacgtagttgttcctgacgaatttc

SEQ ID NO: 1879977 - DNA, 25 bp, Homo sapien
agtcctctgagccatttaagtaaga

SEQ ID NO: 1879978 - DNA, 25 bp, Homo sapien
taatacctctgccacgaccagagtc

SEQ ID NO: 1879979 - DNA, 25 bp, Homo sapien
tggaggtgaatatatccgaatgtca

SEQ ID NO: 1879980 - DNA, 25 bp, Homo sapien
ggagttcttgggtccatgtgtgatc

SEQ ID NO: 1879981 - DNA, 25 bp, Homo sapien
gtttcttggagcaggtgtagcctta

SEQ ID NO: 1879982 - DNA, 25 bp, Homo sapien
ccgaatgtcatatctggtgtcacta

SEQ ID NO: 1879983 - DNA, 25 bp, Homo sapien
cttattttgcttaacctgacgacag

SEQ ID NO: 1879984 - DNA, 25 bp, Homo sapien
atgagtgaggacatgtaaaatttgt

SEQ ID NO: 1879985 - DNA, 25 bp, Homo sapien
gcttaacctgacgacagtttccatc

SEQ ID NO: 1879986 - DNA, 25 bp, Homo sapien
gacgacagtttccatctacgttgtt

SEQ ID NO: 1879987 - DNA, 25 bp, Homo sapien
tggtgtctctttgagaaaatccaga

SEQ ID NO: 1879988 - DNA, 25 bp, Homo sapien
tgtccacaaaaggtttggtgtctct

SEQ ID NO: 1879989 - DNA, 25 bp, Homo sapien
gtctctttgagaaaatccagaagaa

SEQ ID NO: 1879990 - DNA, 25 bp, Homo sapien
ttgtccacaaaaggtttggtgtctc

SEQ ID NO: 1879991 - DNA, 25 bp, Homo sapien
catgaagctcatcactcaagtgggc

SEQ ID NO: 1879992 - DNA, 25 bp, Homo sapien
tacgtgaataagcttccccaggtgg

SEQ ID NO: 1879993 - DNA, 25 bp, Homo sapien
ttccaatgcatgactcatacgtgaa

SEQ ID NO: 1879994 - DNA, 25 bp, Homo sapien
gggcatatttggcttccccactctt

SEQ ID NO: 1879995 - DNA, 25 bp, Homo sapien
aaatggtctgccctatgccaaagcc

SEQ ID NO: 1879996 - DNA, 25 bp, Homo sapien
gagactgcggacctctcatgaaaag

SEQ ID NO: 1879997 - DNA, 25 bp, Homo sapien
cctggcatactataaacactcaaat

SEQ ID NO: 1879998 - DNA, 25 bp, Homo sapien
tttatagaaccatagaaacattggg

SEQ ID NO: 1879999 - DNA, 25 bp, Homo sapien
catatcttgcttgtccactgtagca

SEQ ID NO: 1880000 - DNA, 25 bp, Homo sapien
taggcttctagtccaagtcactagc

SEQ ID NO: 1880001 - DNA, 25 bp, Homo sapien
tacctcagctatcagtaagtcctgc

SEQ ID NO: 1880002 - DNA, 25 bp, Homo sapien
cccttcttgacgagtccatgtggaa

SEQ ID NO: 1880003 - DNA, 25 bp, Homo sapien
accattcccacagtatcaccattaa

SEQ ID NO: 1880004 - DNA, 25 bp, Homo sapien
ctatcctttggcagtgcgttgcctc

SEQ ID NO: 1880005 - DNA, 25 bp, Homo sapien
gcctcacaccagacaccattcccac

SEQ ID NO: 1880006 - DNA, 25 bp, Homo sapien
atcctttggcagtgcgttgcctcac

SEQ ID NO: 1880007 - DNA, 25 bp, Homo sapien
tcatcaatgtaatcatcccatatca

SEQ ID NO: 1880008 - DNA, 25 bp, Homo sapien
catcaatgtaatcatcccatatcat

SEQ ID NO: 1880009 - DNA, 25 bp, Homo sapien
cctgaatgtggtaaatattagattc

SEQ ID NO: 1880010 - DNA, 25 bp, Homo sapien
ggtaaatattagattcaaagttcag

SEQ ID NO: 1880011 - DNA, 25 bp, Homo sapien
ttataggtaacctcctgaatgtggt

SEQ ID NO: 1880012 - DNA, 25 bp, Homo sapien
taaatttggccttcagtgttatagg

SEQ ID NO: 1880013 - DNA, 25 bp, Homo sapien
tttatctctcattgatcctttgccc

SEQ ID NO: 1880014 - DNA, 25 bp, Homo sapien
ttcctcttggtccaagcaatttccc

SEQ ID NO: 1880015 - DNA, 25 bp, Homo sapien
ttatctctcattgatcctttgccca

SEQ ID NO: 1880016 - DNA, 25 bp, Homo sapien
tcctcttggtccaagcaatttcccc

SEQ ID NO: 1880017 - DNA, 25 bp, Homo sapien
gttgcatcacatttggaagacggac

SEQ ID NO: 1880018 - DNA, 25 bp, Homo sapien
gtcatagagatcagacgtggtgctc

SEQ ID NO: 1880019 - DNA, 25 bp, Homo sapien
tcccagttcttggtcttggcaagtt

SEQ ID NO: 1880020 - DNA, 25 bp, Homo sapien
cattattcctcgcaagtcatagaga

SEQ ID NO: 1880021 - DNA, 25 bp, Homo sapien
catgcatcgttatgttctattacca

SEQ ID NO: 1880022 - DNA, 25 bp, Homo sapien
tgaaatcattcaagtcatgcatcgt

SEQ ID NO: 1880023 - DNA, 25 bp, Homo sapien
ccataaggataagggatggcaatac

SEQ ID NO: 1880024 - DNA, 25 bp, Homo sapien
tgtggcatatcaccaaaacaatcca

SEQ ID NO: 1880025 - DNA, 25 bp, Homo sapien
tattgcattttcacttaatcctaaa

SEQ ID NO: 1880026 - DNA, 25 bp, Homo sapien
tttcacttaatcctaaaatagcagt

SEQ ID NO: 1880027 - DNA, 25 bp, Homo sapien
gcattttcacttaatcctaaaatag

SEQ ID NO: 1880028 - DNA, 25 bp, Homo sapien
tcatattgcattttcacttaatcct

SEQ ID NO: 1880029 - DNA, 25 bp, Homo sapien
gcccaatgtgcgtataatttaatgc

SEQ ID NO: 1880030 - DNA, 25 bp, Homo sapien
gctctcctttagttagcacgtggaa

SEQ ID NO: 1880031 - DNA, 25 bp, Homo sapien
ctgagatgtgtcttcagatgggaac

SEQ ID NO: 1880032 - DNA, 25 bp, Homo sapien
taatgcatgtttgtgaaggttcaat

SEQ ID NO: 1880033 - DNA, 25 bp, Homo sapien
tcactgctgcaactgtgacaggtcc

SEQ ID NO: 1880034 - DNA, 25 bp, Homo sapien
tcatgatgtcactgctgcaactgtg

SEQ ID NO: 1880035 - DNA, 25 bp, Homo sapien
gatgtcactgctgcaactgtgacag

SEQ ID NO: 1880036 - DNA, 25 bp, Homo sapien
catgatgtcactgctgcaactgtga

SEQ ID NO: 1880037 - DNA, 25 bp, Homo sapien
ataagtggctatatttggctttgag

SEQ ID NO: 1880038 - DNA, 25 bp, Homo sapien
catgtttccaagattataagtggct

SEQ ID NO: 1880039 - DNA, 25 bp, Homo sapien
gctttgagtcgtagtttccatagga

SEQ ID NO: 1880040 - DNA, 25 bp, Homo sapien
ttccataggagtcgtagtttccaca

SEQ ID NO: 1880041 - DNA, 25 bp, Homo sapien
gcttgacaggaatcagtactctttc

SEQ ID NO: 1880042 - DNA, 25 bp, Homo sapien
actgcttgacaggaatcagtactct

SEQ ID NO: 1880043 - DNA, 25 bp, Homo sapien
tgcttgacaggaatcagtactcttt

SEQ ID NO: 1880044 - DNA, 25 bp, Homo sapien
cttgacaggaatcagtactctttct

SEQ ID NO: 1880045 - DNA, 25 bp, Homo sapien
cactttgtgtgtcagagttccacag

SEQ ID NO: 1880046 - DNA, 25 bp, Homo sapien
tgatattccactttgtgtgtcagag

SEQ ID NO: 1880047 - DNA, 25 bp, Homo sapien
attgatattccactttgtgtgtcag

SEQ ID NO: 1880048 - DNA, 25 bp, Homo sapien
tgtgtgtcagagttccacagtccat

SEQ ID NO: 1880049 - DNA, 25 bp, Homo sapien
aacaggcacgttgtagtctatcctc

SEQ ID NO: 1880050 - DNA, 25 bp, Homo sapien
caggcacgttgtagtctatcctcat

SEQ ID NO: 1880051 - DNA, 25 bp, Homo sapien
acaggcacgttgtagtctatcctca

SEQ ID NO: 1880052 - DNA, 25 bp, Homo sapien
ctgaaatcttatatggtccctttgt

SEQ ID NO: 1880053 - DNA, 25 bp, Homo sapien
atcttatatggtccctttgttttag

SEQ ID NO: 1880054 - DNA, 25 bp, Homo sapien
ttgttttaggtatataggccaccat

SEQ ID NO: 1880055 - DNA, 25 bp, Homo sapien
tttgttttaggtatataggccacca

SEQ ID NO: 1880056 - DNA, 25 bp, Homo sapien
gggagcatcaagacctccatgtaac

SEQ ID NO: 1880057 - DNA, 25 bp, Homo sapien
tctatgcacatagctttagtggaga

SEQ ID NO: 1880058 - DNA, 25 bp, Homo sapien
tcagtttcttcgtcaataatatggg

SEQ ID NO: 1880059 - DNA, 25 bp, Homo sapien
gtaaatatgagttctaacactagcc

SEQ ID NO: 1880060 - DNA, 25 bp, Homo sapien
aggtgactgactttcaactcacgaa

SEQ ID NO: 1880061 - DNA, 25 bp, Homo sapien
ggtggtattttccaagcctagttca

SEQ ID NO: 1880062 - DNA, 25 bp, Homo sapien
cacgaaggactctggcaggttttat

SEQ ID NO: 1880063 - DNA, 25 bp, Homo sapien
ggtattttccaagcctagttcatgt

SEQ ID NO: 1880064 - DNA, 25 bp, Homo sapien
cttgagggataagcataaagccacc

SEQ ID NO: 1880065 - DNA, 25 bp, Homo sapien
gacagcaatgctggccgctaacatg

SEQ ID NO: 1880066 - DNA, 25 bp, Homo sapien
taaagccaccagtcacttatgctgt

SEQ ID NO: 1880067 - DNA, 25 bp, Homo sapien
gtcacttatgctgttgggcaatttc

SEQ ID NO: 1880068 - DNA, 25 bp, Homo sapien
tgaagatataaagatgagctatcat

SEQ ID NO: 1880069 - DNA, 25 bp, Homo sapien
gatgaagatataaagatgagctatc

SEQ ID NO: 1880070 - DNA, 25 bp, Homo sapien
gaagatgaagatataaagatgagct

SEQ ID NO: 1880071 - DNA, 25 bp, Homo sapien
ctgaagatgaagatataaagatgag

SEQ ID NO: 1880072 - DNA, 25 bp, Homo sapien
gcgagcatcttcagggggacagttt

SEQ ID NO: 1880073 - DNA, 25 bp, Homo sapien
tagatctccgtagctttggtcttct

SEQ ID NO: 1880074 - DNA, 25 bp, Homo sapien
gtctgtccgcccgagctctaaggcg

SEQ ID NO: 1880075 - DNA, 25 bp, Homo sapien
taagacgtggagaaggagcactgct

SEQ ID NO: 1880076 - DNA, 25 bp, Homo sapien
ggatccaggctatctttctctgcca

SEQ ID NO: 1880077 - DNA, 25 bp, Homo sapien
cttctgccaaaaggcgcgacgcatg

SEQ ID NO: 1880078 - DNA, 25 bp, Homo sapien
catcagctcaggcaaatatttctcc

SEQ ID NO: 1880079 - DNA, 25 bp, Homo sapien
catgcacaaaagatggatccaggct

SEQ ID NO: 1880080 - DNA, 25 bp, Homo sapien
cgggcgaagcgcgaggttccgctcg

SEQ ID NO: 1880081 - DNA, 25 bp, Homo sapien
cttcggattgtccccgggcgaagcg

SEQ ID NO: 1880082 - DNA, 25 bp, Homo sapien
attgtccccgggcgaagcgcgaggt

SEQ ID NO: 1880083 - DNA, 25 bp, Homo sapien
tgtccccgggcgaagcgcgaggttc

SEQ ID NO: 1880084 - DNA, 25 bp, Homo sapien
ctccgcgcggcgagggatctctgtg

SEQ ID NO: 1880085 - DNA, 25 bp, Homo sapien
cggcgagggatctctgtgcgtcctc

SEQ ID NO: 1880086 - DNA, 25 bp, Homo sapien
gctcacaccagcggccttaactgga

SEQ ID NO: 1880087 - DNA, 25 bp, Homo sapien
ggatctctgtgcgtcctcactggcc

SEQ ID NO: 1880088 - DNA, 25 bp, Homo sapien
gctattaggcatgcccagttttgtg

SEQ ID NO: 1880089 - DNA, 25 bp, Homo sapien
tctcattgggcggtagcgcaagtcg

SEQ ID NO: 1880090 - DNA, 25 bp, Homo sapien
gaagggagctcggaagatgcaaacg

SEQ ID NO: 1880091 - DNA, 25 bp, Homo sapien
gcgcaagtcgggtggcctgactggc

SEQ ID NO: 1880092 - DNA, 25 bp, Homo sapien
caatgaagactgcatgtgatcggca

SEQ ID NO: 1880093 - DNA, 25 bp, Homo sapien
tctcagggacgcagtaggatgttca

SEQ ID NO: 1880094 - DNA, 25 bp, Homo sapien
cgcactgggtctggaaatacaatga

SEQ ID NO: 1880095 - DNA, 25 bp, Homo sapien
caggcgcactccagttgtgcaggaa

SEQ ID NO: 1880096 - DNA, 25 bp, Homo sapien
ctcgaagaaatattgtgcagagaca

SEQ ID NO: 1880097 - DNA, 25 bp, Homo sapien
tcgaagaaatattgtgcagagacat

SEQ ID NO: 1880098 - DNA, 25 bp, Homo sapien
gaaatattgtgcagagacatgattg

SEQ ID NO: 1880099 - DNA, 25 bp, Homo sapien
attgtgcagagacatgattgaggtg

SEQ ID NO: 1880100 - DNA, 25 bp, Homo sapien
gacttccttcctgtggcgttgagga

SEQ ID NO: 1880101 - DNA, 25 bp, Homo sapien
tggccaatggctcataccctgaggt

SEQ ID NO: 1880102 - DNA, 25 bp, Homo sapien
ttccttcttgaacataagttagcat

SEQ ID NO: 1880103 - DNA, 25 bp, Homo sapien
ttgaggaaatatatgtagctggcca

SEQ ID NO: 1880104 - DNA, 25 bp, Homo sapien
tgttaccagaaaaccgcttttctgc

SEQ ID NO: 1880105 - DNA, 25 bp, Homo sapien
gaaaattataggatgttgtgttcca

SEQ ID NO: 1880106 - DNA, 25 bp, Homo sapien
tgaagggatgtcagaaatgcgactg

SEQ ID NO: 1880107 - DNA, 25 bp, Homo sapien
ctttttggaaaattataggatgttg

SEQ ID NO: 1880108 - DNA, 25 bp, Homo sapien
ctccttcaaattaattccaagatat

SEQ ID NO: 1880109 - DNA, 25 bp, Homo sapien
ccttcaaattaattccaagatataa

SEQ ID NO: 1880110 - DNA, 25 bp, Homo sapien
tcaaattaattccaagatataatct

SEQ ID NO: 1880111 - DNA, 25 bp, Homo sapien
aattaattccaagatataatctcaa

SEQ ID NO: 1880112 - DNA, 25 bp, Homo sapien
agccattttttaaccgaatattcat

SEQ ID NO: 1880113 - DNA, 25 bp, Homo sapien
gaagggtggcacttctcgaaattag

SEQ ID NO: 1880114 - DNA, 25 bp, Homo sapien
tactggtgctccaaatgtgtaggag

SEQ ID NO: 1880115 - DNA, 25 bp, Homo sapien
gaccagattgggcagtaatttaagt

SEQ ID NO: 1880116 - DNA, 25 bp, Homo sapien
ttaagattcacaaatggaagggtgg

SEQ ID NO: 1880117 - DNA, 25 bp, Homo sapien
tgatgaatattgctcaccacagtgg

SEQ ID NO: 1880118 - DNA, 25 bp, Homo sapien
cagttgctttgatggatgatcctac

SEQ ID NO: 1880119 - DNA, 25 bp, Homo sapien
agttggaacaatgcagtaagaagcc

SEQ ID NO: 1880120 - DNA, 25 bp, Homo sapien
tacattgcatggctttacacaaagg

SEQ ID NO: 1880121 - DNA, 25 bp, Homo sapien
tcagagacaacaccttgtgggtatt

SEQ ID NO: 1880122 - DNA, 25 bp, Homo sapien
tgcctcccactgtaaaaaacacgtc

SEQ ID NO: 1880123 - DNA, 25 bp, Homo sapien
tcacccagactttagtcaagaaaag

SEQ ID NO: 1880124 - DNA, 25 bp, Homo sapien
aaaatggtctcaattcatggattcc

SEQ ID NO: 1880125 - DNA, 25 bp, Homo sapien
caatacgttttaaggcatcacccag

SEQ ID NO: 1880126 - DNA, 25 bp, Homo sapien
cctctgctgaagagggtgtggtcat

SEQ ID NO: 1880127 - DNA, 25 bp, Homo sapien
tcttctgggaaacattgacaatgca

SEQ ID NO: 1880128 - DNA, 25 bp, Homo sapien
ttgacaatgcagtttagcggatgaa

SEQ ID NO: 1880129 - DNA, 25 bp, Homo sapien
gacaatgcagtttagcggatgaacc

SEQ ID NO: 1880130 - DNA, 25 bp, Homo sapien
caatgcagtttagcggatgaaccat

SEQ ID NO: 1880131 - DNA, 25 bp, Homo sapien
ctatggtaaataggatctctgaaat

SEQ ID NO: 1880132 - DNA, 25 bp, Homo sapien
gtgacatttaagagatgacaatagt

SEQ ID NO: 1880133 - DNA, 25 bp, Homo sapien
ggatctctgaaatcgagtgacattt

SEQ ID NO: 1880134 - DNA, 25 bp, Homo sapien
aatcgagtgacatttaagagatgac

SEQ ID NO: 1880135 - DNA, 25 bp, Homo sapien
ctgtcctcataaggcacaaaccaca

SEQ ID NO: 1880136 - DNA, 25 bp, Homo sapien
gcacaaaccacaatctccttacaag

SEQ ID NO: 1880137 - DNA, 25 bp, Homo sapien
caaaccacaatctccttacaagcat

SEQ ID NO: 1880138 - DNA, 25 bp, Homo sapien
ggcacaaaccacaatctccttacaa

SEQ ID NO: 1880139 - DNA, 25 bp, Homo sapien
gaagagccttgcacaagtagcagga

SEQ ID NO: 1880140 - DNA, 25 bp, Homo sapien
tccttgcacaagtagccggattttt

SEQ ID NO: 1880141 - DNA, 25 bp, Homo sapien
ctttttctatcttgtatccttgcac

SEQ ID NO: 1880142 - DNA, 25 bp, Homo sapien
tctatcttgtatttcagttcatcat

SEQ ID NO: 1880143 - DNA, 25 bp, Homo sapien
ccactgattttcgagattcacttta

SEQ ID NO: 1880144 - DNA, 25 bp, Homo sapien
ggacccactgattttcgagattcac

SEQ ID NO: 1880145 - DNA, 25 bp, Homo sapien
ctgattttcgagattcactttatac

SEQ ID NO: 1880146 - DNA, 25 bp, Homo sapien
tcgagattcactttatacttctctg

SEQ ID NO: 1880147 - DNA, 25 bp, Homo sapien
accaagatagccctcaaacctagtg

SEQ ID NO: 1880148 - DNA, 25 bp, Homo sapien
tagtgggcttcctcttgtcagttcc

SEQ ID NO: 1880149 - DNA, 25 bp, Homo sapien
cctcaaacctagtgggcttcctctt

SEQ ID NO: 1880150 - DNA, 25 bp, Homo sapien
acaaccaagatagccctcaaaccta

SEQ ID NO: 1880151 - DNA, 25 bp, Homo sapien
ctgatcactgagggttttttggaac

SEQ ID NO: 1880152 - DNA, 25 bp, Homo sapien
tcaagcaacaaatagcgtctgatca

SEQ ID NO: 1880153 - DNA, 25 bp, Homo sapien
ttttggaacagccataagttcttca

SEQ ID NO: 1880154 - DNA, 25 bp, Homo sapien
ggaacagccataagttcttcagaac

SEQ ID NO: 1880155 - DNA, 25 bp, Homo sapien
tgtacataattaggcttaagggcat

SEQ ID NO: 1880156 - DNA, 25 bp, Homo sapien
cacagttctgacttcgtttatcaaa

SEQ ID NO: 1880157 - DNA, 25 bp, Homo sapien
tgacttcgtttatcaaatgtgtaca

SEQ ID NO: 1880158 - DNA, 25 bp, Homo sapien
ctgtaacccgacctctgagtaaaca

SEQ ID NO: 1880159 - DNA, 25 bp, Homo sapien
ttttggaaagttagggagccatcag

SEQ ID NO: 1880160 - DNA, 25 bp, Homo sapien
tttggaaagttagggagccatcaga

SEQ ID NO: 1880161 - DNA, 25 bp, Homo sapien
gaaagttagggagccatcagaattc

SEQ ID NO: 1880162 - DNA, 25 bp, Homo sapien
tggaaagttagggagccatcagaat

SEQ ID NO: 1880163 - DNA, 25 bp, Homo sapien
gaggtatatgtaattccagctgaac

SEQ ID NO: 1880164 - DNA, 25 bp, Homo sapien
gcattccctgctagattgaagtata

SEQ ID NO: 1880165 - DNA, 25 bp, Homo sapien
gaactcatcttaatcaggacaaaac

SEQ ID NO: 1880166 - DNA, 25 bp, Homo sapien
gtggcacaggatagttaaaacagtc

SEQ ID NO: 1880167 - DNA, 25 bp, Homo sapien
ggtgtaacttggctgcatatgtttc

SEQ ID NO: 1880168 - DNA, 25 bp, Homo sapien
gtctctggtgtaacttggctgcata

SEQ ID NO: 1880169 - DNA, 25 bp, Homo sapien
tttctttgcaatgagtctctggtgt

SEQ ID NO: 1880170 - DNA, 25 bp, Homo sapien
ttctttgcaatgagtctctggtgta

SEQ ID NO: 1880171 - DNA, 25 bp, Homo sapien
ggaccacttgcatgagtgtgtggaa

SEQ ID NO: 1880172 - DNA, 25 bp, Homo sapien
ctggatgaaagactgcatcacaaag

SEQ ID NO: 1880173 - DNA, 25 bp, Homo sapien
cccctcttgcatgctcctaggacca

SEQ ID NO: 1880174 - DNA, 25 bp, Homo sapien
tgcatcacaaagaacacgtagcaca

SEQ ID NO: 1880175 - DNA, 25 bp, Homo sapien
tggtggtgtggacttgatgtagtca

SEQ ID NO: 1880176 - DNA, 25 bp, Homo sapien
cttggtttccactgaatgttgatgg

SEQ ID NO: 1880177 - DNA, 25 bp, Homo sapien
tcaagaatggtaaatatgctcatca

SEQ ID NO: 1880178 - DNA, 25 bp, Homo sapien
ccaatgtttgaccttttacaaatgg

SEQ ID NO: 1880179 - DNA, 25 bp, Homo sapien
cttttttgttagatccaatatctga

SEQ ID NO: 1880180 - DNA, 25 bp, Homo sapien
tatcaggttcagctctaacaacctg

SEQ ID NO: 1880181 - DNA, 25 bp, Homo sapien
atcaggttcagctctaacaacctgc

SEQ ID NO: 1880182 - DNA, 25 bp, Homo sapien
tgtatcaggttcagctctaacaacc

SEQ ID NO: 1880183 - DNA, 25 bp, Homo sapien
ctgtatcaggttcagctctaacaac

SEQ ID NO: 1880184 - DNA, 25 bp, Homo sapien
ccaatgttgacttgagtagtcaaga

SEQ ID NO: 1880185 - DNA, 25 bp, Homo sapien
gttgacttgagtagtcaagaagttg

SEQ ID NO: 1880186 - DNA, 25 bp, Homo sapien
ccgccaatgttgacttgagtagtca

SEQ ID NO: 1880187 - DNA, 25 bp, Homo sapien
gaattccgccaatgttgacttgagt

SEQ ID NO: 1880188 - DNA, 25 bp, Homo sapien
catctcttgccatcggttaccaaca

SEQ ID NO: 1880189 - DNA, 25 bp, Homo sapien
ggcatctcttgccatcggttaccaa

SEQ ID NO: 1880190 - DNA, 25 bp, Homo sapien
gcatctcttgccatcggttaccaac

SEQ ID NO: 1880191 - DNA, 25 bp, Homo sapien
tggcatctcttgccatcggttacca

SEQ ID NO: 1880192 - DNA, 25 bp, Homo sapien
gtaaaaattatctgatttggtgctt

SEQ ID NO: 1880193 - DNA, 25 bp, Homo sapien
ctgatttggtgcttaattctttcac

SEQ ID NO: 1880194 - DNA, 25 bp, Homo sapien
attctttcacagtgcaggaattttg

SEQ ID NO: 1880195 - DNA, 25 bp, Homo sapien
ggtgcttaattctttcacagtgcag

SEQ ID NO: 1880196 - DNA, 25 bp, Homo sapien
tcaggtgaagggctgtaaccacacc

SEQ ID NO: 1880197 - DNA, 25 bp, Homo sapien
ggctgtaaccacacccaattatcct

SEQ ID NO: 1880198 - DNA, 25 bp, Homo sapien
ggtgaagggctgtaaccacacccaa

SEQ ID NO: 1880199 - DNA, 25 bp, Homo sapien
gaagggctgtaaccacacccaatta

SEQ ID NO: 1880200 - DNA, 25 bp, Homo sapien
ggcaacatttaaaccctgctcagat

SEQ ID NO: 1880201 - DNA, 25 bp, Homo sapien
ctcaagaaccgaggcaacatttaaa

SEQ ID NO: 1880202 - DNA, 25 bp, Homo sapien
ttctcaagaaccgaggcaacattta

SEQ ID NO: 1880203 - DNA, 25 bp, Homo sapien
aacatttaaaccctgctcagattcc

SEQ ID NO: 1880204 - DNA, 25 bp, Homo sapien
tgacaggtccatagccctcttgtga

SEQ ID NO: 1880205 - DNA, 25 bp, Homo sapien
tacttgatgcgagctataaaggctg

SEQ ID NO: 1880206 - DNA, 25 bp, Homo sapien
tgagggaagctgtctaaaccaggaa

SEQ ID NO: 1880207 - DNA, 25 bp, Homo sapien
tgaagacatcagtgcctgacaggtc

SEQ ID NO: 1880208 - DNA, 25 bp, Homo sapien
atgggattcctgttgtggctctcac

SEQ ID NO: 1880209 - DNA, 25 bp, Homo sapien
ttcctgttgtggctctcactgtcat

SEQ ID NO: 1880210 - DNA, 25 bp, Homo sapien
gattcctgttgtggctctcactgtc

SEQ ID NO: 1880211 - DNA, 25 bp, Homo sapien
gggattcctgttgtggctctcactg

SEQ ID NO: 1880212 - DNA, 25 bp, Homo sapien
cacttcaaggagagcaatgagagac

SEQ ID NO: 1880213 - DNA, 25 bp, Homo sapien
aagtttccacaaccaccaatgagag

SEQ ID NO: 1880214 - DNA, 25 bp, Homo sapien
tatgtgcaggagacccataagtttc

SEQ ID NO: 1880215 - DNA, 25 bp, Homo sapien
ccaatgagagattgtgagcactgca

SEQ ID NO: 1880216 - DNA, 25 bp, Homo sapien
tctcacataggagttactcttggcc

SEQ ID NO: 1880217 - DNA, 25 bp, Homo sapien
gaaaatctggagcttttgaccctta

SEQ ID NO: 1880218 - DNA, 25 bp, Homo sapien
tatgtagttgagaaacctgcactgg

SEQ ID NO: 1880219 - DNA, 25 bp, Homo sapien
tgaccaatggtgataggcttcccct

SEQ ID NO: 1880220 - DNA, 25 bp, Homo sapien
tcttggcaaagcattatctatagca

SEQ ID NO: 1880221 - DNA, 25 bp, Homo sapien
gaaccgcagatctatgaatatggct

SEQ ID NO: 1880222 - DNA, 25 bp, Homo sapien
tctggagatatcaggtagacaacat

SEQ ID NO: 1880223 - DNA, 25 bp, Homo sapien
gaatatggctttctggagatatcag

SEQ ID NO: 1880224 - DNA, 25 bp, Homo sapien
ctggaaacttagggctaccaatcct

SEQ ID NO: 1880225 - DNA, 25 bp, Homo sapien
tcaatgttcctcaactcttcacctc

SEQ ID NO: 1880226 - DNA, 25 bp, Homo sapien
ttcaatgttcctcaactcttcacct

SEQ ID NO: 1880227 - DNA, 25 bp, Homo sapien
gtagcaaatacattctccatctctg

SEQ ID NO: 1880228 - DNA, 25 bp, Homo sapien
tggtagcaaatacattctccatctc

SEQ ID NO: 1880229 - DNA, 25 bp, Homo sapien
gtctccagctgccatcgaaggttat

SEQ ID NO: 1880230 - DNA, 25 bp, Homo sapien
catcgaaggttattgatgtagctct

SEQ ID NO: 1880231 - DNA, 25 bp, Homo sapien
gctgcaggaggctccacttggtctt

SEQ ID NO: 1880232 - DNA, 25 bp, Homo sapien
tggtcttcagcatcttgttccgctc

SEQ ID NO: 1880233 - DNA, 25 bp, Homo sapien
atgttgctccaagccatctcctgct

SEQ ID NO: 1880234 - DNA, 25 bp, Homo sapien
tgttccgctccttcaggaactgtac

SEQ ID NO: 1880235 - DNA, 25 bp, Homo sapien
cttgctgagagtcttaatctgcttc

SEQ ID NO: 1880236 - DNA, 25 bp, Homo sapien
gaggcaaacttgctgagagtcttaa

SEQ ID NO: 1880237 - DNA, 25 bp, Homo sapien
ggaggcaaacttgctgagagtctta

SEQ ID NO: 1880238 - DNA, 25 bp, Homo sapien
gctgagagtcttaatctgcttcttc

SEQ ID NO: 1880239 - DNA, 25 bp, Homo sapien
ctctgcctagggtaccctggaatct

SEQ ID NO: 1880240 - DNA, 25 bp, Homo sapien
aagagcacctactgaaggtcccggg

SEQ ID NO: 1880241 - DNA, 25 bp, Homo sapien
gcataagagcacctactgaaggtcc

SEQ ID NO: 1880242 - DNA, 25 bp, Homo sapien
ctggcataagagcacctactgaagg

SEQ ID NO: 1880243 - DNA, 25 bp, Homo sapien
taagagcacctactgaaggtcccgg

SEQ ID NO: 1880244 - DNA, 25 bp, Homo sapien
cactgagtgtgtgcagttgagccca

SEQ ID NO: 1880245 - DNA, 25 bp, Homo sapien
gagtaatactatccttctcggagtc

SEQ ID NO: 1880246 - DNA, 25 bp, Homo sapien
gttgagcccaaccatgcaagcattc

SEQ ID NO: 1880247 - DNA, 25 bp, Homo sapien
gcattcagtacattgcaggtgacaa

SEQ ID NO: 1880248 - DNA, 25 bp, Homo sapien
taaatttccctctttctgtactcac

SEQ ID NO: 1880249 - DNA, 25 bp, Homo sapien
tccataaatttccctctttctgtac

SEQ ID NO: 1880250 - DNA, 25 bp, Homo sapien
tcagcatccataaatttccctcttt

SEQ ID NO: 1880251 - DNA, 25 bp, Homo sapien
cataaatttccctctttctgtactc

SEQ ID NO: 1880252 - DNA, 25 bp, Homo sapien
cttgcttcctcaattatcctgtccc

SEQ ID NO: 1880253 - DNA, 25 bp, Homo sapien
caattatcctgtccctcaggacctt

SEQ ID NO: 1880254 - DNA, 25 bp, Homo sapien
ttcctcaattatcctgtccctcagg

SEQ ID NO: 1880255 - DNA, 25 bp, Homo sapien
tcaattatcctgtccctcaggacct

SEQ ID NO: 1880256 - DNA, 25 bp, Homo sapien
tattttgtgaggtccctagtgtatg

SEQ ID NO: 1880257 - DNA, 25 bp, Homo sapien
tttgtgaggtccctagtgtatgtct

SEQ ID NO: 1880258 - DNA, 25 bp, Homo sapien
aaggtattttgtgaggtccctagtg

SEQ ID NO: 1880259 - DNA, 25 bp, Homo sapien
ctgaaggtattttgtgaggtcccta

SEQ ID NO: 1880260 - DNA, 25 bp, Homo sapien
aggagatagacatggaagcttagcc

SEQ ID NO: 1880261 - DNA, 25 bp, Homo sapien
catggaagcttagccggtgggggcc

SEQ ID NO: 1880262 - DNA, 25 bp, Homo sapien
gatagacatggaagcttagccggtg

SEQ ID NO: 1880263 - DNA, 25 bp, Homo sapien
gtgggggcccctcatctctatccca

SEQ ID NO: 1880264 - DNA, 25 bp, Homo sapien
ttggtatttcaccttcgttgcttct

SEQ ID NO: 1880265 - DNA, 25 bp, Homo sapien
tacttggtatttcaccttcgttgct

SEQ ID NO: 1880266 - DNA, 25 bp, Homo sapien
cttggtatttcaccttcgttgcttc

SEQ ID NO: 1880267 - DNA, 25 bp, Homo sapien
ctacttggtatttcaccttcgttgc

SEQ ID NO: 1880268 - DNA, 25 bp, Homo sapien
atggccaggacctgcggtggaacca

SEQ ID NO: 1880269 - DNA, 25 bp, Homo sapien
aaaatacacttagtgagttgcccat

SEQ ID NO: 1880270 - DNA, 25 bp, Homo sapien
ggcatggccaggacctgcggtggaa

SEQ ID NO: 1880271 - DNA, 25 bp, Homo sapien
ccaggacctgcggtggaaccaggaa

SEQ ID NO: 1880272 - DNA, 25 bp, Homo sapien
gcagagcgcaggaccagccagatcc

SEQ ID NO: 1880273 - DNA, 25 bp, Homo sapien
agagcgcaggaccagccagatcccg

SEQ ID NO: 1880274 - DNA, 25 bp, Homo sapien
aagcagagcgcaggaccagccagat

SEQ ID NO: 1880275 - DNA, 25 bp, Homo sapien
tggaagcagagcgcaggaccagcca

SEQ ID NO: 1880276 - DNA, 25 bp, Homo sapien
cagcatagcagcatgagtaagagag

SEQ ID NO: 1880277 - DNA, 25 bp, Homo sapien
gcaagttctaaagttctggtagtgc

SEQ ID NO: 1880278 - DNA, 25 bp, Homo sapien
ctgtgcaagttctaaagttctggta

SEQ ID NO: 1880279 - DNA, 25 bp, Homo sapien
gtagtgccaagcagcatagcagcat

SEQ ID NO: 1880280 - DNA, 25 bp, Homo sapien
tgagaaagtgcccacacgatgtatg

SEQ ID NO: 1880281 - DNA, 25 bp, Homo sapien
tctcggagggccagaaaatcaggtt

SEQ ID NO: 1880282 - DNA, 25 bp, Homo sapien
actgtttaatggtacgttgctgccc

SEQ ID NO: 1880283 - DNA, 25 bp, Homo sapien
tcattgtgtagcaggttctcagcca

SEQ ID NO: 1880284 - DNA, 25 bp, Homo sapien
ggggcggccctcgtctgggaggctg

SEQ ID NO: 1880285 - DNA, 25 bp, Homo sapien
gggcggccctcgtctgggaggctgg

SEQ ID NO: 1880286 - DNA, 25 bp, Homo sapien
ggcggccctcgtctgggaggctggg

SEQ ID NO: 1880287 - DNA, 25 bp, Homo sapien
tccccatcaagctaatcaaatggtg

SEQ ID NO: 1880288 - DNA, 25 bp, Homo sapien
caaggttaaaggtattgtccagtca

SEQ ID NO: 1880289 - DNA, 25 bp, Homo sapien
aaggcactgtgcacataggtaatgt

SEQ ID NO: 1880290 - DNA, 25 bp, Homo sapien
taaacccctaattataggcagcatg

SEQ ID NO: 1880291 - DNA, 25 bp, Homo sapien
tggtctcccctagtatgatggctcc

SEQ ID NO: 1880292 - DNA, 25 bp, Homo sapien
taaggcacccttttcgagccataaa

SEQ ID NO: 1880293 - DNA, 25 bp, Homo sapien
tcaagcgttgttgttattcacacac

SEQ ID NO: 1880294 - DNA, 25 bp, Homo sapien
caagaaggtagaagcatcagcagaa

SEQ ID NO: 1880295 - DNA, 25 bp, Homo sapien
cactttatagggatgggttagagcc

SEQ ID NO: 1880296 - DNA, 25 bp, Homo sapien
gacatgtttcattaaggcccgtgga

SEQ ID NO: 1880297 - DNA, 25 bp, Homo sapien
cagattatcctctctagaagtggga

SEQ ID NO: 1880298 - DNA, 25 bp, Homo sapien
cccgtggactataaagggatatgcc

SEQ ID NO: 1880299 - DNA, 25 bp, Homo sapien
tttgcactgaacctaataacatgac

SEQ ID NO: 1880300 - DNA, 25 bp, Homo sapien
aacatgaccacatccaaccttaatg

SEQ ID NO: 1880301 - DNA, 25 bp, Homo sapien
ttggcatgagagtcttccttatccc

SEQ ID NO: 1880302 - DNA, 25 bp, Homo sapien
cttatccctcccatgatgtaatgtg

SEQ ID NO: 1880303 - DNA, 25 bp, Homo sapien
ggacttcttcccaaaagcagctaaa

SEQ ID NO: 1880304 - DNA, 25 bp, Homo sapien
aaactccaaacatagccctggctag

SEQ ID NO: 1880305 - DNA, 25 bp, Homo sapien
tcagctccaattctattccttaggg

SEQ ID NO: 1880306 - DNA, 25 bp, Homo sapien
tccacagagcactagaggtttcaga

SEQ ID NO: 1880307 - DNA, 25 bp, Homo sapien
ttgtttagaaagaccataatggtgc

SEQ ID NO: 1880308 - DNA, 25 bp, Homo sapien
cttgtttagaaagaccataatggtg

SEQ ID NO: 1880309 - DNA, 25 bp, Homo sapien
cataatggtgcatacaacctggatt

SEQ ID NO: 1880310 - DNA, 25 bp, Homo sapien
gaaagaccataatggtgcatacaac

SEQ ID NO: 1880311 - DNA, 25 bp, Homo sapien
ttatagcttcaccacaactttgttg

SEQ ID NO: 1880312 - DNA, 25 bp, Homo sapien
cagcagtcctacttcatctgtcaaa

SEQ ID NO: 1880313 - DNA, 25 bp, Homo sapien
tcttatccaggtcaacatacacata

SEQ ID NO: 1880314 - DNA, 25 bp, Homo sapien
gcgaatatatttattgccacccaaa

SEQ ID NO: 1880315 - DNA, 25 bp, Homo sapien
ctttcggcagctaacagaaggcgcc

SEQ ID NO: 1880316 - DNA, 25 bp, Homo sapien
gaaaaactctcgacattggctccag

SEQ ID NO: 1880317 - DNA, 25 bp, Homo sapien
tatgaagtccatctaagccggcagc

SEQ ID NO: 1880318 - DNA, 25 bp, Homo sapien
tcccagtgatcgtgagctgctcagt

SEQ ID NO: 1880319 - DNA, 25 bp, Homo sapien
ctatgtcgctattaaaacatgtggc

SEQ ID NO: 1880320 - DNA, 25 bp, Homo sapien
gggcatgcaaacaccatggctcact

SEQ ID NO: 1880321 - DNA, 25 bp, Homo sapien
ggtatcacttcaagataacctcggg

SEQ ID NO: 1880322 - DNA, 25 bp, Homo sapien
gataactctggcattaggactatgt

SEQ ID NO: 1880323 - DNA, 25 bp, Homo sapien
cctggacacgccgtggaggtctgtt

SEQ ID NO: 1880324 - DNA, 25 bp, Homo sapien
ctgttgcttcaaatcgtacaaactg

SEQ ID NO: 1880325 - DNA, 25 bp, Homo sapien
caaactggaggcgatttttggccat

SEQ ID NO: 1880326 - DNA, 25 bp, Homo sapien
agtgtgcagggatagtcttagacct

SEQ ID NO: 1880327 - DNA, 25 bp, Homo sapien
aaatttgactgctgtccctcatgca

SEQ ID NO: 1880328 - DNA, 25 bp, Homo sapien
atttgactgctgtccctcatgcaat

SEQ ID NO: 1880329 - DNA, 25 bp, Homo sapien
gaggtggggtcaaaatttgactgct

SEQ ID NO: 1880330 - DNA, 25 bp, Homo sapien
gaagagagttgaggtggggtcaaaa

SEQ ID NO: 1880331 - DNA, 25 bp, Homo sapien
ccagaatccttaccagtaaatcctt

SEQ ID NO: 1880332 - DNA, 25 bp, Homo sapien
cagaatccttaccagtaaatcctta

SEQ ID NO: 1880333 - DNA, 25 bp, Homo sapien
cttgtcatcatatgacagatgagac

SEQ ID NO: 1880334 - DNA, 25 bp, Homo sapien
ctgagagtccttgtcatcatatgac

SEQ ID NO: 1880335 - DNA, 25 bp, Homo sapien
acctccaggaacattggttgttgtt

SEQ ID NO: 1880336 - DNA, 25 bp, Homo sapien
gagtccttgtcatcatatgacagat

SEQ ID NO: 1880337 - DNA, 25 bp, Homo sapien
tgttccctaatttgtggcacaccat

SEQ ID NO: 1880338 - DNA, 25 bp, Homo sapien
aatttgtggcacaccatttggtttc

SEQ ID NO: 1880339 - DNA, 25 bp, Homo sapien
gtttgcttgtgttccctaatttgtg

SEQ ID NO: 1880340 - DNA, 25 bp, Homo sapien
tgcttgtgttccctaatttgtggca

SEQ ID NO: 1880341 - DNA, 25 bp, Homo sapien
tcagttgaacaaacatatggtttag

SEQ ID NO: 1880342 - DNA, 25 bp, Homo sapien
gctgttggcttcagtctcattgcct

SEQ ID NO: 1880343 - DNA, 25 bp, Homo sapien
ttccttgtccttcttaatgtgttca

SEQ ID NO: 1880344 - DNA, 25 bp, Homo sapien
catttgaattggacatatccgtttc

SEQ ID NO: 1880345 - DNA, 25 bp, Homo sapien
cagcagctctagagatatgaggcac

SEQ ID NO: 1880346 - DNA, 25 bp, Homo sapien
ggtctcaaaactaccggaatgctgt

SEQ ID NO: 1880347 - DNA, 25 bp, Homo sapien
ccatattaaaacgtggccctcgtgt

SEQ ID NO: 1880348 - DNA, 25 bp, Homo sapien
cagtagttgatagcccttcccagga

SEQ ID NO: 1880349 - DNA, 25 bp, Homo sapien
ctcctgcagaaggtcctcttcatta

SEQ ID NO: 1880350 - DNA, 25 bp, Homo sapien
gcagaaggtcctcttcattattcat

SEQ ID NO: 1880351 - DNA, 25 bp, Homo sapien
tgcagaaggtcctcttcattattca

SEQ ID NO: 1880352 - DNA, 25 bp, Homo sapien
cctgcagaaggtcctcttcattatt

SEQ ID NO: 1880353 - DNA, 25 bp, Homo sapien
ctcaacactttttaagttcagcgtt

SEQ ID NO: 1880354 - DNA, 25 bp, Homo sapien
tcaacactttttaagttcagcgtta

SEQ ID NO: 1880355 - DNA, 25 bp, Homo sapien
caacactttttaagttcagcgttag

SEQ ID NO: 1880356 - DNA, 25 bp, Homo sapien
tgctgctatcaactcaacttcaagt

SEQ ID NO: 1880357 - DNA, 25 bp, Homo sapien
ttccatgtggaagtgtatagtctcc

SEQ ID NO: 1880358 - DNA, 25 bp, Homo sapien
tgttgatgaaggaggatatgcagtt

SEQ ID NO: 1880359 - DNA, 25 bp, Homo sapien
tatagtctccatggctaatcacttc

SEQ ID NO: 1880360 - DNA, 25 bp, Homo sapien
tgcatgggtttgttcctcctttata

SEQ ID NO: 1880361 - DNA, 25 bp, Homo sapien
gcatgggtttgttcctcctttatat

SEQ ID NO: 1880362 - DNA, 25 bp, Homo sapien
catgggtttgttcctcctttatatg

SEQ ID NO: 1880363 - DNA, 25 bp, Homo sapien
gatacagtgccgactggtatattta

SEQ ID NO: 1880364 - DNA, 25 bp, Homo sapien
tggtgggtttacaatccctacaatc

SEQ ID NO: 1880365 - DNA, 25 bp, Homo sapien
gctagatacagtgccgactggtata

SEQ ID NO: 1880366 - DNA, 25 bp, Homo sapien
ttacaatccctacaatccctgagct

SEQ ID NO: 1880367 - DNA, 25 bp, Homo sapien
caaagaaatgtaagttaaaatcaca

SEQ ID NO: 1880368 - DNA, 25 bp, Homo sapien
tacaaagaaatgtaagttaaaatca

SEQ ID NO: 1880369 - DNA, 25 bp, Homo sapien
tatggttacaaagaaatgtaagtta

SEQ ID NO: 1880370 - DNA, 25 bp, Homo sapien
gctcctagttatggtgtagcagcct

SEQ ID NO: 1880371 - DNA, 25 bp, Homo sapien
ctttttgcagctcggcagggtttcc

SEQ ID NO: 1880372 - DNA, 25 bp, Homo sapien
tcacctctaagtggataggcagtct

SEQ ID NO: 1880373 - DNA, 25 bp, Homo sapien
cagccttaaggaagatggatcattc

SEQ ID NO: 1880374 - DNA, 25 bp, Homo sapien
actcttaaagaagggcctcagcgta

SEQ ID NO: 1880375 - DNA, 25 bp, Homo sapien
cagtgccatcagatcactcttaaag

SEQ ID NO: 1880376 - DNA, 25 bp, Homo sapien
gacatccagtgccatcagatcactc

SEQ ID NO: 1880377 - DNA, 25 bp, Homo sapien
gggcctcagcgtagcatccacagct

SEQ ID NO: 1880378 - DNA, 25 bp, Homo sapien
tgttctctgttgaccacactatgtg

SEQ ID NO: 1880379 - DNA, 25 bp, Homo sapien
gaagcatgttttgcacccatgcatg

SEQ ID NO: 1880380 - DNA, 25 bp, Homo sapien
accttgtctcagaccagtccccagg

SEQ ID NO: 1880381 - DNA, 25 bp, Homo sapien
ggctgcaggtgaagcaaccagtctg

SEQ ID NO: 1880382 - DNA, 25 bp, Homo sapien
cacaatgtagaggactgatagcagc

SEQ ID NO: 1880383 - DNA, 25 bp, Homo sapien
gtgtcttagcaactactcagccagc

SEQ ID NO: 1880384 - DNA, 25 bp, Homo sapien
ccaacttgtaagtgggttgatttca

SEQ ID NO: 1880385 - DNA, 25 bp, Homo sapien
tatggaagggaagtaagaaccaaga

SEQ ID NO: 1880386 - DNA, 25 bp, Homo sapien
gtgtgtgccacaaagcccggctaat

SEQ ID NO: 1880387 - DNA, 25 bp, Homo sapien
ccccaacctgtaggtgagattacag

SEQ ID NO: 1880388 - DNA, 25 bp, Homo sapien
tgacctcaagtgatctacccacctc

SEQ ID NO: 1880389 - DNA, 25 bp, Homo sapien
cctcaagtgatctacccacctcagc

SEQ ID NO: 1880390 - DNA, 25 bp, Homo sapien
aaccttcgctcttaaactcctcatg

SEQ ID NO: 1880391 - DNA, 25 bp, Homo sapien
tggcgccagacaacaaatcccaggt

SEQ ID NO: 1880392 - DNA, 25 bp, Homo sapien
agacaatgtagccacttcaaaatga

SEQ ID NO: 1880393 - DNA, 25 bp, Homo sapien
cctaaattttcctggcgccagacaa

SEQ ID NO: 1880394 - DNA, 25 bp, Homo sapien
gtaggttgtgttcccctccagagag

SEQ ID NO: 1880395 - DNA, 25 bp, Homo sapien
gagagggccttagagaaattcacca

SEQ ID NO: 1880396 - DNA, 25 bp, Homo sapien
gcattagccaagacggaagacacaa

SEQ ID NO: 1880397 - DNA, 25 bp, Homo sapien
gaactgcaaggttgtaaggatccta

SEQ ID NO: 1880398 - DNA, 25 bp, Homo sapien
ttaaccgtcaaagcacttaagatca

SEQ ID NO: 1880399 - DNA, 25 bp, Homo sapien
cacttaagatcagccactctgggct

SEQ ID NO: 1880400 - DNA, 25 bp, Homo sapien
taaccgtcaaagcacttaagatcag

SEQ ID NO: 1880401 - DNA, 25 bp, Homo sapien
aagcacttaagatcagccactctgg

SEQ ID NO: 1880402 - DNA, 25 bp, Homo sapien
taaaggattagggactctgtgagag

SEQ ID NO: 1880403 - DNA, 25 bp, Homo sapien
gagaagcttgtagcatccacagatg

SEQ ID NO: 1880404 - DNA, 25 bp, Homo sapien
ctaggacagctaggacttgagattc

SEQ ID NO: 1880405 - DNA, 25 bp, Homo sapien
gattctctggagaactagggtctgg

SEQ ID NO: 1880406 - DNA, 25 bp, Homo sapien
ctcattgtctggttgctatcttgct

SEQ ID NO: 1880407 - DNA, 25 bp, Homo sapien
cattgtctggttgctatcttgctct

SEQ ID NO: 1880408 - DNA, 25 bp, Homo sapien
gtttctcattgtctggttgctatct

SEQ ID NO: 1880409 - DNA, 25 bp, Homo sapien
tgaagctctggcagtttctcattgt

SEQ ID NO: 1880410 - DNA, 25 bp, Homo sapien
ctcttggctccaacactcagactgt

SEQ ID NO: 1880411 - DNA, 25 bp, Homo sapien
caaatccagttattctctagacctc

SEQ ID NO: 1880412 - DNA, 25 bp, Homo sapien
gttattctctagacctcaagatgct

SEQ ID NO: 1880413 - DNA, 25 bp, Homo sapien
tcaagatgctgctgcctatagcttc

SEQ ID NO: 1880414 - DNA, 25 bp, Homo sapien
tcttccagctggagtctcttgctgg

SEQ ID NO: 1880415 - DNA, 25 bp, Homo sapien
tccagctggagtctcttgctggggt

SEQ ID NO: 1880416 - DNA, 25 bp, Homo sapien
tctcttccagctggagtctcttgct

SEQ ID NO: 1880417 - DNA, 25 bp, Homo sapien
ttctcttccagctggagtctcttgc

SEQ ID NO: 1880418 - DNA, 25 bp, Homo sapien
tgctgagtgataggcaggtgctgct

SEQ ID NO: 1880419 - DNA, 25 bp, Homo sapien
gctgctgcaggtgatctgagtggct

SEQ ID NO: 1880420 - DNA, 25 bp, Homo sapien
tggctggtgagggctagaccctcaa

SEQ ID NO: 1880421 - DNA, 25 bp, Homo sapien
aagtgctgagtgataggcaggtgct

SEQ ID NO: 1880422 - DNA, 25 bp, Homo sapien
tatgaagagtccatcaaactggcat

SEQ ID NO: 1880423 - DNA, 25 bp, Homo sapien
ggcatcattgttctccaatcatcca

SEQ ID NO: 1880424 - DNA, 25 bp, Homo sapien
ttggggcatttcatatgaagagtcc

SEQ ID NO: 1880425 - DNA, 25 bp, Homo sapien
tgttctccaatcatccaaaaaataa

SEQ ID NO: 1880426 - DNA, 25 bp, Homo sapien
ctgagggaccactttcttatagatg

SEQ ID NO: 1880427 - DNA, 25 bp, Homo sapien
agggaccactttcttatagatggac

SEQ ID NO: 1880428 - DNA, 25 bp, Homo sapien
tgctgagggaccactttcttataga

SEQ ID NO: 1880429 - DNA, 25 bp, Homo sapien
gagggaccactttcttatagatgga

SEQ ID NO: 1880430 - DNA, 25 bp, Homo sapien
acttctttattgtaaggagcaaaag

SEQ ID NO: 1880431 - DNA, 25 bp, Homo sapien
caagattcgtacttctagggcttct

SEQ ID NO: 1880432 - DNA, 25 bp, Homo sapien
tctcaaataatgaagggacatctct

SEQ ID NO: 1880433 - DNA, 25 bp, Homo sapien
agggcttctctcctatggtaaaatc

SEQ ID NO: 1880434 - DNA, 25 bp, Homo sapien
aaacaaggcatcacaacacatgaag

SEQ ID NO: 1880435 - DNA, 25 bp, Homo sapien
gaataacctctggatcccggcctgg

SEQ ID NO: 1880436 - DNA, 25 bp, Homo sapien
tgaagaacctgaagtggctggacct

SEQ ID NO: 1880437 - DNA, 25 bp, Homo sapien
tcaccttgtcgtcagctttgctcag

SEQ ID NO: 1880438 - DNA, 25 bp, Homo sapien
acttgagacctcctctttgtaggac

SEQ ID NO: 1880439 - DNA, 25 bp, Homo sapien
gctgattggtacttgagacctcctc

SEQ ID NO: 1880440 - DNA, 25 bp, Homo sapien
tggctgctgattggtacttgagacc

SEQ ID NO: 1880441 - DNA, 25 bp, Homo sapien
ggtacttgagacctcctctttgtag

SEQ ID NO: 1880442 - DNA, 25 bp, Homo sapien
ccctctgtagccaaccaacgaaagg

SEQ ID NO: 1880443 - DNA, 25 bp, Homo sapien
gaatctggttgaatcagcacaaaaa

SEQ ID NO: 1880444 - DNA, 25 bp, Homo sapien
cacaaaaatacttagatggagcctt

SEQ ID NO: 1880445 - DNA, 25 bp, Homo sapien
gaagaactagcatgccatggctgac

SEQ ID NO: 1880446 - DNA, 25 bp, Homo sapien
aatttttcactgtgacttttatgga

SEQ ID NO: 1880447 - DNA, 25 bp, Homo sapien
aactctggtagtttgtgacttcaaa

SEQ ID NO: 1880448 - DNA, 25 bp, Homo sapien
ttcactgtgacttttatggatttta

SEQ ID NO: 1880449 - DNA, 25 bp, Homo sapien
cttcttgagtaaactctggtagttt

SEQ ID NO: 1880450 - DNA, 25 bp, Homo sapien
aaccaagtgctgtttgggtcacact

SEQ ID NO: 1880451 - DNA, 25 bp, Homo sapien
tataattttaactatggtatcttct

SEQ ID NO: 1880452 - DNA, 25 bp, Homo sapien
taatgagatttgtatggcctggaat

SEQ ID NO: 1880453 - DNA, 25 bp, Homo sapien
ttggccagagaacatacattgtatt

SEQ ID NO: 1880454 - DNA, 25 bp, Homo sapien
actttctatcattcataactggatg

SEQ ID NO: 1880455 - DNA, 25 bp, Homo sapien
tactttctatcattcataactggat

SEQ ID NO: 1880456 - DNA, 25 bp, Homo sapien
tataaagtgtaaagaatcctagagg

SEQ ID NO: 1880457 - DNA, 25 bp, Homo sapien
taccttgagtttaataagtgagaac

SEQ ID NO: 1880458 - DNA, 25 bp, Homo sapien
gcccagcactcaataggcttttaat

SEQ ID NO: 1880459 - DNA, 25 bp, Homo sapien
catattgaagaccagtaccttctca

SEQ ID NO: 1880460 - DNA, 25 bp, Homo sapien
tatttcgcaatgtgtagtgtatata

SEQ ID NO: 1880461 - DNA, 25 bp, Homo sapien
gctttatgtatttcgcaatgtgtag

SEQ ID NO: 1880462 - DNA, 25 bp, Homo sapien
ttatgtatttcgcaatgtgtagtgt

SEQ ID NO: 1880463 - DNA, 25 bp, Homo sapien
tagctttatgtatttcgcaatgtgt

SEQ ID NO: 1880464 - DNA, 25 bp, Homo sapien
aacccagcttagttgcaagttcttg

SEQ ID NO: 1880465 - DNA, 25 bp, Homo sapien
cagcttagttgcaagttcttgagcc

SEQ ID NO: 1880466 - DNA, 25 bp, Homo sapien
gcttagttgcaagttcttgagcctt

SEQ ID NO: 1880467 - DNA, 25 bp, Homo sapien
cccagcttagttgcaagttcttgag

SEQ ID NO: 1880468 - DNA, 25 bp, Homo sapien
tgaagtagcagagcagctgtttggt

SEQ ID NO: 1880469 - DNA, 25 bp, Homo sapien
tcagccacttacagaggatggctct

SEQ ID NO: 1880470 - DNA, 25 bp, Homo sapien
ctgaagtagcagagcagctgtttgg

SEQ ID NO: 1880471 - DNA, 25 bp, Homo sapien
aggcactttcagccacttacagagg

SEQ ID NO: 1880472 - DNA, 25 bp, Homo sapien
caaagctggttaggtctcttttggg

SEQ ID NO: 1880473 - DNA, 25 bp, Homo sapien
catttcacaaagctggttaggtctc

SEQ ID NO: 1880474 - DNA, 25 bp, Homo sapien
caatgtcaaaattcttaggccgttt

SEQ ID NO: 1880475 - DNA, 25 bp, Homo sapien
tgggctgaatgtcctgtccaatgtc

SEQ ID NO: 1880476 - DNA, 25 bp, Homo sapien
ctgcttcttcacgacagcagggccg

SEQ ID NO: 1880477 - DNA, 25 bp, Homo sapien
ttaacctcctgcttcttcacgacag

SEQ ID NO: 1880478 - DNA, 25 bp, Homo sapien
gcttcttcacgacagcagggccgga

SEQ ID NO: 1880479 - DNA, 25 bp, Homo sapien
agcagggccggagccaccttctttc

SEQ ID NO: 1880480 - DNA, 25 bp, Homo sapien
taagagctcctcgagccttggttcg

SEQ ID NO: 1880481 - DNA, 25 bp, Homo sapien
cagacgactctacctgaagaaagaa

SEQ ID NO: 1880482 - DNA, 25 bp, Homo sapien
taggccacaccaactttcatgataa

SEQ ID NO: 1880483 - DNA, 25 bp, Homo sapien
atgataaagggcctgtaagagctcc

SEQ ID NO: 1880484 - DNA, 25 bp, Homo sapien
gaatcatacaaagagacaattgtgt

SEQ ID NO: 1880485 - DNA, 25 bp, Homo sapien
cacagaaattatgttagaatcatac

SEQ ID NO: 1880486 - DNA, 25 bp, Homo sapien
gtttttagcagcaatgtcggaagtt

SEQ ID NO: 1880487 - DNA, 25 bp, Homo sapien
agcaatgtcggaagttctgaagcac

SEQ ID NO: 1880488 - DNA, 25 bp, Homo sapien
ggagactacctagacaactttcagg

SEQ ID NO: 1880489 - DNA, 25 bp, Homo sapien
cacacactaagctcctacagaagta

SEQ ID NO: 1880490 - DNA, 25 bp, Homo sapien
tgcccaggcggtatctgtcacatct

SEQ ID NO: 1880491 - DNA, 25 bp, Homo sapien
taaatactatattaagcggcagagt

SEQ ID NO: 1880492 - DNA, 25 bp, Homo sapien
tacccacattagtctgtagccaggg

SEQ ID NO: 1880493 - DNA, 25 bp, Homo sapien
atttaaggaattcggctcagggtcg

SEQ ID NO: 1880494 - DNA, 25 bp, Homo sapien
gaggaaaacctatggctacagctgg

SEQ ID NO: 1880495 - DNA, 25 bp, Homo sapien
tgggttcaagccagctgaggaaaac

SEQ ID NO: 1880496 - DNA, 25 bp, Homo sapien
agcacaataaatgaaggtatgcctg

SEQ ID NO: 1880497 - DNA, 25 bp, Homo sapien
tagacttgctcgacaaaaagctgtc

SEQ ID NO: 1880498 - DNA, 25 bp, Homo sapien
tgttcacaaattgccataacaaatg

SEQ ID NO: 1880499 - DNA, 25 bp, Homo sapien
aaaagctgtcacaaaccatcatttt

SEQ ID NO: 1880500 - DNA, 25 bp, Homo sapien
ttgtagccccaaccaatctgagaag

SEQ ID NO: 1880501 - DNA, 25 bp, Homo sapien
tatgggaacttaccctctgcactag

SEQ ID NO: 1880502 - DNA, 25 bp, Homo sapien
cacttactagattatggcccattgg

SEQ ID NO: 1880503 - DNA, 25 bp, Homo sapien
gctagactgtcattataccttgcaa

SEQ ID NO: 1880504 - DNA, 25 bp, Homo sapien
ggcgcttagccattcatcaaccggt

SEQ ID NO: 1880505 - DNA, 25 bp, Homo sapien
taaaccactggcaaagatgaccgtg

SEQ ID NO: 1880506 - DNA, 25 bp, Homo sapien
taaggcagtagaaagcaggctcgac

SEQ ID NO: 1880507 - DNA, 25 bp, Homo sapien
taaatcctaagatgttgcagggcac

SEQ ID NO: 1880508 - DNA, 25 bp, Homo sapien
taaaggggagggcttgtgacgcaag

SEQ ID NO: 1880509 - DNA, 25 bp, Homo sapien
cttgtgacgcaagggcgcctcggcg

SEQ ID NO: 1880510 - DNA, 25 bp, Homo sapien
tcgcgccggctataaaggggagggc

SEQ ID NO: 1880511 - DNA, 25 bp, Homo sapien
ggctataaaggggagggcttgtgac

SEQ ID NO: 1880512 - DNA, 25 bp, Homo sapien
ccggctcggctacgcgctctgctcc

SEQ ID NO: 1880513 - DNA, 25 bp, Homo sapien
ctcggctacgcgctctgctccgagc

SEQ ID NO: 1880514 - DNA, 25 bp, Homo sapien
tgcgggccggctcggctacgcgctc

SEQ ID NO: 1880515 - DNA, 25 bp, Homo sapien
ggccggctcggctacgcgctctgct

SEQ ID NO: 1880516 - DNA, 25 bp, Homo sapien
cccccgccgccgcctgcatcgccgc

SEQ ID NO: 1880517 - DNA, 25 bp, Homo sapien
tgcatggtagagtctggtgcccccg

SEQ ID NO: 1880518 - DNA, 25 bp, Homo sapien
ccgccgccgcctgcatcgccgccac

SEQ ID NO: 1880519 - DNA, 25 bp, Homo sapien
atggtagagtctggtgcccccgccg

SEQ ID NO: 1880520 - DNA, 25 bp, Homo sapien
ccgcctcgggaccggctgtatgatt

SEQ ID NO: 1880521 - DNA, 25 bp, Homo sapien
gctgtatgattaggccacaatcttc

SEQ ID NO: 1880522 - DNA, 25 bp, Homo sapien
tcgggaccggctgtatgattaggcc

SEQ ID NO: 1880523 - DNA, 25 bp, Homo sapien
ggaccggctgtatgattaggccaca

SEQ ID NO: 1880524 - DNA, 25 bp, Homo sapien
cggaggcaccggcttttgagtccct

SEQ ID NO: 1880525 - DNA, 25 bp, Homo sapien
gctgtcgcctttgttcggagcccgg

SEQ ID NO: 1880526 - DNA, 25 bp, Homo sapien
catcgtcgcctctcgggctgggaat

SEQ ID NO: 1880527 - DNA, 25 bp, Homo sapien
ctgtgagtagccgtcgcatcgtcgc

SEQ ID NO: 1880528 - DNA, 25 bp, Homo sapien
gggcgtggggtaggccggacagcca

SEQ ID NO: 1880529 - DNA, 25 bp, Homo sapien
gcgtggggtaggccggacagccagg

SEQ ID NO: 1880530 - DNA, 25 bp, Homo sapien
tggggtaggccggacagccaggcac

SEQ ID NO: 1880531 - DNA, 25 bp, Homo sapien
gcgggcgtggggtaggccggacagc

SEQ ID NO: 1880532 - DNA, 25 bp, Homo sapien
tcttgtgctcgacggccgggacccg

SEQ ID NO: 1880533 - DNA, 25 bp, Homo sapien
gaacccgtgattgcggcgcggagag

SEQ ID NO: 1880534 - DNA, 25 bp, Homo sapien
gggtggtaacgatctggttccagag

SEQ ID NO: 1880535 - DNA, 25 bp, Homo sapien
acagccactgggtgcagctacactc

SEQ ID NO: 1880536 - DNA, 25 bp, Homo sapien
tcttggaaactgacagggctactgt

SEQ ID NO: 1880537 - DNA, 25 bp, Homo sapien
acctcgggctcgtgataatgggaac

SEQ ID NO: 1880538 - DNA, 25 bp, Homo sapien
tagttacactgacgcgaaggacttc

SEQ ID NO: 1880539 - DNA, 25 bp, Homo sapien
cagtcgtcgagaaatggcctggttc

SEQ ID NO: 1880540 - DNA, 25 bp, Homo sapien
tttttatcttctgtccgcggagccc

SEQ ID NO: 1880541 - DNA, 25 bp, Homo sapien
cctcctgttggtttgtggcagcagt

SEQ ID NO: 1880542 - DNA, 25 bp, Homo sapien
tagccaaccagagacggaattctga

SEQ ID NO: 1880543 - DNA, 25 bp, Homo sapien
ctctgtggtgtaatatgttgttgcc

SEQ ID NO: 1880544 - DNA, 25 bp, Homo sapien
ttgtatgttttaccagaaaagtaga

SEQ ID NO: 1880545 - DNA, 25 bp, Homo sapien
gataaatgattgttaatgctagttg

SEQ ID NO: 1880546 - DNA, 25 bp, Homo sapien
gctagttgtatgttttaccagaaaa

SEQ ID NO: 1880547 - DNA, 25 bp, Homo sapien
gttaatgctagttgtatgttttacc

SEQ ID NO: 1880548 - DNA, 25 bp, Homo sapien
cttgcttttgagacctgccacttcc

SEQ ID NO: 1880549 - DNA, 25 bp, Homo sapien
tttgagacctgccacttccaccttc

SEQ ID NO: 1880550 - DNA, 25 bp, Homo sapien
ttgcttttgagacctgccacttcca

SEQ ID NO: 1880551 - DNA, 25 bp, Homo sapien
gcttttgagacctgccacttccacc

SEQ ID NO: 1880552 - DNA, 25 bp, Homo sapien
aggcacagcacgacctctatgcaga

SEQ ID NO: 1880553 - DNA, 25 bp, Homo sapien
gaaactgattactgctccaccaaga

SEQ ID NO: 1880554 - DNA, 25 bp, Homo sapien
cacagaagtgttgaattgaaatcca

SEQ ID NO: 1880555 - DNA, 25 bp, Homo sapien
ccataagagtggttatcctggacac

SEQ ID NO: 1880556 - DNA, 25 bp, Homo sapien
tgcctaatgctactggaagtggaac

SEQ ID NO: 1880557 - DNA, 25 bp, Homo sapien
gaaatgcagcctagtcttgagaaca

SEQ ID NO: 1880558 - DNA, 25 bp, Homo sapien
tgatgtagtccctcaacttggctaa

SEQ ID NO: 1880559 - DNA, 25 bp, Homo sapien
gttttaccaggcctcaagctagaca

SEQ ID NO: 1880560 - DNA, 25 bp, Homo sapien
catttaaatatcacaagtaggagtc

SEQ ID NO: 1880561 - DNA, 25 bp, Homo sapien
aatatcacaagtaggagtcatctgg

SEQ ID NO: 1880562 - DNA, 25 bp, Homo sapien
cttctttctgtagctggataactct

SEQ ID NO: 1880563 - DNA, 25 bp, Homo sapien
tcttctttctgtagctggataactc

SEQ ID NO: 1880564 - DNA, 25 bp, Homo sapien
agcctgctgaccagttcctttttca

SEQ ID NO: 1880565 - DNA, 25 bp, Homo sapien
tattcatcagcctgctgaccagttc

SEQ ID NO: 1880566 - DNA, 25 bp, Homo sapien
ttattcatcagcctgctgaccagtt

SEQ ID NO: 1880567 - DNA, 25 bp, Homo sapien
ctgctgaccagttcctttttcagag

SEQ ID NO: 1880568 - DNA, 25 bp, Homo sapien
aaacaacacctgctctcatccaaac

SEQ ID NO: 1880569 - DNA, 25 bp, Homo sapien
gcttgttgaatcaaagccgctgaat

SEQ ID NO: 1880570 - DNA, 25 bp, Homo sapien
actgaacaaacaacacctgctctca

SEQ ID NO: 1880571 - DNA, 25 bp, Homo sapien
aacaaacaacacctgctctcatcca

SEQ ID NO: 1880572 - DNA, 25 bp, Homo sapien
taatggaagcctagtgtaacaccct

SEQ ID NO: 1880573 - DNA, 25 bp, Homo sapien
atggaagcctagtgtaacacccttg

SEQ ID NO: 1880574 - DNA, 25 bp, Homo sapien
cttgtaatggaagcctagtgtaaca

SEQ ID NO: 1880575 - DNA, 25 bp, Homo sapien
tgtaatggaagcctagtgtaacacc

SEQ ID NO: 1880576 - DNA, 25 bp, Homo sapien
atgactacagatagtccgaacggta

SEQ ID NO: 1880577 - DNA, 25 bp, Homo sapien
ccgtttgtcaacttggagcctcttt

SEQ ID NO: 1880578 - DNA, 25 bp, Homo sapien
tacagatagtccgaacggtagccag

SEQ ID NO: 1880579 - DNA, 25 bp, Homo sapien
cccaccgtttgtcaacttggagcct

SEQ ID NO: 1880580 - DNA, 25 bp, Homo sapien
gaagtccctccgcagggttcctctg

SEQ ID NO: 1880581 - DNA, 25 bp, Homo sapien
agtccctccgcagggttcctctggg

SEQ ID NO: 1880582 - DNA, 25 bp, Homo sapien
ctgagttctactgatgtgattgaag

SEQ ID NO: 1880583 - DNA, 25 bp, Homo sapien
tctactgatgtgattgaagtccctc

SEQ ID NO: 1880584 - DNA, 25 bp, Homo sapien
tcagagtagtgtcgacatttttcat

SEQ ID NO: 1880585 - DNA, 25 bp, Homo sapien
gtgcgtcccttcagagtagtgtcga

SEQ ID NO: 1880586 - DNA, 25 bp, Homo sapien
tgtgcgtcccttcagagtagtgtcg

SEQ ID NO: 1880587 - DNA, 25 bp, Homo sapien
cgtcccttcagagtagtgtcgacat

SEQ ID NO: 1880588 - DNA, 25 bp, Homo sapien
ttcacagcgcttattaagggctgag

SEQ ID NO: 1880589 - DNA, 25 bp, Homo sapien
caagcaacaattacttcacagcgct

SEQ ID NO: 1880590 - DNA, 25 bp, Homo sapien
taagtagctccttttggttggagtg

SEQ ID NO: 1880591 - DNA, 25 bp, Homo sapien
gctccttttggttggagtgactgac

SEQ ID NO: 1880592 - DNA, 25 bp, Homo sapien
gcaggcgcggcagcgacgcaggccg

SEQ ID NO: 1880593 - DNA, 25 bp, Homo sapien
cggcaacgccgggaagcgctgcagc

SEQ ID NO: 1880594 - DNA, 25 bp, Homo sapien
gtgccgcgtcctccgaagacaggga

SEQ ID NO: 1880595 - DNA, 25 bp, Homo sapien
gcgctcgaggccctaaagcgcgcag

SEQ ID NO: 1880596 - DNA, 25 bp, Homo sapien
cccacgcggcaagcgaccttcgggc

SEQ ID NO: 1880597 - DNA, 25 bp, Homo sapien
gtccccacgcggcaagcgaccttcg

SEQ ID NO: 1880598 - DNA, 25 bp, Homo sapien
cgcggcaagcgaccttcgggctcag

SEQ ID NO: 1880599 - DNA, 25 bp, Homo sapien
gcaagcgaccttcgggctcagggcg

SEQ ID NO: 1880600 - DNA, 25 bp, Homo sapien
gaagccaagaatagtgtcgtcagca

SEQ ID NO: 1880601 - DNA, 25 bp, Homo sapien
aagaatagtgtcgtcagcagcagcc

SEQ ID NO: 1880602 - DNA, 25 bp, Homo sapien
gagggcggcgcggaagccaagaata

SEQ ID NO: 1880603 - DNA, 25 bp, Homo sapien
cggcgcggaagccaagaatagtgtc

SEQ ID NO: 1880604 - DNA, 25 bp, Homo sapien
gacgccgacgtcctgcgcgtacccc

SEQ ID NO: 1880605 - DNA, 25 bp, Homo sapien
tgcgcgtaccccctctccgcggcac

SEQ ID NO: 1880606 - DNA, 25 bp, Homo sapien
agcgacgccgacgtcctgcgcgtac

SEQ ID NO: 1880607 - DNA, 25 bp, Homo sapien
gcagcgacgccgacgtcctgcgcgt

SEQ ID NO: 1880608 - DNA, 25 bp, Homo sapien
gcggcggcagcgtccaccatcttcc

SEQ ID NO: 1880609 - DNA, 25 bp, Homo sapien
gtagcgctcgtctggcggagctggg

SEQ ID NO: 1880610 - DNA, 25 bp, Homo sapien
gctgccagtggtagcgctcgtctgg

SEQ ID NO: 1880611 - DNA, 25 bp, Homo sapien
gcggcagcgtccaccatcttcctct

SEQ ID NO: 1880612 - DNA, 25 bp, Homo sapien
ggactctccgcgcttttctcccgcg

SEQ ID NO: 1880613 - DNA, 25 bp, Homo sapien
gagagatcgcctctcgggcctcttg

SEQ ID NO: 1880614 - DNA, 25 bp, Homo sapien
cagggagacgggcaatcctcccctc

SEQ ID NO: 1880615 - DNA, 25 bp, Homo sapien
gggcctcttgcgcaacgtcctcggc

SEQ ID NO: 1880616 - DNA, 25 bp, Homo sapien
gccgcgccgctggcgcctgtggacc

SEQ ID NO: 1880617 - DNA, 25 bp, Homo sapien
gagggtcgggaccacggcctctctc

SEQ ID NO: 1880618 - DNA, 25 bp, Homo sapien
acgcggtcgccaggcggagggtcgg

SEQ ID NO: 1880619 - DNA, 25 bp, Homo sapien
ctctctcccgaccactggtacccag

SEQ ID NO: 1880620 - DNA, 25 bp, Homo sapien
ccagccgtctgctgcgagggcgccc

SEQ ID NO: 1880621 - DNA, 25 bp, Homo sapien
ctgcctggaaggcccgtctcgcagg

SEQ ID NO: 1880622 - DNA, 25 bp, Homo sapien
ctggaaggcccgtctcgcaggcccc

SEQ ID NO: 1880623 - DNA, 25 bp, Homo sapien
ccccagcatggagctttgggccttg

SEQ ID NO: 1880624 - DNA, 25 bp, Homo sapien
agccccagcatggagctttgggcct

SEQ ID NO: 1880625 - DNA, 25 bp, Homo sapien
ttatcctccagttaccgcgcgcttt

SEQ ID NO: 1880626 - DNA, 25 bp, Homo sapien
aatgaaccacttgtcgatacgtacg

SEQ ID NO: 1880627 - DNA, 25 bp, Homo sapien
ttgtgcccgggactcaaactgtgga

SEQ ID NO: 1880628 - DNA, 25 bp, Homo sapien
gactcttgccttccgataatacatg

SEQ ID NO: 1880629 - DNA, 25 bp, Homo sapien
ctttccctcaggatgtgttgccggg

SEQ ID NO: 1880630 - DNA, 25 bp, Homo sapien
gaagagaatgttgatatcgcgcacg

SEQ ID NO: 1880631 - DNA, 25 bp, Homo sapien
gccaattcctagagactagattggg

SEQ ID NO: 1880632 - DNA, 25 bp, Homo sapien
gctttccagtagtcacgcgtagaat

SEQ ID NO: 1880633 - DNA, 25 bp, Homo sapien
ccacctcagcctgcctagttgttgg

SEQ ID NO: 1880634 - DNA, 25 bp, Homo sapien
cacctcagcctgcctagttgttggg

SEQ ID NO: 1880635 - DNA, 25 bp, Homo sapien
gtgtgtgctgccacgccctgctaat

SEQ ID NO: 1880636 - DNA, 25 bp, Homo sapien
caggtgtgtgctgccacgccctgct

SEQ ID NO: 1880637 - DNA, 25 bp, Homo sapien
gctttagacatttctaatagattgt

SEQ ID NO: 1880638 - DNA, 25 bp, Homo sapien
tgctttagacatttctaatagattg

SEQ ID NO: 1880639 - DNA, 25 bp, Homo sapien
ctgctttagacatttctaatagatt

SEQ ID NO: 1880640 - DNA, 25 bp, Homo sapien
tggcaagtaatctgcacagcgatgc

SEQ ID NO: 1880641 - DNA, 25 bp, Homo sapien
gattgtcccacatcggcttcctaaa

SEQ ID NO: 1880642 - DNA, 25 bp, Homo sapien
ccattgatgatattcgctggagtca

SEQ ID NO: 1880643 - DNA, 25 bp, Homo sapien
gaaatgatcactgctaatgccagag

SEQ ID NO: 1880644 - DNA, 25 bp, Homo sapien
tgagaaggacaaagaacgagagaaa

SEQ ID NO: 1880645 - DNA, 25 bp, Homo sapien
cagggataggtaccacaaagatagg

SEQ ID NO: 1880646 - DNA, 25 bp, Homo sapien
tcaggattacatttaaataactgtt

SEQ ID NO: 1880647 - DNA, 25 bp, Homo sapien
gatagggaccacactgacagaacta

SEQ ID NO: 1880648 - DNA, 25 bp, Homo sapien
ctacagctttgtggtaggccattat

SEQ ID NO: 1880649 - DNA, 25 bp, Homo sapien
tccaagcaacttcataatcagatta

SEQ ID NO: 1880650 - DNA, 25 bp, Homo sapien
tttaatctgcactcattgaagtcat

SEQ ID NO: 1880651 - DNA, 25 bp, Homo sapien
taatgtgtgctctgtaagtttgttt

SEQ ID NO: 1880652 - DNA, 25 bp, Homo sapien
tagaaatagctatctatgtcaggca

SEQ ID NO: 1880653 - DNA, 25 bp, Homo sapien
gaaacactgtgcagctatagcccac

SEQ ID NO: 1880654 - DNA, 25 bp, Homo sapien
gcccactttataggtaagtttctga

SEQ ID NO: 1880655 - DNA, 25 bp, Homo sapien
gaggctagaatttagaactacctgt

SEQ ID NO: 1880656 - DNA, 25 bp, Homo sapien
taagcacattctgtgaataagcact

SEQ ID NO: 1880657 - DNA, 25 bp, Homo sapien
cagataaattagatgtaggaaaaac

SEQ ID NO: 1880658 - DNA, 25 bp, Homo sapien
gattccccgtaagcaatgtatcaaa

SEQ ID NO: 1880659 - DNA, 25 bp, Homo sapien
ggtaatatagtaaacagttgattcc

SEQ ID NO: 1880660 - DNA, 25 bp, Homo sapien
tatcccatctagatccaggtagcct

SEQ ID NO: 1880661 - DNA, 25 bp, Homo sapien
gccatcatagtttagagccacaaag

SEQ ID NO: 1880662 - DNA, 25 bp, Homo sapien
tagttctgtcgccaaggttgtagcg

SEQ ID NO: 1880663 - DNA, 25 bp, Homo sapien
tatgataacttgtcggatacagcct

SEQ ID NO: 1880664 - DNA, 25 bp, Homo sapien
taaaggcaattctgcaagcttggaa

SEQ ID NO: 1880665 - DNA, 25 bp, Homo sapien
catctgaagttgcaatgaggcattc

SEQ ID NO: 1880666 - DNA, 25 bp, Homo sapien
taatgaaccacgcagaagtctccac

SEQ ID NO: 1880667 - DNA, 25 bp, Homo sapien
catccagggatattcggcattatgc

SEQ ID NO: 1880668 - DNA, 25 bp, Homo sapien
ctccctcctgcaaatggtgttcttt

SEQ ID NO: 1880669 - DNA, 25 bp, Homo sapien
gtggtctataccaagccattctaga

SEQ ID NO: 1880670 - DNA, 25 bp, Homo sapien
tggtctataccaagccattctagac

SEQ ID NO: 1880671 - DNA, 25 bp, Homo sapien
tgtggtctataccaagccattctag

SEQ ID NO: 1880672 - DNA, 25 bp, Homo sapien
ggtctataccaagccattctagact

SEQ ID NO: 1880673 - DNA, 25 bp, Homo sapien
gcgagaggctgaaactgcaattgaa

SEQ ID NO: 1880674 - DNA, 25 bp, Homo sapien
gggcttttaagtgttgtgcagcata

SEQ ID NO: 1880675 - DNA, 25 bp, Homo sapien
taggataccatctgcagcgagaggc

SEQ ID NO: 1880676 - DNA, 25 bp, Homo sapien
gacatccaggataactcattgcttc

SEQ ID NO: 1880677 - DNA, 25 bp, Homo sapien
tttgttttgctgtttgtactggtcc

SEQ ID NO: 1880678 - DNA, 25 bp, Homo sapien
ttttgttttgctgtttgtactggtc

SEQ ID NO: 1880679 - DNA, 25 bp, Homo sapien
ttttgctgtttgtactggtccttac

SEQ ID NO: 1880680 - DNA, 25 bp, Homo sapien
tgttttgctgtttgtactggtcctt

SEQ ID NO: 1880681 - DNA, 25 bp, Homo sapien
ttcttcactttccgttctgctggtt

SEQ ID NO: 1880682 - DNA, 25 bp, Homo sapien
tcttcactttccgttctgctggttt

SEQ ID NO: 1880683 - DNA, 25 bp, Homo sapien
ccttcttcactttccgttctgctgg

SEQ ID NO: 1880684 - DNA, 25 bp, Homo sapien
ttcactttccgttctgctggttttg

SEQ ID NO: 1880685 - DNA, 25 bp, Homo sapien
gataacatgatttacctcatctcca

SEQ ID NO: 1880686 - DNA, 25 bp, Homo sapien
agtagattagataacatgatttacc

SEQ ID NO: 1880687 - DNA, 25 bp, Homo sapien
cttttccaataaattgatgacctgg

SEQ ID NO: 1880688 - DNA, 25 bp, Homo sapien
aataaatccaatagttgacttttgt

SEQ ID NO: 1880689 - DNA, 25 bp, Homo sapien
ctaattttagttatatttgtggaca

SEQ ID NO: 1880690 - DNA, 25 bp, Homo sapien
tgtggacagcaaaatgatttgaaat

SEQ ID NO: 1880691 - DNA, 25 bp, Homo sapien
tcctaattttagttatatttgtgga

SEQ ID NO: 1880692 - DNA, 25 bp, Homo sapien
tatatttgtggacagcaaaatgatt

SEQ ID NO: 1880693 - DNA, 25 bp, Homo sapien
tgttcacagtagattccagtggttc

SEQ ID NO: 1880694 - DNA, 25 bp, Homo sapien
cttgttcacagtagattccagtggt

SEQ ID NO: 1880695 - DNA, 25 bp, Homo sapien
ttgttcacagtagattccagtggtt

SEQ ID NO: 1880696 - DNA, 25 bp, Homo sapien
tgctcctctgctacagtggtgtgga

SEQ ID NO: 1880697 - DNA, 25 bp, Homo sapien
catgaggtaatgaaatgcaggttgc

SEQ ID NO: 1880698 - DNA, 25 bp, Homo sapien
catgttcaggatcacaggtagaaac

SEQ ID NO: 1880699 - DNA, 25 bp, Homo sapien
ggacagaaacaggtgtatccatgag

SEQ ID NO: 1880700 - DNA, 25 bp, Homo sapien
tgggttgagagaaagccgcatggtt

SEQ ID NO: 1880701 - DNA, 25 bp, Homo sapien
ttgagagaaagccgcatggtttgag

SEQ ID NO: 1880702 - DNA, 25 bp, Homo sapien
ctgtgggttgagagaaagccgcatg

SEQ ID NO: 1880703 - DNA, 25 bp, Homo sapien
ggttgagagaaagccgcatggtttg

SEQ ID NO: 1880704 - DNA, 25 bp, Homo sapien
ttccaaggaagtagggagtactctc

SEQ ID NO: 1880705 - DNA, 25 bp, Homo sapien
gagtactctctcaaggaagcaacag

SEQ ID NO: 1880706 - DNA, 25 bp, Homo sapien
tacctagtgatgaacatttgagcag

SEQ ID NO: 1880707 - DNA, 25 bp, Homo sapien
tagtgtctgattctctacagcctca

SEQ ID NO: 1880708 - DNA, 25 bp, Homo sapien
tgttgcatcagaactcatcccagga

SEQ ID NO: 1880709 - DNA, 25 bp, Homo sapien
aaaaagacacctaccaagcacatac

SEQ ID NO: 1880710 - DNA, 25 bp, Homo sapien
cctattaagctagacatggtggaag

SEQ ID NO: 1880711 - DNA, 25 bp, Homo sapien
gcctgaaatgaactctgccttatga

SEQ ID NO: 1880712 - DNA, 25 bp, Homo sapien
cagtcctctgaaatggccatccttc

SEQ ID NO: 1880713 - DNA, 25 bp, Homo sapien
aagcatgacactggccaacactgcg

SEQ ID NO: 1880714 - DNA, 25 bp, Homo sapien
actgcgtccagcatttgggtggccc

SEQ ID NO: 1880715 - DNA, 25 bp, Homo sapien
gggtggccctcaggatttcccagtc

SEQ ID NO: 1880716 - DNA, 25 bp, Homo sapien
gaatacagaaatgcgcagagaaatt

SEQ ID NO: 1880717 - DNA, 25 bp, Homo sapien
taagaatacagaaatgcgcagagaa

SEQ ID NO: 1880718 - DNA, 25 bp, Homo sapien
aaagtcattcatgatatcatttcac

SEQ ID NO: 1880719 - DNA, 25 bp, Homo sapien
tcatgatatcatttcacagcagaca

SEQ ID NO: 1880720 - DNA, 25 bp, Homo sapien
tctactacaatataaatcagctttg

SEQ ID NO: 1880721 - DNA, 25 bp, Homo sapien
gctttgtaaggatatgttagctggg

SEQ ID NO: 1880722 - DNA, 25 bp, Homo sapien
taactctactacaatataaatcagc

SEQ ID NO: 1880723 - DNA, 25 bp, Homo sapien
tttagtggctcagctacatgagagg

SEQ ID NO: 1880724 - DNA, 25 bp, Homo sapien
tccaggagtgtgcaatcttaatgtt

SEQ ID NO: 1880725 - DNA, 25 bp, Homo sapien
ccaggagtgtgcaatcttaatgttt

SEQ ID NO: 1880726 - DNA, 25 bp, Homo sapien
ttccaggagtgtgcaatcttaatgt

SEQ ID NO: 1880727 - DNA, 25 bp, Homo sapien
ccaagcacaatgttgtccttaatcc

SEQ ID NO: 1880728 - DNA, 25 bp, Homo sapien
aagcacaatgttgtccttaatcctc

SEQ ID NO: 1880729 - DNA, 25 bp, Homo sapien
tgtgggctaccccttggtggtatgg

SEQ ID NO: 1880730 - DNA, 25 bp, Homo sapien
ctaccccttggtggtatggatgggt

SEQ ID NO: 1880731 - DNA, 25 bp, Homo sapien
gtagccacctacataaaactgactg

SEQ ID NO: 1880732 - DNA, 25 bp, Homo sapien
tggagtgtattcactgtagccacct

SEQ ID NO: 1880733 - DNA, 25 bp, Homo sapien
ctgactgaagacattgagaccaacc

SEQ ID NO: 1880734 - DNA, 25 bp, Homo sapien
tgctccatttggtaagagatctgga

SEQ ID NO: 1880735 - DNA, 25 bp, Homo sapien
acttgcccagatgaacagtgtggac

SEQ ID NO: 1880736 - DNA, 25 bp, Homo sapien
ctgccattgagcaggcccacagcca

SEQ ID NO: 1880737 - DNA, 25 bp, Homo sapien
gattgaggggctcgctcctgatgct

SEQ ID NO: 1880738 - DNA, 25 bp, Homo sapien
agccaggaagtcatcgccattcaac

SEQ ID NO: 1880739 - DNA, 25 bp, Homo sapien
tttagaagctgttcctcggattgtt

SEQ ID NO: 1880740 - DNA, 25 bp, Homo sapien
ttacataagggttcacaatggttta

SEQ ID NO: 1880741 - DNA, 25 bp, Homo sapien
ggtttagaagctgttcctcggattg

SEQ ID NO: 1880742 - DNA, 25 bp, Homo sapien
gggttcacaatggtttagaagctgt

SEQ ID NO: 1880743 - DNA, 25 bp, Homo sapien
gatgtctgagatccgtgaataagcc

SEQ ID NO: 1880744 - DNA, 25 bp, Homo sapien
ccagctgaaacttcaggtggaattc

SEQ ID NO: 1880745 - DNA, 25 bp, Homo sapien
gaatgaggtgtatccaaaggcatct

SEQ ID NO: 1880746 - DNA, 25 bp, Homo sapien
gctgagtggttgtttgccagctgaa

SEQ ID NO: 1880747 - DNA, 25 bp, Homo sapien
tttcccacagacctttggttgctga

SEQ ID NO: 1880748 - DNA, 25 bp, Homo sapien
cacagacctttggttgctgagtgcc

SEQ ID NO: 1880749 - DNA, 25 bp, Homo sapien
gacctttggttgctgagtgccaacg

SEQ ID NO: 1880750 - DNA, 25 bp, Homo sapien
ttggttgctgagtgccaacgtgcat

SEQ ID NO: 1880751 - DNA, 25 bp, Homo sapien
gactatggctatgtctcttgagagc

SEQ ID NO: 1880752 - DNA, 25 bp, Homo sapien
gagagctttacccttttgggtgcca

SEQ ID NO: 1880753 - DNA, 25 bp, Homo sapien
gtctcttgagagctttacccttttg

SEQ ID NO: 1880754 - DNA, 25 bp, Homo sapien
ttctgattcaataggactatggcta

SEQ ID NO: 1880755 - DNA, 25 bp, Homo sapien
agccactgtggtattcctccgggaa

SEQ ID NO: 1880756 - DNA, 25 bp, Homo sapien
cagccactgtggtattcctccggga

SEQ ID NO: 1880757 - DNA, 25 bp, Homo sapien
gccactgtggtattcctccgggaag

SEQ ID NO: 1880758 - DNA, 25 bp, Homo sapien
cactgtggtattcctccgggaagcc

SEQ ID NO: 1880759 - DNA, 25 bp, Homo sapien
acaaggtgcatgttaaggcatccac

SEQ ID NO: 1880760 - DNA, 25 bp, Homo sapien
aacaaggtgcatgttaaggcatcca

SEQ ID NO: 1880761 - DNA, 25 bp, Homo sapien
acaaaggaaggcgtgtggaacactc

SEQ ID NO: 1880762 - DNA, 25 bp, Homo sapien
aaggaaggcgtgtggaacactcaac

SEQ ID NO: 1880763 - DNA, 25 bp, Homo sapien
ggaaggcgtgtggaacactcaacat

SEQ ID NO: 1880764 - DNA, 25 bp, Homo sapien
taaacaaaggaaggcgtgtggaaca

SEQ ID NO: 1880765 - DNA, 25 bp, Homo sapien
aggattccctgaagtgcccggctta

SEQ ID NO: 1880766 - DNA, 25 bp, Homo sapien
tgctagctctgtcaagtggtagaac

SEQ ID NO: 1880767 - DNA, 25 bp, Homo sapien
tcctagggtgctccatgaccaccgt

SEQ ID NO: 1880768 - DNA, 25 bp, Homo sapien
aacttagctgggtacattagtgacc

SEQ ID NO: 1880769 - DNA, 25 bp, Homo sapien
gatgttgacctttttgccatccaat

SEQ ID NO: 1880770 - DNA, 25 bp, Homo sapien
ctactcaagcactacttgtttgcca

SEQ ID NO: 1880771 - DNA, 25 bp, Homo sapien
tgatgtggatgttgacctttttgcc

SEQ ID NO: 1880772 - DNA, 25 bp, Homo sapien
ctcaagcactacttgtttgccaata

SEQ ID NO: 1880773 - DNA, 25 bp, Homo sapien
gggagtaaaagtagccttgaggcca

SEQ ID NO: 1880774 - DNA, 25 bp, Homo sapien
gccagagcaggtagcattctggaaa

SEQ ID NO: 1880775 - DNA, 25 bp, Homo sapien
gagtaaaagtagccttgaggccaga

SEQ ID NO: 1880776 - DNA, 25 bp, Homo sapien
tgagggggagtaaaagtagccttga

SEQ ID NO: 1880777 - DNA, 25 bp, Homo sapien
gcttgcctgaatacagccttggaca

SEQ ID NO: 1880778 - DNA, 25 bp, Homo sapien
ttgttttcacaacttgcaaactggc

SEQ ID NO: 1880779 - DNA, 25 bp, Homo sapien
gggtccagacctcccatatgggcag

SEQ ID NO: 1880780 - DNA, 25 bp, Homo sapien
agaggcagacaatatctgttccgga

SEQ ID NO: 1880781 - DNA, 25 bp, Homo sapien
gcggagacgactaactgtgtgcatc

SEQ ID NO: 1880782 - DNA, 25 bp, Homo sapien
taaattcatgcggagacgactaact

SEQ ID NO: 1880783 - DNA, 25 bp, Homo sapien
aagttggttgtgtaaattcatgcgg

SEQ ID NO: 1880784 - DNA, 25 bp, Homo sapien
ttcatcaggtgttgtcagaagttgg

SEQ ID NO: 1880785 - DNA, 25 bp, Homo sapien
gagacatcataaaggcacgaacaaa

SEQ ID NO: 1880786 - DNA, 25 bp, Homo sapien
ccatccaaagtttgttgtgcaccta

SEQ ID NO: 1880787 - DNA, 25 bp, Homo sapien
ttattttggcaattgctgccatcca

SEQ ID NO: 1880788 - DNA, 25 bp, Homo sapien
aagtggtgaataagactcgcttttg

SEQ ID NO: 1880789 - DNA, 25 bp, Homo sapien
cttgaaacagtttcatagacgcccc

SEQ ID NO: 1880790 - DNA, 25 bp, Homo sapien
aacagtttcatagacgccccagtgg

SEQ ID NO: 1880791 - DNA, 25 bp, Homo sapien
tagtgagtggcttgaaacagtttca

SEQ ID NO: 1880792 - DNA, 25 bp, Homo sapien
cttatagtgagtggcttgaaacagt

SEQ ID NO: 1880793 - DNA, 25 bp, Homo sapien
cgagccattattctgttctgggtca

SEQ ID NO: 1880794 - DNA, 25 bp, Homo sapien
gccattattctgttctgggtcaccc

SEQ ID NO: 1880795 - DNA, 25 bp, Homo sapien
cattattctgttctgggtcaccccc

SEQ ID NO: 1880796 - DNA, 25 bp, Homo sapien
tattctgttctgggtcaccccccat

SEQ ID NO: 1880797 - DNA, 25 bp, Homo sapien
tatggcttgcaggtctatacaccag

SEQ ID NO: 1880798 - DNA, 25 bp, Homo sapien
tacaccagggtatggtgcttttgca

SEQ ID NO: 1880799 - DNA, 25 bp, Homo sapien
gccatctggttcaggtaaaaagaca

SEQ ID NO: 1880800 - DNA, 25 bp, Homo sapien
cagggaagtggaatcatcacctttg

SEQ ID NO: 1880801 - DNA, 25 bp, Homo sapien
ccagaagtgggcctgcgaggctcag

SEQ ID NO: 1880802 - DNA, 25 bp, Homo sapien
aagtgggcctgcgaggctcagctct

SEQ ID NO: 1880803 - DNA, 25 bp, Homo sapien
ggcctgcgaggctcagctctctttt

SEQ ID NO: 1880804 - DNA, 25 bp, Homo sapien
gcagccagaagtgggcctgcgaggc

SEQ ID NO: 1880805 - DNA, 25 bp, Homo sapien
catctcttgctataactgtgtccat

SEQ ID NO: 1880806 - DNA, 25 bp, Homo sapien
cctaaggagctcatccacagatctg

SEQ ID NO: 1880807 - DNA, 25 bp, Homo sapien
gaaagcaactcagcctggtcatgca

SEQ ID NO: 1880808 - DNA, 25 bp, Homo sapien
tcattggcaataggtgctcatccta

SEQ ID NO: 1880809 - DNA, 25 bp, Homo sapien
tatcagtaaagagtccaagaagatg

SEQ ID NO: 1880810 - DNA, 25 bp, Homo sapien
aaataccagttggaaaggatggcac

SEQ ID NO: 1880811 - DNA, 25 bp, Homo sapien
ttttcataggcatgataaagacgca

SEQ ID NO: 1880812 - DNA, 25 bp, Homo sapien
gagattaagagggataccaagtttg

SEQ ID NO: 1880813 - DNA, 25 bp, Homo sapien
gggtactagaggattgagattaaga

SEQ ID NO: 1880814 - DNA, 25 bp, Homo sapien
ctttgccttttgtgcactggaggag

SEQ ID NO: 1880815 - DNA, 25 bp, Homo sapien
tggctgcacagaacacttgcgatct

SEQ ID NO: 1880816 - DNA, 25 bp, Homo sapien
aattgctttctcatagcatgtgcac

SEQ ID NO: 1880817 - DNA, 25 bp, Homo sapien
ccattgtgtgaagatggatatgcct

SEQ ID NO: 1880818 - DNA, 25 bp, Homo sapien
ccttgggtgctctctaataggatgt

SEQ ID NO: 1880819 - DNA, 25 bp, Homo sapien
tcaaggatacagcccaaaaaactca

SEQ ID NO: 1880820 - DNA, 25 bp, Homo sapien
cactgaggccttgacttactgctta

SEQ ID NO: 1880821 - DNA, 25 bp, Homo sapien
aaaagaggactctgtattatgatgt

SEQ ID NO: 1880822 - DNA, 25 bp, Homo sapien
ctatgggtctttagtgtgaactcca

SEQ ID NO: 1880823 - DNA, 25 bp, Homo sapien
cacttatcttccatctgtaggtggc

SEQ ID NO: 1880824 - DNA, 25 bp, Homo sapien
tgtaggtggcagtaagttattaatg

SEQ ID NO: 1880825 - DNA, 25 bp, Homo sapien
gctagtagcaggaattttcaaacac

SEQ ID NO: 1880826 - DNA, 25 bp, Homo sapien
tgtaagatactatcgataagctttg

SEQ ID NO: 1880827 - DNA, 25 bp, Homo sapien
tttgtgtaagatactatcgataagc

SEQ ID NO: 1880828 - DNA, 25 bp, Homo sapien
tactatcgataagctttgttcctcc

SEQ ID NO: 1880829 - DNA, 25 bp, Homo sapien
aagctttgttcctccacaagagcca

SEQ ID NO: 1880830 - DNA, 25 bp, Homo sapien
gaaggcagatattctgtcctttcta

SEQ ID NO: 1880831 - DNA, 25 bp, Homo sapien
cagatattctgtcctttctaatctt

SEQ ID NO: 1880832 - DNA, 25 bp, Homo sapien
tctgtcctttctaatctttgtgcag

SEQ ID NO: 1880833 - DNA, 25 bp, Homo sapien
ttctgtcctttctaatctttgtgca

SEQ ID NO: 1880834 - DNA, 25 bp, Homo sapien
ttaatcagacagatttagatcaaaa

SEQ ID NO: 1880835 - DNA, 25 bp, Homo sapien
agacagatttagatcaaaataattt

SEQ ID NO: 1880836 - DNA, 25 bp, Homo sapien
atcagacagatttagatcaaaataa

SEQ ID NO: 1880837 - DNA, 25 bp, Homo sapien
cagatttagatcaaaataatttcta

SEQ ID NO: 1880838 - DNA, 25 bp, Homo sapien
tcagtcaaatccctcctgtcccaag

SEQ ID NO: 1880839 - DNA, 25 bp, Homo sapien
tcccaagccagacccaaacctggag

SEQ ID NO: 1880840 - DNA, 25 bp, Homo sapien
ccaagccagacccaaacctggagaa

SEQ ID NO: 1880841 - DNA, 25 bp, Homo sapien
ctgtcccaagccagacccaaacctg

SEQ ID NO: 1880842 - DNA, 25 bp, Homo sapien
atttcctgtgcaatttggtcaattt

SEQ ID NO: 1880843 - DNA, 25 bp, Homo sapien
tacttgaaggtctagaatgcagccc

SEQ ID NO: 1880844 - DNA, 25 bp, Homo sapien
catttgcaggaatatggccaaggaa

SEQ ID NO: 1880845 - DNA, 25 bp, Homo sapien
ttgttgcggcacagatgatgagcac

SEQ ID NO: 1880846 - DNA, 25 bp, Homo sapien
caccaagggacgtggcagttctcaa

SEQ ID NO: 1880847 - DNA, 25 bp, Homo sapien
agggctgccaacaggcgttgtgtag

SEQ ID NO: 1880848 - DNA, 25 bp, Homo sapien
cagggctgccaacaggcgttgtgta

SEQ ID NO: 1880849 - DNA, 25 bp, Homo sapien
tttccagtatctttatgggttctga

SEQ ID NO: 1880850 - DNA, 25 bp, Homo sapien
gaatgattcctgttccattgttggt

SEQ ID NO: 1880851 - DNA, 25 bp, Homo sapien
tctgatattgtactgtgcaggccca

SEQ ID NO: 1880852 - DNA, 25 bp, Homo sapien
gcaggcccattttgaatgggaggta

SEQ ID NO: 1880853 - DNA, 25 bp, Homo sapien
tcttttgacactgaaaccggaatct

SEQ ID NO: 1880854 - DNA, 25 bp, Homo sapien
atcttttgacactgaaaccggaatc

SEQ ID NO: 1880855 - DNA, 25 bp, Homo sapien
tttgacactgaaaccggaatcttcg

SEQ ID NO: 1880856 - DNA, 25 bp, Homo sapien
ttttgacactgaaaccggaatcttc

SEQ ID NO: 1880857 - DNA, 25 bp, Homo sapien
caggtcatgatactttgattgcatt

SEQ ID NO: 1880858 - DNA, 25 bp, Homo sapien
agactgcttggcataattcaggtca

SEQ ID NO: 1880859 - DNA, 25 bp, Homo sapien
gaaatattcacaggtccattcacag

SEQ ID NO: 1880860 - DNA, 25 bp, Homo sapien
gttctgtcctacaatgatactggaa

SEQ ID NO: 1880861 - DNA, 25 bp, Homo sapien
gattaaacagagcagtcgtcaaggg

SEQ ID NO: 1880862 - DNA, 25 bp, Homo sapien
taaacagagcagtcgtcaagggaac

SEQ ID NO: 1880863 - DNA, 25 bp, Homo sapien
ccttgattaaacagagcagtcgtca

SEQ ID NO: 1880864 - DNA, 25 bp, Homo sapien
cagagcagtcgtcaagggaacatac

SEQ ID NO: 1880865 - DNA, 25 bp, Homo sapien
gactacgctatccaattcacgtgca

SEQ ID NO: 1880866 - DNA, 25 bp, Homo sapien
catcacgagatactggagattttcc

SEQ ID NO: 1880867 - DNA, 25 bp, Homo sapien
ttcacgtgcaatgggactcgcagca

SEQ ID NO: 1880868 - DNA, 25 bp, Homo sapien
tgtgattttctttccgactacgcta

SEQ ID NO: 1880869 - DNA, 25 bp, Homo sapien
tcacagagggtaagaaggaaagaca

SEQ ID NO: 1880870 - DNA, 25 bp, Homo sapien
ccagaggaagcatagccagggcacc

SEQ ID NO: 1880871 - DNA, 25 bp, Homo sapien
aatgagggctgacaggtttgtgcac

SEQ ID NO: 1880872 - DNA, 25 bp, Homo sapien
gagggctgacaggtttgtgcaccag

SEQ ID NO: 1880873 - DNA, 25 bp, Homo sapien
cctgtctcctttaatcataatcttt

SEQ ID NO: 1880874 - DNA, 25 bp, Homo sapien
ctgtctcctttaatcataatctttc

SEQ ID NO: 1880875 - DNA, 25 bp, Homo sapien
tatgatttactatgccaagctgttt

SEQ ID NO: 1880876 - DNA, 25 bp, Homo sapien
tgtctcattgtaatcaatccagtgg

SEQ ID NO: 1880877 - DNA, 25 bp, Homo sapien
gatcagagagtagatattacaaacc

SEQ ID NO: 1880878 - DNA, 25 bp, Homo sapien
gaaaagtaagatggcccttactcag

SEQ ID NO: 1880879 - DNA, 25 bp, Homo sapien
ggctgtactcaaacttgactttctg

SEQ ID NO: 1880880 - DNA, 25 bp, Homo sapien
tagtactgggggctgtactcaaact

SEQ ID NO: 1880881 - DNA, 25 bp, Homo sapien
tactgggggctgtactcaaacttga

SEQ ID NO: 1880882 - DNA, 25 bp, Homo sapien
tgggggctgtactcaaacttgactt

SEQ ID NO: 1880883 - DNA, 25 bp, Homo sapien
cttcttcagccagtaagtgcggatt

SEQ ID NO: 1880884 - DNA, 25 bp, Homo sapien
cagccagtaagtgcggattgtagcc

SEQ ID NO: 1880885 - DNA, 25 bp, Homo sapien
gtaagtcaaacccaaatgtctcagg

SEQ ID NO: 1880886 - DNA, 25 bp, Homo sapien
gtgtaagtcaaacccaaatgtctca

SEQ ID NO: 1880887 - DNA, 25 bp, Homo sapien
cgtattgtgataggggtgaatgcat

SEQ ID NO: 1880888 - DNA, 25 bp, Homo sapien
gctgtaattagcagaaacagtcaaa

SEQ ID NO: 1880889 - DNA, 25 bp, Homo sapien
tatttaactgatggccttccttcca

SEQ ID NO: 1880890 - DNA, 25 bp, Homo sapien
taattagcagaaacagtcaaaatat

SEQ ID NO: 1880891 - DNA, 25 bp, Homo sapien
taccagtatctaactgaattacaaa

SEQ ID NO: 1880892 - DNA, 25 bp, Homo sapien
gaggcttttatgaggttgacagatt

SEQ ID NO: 1880893 - DNA, 25 bp, Homo sapien
gctcatctgttgtgaggcttttatg

SEQ ID NO: 1880894 - DNA, 25 bp, Homo sapien
cttttaaattaccagtatctaactg

SEQ ID NO: 1880895 - DNA, 25 bp, Homo sapien
tcaaaaagggcagttctaaatagga

SEQ ID NO: 1880896 - DNA, 25 bp, Homo sapien
taaataggaattcccattgaaagat

SEQ ID NO: 1880897 - DNA, 25 bp, Homo sapien
ttttatagtcaagtagatggtaaca

SEQ ID NO: 1880898 - DNA, 25 bp, Homo sapien
ggtaacagttctgttatgttccttc

SEQ ID NO: 1880899 - DNA, 25 bp, Homo sapien
ctttataacacacatagtttccaag

SEQ ID NO: 1880900 - DNA, 25 bp, Homo sapien
ataacacacatagtttccaaggctc

SEQ ID NO: 1880901 - DNA, 25 bp, Homo sapien
aaggctctgtcctctgtcttgagtc

SEQ ID NO: 1880902 - DNA, 25 bp, Homo sapien
ttataacacacatagtttccaaggc

SEQ ID NO: 1880903 - DNA, 25 bp, Homo sapien
cttccaaatatcctgacactttcat

SEQ ID NO: 1880904 - DNA, 25 bp, Homo sapien
atttgcttcttccaaatatcctgac

SEQ ID NO: 1880905 - DNA, 25 bp, Homo sapien
tgcttcttccaaatatcctgacact

SEQ ID NO: 1880906 - DNA, 25 bp, Homo sapien
tcttccaaatatcctgacactttca

SEQ ID NO: 1880907 - DNA, 25 bp, Homo sapien
tctgtagaaggtacatctatggccc

SEQ ID NO: 1880908 - DNA, 25 bp, Homo sapien
aggaacagtggttgctctgcacatg

SEQ ID NO: 1880909 - DNA, 25 bp, Homo sapien
tgcacatgagtatgtcccagatcct

SEQ ID NO: 1880910 - DNA, 25 bp, Homo sapien
aagcacctgtgcttcatgcaccaat

SEQ ID NO: 1880911 - DNA, 25 bp, Homo sapien
catagtagatgtaaataggtgagct

SEQ ID NO: 1880912 - DNA, 25 bp, Homo sapien
tctgtgtctgttgaaacagaacttc

SEQ ID NO: 1880913 - DNA, 25 bp, Homo sapien
taggtgagctgtaagtcgtagacga

SEQ ID NO: 1880914 - DNA, 25 bp, Homo sapien
tcgtagacgaggaagggttgacatt

SEQ ID NO: 1880915 - DNA, 25 bp, Homo sapien
gctttcttgagatggttgattacca

SEQ ID NO: 1880916 - DNA, 25 bp, Homo sapien
ctttcttgagatggttgattaccat

SEQ ID NO: 1880917 - DNA, 25 bp, Homo sapien
ttgtaaaactagcaagcatatttcc

SEQ ID NO: 1880918 - DNA, 25 bp, Homo sapien
ctattttgaggtcctgagggattgt

SEQ ID NO: 1880919 - DNA, 25 bp, Homo sapien
gctaaagtttggtgtgctttctaaa

SEQ ID NO: 1880920 - DNA, 25 bp, Homo sapien
tccatagtaggaaatgggctaaagt

SEQ ID NO: 1880921 - DNA, 25 bp, Homo sapien
ctaagattgcttgagtatggtgccc

SEQ ID NO: 1880922 - DNA, 25 bp, Homo sapien
ctggaattcctaagattgcttgagt

SEQ ID NO: 1880923 - DNA, 25 bp, Homo sapien
gccctttgtcccttagacagaagga

SEQ ID NO: 1880924 - DNA, 25 bp, Homo sapien
gcttgagtatggtgccctttgtccc

SEQ ID NO: 1880925 - DNA, 25 bp, Homo sapien
aactcaaacagaagtccgggcccat

SEQ ID NO: 1880926 - DNA, 25 bp, Homo sapien
taaatatatggatagctcagccttc

SEQ ID NO: 1880927 - DNA, 25 bp, Homo sapien
ggtgttagcccatgattacttctca

SEQ ID NO: 1880928 - DNA, 25 bp, Homo sapien
ggcccatgggagtctgctaaatata

SEQ ID NO: 1880929 - DNA, 25 bp, Homo sapien
gagtcacactgctcgtaggtgaggt

SEQ ID NO: 1880930 - DNA, 25 bp, Homo sapien
cacctttccagcgttcacatcaagg

SEQ ID NO: 1880931 - DNA, 25 bp, Homo sapien
ccagcgttcacatcaaggagtctga

SEQ ID NO: 1880932 - DNA, 25 bp, Homo sapien
agccgggctatcacctttccagcgt

SEQ ID NO: 1880933 - DNA, 25 bp, Homo sapien
taactggagttagcatcttcaaaat

SEQ ID NO: 1880934 - DNA, 25 bp, Homo sapien
ttaactggagttagcatcttcaaaa

SEQ ID NO: 1880935 - DNA, 25 bp, Homo sapien
ctggagttagcatcttcaaaattat

SEQ ID NO: 1880936 - DNA, 25 bp, Homo sapien
gagttagcatcttcaaaattatttg

SEQ ID NO: 1880937 - DNA, 25 bp, Homo sapien
aaagagtttatgtccaagtaatgca

SEQ ID NO: 1880938 - DNA, 25 bp, Homo sapien
gagtttatgtccaagtaatgcatta

SEQ ID NO: 1880939 - DNA, 25 bp, Homo sapien
aagagtttatgtccaagtaatgcat

SEQ ID NO: 1880940 - DNA, 25 bp, Homo sapien
gtttatgtccaagtaatgcattaat

SEQ ID NO: 1880941 - DNA, 25 bp, Homo sapien
ttcgcagactgctgtcaatgtgagg

SEQ ID NO: 1880942 - DNA, 25 bp, Homo sapien
cagactgctgtcaatgtgagggctg

SEQ ID NO: 1880943 - DNA, 25 bp, Homo sapien
tctttcataccatgaactgctcaga

SEQ ID NO: 1880944 - DNA, 25 bp, Homo sapien
taggagtcttcgcagactgctgtca

SEQ ID NO: 1880945 - DNA, 25 bp, Homo sapien
ctgtgaagggtagcaatccatgact

SEQ ID NO: 1880946 - DNA, 25 bp, Homo sapien
gactggaagccagttcgtgaacaga

SEQ ID NO: 1880947 - DNA, 25 bp, Homo sapien
aagctaaagagttcccaagtggtgg

SEQ ID NO: 1880948 - DNA, 25 bp, Homo sapien
tctgagaatcagtgccttggatgca

SEQ ID NO: 1880949 - DNA, 25 bp, Homo sapien
tgtgaaggatggcgatttcactgca

SEQ ID NO: 1880950 - DNA, 25 bp, Homo sapien
catgtgttccacaaaatcatctctg

SEQ ID NO: 1880951 - DNA, 25 bp, Homo sapien
gtgaaggatggcgatttcactgcag

SEQ ID NO: 1880952 - DNA, 25 bp, Homo sapien
cagaagcggccagtgaaatgtagtg

SEQ ID NO: 1880953 - DNA, 25 bp, Homo sapien
tagtggacagtcacattggaatgac

SEQ ID NO: 1880954 - DNA, 25 bp, Homo sapien
catggcatgtgcctccattgtggca

SEQ ID NO: 1880955 - DNA, 25 bp, Homo sapien
gacactatgccactggagaggaaga

SEQ ID NO: 1880956 - DNA, 25 bp, Homo sapien
acatcagaagcatcaacaaaggagg

SEQ ID NO: 1880957 - DNA, 25 bp, Homo sapien
gtatcaaccccttgtgtcacatcag

SEQ ID NO: 1880958 - DNA, 25 bp, Homo sapien
tatcaaccccttgtgtcacatcaga

SEQ ID NO: 1880959 - DNA, 25 bp, Homo sapien
ggtatcaaccccttgtgtcacatca

SEQ ID NO: 1880960 - DNA, 25 bp, Homo sapien
tgtctcttaagcaggaaattagtaa

SEQ ID NO: 1880961 - DNA, 25 bp, Homo sapien
catgtttattttcgaaactacactc

SEQ ID NO: 1880962 - DNA, 25 bp, Homo sapien
tcttaagcaggaaattagtaattca

SEQ ID NO: 1880963 - DNA, 25 bp, Homo sapien
tttagcatggaggatggcttggaaa

SEQ ID NO: 1880964 - DNA, 25 bp, Homo sapien
caggaggacatgttcgtttggaaaa

SEQ ID NO: 1880965 - DNA, 25 bp, Homo sapien
tcaggaggacatgttcgtttggaaa

SEQ ID NO: 1880966 - DNA, 25 bp, Homo sapien
ggaggacatgttcgtttggaaaaca

SEQ ID NO: 1880967 - DNA, 25 bp, Homo sapien
tctgaatgtgcatgtttggtgtcat

SEQ ID NO: 1880968 - DNA, 25 bp, Homo sapien
aaagtgaacatctgctcatgcttca

SEQ ID NO: 1880969 - DNA, 25 bp, Homo sapien
ttcctgctagcatccccactaaatg

SEQ ID NO: 1880970 - DNA, 25 bp, Homo sapien
tcttttccattatccgtgatagctc

SEQ ID NO: 1880971 - DNA, 25 bp, Homo sapien
tccgtgatagctccctgtaatgaag

SEQ ID NO: 1880972 - DNA, 25 bp, Homo sapien
agctccctgtaatgaagcttcattc

SEQ ID NO: 1880973 - DNA, 25 bp, Homo sapien
ttcctcttgttcatgggcacctttc

SEQ ID NO: 1880974 - DNA, 25 bp, Homo sapien
cctcttgttcatgggcacctttcat

SEQ ID NO: 1880975 - DNA, 25 bp, Homo sapien
ttcttcctcttgttcatgggcacct

SEQ ID NO: 1880976 - DNA, 25 bp, Homo sapien
tcttcctcttgttcatgggcacctt

SEQ ID NO: 1880977 - DNA, 25 bp, Homo sapien
tttggagtctccatggctgatatga

SEQ ID NO: 1880978 - DNA, 25 bp, Homo sapien
tcacggctttgctcgtagagaactt

SEQ ID NO: 1880979 - DNA, 25 bp, Homo sapien
cggctttgctcgtagagaacttttg

SEQ ID NO: 1880980 - DNA, 25 bp, Homo sapien
gctttgctcgtagagaacttttgga

SEQ ID NO: 1880981 - DNA, 25 bp, Homo sapien
ctccttccagtcttcgctgctgctg

SEQ ID NO: 1880982 - DNA, 25 bp, Homo sapien
actccttccagtcttcgctgctgct

SEQ ID NO: 1880983 - DNA, 25 bp, Homo sapien
cactccttccagtcttcgctgctgc

SEQ ID NO: 1880984 - DNA, 25 bp, Homo sapien
tttctagagactcagaccactcctt

SEQ ID NO: 1880985 - DNA, 25 bp, Homo sapien
gcaaatctcccagcacatcgtttga

SEQ ID NO: 1880986 - DNA, 25 bp, Homo sapien
caggcttaaatatccctgactgact

SEQ ID NO: 1880987 - DNA, 25 bp, Homo sapien
aacaaatggtatcagccccagtcag

SEQ ID NO: 1880988 - DNA, 25 bp, Homo sapien
catcgtttgagctctgttaagggac

SEQ ID NO: 1880989 - DNA, 25 bp, Homo sapien
gtaactacgggtgctattgccctca

SEQ ID NO: 1880990 - DNA, 25 bp, Homo sapien
caggtgagcaagcttaattagccca

SEQ ID NO: 1880991 - DNA, 25 bp, Homo sapien
agaggaggcgtctcagcacaggctt

SEQ ID NO: 1880992 - DNA, 25 bp, Homo sapien
caggttctggtataaagatgacaca

SEQ ID NO: 1880993 - DNA, 25 bp, Homo sapien
gggatgtgtgtgaacgaaattttga

SEQ ID NO: 1880994 - DNA, 25 bp, Homo sapien
tgtgtgtgaacgaaattttgaaagc

SEQ ID NO: 1880995 - DNA, 25 bp, Homo sapien
tctacttttgaagcattacataaag

SEQ ID NO: 1880996 - DNA, 25 bp, Homo sapien
gaagcattacataaagggatgtgtg

SEQ ID NO: 1880997 - DNA, 25 bp, Homo sapien
attcatagttgagagtaggcaaagc

SEQ ID NO: 1880998 - DNA, 25 bp, Homo sapien
tatgccaagaattcaatgccagaaa

SEQ ID NO: 1880999 - DNA, 25 bp, Homo sapien
aagcagtaataggatagacagcagc

SEQ ID NO: 1881000 - DNA, 25 bp, Homo sapien
gagaagttgctacgatcagtggcca

SEQ ID NO: 1881001 - DNA, 25 bp, Homo sapien
cactagacttggtgctattcctgac

SEQ ID NO: 1881002 - DNA, 25 bp, Homo sapien
tggtacactagacttggtgctattc

SEQ ID NO: 1881003 - DNA, 25 bp, Homo sapien
tcttgggctagaccttcttggtaca

SEQ ID NO: 1881004 - DNA, 25 bp, Homo sapien
ggctagaccttcttggtacactaga

SEQ ID NO: 1881005 - DNA, 25 bp, Homo sapien
catttgctttaccagtgtccctatt

SEQ ID NO: 1881006 - DNA, 25 bp, Homo sapien
gctttaccagtgtccctatttccaa

SEQ ID NO: 1881007 - DNA, 25 bp, Homo sapien
tttgctttaccagtgtccctatttc

SEQ ID NO: 1881008 - DNA, 25 bp, Homo sapien
actcatttgctttaccagtgtccct

SEQ ID NO: 1881009 - DNA, 25 bp, Homo sapien
ggactgacataacggtaatcactaa

SEQ ID NO: 1881010 - DNA, 25 bp, Homo sapien
gacataacggtaatcactaactact

SEQ ID NO: 1881011 - DNA, 25 bp, Homo sapien
taacggtaatcactaactactctcc

SEQ ID NO: 1881012 - DNA, 25 bp, Homo sapien
tcatttggactgacataacggtaat

SEQ ID NO: 1881013 - DNA, 25 bp, Homo sapien
gagtcgcattgctatcttgtcacta

SEQ ID NO: 1881014 - DNA, 25 bp, Homo sapien
tcatgtccaatgagccttttacttc

SEQ ID NO: 1881015 - DNA, 25 bp, Homo sapien
ctaactgaaaatgagtcgcattgct

SEQ ID NO: 1881016 - DNA, 25 bp, Homo sapien
ttgggaatcttcatgtccaatgagc

SEQ ID NO: 1881017 - DNA, 25 bp, Homo sapien
tgtgcagccatatattccccactct

SEQ ID NO: 1881018 - DNA, 25 bp, Homo sapien
gtgcagccatatattccccactctc

SEQ ID NO: 1881019 - DNA, 25 bp, Homo sapien
tgcctcattccattaggcaaataag

SEQ ID NO: 1881020 - DNA, 25 bp, Homo sapien
gaacagtcactcaattgcctcattc

SEQ ID NO: 1881021 - DNA, 25 bp, Homo sapien
cattccattaggcaaataagtgtgg

SEQ ID NO: 1881022 - DNA, 25 bp, Homo sapien
cactcaattgcctcattccattagg

SEQ ID NO: 1881023 - DNA, 25 bp, Homo sapien
tactctgacactatctctacatcta

SEQ ID NO: 1881024 - DNA, 25 bp, Homo sapien
ctctgacactatctctacatctaaa

SEQ ID NO: 1881025 - DNA, 25 bp, Homo sapien
actctgacactatctctacatctaa

SEQ ID NO: 1881026 - DNA, 25 bp, Homo sapien
tgatcttgaacatacagcagttctt

SEQ ID NO: 1881027 - DNA, 25 bp, Homo sapien
tgcttcaccaggacagtaaaagtgg

SEQ ID NO: 1881028 - DNA, 25 bp, Homo sapien
cccgttgtccactctaacagtagta

SEQ ID NO: 1881029 - DNA, 25 bp, Homo sapien
aaattttgcttcaccaggacagtaa

SEQ ID NO: 1881030 - DNA, 25 bp, Homo sapien
ttttgcccgttgtccactctaacag

SEQ ID NO: 1881031 - DNA, 25 bp, Homo sapien
ttgagtcttgcttgacatacagcag

SEQ ID NO: 1881032 - DNA, 25 bp, Homo sapien
aagaatctccataataacgaacaca

SEQ ID NO: 1881033 - DNA, 25 bp, Homo sapien
ttgacatacagcagaagtccatagg

SEQ ID NO: 1881034 - DNA, 25 bp, Homo sapien
ccataataacgaacacaactgaaat

SEQ ID NO: 1881035 - DNA, 25 bp, Homo sapien
tagtggcatactaatgttacagcat

SEQ ID NO: 1881036 - DNA, 25 bp, Homo sapien
cagtaccaactgacacacttaaaga

SEQ ID NO: 1881037 - DNA, 25 bp, Homo sapien
tatttactcaatgatgtagcacaca

SEQ ID NO: 1881038 - DNA, 25 bp, Homo sapien
taagtcagtctgcagtcagtaccaa

SEQ ID NO: 1881039 - DNA, 25 bp, Homo sapien
tatatccaaggtgatacagttaact

SEQ ID NO: 1881040 - DNA, 25 bp, Homo sapien
aagatctctgggtatatccaaggtg

SEQ ID NO: 1881041 - DNA, 25 bp, Homo sapien
aatagtacaaactctccccagaaga

SEQ ID NO: 1881042 - DNA, 25 bp, Homo sapien
tagtacaaactctccccagaagatc

SEQ ID NO: 1881043 - DNA, 25 bp, Homo sapien
tgtctcggacaatggcttggttctg

SEQ ID NO: 1881044 - DNA, 25 bp, Homo sapien
ctgtctcggacaatggcttggttct

SEQ ID NO: 1881045 - DNA, 25 bp, Homo sapien
gagttggccatatgtgatacataca

SEQ ID NO: 1881046 - DNA, 25 bp, Homo sapien
cctggttggggctagagttggccat

SEQ ID NO: 1881047 - DNA, 25 bp, Homo sapien
gctagagttggccatatgtgataca

SEQ ID NO: 1881048 - DNA, 25 bp, Homo sapien
tagagttggccatatgtgatacata

SEQ ID NO: 1881049 - DNA, 25 bp, Homo sapien
aaactgccttacctaggccgggcat

SEQ ID NO: 1881050 - DNA, 25 bp, Homo sapien
cactctgctgagaagtgaatgtctt

SEQ ID NO: 1881051 - DNA, 25 bp, Homo sapien
ttcactttagttttagcacaataaa

SEQ ID NO: 1881052 - DNA, 25 bp, Homo sapien
ataatttattagtccctcatagcac

SEQ ID NO: 1881053 - DNA, 25 bp, Homo sapien
aattccacggagttgatagtctttg

SEQ ID NO: 1881054 - DNA, 25 bp, Homo sapien
tccggcaatgcctgagacaattcca

SEQ ID NO: 1881055 - DNA, 25 bp, Homo sapien
tgcactgtttctctccggcaatgcc

SEQ ID NO: 1881056 - DNA, 25 bp, Homo sapien
ttgatagtctttgtatcccaacagc

SEQ ID NO: 1881057 - DNA, 25 bp, Homo sapien
ggccacgcttaagagatccagaccc

SEQ ID NO: 1881058 - DNA, 25 bp, Homo sapien
tggggccacgcttaagagatccaga

SEQ ID NO: 1881059 - DNA, 25 bp, Homo sapien
gcttaagagatccagaccccatcct

SEQ ID NO: 1881060 - DNA, 25 bp, Homo sapien
tctctcctcctatgccctttcctaa

SEQ ID NO: 1881061 - DNA, 25 bp, Homo sapien
aactaaatcctcttggcatgaaagc

SEQ ID NO: 1881062 - DNA, 25 bp, Homo sapien
ggcttgactctgctcaaggagctca

SEQ ID NO: 1881063 - DNA, 25 bp, Homo sapien
aagttagcaggacctacgggtctca

SEQ ID NO: 1881064 - DNA, 25 bp, Homo sapien
ggagctcaccaaactaaggaaaaga

SEQ ID NO: 1881065 - DNA, 25 bp, Homo sapien
gaggaagcaactttaaatcctgtgg

SEQ ID NO: 1881066 - DNA, 25 bp, Homo sapien
tcttcacgtattactaaagtatatt

SEQ ID NO: 1881067 - DNA, 25 bp, Homo sapien
tctttcttcacgtattactaaagta

SEQ ID NO: 1881068 - DNA, 25 bp, Homo sapien
attctttcttcacgtattactaaag

SEQ ID NO: 1881069 - DNA, 25 bp, Homo sapien
ctattctttcttcacgtattactaa

SEQ ID NO: 1881070 - DNA, 25 bp, Homo sapien
ctaaaacaactcctaaagaattcag

SEQ ID NO: 1881071 - DNA, 25 bp, Homo sapien
tctaaaacaactcctaaagaattca

SEQ ID NO: 1881072 - DNA, 25 bp, Homo sapien
agaactgcctcagagcatcagcgag

SEQ ID NO: 1881073 - DNA, 25 bp, Homo sapien
taagaactgcctcagagcatcagcg

SEQ ID NO: 1881074 - DNA, 25 bp, Homo sapien
ggtaagaactgcctcagagcatcag

SEQ ID NO: 1881075 - DNA, 25 bp, Homo sapien
aggtggtaagaactgcctcagagca

SEQ ID NO: 1881076 - DNA, 25 bp, Homo sapien
tcttgtggtatcaaatcattgacct

SEQ ID NO: 1881077 - DNA, 25 bp, Homo sapien
ctcactagctgcctggagtcttgtg

SEQ ID NO: 1881078 - DNA, 25 bp, Homo sapien
ggtatcaaatcattgacctgttcaa

SEQ ID NO: 1881079 - DNA, 25 bp, Homo sapien
gctgcctggagtcttgtggtatcaa

SEQ ID NO: 1881080 - DNA, 25 bp, Homo sapien
ctactgtattgatctggtagccttt

SEQ ID NO: 1881081 - DNA, 25 bp, Homo sapien
tggcagtgcataaagaataaccatc

SEQ ID NO: 1881082 - DNA, 25 bp, Homo sapien
gtggcagtgcataaagaataaccat

SEQ ID NO: 1881083 - DNA, 25 bp, Homo sapien
gtgaccatgacaggctctttcttct

SEQ ID NO: 1881084 - DNA, 25 bp, Homo sapien
cccggtgaccatgacaggctctttc

SEQ ID NO: 1881085 - DNA, 25 bp, Homo sapien
tgaggctgttcagagcacccggtga

SEQ ID NO: 1881086 - DNA, 25 bp, Homo sapien
ggctgttcagagcacccggtgacca

SEQ ID NO: 1881087 - DNA, 25 bp, Homo sapien
tgatttagtacctcagtgggtccca

SEQ ID NO: 1881088 - DNA, 25 bp, Homo sapien
gatgccggcttgcagtgggaaattc

SEQ ID NO: 1881089 - DNA, 25 bp, Homo sapien
cactgagcctgtcaatggtggcaga

SEQ ID NO: 1881090 - DNA, 25 bp, Homo sapien
cagaaatcatcagccgttgaggtgc

SEQ ID NO: 1881091 - DNA, 25 bp, Homo sapien
gatagggtaatggattcttccaagg

SEQ ID NO: 1881092 - DNA, 25 bp, Homo sapien
ccaaggatgaggataaaattgttct

SEQ ID NO: 1881093 - DNA, 25 bp, Homo sapien
ggcacttctgtgaatgccactgatg

SEQ ID NO: 1881094 - DNA, 25 bp, Homo sapien
aagaaaatgaatgcccagaagtgat

SEQ ID NO: 1881095 - DNA, 25 bp, Homo sapien
aatccacgggagagtaatgactgcc

SEQ ID NO: 1881096 - DNA, 25 bp, Homo sapien
tactgaaccggtgcagagctgatga

SEQ ID NO: 1881097 - DNA, 25 bp, Homo sapien
tgtttagctcaatatcagcccctgg

SEQ ID NO: 1881098 - DNA, 25 bp, Homo sapien
tctcttaaagaatcagcagcctgtg

SEQ ID NO: 1881099 - DNA, 25 bp, Homo sapien
cttgatcaactgggtaagtgtccat

SEQ ID NO: 1881100 - DNA, 25 bp, Homo sapien
agctgctgaccaaagtctcagaagg

SEQ ID NO: 1881101 - DNA, 25 bp, Homo sapien
cctttatagatggaaagctgctgac

SEQ ID NO: 1881102 - DNA, 25 bp, Homo sapien
cacaaagaagcccaatggagcaggt

SEQ ID NO: 1881103 - DNA, 25 bp, Homo sapien
tctttgaaagatgggagttaaacag

SEQ ID NO: 1881104 - DNA, 25 bp, Homo sapien
ttctgtgttataattgttgttttgc

SEQ ID NO: 1881105 - DNA, 25 bp, Homo sapien
tctgtgttataattgttgttttgca

SEQ ID NO: 1881106 - DNA, 25 bp, Homo sapien
ccatttcttttctgtgttataattg

SEQ ID NO: 1881107 - DNA, 25 bp, Homo sapien
tcttttctgtgttataattgttgtt

SEQ ID NO: 1881108 - DNA, 25 bp, Homo sapien
aattgctgttttttcactatattca

SEQ ID NO: 1881109 - DNA, 25 bp, Homo sapien
attgctgttttttcactatattcat

SEQ ID NO: 1881110 - DNA, 25 bp, Homo sapien
caattgctgttttttcactatattc

SEQ ID NO: 1881111 - DNA, 25 bp, Homo sapien
aaatccaggtgtgcataaacatgtc

SEQ ID NO: 1881112 - DNA, 25 bp, Homo sapien
tgaacacatgagttgggaatgcact

SEQ ID NO: 1881113 - DNA, 25 bp, Homo sapien
taaacatgtcgagccaggttcattc

SEQ ID NO: 1881114 - DNA, 25 bp, Homo sapien
tccatgcagagttcatgaacacatg

SEQ ID NO: 1881115 - DNA, 25 bp, Homo sapien
tgcaggattcacacagctctgtttg

SEQ ID NO: 1881116 - DNA, 25 bp, Homo sapien
cagtgtgttttgcagactgtctggt

SEQ ID NO: 1881117 - DNA, 25 bp, Homo sapien
tgtgctctgttcagaatgttgcagg

SEQ ID NO: 1881118 - DNA, 25 bp, Homo sapien
tttcagtgtgttttgcagactgtct

SEQ ID NO: 1881119 - DNA, 25 bp, Homo sapien
ggtgatgaagagcattcatttatat

SEQ ID NO: 1881120 - DNA, 25 bp, Homo sapien
ttggcatttgcaaacatatccattg

SEQ ID NO: 1881121 - DNA, 25 bp, Homo sapien
catatccattgatgtgatcttcaca

SEQ ID NO: 1881122 - DNA, 25 bp, Homo sapien
cacaaaattgaccagaaaatccagg

SEQ ID NO: 1881123 - DNA, 25 bp, Homo sapien
tcaaattggaaagtactgtcttaca

SEQ ID NO: 1881124 - DNA, 25 bp, Homo sapien
gctagttaccacttattacccaaga

SEQ ID NO: 1881125 - DNA, 25 bp, Homo sapien
taactgctattaacaggtgacagga

SEQ ID NO: 1881126 - DNA, 25 bp, Homo sapien
gagggacccaacatcatgcctccat

SEQ ID NO: 1881127 - DNA, 25 bp, Homo sapien
gttgctgatactgttcctttgatac

SEQ ID NO: 1881128 - DNA, 25 bp, Homo sapien
tattaagcccatcatagtagtattt

SEQ ID NO: 1881129 - DNA, 25 bp, Homo sapien
atttattaagcccatcatagtagta

SEQ ID NO: 1881130 - DNA, 25 bp, Homo sapien
tttattaagcccatcatagtagtat

SEQ ID NO: 1881131 - DNA, 25 bp, Homo sapien
tatagattttaccactccaaaaaca

SEQ ID NO: 1881132 - DNA, 25 bp, Homo sapien
tgtttctgttcgttaacgataatgc

SEQ ID NO: 1881133 - DNA, 25 bp, Homo sapien
acgataatgcagagcccatgtctcc

SEQ ID NO: 1881134 - DNA, 25 bp, Homo sapien
tgttcgttaacgataatgcagagcc

SEQ ID NO: 1881135 - DNA, 25 bp, Homo sapien
taagaaactatagttctgaggaata

SEQ ID NO: 1881136 - DNA, 25 bp, Homo sapien
agaaactatagttctgaggaataac

SEQ ID NO: 1881137 - DNA, 25 bp, Homo sapien
aactatagttctgaggaataaccat

SEQ ID NO: 1881138 - DNA, 25 bp, Homo sapien
gaaactatagttctgaggaataacc

SEQ ID NO: 1881139 - DNA, 25 bp, Homo sapien
ggcttgtgtaagagttttgtggaat

SEQ ID NO: 1881140 - DNA, 25 bp, Homo sapien
cttgtgtaagagttttgtggaattc

SEQ ID NO: 1881141 - DNA, 25 bp, Homo sapien
gcttgtgtaagagttttgtggaatt

SEQ ID NO: 1881142 - DNA, 25 bp, Homo sapien
tgtgtaagagttttgtggaattcag

SEQ ID NO: 1881143 - DNA, 25 bp, Homo sapien
ttcagaaagatagctttagcaccag

SEQ ID NO: 1881144 - DNA, 25 bp, Homo sapien
tagcaccagtgtgaaaatgatttga

SEQ ID NO: 1881145 - DNA, 25 bp, Homo sapien
gatagctttagcaccagtgtgaaaa

SEQ ID NO: 1881146 - DNA, 25 bp, Homo sapien
gaaagatagctttagcaccagtgtg

SEQ ID NO: 1881147 - DNA, 25 bp, Homo sapien
gcctctccaaatccaacataagctg

SEQ ID NO: 1881148 - DNA, 25 bp, Homo sapien
cagcatggaatgtgactgttttcaa

SEQ ID NO: 1881149 - DNA, 25 bp, Homo sapien
cataagctggtctggattggaacaa

SEQ ID NO: 1881150 - DNA, 25 bp, Homo sapien
gaacaattgtcacctatagtctcag

SEQ ID NO: 1881151 - DNA, 25 bp, Homo sapien
cgtgaaaacactcaattgtgtcctc

SEQ ID NO: 1881152 - DNA, 25 bp, Homo sapien
tcctcagcttgatctttaaatgtca

SEQ ID NO: 1881153 - DNA, 25 bp, Homo sapien
tcagcgtgaaaacactcaattgtgt

SEQ ID NO: 1881154 - DNA, 25 bp, Homo sapien
gtcctcagcttgatctttaaatgtc

SEQ ID NO: 1881155 - DNA, 25 bp, Homo sapien
aagctgcttctcttggatatccagt

SEQ ID NO: 1881156 - DNA, 25 bp, Homo sapien
ctgcttctcttggatatccagttgc

SEQ ID NO: 1881157 - DNA, 25 bp, Homo sapien
gctgcttctcttggatatccagttg

SEQ ID NO: 1881158 - DNA, 25 bp, Homo sapien
caagctgcttctcttggatatccag

SEQ ID NO: 1881159 - DNA, 25 bp, Homo sapien
caggcaattcaatgtctaggatcca

SEQ ID NO: 1881160 - DNA, 25 bp, Homo sapien
taggatccatttacttctgctttcc

SEQ ID NO: 1881161 - DNA, 25 bp, Homo sapien
tgtgatcttaacgtaaattcgagga

SEQ ID NO: 1881162 - DNA, 25 bp, Homo sapien
ttagtaatactacaaactcttagtc

SEQ ID NO: 1881163 - DNA, 25 bp, Homo sapien
cctgcaagtaggctttagggcctgg

SEQ ID NO: 1881164 - DNA, 25 bp, Homo sapien
tcctgcaagtaggctttagggcctg

SEQ ID NO: 1881165 - DNA, 25 bp, Homo sapien
atgactgacaggagcagggcagtca

SEQ ID NO: 1881166 - DNA, 25 bp, Homo sapien
ctgatgactgacaggagcagggcag

SEQ ID NO: 1881167 - DNA, 25 bp, Homo sapien
ctgacaggagcagggcagtcatact

SEQ ID NO: 1881168 - DNA, 25 bp, Homo sapien
acaggagcagggcagtcatactcac

SEQ ID NO: 1881169 - DNA, 25 bp, Homo sapien
gagcttggtgcttaacagatggtac

SEQ ID NO: 1881170 - DNA, 25 bp, Homo sapien
caggagcttggtgcttaacagatgg

SEQ ID NO: 1881171 - DNA, 25 bp, Homo sapien
ggagcttggtgcttaacagatggta

SEQ ID NO: 1881172 - DNA, 25 bp, Homo sapien
ccaggagcttggtgcttaacagatg

SEQ ID NO: 1881173 - DNA, 25 bp, Homo sapien
gatttcacaacatcatctactctgg

SEQ ID NO: 1881174 - DNA, 25 bp, Homo sapien
gtggttgaagtcttcttttcagcct

SEQ ID NO: 1881175 - DNA, 25 bp, Homo sapien
tgctgacagtggttgaagtcttctt

SEQ ID NO: 1881176 - DNA, 25 bp, Homo sapien
tctggggatgatccacttggccacc

SEQ ID NO: 1881177 - DNA, 25 bp, Homo sapien
gtttttctctcaaagtgtgacaaat

SEQ ID NO: 1881178 - DNA, 25 bp, Homo sapien
agtttttctctcaaagtgtgacaaa

SEQ ID NO: 1881179 - DNA, 25 bp, Homo sapien
acatgagacccaaggcatcctagat

SEQ ID NO: 1881180 - DNA, 25 bp, Homo sapien
tgcagtgggacatgagacccaaggc

SEQ ID NO: 1881181 - DNA, 25 bp, Homo sapien
cttcaagatgacaatgcagtgggac

SEQ ID NO: 1881182 - DNA, 25 bp, Homo sapien
gggacatgagacccaaggcatccta

SEQ ID NO: 1881183 - DNA, 25 bp, Homo sapien
gctctatgccagagtgggcgatgat

SEQ ID NO: 1881184 - DNA, 25 bp, Homo sapien
caagagactcataatgggcttagaa

SEQ ID NO: 1881185 - DNA, 25 bp, Homo sapien
ctatgccagagtgggcgatgatgac

SEQ ID NO: 1881186 - DNA, 25 bp, Homo sapien
tccatggcacccaagagactcataa

SEQ ID NO: 1881187 - DNA, 25 bp, Homo sapien
cacgcttatggcaacaatcactgtg

SEQ ID NO: 1881188 - DNA, 25 bp, Homo sapien
gtagccagcacgcttatggcaacaa

SEQ ID NO: 1881189 - DNA, 25 bp, Homo sapien
aaagatggtagccagcacgcttatg

SEQ ID NO: 1881190 - DNA, 25 bp, Homo sapien
cagcacgcttatggcaacaatcact

SEQ ID NO: 1881191 - DNA, 25 bp, Homo sapien
gacctgctacaggattgctgatgtc

SEQ ID NO: 1881192 - DNA, 25 bp, Homo sapien
catttgaaagctcatatgtggactg

SEQ ID NO: 1881193 - DNA, 25 bp, Homo sapien
tatcaacttgtaaaatgtatcagcc

SEQ ID NO: 1881194 - DNA, 25 bp, Homo sapien
tcaaaacgggctgctgaaaaactaa

SEQ ID NO: 1881195 - DNA, 25 bp, Homo sapien
tctaattatatagtagactgggata

SEQ ID NO: 1881196 - DNA, 25 bp, Homo sapien
gattcaattacattcaagaactaca

SEQ ID NO: 1881197 - DNA, 25 bp, Homo sapien
tgtattaagtggaaactctagttta

SEQ ID NO: 1881198 - DNA, 25 bp, Homo sapien
ccatatcagatgttatctaattata

SEQ ID NO: 1881199 - DNA, 25 bp, Homo sapien
ggacacctgcttctaattctgccaa

SEQ ID NO: 1881200 - DNA, 25 bp, Homo sapien
taaggctctgaaaataatggacacc

SEQ ID NO: 1881201 - DNA, 25 bp, Homo sapien
tatcagaccgatacacacagacgct

SEQ ID NO: 1881202 - DNA, 25 bp, Homo sapien
tagagatttagtagggcaatcaacc

SEQ ID NO: 1881203 - DNA, 25 bp, Homo sapien
atattttcattgtgagtgcttccca

SEQ ID NO: 1881204 - DNA, 25 bp, Homo sapien
ttcattgtgagtgcttcccatggta

SEQ ID NO: 1881205 - DNA, 25 bp, Homo sapien
tcccatggtagtcacaaacacatcc

SEQ ID NO: 1881206 - DNA, 25 bp, Homo sapien
ttcccatggtagtcacaaacacatc

SEQ ID NO: 1881207 - DNA, 25 bp, Homo sapien
cacgtccggccgagttataacaaat

SEQ ID NO: 1881208 - DNA, 25 bp, Homo sapien
gatgactgaattaagttcaggctca

SEQ ID NO: 1881209 - DNA, 25 bp, Homo sapien
gcttttttcacagtatgcaccagtg

SEQ ID NO: 1881210 - DNA, 25 bp, Homo sapien
tcaggctcagcacaattatcaatgc

SEQ ID NO: 1881211 - DNA, 25 bp, Homo sapien
tccacgtgggcaaatgcaagtaaat

SEQ ID NO: 1881212 - DNA, 25 bp, Homo sapien
ttcatacaagggattgatgtgcagt

SEQ ID NO: 1881213 - DNA, 25 bp, Homo sapien
tcatacaagggattgatgtgcagtc

SEQ ID NO: 1881214 - DNA, 25 bp, Homo sapien
attcatacaagggattgatgtgcag

SEQ ID NO: 1881215 - DNA, 25 bp, Homo sapien
gatgtggtttagatccacagggttg

SEQ ID NO: 1881216 - DNA, 25 bp, Homo sapien
ctgagggatgtggtttagatccaca

SEQ ID NO: 1881217 - DNA, 25 bp, Homo sapien
ggttgtcctgtgatctcttaactgc

SEQ ID NO: 1881218 - DNA, 25 bp, Homo sapien
gggatgtggtttagatccacagggt

SEQ ID NO: 1881219 - DNA, 25 bp, Homo sapien
gaacggtcacaattctcagtcgacc

SEQ ID NO: 1881220 - DNA, 25 bp, Homo sapien
tcatccaccaagaacggtcacaatt

SEQ ID NO: 1881221 - DNA, 25 bp, Homo sapien
caccaagaacggtcacaattctcag

SEQ ID NO: 1881222 - DNA, 25 bp, Homo sapien
caattctcagtcgaccaacattttt

SEQ ID NO: 1881223 - DNA, 25 bp, Homo sapien
acattgtgtgctagtcccatctgca

SEQ ID NO: 1881224 - DNA, 25 bp, Homo sapien
tcttacattgtgtgctagtcccatc

SEQ ID NO: 1881225 - DNA, 25 bp, Homo sapien
ttgatcttacattgtgtgctagtcc

SEQ ID NO: 1881226 - DNA, 25 bp, Homo sapien
attttgatcttacattgtgtgctag

SEQ ID NO: 1881227 - DNA, 25 bp, Homo sapien
aatcattggcgtttgtttcacagtg

SEQ ID NO: 1881228 - DNA, 25 bp, Homo sapien
gattgatgccatcgatacaaactcc

SEQ ID NO: 1881229 - DNA, 25 bp, Homo sapien
tacaaactccatcatggagacaggg

SEQ ID NO: 1881230 - DNA, 25 bp, Homo sapien
gacagggctctgataggcattcatc

SEQ ID NO: 1881231 - DNA, 25 bp, Homo sapien
tcattatggtaaacatcaccaagaa

SEQ ID NO: 1881232 - DNA, 25 bp, Homo sapien
ttgttcattatggtaaacatcacca

SEQ ID NO: 1881233 - DNA, 25 bp, Homo sapien
gttcattatggtaaacatcaccaag

SEQ ID NO: 1881234 - DNA, 25 bp, Homo sapien
gacaaggcaaaacatgaaaccattt

SEQ ID NO: 1881235 - DNA, 25 bp, Homo sapien
tgaaatcccatatgattttattact

SEQ ID NO: 1881236 - DNA, 25 bp, Homo sapien
aaatcccatatgattttattacttt

SEQ ID NO: 1881237 - DNA, 25 bp, Homo sapien
gaaatcccatatgattttattactt

SEQ ID NO: 1881238 - DNA, 25 bp, Homo sapien
cctttgaatctgaatatgtgtgcca

SEQ ID NO: 1881239 - DNA, 25 bp, Homo sapien
tcctttgaatctgaatatgtgtgcc

SEQ ID NO: 1881240 - DNA, 25 bp, Homo sapien
cttcatcctggtccccataatcatt

SEQ ID NO: 1881241 - DNA, 25 bp, Homo sapien
catcctggtccccataatcatttgt

SEQ ID NO: 1881242 - DNA, 25 bp, Homo sapien
atcctggtccccataatcatttgtt

SEQ ID NO: 1881243 - DNA, 25 bp, Homo sapien
tcatcctggtccccataatcatttg

SEQ ID NO: 1881244 - DNA, 25 bp, Homo sapien
aattgatgcctgaatcaattcagaa

SEQ ID NO: 1881245 - DNA, 25 bp, Homo sapien
tgcataacaagttcacctcatgtct

SEQ ID NO: 1881246 - DNA, 25 bp, Homo sapien
tattgagacactttgtccatcctga

SEQ ID NO: 1881247 - DNA, 25 bp, Homo sapien
tccatcctgattactgcataacaag

SEQ ID NO: 1881248 - DNA, 25 bp, Homo sapien
gaggcagttgtatccatcagtcctg

SEQ ID NO: 1881249 - DNA, 25 bp, Homo sapien
cagttgtatccatcagtcctgtaga

SEQ ID NO: 1881250 - DNA, 25 bp, Homo sapien
gggcacagaggcagttgtatccatc

SEQ ID NO: 1881251 - DNA, 25 bp, Homo sapien
cagaggcagttgtatccatcagtcc

SEQ ID NO: 1881252 - DNA, 25 bp, Homo sapien
gaagggcccatggtactcaggttca

SEQ ID NO: 1881253 - DNA, 25 bp, Homo sapien
cagaagggcccatggtactcaggtt

SEQ ID NO: 1881254 - DNA, 25 bp, Homo sapien
gggcccatggtactcaggttcacaa

SEQ ID NO: 1881255 - DNA, 25 bp, Homo sapien
ctagacaaggtgagattttacattt

SEQ ID NO: 1881256 - DNA, 25 bp, Homo sapien
cagatccacacatgttccattattt

SEQ ID NO: 1881257 - DNA, 25 bp, Homo sapien
gtttgtcagatccacacatgttcca

SEQ ID NO: 1881258 - DNA, 25 bp, Homo sapien
ttatttttgcaaggttcagaggaac

SEQ ID NO: 1881259 - DNA, 25 bp, Homo sapien
tccacacatgttccattatttttgc

SEQ ID NO: 1881260 - DNA, 25 bp, Homo sapien
ccatatcttcacagtcaccataatc

SEQ ID NO: 1881261 - DNA, 25 bp, Homo sapien
gaccatatcttcacagtcaccataa

SEQ ID NO: 1881262 - DNA, 25 bp, Homo sapien
accatatcttcacagtcaccataat

SEQ ID NO: 1881263 - DNA, 25 bp, Homo sapien
tgaccatatcttcacagtcaccata

SEQ ID NO: 1881264 - DNA, 25 bp, Homo sapien
cacatcaatttcacagtttttacct

SEQ ID NO: 1881265 - DNA, 25 bp, Homo sapien
catcaatttcacagtttttaccttc

SEQ ID NO: 1881266 - DNA, 25 bp, Homo sapien
tcaatttcacagtttttaccttcaa

SEQ ID NO: 1881267 - DNA, 25 bp, Homo sapien
ttcacatcaatttcacagtttttac

SEQ ID NO: 1881268 - DNA, 25 bp, Homo sapien
gatttggcttacgtacaataataaa

SEQ ID NO: 1881269 - DNA, 25 bp, Homo sapien
gctctgatttggcttacgtacaata

SEQ ID NO: 1881270 - DNA, 25 bp, Homo sapien
ccaaagctctgatttggcttacgta

SEQ ID NO: 1881271 - DNA, 25 bp, Homo sapien
tagccaaagctctgatttggcttac

SEQ ID NO: 1881272 - DNA, 25 bp, Homo sapien
tctgcaagggttatgaagtaggtca

SEQ ID NO: 1881273 - DNA, 25 bp, Homo sapien
tacaatgctgatttgcgtctaccaa

SEQ ID NO: 1881274 - DNA, 25 bp, Homo sapien
tatagcgttggtggcaaaattgtcc

SEQ ID NO: 1881275 - DNA, 25 bp, Homo sapien
tccagggatggtagattcatgacaa

SEQ ID NO: 1881276 - DNA, 25 bp, Homo sapien
actacagttctgtccagtccatcca

SEQ ID NO: 1881277 - DNA, 25 bp, Homo sapien
catggatcagagtcgcattcattta

SEQ ID NO: 1881278 - DNA, 25 bp, Homo sapien
gcatggatcagagtcgcattcattt

SEQ ID NO: 1881279 - DNA, 25 bp, Homo sapien
agtccatccagatgtacactcacat

SEQ ID NO: 1881280 - DNA, 25 bp, Homo sapien
taacatagttaggcctctgagacat

SEQ ID NO: 1881281 - DNA, 25 bp, Homo sapien
ctaacatagttaggcctctgagaca

SEQ ID NO: 1881282 - DNA, 25 bp, Homo sapien
ctgaaagtcagctttgtagtgtcca

SEQ ID NO: 1881283 - DNA, 25 bp, Homo sapien
tccaataatggccatacagagcccc

SEQ ID NO: 1881284 - DNA, 25 bp, Homo sapien
gcaggccaaagcatcaacacaaatg

SEQ ID NO: 1881285 - DNA, 25 bp, Homo sapien
gaaaagcaggccaaagcatcaacac

SEQ ID NO: 1881286 - DNA, 25 bp, Homo sapien
ctgaagctttgataatttccttcag

SEQ ID NO: 1881287 - DNA, 25 bp, Homo sapien
aagctttgataatttccttcagcat

SEQ ID NO: 1881288 - DNA, 25 bp, Homo sapien
gaagctttgataatttccttcagca

SEQ ID NO: 1881289 - DNA, 25 bp, Homo sapien
tgaagctttgataatttccttcagc

SEQ ID NO: 1881290 - DNA, 25 bp, Homo sapien
tcaggaatttcccattcttttgact

SEQ ID NO: 1881291 - DNA, 25 bp, Homo sapien
cgttcaggaatttcccattcttttg

SEQ ID NO: 1881292 - DNA, 25 bp, Homo sapien
tctcccttcgttcaggaatttccca

SEQ ID NO: 1881293 - DNA, 25 bp, Homo sapien
ccttcgttcaggaatttcccattct

SEQ ID NO: 1881294 - DNA, 25 bp, Homo sapien
gacagtagagcccaaattccctgga

SEQ ID NO: 1881295 - DNA, 25 bp, Homo sapien
aattccctggaacccactaggactg

SEQ ID NO: 1881296 - DNA, 25 bp, Homo sapien
cccactaggactgtagaagaagcca

SEQ ID NO: 1881297 - DNA, 25 bp, Homo sapien
ttctaaggacagtagagcccaaatt

SEQ ID NO: 1881298 - DNA, 25 bp, Homo sapien
ctttgtgtctatcagatgcagagca

SEQ ID NO: 1881299 - DNA, 25 bp, Homo sapien
caagagcctcagcatccgatgatat

SEQ ID NO: 1881300 - DNA, 25 bp, Homo sapien
gagatcaggctgaggtgttttgctt

SEQ ID NO: 1881301 - DNA, 25 bp, Homo sapien
agaaatgcagcaatctcacagcaag

SEQ ID NO: 1881302 - DNA, 25 bp, Homo sapien
ctggtcatggatatgtaaatgcgag

SEQ ID NO: 1881303 - DNA, 25 bp, Homo sapien
tgcagtccttgtgggaaaaaacagt

SEQ ID NO: 1881304 - DNA, 25 bp, Homo sapien
aaacagtttgccacaaatgttcctt

SEQ ID NO: 1881305 - DNA, 25 bp, Homo sapien
cagttattccattaggtatctgcag

SEQ ID NO: 1881306 - DNA, 25 bp, Homo sapien
acatttaggtatataaaaagccagt

SEQ ID NO: 1881307 - DNA, 25 bp, Homo sapien
tttaggtatataaaaagccagtgga

SEQ ID NO: 1881308 - DNA, 25 bp, Homo sapien
catttaggtatataaaaagccagtg

SEQ ID NO: 1881309 - DNA, 25 bp, Homo sapien
aggtatataaaaagccagtggatac

SEQ ID NO: 1881310 - DNA, 25 bp, Homo sapien
gagatgcaggtctttgcaggtagaa

SEQ ID NO: 1881311 - DNA, 25 bp, Homo sapien
catagcctggattgcataagcagga

SEQ ID NO: 1881312 - DNA, 25 bp, Homo sapien
atgtcctgttcacatcttatcccaa

SEQ ID NO: 1881313 - DNA, 25 bp, Homo sapien
tcccaacatagcctggattgcataa

SEQ ID NO: 1881314 - DNA, 25 bp, Homo sapien
ctgttcacatcttatcccaacatag

SEQ ID NO: 1881315 - DNA, 25 bp, Homo sapien
aattgcagccgctgaaggaactcac

SEQ ID NO: 1881316 - DNA, 25 bp, Homo sapien
aataattgcagccgctgaaggaact

SEQ ID NO: 1881317 - DNA, 25 bp, Homo sapien
tacaataattgcagccgctgaagga

SEQ ID NO: 1881318 - DNA, 25 bp, Homo sapien
taattgcagccgctgaaggaactca

SEQ ID NO: 1881319 - DNA, 25 bp, Homo sapien
gggctggaactgcactcattgacat

SEQ ID NO: 1881320 - DNA, 25 bp, Homo sapien
catagcaatatccatgcaggcaagg

SEQ ID NO: 1881321 - DNA, 25 bp, Homo sapien
cattgacattgatctcacagcgtgg

SEQ ID NO: 1881322 - DNA, 25 bp, Homo sapien
tatccatgcaggcaagggctggaac

SEQ ID NO: 1881323 - DNA, 25 bp, Homo sapien
tagctttgcaaggtccaaattcaca

SEQ ID NO: 1881324 - DNA, 25 bp, Homo sapien
tggcacactggcaccggaactcaag

SEQ ID NO: 1881325 - DNA, 25 bp, Homo sapien
cacagctccattctcacaagaatca

SEQ ID NO: 1881326 - DNA, 25 bp, Homo sapien
tctccacgcacagctccattctcac

SEQ ID NO: 1881327 - DNA, 25 bp, Homo sapien
cagcataaaggcatccaatttattc

SEQ ID NO: 1881328 - DNA, 25 bp, Homo sapien
tcagcataaaggcatccaatttatt

SEQ ID NO: 1881329 - DNA, 25 bp, Homo sapien
tatttcagcataaaggcatccaatt

SEQ ID NO: 1881330 - DNA, 25 bp, Homo sapien
tttcagcataaaggcatccaattta

SEQ ID NO: 1881331 - DNA, 25 bp, Homo sapien
cagtcaaatgattagtttcagcaat

SEQ ID NO: 1881332 - DNA, 25 bp, Homo sapien
ggactatcatcagtcaaatgattag

SEQ ID NO: 1881333 - DNA, 25 bp, Homo sapien
gaggactatcatcagtcaaatgatt

SEQ ID NO: 1881334 - DNA, 25 bp, Homo sapien
tcatcagtcaaatgattagtttcag

SEQ ID NO: 1881335 - DNA, 25 bp, Homo sapien
ctagggtgattaagggtagtgaatt

SEQ ID NO: 1881336 - DNA, 25 bp, Homo sapien
tgattaagggtagtgaatttaggta

SEQ ID NO: 1881337 - DNA, 25 bp, Homo sapien
gcttttccttatcccttggtgttca

SEQ ID NO: 1881338 - DNA, 25 bp, Homo sapien
tgcttttccttatcccttggtgttc

SEQ ID NO: 1881339 - DNA, 25 bp, Homo sapien
cttttccttatcccttggtgttcat

SEQ ID NO: 1881340 - DNA, 25 bp, Homo sapien
ttaccaggttggtcaatgcaggtgg

SEQ ID NO: 1881341 - DNA, 25 bp, Homo sapien
catttttgcagggatgtgaagcaca

SEQ ID NO: 1881342 - DNA, 25 bp, Homo sapien
tttgcagggatgtgaagcacactca

SEQ ID NO: 1881343 - DNA, 25 bp, Homo sapien
cactggcagaagtaattaccaggtt

SEQ ID NO: 1881344 - DNA, 25 bp, Homo sapien
tcctcaattgcttgcaccatctggg

SEQ ID NO: 1881345 - DNA, 25 bp, Homo sapien
tcacactgtgatcgttttctcctca

SEQ ID NO: 1881346 - DNA, 25 bp, Homo sapien
ccatctgggctaaatcacactgtga

SEQ ID NO: 1881347 - DNA, 25 bp, Homo sapien
cttgcaccatctgggctaaatcaca

SEQ ID NO: 1881348 - DNA, 25 bp, Homo sapien
atcttggaagtacattcatcaatgt

SEQ ID NO: 1881349 - DNA, 25 bp, Homo sapien
gtgagttgatgagagatctctaaat

SEQ ID NO: 1881350 - DNA, 25 bp, Homo sapien
tacactgtcctggaccaaattgcag

SEQ ID NO: 1881351 - DNA, 25 bp, Homo sapien
caaattgcagagtaccttgtctgct

SEQ ID NO: 1881352 - DNA, 25 bp, Homo sapien
tgatgagagatctctaaattacact

SEQ ID NO: 1881353 - DNA, 25 bp, Homo sapien
ctattccgtgaatgatgtctgtact

SEQ ID NO: 1881354 - DNA, 25 bp, Homo sapien
ccgtgaatgatgtctgtacttctga

SEQ ID NO: 1881355 - DNA, 25 bp, Homo sapien
tattccgtgaatgatgtctgtactt

SEQ ID NO: 1881356 - DNA, 25 bp, Homo sapien
ttccgtgaatgatgtctgtacttct

SEQ ID NO: 1881357 - DNA, 25 bp, Homo sapien
agatatgagataactaagactctgc

SEQ ID NO: 1881358 - DNA, 25 bp, Homo sapien
ttttaacctccgcttgagatatgag

SEQ ID NO: 1881359 - DNA, 25 bp, Homo sapien
tctgatgaccatattaacttgcttt

SEQ ID NO: 1881360 - DNA, 25 bp, Homo sapien
taacaacttgccaaacgcaggccca

SEQ ID NO: 1881361 - DNA, 25 bp, Homo sapien
cagactcaaggtgtggtataggcct

SEQ ID NO: 1881362 - DNA, 25 bp, Homo sapien
agtcttagtcgatttagggctgcca

SEQ ID NO: 1881363 - DNA, 25 bp, Homo sapien
gacagaagaggcaagctatctctct

SEQ ID NO: 1881364 - DNA, 25 bp, Homo sapien
gaagttcagtagcagtccagtacca

SEQ ID NO: 1881365 - DNA, 25 bp, Homo sapien
aactagaactttttcaatacaagtg

SEQ ID NO: 1881366 - DNA, 25 bp, Homo sapien
ttcaatacaagtgttgaccgaattt

SEQ ID NO: 1881367 - DNA, 25 bp, Homo sapien
tgttgaccgaatttatgcaagtaga

SEQ ID NO: 1881368 - DNA, 25 bp, Homo sapien
cgaatttatgcaagtagaattcaca

SEQ ID NO: 1881369 - DNA, 25 bp, Homo sapien
attcagaaatatctatggcagccat

SEQ ID NO: 1881370 - DNA, 25 bp, Homo sapien
atattcagaaatatctatggcagcc

SEQ ID NO: 1881371 - DNA, 25 bp, Homo sapien
tattcagaaatatctatggcagcca

SEQ ID NO: 1881372 - DNA, 25 bp, Homo sapien
tctcaggacaccagtaagtggatcc

SEQ ID NO: 1881373 - DNA, 25 bp, Homo sapien
tataagggacagacatcgatgcgcc

SEQ ID NO: 1881374 - DNA, 25 bp, Homo sapien
taggtgagagcttccccaaattccc

SEQ ID NO: 1881375 - DNA, 25 bp, Homo sapien
gagcctgagtacaaaggtgtcaacc

SEQ ID NO: 1881376 - DNA, 25 bp, Homo sapien
gatatgagggatagtgaaacaattt

SEQ ID NO: 1881377 - DNA, 25 bp, Homo sapien
aataggaatatagtctatgggtttc

SEQ ID NO: 1881378 - DNA, 25 bp, Homo sapien
aaaacttctaattgtaatcattcac

SEQ ID NO: 1881379 - DNA, 25 bp, Homo sapien
caatgtgatattgtgttaagtatga

SEQ ID NO: 1881380 - DNA, 25 bp, Homo sapien
gaaaatagactctcctttcatggag

SEQ ID NO: 1881381 - DNA, 25 bp, Homo sapien
tgagaggcagaatacaggacggtat

SEQ ID NO: 1881382 - DNA, 25 bp, Homo sapien
catggagtttactctctgatgtggg

SEQ ID NO: 1881383 - DNA, 25 bp, Homo sapien
caggatggacataaaacggattggt

SEQ ID NO: 1881384 - DNA, 25 bp, Homo sapien
ttagcttagacctacacacaataag

SEQ ID NO: 1881385 - DNA, 25 bp, Homo sapien
cattagcttagacctacacacaata

SEQ ID NO: 1881386 - DNA, 25 bp, Homo sapien
tagcttagacctacacacaataagg

SEQ ID NO: 1881387 - DNA, 25 bp, Homo sapien
tagtacgttttgttgataactaaga

SEQ ID NO: 1881388 - DNA, 25 bp, Homo sapien
agcatactctgggtacctgttgatc

SEQ ID NO: 1881389 - DNA, 25 bp, Homo sapien
atattttcactcattgggattttgc

SEQ ID NO: 1881390 - DNA, 25 bp, Homo sapien
tgtaccagttgtaagctgaggcttt

SEQ ID NO: 1881391 - DNA, 25 bp, Homo sapien
gagaagagcatactctgggtacctg

SEQ ID NO: 1881392 - DNA, 25 bp, Homo sapien
cacaagacgagatggccacactgac

SEQ ID NO: 1881393 - DNA, 25 bp, Homo sapien
tgaattcgtagtcaaaacctcccca

SEQ ID NO: 1881394 - DNA, 25 bp, Homo sapien
ggtaaagtgattgaattcgtagtca

SEQ ID NO: 1881395 - DNA, 25 bp, Homo sapien
aacacaagacgagatggccacactg

SEQ ID NO: 1881396 - DNA, 25 bp, Homo sapien
tcatgtcttatggtatgccagagga

SEQ ID NO: 1881397 - DNA, 25 bp, Homo sapien
cacaaggattcaatgtgcctaacag

SEQ ID NO: 1881398 - DNA, 25 bp, Homo sapien
ttggtggtcactgggaaaagagccc

SEQ ID NO: 1881399 - DNA, 25 bp, Homo sapien
tattacaagtatatccacaaggatt

SEQ ID NO: 1881400 - DNA, 25 bp, Homo sapien
aagtgtctacccttattagctgagg

SEQ ID NO: 1881401 - DNA, 25 bp, Homo sapien
tatttatgaggcagctcctgtaaaa

SEQ ID NO: 1881402 - DNA, 25 bp, Homo sapien
acttccaaccatattcagaacctgg

SEQ ID NO: 1881403 - DNA, 25 bp, Homo sapien
gagcagagtagattttgttcaccaa

SEQ ID NO: 1881404 - DNA, 25 bp, Homo sapien
tcagtaactgtccatcatatagatc

SEQ ID NO: 1881405 - DNA, 25 bp, Homo sapien
tgtccatcatatagatcatcttgct

SEQ ID NO: 1881406 - DNA, 25 bp, Homo sapien
taaagccattggatccgtcattgat

SEQ ID NO: 1881407 - DNA, 25 bp, Homo sapien
tccaagtccattgtataactcgggt

SEQ ID NO: 1881408 - DNA, 25 bp, Homo sapien
ggagtgttatggcattggctcttct

SEQ ID NO: 1881409 - DNA, 25 bp, Homo sapien
gctgtcttggatctcaggcctttgg

SEQ ID NO: 1881410 - DNA, 25 bp, Homo sapien
tctggtgtagactgcagatctggct

SEQ ID NO: 1881411 - DNA, 25 bp, Homo sapien
tgtggactggaattatagctttggc

SEQ ID NO: 1881412 - DNA, 25 bp, Homo sapien
gcctctgttctgttgctaggttcat

SEQ ID NO: 1881413 - DNA, 25 bp, Homo sapien
tgtgggctccagttagcctctgttc

SEQ ID NO: 1881414 - DNA, 25 bp, Homo sapien
tgaaatggcacatttcctgtgtggc

SEQ ID NO: 1881415 - DNA, 25 bp, Homo sapien
ctgccaagaattgaaatggcacatt

SEQ ID NO: 1881416 - DNA, 25 bp, Homo sapien
tgagatatatttgagatatatcaaa

SEQ ID NO: 1881417 - DNA, 25 bp, Homo sapien
tattaacaacattatttactagaaa

SEQ ID NO: 1881418 - DNA, 25 bp, Homo sapien
tcaaataaatatattaacaacatta

SEQ ID NO: 1881419 - DNA, 25 bp, Homo sapien
gagatatatttgagatatatcaaat

SEQ ID NO: 1881420 - DNA, 25 bp, Homo sapien
catgcactgatatactgtggttccc

SEQ ID NO: 1881421 - DNA, 25 bp, Homo sapien
taaatcctgggacacacttgcggaa

SEQ ID NO: 1881422 - DNA, 25 bp, Homo sapien
caattgtgcgaaagggccaggcaga

SEQ ID NO: 1881423 - DNA, 25 bp, Homo sapien
gcagaccgctacagttacaattgtg

SEQ ID NO: 1881424 - DNA, 25 bp, Homo sapien
agtcttggttttctgctagtgctgc

SEQ ID NO: 1881425 - DNA, 25 bp, Homo sapien
atctttgacgctggcagtcttggtt

SEQ ID NO: 1881426 - DNA, 25 bp, Homo sapien
cgtgctggcacttttaccggccggg

SEQ ID NO: 1881427 - DNA, 25 bp, Homo sapien
agaaagacgtggcagcaagcgggag

SEQ ID NO: 1881428 - DNA, 25 bp, Homo sapien
cactgtgaagctgcactaggcaatg

SEQ ID NO: 1881429 - DNA, 25 bp, Homo sapien
actgcgctttccatcacaatagagg

SEQ ID NO: 1881430 - DNA, 25 bp, Homo sapien
cattatggcaagaagggcgctgttt

SEQ ID NO: 1881431 - DNA, 25 bp, Homo sapien
gcctaatcaaggagaagactgctat

SEQ ID NO: 1881432 - DNA, 25 bp, Homo sapien
ccctcagctgcggagcgttatgaaa

SEQ ID NO: 1881433 - DNA, 25 bp, Homo sapien
tccgaaaatgttcctagccccaagc

SEQ ID NO: 1881434 - DNA, 25 bp, Homo sapien
gaagtgaaggctagccaactttcag

SEQ ID NO: 1881435 - DNA, 25 bp, Homo sapien
tccgagcaaaagtgtgttgcccact

SEQ ID NO: 1881436 - DNA, 25 bp, Homo sapien
cctcatcccaaatgagcatgaaaac

SEQ ID NO: 1881437 - DNA, 25 bp, Homo sapien
gatttcaggaggcaaattggaagct

SEQ ID NO: 1881438 - DNA, 25 bp, Homo sapien
tcagattcctcacccccggaggtgt

SEQ ID NO: 1881439 - DNA, 25 bp, Homo sapien
gagcatgaaaactcgccgactcagc

SEQ ID NO: 1881440 - DNA, 25 bp, Homo sapien
gtagagatcccctactgtttcgtgg

SEQ ID NO: 1881441 - DNA, 25 bp, Homo sapien
gaggtagtagagatcccctactgtt

SEQ ID NO: 1881442 - DNA, 25 bp, Homo sapien
ttgctttactccagtcctcaacccc

SEQ ID NO: 1881443 - DNA, 25 bp, Homo sapien
ctactgtttcgtggaacaccagcaa

SEQ ID NO: 1881444 - DNA, 25 bp, Homo sapien
aggcaatgaaggcagctgtcgccac

SEQ ID NO: 1881445 - DNA, 25 bp, Homo sapien
caatgaaggcagctgtcgccaccat

SEQ ID NO: 1881446 - DNA, 25 bp, Homo sapien
gccctggtaacaaggtggcagcaag

SEQ ID NO: 1881447 - DNA, 25 bp, Homo sapien
tggccctggtaacaaggtggcagca

SEQ ID NO: 1881448 - DNA, 25 bp, Homo sapien
gatctagtggtttcaagactggccc

SEQ ID NO: 1881449 - DNA, 25 bp, Homo sapien
ttaataaaatcacggacatcacggc

SEQ ID NO: 1881450 - DNA, 25 bp, Homo sapien
catcacggcagaaattacaatagtc

SEQ ID NO: 1881451 - DNA, 25 bp, Homo sapien
tcagtgtatgtaagtgccttagaca

SEQ ID NO: 1881452 - DNA, 25 bp, Homo sapien
gaaaaatatcttccagttagaggag

SEQ ID NO: 1881453 - DNA, 25 bp, Homo sapien
tcttatcagattgtggaagttccct

SEQ ID NO: 1881454 - DNA, 25 bp, Homo sapien
tcaaaaacaggtgggagtcatgaac

SEQ ID NO: 1881455 - DNA, 25 bp, Homo sapien
tattgagttcccgtatatactcggg

SEQ ID NO: 1881456 - DNA, 25 bp, Homo sapien
gatgactatcaatttaattataact

SEQ ID NO: 1881457 - DNA, 25 bp, Homo sapien
aattataactttttgatatgtgata

SEQ ID NO: 1881458 - DNA, 25 bp, Homo sapien
ctttttgatatgtgatattatctgc

SEQ ID NO: 1881459 - DNA, 25 bp, Homo sapien
taactttttgatatgtgatattatc

SEQ ID NO: 1881460 - DNA, 25 bp, Homo sapien
atagataccgatattcctgactgtc

SEQ ID NO: 1881461 - DNA, 25 bp, Homo sapien
cagcttcatgttgacactcattttc

SEQ ID NO: 1881462 - DNA, 25 bp, Homo sapien
tcttcactcaaacaactgcatccat

SEQ ID NO: 1881463 - DNA, 25 bp, Homo sapien
gagaaaacatagataccgatattcc

SEQ ID NO: 1881464 - DNA, 25 bp, Homo sapien
gtgggaaccaacatgaagaattatt

SEQ ID NO: 1881465 - DNA, 25 bp, Homo sapien
tcaataaccccttggcacttttcgc

SEQ ID NO: 1881466 - DNA, 25 bp, Homo sapien
tcttcaggatcgttcacataggttg

SEQ ID NO: 1881467 - DNA, 25 bp, Homo sapien
cttcagtgcagtttgcagccagaaa

SEQ ID NO: 1881468 - DNA, 25 bp, Homo sapien
tttccctcaaaaatacttctgccat

SEQ ID NO: 1881469 - DNA, 25 bp, Homo sapien
ccattttccctcaaaaatacttctg

SEQ ID NO: 1881470 - DNA, 25 bp, Homo sapien
tattactccttccattttccctcaa

SEQ ID NO: 1881471 - DNA, 25 bp, Homo sapien
ttttccctcaaaaatacttctgcca

SEQ ID NO: 1881472 - DNA, 25 bp, Homo sapien
ttttgtgcaccctggaatgcataca

SEQ ID NO: 1881473 - DNA, 25 bp, Homo sapien
gaaggtgactccacagtagcagagg

SEQ ID NO: 1881474 - DNA, 25 bp, Homo sapien
tgagcaggacctttatcttggcaaa

SEQ ID NO: 1881475 - DNA, 25 bp, Homo sapien
ttggcaaataccatggaaggtgact

SEQ ID NO: 1881476 - DNA, 25 bp, Homo sapien
ttctgtactatcttttgtcatatcc

SEQ ID NO: 1881477 - DNA, 25 bp, Homo sapien
ctttctgtactatcttttgtcatat

SEQ ID NO: 1881478 - DNA, 25 bp, Homo sapien
tctgtactatcttttgtcatatcca

SEQ ID NO: 1881479 - DNA, 25 bp, Homo sapien
ctgtactatcttttgtcatatccat

SEQ ID NO: 1881480 - DNA, 25 bp, Homo sapien
tcacaaatgatttattcttaaccat

SEQ ID NO: 1881481 - DNA, 25 bp, Homo sapien
tttctttcacaaatgatttattctt

SEQ ID NO: 1881482 - DNA, 25 bp, Homo sapien
tctttcacaaatgatttattcttaa

SEQ ID NO: 1881483 - DNA, 25 bp, Homo sapien
tttcacaaatgatttattcttaacc

SEQ ID NO: 1881484 - DNA, 25 bp, Homo sapien
tttttcagtaaatcctgatatacag

SEQ ID NO: 1881485 - DNA, 25 bp, Homo sapien
gtttacagtggtcaattgctttctc

SEQ ID NO: 1881486 - DNA, 25 bp, Homo sapien
ttacagtggtcaattgctttctcac

SEQ ID NO: 1881487 - DNA, 25 bp, Homo sapien
tattgaaacaccattcttcattcag

SEQ ID NO: 1881488 - DNA, 25 bp, Homo sapien
cagagtcctgtagctgtagcactgc

SEQ ID NO: 1881489 - DNA, 25 bp, Homo sapien
tcagtggagctgtgtcctgtagcgc

SEQ ID NO: 1881490 - DNA, 25 bp, Homo sapien
taagtgaagtgcagcacagagtcct

SEQ ID NO: 1881491 - DNA, 25 bp, Homo sapien
caaatgtctatcgagctctgtgagc

SEQ ID NO: 1881492 - DNA, 25 bp, Homo sapien
cacatgatgtttgaatgctcttaca

SEQ ID NO: 1881493 - DNA, 25 bp, Homo sapien
tacatgtagcattattcctcaaagg

SEQ ID NO: 1881494 - DNA, 25 bp, Homo sapien
tgctcttacaaagcaaatctgtaaa

SEQ ID NO: 1881495 - DNA, 25 bp, Homo sapien
aggaaatgactcacatgatgtttga

SEQ ID NO: 1881496 - DNA, 25 bp, Homo sapien
accattctgacatggtactaatgaa

SEQ ID NO: 1881497 - DNA, 25 bp, Homo sapien
cagtcagtaccattctgacatggta

SEQ ID NO: 1881498 - DNA, 25 bp, Homo sapien
tttgatgcagtcagtaccattctga

SEQ ID NO: 1881499 - DNA, 25 bp, Homo sapien
tgcagtcagtaccattctgacatgg

SEQ ID NO: 1881500 - DNA, 25 bp, Homo sapien
ctggaagatccttttgggcattcat

SEQ ID NO: 1881501 - DNA, 25 bp, Homo sapien
ttcataagtataagcagaactgcta

SEQ ID NO: 1881502 - DNA, 25 bp, Homo sapien
tttgggcattcataagtataagcag

SEQ ID NO: 1881503 - DNA, 25 bp, Homo sapien
gaagatccttttgggcattcataag

SEQ ID NO: 1881504 - DNA, 25 bp, Homo sapien
ttttttcagtcatagtctcgctgtg

SEQ ID NO: 1881505 - DNA, 25 bp, Homo sapien
tttcagtcatagtctcgctgtgttg

SEQ ID NO: 1881506 - DNA, 25 bp, Homo sapien
tcatcacaacctccagctcctgcat

SEQ ID NO: 1881507 - DNA, 25 bp, Homo sapien
atttttttcagtcatagtctcgctg

SEQ ID NO: 1881508 - DNA, 25 bp, Homo sapien
gtaaggctttggacaattgatacat

SEQ ID NO: 1881509 - DNA, 25 bp, Homo sapien
agtaaggctttggacaattgataca

SEQ ID NO: 1881510 - DNA, 25 bp, Homo sapien
tgagtaaggctttggacaattgata

SEQ ID NO: 1881511 - DNA, 25 bp, Homo sapien
gagtaaggctttggacaattgatac

SEQ ID NO: 1881512 - DNA, 25 bp, Homo sapien
agggagacatctgactcctagctaa

SEQ ID NO: 1881513 - DNA, 25 bp, Homo sapien
tgatatacgtggactttgaaaatta

SEQ ID NO: 1881514 - DNA, 25 bp, Homo sapien
aagggagacatctgactcctagcta

SEQ ID NO: 1881515 - DNA, 25 bp, Homo sapien
tgaaaattaaggtattcgtacttca

SEQ ID NO: 1881516 - DNA, 25 bp, Homo sapien
tgccctgctataagtgacattctct

SEQ ID NO: 1881517 - DNA, 25 bp, Homo sapien
tctgtctagtcttctaattgccctg

SEQ ID NO: 1881518 - DNA, 25 bp, Homo sapien
cgtgaaatttgtgtcctggcagcct

SEQ ID NO: 1881519 - DNA, 25 bp, Homo sapien
catcattaactcagccaaagactgc

SEQ ID NO: 1881520 - DNA, 25 bp, Homo sapien
gacactaattgtgaggaggccacca

SEQ ID NO: 1881521 - DNA, 25 bp, Homo sapien
tccgagagagacttacttgtccaag

SEQ ID NO: 1881522 - DNA, 25 bp, Homo sapien
gagagctcttaagggcagtagcagc

SEQ ID NO: 1881523 - DNA, 25 bp, Homo sapien
ctcctgaggtaaaagggaatccgag

SEQ ID NO: 1881524 - DNA, 25 bp, Homo sapien
ccagaaccttaaacagggaatcatg

SEQ ID NO: 1881525 - DNA, 25 bp, Homo sapien
tggcaagagatgttctgatgcttct

SEQ ID NO: 1881526 - DNA, 25 bp, Homo sapien
accttaaacagggaatcatggcaag

SEQ ID NO: 1881527 - DNA, 25 bp, Homo sapien
caagagatgttctgatgcttcttcc

SEQ ID NO: 1881528 - DNA, 25 bp, Homo sapien
ttacttctttgatctaatgaatttt

SEQ ID NO: 1881529 - DNA, 25 bp, Homo sapien
tagctgtgagctgaataaggccttc

SEQ ID NO: 1881530 - DNA, 25 bp, Homo sapien
attgcatctcaggtatgaagccgac

SEQ ID NO: 1881531 - DNA, 25 bp, Homo sapien
gagcgtaagacaggcaactcactgg

SEQ ID NO: 1881532 - DNA, 25 bp, Homo sapien
gcaagatcagtaaaccaaacgctgg

SEQ ID NO: 1881533 - DNA, 25 bp, Homo sapien
tgacactggccaattatttctgagc

SEQ ID NO: 1881534 - DNA, 25 bp, Homo sapien
cagacatgtggttgacactggccaa

SEQ ID NO: 1881535 - DNA, 25 bp, Homo sapien
gaagtaatattgctgcagtttccat

SEQ ID NO: 1881536 - DNA, 25 bp, Homo sapien
gtggttgacactggccaattatttc

SEQ ID NO: 1881537 - DNA, 25 bp, Homo sapien
cagcaatctctgtagaagtccaagc

SEQ ID NO: 1881538 - DNA, 25 bp, Homo sapien
caatggcagctatatgtcttgctcc

SEQ ID NO: 1881539 - DNA, 25 bp, Homo sapien
cacatttagtcgaagtcccagtgga

SEQ ID NO: 1881540 - DNA, 25 bp, Homo sapien
tgcacacagccaacgaaagatgttt

SEQ ID NO: 1881541 - DNA, 25 bp, Homo sapien
gattcctgggaattggaattgacct

SEQ ID NO: 1881542 - DNA, 25 bp, Homo sapien
ttttctatacccaaagtagctttga

SEQ ID NO: 1881543 - DNA, 25 bp, Homo sapien
aggattcctgggaattggaattgac

SEQ ID NO: 1881544 - DNA, 25 bp, Homo sapien
ctttgatgacaatgtgctttgatgg

SEQ ID NO: 1881545 - DNA, 25 bp, Homo sapien
aagcattcctcttctgattagtttt

SEQ ID NO: 1881546 - DNA, 25 bp, Homo sapien
aagcttcaatctaatcaaaacacag

SEQ ID NO: 1881547 - DNA, 25 bp, Homo sapien
tcttgggagataagcattcctcttc

SEQ ID NO: 1881548 - DNA, 25 bp, Homo sapien
tgttttctctttacaccaagcttca

SEQ ID NO: 1881549 - DNA, 25 bp, Homo sapien
gtctgccttcattaaaatctctcag

SEQ ID NO: 1881550 - DNA, 25 bp, Homo sapien
atattgtttgcatgacatgtctgcc

SEQ ID NO: 1881551 - DNA, 25 bp, Homo sapien
ctctcagattttgttagtctgagaa

SEQ ID NO: 1881552 - DNA, 25 bp, Homo sapien
cagattttgttagtctgagaaagtt

SEQ ID NO: 1881553 - DNA, 25 bp, Homo sapien
attctccactagacaacattcattt

SEQ ID NO: 1881554 - DNA, 25 bp, Homo sapien
tattctccactagacaacattcatt

SEQ ID NO: 1881555 - DNA, 25 bp, Homo sapien
tttattctccactagacaacattca

SEQ ID NO: 1881556 - DNA, 25 bp, Homo sapien
tatttaactcactgattaatgtgaa

SEQ ID NO: 1881557 - DNA, 25 bp, Homo sapien
agctgctctaaacctgcacacacct

SEQ ID NO: 1881558 - DNA, 25 bp, Homo sapien
gctgctctaaacctgcacacacctg

SEQ ID NO: 1881559 - DNA, 25 bp, Homo sapien
aatatagtcacactaagggtaaatg

SEQ ID NO: 1881560 - DNA, 25 bp, Homo sapien
tagtcacactaagggtaaatgttgc

SEQ ID NO: 1881561 - DNA, 25 bp, Homo sapien
cactaagggtaaatgttgcaacata

SEQ ID NO: 1881562 - DNA, 25 bp, Homo sapien
gggtaaatgttgcaacatatgaatt

SEQ ID NO: 1881563 - DNA, 25 bp, Homo sapien
tacacaggactagttaacaattaca

SEQ ID NO: 1881564 - DNA, 25 bp, Homo sapien
tttagttactacaggcaacatggtg

SEQ ID NO: 1881565 - DNA, 25 bp, Homo sapien
caatatctatgcctgtgaaaggatc

SEQ ID NO: 1881566 - DNA, 25 bp, Homo sapien
ggcacatgggatatacaatacgacg

SEQ ID NO: 1881567 - DNA, 25 bp, Homo sapien
catcaagagtgttagaaacctatgt

SEQ ID NO: 1881568 - DNA, 25 bp, Homo sapien
gagcctgtgaacgaagctattgatt

SEQ ID NO: 1881569 - DNA, 25 bp, Homo sapien
tctagtttactagtgacagtcagaa

SEQ ID NO: 1881570 - DNA, 25 bp, Homo sapien
gttgacaatataacaagagcctgtg

SEQ ID NO: 1881571 - DNA, 25 bp, Homo sapien
gagcagaggatccagacttgactcc

SEQ ID NO: 1881572 - DNA, 25 bp, Homo sapien
tgactccccaggtgtaagagaagag

SEQ ID NO: 1881573 - DNA, 25 bp, Homo sapien
ctcaagtacacaggttccgttgctg

SEQ ID NO: 1881574 - DNA, 25 bp, Homo sapien
taaataaatatggagcagaggatcc

SEQ ID NO: 1881575 - DNA, 25 bp, Homo sapien
ccacaacccgagctgccattttcat

SEQ ID NO: 1881576 - DNA, 25 bp, Homo sapien
ctgccatggatatctgacagtcctt

SEQ ID NO: 1881577 - DNA, 25 bp, Homo sapien
acagccaccacaacccgagctgcca

SEQ ID NO: 1881578 - DNA, 25 bp, Homo sapien
ccatggatatctgacagtccttcat

SEQ ID NO: 1881579 - DNA, 25 bp, Homo sapien
ccttttatcatctttcaatggagga

SEQ ID NO: 1881580 - DNA, 25 bp, Homo sapien
tttatcatctttcaatggaggactt

SEQ ID NO: 1881581 - DNA, 25 bp, Homo sapien
atcatctttcaatggaggacttggc

SEQ ID NO: 1881582 - DNA, 25 bp, Homo sapien
tcatctttcaatggaggacttggct

SEQ ID NO: 1881583 - DNA, 25 bp, Homo sapien
cctaggaggcttctgattacggtta

SEQ ID NO: 1881584 - DNA, 25 bp, Homo sapien
gattacggttaatgtctggacatgc

SEQ ID NO: 1881585 - DNA, 25 bp, Homo sapien
ccaaccattagccaaggaggcttgc

SEQ ID NO: 1881586 - DNA, 25 bp, Homo sapien
ggaggcttgcaaccctaggaggctt

SEQ ID NO: 1881587 - DNA, 25 bp, Homo sapien
taggcttcaaaatccgtacacttcc

SEQ ID NO: 1881588 - DNA, 25 bp, Homo sapien
taaatattcagaccctagcaatacc

SEQ ID NO: 1881589 - DNA, 25 bp, Homo sapien
gattccttaacagagctacttcatt

SEQ ID NO: 1881590 - DNA, 25 bp, Homo sapien
tccaagacaaggtaggaatccactt

SEQ ID NO: 1881591 - DNA, 25 bp, Homo sapien
tcaaaatgcccaagtgtagagggag

SEQ ID NO: 1881592 - DNA, 25 bp, Homo sapien
gaacagactattacatacaccaata

SEQ ID NO: 1881593 - DNA, 25 bp, Homo sapien
tccctcctgcgaccatgtgagatgt

SEQ ID NO: 1881594 - DNA, 25 bp, Homo sapien
atgggtaaactttagaggacataag

SEQ ID NO: 1881595 - DNA, 25 bp, Homo sapien
ccaagatccaaagcttggtcctttt

SEQ ID NO: 1881596 - DNA, 25 bp, Homo sapien
accaagatccaaagcttggtccttt

SEQ ID NO: 1881597 - DNA, 25 bp, Homo sapien
tgctttctatgattaattggagttt

SEQ ID NO: 1881598 - DNA, 25 bp, Homo sapien
tctctggggtagctgcgaagctcta

SEQ ID NO: 1881599 - DNA, 25 bp, Homo sapien
gattcatgaattacactcataacac

SEQ ID NO: 1881600 - DNA, 25 bp, Homo sapien
gcgtccagaaaacaggtccatgact

SEQ ID NO: 1881601 - DNA, 25 bp, Homo sapien
tcacatcacgacaggttggacatta

SEQ ID NO: 1881602 - DNA, 25 bp, Homo sapien
tccatcagtcgtctcaatgagccct

SEQ ID NO: 1881603 - DNA, 25 bp, Homo sapien
agtcgtctcaatgagcccttcctgg

SEQ ID NO: 1881604 - DNA, 25 bp, Homo sapien
actccccagcccttgtgataagcct

SEQ ID NO: 1881605 - DNA, 25 bp, Homo sapien
tcagtcgtctcaatgagcccttcct

SEQ ID NO: 1881606 - DNA, 25 bp, Homo sapien
acggcacaaacagagccaggttcca

SEQ ID NO: 1881607 - DNA, 25 bp, Homo sapien
gaccaaagacggcacaaacagagcc

SEQ ID NO: 1881608 - DNA, 25 bp, Homo sapien
agaccaaagacggcacaaacagagc

SEQ ID NO: 1881609 - DNA, 25 bp, Homo sapien
aagacggcacaaacagagccaggtt

SEQ ID NO: 1881610 - DNA, 25 bp, Homo sapien
tataggcgtcggtgtggcaaaccgc

SEQ ID NO: 1881611 - DNA, 25 bp, Homo sapien
tcagctcccctcagggtataggcgt

SEQ ID NO: 1881612 - DNA, 25 bp, Homo sapien
ggttcccatgtaacgcaaaattgtc

SEQ ID NO: 1881613 - DNA, 25 bp, Homo sapien
gatcttgattcgaacttcatgagcc

SEQ ID NO: 1881614 - DNA, 25 bp, Homo sapien
tagaatgggcttatatcaggaatac

SEQ ID NO: 1881615 - DNA, 25 bp, Homo sapien
tggatagaatgggcttatatcagga

SEQ ID NO: 1881616 - DNA, 25 bp, Homo sapien
gatagaatgggcttatatcaggaat

SEQ ID NO: 1881617 - DNA, 25 bp, Homo sapien
tctggatagaatgggcttatatcag

SEQ ID NO: 1881618 - DNA, 25 bp, Homo sapien
ttctctactacagcgaaggacacca

SEQ ID NO: 1881619 - DNA, 25 bp, Homo sapien
tcttctctactacagcgaaggacac

SEQ ID NO: 1881620 - DNA, 25 bp, Homo sapien
tttcttctctactacagcgaaggac

SEQ ID NO: 1881621 - DNA, 25 bp, Homo sapien
ttttcttctctactacagcgaagga

SEQ ID NO: 1881622 - DNA, 25 bp, Homo sapien
tgccatatctgaaagatctgggcta

SEQ ID NO: 1881623 - DNA, 25 bp, Homo sapien
gagtggcccagactgccatatctga

SEQ ID NO: 1881624 - DNA, 25 bp, Homo sapien
aaagatctgggctattggtttcatt

SEQ ID NO: 1881625 - DNA, 25 bp, Homo sapien
tctgaaagatctgggctattggttt

SEQ ID NO: 1881626 - DNA, 25 bp, Homo sapien
tctctttcagtacgcctgagaataa

SEQ ID NO: 1881627 - DNA, 25 bp, Homo sapien
gattctctttcagtacgcctgagaa

SEQ ID NO: 1881628 - DNA, 25 bp, Homo sapien
ctttcagtacgcctgagaataactt

SEQ ID NO: 1881629 - DNA, 25 bp, Homo sapien
agtacgcctgagaataacttcactg

SEQ ID NO: 1881630 - DNA, 25 bp, Homo sapien
gggtcacccgcaaagtcattactta

SEQ ID NO: 1881631 - DNA, 25 bp, Homo sapien
gtcacccgcaaagtcattacttatt

SEQ ID NO: 1881632 - DNA, 25 bp, Homo sapien
ctgggtcacccgcaaagtcattact

SEQ ID NO: 1881633 - DNA, 25 bp, Homo sapien
cccgcaaagtcattacttattctca

SEQ ID NO: 1881634 - DNA, 25 bp, Homo sapien
ttctgcccaggtatactgctctcct

SEQ ID NO: 1881635 - DNA, 25 bp, Homo sapien
tttctgcccaggtatactgctctcc

SEQ ID NO: 1881636 - DNA, 25 bp, Homo sapien
ctttctgcccaggtatactgctctc

SEQ ID NO: 1881637 - DNA, 25 bp, Homo sapien
caaagcatcgtaagtgccacaagga

SEQ ID NO: 1881638 - DNA, 25 bp, Homo sapien
aattcaaagcatcgtaagtgccaca

SEQ ID NO: 1881639 - DNA, 25 bp, Homo sapien
tcgtaagtgccacaaggatgaccat

SEQ ID NO: 1881640 - DNA, 25 bp, Homo sapien
gatttgttagtggaactggattatc

SEQ ID NO: 1881641 - DNA, 25 bp, Homo sapien
taacagcagttagggtctccactcc

SEQ ID NO: 1881642 - DNA, 25 bp, Homo sapien
gacatggccaggaagatcaacacaa

SEQ ID NO: 1881643 - DNA, 25 bp, Homo sapien
tgaccacaccatgcatgtatgcctt

SEQ ID NO: 1881644 - DNA, 25 bp, Homo sapien
tgtatgcctttcttccaaggacccc

SEQ ID NO: 1881645 - DNA, 25 bp, Homo sapien
tctttgcatattcgcttcctctagc

SEQ ID NO: 1881646 - DNA, 25 bp, Homo sapien
tgcatattcgcttcctctagcagca

SEQ ID NO: 1881647 - DNA, 25 bp, Homo sapien
ttccttctttgcatattcgcttcct

SEQ ID NO: 1881648 - DNA, 25 bp, Homo sapien
ccttctttgcatattcgcttcctct

SEQ ID NO: 1881649 - DNA, 25 bp, Homo sapien
cccaaatagttaagccatcagcaaa

SEQ ID NO: 1881650 - DNA, 25 bp, Homo sapien
cctgatccaagcttttgtcatcctc

SEQ ID NO: 1881651 - DNA, 25 bp, Homo sapien
tcagtacaaccaaccaaggtgctca

SEQ ID NO: 1881652 - DNA, 25 bp, Homo sapien
cacttaggcatcattgctggtaaca

SEQ ID NO: 1881653 - DNA, 25 bp, Homo sapien
tctgttgagggttcgtatctgagca

SEQ ID NO: 1881654 - DNA, 25 bp, Homo sapien
ctctgttgagggttcgtatctgagc

SEQ ID NO: 1881655 - DNA, 25 bp, Homo sapien
cctctgttgagggttcgtatctgag

SEQ ID NO: 1881656 - DNA, 25 bp, Homo sapien
ctccacattcccctatcatctcaga

SEQ ID NO: 1881657 - DNA, 25 bp, Homo sapien
tcagtgttgatacattcgttgaaat

SEQ ID NO: 1881658 - DNA, 25 bp, Homo sapien
acattcccctatcatctcagacaag

SEQ ID NO: 1881659 - DNA, 25 bp, Homo sapien
tggaatcagtgttgatacattcgtt

SEQ ID NO: 1881660 - DNA, 25 bp, Homo sapien
tgaaaaattcctctgggagtttgct

SEQ ID NO: 1881661 - DNA, 25 bp, Homo sapien
cagaaacatagagtttgaaaaattc

SEQ ID NO: 1881662 - DNA, 25 bp, Homo sapien
aacatagagtttgaaaaattcctct

SEQ ID NO: 1881663 - DNA, 25 bp, Homo sapien
cctctgggagtttgctaaaggccat

SEQ ID NO: 1881664 - DNA, 25 bp, Homo sapien
gctacaataaactttggcaccactc

SEQ ID NO: 1881665 - DNA, 25 bp, Homo sapien
aaaagctatgctacaataaactttg

SEQ ID NO: 1881666 - DNA, 25 bp, Homo sapien
gctatgctacaataaactttggcac

SEQ ID NO: 1881667 - DNA, 25 bp, Homo sapien
acaataaactttggcaccactcgga

SEQ ID NO: 1881668 - DNA, 25 bp, Homo sapien
gaagtcaattatagaggatatgaga

SEQ ID NO: 1881669 - DNA, 25 bp, Homo sapien
taaacaatagtcaccatagctaaag

SEQ ID NO: 1881670 - DNA, 25 bp, Homo sapien
caggctatattatatctccttagaa

SEQ ID NO: 1881671 - DNA, 25 bp, Homo sapien
acctgtacccaaaacaggcaaagca

SEQ ID NO: 1881672 - DNA, 25 bp, Homo sapien
gctgaatcaatccttttaaaagctt

SEQ ID NO: 1881673 - DNA, 25 bp, Homo sapien
gcccaactttgcttagctgaatcaa

SEQ ID NO: 1881674 - DNA, 25 bp, Homo sapien
tactgctaaacctatcttcaattct

SEQ ID NO: 1881675 - DNA, 25 bp, Homo sapien
aaaattctcccagcaaatactagat

SEQ ID NO: 1881676 - DNA, 25 bp, Homo sapien
aaattccaacatacatcctacgagg

SEQ ID NO: 1881677 - DNA, 25 bp, Homo sapien
gcttcagttatgtatgctgaaacac

SEQ ID NO: 1881678 - DNA, 25 bp, Homo sapien
catacatcctacgaggcttacaatt

SEQ ID NO: 1881679 - DNA, 25 bp, Homo sapien
cagttatgtatgctgaaacaccaga

SEQ ID NO: 1881680 - DNA, 25 bp, Homo sapien
acatctttacttttcgcagaattag

SEQ ID NO: 1881681 - DNA, 25 bp, Homo sapien
catgtcgaatgtccggagctagaag

SEQ ID NO: 1881682 - DNA, 25 bp, Homo sapien
tttgatgatgtaccgaacacactgc

SEQ ID NO: 1881683 - DNA, 25 bp, Homo sapien
cgcagaattagtatccagtccaaaa

SEQ ID NO: 1881684 - DNA, 25 bp, Homo sapien
cgaataacgtttgatagttgtgata

SEQ ID NO: 1881685 - DNA, 25 bp, Homo sapien
tcttggttcgaataacgtttgatag

SEQ ID NO: 1881686 - DNA, 25 bp, Homo sapien
gatggtgtgttcttggttcgaataa

SEQ ID NO: 1881687 - DNA, 25 bp, Homo sapien
taacgtttgatagttgtgataatct

SEQ ID NO: 1881688 - DNA, 25 bp, Homo sapien
catagggctggtgtcacttccttgg

SEQ ID NO: 1881689 - DNA, 25 bp, Homo sapien
gactgccatagctactcattagtga

SEQ ID NO: 1881690 - DNA, 25 bp, Homo sapien
cattagtgagcatagggctggtgtc

SEQ ID NO: 1881691 - DNA, 25 bp, Homo sapien
gccaaaacgtctgcttcagtcttga

SEQ ID NO: 1881692 - DNA, 25 bp, Homo sapien
aaaacaccaagaggatctgcatttg

SEQ ID NO: 1881693 - DNA, 25 bp, Homo sapien
aaacaccaagaggatctgcatttgc

SEQ ID NO: 1881694 - DNA, 25 bp, Homo sapien
caaaacaccaagaggatctgcattt

SEQ ID NO: 1881695 - DNA, 25 bp, Homo sapien
tcacacaagtgattgcctgatccag

SEQ ID NO: 1881696 - DNA, 25 bp, Homo sapien
caaatcacacaagtgattgcctgat

SEQ ID NO: 1881697 - DNA, 25 bp, Homo sapien
cttcaaatcacacaagtgattgcct

SEQ ID NO: 1881698 - DNA, 25 bp, Homo sapien
caagtgattgcctgatccagtgact

SEQ ID NO: 1881699 - DNA, 25 bp, Homo sapien
ttttcatttctgattctcgccagga

SEQ ID NO: 1881700 - DNA, 25 bp, Homo sapien
ctgattctcgccaggacttctgata

SEQ ID NO: 1881701 - DNA, 25 bp, Homo sapien
tttcatttctgattctcgccaggac

SEQ ID NO: 1881702 - DNA, 25 bp, Homo sapien
ttggccagagttggctagtttttcc

SEQ ID NO: 1881703 - DNA, 25 bp, Homo sapien
tgcaatttcctctggagtgtctaac

SEQ ID NO: 1881704 - DNA, 25 bp, Homo sapien
cgtgcaatttcctctggagtgtcta

SEQ ID NO: 1881705 - DNA, 25 bp, Homo sapien
gtgcaatttcctctggagtgtctaa

SEQ ID NO: 1881706 - DNA, 25 bp, Homo sapien
cagacatgtgtttgtcatacttttc

SEQ ID NO: 1881707 - DNA, 25 bp, Homo sapien
ttttaaaaccacgatcacaggtatc

SEQ ID NO: 1881708 - DNA, 25 bp, Homo sapien
tttgtatgttcagacatgtgtttgt

SEQ ID NO: 1881709 - DNA, 25 bp, Homo sapien
taaaaccacgatcacaggtatcaca

SEQ ID NO: 1881710 - DNA, 25 bp, Homo sapien
catcatactttcgtggataataaga

SEQ ID NO: 1881711 - DNA, 25 bp, Homo sapien
gtaagctgaagtctgtgaattttgc

SEQ ID NO: 1881712 - DNA, 25 bp, Homo sapien
cttctgatgccgaggaaacctatca

SEQ ID NO: 1881713 - DNA, 25 bp, Homo sapien
aggacttctgatgccgaggaaacct

SEQ ID NO: 1881714 - DNA, 25 bp, Homo sapien
aattccaaggctggccgctgggttg

SEQ ID NO: 1881715 - DNA, 25 bp, Homo sapien
caataccacgatgtggaagcatgga

SEQ ID NO: 1881716 - DNA, 25 bp, Homo sapien
agaacatccagctgtcccgcggcgg

SEQ ID NO: 1881717 - DNA, 25 bp, Homo sapien
ggaaggctttgacccggctgcggga

SEQ ID NO: 1881718 - DNA, 25 bp, Homo sapien
agagcccaagagccattgcagagcc

SEQ ID NO: 1881719 - DNA, 25 bp, Homo sapien
cttacaaatggttaaaccttcagat

SEQ ID NO: 1881720 - DNA, 25 bp, Homo sapien
aatggttaaaccttcagatgcaaac

SEQ ID NO: 1881721 - DNA, 25 bp, Homo sapien
caagagccattgcagagccattcct

SEQ ID NO: 1881722 - DNA, 25 bp, Homo sapien
gatcctcctgtccataaaactcttt

SEQ ID NO: 1881723 - DNA, 25 bp, Homo sapien
aactctttacctcagcaggtttttg

SEQ ID NO: 1881724 - DNA, 25 bp, Homo sapien
aggcttcacaaaggaatttctcgaa

SEQ ID NO: 1881725 - DNA, 25 bp, Homo sapien
caggtttttgtgataccggcctcat

SEQ ID NO: 1881726 - DNA, 25 bp, Homo sapien
ttggggaaactgacatatcgaatat

SEQ ID NO: 1881727 - DNA, 25 bp, Homo sapien
gggaaactgacatatcgaatattgt

SEQ ID NO: 1881728 - DNA, 25 bp, Homo sapien
atattgtcaataattccttctactt

SEQ ID NO: 1881729 - DNA, 25 bp, Homo sapien
gaaactgacatatcgaatattgtca

SEQ ID NO: 1881730 - DNA, 25 bp, Homo sapien
tgtccacatttcttagagcaaataa

SEQ ID NO: 1881731 - DNA, 25 bp, Homo sapien
tttccggtagagcttgtccacattt

SEQ ID NO: 1881732 - DNA, 25 bp, Homo sapien
ttttccggtagagcttgtccacatt

SEQ ID NO: 1881733 - DNA, 25 bp, Homo sapien
actgtctcttctttctgatgtagca

SEQ ID NO: 1881734 - DNA, 25 bp, Homo sapien
ctgtctcttctttctgatgtagcat

SEQ ID NO: 1881735 - DNA, 25 bp, Homo sapien
taacaagaacctgagcaatccaact

SEQ ID NO: 1881736 - DNA, 25 bp, Homo sapien
gaacttaatgtctatatctcagggc

SEQ ID NO: 1881737 - DNA, 25 bp, Homo sapien
ttctgttagtgggacaagaacccag

SEQ ID NO: 1881738 - DNA, 25 bp, Homo sapien
tattcttagaactgatccctggtga

SEQ ID NO: 1881739 - DNA, 25 bp, Homo sapien
gtcctcttcatctatgattatggag

SEQ ID NO: 1881740 - DNA, 25 bp, Homo sapien
tgagtgaattctgttgtaagacctt

SEQ ID NO: 1881741 - DNA, 25 bp, Homo sapien
tgaattctgttgtaagacctttttg

SEQ ID NO: 1881742 - DNA, 25 bp, Homo sapien
cttcatctatgattatggaggaaat

SEQ ID NO: 1881743 - DNA, 25 bp, Homo sapien
tcaagagaccgggattccatttttc

SEQ ID NO: 1881744 - DNA, 25 bp, Homo sapien
ttgaggggtgcagcttacaagaaac

SEQ ID NO: 1881745 - DNA, 25 bp, Homo sapien
tatagcagcttccaagggaagggtt

SEQ ID NO: 1881746 - DNA, 25 bp, Homo sapien
tatctaaaacaacggttgtcaagag

SEQ ID NO: 1881747 - DNA, 25 bp, Homo sapien
tatgcctaaatcagacaccagcaaa

SEQ ID NO: 1881748 - DNA, 25 bp, Homo sapien
agcaaaaggagacacgtccagaaga

SEQ ID NO: 1881749 - DNA, 25 bp, Homo sapien
gacacgtccagaagaagtagctgca

SEQ ID NO: 1881750 - DNA, 25 bp, Homo sapien
tcctgaatatagttatgcctaaatc

SEQ ID NO: 1881751 - DNA, 25 bp, Homo sapien
ccggggcttattgcctcgatttcta

SEQ ID NO: 1881752 - DNA, 25 bp, Homo sapien
gtagccatatatgtacccggggctt

SEQ ID NO: 1881753 - DNA, 25 bp, Homo sapien
tgtacccggggcttattgcctcgat

SEQ ID NO: 1881754 - DNA, 25 bp, Homo sapien
cttattgcctcgatttctatttcca

SEQ ID NO: 1881755 - DNA, 25 bp, Homo sapien
tgttgttgtcgttaataatgttgat

SEQ ID NO: 1881756 - DNA, 25 bp, Homo sapien
gttgttgtcgttaataatgttgatt

SEQ ID NO: 1881757 - DNA, 25 bp, Homo sapien
gttgtcgttaataatgttgatttct

SEQ ID NO: 1881758 - DNA, 25 bp, Homo sapien
tgttgtcgttaataatgttgatttc

SEQ ID NO: 1881759 - DNA, 25 bp, Homo sapien
cctgttcctccatacttgtcggcat

SEQ ID NO: 1881760 - DNA, 25 bp, Homo sapien
gaagggcaattccagagctatagag

SEQ ID NO: 1881761 - DNA, 25 bp, Homo sapien
aaagcgtactcagaagggcaattcc

SEQ ID NO: 1881762 - DNA, 25 bp, Homo sapien
ccagagctatagaggatcttgtcct

SEQ ID NO: 1881763 - DNA, 25 bp, Homo sapien
cacattctggaaagcgtactcagaa

SEQ ID NO: 1881764 - DNA, 25 bp, Homo sapien
tctctggcacaagcccttcttggtg

SEQ ID NO: 1881765 - DNA, 25 bp, Homo sapien
tcttggatccacttgcagcgaatgt

SEQ ID NO: 1881766 - DNA, 25 bp, Homo sapien
tctcttgctaactgtggtggtgaag

SEQ ID NO: 1881767 - DNA, 25 bp, Homo sapien
ggtggtgaagggtgtgcattcttga

SEQ ID NO: 1881768 - DNA, 25 bp, Homo sapien
gctacattgaggtttggaggtactc

SEQ ID NO: 1881769 - DNA, 25 bp, Homo sapien
agtttgcactgtatctcttccctcg

SEQ ID NO: 1881770 - DNA, 25 bp, Homo sapien
tgtagcttacacaagtaggaaaaac

SEQ ID NO: 1881771 - DNA, 25 bp, Homo sapien
gaggtactcatcacagtacaatcag

SEQ ID NO: 1881772 - DNA, 25 bp, Homo sapien
attcagtcagggaccactgaactat

SEQ ID NO: 1881773 - DNA, 25 bp, Homo sapien
ttcagtcagggaccactgaactatt

SEQ ID NO: 1881774 - DNA, 25 bp, Homo sapien
atctgttttccgtaatggagagtga

SEQ ID NO: 1881775 - DNA, 25 bp, Homo sapien
gttttccgtaatggagagtgagcag

SEQ ID NO: 1881776 - DNA, 25 bp, Homo sapien
ctgttttccgtaatggagagtgagc

SEQ ID NO: 1881777 - DNA, 25 bp, Homo sapien
tgttttccgtaatggagagtgagca

SEQ ID NO: 1881778 - DNA, 25 bp, Homo sapien
caggagactttgcttggtgcaccat

SEQ ID NO: 1881779 - DNA, 25 bp, Homo sapien
tccaggagactttgcttggtgcacc

SEQ ID NO: 1881780 - DNA, 25 bp, Homo sapien
ccaggagactttgcttggtgcacca

SEQ ID NO: 1881781 - DNA, 25 bp, Homo sapien
cttccaggagactttgcttggtgca

SEQ ID NO: 1881782 - DNA, 25 bp, Homo sapien
ttcctactctctccctatcacgtga

SEQ ID NO: 1881783 - DNA, 25 bp, Homo sapien
tattccactactagttatcctagaa

SEQ ID NO: 1881784 - DNA, 25 bp, Homo sapien
ctgcttctctattccactactagtt

SEQ ID NO: 1881785 - DNA, 25 bp, Homo sapien
tctccctatcacgtgaaccttcatc

SEQ ID NO: 1881786 - DNA, 25 bp, Homo sapien
taatttcgatataccacttaatcat

SEQ ID NO: 1881787 - DNA, 25 bp, Homo sapien
gaacacaagttaatttcgatatacc

SEQ ID NO: 1881788 - DNA, 25 bp, Homo sapien
gtgttagtaggtcagaacacaagtt

SEQ ID NO: 1881789 - DNA, 25 bp, Homo sapien
tagtaggtcagaacacaagttaatt

SEQ ID NO: 1881790 - DNA, 25 bp, Homo sapien
cataactacccaataaatggtggca

SEQ ID NO: 1881791 - DNA, 25 bp, Homo sapien
tagaagatacggaaatcactatgga

SEQ ID NO: 1881792 - DNA, 25 bp, Homo sapien
cctctaactatcaagacttctgtgc

SEQ ID NO: 1881793 - DNA, 25 bp, Homo sapien
tactagtagtgaaaaccagtgcaat

SEQ ID NO: 1881794 - DNA, 25 bp, Homo sapien
aggcaggagaatgagatctgcagac

SEQ ID NO: 1881795 - DNA, 25 bp, Homo sapien
gaggcaggagaatgagatctgcaga

SEQ ID NO: 1881796 - DNA, 25 bp, Homo sapien
ggcaggagaatgagatctgcagaca

SEQ ID NO: 1881797 - DNA, 25 bp, Homo sapien
gctctgagctctgccggtttgaaac

SEQ ID NO: 1881798 - DNA, 25 bp, Homo sapien
tcttttctgcatatgctctgagctc

SEQ ID NO: 1881799 - DNA, 25 bp, Homo sapien
aattctagtaagatagcttttcctc

SEQ ID NO: 1881800 - DNA, 25 bp, Homo sapien
acttggtaaattctagtaagatagc

SEQ ID NO: 1881801 - DNA, 25 bp, Homo sapien
tagactaaaactgacctgttttctg

SEQ ID NO: 1881802 - DNA, 25 bp, Homo sapien
tgtaagaacggtagaaatgtaggat

SEQ ID NO: 1881803 - DNA, 25 bp, Homo sapien
tgtgcccagttgcaaagcaagtaat

SEQ ID NO: 1881804 - DNA, 25 bp, Homo sapien
cattattaccaattaaagcttaaga

SEQ ID NO: 1881805 - DNA, 25 bp, Homo sapien
tttgcgttgcttcttggaaatgaat

SEQ ID NO: 1881806 - DNA, 25 bp, Homo sapien
cgttgcttcttggaaatgaatcaat

SEQ ID NO: 1881807 - DNA, 25 bp, Homo sapien
gcttcttggaaatgaatcaattcat

SEQ ID NO: 1881808 - DNA, 25 bp, Homo sapien
ttgcgttgcttcttggaaatgaatc

SEQ ID NO: 1881809 - DNA, 25 bp, Homo sapien
cacttacctcaccatgtaggcattt

SEQ ID NO: 1881810 - DNA, 25 bp, Homo sapien
tgtttgaatgtagctccatgggtga

SEQ ID NO: 1881811 - DNA, 25 bp, Homo sapien
tacaatgccaacactagtcacacac

SEQ ID NO: 1881812 - DNA, 25 bp, Homo sapien
aaaaggtagtgtatatcaggttcag

SEQ ID NO: 1881813 - DNA, 25 bp, Homo sapien
ccccatggaacagtattcagaatta

SEQ ID NO: 1881814 - DNA, 25 bp, Homo sapien
gaacagtattcagaattattttgtc

SEQ ID NO: 1881815 - DNA, 25 bp, Homo sapien
ccatggaacagtattcagaattatt

SEQ ID NO: 1881816 - DNA, 25 bp, Homo sapien
tattcagaattattttgtcttgtgg

SEQ ID NO: 1881817 - DNA, 25 bp, Homo sapien
ttactgtatatgagtggctgcagaa

SEQ ID NO: 1881818 - DNA, 25 bp, Homo sapien
taatggatgcagttttacacagata

SEQ ID NO: 1881819 - DNA, 25 bp, Homo sapien
cttcatttctaatggatgcagtttt

SEQ ID NO: 1881820 - DNA, 25 bp, Homo sapien
aatggatgcagttttacacagataa

SEQ ID NO: 1881821 - DNA, 25 bp, Homo sapien
atggatgcagttttacacagataat

SEQ ID NO: 1881822 - DNA, 25 bp, Homo sapien
ggtgaggggagtacttgtactgcac

SEQ ID NO: 1881823 - DNA, 25 bp, Homo sapien
tttttattgctgggactgggtgagg

SEQ ID NO: 1881824 - DNA, 25 bp, Homo sapien
tgaggggagtacttgtactgcacct

SEQ ID NO: 1881825 - DNA, 25 bp, Homo sapien
actgggtgaggggagtacttgtact

SEQ ID NO: 1881826 - DNA, 25 bp, Homo sapien
tggagaaagtaaccttggcttgagt

SEQ ID NO: 1881827 - DNA, 25 bp, Homo sapien
gcttgagtattcttagagctgacat

SEQ ID NO: 1881828 - DNA, 25 bp, Homo sapien
ttctcaactctatccatagcatcca

SEQ ID NO: 1881829 - DNA, 25 bp, Homo sapien
ctctttctcaactctatccatagca

SEQ ID NO: 1881830 - DNA, 25 bp, Homo sapien
tccatatacctaagtggagaacggt

SEQ ID NO: 1881831 - DNA, 25 bp, Homo sapien
tgcccttccatatacctaagtggag

SEQ ID NO: 1881832 - DNA, 25 bp, Homo sapien
cagacttagtgacaactctgtgccc

SEQ ID NO: 1881833 - DNA, 25 bp, Homo sapien
agtgacaactctgtgcccttccata

SEQ ID NO: 1881834 - DNA, 25 bp, Homo sapien
tgttctgaaactaatggtttcagtt

SEQ ID NO: 1881835 - DNA, 25 bp, Homo sapien
gctttctaatccaccactctccttc

SEQ ID NO: 1881836 - DNA, 25 bp, Homo sapien
ctgaaactaatggtttcagtttaag

SEQ ID NO: 1881837 - DNA, 25 bp, Homo sapien
atgtgttctgaaactaatggtttca

SEQ ID NO: 1881838 - DNA, 25 bp, Homo sapien
ttatgcttgtagctgaagctgcagc

SEQ ID NO: 1881839 - DNA, 25 bp, Homo sapien
aagctgcagctgaagatcctgctgt

SEQ ID NO: 1881840 - DNA, 25 bp, Homo sapien
tgaagctgcagctgaagatcctgct

SEQ ID NO: 1881841 - DNA, 25 bp, Homo sapien
gctgcagctgaagatcctgctgttt

SEQ ID NO: 1881842 - DNA, 25 bp, Homo sapien
ctaagttcttttcatggtactcaaa

SEQ ID NO: 1881843 - DNA, 25 bp, Homo sapien
cttttcatggtactcaaagagtatt

SEQ ID NO: 1881844 - DNA, 25 bp, Homo sapien
tcatggtactcaaagagtattttgc

SEQ ID NO: 1881845 - DNA, 25 bp, Homo sapien
taagttcttttcatggtactcaaag

SEQ ID NO: 1881846 - DNA, 25 bp, Homo sapien
acgcagggctcagccacttcagtca

SEQ ID NO: 1881847 - DNA, 25 bp, Homo sapien
tcctgctgcactgtctattcagaac

SEQ ID NO: 1881848 - DNA, 25 bp, Homo sapien
cttgggagacagctcgaatacagca

SEQ ID NO: 1881849 - DNA, 25 bp, Homo sapien
ctattcagaaccttacacttgggag

SEQ ID NO: 1881850 - DNA, 25 bp, Homo sapien
tcaagtgcactgattgttgatacaa

SEQ ID NO: 1881851 - DNA, 25 bp, Homo sapien
aagtgcactgattgttgatacaagt

SEQ ID NO: 1881852 - DNA, 25 bp, Homo sapien
caagtgcactgattgttgatacaag

SEQ ID NO: 1881853 - DNA, 25 bp, Homo sapien
tagcctgaagtttttcaactctgtt

SEQ ID NO: 1881854 - DNA, 25 bp, Homo sapien
tctagcctgaagtttttcaactctg

SEQ ID NO: 1881855 - DNA, 25 bp, Homo sapien
aacatatctagcctgaagtttttca

SEQ ID NO: 1881856 - DNA, 25 bp, Homo sapien
catatctagcctgaagtttttcaac

SEQ ID NO: 1881857 - DNA, 25 bp, Homo sapien
ttcttttgagtccacctccgctaca

SEQ ID NO: 1881858 - DNA, 25 bp, Homo sapien
taggttgtggcatttggcaagttcc

SEQ ID NO: 1881859 - DNA, 25 bp, Homo sapien
taacttgcatctggagagtaaggca

SEQ ID NO: 1881860 - DNA, 25 bp, Homo sapien
aaggaaagactttctacccagctgt

SEQ ID NO: 1881861 - DNA, 25 bp, Homo sapien
agagcctgaggtcatagatactctg

SEQ ID NO: 1881862 - DNA, 25 bp, Homo sapien
taagagcctgaggtcatagatactc

SEQ ID NO: 1881863 - DNA, 25 bp, Homo sapien
ttttaagagcctgaggtcatagata

SEQ ID NO: 1881864 - DNA, 25 bp, Homo sapien
ttaagagcctgaggtcatagatact

SEQ ID NO: 1881865 - DNA, 25 bp, Homo sapien
tagaataattgtgtcaagttctcca

SEQ ID NO: 1881866 - DNA, 25 bp, Homo sapien
catggagatcatttcccgtttaaat

SEQ ID NO: 1881867 - DNA, 25 bp, Homo sapien
gttctggtggacttggttattcatg

SEQ ID NO: 1881868 - DNA, 25 bp, Homo sapien
gttattcatggagatcatttcccgt

SEQ ID NO: 1881869 - DNA, 25 bp, Homo sapien
cgaataaacgcatagttcctgctga

SEQ ID NO: 1881870 - DNA, 25 bp, Homo sapien
tgctgatttggcaggttccgatgcc

SEQ ID NO: 1881871 - DNA, 25 bp, Homo sapien
gccaggatcccatatttcacgtaag

SEQ ID NO: 1881872 - DNA, 25 bp, Homo sapien
ttccgatgcctagaaccgatatgcg

SEQ ID NO: 1881873 - DNA, 25 bp, Homo sapien
actgaagtttagtgagtcttcagcc

SEQ ID NO: 1881874 - DNA, 25 bp, Homo sapien
ttcctggcagtattgggaatgtaac

SEQ ID NO: 1881875 - DNA, 25 bp, Homo sapien
ctgcttgcaagcacccgcaatggct

SEQ ID NO: 1881876 - DNA, 25 bp, Homo sapien
aaaggctgctgaagataacctcatg

SEQ ID NO: 1881877 - DNA, 25 bp, Homo sapien
gataactctaataacatcaggttct

SEQ ID NO: 1881878 - DNA, 25 bp, Homo sapien
ccggaggctgtaacgataactctaa

SEQ ID NO: 1881879 - DNA, 25 bp, Homo sapien
tcaatgagttcaccggaggctgtaa

SEQ ID NO: 1881880 - DNA, 25 bp, Homo sapien
tgtacttcccatgtcaatgagttca

SEQ ID NO: 1881881 - DNA, 25 bp, Homo sapien
ctactttacttcagccacagctata

SEQ ID NO: 1881882 - DNA, 25 bp, Homo sapien
ttacttcagccacagctatagcatg

SEQ ID NO: 1881883 - DNA, 25 bp, Homo sapien
acttcagccacagctatagcatgcc

SEQ ID NO: 1881884 - DNA, 25 bp, Homo sapien
ctttacttcagccacagctatagca

SEQ ID NO: 1881885 - DNA, 25 bp, Homo sapien
tcaggtaactgctaattccggcaca

SEQ ID NO: 1881886 - DNA, 25 bp, Homo sapien
ggcttgcttgcgtgctttcattgtc

SEQ ID NO: 1881887 - DNA, 25 bp, Homo sapien
tcattgtcttaactctagtaggaga

SEQ ID NO: 1881888 - DNA, 25 bp, Homo sapien
taactgctaattccggcacagtcac

SEQ ID NO: 1881889 - DNA, 25 bp, Homo sapien
tacataaatcatcaacttgcattat

SEQ ID NO: 1881890 - DNA, 25 bp, Homo sapien
aatgtttaagagttgctttcctggc

SEQ ID NO: 1881891 - DNA, 25 bp, Homo sapien
gcattatggatctcctccgggggat

SEQ ID NO: 1881892 - DNA, 25 bp, Homo sapien
tgtttaagagttgctttcctggcca

SEQ ID NO: 1881893 - DNA, 25 bp, Homo sapien
ttgtcaagtagtctcgtaagttcat

SEQ ID NO: 1881894 - DNA, 25 bp, Homo sapien
agatgccagtaactgaacagttgag

SEQ ID NO: 1881895 - DNA, 25 bp, Homo sapien
ttttcagatgccagtaactgaacag

SEQ ID NO: 1881896 - DNA, 25 bp, Homo sapien
tcagatgccagtaactgaacagttg

SEQ ID NO: 1881897 - DNA, 25 bp, Homo sapien
gcttcagaagatcagactactccga

SEQ ID NO: 1881898 - DNA, 25 bp, Homo sapien
caaaatggatgaaatgaagtgtgaa

SEQ ID NO: 1881899 - DNA, 25 bp, Homo sapien
atcagtgatggaagacaaaatggat

SEQ ID NO: 1881900 - DNA, 25 bp, Homo sapien
acaagcctcagtaactgatgtgatc

SEQ ID NO: 1881901 - DNA, 25 bp, Homo sapien
gcagttttgggtgtcgagctatgat

SEQ ID NO: 1881902 - DNA, 25 bp, Homo sapien
ttttgggtgtcgagctatgatgtaa

SEQ ID NO: 1881903 - DNA, 25 bp, Homo sapien
ctatgatgtaagaagactggccacc

SEQ ID NO: 1881904 - DNA, 25 bp, Homo sapien
gagctatgatgtaagaagactggcc

SEQ ID NO: 1881905 - DNA, 25 bp, Homo sapien
tatgttcgtattaagcccctcctaa

SEQ ID NO: 1881906 - DNA, 25 bp, Homo sapien
ttatgttcgtattaagcccctccta

SEQ ID NO: 1881907 - DNA, 25 bp, Homo sapien
taagcccctcctaatagagcaggaa

SEQ ID NO: 1881908 - DNA, 25 bp, Homo sapien
cgtattaagcccctcctaatagagc

SEQ ID NO: 1881909 - DNA, 25 bp, Homo sapien
ctttattctgtgtcaacctcttggc

SEQ ID NO: 1881910 - DNA, 25 bp, Homo sapien
tgtctccaagacaaggaaccatcag

SEQ ID NO: 1881911 - DNA, 25 bp, Homo sapien
gattgaaacttctccatcgtgactt

SEQ ID NO: 1881912 - DNA, 25 bp, Homo sapien
gagcttgccactaccccacatttag

SEQ ID NO: 1881913 - DNA, 25 bp, Homo sapien
tttccctccacggagaatacaattg

SEQ ID NO: 1881914 - DNA, 25 bp, Homo sapien
gcttttccctccacggagaatacaa

SEQ ID NO: 1881915 - DNA, 25 bp, Homo sapien
cacggagaatacaattgctgtcctc

SEQ ID NO: 1881916 - DNA, 25 bp, Homo sapien
cctccacggagaatacaattgctgt

SEQ ID NO: 1881917 - DNA, 25 bp, Homo sapien
tggcatttgcaaaagcctcttctta

SEQ ID NO: 1881918 - DNA, 25 bp, Homo sapien
taacgggtactcctttccaccatca

SEQ ID NO: 1881919 - DNA, 25 bp, Homo sapien
tttccaccatcaagttggcatttgc

SEQ ID NO: 1881920 - DNA, 25 bp, Homo sapien
ggcatttgcaaaagcctcttcttag

SEQ ID NO: 1881921 - DNA, 25 bp, Homo sapien
tggtttttagtcttctaggctctcc

SEQ ID NO: 1881922 - DNA, 25 bp, Homo sapien
tctgccaactacttaaaccttgaag

SEQ ID NO: 1881923 - DNA, 25 bp, Homo sapien
ctagaatgtgagcagctactatacc

SEQ ID NO: 1881924 - DNA, 25 bp, Homo sapien
aaccttgaagtcataatcttgaatg

SEQ ID NO: 1881925 - DNA, 25 bp, Homo sapien
gcacattcagaccatgctccccaca

SEQ ID NO: 1881926 - DNA, 25 bp, Homo sapien
catgctccccacaccgtctgaaata

SEQ ID NO: 1881927 - DNA, 25 bp, Homo sapien
atgatcattcccatgtagatgggcc

SEQ ID NO: 1881928 - DNA, 25 bp, Homo sapien
tcccatgtagatgggcctgcccttc

SEQ ID NO: 1881929 - DNA, 25 bp, Homo sapien
catcacaatcggaatgcagactgct

SEQ ID NO: 1881930 - DNA, 25 bp, Homo sapien
tagctgttctagcatgctgccagtg

SEQ ID NO: 1881931 - DNA, 25 bp, Homo sapien
cagactgctttggagtgggctagct

SEQ ID NO: 1881932 - DNA, 25 bp, Homo sapien
gtccttcatcctggaatggcatcac

SEQ ID NO: 1881933 - DNA, 25 bp, Homo sapien
tggcttaaatgcttccctccaagct

SEQ ID NO: 1881934 - DNA, 25 bp, Homo sapien
gtttcttgtagatgaggctgtcctc

SEQ ID NO: 1881935 - DNA, 25 bp, Homo sapien
aaaataaagctcttgaagctgtttc

SEQ ID NO: 1881936 - DNA, 25 bp, Homo sapien
catgatgggaagtccatgagatatc

SEQ ID NO: 1881937 - DNA, 25 bp, Homo sapien
agagaagagatgtttccaaatttga

SEQ ID NO: 1881938 - DNA, 25 bp, Homo sapien
tctttgccttctatagcatgattat

SEQ ID NO: 1881939 - DNA, 25 bp, Homo sapien
gattatgtaaaacagccttgattcc

SEQ ID NO: 1881940 - DNA, 25 bp, Homo sapien
tctttaataagacaaagcctgactg

SEQ ID NO: 1881941 - DNA, 25 bp, Homo sapien
gaagttgatcttgctccgtgtcttc

SEQ ID NO: 1881942 - DNA, 25 bp, Homo sapien
gaaccaactcacaccgctgaagttg

SEQ ID NO: 1881943 - DNA, 25 bp, Homo sapien
tcttctctatgtaaggaaagcattg

SEQ ID NO: 1881944 - DNA, 25 bp, Homo sapien
cacctggtgctgaaccgtgtcgtgt

SEQ ID NO: 1881945 - DNA, 25 bp, Homo sapien
tgtgaacacaagagttgaggtagaa

SEQ ID NO: 1881946 - DNA, 25 bp, Homo sapien
aacacaagagttgaggtagaaaggt

SEQ ID NO: 1881947 - DNA, 25 bp, Homo sapien
cttgtgaacacaagagttgaggtag

SEQ ID NO: 1881948 - DNA, 25 bp, Homo sapien
tgaacacaagagttgaggtagaaag

SEQ ID NO: 1881949 - DNA, 25 bp, Homo sapien
cttttcgtcttaagtaagttgagtg

SEQ ID NO: 1881950 - DNA, 25 bp, Homo sapien
tttgtgcgtggtgaaaagagctgat

SEQ ID NO: 1881951 - DNA, 25 bp, Homo sapien
taagtaagttgagtgggaagtcaag

SEQ ID NO: 1881952 - DNA, 25 bp, Homo sapien
tcagacaggactgtcaagttggtgt

SEQ ID NO: 1881953 - DNA, 25 bp, Homo sapien
cattgtgggcgtgaaggatgtgatg

SEQ ID NO: 1881954 - DNA, 25 bp, Homo sapien
actgacatgtgtccacttccattgt

SEQ ID NO: 1881955 - DNA, 25 bp, Homo sapien
cacttccattgtgggcgtgaaggat

SEQ ID NO: 1881956 - DNA, 25 bp, Homo sapien
ctgacatgtgtccacttccattgtg

SEQ ID NO: 1881957 - DNA, 25 bp, Homo sapien
cactggcagctgatatgatccgatc

SEQ ID NO: 1881958 - DNA, 25 bp, Homo sapien
agtaggcatataactgaaagagtcc

SEQ ID NO: 1881959 - DNA, 25 bp, Homo sapien
tttccccaaggaaacaagcactggc

SEQ ID NO: 1881960 - DNA, 25 bp, Homo sapien
ggtggttgatagtccctttgctgac

SEQ ID NO: 1881961 - DNA, 25 bp, Homo sapien
tattcggttgattaagggcttagag

SEQ ID NO: 1881962 - DNA, 25 bp, Homo sapien
gacatgtgccctttattcggttgat

SEQ ID NO: 1881963 - DNA, 25 bp, Homo sapien
tcggttgattaagggcttagagcca

SEQ ID NO: 1881964 - DNA, 25 bp, Homo sapien
gggtgtgacatgtgccctttattcg

SEQ ID NO: 1881965 - DNA, 25 bp, Homo sapien
aggcccgaccctgattagcccacaa

SEQ ID NO: 1881966 - DNA, 25 bp, Homo sapien
ccacaagatcggaggagatcgggca

SEQ ID NO: 1881967 - DNA, 25 bp, Homo sapien
tgattagcccacaagatcggaggag

SEQ ID NO: 1881968 - DNA, 25 bp, Homo sapien
cgaccctgattagcccacaagatcg

SEQ ID NO: 1881969 - DNA, 25 bp, Homo sapien
caatgaatatgttcttccagtgtca

SEQ ID NO: 1881970 - DNA, 25 bp, Homo sapien
cctgcttagtctggagaactggaga

SEQ ID NO: 1881971 - DNA, 25 bp, Homo sapien
cacccaacgattggaacaatgaata

SEQ ID NO: 1881972 - DNA, 25 bp, Homo sapien
aaccagcaaaactcacccaacgatt

SEQ ID NO: 1881973 - DNA, 25 bp, Homo sapien
ccttgtgcttgtggcaggactcctt

SEQ ID NO: 1881974 - DNA, 25 bp, Homo sapien
agcacttcgtcttctacttgttgag

SEQ ID NO: 1881975 - DNA, 25 bp, Homo sapien
tctgatttcctgtccagcccacagt

SEQ ID NO: 1881976 - DNA, 25 bp, Homo sapien
acacttcggatttcaaaacctggca

SEQ ID NO: 1881977 - DNA, 25 bp, Homo sapien
tgtgtggagaatcttgtcgctttca

SEQ ID NO: 1881978 - DNA, 25 bp, Homo sapien
ctgtgtgtggagaatcttgtcgctt

SEQ ID NO: 1881979 - DNA, 25 bp, Homo sapien
tgtggagaatcttgtcgctttcaac

SEQ ID NO: 1881980 - DNA, 25 bp, Homo sapien
gtgtgtggagaatcttgtcgctttc

SEQ ID NO: 1881981 - DNA, 25 bp, Homo sapien
cgtctggccccacaaactctggtgg

SEQ ID NO: 1881982 - DNA, 25 bp, Homo sapien
ctttttccccagttaagtgcctctg

SEQ ID NO: 1881983 - DNA, 25 bp, Homo sapien
ctgcaacacaagctccgtctggccc

SEQ ID NO: 1881984 - DNA, 25 bp, Homo sapien
tggccccacaaactctggtggtttc

SEQ ID NO: 1881985 - DNA, 25 bp, Homo sapien
ttatcatcctagtcagctttaactc

SEQ ID NO: 1881986 - DNA, 25 bp, Homo sapien
gaggcaagaatactgcatccctcat

SEQ ID NO: 1881987 - DNA, 25 bp, Homo sapien
cagctttaactctactggaggcaag

SEQ ID NO: 1881988 - DNA, 25 bp, Homo sapien
tactggaggcaagaatactgcatcc

SEQ ID NO: 1881989 - DNA, 25 bp, Homo sapien
ttcactgtagctcatctcagattct

SEQ ID NO: 1881990 - DNA, 25 bp, Homo sapien
tcttcactgtagctcatctcagatt

SEQ ID NO: 1881991 - DNA, 25 bp, Homo sapien
ttcttcactgtagctcatctcagat

SEQ ID NO: 1881992 - DNA, 25 bp, Homo sapien
cttcactgtagctcatctcagattc

SEQ ID NO: 1881993 - DNA, 25 bp, Homo sapien
actgtgacatttctgggatgattgc

SEQ ID NO: 1881994 - DNA, 25 bp, Homo sapien
caggactgtgacatttctgggatga

SEQ ID NO: 1881995 - DNA, 25 bp, Homo sapien
tctgggatgattgcctttgtctttg

SEQ ID NO: 1881996 - DNA, 25 bp, Homo sapien
gacatttctgggatgattgcctttg

SEQ ID NO: 1881997 - DNA, 25 bp, Homo sapien
tataattgtgtcctataaagggaca

SEQ ID NO: 1881998 - DNA, 25 bp, Homo sapien
taaagggacattgttcttctggacg

SEQ ID NO: 1881999 - DNA, 25 bp, Homo sapien
ccacagtatgagaagaatcttgtct

SEQ ID NO: 1882000 - DNA, 25 bp, Homo sapien
aaaagtcatatggagttgtcaattg

SEQ ID NO: 1882001 - DNA, 25 bp, Homo sapien
tgtcttgttacaattttcaggggaa

SEQ ID NO: 1882002 - DNA, 25 bp, Homo sapien
tcttttcccgattcaatataatgtt

SEQ ID NO: 1882003 - DNA, 25 bp, Homo sapien
gcttcatcttttcccgattcaatat

SEQ ID NO: 1882004 - DNA, 25 bp, Homo sapien
tattgtccttcatataatcttgtgt

SEQ ID NO: 1882005 - DNA, 25 bp, Homo sapien
ttgactccatattcaaggtcaagga

SEQ ID NO: 1882006 - DNA, 25 bp, Homo sapien
caaggatatccgagtgatgttcaat

SEQ ID NO: 1882007 - DNA, 25 bp, Homo sapien
ttttttcaatcaagttcaaatctga

SEQ ID NO: 1882008 - DNA, 25 bp, Homo sapien
catattcaaggtcaaggatatccga

SEQ ID NO: 1882009 - DNA, 25 bp, Homo sapien
attgatcacatggaaacttttcccc

SEQ ID NO: 1882010 - DNA, 25 bp, Homo sapien
tgatcacatggaaacttttccccat

SEQ ID NO: 1882011 - DNA, 25 bp, Homo sapien
ttgatcacatggaaacttttcccca

SEQ ID NO: 1882012 - DNA, 25 bp, Homo sapien
cattgatcacatggaaacttttccc

SEQ ID NO: 1882013 - DNA, 25 bp, Homo sapien
tccactggactgactatcccaatct

SEQ ID NO: 1882014 - DNA, 25 bp, Homo sapien
actggactgactatcccaatctcaa

SEQ ID NO: 1882015 - DNA, 25 bp, Homo sapien
tggactgactatcccaatctcaatg

SEQ ID NO: 1882016 - DNA, 25 bp, Homo sapien
cactggactgactatcccaatctca

SEQ ID NO: 1882017 - DNA, 25 bp, Homo sapien
gttctgtgctaaaaccacagcacat

SEQ ID NO: 1882018 - DNA, 25 bp, Homo sapien
tatgcttgggagtttctgtatccct

SEQ ID NO: 1882019 - DNA, 25 bp, Homo sapien
gagtttctgtatccctcaatgtcag

SEQ ID NO: 1882020 - DNA, 25 bp, Homo sapien
tgctgtcagaatacctctaaccacc

SEQ ID NO: 1882021 - DNA, 25 bp, Homo sapien
gctcaagggaaacataatatgccat

SEQ ID NO: 1882022 - DNA, 25 bp, Homo sapien
cataatatgccattcgatgtttgat

SEQ ID NO: 1882023 - DNA, 25 bp, Homo sapien
tatgccattcgatgtttgatatgca

SEQ ID NO: 1882024 - DNA, 25 bp, Homo sapien
atcactggctcaagggaaacataat

SEQ ID NO: 1882025 - DNA, 25 bp, Homo sapien
gcatgacagcgcatcctttctcttc

SEQ ID NO: 1882026 - DNA, 25 bp, Homo sapien
tgcatgacagcgcatcctttctctt

SEQ ID NO: 1882027 - DNA, 25 bp, Homo sapien
gtgcatgacagcgcatcctttctct

SEQ ID NO: 1882028 - DNA, 25 bp, Homo sapien
tgtgcatgacagcgcatcctttctc

SEQ ID NO: 1882029 - DNA, 25 bp, Homo sapien
tcagcagaacagtgaagagggcctt

SEQ ID NO: 1882030 - DNA, 25 bp, Homo sapien
ggccttctgactcaccaacagggct

SEQ ID NO: 1882031 - DNA, 25 bp, Homo sapien
tgactgtcagcagaacagtgaagag

SEQ ID NO: 1882032 - DNA, 25 bp, Homo sapien
ccaacagggctttgctagcatgcat

SEQ ID NO: 1882033 - DNA, 25 bp, Homo sapien
aatgatgggaacataaagtttcctg

SEQ ID NO: 1882034 - DNA, 25 bp, Homo sapien
caatgatgggaacataaagtttcct

SEQ ID NO: 1882035 - DNA, 25 bp, Homo sapien
tcaatgatgggaacataaagtttcc

SEQ ID NO: 1882036 - DNA, 25 bp, Homo sapien
gtcaatgatgggaacataaagtttc

SEQ ID NO: 1882037 - DNA, 25 bp, Homo sapien
ttatttggctaaaccaaactgccaa

SEQ ID NO: 1882038 - DNA, 25 bp, Homo sapien
aaatgtagtcaatcaatattctctc

SEQ ID NO: 1882039 - DNA, 25 bp, Homo sapien
aatgtagtcaatcaatattctctcc

SEQ ID NO: 1882040 - DNA, 25 bp, Homo sapien
tgattttggcttgttgtgtatggtg

SEQ ID NO: 1882041 - DNA, 25 bp, Homo sapien
catctgtggtgcatagagctataag

SEQ ID NO: 1882042 - DNA, 25 bp, Homo sapien
gattgggtatctacatctgtggtgc

SEQ ID NO: 1882043 - DNA, 25 bp, Homo sapien
ttcttcctcatctgattgggtatct

SEQ ID NO: 1882044 - DNA, 25 bp, Homo sapien
agtatagcacagattgaacacctgt

SEQ ID NO: 1882045 - DNA, 25 bp, Homo sapien
gattgaacacctgtgccttgaacta

SEQ ID NO: 1882046 - DNA, 25 bp, Homo sapien
tccaaagtatagcacagattgaaca

SEQ ID NO: 1882047 - DNA, 25 bp, Homo sapien
cacagattgaacacctgtgccttga

SEQ ID NO: 1882048 - DNA, 25 bp, Homo sapien
gtagcattgattccactcccacaag

SEQ ID NO: 1882049 - DNA, 25 bp, Homo sapien
tgtatcccaaggtcagtagcattga

SEQ ID NO: 1882050 - DNA, 25 bp, Homo sapien
ttatcaactttttctgcccagggtc

SEQ ID NO: 1882051 - DNA, 25 bp, Homo sapien
gcaatgatgtctagtgcttcagaca

SEQ ID NO: 1882052 - DNA, 25 bp, Homo sapien
gctactgccactgtgtgtgcaccca

SEQ ID NO: 1882053 - DNA, 25 bp, Homo sapien
ccgcatatgaccatattctgggcat

SEQ ID NO: 1882054 - DNA, 25 bp, Homo sapien
tgcacccacacactggtgacaagag

SEQ ID NO: 1882055 - DNA, 25 bp, Homo sapien
caaatttcaagctgtagctgttccg

SEQ ID NO: 1882056 - DNA, 25 bp, Homo sapien
ggtgaccaaagacctcccacaatct

SEQ ID NO: 1882057 - DNA, 25 bp, Homo sapien
cactattggaccaccattgcctcat

SEQ ID NO: 1882058 - DNA, 25 bp, Homo sapien
caatcttcaccgatactgacctcag

SEQ ID NO: 1882059 - DNA, 25 bp, Homo sapien
aaaatctacactattggaccaccat

SEQ ID NO: 1882060 - DNA, 25 bp, Homo sapien
tcacgatggcttgaccatggcgccg

SEQ ID NO: 1882061 - DNA, 25 bp, Homo sapien
tcagctaagacaggaactagccgtt

SEQ ID NO: 1882062 - DNA, 25 bp, Homo sapien
gatcagttagggtacagcctgttac

SEQ ID NO: 1882063 - DNA, 25 bp, Homo sapien
agttcggagctgtttattgagggca

SEQ ID NO: 1882064 - DNA, 25 bp, Homo sapien
tcagggcttcttcgagcaggcttag

SEQ ID NO: 1882065 - DNA, 25 bp, Homo sapien
gaatctaagctagagaatggccagg

SEQ ID NO: 1882066 - DNA, 25 bp, Homo sapien
gatgcgattttgtatgaactgagag

SEQ ID NO: 1882067 - DNA, 25 bp, Homo sapien
gccaggtagtgccagtataactatt

SEQ ID NO: 1882068 - DNA, 25 bp, Homo sapien
tctggaggaaaagcgtgaactggca

SEQ ID NO: 1882069 - DNA, 25 bp, Homo sapien
tgggcatagttttatcctggagcga

SEQ ID NO: 1882070 - DNA, 25 bp, Homo sapien
ctaggctggtcgtcagatgggcata

SEQ ID NO: 1882071 - DNA, 25 bp, Homo sapien
tactatagatgaccaggtaggatcc

SEQ ID NO: 1882072 - DNA, 25 bp, Homo sapien
gggtgaaccctcgtgcttgatgcat

SEQ ID NO: 1882073 - DNA, 25 bp, Homo sapien
ttgggcccaagcagaaaggtgcgac

SEQ ID NO: 1882074 - DNA, 25 bp, Homo sapien
gattccattggataccaacggctgg

SEQ ID NO: 1882075 - DNA, 25 bp, Homo sapien
acagagtaagcttgagacgcaggga

SEQ ID NO: 1882076 - DNA, 25 bp, Homo sapien
gcgattgtctaaggggcctccgaga

SEQ ID NO: 1882077 - DNA, 25 bp, Homo sapien
ctcggcatccgcgattgtctaaggg

SEQ ID NO: 1882078 - DNA, 25 bp, Homo sapien
tgtctaaggggcctccgagacgttc

SEQ ID NO: 1882079 - DNA, 25 bp, Homo sapien
aagctcggcatccgcgattgtctaa

SEQ ID NO: 1882080 - DNA, 25 bp, Homo sapien
ttctgaaatgcgctgtcgccgggca

SEQ ID NO: 1882081 - DNA, 25 bp, Homo sapien
tgaagttcttgcaggtaggcagtgc

SEQ ID NO: 1882082 - DNA, 25 bp, Homo sapien
agtggccaggttttcatcgcttgaa

SEQ ID NO: 1882083 - DNA, 25 bp, Homo sapien
gagagtcgggcagtcagacttccag

SEQ ID NO: 1882084 - DNA, 25 bp, Homo sapien
aggaaggctgtctccccaagaagag

SEQ ID NO: 1882085 - DNA, 25 bp, Homo sapien
gcaagagatcatgtagtcccgcctg

SEQ ID NO: 1882086 - DNA, 25 bp, Homo sapien
gggcattgaccgaacactgaaggaa

SEQ ID NO: 1882087 - DNA, 25 bp, Homo sapien
tggtcgcaggcccaaactgtaagcc

SEQ ID NO: 1882088 - DNA, 25 bp, Homo sapien
acacggataagaggaaggttctttg

SEQ ID NO: 1882089 - DNA, 25 bp, Homo sapien
tgaaacacggataagaggaaggttc

SEQ ID NO: 1882090 - DNA, 25 bp, Homo sapien
ctgaaacacggataagaggaaggtt

SEQ ID NO: 1882091 - DNA, 25 bp, Homo sapien
tccatagacagaggccggagtgctc

SEQ ID NO: 1882092 - DNA, 25 bp, Homo sapien
ttatcagttagaggtaagcaccgga

SEQ ID NO: 1882093 - DNA, 25 bp, Homo sapien
ttattcacccgggtgcgagtgggct

SEQ ID NO: 1882094 - DNA, 25 bp, Homo sapien
tcttgcatgggagaacgtgggtacc

SEQ ID NO: 1882095 - DNA, 25 bp, Homo sapien
tgcctgacctgtgtcaggagtaatc

SEQ ID NO: 1882096 - DNA, 25 bp, Homo sapien
tgctctgcctgacctgtgtcaggag

SEQ ID NO: 1882097 - DNA, 25 bp, Homo sapien
tctgcctgacctgtgtcaggagtaa

SEQ ID NO: 1882098 - DNA, 25 bp, Homo sapien
ctactgctctgcctgacctgtgtca

SEQ ID NO: 1882099 - DNA, 25 bp, Homo sapien
gcgacttgttgttgcaacactgggt

SEQ ID NO: 1882100 - DNA, 25 bp, Homo sapien
gggcacttctaacactggcgacttg

SEQ ID NO: 1882101 - DNA, 25 bp, Homo sapien
tatagccagggcacttctaacactg

SEQ ID NO: 1882102 - DNA, 25 bp, Homo sapien
accatcaccatgtatagccagggca

SEQ ID NO: 1882103 - DNA, 25 bp, Homo sapien
ccaaaaatgttggctgctagatttg

SEQ ID NO: 1882104 - DNA, 25 bp, Homo sapien
gctgctagatttggatatgtaaata

SEQ ID NO: 1882105 - DNA, 25 bp, Homo sapien
tagatttggatatgtaaatatagac

SEQ ID NO: 1882106 - DNA, 25 bp, Homo sapien
tgttggctgctagatttggatatgt

SEQ ID NO: 1882107 - DNA, 25 bp, Homo sapien
tttacctctgtttcctctacctcat

SEQ ID NO: 1882108 - DNA, 25 bp, Homo sapien
ctgtactgatttacctctgtttcct

SEQ ID NO: 1882109 - DNA, 25 bp, Homo sapien
tgtactgatttacctctgtttcctc

SEQ ID NO: 1882110 - DNA, 25 bp, Homo sapien
ctctgtttcctctacctcattcttt

SEQ ID NO: 1882111 - DNA, 25 bp, Homo sapien
ttttaaatcctacctccatgaaggc

SEQ ID NO: 1882112 - DNA, 25 bp, Homo sapien
cacagtctgctaagcctcttgatct

SEQ ID NO: 1882113 - DNA, 25 bp, Homo sapien
caggttcccaatacatcctcagaga

SEQ ID NO: 1882114 - DNA, 25 bp, Homo sapien
tccaggatctggcattccttagctc

SEQ ID NO: 1882115 - DNA, 25 bp, Homo sapien
ggtcatctttcatatgcaatgtaca

SEQ ID NO: 1882116 - DNA, 25 bp, Homo sapien
tcttgtaagccctcaagatagggct

SEQ ID NO: 1882117 - DNA, 25 bp, Homo sapien
ccagctctcttgtaagccctcaaga

SEQ ID NO: 1882118 - DNA, 25 bp, Homo sapien
gctctcttgtaagccctcaagatag

SEQ ID NO: 1882119 - DNA, 25 bp, Homo sapien
tgtaagccctcaagatagggcttca

SEQ ID NO: 1882120 - DNA, 25 bp, Homo sapien
tctgggtcctaaaatgccccagagt

SEQ ID NO: 1882121 - DNA, 25 bp, Homo sapien
tcctgagctaatgtcactctttcca

SEQ ID NO: 1882122 - DNA, 25 bp, Homo sapien
gggtcctaaaatgccccagagtcat

SEQ ID NO: 1882123 - DNA, 25 bp, Homo sapien
ttcttgtcctgagctaatgtcactc

SEQ ID NO: 1882124 - DNA, 25 bp, Homo sapien
tatgggttggtatgacctttctaga

SEQ ID NO: 1882125 - DNA, 25 bp, Homo sapien
aatttgcatacttcattctactggg

SEQ ID NO: 1882126 - DNA, 25 bp, Homo sapien
taagttagttgatcaaaataagaac

SEQ ID NO: 1882127 - DNA, 25 bp, Homo sapien
taatttattcatgaaaccacaacat

SEQ ID NO: 1882128 - DNA, 25 bp, Homo sapien
gtgtttgccaaggttcttctcgtca

SEQ ID NO: 1882129 - DNA, 25 bp, Homo sapien
aaggttcttctcgtcaaaatctgca

SEQ ID NO: 1882130 - DNA, 25 bp, Homo sapien
gccaaggttcttctcgtcaaaatct

SEQ ID NO: 1882131 - DNA, 25 bp, Homo sapien
ttgccaaggttcttctcgtcaaaat

SEQ ID NO: 1882132 - DNA, 25 bp, Homo sapien
gcaactgcctcaaggcgttcttggt

SEQ ID NO: 1882133 - DNA, 25 bp, Homo sapien
ttggttccatttcaccacttcacca

SEQ ID NO: 1882134 - DNA, 25 bp, Homo sapien
gaaatcctccggagattaacagcaa

SEQ ID NO: 1882135 - DNA, 25 bp, Homo sapien
caggtatgcttccatattgaaatcc

SEQ ID NO: 1882136 - DNA, 25 bp, Homo sapien
tctacttgatactcggcatctaaca

SEQ ID NO: 1882137 - DNA, 25 bp, Homo sapien
ataattcatgacttgctaaatcttc

SEQ ID NO: 1882138 - DNA, 25 bp, Homo sapien
cttttagagggtgccatacctgttc

SEQ ID NO: 1882139 - DNA, 25 bp, Homo sapien
tacctgttctacttgatactcggca

SEQ ID NO: 1882140 - DNA, 25 bp, Homo sapien
tcctgacttttaattcgtgctgaca

SEQ ID NO: 1882141 - DNA, 25 bp, Homo sapien
cattatagagtagagaaggtccatc

SEQ ID NO: 1882142 - DNA, 25 bp, Homo sapien
cattctcggtgtggttgttctagaa

SEQ ID NO: 1882143 - DNA, 25 bp, Homo sapien
taaggcactcctctaaaagcagtat

SEQ ID NO: 1882144 - DNA, 25 bp, Homo sapien
gactgtgaaagtacacatcttttag

SEQ ID NO: 1882145 - DNA, 25 bp, Homo sapien
cgggtccatgactgtgaaagtacac

SEQ ID NO: 1882146 - DNA, 25 bp, Homo sapien
ctgggaaatagttcggatttttcag

SEQ ID NO: 1882147 - DNA, 25 bp, Homo sapien
gatttttcagatattcgggtccatg

SEQ ID NO: 1882148 - DNA, 25 bp, Homo sapien
ggcaaaaataacgcttttctcctca

SEQ ID NO: 1882149 - DNA, 25 bp, Homo sapien
gcaaaaataacgcttttctcctcac

SEQ ID NO: 1882150 - DNA, 25 bp, Homo sapien
aaaataacgcttttctcctcaccat

SEQ ID NO: 1882151 - DNA, 25 bp, Homo sapien
tagaggcaaaaataacgcttttctc

SEQ ID NO: 1882152 - DNA, 25 bp, Homo sapien
gcactgataacacctgttaagtggt

SEQ ID NO: 1882153 - DNA, 25 bp, Homo sapien
agcggacagggagggtcccatcact

SEQ ID NO: 1882154 - DNA, 25 bp, Homo sapien
cagcggacagggagggtcccatcac

SEQ ID NO: 1882155 - DNA, 25 bp, Homo sapien
atgaagcactgataacacctgttaa

SEQ ID NO: 1882156 - DNA, 25 bp, Homo sapien
gaaattaggttatacaagcctgtgg

SEQ ID NO: 1882157 - DNA, 25 bp, Homo sapien
gataaagccatttgctctattgtga

SEQ ID NO: 1882158 - DNA, 25 bp, Homo sapien
tgtgagctgtcttaaggaaaaggtc

SEQ ID NO: 1882159 - DNA, 25 bp, Homo sapien
catattgtcatgtcctctcagttgt

SEQ ID NO: 1882160 - DNA, 25 bp, Homo sapien
tattgaaaaatctcagagcggtagc

SEQ ID NO: 1882161 - DNA, 25 bp, Homo sapien
gaggtacaacccagtgatcatctat

SEQ ID NO: 1882162 - DNA, 25 bp, Homo sapien
cagattctgttgcagggcacattgc

SEQ ID NO: 1882163 - DNA, 25 bp, Homo sapien
cccagttagggtttatagcaaagca

SEQ ID NO: 1882164 - DNA, 25 bp, Homo sapien
gaaatggaaatcctccaataatctc

SEQ ID NO: 1882165 - DNA, 25 bp, Homo sapien
catggaggaaaacgtccagggcatg

SEQ ID NO: 1882166 - DNA, 25 bp, Homo sapien
cagatgcagccatggaggaaaacgt

SEQ ID NO: 1882167 - DNA, 25 bp, Homo sapien
aatggaaatcctccaataatctcag

SEQ ID NO: 1882168 - DNA, 25 bp, Homo sapien
tcatttacggtaggagacccccatc

SEQ ID NO: 1882169 - DNA, 25 bp, Homo sapien
aagagaaaggaatcactgtgcggag

SEQ ID NO: 1882170 - DNA, 25 bp, Homo sapien
cggagaatctgatttgcatgtaaca

SEQ ID NO: 1882171 - DNA, 25 bp, Homo sapien
tcagcctgaaggtcttagaagagaa

SEQ ID NO: 1882172 - DNA, 25 bp, Homo sapien
aattgtttaatctccgggatcgtct

SEQ ID NO: 1882173 - DNA, 25 bp, Homo sapien
atgtgggagttgacattgaccttga

SEQ ID NO: 1882174 - DNA, 25 bp, Homo sapien
cccatgtgggagttgacattgacct

SEQ ID NO: 1882175 - DNA, 25 bp, Homo sapien
tttaatctccgggatcgtcttccca

SEQ ID NO: 1882176 - DNA, 25 bp, Homo sapien
gtacaataaatattcctatacattg

SEQ ID NO: 1882177 - DNA, 25 bp, Homo sapien
tagtacaataaatattcctatacat

SEQ ID NO: 1882178 - DNA, 25 bp, Homo sapien
gatagtacaataaatattcctatac

SEQ ID NO: 1882179 - DNA, 25 bp, Homo sapien
caagtcctctatggatagtacaata

SEQ ID NO: 1882180 - DNA, 25 bp, Homo sapien
gggtcagtagtgttatcttccttaa

SEQ ID NO: 1882181 - DNA, 25 bp, Homo sapien
tgtggggtcagtagtgttatcttcc

SEQ ID NO: 1882182 - DNA, 25 bp, Homo sapien
tctgtggggtcagtagtgttatctt

SEQ ID NO: 1882183 - DNA, 25 bp, Homo sapien
tggggtcagtagtgttatcttcctt

SEQ ID NO: 1882184 - DNA, 25 bp, Homo sapien
cctctttaatggtctcatatcttcc

SEQ ID NO: 1882185 - DNA, 25 bp, Homo sapien
aatggtctcatatcttcctgactaa

SEQ ID NO: 1882186 - DNA, 25 bp, Homo sapien
tggtgtaactttaatctgttcgtct

SEQ ID NO: 1882187 - DNA, 25 bp, Homo sapien
cttggtgtaactttaatctgttcgt

SEQ ID NO: 1882188 - DNA, 25 bp, Homo sapien
cttgagcctgggaagaggaggcggc

SEQ ID NO: 1882189 - DNA, 25 bp, Homo sapien
agcctggagcctgggcagcaacaga

SEQ ID NO: 1882190 - DNA, 25 bp, Homo sapien
tgggaagaggaggcggcagtgagcc

SEQ ID NO: 1882191 - DNA, 25 bp, Homo sapien
aggaggcaaatgtgggaggatcgct

SEQ ID NO: 1882192 - DNA, 25 bp, Homo sapien
tggttccccagtaagcttcagctgt

SEQ ID NO: 1882193 - DNA, 25 bp, Homo sapien
gagacttcattctgcatagcttcaa

SEQ ID NO: 1882194 - DNA, 25 bp, Homo sapien
gcttcaatctacatatgctttccct

SEQ ID NO: 1882195 - DNA, 25 bp, Homo sapien
tcttaatttagggcaccattggttc

SEQ ID NO: 1882196 - DNA, 25 bp, Homo sapien
tttacctgtctgaaccatggtttcc

SEQ ID NO: 1882197 - DNA, 25 bp, Homo sapien
ttaaagcgagaggtaactggtagtc

SEQ ID NO: 1882198 - DNA, 25 bp, Homo sapien
ctgatacagtgaaagtccctggact

SEQ ID NO: 1882199 - DNA, 25 bp, Homo sapien
tcaatatggaagcatgacatcttac

SEQ ID NO: 1882200 - DNA, 25 bp, Homo sapien
taatgagcatgagcttgtgcagctt

SEQ ID NO: 1882201 - DNA, 25 bp, Homo sapien
ggctctatgggaaaccagtggcagc

SEQ ID NO: 1882202 - DNA, 25 bp, Homo sapien
gggaccatggccagatcctttgtaa

SEQ ID NO: 1882203 - DNA, 25 bp, Homo sapien
gcagcttgcttggaggtcagccaaa

SEQ ID NO: 1882204 - DNA, 25 bp, Homo sapien
tagtctgtggtggtatgaagaaatc

SEQ ID NO: 1882205 - DNA, 25 bp, Homo sapien
tgaagaaatctttagctgagagaag

SEQ ID NO: 1882206 - DNA, 25 bp, Homo sapien
caagaacgttgagattcctcagggt

SEQ ID NO: 1882207 - DNA, 25 bp, Homo sapien
tctgtgcatggtggagacaaagccc

SEQ ID NO: 1882208 - DNA, 25 bp, Homo sapien
ctctgtaatatctttccaggaactt

SEQ ID NO: 1882209 - DNA, 25 bp, Homo sapien
caggaacttaaattatccttctcac

SEQ ID NO: 1882210 - DNA, 25 bp, Homo sapien
tctcacttttatattcaagtcccat

SEQ ID NO: 1882211 - DNA, 25 bp, Homo sapien
tatctttccaggaacttaaattatc

SEQ ID NO: 1882212 - DNA, 25 bp, Homo sapien
caaatgtgtggcctgatctcaagtg

SEQ ID NO: 1882213 - DNA, 25 bp, Homo sapien
tctcaagtggaagagtatccctcac

SEQ ID NO: 1882214 - DNA, 25 bp, Homo sapien
aaatgtgtggcctgatctcaagtgg

SEQ ID NO: 1882215 - DNA, 25 bp, Homo sapien
ctgatctcaagtggaagagtatccc

SEQ ID NO: 1882216 - DNA, 25 bp, Homo sapien
tggtacaggagctgactatgcctcc

SEQ ID NO: 1882217 - DNA, 25 bp, Homo sapien
gcctcctttcatgtgattggaccag

SEQ ID NO: 1882218 - DNA, 25 bp, Homo sapien
cactggttcgtatggtggtacagga

SEQ ID NO: 1882219 - DNA, 25 bp, Homo sapien
catgggataagcctaactgattggg

SEQ ID NO: 1882220 - DNA, 25 bp, Homo sapien
gcccagctttgccccctctagtctc

SEQ ID NO: 1882221 - DNA, 25 bp, Homo sapien
cagctttgccccctctagtctccat

SEQ ID NO: 1882222 - DNA, 25 bp, Homo sapien
ccagctttgccccctctagtctcca

SEQ ID NO: 1882223 - DNA, 25 bp, Homo sapien
tgcccagctttgccccctctagtct

SEQ ID NO: 1882224 - DNA, 25 bp, Homo sapien
caatgaacaattagacagccttgat

SEQ ID NO: 1882225 - DNA, 25 bp, Homo sapien
cattacggagacaaaagttaactca

SEQ ID NO: 1882226 - DNA, 25 bp, Homo sapien
tctgtgtatagccaatgtgacaatg

SEQ ID NO: 1882227 - DNA, 25 bp, Homo sapien
tgtaattgaaatgcagagttccaca

SEQ ID NO: 1882228 - DNA, 25 bp, Homo sapien
ttcctttggatatggcaaatgggtg

SEQ ID NO: 1882229 - DNA, 25 bp, Homo sapien
ggtgacacaggacattaaaggacaa

SEQ ID NO: 1882230 - DNA, 25 bp, Homo sapien
tttggatatggcaaatgggtgacac

SEQ ID NO: 1882231 - DNA, 25 bp, Homo sapien
gacacaggacattaaaggacaaagg

SEQ ID NO: 1882232 - DNA, 25 bp, Homo sapien
tcttccctaactggttgatctaact

SEQ ID NO: 1882233 - DNA, 25 bp, Homo sapien
tcaaagatcggatccagaaggtaag

SEQ ID NO: 1882234 - DNA, 25 bp, Homo sapien
agaaggtaagttgccaaatttccat

SEQ ID NO: 1882235 - DNA, 25 bp, Homo sapien
ctggttgatctaactctaggctcat

SEQ ID NO: 1882236 - DNA, 25 bp, Homo sapien
gatgttacaatgttagcttttacct

SEQ ID NO: 1882237 - DNA, 25 bp, Homo sapien
cttggggatgttacaatgttagctt

SEQ ID NO: 1882238 - DNA, 25 bp, Homo sapien
ggcttggggatgttacaatgttagc

SEQ ID NO: 1882239 - DNA, 25 bp, Homo sapien
gggatgttacaatgttagcttttac

SEQ ID NO: 1882240 - DNA, 25 bp, Homo sapien
ctgatccagagcactggtaattgaa

SEQ ID NO: 1882241 - DNA, 25 bp, Homo sapien
tccagagcactggtaattgaaatat

SEQ ID NO: 1882242 - DNA, 25 bp, Homo sapien
ctggtaattgaaatatccttaaaca

SEQ ID NO: 1882243 - DNA, 25 bp, Homo sapien
cagagcactggtaattgaaatatcc

SEQ ID NO: 1882244 - DNA, 25 bp, Homo sapien
gtctagcataagagacttaaggcag

SEQ ID NO: 1882245 - DNA, 25 bp, Homo sapien
taccaatgactcagaaggctttgag

SEQ ID NO: 1882246 - DNA, 25 bp, Homo sapien
gtctgtatctattaccaatgactca

SEQ ID NO: 1882247 - DNA, 25 bp, Homo sapien
cttaaggcagatacaagtctctcca

SEQ ID NO: 1882248 - DNA, 25 bp, Homo sapien
ctgtaggttgctaaatccaggctga

SEQ ID NO: 1882249 - DNA, 25 bp, Homo sapien
tccaggctgataagcaggaacaact

SEQ ID NO: 1882250 - DNA, 25 bp, Homo sapien
ggcaaaggaaaagttgtctcaatct

SEQ ID NO: 1882251 - DNA, 25 bp, Homo sapien
gaggccagcctctaacctgtaggtt

SEQ ID NO: 1882252 - DNA, 25 bp, Homo sapien
tagattgggcttcttcctaggtaaa

SEQ ID NO: 1882253 - DNA, 25 bp, Homo sapien
taactccacttgaaggcattcatgc

SEQ ID NO: 1882254 - DNA, 25 bp, Homo sapien
tggtaagattcaaagctcgtatttg

SEQ ID NO: 1882255 - DNA, 25 bp, Homo sapien
caatctttccttgctatttgctaaa

SEQ ID NO: 1882256 - DNA, 25 bp, Homo sapien
ccatctccaattccccagaattttg

SEQ ID NO: 1882257 - DNA, 25 bp, Homo sapien
ggaagcattcactaattcttcagta

SEQ ID NO: 1882258 - DNA, 25 bp, Homo sapien
ttcttcagtacaattcagagctttc

SEQ ID NO: 1882259 - DNA, 25 bp, Homo sapien
tccaattgttcggaagcattcacta

SEQ ID NO: 1882260 - DNA, 25 bp, Homo sapien
cagtcactataggtctttgtaaggc

SEQ ID NO: 1882261 - DNA, 25 bp, Homo sapien
taggtctttgtaaggcatttgatgc

SEQ ID NO: 1882262 - DNA, 25 bp, Homo sapien
catttgatgctgtgtagcaatcata

SEQ ID NO: 1882263 - DNA, 25 bp, Homo sapien
ccccaacttcagtcactataggtct

SEQ ID NO: 1882264 - DNA, 25 bp, Homo sapien
ttctctggaactgccgtgtaaccat

SEQ ID NO: 1882265 - DNA, 25 bp, Homo sapien
tttctctggaactgccgtgtaacca

SEQ ID NO: 1882266 - DNA, 25 bp, Homo sapien
gttatcaaccgtagatgtttctctg

SEQ ID NO: 1882267 - DNA, 25 bp, Homo sapien
tctctgcgaacttttgctgttggaa

SEQ ID NO: 1882268 - DNA, 25 bp, Homo sapien
gtacatatgtcccttcaggaaagaa

SEQ ID NO: 1882269 - DNA, 25 bp, Homo sapien
cagcacgctttttctggactgtagt

SEQ ID NO: 1882270 - DNA, 25 bp, Homo sapien
ttgccttaagtgtgcttttcttttc

SEQ ID NO: 1882271 - DNA, 25 bp, Homo sapien
ttttcctctggcagcataaaataca

SEQ ID NO: 1882272 - DNA, 25 bp, Homo sapien
ctttgccttaagtgtgcttttcttt

SEQ ID NO: 1882273 - DNA, 25 bp, Homo sapien
ttcttttcctctggcagcataaaat

SEQ ID NO: 1882274 - DNA, 25 bp, Homo sapien
aaacctgtaagacagtgagtggagt

SEQ ID NO: 1882275 - DNA, 25 bp, Homo sapien
agcctcagcccgatcatacctagtg

SEQ ID NO: 1882276 - DNA, 25 bp, Homo sapien
tagtgctctagagcaggcgtcccca

SEQ ID NO: 1882277 - DNA, 25 bp, Homo sapien
cccgggcggcagatcctataggtct

SEQ ID NO: 1882278 - DNA, 25 bp, Homo sapien
tcatgagtgcagcagttccacagcc

SEQ ID NO: 1882279 - DNA, 25 bp, Homo sapien
tccacagcccaaggcagtcctccag

SEQ ID NO: 1882280 - DNA, 25 bp, Homo sapien
tgctagagccttatcaaaatgttta

SEQ ID NO: 1882281 - DNA, 25 bp, Homo sapien
gagacaccaacagtgtctgctagag

SEQ ID NO: 1882282 - DNA, 25 bp, Homo sapien
ctgaagataaaagggatttccagga

SEQ ID NO: 1882283 - DNA, 25 bp, Homo sapien
ttccaggaattcatttgagacacca

SEQ ID NO: 1882284 - DNA, 25 bp, Homo sapien
aaggtaataggactctagacttggc

SEQ ID NO: 1882285 - DNA, 25 bp, Homo sapien
catcctagtgacagcaaaacttgac

SEQ ID NO: 1882286 - DNA, 25 bp, Homo sapien
caattccacgtggatgccagacaac

SEQ ID NO: 1882287 - DNA, 25 bp, Homo sapien
tagacttggctttatcgccagatag

SEQ ID NO: 1882288 - DNA, 25 bp, Homo sapien
gttgaggcccaaaggatgtgttgac

SEQ ID NO: 1882289 - DNA, 25 bp, Homo sapien
ggatgtgttgacattcttgatgaat

SEQ ID NO: 1882290 - DNA, 25 bp, Homo sapien
aaggatgtgttgacattcttgatga

SEQ ID NO: 1882291 - DNA, 25 bp, Homo sapien
ctgttgaggcccaaaggatgtgttg

SEQ ID NO: 1882292 - DNA, 25 bp, Homo sapien
tgtttgtatgtaatctttaaatcca

SEQ ID NO: 1882293 - DNA, 25 bp, Homo sapien
tatgtaatctttaaatccaacttct

SEQ ID NO: 1882294 - DNA, 25 bp, Homo sapien
atctttaaatccaacttctggttag

SEQ ID NO: 1882295 - DNA, 25 bp, Homo sapien
ctccttgtttgtatgtaatctttaa

SEQ ID NO: 1882296 - DNA, 25 bp, Homo sapien
tcttatagaaaccatgttcctgaag

SEQ ID NO: 1882297 - DNA, 25 bp, Homo sapien
tattgaaatgaccttcaacattctg

SEQ ID NO: 1882298 - DNA, 25 bp, Homo sapien
gctttagatttcttccaagattatt

SEQ ID NO: 1882299 - DNA, 25 bp, Homo sapien
gaaatgaccttcaacattctggtct

SEQ ID NO: 1882300 - DNA, 25 bp, Homo sapien
agttcactgccgcaacttcaaagtc

SEQ ID NO: 1882301 - DNA, 25 bp, Homo sapien
cagaaattaggatccctgggaacca

SEQ ID NO: 1882302 - DNA, 25 bp, Homo sapien
tgggaaccattttggcaagtccctc

SEQ ID NO: 1882303 - DNA, 25 bp, Homo sapien
ttcaaagtccactgagtcctcaatg

SEQ ID NO: 1882304 - DNA, 25 bp, Homo sapien
cagtgagggcagtgttttgattcat

SEQ ID NO: 1882305 - DNA, 25 bp, Homo sapien
gtcttctggcttcaatcatttcctt

SEQ ID NO: 1882306 - DNA, 25 bp, Homo sapien
ttctggcttcaatcatttcctttgc

SEQ ID NO: 1882307 - DNA, 25 bp, Homo sapien
cttctggcttcaatcatttcctttg

SEQ ID NO: 1882308 - DNA, 25 bp, Homo sapien
cagtcttctggcttcaatcatttcc

SEQ ID NO: 1882309 - DNA, 25 bp, Homo sapien
tattttgatgtgctaacactgacct

SEQ ID NO: 1882310 - DNA, 25 bp, Homo sapien
tattagatacctgggtcaatttaaa

SEQ ID NO: 1882311 - DNA, 25 bp, Homo sapien
tgccataccagactatattttgatg

SEQ ID NO: 1882312 - DNA, 25 bp, Homo sapien
caatgtagtgaaacttcccaagcaa

SEQ ID NO: 1882313 - DNA, 25 bp, Homo sapien
catagacttgtgaaagagaccaatg

SEQ ID NO: 1882314 - DNA, 25 bp, Homo sapien
gacttgtgaaagagaccaatgaaag

SEQ ID NO: 1882315 - DNA, 25 bp, Homo sapien
gaaagagaccaatgaaagcagataa

SEQ ID NO: 1882316 - DNA, 25 bp, Homo sapien
tatagacatagacttgtgaaagaga

SEQ ID NO: 1882317 - DNA, 25 bp, Homo sapien
gctgagggtgtgtaaactgctgctc

SEQ ID NO: 1882318 - DNA, 25 bp, Homo sapien
gacagtgtcttgcttggcgtagtta

SEQ ID NO: 1882319 - DNA, 25 bp, Homo sapien
gacatgaaacaaggtggttcctcct

SEQ ID NO: 1882320 - DNA, 25 bp, Homo sapien
aaggatcatcatcaggccagctcag

SEQ ID NO: 1882321 - DNA, 25 bp, Homo sapien
tgttttgcaaaccaccaactgcgtt

SEQ ID NO: 1882322 - DNA, 25 bp, Homo sapien
caactccagtggataacagaccata

SEQ ID NO: 1882323 - DNA, 25 bp, Homo sapien
caggcattcgtttaagacgggaaag

SEQ ID NO: 1882324 - DNA, 25 bp, Homo sapien
gaactgaccaaattgccttgcgaaa

SEQ ID NO: 1882325 - DNA, 25 bp, Homo sapien
aaatactattgttccagccagagac

SEQ ID NO: 1882326 - DNA, 25 bp, Homo sapien
agcaatgcaagagcccaacgtcggt

SEQ ID NO: 1882327 - DNA, 25 bp, Homo sapien
gaatcccggtactgaaatgacagct

SEQ ID NO: 1882328 - DNA, 25 bp, Homo sapien
cgctgcggactggatcaattctgaa

SEQ ID NO: 1882329 - DNA, 25 bp, Homo sapien
agtagccgtgacgtgcaggcgaacc

SEQ ID NO: 1882330 - DNA, 25 bp, Homo sapien
aaataccgctttcgggacgtgcttg

SEQ ID NO: 1882331 - DNA, 25 bp, Homo sapien
tgaggatgcaaaaacctcccagacg

SEQ ID NO: 1882332 - DNA, 25 bp, Homo sapien
gagaaagacgatcaagtccagcatt

SEQ ID NO: 1882333 - DNA, 25 bp, Homo sapien
ataagcttgagccttccgatccgac

SEQ ID NO: 1882334 - DNA, 25 bp, Homo sapien
cgatccgaccacgaatactcctgta

SEQ ID NO: 1882335 - DNA, 25 bp, Homo sapien
cggtcacttctcgtctcagcgcttt

SEQ ID NO: 1882336 - DNA, 25 bp, Homo sapien
caacaaatctgccatagcagccgcc

SEQ ID NO: 1882337 - DNA, 25 bp, Homo sapien
tgatgagcacggcattgcagacatg

SEQ ID NO: 1882338 - DNA, 25 bp, Homo sapien
gagcacggcattgcagacatgcact

SEQ ID NO: 1882339 - DNA, 25 bp, Homo sapien
atcattgatgagcacggcattgcag

SEQ ID NO: 1882340 - DNA, 25 bp, Homo sapien
cagacatgcactgtcaaataaatga

SEQ ID NO: 1882341 - DNA, 25 bp, Homo sapien
tagaagcgcaaactctccaggtctt

SEQ ID NO: 1882342 - DNA, 25 bp, Homo sapien
gagaaatagcattgaaggtgagaaa

SEQ ID NO: 1882343 - DNA, 25 bp, Homo sapien
cgccttgcattgctgtgggttggct

SEQ ID NO: 1882344 - DNA, 25 bp, Homo sapien
gcttctcgccttgcattgctgtggg

SEQ ID NO: 1882345 - DNA, 25 bp, Homo sapien
gatacattgagaaatagcattgaag

SEQ ID NO: 1882346 - DNA, 25 bp, Homo sapien
cacttttgatgattgtgatattggc

SEQ ID NO: 1882347 - DNA, 25 bp, Homo sapien
cgagccaagtatggtgcagaaatga

SEQ ID NO: 1882348 - DNA, 25 bp, Homo sapien
ggcagataattaaattggcaatgtc

SEQ ID NO: 1882349 - DNA, 25 bp, Homo sapien
ggagctggttcaagtcgagccaagt

SEQ ID NO: 1882350 - DNA, 25 bp, Homo sapien
agaaacttctctagtaacaaactat

SEQ ID NO: 1882351 - DNA, 25 bp, Homo sapien
aggttctcggtgctctacacgttca

SEQ ID NO: 1882352 - DNA, 25 bp, Homo sapien
ggttctcggtgctctacacgttcag

SEQ ID NO: 1882353 - DNA, 25 bp, Homo sapien
gtaacaaactatagaaatgatccct

SEQ ID NO: 1882354 - DNA, 25 bp, Homo sapien
tcagtataggtgtgtgggttctctc

SEQ ID NO: 1882355 - DNA, 25 bp, Homo sapien
cagtggccacaagattttccccagt

SEQ ID NO: 1882356 - DNA, 25 bp, Homo sapien
aacttttcactcagaccagtggcca

SEQ ID NO: 1882357 - DNA, 25 bp, Homo sapien
tttttcaactggatgtgagcccatt

SEQ ID NO: 1882358 - DNA, 25 bp, Homo sapien
gccttcttagcacagtccttgtcca

SEQ ID NO: 1882359 - DNA, 25 bp, Homo sapien
ttctctttagccttcttagcacagt

SEQ ID NO: 1882360 - DNA, 25 bp, Homo sapien
tctttagccttcttagcacagtcct

SEQ ID NO: 1882361 - DNA, 25 bp, Homo sapien
accactttctctttagccttcttag

SEQ ID NO: 1882362 - DNA, 25 bp, Homo sapien
gtcctctgccaacatccgtgttttg

SEQ ID NO: 1882363 - DNA, 25 bp, Homo sapien
tggtcctctgccaacatccgtgttt

SEQ ID NO: 1882364 - DNA, 25 bp, Homo sapien
aaatggtcctctgccaacatccgtg

SEQ ID NO: 1882365 - DNA, 25 bp, Homo sapien
cataaatggtcctctgccaacatcc

SEQ ID NO: 1882366 - DNA, 25 bp, Homo sapien
aatttatgggaaacactcgcctgac

SEQ ID NO: 1882367 - DNA, 25 bp, Homo sapien
ttatgggaaacactcgcctgacttc

SEQ ID NO: 1882368 - DNA, 25 bp, Homo sapien
ctgaatttatgggaaacactcgcct

SEQ ID NO: 1882369 - DNA, 25 bp, Homo sapien
cagggtggaaggaagttgtttctgc

SEQ ID NO: 1882370 - DNA, 25 bp, Homo sapien
atcacagccaaggttagccaatgtg

SEQ ID NO: 1882371 - DNA, 25 bp, Homo sapien
tcaggtggttcttctttaactggta

SEQ ID NO: 1882372 - DNA, 25 bp, Homo sapien
cttctttaactggtatcttctatct

SEQ ID NO: 1882373 - DNA, 25 bp, Homo sapien
ggttagccaatgtgggagacaattg

SEQ ID NO: 1882374 - DNA, 25 bp, Homo sapien
ttttagccatattgcacagatgcca

SEQ ID NO: 1882375 - DNA, 25 bp, Homo sapien
tactggtccagaaatgttgaagtcc

SEQ ID NO: 1882376 - DNA, 25 bp, Homo sapien
tccagggtcatgtagaggtcacgtt

SEQ ID NO: 1882377 - DNA, 25 bp, Homo sapien
tcacattagaagtccttttagccat

SEQ ID NO: 1882378 - DNA, 25 bp, Homo sapien
tttcagctttgtcattcaatgatgc

SEQ ID NO: 1882379 - DNA, 25 bp, Homo sapien
agtcctcttgtccaatatccgtgtg

SEQ ID NO: 1882380 - DNA, 25 bp, Homo sapien
tgtggtagcccctgtaagcatttgg

SEQ ID NO: 1882381 - DNA, 25 bp, Homo sapien
ttgggtttgtgatccctgatatcca

SEQ ID NO: 1882382 - DNA, 25 bp, Homo sapien
caccagagatgactgttgaactttt

SEQ ID NO: 1882383 - DNA, 25 bp, Homo sapien
cagctgacataaaacaattctttgg

SEQ ID NO: 1882384 - DNA, 25 bp, Homo sapien
ctttggagtccaattgaactccttc

SEQ ID NO: 1882385 - DNA, 25 bp, Homo sapien
gacataaaacaattctttggagtcc

SEQ ID NO: 1882386 - DNA, 25 bp, Homo sapien
gacgagtcagaatgatcagtatgga

SEQ ID NO: 1882387 - DNA, 25 bp, Homo sapien
tatggatcagatccggagagatttc

SEQ ID NO: 1882388 - DNA, 25 bp, Homo sapien
tacatctcttgctggagagcttgat

SEQ ID NO: 1882389 - DNA, 25 bp, Homo sapien
aatactgtggctgtaaagtcagagc

SEQ ID NO: 1882390 - DNA, 25 bp, Homo sapien
attaagggcgctaagccacttttgg

SEQ ID NO: 1882391 - DNA, 25 bp, Homo sapien
gtgctctaaggcaggcaattaaggg

SEQ ID NO: 1882392 - DNA, 25 bp, Homo sapien
taaggcaggcaattaagggcgctaa

SEQ ID NO: 1882393 - DNA, 25 bp, Homo sapien
gcaggcaattaagggcgctaagcca

SEQ ID NO: 1882394 - DNA, 25 bp, Homo sapien
actattagtatcgaaaggttgtagc

SEQ ID NO: 1882395 - DNA, 25 bp, Homo sapien
cacatcaagccatcacatagttagc

SEQ ID NO: 1882396 - DNA, 25 bp, Homo sapien
ggttaattatgaacacacatcaagc

SEQ ID NO: 1882397 - DNA, 25 bp, Homo sapien
cagaagtggcaggtctatacaaaac

SEQ ID NO: 1882398 - DNA, 25 bp, Homo sapien
gcttcgtcttctatcccttgagtgc

SEQ ID NO: 1882399 - DNA, 25 bp, Homo sapien
ggcttcgtcttctatcccttgagtg

SEQ ID NO: 1882400 - DNA, 25 bp, Homo sapien
cttcgtcttctatcccttgagtgca

SEQ ID NO: 1882401 - DNA, 25 bp, Homo sapien
tgggcttcgtcttctatcccttgag

SEQ ID NO: 1882402 - DNA, 25 bp, Homo sapien
ctgcaaatgtggatgcaggttacct

SEQ ID NO: 1882403 - DNA, 25 bp, Homo sapien
tgtggatgcaggttacctggtatct

SEQ ID NO: 1882404 - DNA, 25 bp, Homo sapien
aaatgtggatgcaggttacctggta

SEQ ID NO: 1882405 - DNA, 25 bp, Homo sapien
gcaaatgtggatgcaggttacctgg

SEQ ID NO: 1882406 - DNA, 25 bp, Homo sapien
ttaatgacatgagcctgaatatagg

SEQ ID NO: 1882407 - DNA, 25 bp, Homo sapien
tgtggaagatgttaatgacatgagc

SEQ ID NO: 1882408 - DNA, 25 bp, Homo sapien
agcctgaatataggacaccacatca

SEQ ID NO: 1882409 - DNA, 25 bp, Homo sapien
gaatataggacaccacatcatcagc

SEQ ID NO: 1882410 - DNA, 25 bp, Homo sapien
gccacctgtcgagaatgaagttgac

SEQ ID NO: 1882411 - DNA, 25 bp, Homo sapien
aatcaatttgatggttcttctggat

SEQ ID NO: 1882412 - DNA, 25 bp, Homo sapien
taaggccacctgtcgagaatgaagt

SEQ ID NO: 1882413 - DNA, 25 bp, Homo sapien
ggaggtaaggccacctgtcgagaat

SEQ ID NO: 1882414 - DNA, 25 bp, Homo sapien
ttgcttttctctttcaaaataatac

SEQ ID NO: 1882415 - DNA, 25 bp, Homo sapien
tgcttttctctttcaaaataatacc

SEQ ID NO: 1882416 - DNA, 25 bp, Homo sapien
tttgcttttctctttcaaaataata

SEQ ID NO: 1882417 - DNA, 25 bp, Homo sapien
tgcaggcttgttcagtgtcgatgtg

SEQ ID NO: 1882418 - DNA, 25 bp, Homo sapien
tgcaggcgccagacatgtattttct

SEQ ID NO: 1882419 - DNA, 25 bp, Homo sapien
tatgctgctacgttccaaaatatgc

SEQ ID NO: 1882420 - DNA, 25 bp, Homo sapien
cacaggttgtgctttggtgtcctct

SEQ ID NO: 1882421 - DNA, 25 bp, Homo sapien
aaagatgcctgacccaaaattctgc

SEQ ID NO: 1882422 - DNA, 25 bp, Homo sapien
gatgccttcccctgtgtgcaaggaa

SEQ ID NO: 1882423 - DNA, 25 bp, Homo sapien
gcaaggaatatagaaccccgcactg

SEQ ID NO: 1882424 - DNA, 25 bp, Homo sapien
tgatcagggataaaaggcacaggtg

SEQ ID NO: 1882425 - DNA, 25 bp, Homo sapien
tctgttggagggatagtatgggagg

SEQ ID NO: 1882426 - DNA, 25 bp, Homo sapien
gctatctagctgaaggtaattcaga

SEQ ID NO: 1882427 - DNA, 25 bp, Homo sapien
ttattttctaagagcttgggaagcg

SEQ ID NO: 1882428 - DNA, 25 bp, Homo sapien
cttgggaagcgtggctatctagctg

SEQ ID NO: 1882429 - DNA, 25 bp, Homo sapien
cagtgatattagctatgtgctggca

SEQ ID NO: 1882430 - DNA, 25 bp, Homo sapien
ggcatttcatgtatatgtcactgga

SEQ ID NO: 1882431 - DNA, 25 bp, Homo sapien
cacatacatagcatttaggaatcca

SEQ ID NO: 1882432 - DNA, 25 bp, Homo sapien
tgtccccagcagtccatgtggtcag

SEQ ID NO: 1882433 - DNA, 25 bp, Homo sapien
gggatttaaccacctcaccaaatgc

SEQ ID NO: 1882434 - DNA, 25 bp, Homo sapien
ggatttaaccacctcaccaaatgct

SEQ ID NO: 1882435 - DNA, 25 bp, Homo sapien
gaatagatccaatcatttcactctc

SEQ ID NO: 1882436 - DNA, 25 bp, Homo sapien
tgtgaagtattctcagtagcttccc

SEQ ID NO: 1882437 - DNA, 25 bp, Homo sapien
tcccattgcctgtgataaactccat

SEQ ID NO: 1882438 - DNA, 25 bp, Homo sapien
caaggtctaattggagaatagatcc

SEQ ID NO: 1882439 - DNA, 25 bp, Homo sapien
attcttcatatttgtctcacttgtg

SEQ ID NO: 1882440 - DNA, 25 bp, Homo sapien
cgtgcatcgctgtggaattcttcat

SEQ ID NO: 1882441 - DNA, 25 bp, Homo sapien
taacattgccctggtatgctgaaga

SEQ ID NO: 1882442 - DNA, 25 bp, Homo sapien
gaagatttactgctacgtgcatcgc

SEQ ID NO: 1882443 - DNA, 25 bp, Homo sapien
aagattcaagcagagacagtcttac

SEQ ID NO: 1882444 - DNA, 25 bp, Homo sapien
agtgccctctgaaattctgatgagc

SEQ ID NO: 1882445 - DNA, 25 bp, Homo sapien
gcatcttcaacttgaggttccacat

SEQ ID NO: 1882446 - DNA, 25 bp, Homo sapien
caacttgaggttccacattacattc

SEQ ID NO: 1882447 - DNA, 25 bp, Homo sapien
gctgcaagtatggatagatgtttaa

SEQ ID NO: 1882448 - DNA, 25 bp, Homo sapien
cactctctttctaaagcatttgtca

SEQ ID NO: 1882449 - DNA, 25 bp, Homo sapien
tccttccattaggtaatctctgcag

SEQ ID NO: 1882450 - DNA, 25 bp, Homo sapien
tctcaggattttgtgtcgttgtttt

SEQ ID NO: 1882451 - DNA, 25 bp, Homo sapien
catttccttccattaggtaatctct

SEQ ID NO: 1882452 - DNA, 25 bp, Homo sapien
tatctttgatgtagtcaaaagttgt

SEQ ID NO: 1882453 - DNA, 25 bp, Homo sapien
caaagaagtcttcacaaacctcctc

SEQ ID NO: 1882454 - DNA, 25 bp, Homo sapien
ctttgatgtagtcaaaagttgtgac

SEQ ID NO: 1882455 - DNA, 25 bp, Homo sapien
caaaatctgaccatctttgatatct

SEQ ID NO: 1882456 - DNA, 25 bp, Homo sapien
taggtgcatgctttgaagggtcctg

SEQ ID NO: 1882457 - DNA, 25 bp, Homo sapien
ttctctcatggggtacataggtgca

SEQ ID NO: 1882458 - DNA, 25 bp, Homo sapien
gtacataggtgcatgctttgaaggg

SEQ ID NO: 1882459 - DNA, 25 bp, Homo sapien
ctttgaagggtcctgtgggatcttc

SEQ ID NO: 1882460 - DNA, 25 bp, Homo sapien
gagacctaagccaaatcagtaaaac

SEQ ID NO: 1882461 - DNA, 25 bp, Homo sapien
ctttttgctcagagacctaagccaa

SEQ ID NO: 1882462 - DNA, 25 bp, Homo sapien
aaactattacccaagcagatatcca

SEQ ID NO: 1882463 - DNA, 25 bp, Homo sapien
cagatatccaatgaagcaacagaac

SEQ ID NO: 1882464 - DNA, 25 bp, Homo sapien
tcatgccttgacagacattttagct

SEQ ID NO: 1882465 - DNA, 25 bp, Homo sapien
gcagcatcagttgatctttatgttc

SEQ ID NO: 1882466 - DNA, 25 bp, Homo sapien
ctcatccaagtcatttggcagcatc

SEQ ID NO: 1882467 - DNA, 25 bp, Homo sapien
atgccttgacagacattttagctga

SEQ ID NO: 1882468 - DNA, 25 bp, Homo sapien
ctctcttctaacaggagcaacttgg

SEQ ID NO: 1882469 - DNA, 25 bp, Homo sapien
tgacccccattaatgctgtaacttt

SEQ ID NO: 1882470 - DNA, 25 bp, Homo sapien
tctcttctaacaggagcaacttggg

SEQ ID NO: 1882471 - DNA, 25 bp, Homo sapien
aataatgacccccattaatgctgta

SEQ ID NO: 1882472 - DNA, 25 bp, Homo sapien
agttgttcaactggctcctgaaaag

SEQ ID NO: 1882473 - DNA, 25 bp, Homo sapien
gaagttgttcaactggctcctgaaa

SEQ ID NO: 1882474 - DNA, 25 bp, Homo sapien
tctatgaagttgttcaactggctcc

SEQ ID NO: 1882475 - DNA, 25 bp, Homo sapien
tagctctatgaagttgttcaactgg

SEQ ID NO: 1882476 - DNA, 25 bp, Homo sapien
tggagtggaggaagaggagagggag

SEQ ID NO: 1882477 - DNA, 25 bp, Homo sapien
agtggaggaagaggagagggagatg

SEQ ID NO: 1882478 - DNA, 25 bp, Homo sapien
gagtggaggaagaggagagggagat

SEQ ID NO: 1882479 - DNA, 25 bp, Homo sapien
ctggagtggaggaagaggagaggga

SEQ ID NO: 1882480 - DNA, 25 bp, Homo sapien
tattcctactcctgtgaagctcaca

SEQ ID NO: 1882481 - DNA, 25 bp, Homo sapien
ggctttttcatacgagacagggtaa

SEQ ID NO: 1882482 - DNA, 25 bp, Homo sapien
gagctatgcatgttgcagaaacgaa

SEQ ID NO: 1882483 - DNA, 25 bp, Homo sapien
tttgatagtcgggaagggtctcttg

SEQ ID NO: 1882484 - DNA, 25 bp, Homo sapien
caagcagatatgttgcaccatggat

SEQ ID NO: 1882485 - DNA, 25 bp, Homo sapien
caagaggcattgtgtaaccagaaag

SEQ ID NO: 1882486 - DNA, 25 bp, Homo sapien
tgctctgaccttcaagatgtggctt

SEQ ID NO: 1882487 - DNA, 25 bp, Homo sapien
tcaaacatcagtaagggagataggg

SEQ ID NO: 1882488 - DNA, 25 bp, Homo sapien
ttagatgggcctaaacacattgcat

SEQ ID NO: 1882489 - DNA, 25 bp, Homo sapien
ttaagatgatggtgcaactgctgcc

SEQ ID NO: 1882490 - DNA, 25 bp, Homo sapien
tccagggtcaatagagttaatgcag

SEQ ID NO: 1882491 - DNA, 25 bp, Homo sapien
ggatgccgagttactttctcactga

SEQ ID NO: 1882492 - DNA, 25 bp, Homo sapien
gggaccttgtctgttgttgagcctg

SEQ ID NO: 1882493 - DNA, 25 bp, Homo sapien
tcatctccaagaaagtgcctggact

SEQ ID NO: 1882494 - DNA, 25 bp, Homo sapien
tgaggtcatcgccttctttagtatc

SEQ ID NO: 1882495 - DNA, 25 bp, Homo sapien
tgcctggactatgaggtcatcgcct

SEQ ID NO: 1882496 - DNA, 25 bp, Homo sapien
gacctctttaagtgcttcatttgat

SEQ ID NO: 1882497 - DNA, 25 bp, Homo sapien
tttgatcttggggagcagttcaggc

SEQ ID NO: 1882498 - DNA, 25 bp, Homo sapien
atcttggggagcagttcaggcattc

SEQ ID NO: 1882499 - DNA, 25 bp, Homo sapien
tttctgacctctttaagtgcttcat

SEQ ID NO: 1882500 - DNA, 25 bp, Homo sapien
tgggtcaatgggaatacaagaagac

SEQ ID NO: 1882501 - DNA, 25 bp, Homo sapien
aagacctaaccttggtcagagattg

SEQ ID NO: 1882502 - DNA, 25 bp, Homo sapien
agacctaaccttggtcagagattgg

SEQ ID NO: 1882503 - DNA, 25 bp, Homo sapien
aatgctttttggctgtatgggtcaa

SEQ ID NO: 1882504 - DNA, 25 bp, Homo sapien
tattagcagcatttcgagtccacca

SEQ ID NO: 1882505 - DNA, 25 bp, Homo sapien
gcagcatttcgagtccaccaatcct

SEQ ID NO: 1882506 - DNA, 25 bp, Homo sapien
ttcgagtccaccaatcctccagttt

SEQ ID NO: 1882507 - DNA, 25 bp, Homo sapien
catttgttattagcagcatttcgag

SEQ ID NO: 1882508 - DNA, 25 bp, Homo sapien
ctcccactttgaaggcaatttgttc

SEQ ID NO: 1882509 - DNA, 25 bp, Homo sapien
tctgttctggtatctctttcagcca

SEQ ID NO: 1882510 - DNA, 25 bp, Homo sapien
aaggcaatttgttctgttctggtat

SEQ ID NO: 1882511 - DNA, 25 bp, Homo sapien
gcaatttgttctgttctggtatctc

SEQ ID NO: 1882512 - DNA, 25 bp, Homo sapien
atttagaatagtctcaaaaattggt

SEQ ID NO: 1882513 - DNA, 25 bp, Homo sapien
tttggggacctacaatggtcctctg

SEQ ID NO: 1882514 - DNA, 25 bp, Homo sapien
tagttagagtacgttccacaggaag

SEQ ID NO: 1882515 - DNA, 25 bp, Homo sapien
agtgtatgtgcgtaggaagggcttc

SEQ ID NO: 1882516 - DNA, 25 bp, Homo sapien
tacctctggtggtatagcaatgacc

SEQ ID NO: 1882517 - DNA, 25 bp, Homo sapien
gatccctgctatcgggagacatctc

SEQ ID NO: 1882518 - DNA, 25 bp, Homo sapien
ggctatcatatgagctttgaccacc

SEQ ID NO: 1882519 - DNA, 25 bp, Homo sapien
tgaccaatacagacgagatccctgc

SEQ ID NO: 1882520 - DNA, 25 bp, Homo sapien
cccaacttttgacagagctggctct

SEQ ID NO: 1882521 - DNA, 25 bp, Homo sapien
gagctggctcttgaaaggagattgg

SEQ ID NO: 1882522 - DNA, 25 bp, Homo sapien
aaggagattggaggcacagtggatg

SEQ ID NO: 1882523 - DNA, 25 bp, Homo sapien
ctggctcttgaaaggagattggagg

SEQ ID NO: 1882524 - DNA, 25 bp, Homo sapien
aaggacaccagtggaggtgaagcag

SEQ ID NO: 1882525 - DNA, 25 bp, Homo sapien
atgatgatgggcttcggaacagcta

SEQ ID NO: 1882526 - DNA, 25 bp, Homo sapien
cttcggaacagctatgggtgtggca

SEQ ID NO: 1882527 - DNA, 25 bp, Homo sapien
gatgatgggcttcggaacagctatg

SEQ ID NO: 1882528 - DNA, 25 bp, Homo sapien
tgctttagcagaacgttggagttac

SEQ ID NO: 1882529 - DNA, 25 bp, Homo sapien
tgtgatcaaatgctttagcagaacg

SEQ ID NO: 1882530 - DNA, 25 bp, Homo sapien
caaatgctttagcagaacgttggag

SEQ ID NO: 1882531 - DNA, 25 bp, Homo sapien
ctttagcagaacgttggagttacat

SEQ ID NO: 1882532 - DNA, 25 bp, Homo sapien
gcaacactaataaaaacgattatgt

SEQ ID NO: 1882533 - DNA, 25 bp, Homo sapien
caactgactggctgaccagtgatgc

SEQ ID NO: 1882534 - DNA, 25 bp, Homo sapien
ctctctgagacttggcatggctttc

SEQ ID NO: 1882535 - DNA, 25 bp, Homo sapien
gaataagcactaacctttcttctgg

SEQ ID NO: 1882536 - DNA, 25 bp, Homo sapien
gagtgtgaaaaagtcccgaaccaca

SEQ ID NO: 1882537 - DNA, 25 bp, Homo sapien
ggttatcagagggtactcctgttgc

SEQ ID NO: 1882538 - DNA, 25 bp, Homo sapien
taaataaggctgaactaaacactga

SEQ ID NO: 1882539 - DNA, 25 bp, Homo sapien
taaacactgagcaacacccacaggt

SEQ ID NO: 1882540 - DNA, 25 bp, Homo sapien
agtcggaaccagctgatgccgctgc

SEQ ID NO: 1882541 - DNA, 25 bp, Homo sapien
gcaaaggcaatgagagtcggaacca

SEQ ID NO: 1882542 - DNA, 25 bp, Homo sapien
caatgagagtcggaaccagctgatg

SEQ ID NO: 1882543 - DNA, 25 bp, Homo sapien
ccctggataccaggcaaaggcaatg

SEQ ID NO: 1882544 - DNA, 25 bp, Homo sapien
caaaatatgggacgggaatcagagc

SEQ ID NO: 1882545 - DNA, 25 bp, Homo sapien
ttatggtccaaaatatgggacggga

SEQ ID NO: 1882546 - DNA, 25 bp, Homo sapien
ggacgggaatcagagctggtagaaa

SEQ ID NO: 1882547 - DNA, 25 bp, Homo sapien
tggtccaaaatatgggacgggaatc

SEQ ID NO: 1882548 - DNA, 25 bp, Homo sapien
tgctgttcctcgcatagggctggac

SEQ ID NO: 1882549 - DNA, 25 bp, Homo sapien
gacagagctagtcccggtttcagca

SEQ ID NO: 1882550 - DNA, 25 bp, Homo sapien
cctgagtatttgaaacaatccgatg

SEQ ID NO: 1882551 - DNA, 25 bp, Homo sapien
gtttcagcacctccggcgctggaca

SEQ ID NO: 1882552 - DNA, 25 bp, Homo sapien
tactggagatgcatctaaattacat

SEQ ID NO: 1882553 - DNA, 25 bp, Homo sapien
actggagatgcatctaaattacatc

SEQ ID NO: 1882554 - DNA, 25 bp, Homo sapien
tggctatcaggcgtatttatcccga

SEQ ID NO: 1882555 - DNA, 25 bp, Homo sapien
tgtgcttaccgatgcatcccatacg

SEQ ID NO: 1882556 - DNA, 25 bp, Homo sapien
tcccctttgcaggaacgagtctttg

SEQ ID NO: 1882557 - DNA, 25 bp, Homo sapien
gaacgtggtccacccagggatgtaa

SEQ ID NO: 1882558 - DNA, 25 bp, Homo sapien
ggtaggacctaggaggctgctttaa

SEQ ID NO: 1882559 - DNA, 25 bp, Homo sapien
agagcccaattctaggtccgggtag

SEQ ID NO: 1882560 - DNA, 25 bp, Homo sapien
ctaagactggtgatttccaccaaaa

SEQ ID NO: 1882561 - DNA, 25 bp, Homo sapien
tcttcttggcccacattgccctagg

SEQ ID NO: 1882562 - DNA, 25 bp, Homo sapien
aatttcctgctcaccactaaattca

SEQ ID NO: 1882563 - DNA, 25 bp, Homo sapien
ctcatgtccaatttcctgctcacca

SEQ ID NO: 1882564 - DNA, 25 bp, Homo sapien
tgtccaatttcctgctcaccactaa

SEQ ID NO: 1882565 - DNA, 25 bp, Homo sapien
gtccaatttcctgctcaccactaaa

SEQ ID NO: 1882566 - DNA, 25 bp, Homo sapien
aaaacatcaatggaaacttggccaa

SEQ ID NO: 1882567 - DNA, 25 bp, Homo sapien
gagggtctgtgcagaacggcaataa

SEQ ID NO: 1882568 - DNA, 25 bp, Homo sapien
acttggccaaagaatgaaactgagt

SEQ ID NO: 1882569 - DNA, 25 bp, Homo sapien
tgtgcagaacggcaataaaacatca

SEQ ID NO: 1882570 - DNA, 25 bp, Homo sapien
tcaggcaggctttaatggcaaagca

SEQ ID NO: 1882571 - DNA, 25 bp, Homo sapien
taaacagtaaacacctcaggcaggc

SEQ ID NO: 1882572 - DNA, 25 bp, Homo sapien
tattgtggaacctgtctcactgccc

SEQ ID NO: 1882573 - DNA, 25 bp, Homo sapien
gacaccagcctaagactgccgagtt

SEQ ID NO: 1882574 - DNA, 25 bp, Homo sapien
tgggccttctagttaccttagacca

SEQ ID NO: 1882575 - DNA, 25 bp, Homo sapien
ggtgtttatgtcttcttgacccagg

SEQ ID NO: 1882576 - DNA, 25 bp, Homo sapien
gtgtttatgtcttcttgacccagga

SEQ ID NO: 1882577 - DNA, 25 bp, Homo sapien
cgctccgacacttcccacattgaat

SEQ ID NO: 1882578 - DNA, 25 bp, Homo sapien
tgcagcctttgggttctctacaatt

SEQ ID NO: 1882579 - DNA, 25 bp, Homo sapien
ggttctctacaattcgctccgacac

SEQ ID NO: 1882580 - DNA, 25 bp, Homo sapien
acattgaatctttttcacgtgtcat

SEQ ID NO: 1882581 - DNA, 25 bp, Homo sapien
taaaaggccacataagaaactcttc

SEQ ID NO: 1882582 - DNA, 25 bp, Homo sapien
cttagaatgatcctcttgaatagga

SEQ ID NO: 1882583 - DNA, 25 bp, Homo sapien
gattcagggtctgatttgctcagta

SEQ ID NO: 1882584 - DNA, 25 bp, Homo sapien
cattcatgtcaattgtcatatcaac

SEQ ID NO: 1882585 - DNA, 25 bp, Homo sapien
agcagccagcgatgtaggaataatt

SEQ ID NO: 1882586 - DNA, 25 bp, Homo sapien
atttctgcatgagtcatttgggtca

SEQ ID NO: 1882587 - DNA, 25 bp, Homo sapien
cagcagccagcgatgtaggaataat

SEQ ID NO: 1882588 - DNA, 25 bp, Homo sapien
gagatttctgcatgagtcatttggg

SEQ ID NO: 1882589 - DNA, 25 bp, Homo sapien
taggtttcaggccatcagtcctagg

SEQ ID NO: 1882590 - DNA, 25 bp, Homo sapien
caggaagtgggtgcttattggtcca

SEQ ID NO: 1882591 - DNA, 25 bp, Homo sapien
tattggtccatagctggccatggac

SEQ ID NO: 1882592 - DNA, 25 bp, Homo sapien
ccatggacaggcctagaaaaagccc

SEQ ID NO: 1882593 - DNA, 25 bp, Homo sapien
gagccaccgtgcctggcccactctt

SEQ ID NO: 1882594 - DNA, 25 bp, Homo sapien
gccaccgtgcctggcccactctttt

SEQ ID NO: 1882595 - DNA, 25 bp, Homo sapien
aaaatagtttctacatttgggccat

SEQ ID NO: 1882596 - DNA, 25 bp, Homo sapien
caccgtgcctggcccactctttttt

SEQ ID NO: 1882597 - DNA, 25 bp, Homo sapien
taaaactctgcttagggacaccaac

SEQ ID NO: 1882598 - DNA, 25 bp, Homo sapien
tctgacaccatgacagggaatcttc

SEQ ID NO: 1882599 - DNA, 25 bp, Homo sapien
cagcgatctatagtttgggacatca

SEQ ID NO: 1882600 - DNA, 25 bp, Homo sapien
caacaaatgatgagattagccagcg

SEQ ID NO: 1882601 - DNA, 25 bp, Homo sapien
tgaacttcaccaaatttactcctct

SEQ ID NO: 1882602 - DNA, 25 bp, Homo sapien
ggcctccactgtgtcttttacggtg

SEQ ID NO: 1882603 - DNA, 25 bp, Homo sapien
ccagtgacatccacattgcccattt

SEQ ID NO: 1882604 - DNA, 25 bp, Homo sapien
gtgacatccacattgcccatttttg

SEQ ID NO: 1882605 - DNA, 25 bp, Homo sapien
tctcatttccttgtaatctctcctc

SEQ ID NO: 1882606 - DNA, 25 bp, Homo sapien
gatctcatttccttgtaatctctcc

SEQ ID NO: 1882607 - DNA, 25 bp, Homo sapien
tcagatgaagatctcatttccttgt

SEQ ID NO: 1882608 - DNA, 25 bp, Homo sapien
agatgaagatctcatttccttgtaa

SEQ ID NO: 1882609 - DNA, 25 bp, Homo sapien
catctcgacactgaaactttttcat

SEQ ID NO: 1882610 - DNA, 25 bp, Homo sapien
tcgacactgaaactttttcatcccc

SEQ ID NO: 1882611 - DNA, 25 bp, Homo sapien
tctcgacactgaaactttttcatcc

SEQ ID NO: 1882612 - DNA, 25 bp, Homo sapien
gacactgaaactttttcatccccat

SEQ ID NO: 1882613 - DNA, 25 bp, Homo sapien
cagataaaggcaagggtgcactccc

SEQ ID NO: 1882614 - DNA, 25 bp, Homo sapien
ggattcagtccctcagcctatagga

SEQ ID NO: 1882615 - DNA, 25 bp, Homo sapien
cctcttgtggaaaggtcagaatgca

SEQ ID NO: 1882616 - DNA, 25 bp, Homo sapien
gacttagtctgatgagcccaatgag

SEQ ID NO: 1882617 - DNA, 25 bp, Homo sapien
tgttcctctatgtggagtatctgcg

SEQ ID NO: 1882618 - DNA, 25 bp, Homo sapien
gagtatctgcggctttgataagtgt

SEQ ID NO: 1882619 - DNA, 25 bp, Homo sapien
ctttgataagtgtatggttctgtag

SEQ ID NO: 1882620 - DNA, 25 bp, Homo sapien
taagtgtatggttctgtaggtaaac

SEQ ID NO: 1882621 - DNA, 25 bp, Homo sapien
tcaaagttgcgaatacttgaaggat

SEQ ID NO: 1882622 - DNA, 25 bp, Homo sapien
tgtcccttttttgtccaccagctga

SEQ ID NO: 1882623 - DNA, 25 bp, Homo sapien
ccttttttgtccaccagctgatttc

SEQ ID NO: 1882624 - DNA, 25 bp, Homo sapien
caagaaagatttctgtaggatgcaa

SEQ ID NO: 1882625 - DNA, 25 bp, Homo sapien
cataggttgtaagaagttccctgac

SEQ ID NO: 1882626 - DNA, 25 bp, Homo sapien
cctgaccgaacagaatccttcatac

SEQ ID NO: 1882627 - DNA, 25 bp, Homo sapien
agttccctgaccgaacagaatcctt

SEQ ID NO: 1882628 - DNA, 25 bp, Homo sapien
tcagacacatctgtacataggttgt

SEQ ID NO: 1882629 - DNA, 25 bp, Homo sapien
gcttgtgtttgacatgatccacagc

SEQ ID NO: 1882630 - DNA, 25 bp, Homo sapien
gtctcagggcttgtgtttgacatga

SEQ ID NO: 1882631 - DNA, 25 bp, Homo sapien
ccacagcgtgtctcagggcttgtgt

SEQ ID NO: 1882632 - DNA, 25 bp, Homo sapien
cagcgtgtctcagggcttgtgtttg

SEQ ID NO: 1882633 - DNA, 25 bp, Homo sapien
cacaaggcaccatttagaaggaaga

SEQ ID NO: 1882634 - DNA, 25 bp, Homo sapien
tcagtccctacagagagctatcctt

SEQ ID NO: 1882635 - DNA, 25 bp, Homo sapien
gaactcctgggaagcaaaaagtgga

SEQ ID NO: 1882636 - DNA, 25 bp, Homo sapien
gactgattgagtccttgctgaggga

SEQ ID NO: 1882637 - DNA, 25 bp, Homo sapien
tttctttccaggaaccatctggctc

SEQ ID NO: 1882638 - DNA, 25 bp, Homo sapien
tctggctcacctcctttttgtgaac

SEQ ID NO: 1882639 - DNA, 25 bp, Homo sapien
tctgcccagggcttgtgattactgc

SEQ ID NO: 1882640 - DNA, 25 bp, Homo sapien
tgtgattactgcaatttctttgttc

SEQ ID NO: 1882641 - DNA, 25 bp, Homo sapien
aaagccacgagtttccaacgatctg

SEQ ID NO: 1882642 - DNA, 25 bp, Homo sapien
caggcttacttgtgtcacccatgga

SEQ ID NO: 1882643 - DNA, 25 bp, Homo sapien
gaagggcctggaaccaaaagcagca

SEQ ID NO: 1882644 - DNA, 25 bp, Homo sapien
acctctttgctacagggtaacctag

SEQ ID NO: 1882645 - DNA, 25 bp, Homo sapien
ggcctcaaccacttggaatataaac

SEQ ID NO: 1882646 - DNA, 25 bp, Homo sapien
caaccacttggaatataaaccacct

SEQ ID NO: 1882647 - DNA, 25 bp, Homo sapien
cctcaaccacttggaatataaacca

SEQ ID NO: 1882648 - DNA, 25 bp, Homo sapien
ctggcctcaaccacttggaatataa

SEQ ID NO: 1882649 - DNA, 25 bp, Homo sapien
aaggatgatggagtcactattggcc

SEQ ID NO: 1882650 - DNA, 25 bp, Homo sapien
gtgctcatcttcactaaagggtcgt

SEQ ID NO: 1882651 - DNA, 25 bp, Homo sapien
cgtgttgatgctctttcctgactgt

SEQ ID NO: 1882652 - DNA, 25 bp, Homo sapien
gcagcagtgaggagacacggcatct

SEQ ID NO: 1882653 - DNA, 25 bp, Homo sapien
gacacggcatctaagtgctcatctt

SEQ ID NO: 1882654 - DNA, 25 bp, Homo sapien
ggtggaataaacagccctacttggc

SEQ ID NO: 1882655 - DNA, 25 bp, Homo sapien
tctgattctcgatgaggtggaataa

SEQ ID NO: 1882656 - DNA, 25 bp, Homo sapien
ttcatgtctgattctcgatgaggtg

SEQ ID NO: 1882657 - DNA, 25 bp, Homo sapien
gaggtggaataaacagccctacttg

SEQ ID NO: 1882658 - DNA, 25 bp, Homo sapien
gtcttgagcactatccagcagcttc

SEQ ID NO: 1882659 - DNA, 25 bp, Homo sapien
agaagacattgctttacacacgtac

SEQ ID NO: 1882660 - DNA, 25 bp, Homo sapien
ctatcaaaagtgtcttctagggcaa

SEQ ID NO: 1882661 - DNA, 25 bp, Homo sapien
aaaagtgtcttctagggcaacagaa

SEQ ID NO: 1882662 - DNA, 25 bp, Homo sapien
tctaggcaccaaggacaaagttgaa

SEQ ID NO: 1882663 - DNA, 25 bp, Homo sapien
gaatacctcccatgtgtaagaagct

SEQ ID NO: 1882664 - DNA, 25 bp, Homo sapien
caaaaggaagggacaggcatcaaaa

SEQ ID NO: 1882665 - DNA, 25 bp, Homo sapien
gagggacctagggagataatgctaa

SEQ ID NO: 1882666 - DNA, 25 bp, Homo sapien
ttggatttgggcttcacgcaatagc

SEQ ID NO: 1882667 - DNA, 25 bp, Homo sapien
tcctgttggcttgcagaccactgcc

SEQ ID NO: 1882668 - DNA, 25 bp, Homo sapien
tgtttaggcaatcaagtgtctgcgg

SEQ ID NO: 1882669 - DNA, 25 bp, Homo sapien
gactttgcagaaagcccagtgagga

SEQ ID NO: 1882670 - DNA, 25 bp, Homo sapien
caagtagtatagatagaagccaagg

SEQ ID NO: 1882671 - DNA, 25 bp, Homo sapien
tcaaagttcagagcttaagaacaag

SEQ ID NO: 1882672 - DNA, 25 bp, Homo sapien
agtatagatagaagccaagggtatg

SEQ ID NO: 1882673 - DNA, 25 bp, Homo sapien
cttaagaacaagtagtatagataga

SEQ ID NO: 1882674 - DNA, 25 bp, Homo sapien
gggtagttgcagaagcagaagccaa

SEQ ID NO: 1882675 - DNA, 25 bp, Homo sapien
catgaaatctacttgagtggtgcta

SEQ ID NO: 1882676 - DNA, 25 bp, Homo sapien
tataacacatcttggaacgccatgc

SEQ ID NO: 1882677 - DNA, 25 bp, Homo sapien
gccaaatacgaaagctgtgaaggtt

SEQ ID NO: 1882678 - DNA, 25 bp, Homo sapien
tttattatgttttcaaaaagtgaca

SEQ ID NO: 1882679 - DNA, 25 bp, Homo sapien
gctagttagcaaatcctaatgttag

SEQ ID NO: 1882680 - DNA, 25 bp, Homo sapien
cctcacaaagccagtagtcttatat

SEQ ID NO: 1882681 - DNA, 25 bp, Homo sapien
tagccatgctcccatttttgatgaa

SEQ ID NO: 1882682 - DNA, 25 bp, Homo sapien
aaatatagttgtcttatagccatgc

SEQ ID NO: 1882683 - DNA, 25 bp, Homo sapien
catcacttatgtctgaatcttcatc

SEQ ID NO: 1882684 - DNA, 25 bp, Homo sapien
gatttcttccctttacaacaggata

SEQ ID NO: 1882685 - DNA, 25 bp, Homo sapien
tctactccttcaataaccgatttct

SEQ ID NO: 1882686 - DNA, 25 bp, Homo sapien
tcaagcagaatagacagagggctca

SEQ ID NO: 1882687 - DNA, 25 bp, Homo sapien
aaaggaaggtcaaatcacgcgtggg

SEQ ID NO: 1882688 - DNA, 25 bp, Homo sapien
gaaggtcaaatcacgcgtgggatat

SEQ ID NO: 1882689 - DNA, 25 bp, Homo sapien
aatcacgcgtgggatatctgcactt

SEQ ID NO: 1882690 - DNA, 25 bp, Homo sapien
gtcaaatcacgcgtgggatatctgc

SEQ ID NO: 1882691 - DNA, 25 bp, Homo sapien
ttaccaaaatagtaagcagcactga

SEQ ID NO: 1882692 - DNA, 25 bp, Homo sapien
gaaccagaacttgtgaaggaatagg

SEQ ID NO: 1882693 - DNA, 25 bp, Homo sapien
gaataggtatgtccgggtaacagta

SEQ ID NO: 1882694 - DNA, 25 bp, Homo sapien
aaatagtaagcagcactgaagaacc

SEQ ID NO: 1882695 - DNA, 25 bp, Homo sapien
gctaatgactaagatcatatggcta

SEQ ID NO: 1882696 - DNA, 25 bp, Homo sapien
gaaacttaggtctctctccaaagcc

SEQ ID NO: 1882697 - DNA, 25 bp, Homo sapien
cactctttcaatcaccttaatgtag

SEQ ID NO: 1882698 - DNA, 25 bp, Homo sapien
taaaagactatggtgagataggttc

SEQ ID NO: 1882699 - DNA, 25 bp, Homo sapien
aaatctggcataagtgaacccatgc

SEQ ID NO: 1882700 - DNA, 25 bp, Homo sapien
tacatgcaattagaagaccaatctc

SEQ ID NO: 1882701 - DNA, 25 bp, Homo sapien
aatggcaaaaagatcctacatgcaa

SEQ ID NO: 1882702 - DNA, 25 bp, Homo sapien
tgcatctaatagaggatactaacct

SEQ ID NO: 1882703 - DNA, 25 bp, Homo sapien
taaatggaggggagtgccgttcttc

SEQ ID NO: 1882704 - DNA, 25 bp, Homo sapien
ggagtgccgttcttcaccatctgcc

SEQ ID NO: 1882705 - DNA, 25 bp, Homo sapien
gaggggagtgccgttcttcaccatc

SEQ ID NO: 1882706 - DNA, 25 bp, Homo sapien
cctgaataaatggaggggagtgccg

SEQ ID NO: 1882707 - DNA, 25 bp, Homo sapien
gctttaggaatctcagaagttcaag

SEQ ID NO: 1882708 - DNA, 25 bp, Homo sapien
tggtagataaatacccagttggttc

SEQ ID NO: 1882709 - DNA, 25 bp, Homo sapien
ctttcctgaggcacacagactttca

SEQ ID NO: 1882710 - DNA, 25 bp, Homo sapien
tctaaaatcagcatctacttggcag

SEQ ID NO: 1882711 - DNA, 25 bp, Homo sapien
ggtaatggataccacatttgccctg

SEQ ID NO: 1882712 - DNA, 25 bp, Homo sapien
ggagagttctcatccagtctcacaa

SEQ ID NO: 1882713 - DNA, 25 bp, Homo sapien
tcagttggctgggtcataatctgtg

SEQ ID NO: 1882714 - DNA, 25 bp, Homo sapien
ccacttgatgtttaatgaacgactc

SEQ ID NO: 1882715 - DNA, 25 bp, Homo sapien
caaatggtttcagaaggataggtac

SEQ ID NO: 1882716 - DNA, 25 bp, Homo sapien
tatctcttggtaccctagtttctcc

SEQ ID NO: 1882717 - DNA, 25 bp, Homo sapien
gaaaataagtcaatgtgctcacttg

SEQ ID NO: 1882718 - DNA, 25 bp, Homo sapien
tacaacttatgtggctctttatggc

SEQ ID NO: 1882719 - DNA, 25 bp, Homo sapien
gctgctttaatatctctccagggag

SEQ ID NO: 1882720 - DNA, 25 bp, Homo sapien
ccagggagattaacttttctcagaa

SEQ ID NO: 1882721 - DNA, 25 bp, Homo sapien
gactcatttgaaacctaatcatttt

SEQ ID NO: 1882722 - DNA, 25 bp, Homo sapien
tgttgaataaatgtcagatcgcctc

SEQ ID NO: 1882723 - DNA, 25 bp, Homo sapien
ccatcccattatccctgaagtctct

SEQ ID NO: 1882724 - DNA, 25 bp, Homo sapien
ctagttccatcccattatccctgaa

SEQ ID NO: 1882725 - DNA, 25 bp, Homo sapien
cctgctccactagttccatcccatt

SEQ ID NO: 1882726 - DNA, 25 bp, Homo sapien
tgctccactagttccatcccattat

SEQ ID NO: 1882727 - DNA, 25 bp, Homo sapien
tcatgaccactgtttagttcaggct

SEQ ID NO: 1882728 - DNA, 25 bp, Homo sapien
tctaaagccttttatgatatgactc

SEQ ID NO: 1882729 - DNA, 25 bp, Homo sapien
caaagtactcagtaactagagtgtc

SEQ ID NO: 1882730 - DNA, 25 bp, Homo sapien
ttttatctcagctggtaacaccaaa

SEQ ID NO: 1882731 - DNA, 25 bp, Homo sapien
ggttgaattgcctttatgattatca

SEQ ID NO: 1882732 - DNA, 25 bp, Homo sapien
gggttgaattgcctttatgattatc

SEQ ID NO: 1882733 - DNA, 25 bp, Homo sapien
ttgaattgcctttatgattatcaga

SEQ ID NO: 1882734 - DNA, 25 bp, Homo sapien
gttgaattgcctttatgattatcag

SEQ ID NO: 1882735 - DNA, 25 bp, Homo sapien
ttttggcttccatacataacatatt

SEQ ID NO: 1882736 - DNA, 25 bp, Homo sapien
tctattaagtaattttggcttccat

SEQ ID NO: 1882737 - DNA, 25 bp, Homo sapien
gtgtgaaggacaataagcagaagta

SEQ ID NO: 1882738 - DNA, 25 bp, Homo sapien
ctagtgtgaaggacaataagcagaa

SEQ ID NO: 1882739 - DNA, 25 bp, Homo sapien
gctagtgtgaaggacaataagcaga

SEQ ID NO: 1882740 - DNA, 25 bp, Homo sapien
gtagctagtgtgaaggacaataagc

SEQ ID NO: 1882741 - DNA, 25 bp, Homo sapien
agtgcttggggcctggttctacctc

SEQ ID NO: 1882742 - DNA, 25 bp, Homo sapien
gaaccatatgccaatatttcgaatt

SEQ ID NO: 1882743 - DNA, 25 bp, Homo sapien
aaccatatgccaatatttcgaattc

SEQ ID NO: 1882744 - DNA, 25 bp, Homo sapien
agaaccatatgccaatatttcgaat

SEQ ID NO: 1882745 - DNA, 25 bp, Homo sapien
tgttataagaatataatcaagaggg

SEQ ID NO: 1882746 - DNA, 25 bp, Homo sapien
taagaatataatcaagagggaaaac

SEQ ID NO: 1882747 - DNA, 25 bp, Homo sapien
tataagaatataatcaagagggaaa

SEQ ID NO: 1882748 - DNA, 25 bp, Homo sapien
taattgttataagaatataatcaag

SEQ ID NO: 1882749 - DNA, 25 bp, Homo sapien
tcagtggattactcaggttagctcc

SEQ ID NO: 1882750 - DNA, 25 bp, Homo sapien
aaagcatattcagtggattactcag

SEQ ID NO: 1882751 - DNA, 25 bp, Homo sapien
ggattactcaggttagctccaaaaa

SEQ ID NO: 1882752 - DNA, 25 bp, Homo sapien
tattcagtggattactcaggttagc

SEQ ID NO: 1882753 - DNA, 25 bp, Homo sapien
agatgaaaaatattccccagacgat

SEQ ID NO: 1882754 - DNA, 25 bp, Homo sapien
gcaatgcaactaagatgaaaaatat

SEQ ID NO: 1882755 - DNA, 25 bp, Homo sapien
gaaattacaaacagcaatgcaacta

SEQ ID NO: 1882756 - DNA, 25 bp, Homo sapien
caactaagatgaaaaatattcccca

SEQ ID NO: 1882757 - DNA, 25 bp, Homo sapien
tgtttcaggctattaatttctcttt

SEQ ID NO: 1882758 - DNA, 25 bp, Homo sapien
aactgctacagaaatgaagtaagac

SEQ ID NO: 1882759 - DNA, 25 bp, Homo sapien
ttattggcaatggagcctggacaac

SEQ ID NO: 1882760 - DNA, 25 bp, Homo sapien
acattattggcaatggagcctggac

SEQ ID NO: 1882761 - DNA, 25 bp, Homo sapien
cagtcatccggaagcaattcttcat

SEQ ID NO: 1882762 - DNA, 25 bp, Homo sapien
ccggaagcaattcttcatataattg

SEQ ID NO: 1882763 - DNA, 25 bp, Homo sapien
gcctcctggtcagtcatccggaagc

SEQ ID NO: 1882764 - DNA, 25 bp, Homo sapien
gtcatccggaagcaattcttcatat

SEQ ID NO: 1882765 - DNA, 25 bp, Homo sapien
tacccgtttgatcttggtattgatg

SEQ ID NO: 1882766 - DNA, 25 bp, Homo sapien
ttgaaggattcttacccgtttgatc

SEQ ID NO: 1882767 - DNA, 25 bp, Homo sapien
tcttacccgtttgatcttggtattg

SEQ ID NO: 1882768 - DNA, 25 bp, Homo sapien
gattcttacccgtttgatcttggta

SEQ ID NO: 1882769 - DNA, 25 bp, Homo sapien
ccagatatacttaagagtttcacat

SEQ ID NO: 1882770 - DNA, 25 bp, Homo sapien
ccagggacagaccactttccagata

SEQ ID NO: 1882771 - DNA, 25 bp, Homo sapien
atacttaagagtttcacatcctcct

SEQ ID NO: 1882772 - DNA, 25 bp, Homo sapien
acctccagggacagaccactttcca

SEQ ID NO: 1882773 - DNA, 25 bp, Homo sapien
cctaaggaaaattgttggctgtaca

SEQ ID NO: 1882774 - DNA, 25 bp, Homo sapien
taaggaaaattgttggctgtacaga

SEQ ID NO: 1882775 - DNA, 25 bp, Homo sapien
ctaaggaaaattgttggctgtacag

SEQ ID NO: 1882776 - DNA, 25 bp, Homo sapien
agcccctaaggaaaattgttggctg

SEQ ID NO: 1882777 - DNA, 25 bp, Homo sapien
ccttaaagtgataatctttgtcagc

SEQ ID NO: 1882778 - DNA, 25 bp, Homo sapien
ccaccttaaagtgataatctttgtc

SEQ ID NO: 1882779 - DNA, 25 bp, Homo sapien
tatccaccttaaagtgataatcttt

SEQ ID NO: 1882780 - DNA, 25 bp, Homo sapien
cattatccaccttaaagtgataatc

SEQ ID NO: 1882781 - DNA, 25 bp, Homo sapien
aaatagatagttccagggcctccgg

SEQ ID NO: 1882782 - DNA, 25 bp, Homo sapien
caaatagatagttccagggcctccg

SEQ ID NO: 1882783 - DNA, 25 bp, Homo sapien
accaaatagatagttccagggcctc

SEQ ID NO: 1882784 - DNA, 25 bp, Homo sapien
atagatagttccagggcctccgggg

SEQ ID NO: 1882785 - DNA, 25 bp, Homo sapien
tatacaatgagcatatttggaagtc

SEQ ID NO: 1882786 - DNA, 25 bp, Homo sapien
cccaggtactaagcaaggaacccat

SEQ ID NO: 1882787 - DNA, 25 bp, Homo sapien
tgtgctattgtatacaaaggtctgg

SEQ ID NO: 1882788 - DNA, 25 bp, Homo sapien
tttggaagtctgtggccaacagttt

SEQ ID NO: 1882789 - DNA, 25 bp, Homo sapien
tagtagttaccagggaatgcagaaa

SEQ ID NO: 1882790 - DNA, 25 bp, Homo sapien
gcacaattcttatgtgagacacctg

SEQ ID NO: 1882791 - DNA, 25 bp, Homo sapien
ggatatgcccattacccagaatgtg

SEQ ID NO: 1882792 - DNA, 25 bp, Homo sapien
ccagaggtctgccatgagagggcct

SEQ ID NO: 1882793 - DNA, 25 bp, Homo sapien
tctctccaagaggtactacataaac

SEQ ID NO: 1882794 - DNA, 25 bp, Homo sapien
tctccaagaggtactacataaactt

SEQ ID NO: 1882795 - DNA, 25 bp, Homo sapien
tcaatctctccaagaggtactacat

SEQ ID NO: 1882796 - DNA, 25 bp, Homo sapien
ctacataaacttggggaagagtgac

SEQ ID NO: 1882797 - DNA, 25 bp, Homo sapien
tttaaggcgcgtttatcccttgctg

SEQ ID NO: 1882798 - DNA, 25 bp, Homo sapien
gacgcagagcgccacaaaattttgt

SEQ ID NO: 1882799 - DNA, 25 bp, Homo sapien
gtccaccagctgttttcaatgaatt

SEQ ID NO: 1882800 - DNA, 25 bp, Homo sapien
ctctcttcttaagtgttcgtaacct

SEQ ID NO: 1882801 - DNA, 25 bp, Homo sapien
agtattatgctcattagaggcttcc

SEQ ID NO: 1882802 - DNA, 25 bp, Homo sapien
tataggcatgccagtacacctagct

SEQ ID NO: 1882803 - DNA, 25 bp, Homo sapien
cctatatttgacgttaatgggaatg

SEQ ID NO: 1882804 - DNA, 25 bp, Homo sapien
gtaacaaggatactaacattactcc

SEQ ID NO: 1882805 - DNA, 25 bp, Homo sapien
cgttcataagcagcgcttctagtgc

SEQ ID NO: 1882806 - DNA, 25 bp, Homo sapien
tttccaaacgttcataagcagcgct

SEQ ID NO: 1882807 - DNA, 25 bp, Homo sapien
gatttaaaggtaacgcagacatgcc

SEQ ID NO: 1882808 - DNA, 25 bp, Homo sapien
taatcgtttgaatgtgttgttctac

SEQ ID NO: 1882809 - DNA, 25 bp, Homo sapien
gatagaaaatgacaatgcagctaaa

SEQ ID NO: 1882810 - DNA, 25 bp, Homo sapien
gaaaatgacaatgcagctaaaccat

SEQ ID NO: 1882811 - DNA, 25 bp, Homo sapien
tagaaaatgacaatgcagctaaacc

SEQ ID NO: 1882812 - DNA, 25 bp, Homo sapien
actgatagaaaatgacaatgcagct

SEQ ID NO: 1882813 - DNA, 25 bp, Homo sapien
gaaggcatattattaacaaattcac

SEQ ID NO: 1882814 - DNA, 25 bp, Homo sapien
gctgttactttactgatcataccag

SEQ ID NO: 1882815 - DNA, 25 bp, Homo sapien
aatcacgcaaggcaaatttttaagc

SEQ ID NO: 1882816 - DNA, 25 bp, Homo sapien
gatctatcatcttaaaactcatgtc

SEQ ID NO: 1882817 - DNA, 25 bp, Homo sapien
aaaggtcatatacccttgatgcctg

SEQ ID NO: 1882818 - DNA, 25 bp, Homo sapien
ctagagtgataagtaacatgtattc

SEQ ID NO: 1882819 - DNA, 25 bp, Homo sapien
tgggtaactgttttggacttagaca

SEQ ID NO: 1882820 - DNA, 25 bp, Homo sapien
gacagctcatctagagtgataagta

SEQ ID NO: 1882821 - DNA, 25 bp, Homo sapien
gggaacattcaatggaacaaaggca

SEQ ID NO: 1882822 - DNA, 25 bp, Homo sapien
aggacactgatgaaccaggctttcc

SEQ ID NO: 1882823 - DNA, 25 bp, Homo sapien
gccttaattctgcaggacactgatg

SEQ ID NO: 1882824 - DNA, 25 bp, Homo sapien
caggacactgatgaaccaggctttc

SEQ ID NO: 1882825 - DNA, 25 bp, Homo sapien
ctggccttaattctgcaggacactg

SEQ ID NO: 1882826 - DNA, 25 bp, Homo sapien
gaactggaaacctgtcatcattgga

SEQ ID NO: 1882827 - DNA, 25 bp, Homo sapien
aaatgttccagcacgattccaccca

SEQ ID NO: 1882828 - DNA, 25 bp, Homo sapien
tgaccttcactacacggcctaaatg

SEQ ID NO: 1882829 - DNA, 25 bp, Homo sapien
catggcaagttctagggcactgtca

SEQ ID NO: 1882830 - DNA, 25 bp, Homo sapien
tcctccaactttactagtgatactc

SEQ ID NO: 1882831 - DNA, 25 bp, Homo sapien
ttactagtgatactcattccttcac

SEQ ID NO: 1882832 - DNA, 25 bp, Homo sapien
tccaactttactagtgatactcatt

SEQ ID NO: 1882833 - DNA, 25 bp, Homo sapien
ctagtgatactcattccttcacctt

SEQ ID NO: 1882834 - DNA, 25 bp, Homo sapien
tcatgttccacccggcttccaaggg

SEQ ID NO: 1882835 - DNA, 25 bp, Homo sapien
tggtggaactcatgttccacccggc

SEQ ID NO: 1882836 - DNA, 25 bp, Homo sapien
agggtggtggaactcatgttccacc

SEQ ID NO: 1882837 - DNA, 25 bp, Homo sapien
tggaactcatgttccacccggcttc

SEQ ID NO: 1882838 - DNA, 25 bp, Homo sapien
gtccctgacgcactcagtcccttac

SEQ ID NO: 1882839 - DNA, 25 bp, Homo sapien
ctgagaatctcccctggacacagtt

SEQ ID NO: 1882840 - DNA, 25 bp, Homo sapien
gaagcagtgcacaaatcacaacaaa

SEQ ID NO: 1882841 - DNA, 25 bp, Homo sapien
caaagtatacttgagtgccgtttta

SEQ ID NO: 1882842 - DNA, 25 bp, Homo sapien
agtgcacaaatcacaacaaatccca

SEQ ID NO: 1882843 - DNA, 25 bp, Homo sapien
cacaacaaatcccaaagtatacttg

SEQ ID NO: 1882844 - DNA, 25 bp, Homo sapien
ctaaggcctctaaaataaagatact

SEQ ID NO: 1882845 - DNA, 25 bp, Homo sapien
gaagaacacacagaacaatataaca

SEQ ID NO: 1882846 - DNA, 25 bp, Homo sapien
gaacacacagaacaatataacagaa

SEQ ID NO: 1882847 - DNA, 25 bp, Homo sapien
agaacacacagaacaatataacaga

SEQ ID NO: 1882848 - DNA, 25 bp, Homo sapien
cagaagaacacacagaacaatataa

SEQ ID NO: 1882849 - DNA, 25 bp, Homo sapien
ccatctgcaatactatatagtcttg

SEQ ID NO: 1882850 - DNA, 25 bp, Homo sapien
gctctatatgtctgaccatctgcaa

SEQ ID NO: 1882851 - DNA, 25 bp, Homo sapien
ttaaactgaattggcacagctgttg

SEQ ID NO: 1882852 - DNA, 25 bp, Homo sapien
tatattatgttttgagatctgagga

SEQ ID NO: 1882853 - DNA, 25 bp, Homo sapien
ccaagattgtcacttccataaacaa

SEQ ID NO: 1882854 - DNA, 25 bp, Homo sapien
gactccaagattgtcacttccataa

SEQ ID NO: 1882855 - DNA, 25 bp, Homo sapien
ctgactccaagattgtcacttccat

SEQ ID NO: 1882856 - DNA, 25 bp, Homo sapien
gattgtcacttccataaacaatagc

SEQ ID NO: 1882857 - DNA, 25 bp, Homo sapien
ggttagcagtccaaatagggaaaga

SEQ ID NO: 1882858 - DNA, 25 bp, Homo sapien
cagcctcttcatatacctgactggt

SEQ ID NO: 1882859 - DNA, 25 bp, Homo sapien
ggttctccactcatcggagtcgtat

SEQ ID NO: 1882860 - DNA, 25 bp, Homo sapien
tttcttgcctactaaactccctgct

SEQ ID NO: 1882861 - DNA, 25 bp, Homo sapien
aaccgtataatacagtgtcctcaat

SEQ ID NO: 1882862 - DNA, 25 bp, Homo sapien
tagtaaccgtataatacagtgtcct

SEQ ID NO: 1882863 - DNA, 25 bp, Homo sapien
tataatacagtgtcctcaatctgtc

SEQ ID NO: 1882864 - DNA, 25 bp, Homo sapien
tatagtaaccgtataatacagtgtc

SEQ ID NO: 1882865 - DNA, 25 bp, Homo sapien
atatagattaaattgagcttttgga

SEQ ID NO: 1882866 - DNA, 25 bp, Homo sapien
aatatagattaaattgagcttttgg

SEQ ID NO: 1882867 - DNA, 25 bp, Homo sapien
cattctatgagtgctcttaaaaaag

SEQ ID NO: 1882868 - DNA, 25 bp, Homo sapien
taaagagctcaagtcagtgtcaaca

SEQ ID NO: 1882869 - DNA, 25 bp, Homo sapien
taaacacctctagcaatgagtagct

SEQ ID NO: 1882870 - DNA, 25 bp, Homo sapien
aaagggcatcaatatttaattctct

SEQ ID NO: 1882871 - DNA, 25 bp, Homo sapien
acaaagcgataagctagcccaaatg

SEQ ID NO: 1882872 - DNA, 25 bp, Homo sapien
taagctagcccaaatgggcccttcc

SEQ ID NO: 1882873 - DNA, 25 bp, Homo sapien
ctcaggagctcttacaaagcgataa

SEQ ID NO: 1882874 - DNA, 25 bp, Homo sapien
caggagctcttacaaagcgataagc

SEQ ID NO: 1882875 - DNA, 25 bp, Homo sapien
ttaaatgtaccattttgatttttca

SEQ ID NO: 1882876 - DNA, 25 bp, Homo sapien
taaatgtaccattttgatttttcat

SEQ ID NO: 1882877 - DNA, 25 bp, Homo sapien
tacgaacatatatccagcagaatgc

SEQ ID NO: 1882878 - DNA, 25 bp, Homo sapien
ggagacaacttcactttcccgccga

SEQ ID NO: 1882879 - DNA, 25 bp, Homo sapien
aaattgctgttatggtggagacaac

SEQ ID NO: 1882880 - DNA, 25 bp, Homo sapien
cgccgactttggtatttacgaacat

SEQ ID NO: 1882881 - DNA, 25 bp, Homo sapien
gcaggaaaccttatgtgaagtaaag

SEQ ID NO: 1882882 - DNA, 25 bp, Homo sapien
tgtgtaaggaaagcccactatccct

SEQ ID NO: 1882883 - DNA, 25 bp, Homo sapien
gatgtttgttactacccagtgtatt

SEQ ID NO: 1882884 - DNA, 25 bp, Homo sapien
tcaaagcctacttcatgaatgcagt

SEQ ID NO: 1882885 - DNA, 25 bp, Homo sapien
tgaagcatgcgtacataaagtcctg

SEQ ID NO: 1882886 - DNA, 25 bp, Homo sapien
aagatgtgatggctatctccaggaa

SEQ ID NO: 1882887 - DNA, 25 bp, Homo sapien
gattccaccttgcagctgacatgaa

SEQ ID NO: 1882888 - DNA, 25 bp, Homo sapien
agtcctgctgcataccaagatgtga

SEQ ID NO: 1882889 - DNA, 25 bp, Homo sapien
taacatgttccagggtaaaggcagt

SEQ ID NO: 1882890 - DNA, 25 bp, Homo sapien
gaaagtaactacagcctcggacgat

SEQ ID NO: 1882891 - DNA, 25 bp, Homo sapien
gaagtaatagccaggccactctgag

SEQ ID NO: 1882892 - DNA, 25 bp, Homo sapien
tactggtaataaagagggctacagc

SEQ ID NO: 1882893 - DNA, 25 bp, Homo sapien
cagcgatgacggcaagagcttccaa

SEQ ID NO: 1882894 - DNA, 25 bp, Homo sapien
taacttgcaaagatccagcgctgcc

SEQ ID NO: 1882895 - DNA, 25 bp, Homo sapien
gagcaactcacgtcatcaaggcaga

SEQ ID NO: 1882896 - DNA, 25 bp, Homo sapien
tggagactcactagccccaagggta

SEQ ID NO: 1882897 - DNA, 25 bp, Homo sapien
taagaggccgaatatgcaccagccg

SEQ ID NO: 1882898 - DNA, 25 bp, Homo sapien
ccgaggccgcgccagaagtcgccat

SEQ ID NO: 1882899 - DNA, 25 bp, Homo sapien
gaatatgcaccagccgatcaccagc

SEQ ID NO: 1882900 - DNA, 25 bp, Homo sapien
cagtagtaagaggccgaatatgcac

SEQ ID NO: 1882901 - DNA, 25 bp, Homo sapien
cttccggtccagaccaacctgagcg

SEQ ID NO: 1882902 - DNA, 25 bp, Homo sapien
ggagagagcgcgagatatactgcac

SEQ ID NO: 1882903 - DNA, 25 bp, Homo sapien
tggttgccaaggagactggacccac

SEQ ID NO: 1882904 - DNA, 25 bp, Homo sapien
tgcacccgcgcaccctaaaggttaa

SEQ ID NO: 1882905 - DNA, 25 bp, Homo sapien
acagcaacccctgctaaacccatca

SEQ ID NO: 1882906 - DNA, 25 bp, Homo sapien
tacgactttagcctctaggcctggg

SEQ ID NO: 1882907 - DNA, 25 bp, Homo sapien
gactccccaagatgaatgagcatga

SEQ ID NO: 1882908 - DNA, 25 bp, Homo sapien
gcttcatttgcataaaatagggtgc

SEQ ID NO: 1882909 - DNA, 25 bp, Homo sapien
gccttttaataagctccacatgagt

SEQ ID NO: 1882910 - DNA, 25 bp, Homo sapien
cagacgtttagagtaatggaattta

SEQ ID NO: 1882911 - DNA, 25 bp, Homo sapien
tcaagtcaattccagacgtttagag

SEQ ID NO: 1882912 - DNA, 25 bp, Homo sapien
gctttattaaggatgtatttcatga

SEQ ID NO: 1882913 - DNA, 25 bp, Homo sapien
agggctttattaaggatgtatttca

SEQ ID NO: 1882914 - DNA, 25 bp, Homo sapien
cattttgtactcattgcaatggtca

SEQ ID NO: 1882915 - DNA, 25 bp, Homo sapien
attttgtactcattgcaatggtcat

SEQ ID NO: 1882916 - DNA, 25 bp, Homo sapien
ttactggtagtttatagttgtgcct

SEQ ID NO: 1882917 - DNA, 25 bp, Homo sapien
actggtagtttatagttgtgcctgt

SEQ ID NO: 1882918 - DNA, 25 bp, Homo sapien
tactggtagtttatagttgtgcctg

SEQ ID NO: 1882919 - DNA, 25 bp, Homo sapien
cctcttccccaatgctatcgagtga

SEQ ID NO: 1882920 - DNA, 25 bp, Homo sapien
gagtgatttacacttctctcccaca

SEQ ID NO: 1882921 - DNA, 25 bp, Homo sapien
tgacattcagcgcatatccaaggac

SEQ ID NO: 1882922 - DNA, 25 bp, Homo sapien
ctagcatgaggccagcattctccct

SEQ ID NO: 1882923 - DNA, 25 bp, Homo sapien
cttaaattcacaacgaagagatgtt

SEQ ID NO: 1882924 - DNA, 25 bp, Homo sapien
ttcacaacgaagagatgttagaaca

SEQ ID NO: 1882925 - DNA, 25 bp, Homo sapien
cacaacgaagagatgttagaacagg

SEQ ID NO: 1882926 - DNA, 25 bp, Homo sapien
aagagatgttagaacaggagactca

SEQ ID NO: 1882927 - DNA, 25 bp, Homo sapien
ctaataagggcagagatgcgtcccc

SEQ ID NO: 1882928 - DNA, 25 bp, Homo sapien
gaaaggcattactcccagctctaag

SEQ ID NO: 1882929 - DNA, 25 bp, Homo sapien
tacctactcgtgaacgtttgccaca

SEQ ID NO: 1882930 - DNA, 25 bp, Homo sapien
gaaaacctgtgcctgagttggctga

SEQ ID NO: 1882931 - DNA, 25 bp, Homo sapien
gtgccgcagccctgtccggactcca

SEQ ID NO: 1882932 - DNA, 25 bp, Homo sapien
gggagctcactcctcggcggtgccg

SEQ ID NO: 1882933 - DNA, 25 bp, Homo sapien
cggtgccgcagccctgtccggactc

SEQ ID NO: 1882934 - DNA, 25 bp, Homo sapien
gagctcactcctcggcggtgccgca

SEQ ID NO: 1882935 - DNA, 25 bp, Homo sapien
ttgacggtgttagccctggaagcga

SEQ ID NO: 1882936 - DNA, 25 bp, Homo sapien
cgaattcaaggtaagctgcgcggct

SEQ ID NO: 1882937 - DNA, 25 bp, Homo sapien
tgcgggtagggacagacatcaaata

SEQ ID NO: 1882938 - DNA, 25 bp, Homo sapien
tctgtgaagcggaactatggagcac

SEQ ID NO: 1882939 - DNA, 25 bp, Homo sapien
tactggaggcgtttagcagcttcaa

SEQ ID NO: 1882940 - DNA, 25 bp, Homo sapien
gctgatgtactggaggcgtttagca

SEQ ID NO: 1882941 - DNA, 25 bp, Homo sapien
gatgtgcagatttatctgctgggaa

SEQ ID NO: 1882942 - DNA, 25 bp, Homo sapien
caagttgcaagccaagggatgtgca

SEQ ID NO: 1882943 - DNA, 25 bp, Homo sapien
ataatcatggtgattgagagccagc

SEQ ID NO: 1882944 - DNA, 25 bp, Homo sapien
caagggttcaaacctgaactcattc

SEQ ID NO: 1882945 - DNA, 25 bp, Homo sapien
tagcactggtgtcgaaggtagagcc

SEQ ID NO: 1882946 - DNA, 25 bp, Homo sapien
ctgtgactgagccagcatagtggac

SEQ ID NO: 1882947 - DNA, 25 bp, Homo sapien
cctgatttccacttcaggttacttt

SEQ ID NO: 1882948 - DNA, 25 bp, Homo sapien
aagcctgatttccacttcaggttac

SEQ ID NO: 1882949 - DNA, 25 bp, Homo sapien
caagcctgatttccacttcaggtta

SEQ ID NO: 1882950 - DNA, 25 bp, Homo sapien
tcccatcaagcctgatttccacttc

SEQ ID NO: 1882951 - DNA, 25 bp, Homo sapien
acagcaggccttgctatcattccct

SEQ ID NO: 1882952 - DNA, 25 bp, Homo sapien
tgttacctctgtgaactgatcagta

SEQ ID NO: 1882953 - DNA, 25 bp, Homo sapien
actgatcagtatgtgagtcaacagc

SEQ ID NO: 1882954 - DNA, 25 bp, Homo sapien
tccccagagattctatatgtgttac

SEQ ID NO: 1882955 - DNA, 25 bp, Homo sapien
cagctgtgcttaactgccttgtggg

SEQ ID NO: 1882956 - DNA, 25 bp, Homo sapien
gattgttggtaaggattccctgcca

SEQ ID NO: 1882957 - DNA, 25 bp, Homo sapien
tcttgattgttggtaaggattccct

SEQ ID NO: 1882958 - DNA, 25 bp, Homo sapien
ctcccagctgtgcttaactgccttg

SEQ ID NO: 1882959 - DNA, 25 bp, Homo sapien
cattgcctgtgatatcctaggaccc

SEQ ID NO: 1882960 - DNA, 25 bp, Homo sapien
tggaaaggacctgaagggccacatg

SEQ ID NO: 1882961 - DNA, 25 bp, Homo sapien
ggatggttatcctcccagaattgca

SEQ ID NO: 1882962 - DNA, 25 bp, Homo sapien
ccaaatgtgggtttcactctgaaat

SEQ ID NO: 1882963 - DNA, 25 bp, Homo sapien
cacccagcttaattggctagtagag

SEQ ID NO: 1882964 - DNA, 25 bp, Homo sapien
gcttggttattacactgttggagat

SEQ ID NO: 1882965 - DNA, 25 bp, Homo sapien
tagtaaagaatcagctgcttggtta

SEQ ID NO: 1882966 - DNA, 25 bp, Homo sapien
gaatttgaaatttgaccctcaccca

SEQ ID NO: 1882967 - DNA, 25 bp, Homo sapien
gaatccttctatagattcatgttca

SEQ ID NO: 1882968 - DNA, 25 bp, Homo sapien
cagttgaatccctttgataacgttt

SEQ ID NO: 1882969 - DNA, 25 bp, Homo sapien
tcatgttcacgggtcatatggaaaa

SEQ ID NO: 1882970 - DNA, 25 bp, Homo sapien
gataacgtttgaatccttctataga

SEQ ID NO: 1882971 - DNA, 25 bp, Homo sapien
taaattgtccaaggttcacagatgt

SEQ ID NO: 1882972 - DNA, 25 bp, Homo sapien
ttactacatcgtacataagggaact

SEQ ID NO: 1882973 - DNA, 25 bp, Homo sapien
aatttttaaatcaggtcaggcatgg

SEQ ID NO: 1882974 - DNA, 25 bp, Homo sapien
taacagagctaatattcaactgccc

SEQ ID NO: 1882975 - DNA, 25 bp, Homo sapien
agagagttagtctttcctgtgaagc

SEQ ID NO: 1882976 - DNA, 25 bp, Homo sapien
aactcgttgcgtggtgtggttacct

SEQ ID NO: 1882977 - DNA, 25 bp, Homo sapien
tctaagcagtggtatcaacagtggg

SEQ ID NO: 1882978 - DNA, 25 bp, Homo sapien
tgtcattccgcttatagagcacagg

SEQ ID NO: 1882979 - DNA, 25 bp, Homo sapien
tccttcacctgtgccgtgtgattca

SEQ ID NO: 1882980 - DNA, 25 bp, Homo sapien
ctccttcacctgtgccgtgtgattc

SEQ ID NO: 1882981 - DNA, 25 bp, Homo sapien
ccttcacctgtgccgtgtgattcat

SEQ ID NO: 1882982 - DNA, 25 bp, Homo sapien
tccaattactgctgtaacctcatct

SEQ ID NO: 1882983 - DNA, 25 bp, Homo sapien
gtgccatcccttaagtccaattact

SEQ ID NO: 1882984 - DNA, 25 bp, Homo sapien
gtgtgccatcccttaagtccaatta

SEQ ID NO: 1882985 - DNA, 25 bp, Homo sapien
ccaattactgctgtaacctcatctt

SEQ ID NO: 1882986 - DNA, 25 bp, Homo sapien
taagtccaattactgctctaacttc

SEQ ID NO: 1882987 - DNA, 25 bp, Homo sapien
tcatcctttaagtccaattactgct

SEQ ID NO: 1882988 - DNA, 25 bp, Homo sapien
ccaattactgctctaacttcatcat

SEQ ID NO: 1882989 - DNA, 25 bp, Homo sapien
cctttaagtccaattactgctctaa

SEQ ID NO: 1882990 - DNA, 25 bp, Homo sapien
cattcgaccagtcctggtattattt

SEQ ID NO: 1882991 - DNA, 25 bp, Homo sapien
attcgaccagtcctggtattatttc

SEQ ID NO: 1882992 - DNA, 25 bp, Homo sapien
tcattcgaccagtcctggtattatt

SEQ ID NO: 1882993 - DNA, 25 bp, Homo sapien
tgtgtgcgtcttactgcaacacttt

SEQ ID NO: 1882994 - DNA, 25 bp, Homo sapien
caacacttttcaaacgatggcgttc

SEQ ID NO: 1882995 - DNA, 25 bp, Homo sapien
aatgtgtgcgtcttactgcaacact

SEQ ID NO: 1882996 - DNA, 25 bp, Homo sapien
aaacgatggcgttcccttcagtatc

SEQ ID NO: 1882997 - DNA, 25 bp, Homo sapien
tgtggccaagaccaaagagtgttgt

SEQ ID NO: 1882998 - DNA, 25 bp, Homo sapien
tttaagtagaagatagatgatcctt

SEQ ID NO: 1882999 - DNA, 25 bp, Homo sapien
tagctcttaggtaggcttttgcctt

SEQ ID NO: 1883000 - DNA, 25 bp, Homo sapien
taagtagaagatagatgatccttca

SEQ ID NO: 1883001 - DNA, 25 bp, Homo sapien
ttcccctccttgctagttttcatgc

SEQ ID NO: 1883002 - DNA, 25 bp, Homo sapien
cctccttgctagttttcatgcccct

SEQ ID NO: 1883003 - DNA, 25 bp, Homo sapien
tccttgctagttttcatgcccctgt

SEQ ID NO: 1883004 - DNA, 25 bp, Homo sapien
cattcccctccttgctagttttcat

SEQ ID NO: 1883005 - DNA, 25 bp, Homo sapien
ggcactctaaagattcctgctgctc

SEQ ID NO: 1883006 - DNA, 25 bp, Homo sapien
tgtgggtggcaaggcactctaaaga

SEQ ID NO: 1883007 - DNA, 25 bp, Homo sapien
cctgctgctccttatattgcaggac

SEQ ID NO: 1883008 - DNA, 25 bp, Homo sapien
tgctccttatattgcaggacactga

SEQ ID NO: 1883009 - DNA, 25 bp, Homo sapien
gacaactccttggatcttctccagc

SEQ ID NO: 1883010 - DNA, 25 bp, Homo sapien
tagtctgcaggatagacaactcttg

SEQ ID NO: 1883011 - DNA, 25 bp, Homo sapien
gctaaacttggcgacaactccttgg

SEQ ID NO: 1883012 - DNA, 25 bp, Homo sapien
tcttggagttgattggtagtctgca

SEQ ID NO: 1883013 - DNA, 25 bp, Homo sapien
cggaccgctaggagagtttgtataa

SEQ ID NO: 1883014 - DNA, 25 bp, Homo sapien
tgtggtacccaaactatcccagtga

SEQ ID NO: 1883015 - DNA, 25 bp, Homo sapien
tctgaagggttccttcggaccgcta

SEQ ID NO: 1883016 - DNA, 25 bp, Homo sapien
tttgtataaagtattgcctgcaggg

SEQ ID NO: 1883017 - DNA, 25 bp, Homo sapien
acatttgggataggcggaatgctga

SEQ ID NO: 1883018 - DNA, 25 bp, Homo sapien
taggcggaatgctgacgtggaagta

SEQ ID NO: 1883019 - DNA, 25 bp, Homo sapien
gcggaatgctgacgtggaagtatcc

SEQ ID NO: 1883020 - DNA, 25 bp, Homo sapien
gaatgctgacgtggaagtatccaaa

SEQ ID NO: 1883021 - DNA, 25 bp, Homo sapien
cctcagcttcataagggaaaagcca

SEQ ID NO: 1883022 - DNA, 25 bp, Homo sapien
agcttcataagggaaaagccaaatg

SEQ ID NO: 1883023 - DNA, 25 bp, Homo sapien
tcagcttcataagggaaaagccaaa

SEQ ID NO: 1883024 - DNA, 25 bp, Homo sapien
ctcagcttcataagggaaaagccaa

SEQ ID NO: 1883025 - DNA, 25 bp, Homo sapien
gcttcagggtccagcaaggactgct

SEQ ID NO: 1883026 - DNA, 25 bp, Homo sapien
tgaccaggcagtaggattcgaatct

SEQ ID NO: 1883027 - DNA, 25 bp, Homo sapien
taggattcgaatctgcttcagggtc

SEQ ID NO: 1883028 - DNA, 25 bp, Homo sapien
ggattcgaatctgcttcagggtcca

SEQ ID NO: 1883029 - DNA, 25 bp, Homo sapien
tccctccaaacctgaacactgacac

SEQ ID NO: 1883030 - DNA, 25 bp, Homo sapien
gacaccaaccttctcttaatttcca

SEQ ID NO: 1883031 - DNA, 25 bp, Homo sapien
ccctccaaacctgaacactgacacc

SEQ ID NO: 1883032 - DNA, 25 bp, Homo sapien
ttatgcatgcttatatcggaactct

SEQ ID NO: 1883033 - DNA, 25 bp, Homo sapien
cctgcctcattagaaagcatagcca

SEQ ID NO: 1883034 - DNA, 25 bp, Homo sapien
attcctgcctcattagaaagcatag

SEQ ID NO: 1883035 - DNA, 25 bp, Homo sapien
gcttatatcggaactcttcaattcc

SEQ ID NO: 1883036 - DNA, 25 bp, Homo sapien
aagcaaccgtttgaatcctattcct

SEQ ID NO: 1883037 - DNA, 25 bp, Homo sapien
taagccaggcattaaaagcaaccgt

SEQ ID NO: 1883038 - DNA, 25 bp, Homo sapien
gcatcttgtgacttagtagactgat

SEQ ID NO: 1883039 - DNA, 25 bp, Homo sapien
tagactcatcaacatgtggttggcc

SEQ ID NO: 1883040 - DNA, 25 bp, Homo sapien
tcacacccactctaaaaccatgtcc

SEQ ID NO: 1883041 - DNA, 25 bp, Homo sapien
cacacccactctaaaaccatgtcct

SEQ ID NO: 1883042 - DNA, 25 bp, Homo sapien
catttcgaaaaggtccatgaagctc

SEQ ID NO: 1883043 - DNA, 25 bp, Homo sapien
cagcacaggttactcacaggctctg

SEQ ID NO: 1883044 - DNA, 25 bp, Homo sapien
gggtaacaccctctgtggaacagct

SEQ ID NO: 1883045 - DNA, 25 bp, Homo sapien
aatatagatgcgcatgcagctgcac

SEQ ID NO: 1883046 - DNA, 25 bp, Homo sapien
tcattgaacatgattatttataaga

SEQ ID NO: 1883047 - DNA, 25 bp, Homo sapien
gtttaatgtatctaaataagctcag

SEQ ID NO: 1883048 - DNA, 25 bp, Homo sapien
cattgaacatgattatttataagaa

SEQ ID NO: 1883049 - DNA, 25 bp, Homo sapien
tagttaagtaatgtttaatgtatct

SEQ ID NO: 1883050 - DNA, 25 bp, Homo sapien
tggttcatgcagacagccatgcagc

SEQ ID NO: 1883051 - DNA, 25 bp, Homo sapien
tggcccacgataagacacataggta

SEQ ID NO: 1883052 - DNA, 25 bp, Homo sapien
cactaaagctcaagatcctgggaac

SEQ ID NO: 1883053 - DNA, 25 bp, Homo sapien
tcatttcgggagatgtagccctttc

SEQ ID NO: 1883054 - DNA, 25 bp, Homo sapien
gggcctcgctcaccgtctcggccat

SEQ ID NO: 1883055 - DNA, 25 bp, Homo sapien
tgctcgctgaccagcctgcatggtg

SEQ ID NO: 1883056 - DNA, 25 bp, Homo sapien
tcgctcaccgtctcggccatttctg

SEQ ID NO: 1883057 - DNA, 25 bp, Homo sapien
caagggtcaggccctttgttaaatg

SEQ ID NO: 1883058 - DNA, 25 bp, Homo sapien
tccatcagtagagctgcaccgtgca

SEQ ID NO: 1883059 - DNA, 25 bp, Homo sapien
gatgataataagatcccttccttgg

SEQ ID NO: 1883060 - DNA, 25 bp, Homo sapien
agccacaggtgcctattgagagctg

SEQ ID NO: 1883061 - DNA, 25 bp, Homo sapien
tgaactaaggatcaaacacacctgg

SEQ ID NO: 1883062 - DNA, 25 bp, Homo sapien
tgctgagtttattccaaattgctgc

SEQ ID NO: 1883063 - DNA, 25 bp, Homo sapien
ttaaccagtgaaaagatgtactgct

SEQ ID NO: 1883064 - DNA, 25 bp, Homo sapien
cagtacttcgcatttgtgatttgga

SEQ ID NO: 1883065 - DNA, 25 bp, Homo sapien
tttggagttgaagtagactttcatg

SEQ ID NO: 1883066 - DNA, 25 bp, Homo sapien
tgctgatttagagaagagtaatata

SEQ ID NO: 1883067 - DNA, 25 bp, Homo sapien
tcaacggcaagagaaaaaagctgca

SEQ ID NO: 1883068 - DNA, 25 bp, Homo sapien
cccaagccctcagctggtgctttca

SEQ ID NO: 1883069 - DNA, 25 bp, Homo sapien
acccaagccctcagctggtgctttc

SEQ ID NO: 1883070 - DNA, 25 bp, Homo sapien
aacccaagccctcagctggtgcttt

SEQ ID NO: 1883071 - DNA, 25 bp, Homo sapien
ctcgaaacccaagccctcagctggt

SEQ ID NO: 1883072 - DNA, 25 bp, Homo sapien
actacacgaggacaccgcgccaaag

SEQ ID NO: 1883073 - DNA, 25 bp, Homo sapien
aggacaccgcgccaaagcgcagaaa

SEQ ID NO: 1883074 - DNA, 25 bp, Homo sapien
gcagaaaacgatccaccagcagacc

SEQ ID NO: 1883075 - DNA, 25 bp, Homo sapien
gcgccaaagcgcagaaaacgatcca

SEQ ID NO: 1883076 - DNA, 25 bp, Homo sapien
tactaaagctggtcttgaaaaatct

SEQ ID NO: 1883077 - DNA, 25 bp, Homo sapien
aacaagtgcattgtgcctggacctt

SEQ ID NO: 1883078 - DNA, 25 bp, Homo sapien
aattagtatttcaagtcctgatacc

SEQ ID NO: 1883079 - DNA, 25 bp, Homo sapien
gaaaaatctatgctagccattctga

SEQ ID NO: 1883080 - DNA, 25 bp, Homo sapien
gagacctatagctccaggcaaaccg

SEQ ID NO: 1883081 - DNA, 25 bp, Homo sapien
agacctatagctccaggcaaaccgt

SEQ ID NO: 1883082 - DNA, 25 bp, Homo sapien
ctgggagacctatagctccaggcaa

SEQ ID NO: 1883083 - DNA, 25 bp, Homo sapien
gggagacctatagctccaggcaaac

SEQ ID NO: 1883084 - DNA, 25 bp, Homo sapien
tgtagtgagtatgtagcaaggcaaa

SEQ ID NO: 1883085 - DNA, 25 bp, Homo sapien
gcaaggcaaaaatcaagttcatcta

SEQ ID NO: 1883086 - DNA, 25 bp, Homo sapien
ctataaaaataaacttccgcatctt

SEQ ID NO: 1883087 - DNA, 25 bp, Homo sapien
aataaaataagaaccaatggccact

SEQ ID NO: 1883088 - DNA, 25 bp, Homo sapien
ttaaactaagagaagatacagcttt

SEQ ID NO: 1883089 - DNA, 25 bp, Homo sapien
caaattctcagaagttaaactaaga

SEQ ID NO: 1883090 - DNA, 25 bp, Homo sapien
agagaagatacagctttaaaggaat

SEQ ID NO: 1883091 - DNA, 25 bp, Homo sapien
agttaaactaagagaagatacagct

SEQ ID NO: 1883092 - DNA, 25 bp, Homo sapien
tttaggtcccctcaaaccaagagca

SEQ ID NO: 1883093 - DNA, 25 bp, Homo sapien
tggacgcttaagactggcagccatc

SEQ ID NO: 1883094 - DNA, 25 bp, Homo sapien
ccttaatgcccggaaggccacgaat

SEQ ID NO: 1883095 - DNA, 25 bp, Homo sapien
aagcccagtggcacctgagtctgga

SEQ ID NO: 1883096 - DNA, 25 bp, Homo sapien
aacctgcttaatgtgctgatctgtc

SEQ ID NO: 1883097 - DNA, 25 bp, Homo sapien
tatgactctcatgcaaacctgctta

SEQ ID NO: 1883098 - DNA, 25 bp, Homo sapien
ctgcttaatgtgctgatctgtcggt

SEQ ID NO: 1883099 - DNA, 25 bp, Homo sapien
gactctcatgcaaacctgcttaatg

SEQ ID NO: 1883100 - DNA, 25 bp, Homo sapien
ctcaggccctctcaagccaggttcc

SEQ ID NO: 1883101 - DNA, 25 bp, Homo sapien
aggccggtggcaccctgttctccct

SEQ ID NO: 1883102 - DNA, 25 bp, Homo sapien
ggcaggccggtggcaccctgttctc

SEQ ID NO: 1883103 - DNA, 25 bp, Homo sapien
ttccctcaggccctctcaagccagg

SEQ ID NO: 1883104 - DNA, 25 bp, Homo sapien
ccctttgggccaggtaatcctatat

SEQ ID NO: 1883105 - DNA, 25 bp, Homo sapien
ttgggccaggtaatcctatatctcc

SEQ ID NO: 1883106 - DNA, 25 bp, Homo sapien
atccctttgggccaggtaatcctat

SEQ ID NO: 1883107 - DNA, 25 bp, Homo sapien
cctttgggccaggtaatcctatatc

SEQ ID NO: 1883108 - DNA, 25 bp, Homo sapien
tgcttcaccttcttcaccagaggca

SEQ ID NO: 1883109 - DNA, 25 bp, Homo sapien
cttcaccttcttcaccagaggcacc

SEQ ID NO: 1883110 - DNA, 25 bp, Homo sapien
cctgcttcaccttcttcaccagagg

SEQ ID NO: 1883111 - DNA, 25 bp, Homo sapien
ccccctttctcctgcttcaccttct

SEQ ID NO: 1883112 - DNA, 25 bp, Homo sapien
acctttcattccaggaagtccaggg

SEQ ID NO: 1883113 - DNA, 25 bp, Homo sapien
cctgtcacctttcattccaggaagt

SEQ ID NO: 1883114 - DNA, 25 bp, Homo sapien
tcacctttcattccaggaagtccag

SEQ ID NO: 1883115 - DNA, 25 bp, Homo sapien
tgtcacctttcattccaggaagtcc

SEQ ID NO: 1883116 - DNA, 25 bp, Homo sapien
agtccccggagttactgtcactgca

SEQ ID NO: 1883117 - DNA, 25 bp, Homo sapien
acctggtaggcctggggatcccact

SEQ ID NO: 1883118 - DNA, 25 bp, Homo sapien
ctggggatcccactggtcctaattc

SEQ ID NO: 1883119 - DNA, 25 bp, Homo sapien
cagtttacctggtaggcctggggat

SEQ ID NO: 1883120 - DNA, 25 bp, Homo sapien
gggatcccactggtcctaattctcc

SEQ ID NO: 1883121 - DNA, 25 bp, Homo sapien
aaaatgatgaattggccgcgcatgg

SEQ ID NO: 1883122 - DNA, 25 bp, Homo sapien
caaaggctgtacatttctcttggat

SEQ ID NO: 1883123 - DNA, 25 bp, Homo sapien
cacatacgtccccaacaaattgaga

SEQ ID NO: 1883124 - DNA, 25 bp, Homo sapien
taagaagccattcagggctaggcgc

SEQ ID NO: 1883125 - DNA, 25 bp, Homo sapien
ccacctctcctggaggcccctgttg

SEQ ID NO: 1883126 - DNA, 25 bp, Homo sapien
cctcggggtcccacctctcctggag

SEQ ID NO: 1883127 - DNA, 25 bp, Homo sapien
cctctcctggaggcccctgttggcc

SEQ ID NO: 1883128 - DNA, 25 bp, Homo sapien
tcctcggggtcccacctctcctgga

SEQ ID NO: 1883129 - DNA, 25 bp, Homo sapien
ctgaatttcccatctgaccaggctt

SEQ ID NO: 1883130 - DNA, 25 bp, Homo sapien
tgaatttcccatctgaccaggcttc

SEQ ID NO: 1883131 - DNA, 25 bp, Homo sapien
gcctgaatttcccatctgaccaggc

SEQ ID NO: 1883132 - DNA, 25 bp, Homo sapien
gaatttcccatctgaccaggcttcc

SEQ ID NO: 1883133 - DNA, 25 bp, Homo sapien
aacaccctttgcaccaggaattcca

SEQ ID NO: 1883134 - DNA, 25 bp, Homo sapien
ttttcaccagcaacaccctttgcac

SEQ ID NO: 1883135 - DNA, 25 bp, Homo sapien
tcaccagcaacaccctttgcaccag

SEQ ID NO: 1883136 - DNA, 25 bp, Homo sapien
caacaccctttgcaccaggaattcc

SEQ ID NO: 1883137 - DNA, 25 bp, Homo sapien
cctgcaatcctgcatcaccaggagg

SEQ ID NO: 1883138 - DNA, 25 bp, Homo sapien
tgcaatcctgcatcaccaggaggcc

SEQ ID NO: 1883139 - DNA, 25 bp, Homo sapien
caatcctgcatcaccaggaggccca

SEQ ID NO: 1883140 - DNA, 25 bp, Homo sapien
tggtaacccctgcaatcctgcatca

SEQ ID NO: 1883141 - DNA, 25 bp, Homo sapien
tcacatgattgaacctgtatgagct

SEQ ID NO: 1883142 - DNA, 25 bp, Homo sapien
catgattgaacctgtatgagctgct

SEQ ID NO: 1883143 - DNA, 25 bp, Homo sapien
gattgaacctgtatgagctgctgta

SEQ ID NO: 1883144 - DNA, 25 bp, Homo sapien
gaacctgtatgagctgctgtatttc

SEQ ID NO: 1883145 - DNA, 25 bp, Homo sapien
tcatcaacagggcaattttactgag

SEQ ID NO: 1883146 - DNA, 25 bp, Homo sapien
catcaacagggcaattttactgagt

SEQ ID NO: 1883147 - DNA, 25 bp, Homo sapien
tcaacagggcaattttactgagttc

SEQ ID NO: 1883148 - DNA, 25 bp, Homo sapien
tttcatcaacagggcaattttactg

SEQ ID NO: 1883149 - DNA, 25 bp, Homo sapien
ggcattccagggatcccatcacggc

SEQ ID NO: 1883150 - DNA, 25 bp, Homo sapien
cagggatcccatcacggccatccac

SEQ ID NO: 1883151 - DNA, 25 bp, Homo sapien
ttccagggatcccatcacggccatc

SEQ ID NO: 1883152 - DNA, 25 bp, Homo sapien
caggcattccagggatcccatcacg

SEQ ID NO: 1883153 - DNA, 25 bp, Homo sapien
cgtgtctcctttgggcccagggaga

SEQ ID NO: 1883154 - DNA, 25 bp, Homo sapien
ttgggcccagggagaccaggaattc

SEQ ID NO: 1883155 - DNA, 25 bp, Homo sapien
gggagaccaggaattcctctagcac

SEQ ID NO: 1883156 - DNA, 25 bp, Homo sapien
cccagggagaccaggaattcctcta

SEQ ID NO: 1883157 - DNA, 25 bp, Homo sapien
tggaggtcctcgctgtccttgatca

SEQ ID NO: 1883158 - DNA, 25 bp, Homo sapien
atctcctttgggacctgcttctcct

SEQ ID NO: 1883159 - DNA, 25 bp, Homo sapien
gcttctcctggaggtcctcgctgtc

SEQ ID NO: 1883160 - DNA, 25 bp, Homo sapien
tctatctcctttgggacctgcttct

SEQ ID NO: 1883161 - DNA, 25 bp, Homo sapien
caggttcaccatctaagccccgagc

SEQ ID NO: 1883162 - DNA, 25 bp, Homo sapien
cccaggttcaccatctaagccccga

SEQ ID NO: 1883163 - DNA, 25 bp, Homo sapien
aggttcaccatctaagccccgagca

SEQ ID NO: 1883164 - DNA, 25 bp, Homo sapien
gttcaccatctaagccccgagcacc

SEQ ID NO: 1883165 - DNA, 25 bp, Homo sapien
cattcaccttgcattacaagagcag

SEQ ID NO: 1883166 - DNA, 25 bp, Homo sapien
ttcaccttgcattacaagagcagaa

SEQ ID NO: 1883167 - DNA, 25 bp, Homo sapien
tatcattcaccttgcattacaagag

SEQ ID NO: 1883168 - DNA, 25 bp, Homo sapien
caccttgcattacaagagcagaacc

SEQ ID NO: 1883169 - DNA, 25 bp, Homo sapien
gtgatgcctcgcaaaccctgggctc

SEQ ID NO: 1883170 - DNA, 25 bp, Homo sapien
actatgccggtgatgcctcgcaaac

SEQ ID NO: 1883171 - DNA, 25 bp, Homo sapien
cctttgtccccaactatgccggtga

SEQ ID NO: 1883172 - DNA, 25 bp, Homo sapien
gtccccaactatgccggtgatgcct

SEQ ID NO: 1883173 - DNA, 25 bp, Homo sapien
gtaaataccagcataagagaaattg

SEQ ID NO: 1883174 - DNA, 25 bp, Homo sapien
aaactggagttgacaaaatcactta

SEQ ID NO: 1883175 - DNA, 25 bp, Homo sapien
tctgaagtcttacacaaaactggag

SEQ ID NO: 1883176 - DNA, 25 bp, Homo sapien
cacaaaagctgatctagacaatgga

SEQ ID NO: 1883177 - DNA, 25 bp, Homo sapien
caacttctccgagttctccctggtc

SEQ ID NO: 1883178 - DNA, 25 bp, Homo sapien
tccttgagctccaacttctccgagt

SEQ ID NO: 1883179 - DNA, 25 bp, Homo sapien
caatttctcctttagcccctttatg

SEQ ID NO: 1883180 - DNA, 25 bp, Homo sapien
gtaggcctggatatcctgagcgacc

SEQ ID NO: 1883181 - DNA, 25 bp, Homo sapien
ctgagcgacctggtggacaggcatt

SEQ ID NO: 1883182 - DNA, 25 bp, Homo sapien
tggatatcctgagcgacctggtgga

SEQ ID NO: 1883183 - DNA, 25 bp, Homo sapien
cctggtaggcctggatatcctgagc

SEQ ID NO: 1883184 - DNA, 25 bp, Homo sapien
caaatgggccaacattgcatttagt

SEQ ID NO: 1883185 - DNA, 25 bp, Homo sapien
agccccatcctgaggttcgtgtctc

SEQ ID NO: 1883186 - DNA, 25 bp, Homo sapien
tagtgtacattaccaccatcattgg

SEQ ID NO: 1883187 - DNA, 25 bp, Homo sapien
cattaccaccatcattggactgtta

SEQ ID NO: 1883188 - DNA, 25 bp, Homo sapien
caatggatctccatcatgaaagcca

SEQ ID NO: 1883189 - DNA, 25 bp, Homo sapien
ggatctccatcatgaaagccaattg

SEQ ID NO: 1883190 - DNA, 25 bp, Homo sapien
ctccatcatgaaagccaattgttcc

SEQ ID NO: 1883191 - DNA, 25 bp, Homo sapien
gatctccatcatgaaagccaattgt

SEQ ID NO: 1883192 - DNA, 25 bp, Homo sapien
ggggccaggtggtcctcttctccca

SEQ ID NO: 1883193 - DNA, 25 bp, Homo sapien
caggggggccaggtggtcctcttct

SEQ ID NO: 1883194 - DNA, 25 bp, Homo sapien
ggccaggtggtcctcttctcccagg

SEQ ID NO: 1883195 - DNA, 25 bp, Homo sapien
aggtggtcctcttctcccagggtca

SEQ ID NO: 1883196 - DNA, 25 bp, Homo sapien
caggtcctacacggccaagctctcc

SEQ ID NO: 1883197 - DNA, 25 bp, Homo sapien
aggtcctacacggccaagctctcca

SEQ ID NO: 1883198 - DNA, 25 bp, Homo sapien
aacaggtcctacacggccaagctct

SEQ ID NO: 1883199 - DNA, 25 bp, Homo sapien
acaggtcctacacggccaagctctc

SEQ ID NO: 1883200 - DNA, 25 bp, Homo sapien
ttcaattctgtagctttacatttac

SEQ ID NO: 1883201 - DNA, 25 bp, Homo sapien
attctgtagctttacatttacttac

SEQ ID NO: 1883202 - DNA, 25 bp, Homo sapien
caattctgtagctttacatttactt

SEQ ID NO: 1883203 - DNA, 25 bp, Homo sapien
aattttcaattctgtagctttacat

SEQ ID NO: 1883204 - DNA, 25 bp, Homo sapien
tggaaatccacgcgatccaggcaca

SEQ ID NO: 1883205 - DNA, 25 bp, Homo sapien
ggaaatccacgcgatccaggcacac

SEQ ID NO: 1883206 - DNA, 25 bp, Homo sapien
ccaatggagccaggggatccatcag

SEQ ID NO: 1883207 - DNA, 25 bp, Homo sapien
cccaatggagccaggggatccatca

SEQ ID NO: 1883208 - DNA, 25 bp, Homo sapien
tactcctaacttcctgctaactgca

SEQ ID NO: 1883209 - DNA, 25 bp, Homo sapien
taaagattaacagaagatctgcctg

SEQ ID NO: 1883210 - DNA, 25 bp, Homo sapien
gaactatcataacatccttaggcaa

SEQ ID NO: 1883211 - DNA, 25 bp, Homo sapien
tgttgtaatagctaagactggtggg

SEQ ID NO: 1883212 - DNA, 25 bp, Homo sapien
taattataggttttcgagtgctttc

SEQ ID NO: 1883213 - DNA, 25 bp, Homo sapien
gaaggatatgtcttaaactgtagtc

SEQ ID NO: 1883214 - DNA, 25 bp, Homo sapien
ccatggtatgctaagaacagacgcc

SEQ ID NO: 1883215 - DNA, 25 bp, Homo sapien
gaagagtaacttgagtgatgcacca

SEQ ID NO: 1883216 - DNA, 25 bp, Homo sapien
tctaaattaatgcagggagtgccgg

SEQ ID NO: 1883217 - DNA, 25 bp, Homo sapien
caagggcgaaggctagcttccagga

SEQ ID NO: 1883218 - DNA, 25 bp, Homo sapien
tcacagcaggtaagccgaagccagt

SEQ ID NO: 1883219 - DNA, 25 bp, Homo sapien
tgccggtgaaagagcaagggcgaag

SEQ ID NO: 1883220 - DNA, 25 bp, Homo sapien
ggcgccctcccagcactcgcctact

SEQ ID NO: 1883221 - DNA, 25 bp, Homo sapien
gccctcccagcactcgcctactcac

SEQ ID NO: 1883222 - DNA, 25 bp, Homo sapien
tgggcgccctcccagcactcgccta

SEQ ID NO: 1883223 - DNA, 25 bp, Homo sapien
gctgggcgccctcccagcactcgcc

SEQ ID NO: 1883224 - DNA, 25 bp, Homo sapien
ctggagctcctggctttcccggttc

SEQ ID NO: 1883225 - DNA, 25 bp, Homo sapien
ggagctcctggctttcccggttcac

SEQ ID NO: 1883226 - DNA, 25 bp, Homo sapien
tggagctcctggctttcccggttca

SEQ ID NO: 1883227 - DNA, 25 bp, Homo sapien
gagaaaaaggtgcaaagttgagacc

SEQ ID NO: 1883228 - DNA, 25 bp, Homo sapien
ggggcagaagggtgcgggggcagga

SEQ ID NO: 1883229 - DNA, 25 bp, Homo sapien
ctgagcaggggcagaagggtgcggg

SEQ ID NO: 1883230 - DNA, 25 bp, Homo sapien
gagagaaaaaggtgcaaagttgaga

SEQ ID NO: 1883231 - DNA, 25 bp, Homo sapien
gatcctgcctttaagtggggtggca

SEQ ID NO: 1883232 - DNA, 25 bp, Homo sapien
tctcgcccatgtctgatcctgcctt

SEQ ID NO: 1883233 - DNA, 25 bp, Homo sapien
ccaactctcgcccatgtctgatcct

SEQ ID NO: 1883234 - DNA, 25 bp, Homo sapien
cgcccatgtctgatcctgcctttaa

SEQ ID NO: 1883235 - DNA, 25 bp, Homo sapien
gatgccatcgatgcctggaactcca

SEQ ID NO: 1883236 - DNA, 25 bp, Homo sapien
gtcgatgccatcgatgcctggaact

SEQ ID NO: 1883237 - DNA, 25 bp, Homo sapien
tcgatgccatcgatgcctggaactc

SEQ ID NO: 1883238 - DNA, 25 bp, Homo sapien
tgccatcgatgcctggaactccagg

SEQ ID NO: 1883239 - DNA, 25 bp, Homo sapien
ggcgtgaccccttttatcgcttgca

SEQ ID NO: 1883240 - DNA, 25 bp, Homo sapien
caaacagctgcgttttgatggtgct

SEQ ID NO: 1883241 - DNA, 25 bp, Homo sapien
ttcagactgaccctggggcgtgacc

SEQ ID NO: 1883242 - DNA, 25 bp, Homo sapien
cactccctcagtcccttgaattagg

SEQ ID NO: 1883243 - DNA, 25 bp, Homo sapien
gctgcgccccgacctgtcctcgtgt

SEQ ID NO: 1883244 - DNA, 25 bp, Homo sapien
cgtgtgcgcttgaaaaatgcaaaca

SEQ ID NO: 1883245 - DNA, 25 bp, Homo sapien
cctgtcctcgtgtgcgcttgaaaaa

SEQ ID NO: 1883246 - DNA, 25 bp, Homo sapien
ccgacctgtcctcgtgtgcgcttga

SEQ ID NO: 1883247 - DNA, 25 bp, Homo sapien
cccctcaaactcgatcgcaacttac

SEQ ID NO: 1883248 - DNA, 25 bp, Homo sapien
gaaaagcacccctcaaactcgatcg

SEQ ID NO: 1883249 - DNA, 25 bp, Homo sapien
aagtgagaaaagcacccctcaaact

SEQ ID NO: 1883250 - DNA, 25 bp, Homo sapien
gtgagaaaagcacccctcaaactcg

SEQ ID NO: 1883251 - DNA, 25 bp, Homo sapien
ttgagccgcgcacaagcagagcccc

SEQ ID NO: 1883252 - DNA, 25 bp, Homo sapien
cgcggtcccgcgcagtccaggccat

SEQ ID NO: 1883253 - DNA, 25 bp, Homo sapien
ccgcgcacaagcagagccccaacag

SEQ ID NO: 1883254 - DNA, 25 bp, Homo sapien
gagccgcgcacaagcagagccccaa

SEQ ID NO: 1883255 - DNA, 25 bp, Homo sapien
ttccagacccgccactagcataggt

SEQ ID NO: 1883256 - DNA, 25 bp, Homo sapien
tagcataggtggcacttcgtccctg

SEQ ID NO: 1883257 - DNA, 25 bp, Homo sapien
gcctggttcccctctaggcttccag

SEQ ID NO: 1883258 - DNA, 25 bp, Homo sapien
ggagtagcggttgccaaagcgtcca

SEQ ID NO: 1883259 - DNA, 25 bp, Homo sapien
gcagggggtcacaatggatcagcat

SEQ ID NO: 1883260 - DNA, 25 bp, Homo sapien
ctggcagctcatggcaagtttctct

SEQ ID NO: 1883261 - DNA, 25 bp, Homo sapien
tggctggcagctcatggcaagtttc

SEQ ID NO: 1883262 - DNA, 25 bp, Homo sapien
gggtcacaatggatcagcatccatt

SEQ ID NO: 1883263 - DNA, 25 bp, Homo sapien
aattctcctaggctatcatgctgac

SEQ ID NO: 1883264 - DNA, 25 bp, Homo sapien
caacatattacagcagtgcattggg

SEQ ID NO: 1883265 - DNA, 25 bp, Homo sapien
catgtttttatggtatgctgccagg

SEQ ID NO: 1883266 - DNA, 25 bp, Homo sapien
gctttgcagtgggataaatggcacc

SEQ ID NO: 1883267 - DNA, 25 bp, Homo sapien
tggtatactgatttagaaaagctcc

SEQ ID NO: 1883268 - DNA, 25 bp, Homo sapien
ttcacattggctatggtatactgat

SEQ ID NO: 1883269 - DNA, 25 bp, Homo sapien
aaaagctccttggtggaccagaatc

SEQ ID NO: 1883270 - DNA, 25 bp, Homo sapien
cttggtggaccagaatcagaatgta

SEQ ID NO: 1883271 - DNA, 25 bp, Homo sapien
ttaatctgccatagtgtgtggtttt

SEQ ID NO: 1883272 - DNA, 25 bp, Homo sapien
tctgccatagtgtgtggttttatac

SEQ ID NO: 1883273 - DNA, 25 bp, Homo sapien
aatctgccatagtgtgtggttttat

SEQ ID NO: 1883274 - DNA, 25 bp, Homo sapien
taatctgccatagtgtgtggtttta

SEQ ID NO: 1883275 - DNA, 25 bp, Homo sapien
caatcatgatcttatgccactggga

SEQ ID NO: 1883276 - DNA, 25 bp, Homo sapien
gaggacaaattcgaaaaggctgctg

SEQ ID NO: 1883277 - DNA, 25 bp, Homo sapien
tcgaaacgtcgtcaagaaggagtat

SEQ ID NO: 1883278 - DNA, 25 bp, Homo sapien
gagagtgcttccagtcattcgaaac

SEQ ID NO: 1883279 - DNA, 25 bp, Homo sapien
aaatttttaaatagtaaacatgcat

SEQ ID NO: 1883280 - DNA, 25 bp, Homo sapien
cacagtaatgtgtttaggtgactct

SEQ ID NO: 1883281 - DNA, 25 bp, Homo sapien
caattgtgaaattgggcaagtgtcc

SEQ ID NO: 1883282 - DNA, 25 bp, Homo sapien
gaaactgtctactacatgactccag

SEQ ID NO: 1883283 - DNA, 25 bp, Homo sapien
gactgacctattttccccatatgaa

SEQ ID NO: 1883284 - DNA, 25 bp, Homo sapien
tttcccaacttgtaagccacctgca

SEQ ID NO: 1883285 - DNA, 25 bp, Homo sapien
tgtagctgatcccactactctctgg

SEQ ID NO: 1883286 - DNA, 25 bp, Homo sapien
tctggatagctcttctagatgctgc

SEQ ID NO: 1883287 - DNA, 25 bp, Homo sapien
gatgctgctttatctacctggaact

SEQ ID NO: 1883288 - DNA, 25 bp, Homo sapien
tcatttccaccattagaattggaat

SEQ ID NO: 1883289 - DNA, 25 bp, Homo sapien
ctgatctttggacagagttcatttc

SEQ ID NO: 1883290 - DNA, 25 bp, Homo sapien
ccaccattagaattggaattgacag

SEQ ID NO: 1883291 - DNA, 25 bp, Homo sapien
tcctgatctttggacagagttcatt

SEQ ID NO: 1883292 - DNA, 25 bp, Homo sapien
gctgcagatgcccagggttccagga

SEQ ID NO: 1883293 - DNA, 25 bp, Homo sapien
caggaaactgcacacaaagaagaaa

SEQ ID NO: 1883294 - DNA, 25 bp, Homo sapien
cccagggttccaggaaactgcacac

SEQ ID NO: 1883295 - DNA, 25 bp, Homo sapien
agggttccaggaaactgcacacaaa

SEQ ID NO: 1883296 - DNA, 25 bp, Homo sapien
gattttctttgtttgccaacagtcc

SEQ ID NO: 1883297 - DNA, 25 bp, Homo sapien
ttcccagttgattttctttgtttgc

SEQ ID NO: 1883298 - DNA, 25 bp, Homo sapien
gttgattttctttgtttgccaacag

SEQ ID NO: 1883299 - DNA, 25 bp, Homo sapien
cccagttgattttctttgtttgcca

SEQ ID NO: 1883300 - DNA, 25 bp, Homo sapien
cctaggactatgtgttctgggccca

SEQ ID NO: 1883301 - DNA, 25 bp, Homo sapien
tgtcccctcacgaccccttcactgt

SEQ ID NO: 1883302 - DNA, 25 bp, Homo sapien
tcactgttaccctaggactatgtgt

SEQ ID NO: 1883303 - DNA, 25 bp, Homo sapien
ggaagggagtcactgtcccctcacg

SEQ ID NO: 1883304 - DNA, 25 bp, Homo sapien
ttagagatctcaattccgcatttgc

SEQ ID NO: 1883305 - DNA, 25 bp, Homo sapien
atcctttcattgctttagagatctc

SEQ ID NO: 1883306 - DNA, 25 bp, Homo sapien
gagatctcaattccgcatttgcccc

SEQ ID NO: 1883307 - DNA, 25 bp, Homo sapien
tcctttcattgctttagagatctca

SEQ ID NO: 1883308 - DNA, 25 bp, Homo sapien
ggtgatgtcactttctgaaatcaca

SEQ ID NO: 1883309 - DNA, 25 bp, Homo sapien
aatcacaagtaggaggaccacgggg

SEQ ID NO: 1883310 - DNA, 25 bp, Homo sapien
tggttttgagcttgagcaactgagt

SEQ ID NO: 1883311 - DNA, 25 bp, Homo sapien
actgagtagatggtgatgtcacttt

SEQ ID NO: 1883312 - DNA, 25 bp, Homo sapien
tgtgaatcagatctgttttgttcct

SEQ ID NO: 1883313 - DNA, 25 bp, Homo sapien
tctcaaaatgttatatctgctagca

SEQ ID NO: 1883314 - DNA, 25 bp, Homo sapien
aattgtgaatcagatctgttttgtt

SEQ ID NO: 1883315 - DNA, 25 bp, Homo sapien
caaaatgttatatctgctagcagca

SEQ ID NO: 1883316 - DNA, 25 bp, Homo sapien
acagcagacaaggaaagttcttgtt

SEQ ID NO: 1883317 - DNA, 25 bp, Homo sapien
tctggcatcttaacagcagacaagg

SEQ ID NO: 1883318 - DNA, 25 bp, Homo sapien
tttttctggcatcttaacagcagac

SEQ ID NO: 1883319 - DNA, 25 bp, Homo sapien
aacagcagacaaggaaagttcttgt

SEQ ID NO: 1883320 - DNA, 25 bp, Homo sapien
tgtgctttcaagtcatctgcagcaa

SEQ ID NO: 1883321 - DNA, 25 bp, Homo sapien
caaggtgggcctgtaggctcgaggt

SEQ ID NO: 1883322 - DNA, 25 bp, Homo sapien
tgcagcaactgccaccaggcaaggt

SEQ ID NO: 1883323 - DNA, 25 bp, Homo sapien
tcttgtgctttcaagtcatctgcag

SEQ ID NO: 1883324 - DNA, 25 bp, Homo sapien
cattagtcaaaccagaaaggccttt

SEQ ID NO: 1883325 - DNA, 25 bp, Homo sapien
ccttgtgttcattagtcaaaccaga

SEQ ID NO: 1883326 - DNA, 25 bp, Homo sapien
agaaaggcctttctggactgttagg

SEQ ID NO: 1883327 - DNA, 25 bp, Homo sapien
ttcattagtcaaaccagaaaggcct

SEQ ID NO: 1883328 - DNA, 25 bp, Homo sapien
atccttcttgaggtcctacaaaagg

SEQ ID NO: 1883329 - DNA, 25 bp, Homo sapien
tccagaggacttctgaaagcactga

SEQ ID NO: 1883330 - DNA, 25 bp, Homo sapien
ctacaaaaggctgacaatcatccat

SEQ ID NO: 1883331 - DNA, 25 bp, Homo sapien
aattctgtgcaatcatttgtgtgct

SEQ ID NO: 1883332 - DNA, 25 bp, Homo sapien
tctgaggtgcctctattgcaaaaaa

SEQ ID NO: 1883333 - DNA, 25 bp, Homo sapien
gaggtgcctctattgcaaaaaatta

SEQ ID NO: 1883334 - DNA, 25 bp, Homo sapien
ggaaagctggtaacagattagctga

SEQ ID NO: 1883335 - DNA, 25 bp, Homo sapien
acagattagctgaagcagtagtgct

SEQ ID NO: 1883336 - DNA, 25 bp, Homo sapien
tcagtgctgattatatccgaaatca

SEQ ID NO: 1883337 - DNA, 25 bp, Homo sapien
tagttcagtgctgattatatccgaa

SEQ ID NO: 1883338 - DNA, 25 bp, Homo sapien
attatatccgaaatcatcagagtct

SEQ ID NO: 1883339 - DNA, 25 bp, Homo sapien
tgctgattatatccgaaatcatcag

SEQ ID NO: 1883340 - DNA, 25 bp, Homo sapien
actgaaacggcatgaagacactggt

SEQ ID NO: 1883341 - DNA, 25 bp, Homo sapien
catctcactgatagaactgaatcac

SEQ ID NO: 1883342 - DNA, 25 bp, Homo sapien
tggaatgtaggactatggagaactg

SEQ ID NO: 1883343 - DNA, 25 bp, Homo sapien
tgaatcaccacttttggagctgggg

SEQ ID NO: 1883344 - DNA, 25 bp, Homo sapien
tgataaaccttcaaataacctccga

SEQ ID NO: 1883345 - DNA, 25 bp, Homo sapien
tggatcatggtaagcaaaaactgta

SEQ ID NO: 1883346 - DNA, 25 bp, Homo sapien
tccgaaataccataaaaagagcaat

SEQ ID NO: 1883347 - DNA, 25 bp, Homo sapien
taatacacttgacattggatcatgg

SEQ ID NO: 1883348 - DNA, 25 bp, Homo sapien
ttttggcgtcataaaccaagaaaca

SEQ ID NO: 1883349 - DNA, 25 bp, Homo sapien
ttggcgtcataaaccaagaaacaac

SEQ ID NO: 1883350 - DNA, 25 bp, Homo sapien
taaaccaagaaacaaccagatcagc

SEQ ID NO: 1883351 - DNA, 25 bp, Homo sapien
caagaaacaaccagatcagcaccca

SEQ ID NO: 1883352 - DNA, 25 bp, Homo sapien
tctctacccgggactgcacggagga

SEQ ID NO: 1883353 - DNA, 25 bp, Homo sapien
tcgactagcgcagggaccgggctct

SEQ ID NO: 1883354 - DNA, 25 bp, Homo sapien
cctactgcacaaatcgactagcgca

SEQ ID NO: 1883355 - DNA, 25 bp, Homo sapien
actgggtcccgaaaggcatctgtcc

SEQ ID NO: 1883356 - DNA, 25 bp, Homo sapien
agtagccgagccgcggtgacgaacc

SEQ ID NO: 1883357 - DNA, 25 bp, Homo sapien
gtgacgaaccggctccgcggttgcg

SEQ ID NO: 1883358 - DNA, 25 bp, Homo sapien
gggcgactgcgcatgctcgctggcc

SEQ ID NO: 1883359 - DNA, 25 bp, Homo sapien
ctgttgatcgcaggtatagccggct

SEQ ID NO: 1883360 - DNA, 25 bp, Homo sapien
ctgctggcggtcggagcctggcccc

SEQ ID NO: 1883361 - DNA, 25 bp, Homo sapien
actgctggcggtcggagcctggccc

SEQ ID NO: 1883362 - DNA, 25 bp, Homo sapien
cgactgctggcggtcggagcctggc

SEQ ID NO: 1883363 - DNA, 25 bp, Homo sapien
gactgctggcggtcggagcctggcc

SEQ ID NO: 1883364 - DNA, 25 bp, Homo sapien
gcggcgcgctgctctcccggtgccc

SEQ ID NO: 1883365 - DNA, 25 bp, Homo sapien
ccgcggcgcgctgctctcccggtgc

SEQ ID NO: 1883366 - DNA, 25 bp, Homo sapien
cggcgcgctgctctcccggtgcccg

SEQ ID NO: 1883367 - DNA, 25 bp, Homo sapien
gcgcgctgctctcccggtgcccgcg

SEQ ID NO: 1883368 - DNA, 25 bp, Homo sapien
ttgttagttgccgattgtgttttgc

SEQ ID NO: 1883369 - DNA, 25 bp, Homo sapien
ccctttttgttagttgccgattgtg

SEQ ID NO: 1883370 - DNA, 25 bp, Homo sapien
ttgccgattgtgttttgctttagca

SEQ ID NO: 1883371 - DNA, 25 bp, Homo sapien
gttttgctttagcatcgctttgcat

SEQ ID NO: 1883372 - DNA, 25 bp, Homo sapien
gctttctgtctaatggcccctatcc

SEQ ID NO: 1883373 - DNA, 25 bp, Homo sapien
gcccctatcctcacgtccttttcca

SEQ ID NO: 1883374 - DNA, 25 bp, Homo sapien
ctctggtaccctgcttcatcgcttt

SEQ ID NO: 1883375 - DNA, 25 bp, Homo sapien
ggtaccctgcttcatcgctttctgt

SEQ ID NO: 1883376 - DNA, 25 bp, Homo sapien
gaagctggtatttgagtcaaggcca

SEQ ID NO: 1883377 - DNA, 25 bp, Homo sapien
agtgagtcctgtggatatctggaga

SEQ ID NO: 1883378 - DNA, 25 bp, Homo sapien
tgttccagggaacaacgagtgcaga

SEQ ID NO: 1883379 - DNA, 25 bp, Homo sapien
tcatgcgttcaaagagtagaaagga

SEQ ID NO: 1883380 - DNA, 25 bp, Homo sapien
gctgagcatgacggcgcatgcctat

SEQ ID NO: 1883381 - DNA, 25 bp, Homo sapien
ctgagcatgacggcgcatgcctata

SEQ ID NO: 1883382 - DNA, 25 bp, Homo sapien
tgagcatgacggcgcatgcctatag

SEQ ID NO: 1883383 - DNA, 25 bp, Homo sapien
gcagtgtattacctgctacacaggg

SEQ ID NO: 1883384 - DNA, 25 bp, Homo sapien
tgctacctgggaaaactcacttaac

SEQ ID NO: 1883385 - DNA, 25 bp, Homo sapien
gatgctgctctgatgtagttaacaa

SEQ ID NO: 1883386 - DNA, 25 bp, Homo sapien
tgaactagtatgaccaagagcaaga

SEQ ID NO: 1883387 - DNA, 25 bp, Homo sapien
tttgggcataactagtttcaaatct

SEQ ID NO: 1883388 - DNA, 25 bp, Homo sapien
ttaatttgggcataactagtttcaa

SEQ ID NO: 1883389 - DNA, 25 bp, Homo sapien
gggcataactagtttcaaatcttgt

SEQ ID NO: 1883390 - DNA, 25 bp, Homo sapien
taatttgggcataactagtttcaaa

SEQ ID NO: 1883391 - DNA, 25 bp, Homo sapien
agttgtctccttaagctttgctcag

SEQ ID NO: 1883392 - DNA, 25 bp, Homo sapien
ggtaactcccctaagcagttagatg

SEQ ID NO: 1883393 - DNA, 25 bp, Homo sapien
gatttgatcctatcctacatgtcga

SEQ ID NO: 1883394 - DNA, 25 bp, Homo sapien
tacatgtcgaattttgtttcccacc

SEQ ID NO: 1883395 - DNA, 25 bp, Homo sapien
tacctccttaaccatattgattcgg

SEQ ID NO: 1883396 - DNA, 25 bp, Homo sapien
tccaaatggttgctactaggatgta

SEQ ID NO: 1883397 - DNA, 25 bp, Homo sapien
aatttgtgggcatgatatagcttcc

SEQ ID NO: 1883398 - DNA, 25 bp, Homo sapien
taaatctcaatcagctcaagttggt

SEQ ID NO: 1883399 - DNA, 25 bp, Homo sapien
cagtaaaaagatccgggttgtcagg

SEQ ID NO: 1883400 - DNA, 25 bp, Homo sapien
agggcaatatggaaactcttcgtac

SEQ ID NO: 1883401 - DNA, 25 bp, Homo sapien
tattgcaggctgaaagaagccaacc

SEQ ID NO: 1883402 - DNA, 25 bp, Homo sapien
tgtaccacagtaacacaagatgtaa

SEQ ID NO: 1883403 - DNA, 25 bp, Homo sapien
cgtgatctggttgtactagtctaaa

SEQ ID NO: 1883404 - DNA, 25 bp, Homo sapien
gagctatggagttcataccctttgc

SEQ ID NO: 1883405 - DNA, 25 bp, Homo sapien
gctgacaggttaggaaatacgtgaa

SEQ ID NO: 1883406 - DNA, 25 bp, Homo sapien
tagaaccgttgtgtggagctatgga

SEQ ID NO: 1883407 - DNA, 25 bp, Homo sapien
gaaatcaacttctgtagttctaaaa

SEQ ID NO: 1883408 - DNA, 25 bp, Homo sapien
tcagactacattatattagagacca

SEQ ID NO: 1883409 - DNA, 25 bp, Homo sapien
aactttaagcccatacctgtgtctg

SEQ ID NO: 1883410 - DNA, 25 bp, Homo sapien
tttatcatacaatcaaaccaggtag

SEQ ID NO: 1883411 - DNA, 25 bp, Homo sapien
tcatggacttccttatatgtacata

SEQ ID NO: 1883412 - DNA, 25 bp, Homo sapien
tgtttgcactcactaattgtgacag

SEQ ID NO: 1883413 - DNA, 25 bp, Homo sapien
taactttacatgtttggtgatacag

SEQ ID NO: 1883414 - DNA, 25 bp, Homo sapien
tatggagatgttgagtcttttgact

SEQ ID NO: 1883415 - DNA, 25 bp, Homo sapien
tcctacttgcaaggttacaggctag

SEQ ID NO: 1883416 - DNA, 25 bp, Homo sapien
gaacctggactcagagatggctagc

SEQ ID NO: 1883417 - DNA, 25 bp, Homo sapien
tggcaattccagctgggcacaaaaa

SEQ ID NO: 1883418 - DNA, 25 bp, Homo sapien
tacaggctaggttgctgcagtttca

SEQ ID NO: 1883419 - DNA, 25 bp, Homo sapien
tatttgcatcagttcccgtagccca

SEQ ID NO: 1883420 - DNA, 25 bp, Homo sapien
taatgctgtgattgccttgacctac

SEQ ID NO: 1883421 - DNA, 25 bp, Homo sapien
gaagccagagtgtccgcatatttgc

SEQ ID NO: 1883422 - DNA, 25 bp, Homo sapien
gatggatacggcttgcagtctggca

SEQ ID NO: 1883423 - DNA, 25 bp, Homo sapien
ccctaaggtatcctttgctgcatct

SEQ ID NO: 1883424 - DNA, 25 bp, Homo sapien
tcaagtccagtgtacagatctggaa

SEQ ID NO: 1883425 - DNA, 25 bp, Homo sapien
tgggctcccctaaggtatcctttgc

SEQ ID NO: 1883426 - DNA, 25 bp, Homo sapien
gaataatggaaggacaggaactgct

SEQ ID NO: 1883427 - DNA, 25 bp, Homo sapien
ggtttttctcgctggctgatacagt

SEQ ID NO: 1883428 - DNA, 25 bp, Homo sapien
gctgatacagttgtggagaccgtga

SEQ ID NO: 1883429 - DNA, 25 bp, Homo sapien
ggagaccgtgaatttgtctgcagca

SEQ ID NO: 1883430 - DNA, 25 bp, Homo sapien
tcccactgctggtttttctcgctgg

SEQ ID NO: 1883431 - DNA, 25 bp, Homo sapien
tcttcacagagcgacagtgctttgg

SEQ ID NO: 1883432 - DNA, 25 bp, Homo sapien
ttcttcacagagcgacagtgctttg

SEQ ID NO: 1883433 - DNA, 25 bp, Homo sapien
cttcacagagcgacagtgctttggt

SEQ ID NO: 1883434 - DNA, 25 bp, Homo sapien
ttcacagagcgacagtgctttggtc

SEQ ID NO: 1883435 - DNA, 25 bp, Homo sapien
tgtcaaatcattaatcgcataatca

SEQ ID NO: 1883436 - DNA, 25 bp, Homo sapien
tcaaatcattaatcgcataatcaaa

SEQ ID NO: 1883437 - DNA, 25 bp, Homo sapien
ctgtcaaatcattaatcgcataatc

SEQ ID NO: 1883438 - DNA, 25 bp, Homo sapien
gtcaaatcattaatcgcataatcaa

SEQ ID NO: 1883439 - DNA, 25 bp, Homo sapien
ctttaagattgtctaagacatcgcc

SEQ ID NO: 1883440 - DNA, 25 bp, Homo sapien
tttaagattgtctaagacatcgcca

SEQ ID NO: 1883441 - DNA, 25 bp, Homo sapien
actgcccatgatggcccgggtatat

SEQ ID NO: 1883442 - DNA, 25 bp, Homo sapien
tgataagattaatcttcgtcatata

SEQ ID NO: 1883443 - DNA, 25 bp, Homo sapien
gataagattaatcttcgtcatatac

SEQ ID NO: 1883444 - DNA, 25 bp, Homo sapien
tattttgataagattaatcttcgtc

SEQ ID NO: 1883445 - DNA, 25 bp, Homo sapien
tttgataagattaatcttcgtcata

SEQ ID NO: 1883446 - DNA, 25 bp, Homo sapien
tatgggtggtaatcgtttcacccgc

SEQ ID NO: 1883447 - DNA, 25 bp, Homo sapien
ggcggtgagccagtatctgtcaatg

SEQ ID NO: 1883448 - DNA, 25 bp, Homo sapien
tcggcggtgagccagtatctgtcaa

SEQ ID NO: 1883449 - DNA, 25 bp, Homo sapien
tcaatggctcctcctcgcactatgg

SEQ ID NO: 1883450 - DNA, 25 bp, Homo sapien
cataactctgaaggtccagcaacac

SEQ ID NO: 1883451 - DNA, 25 bp, Homo sapien
atcaccatcataactctgaaggtcc

SEQ ID NO: 1883452 - DNA, 25 bp, Homo sapien
tctgaaggtccagcaacaccaatcc

SEQ ID NO: 1883453 - DNA, 25 bp, Homo sapien
aggtccagcaacaccaatccatgtg

SEQ ID NO: 1883454 - DNA, 25 bp, Homo sapien
agtgaggcgaggccctgtgccatgc

SEQ ID NO: 1883455 - DNA, 25 bp, Homo sapien
gaatcagagtgtacctgagcaggtt

SEQ ID NO: 1883456 - DNA, 25 bp, Homo sapien
ttattttagaatcagagtgtacctg

SEQ ID NO: 1883457 - DNA, 25 bp, Homo sapien
ttatatacagggaagttatataaca

SEQ ID NO: 1883458 - DNA, 25 bp, Homo sapien
taaattccatactgggaggagggca

SEQ ID NO: 1883459 - DNA, 25 bp, Homo sapien
ttattgcaaatagtgttccgtggac

SEQ ID NO: 1883460 - DNA, 25 bp, Homo sapien
tattgcaaatagtgttccgtggaca

SEQ ID NO: 1883461 - DNA, 25 bp, Homo sapien
ttgcaaatagtgttccgtggacact

SEQ ID NO: 1883462 - DNA, 25 bp, Homo sapien
attgcaaatagtgttccgtggacac

SEQ ID NO: 1883463 - DNA, 25 bp, Homo sapien
gactgggccacgtcccagcaagttt

SEQ ID NO: 1883464 - DNA, 25 bp, Homo sapien
gacagctgaccccttgagaggtggt

SEQ ID NO: 1883465 - DNA, 25 bp, Homo sapien
tggtgaagcgttatccaccaaaaac

SEQ ID NO: 1883466 - DNA, 25 bp, Homo sapien
tgagctctggcctactgatttcttc

SEQ ID NO: 1883467 - DNA, 25 bp, Homo sapien
caaactccctaaacctgtttctcat

SEQ ID NO: 1883468 - DNA, 25 bp, Homo sapien
ttatatcctctgttgaatcctggtt

SEQ ID NO: 1883469 - DNA, 25 bp, Homo sapien
tcaaactccctaaacctgtttctca

SEQ ID NO: 1883470 - DNA, 25 bp, Homo sapien
attgtagtcaaactccctaaacctg

SEQ ID NO: 1883471 - DNA, 25 bp, Homo sapien
gagggttcccatgtgcagtatgttg

SEQ ID NO: 1883472 - DNA, 25 bp, Homo sapien
tcttcaattccacatacaggacagg

SEQ ID NO: 1883473 - DNA, 25 bp, Homo sapien
tagaaggtcatgttggccgcaccac

SEQ ID NO: 1883474 - DNA, 25 bp, Homo sapien
tgggcaatcatctggctcaccatga

SEQ ID NO: 1883475 - DNA, 25 bp, Homo sapien
gaatcccagctctgtgtacgatttc

SEQ ID NO: 1883476 - DNA, 25 bp, Homo sapien
cctaggtctttgaacctgaatccca

SEQ ID NO: 1883477 - DNA, 25 bp, Homo sapien
taggtctttgaacctgaatcccagc

SEQ ID NO: 1883478 - DNA, 25 bp, Homo sapien
gatttcccaacattgaccaccagat

SEQ ID NO: 1883479 - DNA, 25 bp, Homo sapien
ggtggctctggccgccttgttggag

SEQ ID NO: 1883480 - DNA, 25 bp, Homo sapien
ttgttggaggccagattgtgggcaa

SEQ ID NO: 1883481 - DNA, 25 bp, Homo sapien
ggctctggccgccttgttggaggcc

SEQ ID NO: 1883482 - DNA, 25 bp, Homo sapien
cttgttggaggccagattgtgggca

SEQ ID NO: 1883483 - DNA, 25 bp, Homo sapien
tcctagcgccttgcatctgctacag

SEQ ID NO: 1883484 - DNA, 25 bp, Homo sapien
tactcccaggaatagctgtgtctgc

SEQ ID NO: 1883485 - DNA, 25 bp, Homo sapien
tatccttgaatgtgatgttgagggc

SEQ ID NO: 1883486 - DNA, 25 bp, Homo sapien
gtgtgtgttcatccatactcccagg

SEQ ID NO: 1883487 - DNA, 25 bp, Homo sapien
ggcaaaggagatcgcctgttgtgtc

SEQ ID NO: 1883488 - DNA, 25 bp, Homo sapien
ccacaactatcttggcgacagcagc

SEQ ID NO: 1883489 - DNA, 25 bp, Homo sapien
ctcaatcagggccacaactatcttg

SEQ ID NO: 1883490 - DNA, 25 bp, Homo sapien
agcagcaatgccaccagccagatgg

SEQ ID NO: 1883491 - DNA, 25 bp, Homo sapien
tcagggccttgagtccttgaggaca

SEQ ID NO: 1883492 - DNA, 25 bp, Homo sapien
ttcagggccttgagtccttgaggac

SEQ ID NO: 1883493 - DNA, 25 bp, Homo sapien
cttcagggccttgagtccttgagga

SEQ ID NO: 1883494 - DNA, 25 bp, Homo sapien
ttcagcctttggtatcctctccttc

SEQ ID NO: 1883495 - DNA, 25 bp, Homo sapien
tcttcagcctttggtatcctctcct

SEQ ID NO: 1883496 - DNA, 25 bp, Homo sapien
tcagcctttggtatcctctccttct

SEQ ID NO: 1883497 - DNA, 25 bp, Homo sapien
tcctcttcagcctttggtatcctct

SEQ ID NO: 1883498 - DNA, 25 bp, Homo sapien
caaaaataaattggaggtatggtca

SEQ ID NO: 1883499 - DNA, 25 bp, Homo sapien
aaaaataaattggaggtatggtcat

SEQ ID NO: 1883500 - DNA, 25 bp, Homo sapien
ctgttgacaaaaataaattggaggt

SEQ ID NO: 1883501 - DNA, 25 bp, Homo sapien
tgacaaaaataaattggaggtatgg

SEQ ID NO: 1883502 - DNA, 25 bp, Homo sapien
tagatgtgctgcatgtgtcttgaca

SEQ ID NO: 1883503 - DNA, 25 bp, Homo sapien
gtatcaagtcatgctctccctctag

SEQ ID NO: 1883504 - DNA, 25 bp, Homo sapien
gatacatctttgtgccctcatatag

SEQ ID NO: 1883505 - DNA, 25 bp, Homo sapien
tagtgatttcatatgtgcccaccaa

SEQ ID NO: 1883506 - DNA, 25 bp, Homo sapien
ggattgatgattggtgtccaccttg

SEQ ID NO: 1883507 - DNA, 25 bp, Homo sapien
tacagagaatcaaaggtctctttca

SEQ ID NO: 1883508 - DNA, 25 bp, Homo sapien
tatttatctgctcagaagcatgccg

SEQ ID NO: 1883509 - DNA, 25 bp, Homo sapien
aagcatgccgctctcctccaatggg

SEQ ID NO: 1883510 - DNA, 25 bp, Homo sapien
ggcgtaggtgccttgaagtatgatt

SEQ ID NO: 1883511 - DNA, 25 bp, Homo sapien
tgtaaattgaaacacagcggggatt

SEQ ID NO: 1883512 - DNA, 25 bp, Homo sapien
gaagtatgatttatggtcatgcaaa

SEQ ID NO: 1883513 - DNA, 25 bp, Homo sapien
ttatggtcatgcaaagatgacagca

SEQ ID NO: 1883514 - DNA, 25 bp, Homo sapien
ctccatttgccctaggcttttcttg

SEQ ID NO: 1883515 - DNA, 25 bp, Homo sapien
atcattccgtagctgagcaaggtgc

SEQ ID NO: 1883516 - DNA, 25 bp, Homo sapien
ctgtttctgcatactaattaaaggg

SEQ ID NO: 1883517 - DNA, 25 bp, Homo sapien
ttatgatgttcccagctgaatttcc

SEQ ID NO: 1883518 - DNA, 25 bp, Homo sapien
tttgtgaattgacttcatgacagct

SEQ ID NO: 1883519 - DNA, 25 bp, Homo sapien
actatgaagccgaaatgaatgagca

SEQ ID NO: 1883520 - DNA, 25 bp, Homo sapien
gcagctgcaaccctgtctacagtaa

SEQ ID NO: 1883521 - DNA, 25 bp, Homo sapien
gataagctgcgctttactatgcaga

SEQ ID NO: 1883522 - DNA, 25 bp, Homo sapien
cattcaacagcaaagtactcctggt

SEQ ID NO: 1883523 - DNA, 25 bp, Homo sapien
cagagtaagtttggcctgccgcaag

SEQ ID NO: 1883524 - DNA, 25 bp, Homo sapien
cataaggtgtgaaccagacatcccc

SEQ ID NO: 1883525 - DNA, 25 bp, Homo sapien
aaacattggtctctacccgctggga

SEQ ID NO: 1883526 - DNA, 25 bp, Homo sapien
gggaccagtggtacaaatcagcaat

SEQ ID NO: 1883527 - DNA, 25 bp, Homo sapien
tatgatgtgcttaacagggaacgtg

SEQ ID NO: 1883528 - DNA, 25 bp, Homo sapien
gaccgtgttggtctgtactgattca

SEQ ID NO: 1883529 - DNA, 25 bp, Homo sapien
tgctgaaacgcatctagttcccctg

SEQ ID NO: 1883530 - DNA, 25 bp, Homo sapien
gcactatatgcaaacagggtaacta

SEQ ID NO: 1883531 - DNA, 25 bp, Homo sapien
tatcttgcagtatcggcactgtaca

SEQ ID NO: 1883532 - DNA, 25 bp, Homo sapien
gatgtatactgccactaaccttcca

SEQ ID NO: 1883533 - DNA, 25 bp, Homo sapien
caagtctaccaattataagggcaaa

SEQ ID NO: 1883534 - DNA, 25 bp, Homo sapien
tattgcaaagtcaggaatcatcagg

SEQ ID NO: 1883535 - DNA, 25 bp, Homo sapien
catatggatccactggctggacaaa

SEQ ID NO: 1883536 - DNA, 25 bp, Homo sapien
gctggacaaactgcaccagttgctg

SEQ ID NO: 1883537 - DNA, 25 bp, Homo sapien
tccactggctggacaaactgcacca

SEQ ID NO: 1883538 - DNA, 25 bp, Homo sapien
tcctcttccatatggatccactggc

SEQ ID NO: 1883539 - DNA, 25 bp, Homo sapien
tccaggtggtactttggctcgttgg

SEQ ID NO: 1883540 - DNA, 25 bp, Homo sapien
atacctcaattttcactgtgtccag

SEQ ID NO: 1883541 - DNA, 25 bp, Homo sapien
actgtgtccaggtggtactttggct

SEQ ID NO: 1883542 - DNA, 25 bp, Homo sapien
cctcaattttcactgtgtccaggtg

SEQ ID NO: 1883543 - DNA, 25 bp, Homo sapien
ctagattaaccttctctgtccgagt

SEQ ID NO: 1883544 - DNA, 25 bp, Homo sapien
gattaaccttctctgtccgagtgtg

SEQ ID NO: 1883545 - DNA, 25 bp, Homo sapien
ttaaccttctctgtccgagtgtgcc

SEQ ID NO: 1883546 - DNA, 25 bp, Homo sapien
tctgtccgagtgtgccacacgagaa

SEQ ID NO: 1883547 - DNA, 25 bp, Homo sapien
cgggcagcacaagtgtaatgaatac

SEQ ID NO: 1883548 - DNA, 25 bp, Homo sapien
tcatggtgacactcgaggtcgggca

SEQ ID NO: 1883549 - DNA, 25 bp, Homo sapien
aggaaatagcttgggtagcgcactc

SEQ ID NO: 1883550 - DNA, 25 bp, Homo sapien
gggtagcgcactcttcatggtgaca

SEQ ID NO: 1883551 - DNA, 25 bp, Homo sapien
cggttccagttcttcgactgttgtt

SEQ ID NO: 1883552 - DNA, 25 bp, Homo sapien
tgggatccacgacgcttaaatacag

SEQ ID NO: 1883553 - DNA, 25 bp, Homo sapien
taaatacagcttttggattggacaa

SEQ ID NO: 1883554 - DNA, 25 bp, Homo sapien
aaatgacttgaagacttacagcaaa

SEQ ID NO: 1883555 - DNA, 25 bp, Homo sapien
cctggagacatgttagcctgtggct

SEQ ID NO: 1883556 - DNA, 25 bp, Homo sapien
caccctggagacatgttagcctgtg

SEQ ID NO: 1883557 - DNA, 25 bp, Homo sapien
tggagacatgttagcctgtggctct

SEQ ID NO: 1883558 - DNA, 25 bp, Homo sapien
gacatgttagcctgtggctctccac

SEQ ID NO: 1883559 - DNA, 25 bp, Homo sapien
cagcgctgatggtttctgcatgcaa

SEQ ID NO: 1883560 - DNA, 25 bp, Homo sapien
ttctccttctcactccttcaaaggg

SEQ ID NO: 1883561 - DNA, 25 bp, Homo sapien
gagtaacctgtacgctctcctctgt

SEQ ID NO: 1883562 - DNA, 25 bp, Homo sapien
tgtagccaaatcttaccttacattg

SEQ ID NO: 1883563 - DNA, 25 bp, Homo sapien
gtttccataagccagccatgacctt

SEQ ID NO: 1883564 - DNA, 25 bp, Homo sapien
tcaatttcagcttgtgtttccataa

SEQ ID NO: 1883565 - DNA, 25 bp, Homo sapien
ccagccatgacctttgtaatcctgt

SEQ ID NO: 1883566 - DNA, 25 bp, Homo sapien
ttcaatttcagcttgtgtttccata

SEQ ID NO: 1883567 - DNA, 25 bp, Homo sapien
atgtgtctgaggcacggcccccttc

SEQ ID NO: 1883568 - DNA, 25 bp, Homo sapien
cattctctgccatgcgaggaagctg

SEQ ID NO: 1883569 - DNA, 25 bp, Homo sapien
ctgagaataggggtgtccaggggct

SEQ ID NO: 1883570 - DNA, 25 bp, Homo sapien
ccttcagcccactggatctctgcac

SEQ ID NO: 1883571 - DNA, 25 bp, Homo sapien
tgataggccgtaggcgaggaggagt

SEQ ID NO: 1883572 - DNA, 25 bp, Homo sapien
cacccactcgccacaaaagtcaggg

SEQ ID NO: 1883573 - DNA, 25 bp, Homo sapien
gggcttttaagcctccattgaatag

SEQ ID NO: 1883574 - DNA, 25 bp, Homo sapien
gctggaaagctggtgataggccgta

SEQ ID NO: 1883575 - DNA, 25 bp, Homo sapien
ctcttcccacatccaataacggaat

SEQ ID NO: 1883576 - DNA, 25 bp, Homo sapien
tccaataacggaattcatcattcat

SEQ ID NO: 1883577 - DNA, 25 bp, Homo sapien
tcccacatccaataacggaattcat

SEQ ID NO: 1883578 - DNA, 25 bp, Homo sapien
ccacatccaataacggaattcatca

SEQ ID NO: 1883579 - DNA, 25 bp, Homo sapien
tgctctaaggtacacttctggtcag

SEQ ID NO: 1883580 - DNA, 25 bp, Homo sapien
tcaggaccgtccaagatggctcagc

SEQ ID NO: 1883581 - DNA, 25 bp, Homo sapien
tcagggccatgcactctgagcgggt

SEQ ID NO: 1883582 - DNA, 25 bp, Homo sapien
tggagacctagactgagatgccagc

SEQ ID NO: 1883583 - DNA, 25 bp, Homo sapien
caggagccaggtctagctctcacca

SEQ ID NO: 1883584 - DNA, 25 bp, Homo sapien
tagctgccatgtagacgcttgtggg

SEQ ID NO: 1883585 - DNA, 25 bp, Homo sapien
ggagtcaaaaggttccagctaacag

SEQ ID NO: 1883586 - DNA, 25 bp, Homo sapien
cagtggccaacccagtagctgccat

SEQ ID NO: 1883587 - DNA, 25 bp, Homo sapien
tatgatatgatgtagggttttatcc

SEQ ID NO: 1883588 - DNA, 25 bp, Homo sapien
gggcattttctaatcaccctccaaa

SEQ ID NO: 1883589 - DNA, 25 bp, Homo sapien
tgatgtagggttttatccaaatttg

SEQ ID NO: 1883590 - DNA, 25 bp, Homo sapien
cacttgatctaaccaaagagcctat

SEQ ID NO: 1883591 - DNA, 25 bp, Homo sapien
taagaacagtccagcaggaacaaat

SEQ ID NO: 1883592 - DNA, 25 bp, Homo sapien
caggaacaaatgtcatcacccacac

SEQ ID NO: 1883593 - DNA, 25 bp, Homo sapien
agcaggaacaaatgtcatcacccac

SEQ ID NO: 1883594 - DNA, 25 bp, Homo sapien
ggaacaaatgtcatcacccacactg

SEQ ID NO: 1883595 - DNA, 25 bp, Homo sapien
gtcgatggcaaaaggcctgtctgct

SEQ ID NO: 1883596 - DNA, 25 bp, Homo sapien
atgtcgatggcaaaaggcctgtctg

SEQ ID NO: 1883597 - DNA, 25 bp, Homo sapien
cgatggcaaaaggcctgtctgctct

SEQ ID NO: 1883598 - DNA, 25 bp, Homo sapien
ctgccatgtcgatggcaaaaggcct

SEQ ID NO: 1883599 - DNA, 25 bp, Homo sapien
agccggtgtaccagccaacaacttt

SEQ ID NO: 1883600 - DNA, 25 bp, Homo sapien
caactttgccgttttccaccagcgg

SEQ ID NO: 1883601 - DNA, 25 bp, Homo sapien
tttccaccagcggacgttcgtagcg

SEQ ID NO: 1883602 - DNA, 25 bp, Homo sapien
gcccacaggccagacggagaccttg

SEQ ID NO: 1883603 - DNA, 25 bp, Homo sapien
aaaacaacacgtccatatatggacc

SEQ ID NO: 1883604 - DNA, 25 bp, Homo sapien
tagatgtaaaacaacacgtccatat

SEQ ID NO: 1883605 - DNA, 25 bp, Homo sapien
caacacgtccatatatggaccatac

SEQ ID NO: 1883606 - DNA, 25 bp, Homo sapien
tgtaaaacaacacgtccatatatgg

SEQ ID NO: 1883607 - DNA, 25 bp, Homo sapien
cagtagctaggtggctttgtgacat

SEQ ID NO: 1883608 - DNA, 25 bp, Homo sapien
tggtacagccacagtagctaggtgg

SEQ ID NO: 1883609 - DNA, 25 bp, Homo sapien
accttggggccgctatgactgtcag

SEQ ID NO: 1883610 - DNA, 25 bp, Homo sapien
gctatgactgtcaggattggtacag

SEQ ID NO: 1883611 - DNA, 25 bp, Homo sapien
caattactcctacaatcaacaactc

SEQ ID NO: 1883612 - DNA, 25 bp, Homo sapien
tccacaattactcctacaatcaaca

SEQ ID NO: 1883613 - DNA, 25 bp, Homo sapien
tcctccacaattactcctacaatca

SEQ ID NO: 1883614 - DNA, 25 bp, Homo sapien
gtcacttcctccacaattactccta

SEQ ID NO: 1883615 - DNA, 25 bp, Homo sapien
tagggacctctgctttacactccca

SEQ ID NO: 1883616 - DNA, 25 bp, Homo sapien
ctctgctttacactcccagacacat

SEQ ID NO: 1883617 - DNA, 25 bp, Homo sapien
tctgctttacactcccagacacatt

SEQ ID NO: 1883618 - DNA, 25 bp, Homo sapien
gctttacactcccagacacattcat

SEQ ID NO: 1883619 - DNA, 25 bp, Homo sapien
tcaaatgaacctggtagtgctgcct

SEQ ID NO: 1883620 - DNA, 25 bp, Homo sapien
gcttcagcgcaaattggctcaggcc

SEQ ID NO: 1883621 - DNA, 25 bp, Homo sapien
caagcacatctctgttcccagaagg

SEQ ID NO: 1883622 - DNA, 25 bp, Homo sapien
ttctgcctgccctgacatgatacac

SEQ ID NO: 1883623 - DNA, 25 bp, Homo sapien
agggagcccggatgcactcaggacc

SEQ ID NO: 1883624 - DNA, 25 bp, Homo sapien
tcctggctaactcgccaaaaagagg

SEQ ID NO: 1883625 - DNA, 25 bp, Homo sapien
aatgtgtcctggctaactcgccaaa

SEQ ID NO: 1883626 - DNA, 25 bp, Homo sapien
tggctgcaccagaaagacgcaaaag

SEQ ID NO: 1883627 - DNA, 25 bp, Homo sapien
tcagcgaagaagagcacgccgggct

SEQ ID NO: 1883628 - DNA, 25 bp, Homo sapien
tgttgtcgtcgtcagcgaagaagag

SEQ ID NO: 1883629 - DNA, 25 bp, Homo sapien
tgcctctggcgcagccaggcgaggc

SEQ ID NO: 1883630 - DNA, 25 bp, Homo sapien
tggaagagctccagactataggtgt

SEQ ID NO: 1883631 - DNA, 25 bp, Homo sapien
gggcacgtgcaggtgagtgctgggc

SEQ ID NO: 1883632 - DNA, 25 bp, Homo sapien
gcgcggcagcccgggccgcttgtag

SEQ ID NO: 1883633 - DNA, 25 bp, Homo sapien
tagcgccgcggcgtgggcacgtgca

SEQ ID NO: 1883634 - DNA, 25 bp, Homo sapien
gggccgcttgtagcgccgcggcgtg

SEQ ID NO: 1883635 - DNA, 25 bp, Homo sapien
ccacctggcggaacgtgttggccag

SEQ ID NO: 1883636 - DNA, 25 bp, Homo sapien
gcgccacctggcggaacgtgttggc

SEQ ID NO: 1883637 - DNA, 25 bp, Homo sapien
agctgcgccacctggcggaacgtgt

SEQ ID NO: 1883638 - DNA, 25 bp, Homo sapien
gctgcgccacctggcggaacgtgtt

SEQ ID NO: 1883639 - DNA, 25 bp, Homo sapien
gcgtgtccacgtcgagcatgatgat

SEQ ID NO: 1883640 - DNA, 25 bp, Homo sapien
ttgcgcttttgggtcccgtgagccg

SEQ ID NO: 1883641 - DNA, 25 bp, Homo sapien
aagcgggtgaaaagcgcggacttca

SEQ ID NO: 1883642 - DNA, 25 bp, Homo sapien
tgacaattaggatccagggcaggag

SEQ ID NO: 1883643 - DNA, 25 bp, Homo sapien
ttcgcgcaagctagagcgacaaggg

SEQ ID NO: 1883644 - DNA, 25 bp, Homo sapien
accccagtgcgcagcttggacagcg

SEQ ID NO: 1883645 - DNA, 25 bp, Homo sapien
gggctcactacctgggcgtggagga

SEQ ID NO: 1883646 - DNA, 25 bp, Homo sapien
gtggaggagcggcaggttcgcgcaa

SEQ ID NO: 1883647 - DNA, 25 bp, Homo sapien
aagagtggaagccgagaagcggcac

SEQ ID NO: 1883648 - DNA, 25 bp, Homo sapien
ctgaagagtggaagccgagaagcgg

SEQ ID NO: 1883649 - DNA, 25 bp, Homo sapien
tgaagagtggaagccgagaagcggc

SEQ ID NO: 1883650 - DNA, 25 bp, Homo sapien
gaagagtggaagccgagaagcggca

SEQ ID NO: 1883651 - DNA, 25 bp, Homo sapien
cggtgcgcctcgccgctccagtccg

SEQ ID NO: 1883652 - DNA, 25 bp, Homo sapien
ccggtgcgcctcgccgctccagtcc

SEQ ID NO: 1883653 - DNA, 25 bp, Homo sapien
gctccagccgcgggcccccaggacg

SEQ ID NO: 1883654 - DNA, 25 bp, Homo sapien
tccagccgcgggcccccaggacgct

SEQ ID NO: 1883655 - DNA, 25 bp, Homo sapien
cagccgcgggcccccaggacgctct

SEQ ID NO: 1883656 - DNA, 25 bp, Homo sapien
ctgcgggcacaagggctccagccgc

SEQ ID NO: 1883657 - DNA, 25 bp, Homo sapien
gcggcggcgctgggggctttccttc

SEQ ID NO: 1883658 - DNA, 25 bp, Homo sapien
tccggatccagcagcaagatcccaa

SEQ ID NO: 1883659 - DNA, 25 bp, Homo sapien
cttgtcttctcagaacctctccgga

SEQ ID NO: 1883660 - DNA, 25 bp, Homo sapien
ttcgcgcgccgcagcggaagcctgc

SEQ ID NO: 1883661 - DNA, 25 bp, Homo sapien
tgcagaatccagcgtcctcccaagt

SEQ ID NO: 1883662 - DNA, 25 bp, Homo sapien
ggagaaagcgaagggattcctcctc

SEQ ID NO: 1883663 - DNA, 25 bp, Homo sapien
ctgatgcctagggttcggagtgaaa

SEQ ID NO: 1883664 - DNA, 25 bp, Homo sapien
cccagctgctgcgttgatgtgctgg

SEQ ID NO: 1883665 - DNA, 25 bp, Homo sapien
aaatttgccgggctacgcgcgttgc

SEQ ID NO: 1883666 - DNA, 25 bp, Homo sapien
aagctccagactgttctgccctagc

SEQ ID NO: 1883667 - DNA, 25 bp, Homo sapien
tatgataaataatttctgagcccat

SEQ ID NO: 1883668 - DNA, 25 bp, Homo sapien
caggtcccagggaagtgcttgcaaa

SEQ ID NO: 1883669 - DNA, 25 bp, Homo sapien
caggaagaagggctgtgcttcccag

SEQ ID NO: 1883670 - DNA, 25 bp, Homo sapien
gatgggtgggatttcaaatccagac

SEQ ID NO: 1883671 - DNA, 25 bp, Homo sapien
tcaaatccagactctatggtatgat

SEQ ID NO: 1883672 - DNA, 25 bp, Homo sapien
gaggcctaagcagtactcgagaggc

SEQ ID NO: 1883673 - DNA, 25 bp, Homo sapien
tatgattgacggtactcgagaggcc

SEQ ID NO: 1883674 - DNA, 25 bp, Homo sapien
aactgacataactttctgccacggg

SEQ ID NO: 1883675 - DNA, 25 bp, Homo sapien
tgcctttcctccacaagaagatagt

SEQ ID NO: 1883676 - DNA, 25 bp, Homo sapien
caacagattggtactggccaccgta

SEQ ID NO: 1883677 - DNA, 25 bp, Homo sapien
taagccatattggtggccgtgggct

SEQ ID NO: 1883678 - DNA, 25 bp, Homo sapien
ggtctctgaccaatcagaccagcaa

SEQ ID NO: 1883679 - DNA, 25 bp, Homo sapien
cgtagtcccaacgatgtactggtct

SEQ ID NO: 1883680 - DNA, 25 bp, Homo sapien
aatgtccctgtgtttttggatgggc

SEQ ID NO: 1883681 - DNA, 25 bp, Homo sapien
tctctgtgggactggtaatcgtagt

SEQ ID NO: 1883682 - DNA, 25 bp, Homo sapien
catgcaatacctgtagtgttctttg

SEQ ID NO: 1883683 - DNA, 25 bp, Homo sapien
caatacctgtagtgttctttgctcc

SEQ ID NO: 1883684 - DNA, 25 bp, Homo sapien
gtgtcttcatgcaatacctgtagtg

SEQ ID NO: 1883685 - DNA, 25 bp, Homo sapien
ctttagtgtcttcatgcaatacctg

SEQ ID NO: 1883686 - DNA, 25 bp, Homo sapien
ggtgccttgttcagccccctttgct

SEQ ID NO: 1883687 - DNA, 25 bp, Homo sapien
ttctcttctccggtgccttgttcag

SEQ ID NO: 1883688 - DNA, 25 bp, Homo sapien
aggtgctcagttctcttctccggtg

SEQ ID NO: 1883689 - DNA, 25 bp, Homo sapien
tcagttctcttctccggtgccttgt

SEQ ID NO: 1883690 - DNA, 25 bp, Homo sapien
catcgtagggtatcccagtcatatt

SEQ ID NO: 1883691 - DNA, 25 bp, Homo sapien
tacaaacacaggtctgtagcaccat

SEQ ID NO: 1883692 - DNA, 25 bp, Homo sapien
aagcaggggtagtgcacagataact

SEQ ID NO: 1883693 - DNA, 25 bp, Homo sapien
tgaaagccaaatttcgggtatggcc

SEQ ID NO: 1883694 - DNA, 25 bp, Homo sapien
ttgctccattgtctgcagcttggct

SEQ ID NO: 1883695 - DNA, 25 bp, Homo sapien
tccctgcagtgtggttggcatcctg

SEQ ID NO: 1883696 - DNA, 25 bp, Homo sapien
ttggctcagcagctgcatagctcct

SEQ ID NO: 1883697 - DNA, 25 bp, Homo sapien
tagctccttgggctgtggtggctcc

SEQ ID NO: 1883698 - DNA, 25 bp, Homo sapien
gggcactggtactgacatccccatt

SEQ ID NO: 1883699 - DNA, 25 bp, Homo sapien
acatccccattctgtaagactcctg

SEQ ID NO: 1883700 - DNA, 25 bp, Homo sapien
aaggccagggcactggtactgacat

SEQ ID NO: 1883701 - DNA, 25 bp, Homo sapien
tccccattctgtaagactcctgcag

SEQ ID NO: 1883702 - DNA, 25 bp, Homo sapien
ccaggtgacacagtccttgtgagga

SEQ ID NO: 1883703 - DNA, 25 bp, Homo sapien
gaggacaagccactctctccactca

SEQ ID NO: 1883704 - DNA, 25 bp, Homo sapien
cgaggtccggcctcgggagccttgc

SEQ ID NO: 1883705 - DNA, 25 bp, Homo sapien
ggcctcgggagccttgcttgcccag

SEQ ID NO: 1883706 - DNA, 25 bp, Homo sapien
gctgaggctgcccagacggatgaac

SEQ ID NO: 1883707 - DNA, 25 bp, Homo sapien
caggaagaacatgcgctgctggagc

SEQ ID NO: 1883708 - DNA, 25 bp, Homo sapien
ctgaggctgcccagacggatgaact

SEQ ID NO: 1883709 - DNA, 25 bp, Homo sapien
tgaggctgcccagacggatgaactc

SEQ ID NO: 1883710 - DNA, 25 bp, Homo sapien
caatgagtggatgtgaggtggcctg

SEQ ID NO: 1883711 - DNA, 25 bp, Homo sapien
ggtggcctgatgagtgaaagaatca

SEQ ID NO: 1883712 - DNA, 25 bp, Homo sapien
tgagcttaggaaggagtaccccaat

SEQ ID NO: 1883713 - DNA, 25 bp, Homo sapien
tctgagcttaggaaggagtacccca

SEQ ID NO: 1883714 - DNA, 25 bp, Homo sapien
agtaagattgtggttctagaggaag

SEQ ID NO: 1883715 - DNA, 25 bp, Homo sapien
agattgtggttctagaggaagatca

SEQ ID NO: 1883716 - DNA, 25 bp, Homo sapien
ttagtaagattgtggttctagagga

SEQ ID NO: 1883717 - DNA, 25 bp, Homo sapien
gtggttctagaggaagatcagtgtt

SEQ ID NO: 1883718 - DNA, 25 bp, Homo sapien
gctctactcaggctcttaggttctt

SEQ ID NO: 1883719 - DNA, 25 bp, Homo sapien
acacctctagaagcggcaagtgccc

SEQ ID NO: 1883720 - DNA, 25 bp, Homo sapien
ttctcaataactgtaaaagctctac

SEQ ID NO: 1883721 - DNA, 25 bp, Homo sapien
tcttaggttcttggtcgcacacctc

SEQ ID NO: 1883722 - DNA, 25 bp, Homo sapien
gaaagtagcctgtgtattgttgaag

SEQ ID NO: 1883723 - DNA, 25 bp, Homo sapien
cgtattgtttgtaccagagaattca

SEQ ID NO: 1883724 - DNA, 25 bp, Homo sapien
tgtattgttgaagtctcctcctgtt

SEQ ID NO: 1883725 - DNA, 25 bp, Homo sapien
aagttctcgtattgtttgtaccaga

SEQ ID NO: 1883726 - DNA, 25 bp, Homo sapien
ctaattgcttcctaaggtcacaaac

SEQ ID NO: 1883727 - DNA, 25 bp, Homo sapien
tcacaaacaattctttagggagagg

SEQ ID NO: 1883728 - DNA, 25 bp, Homo sapien
tgcttcctaaggtcacaaacaattc

SEQ ID NO: 1883729 - DNA, 25 bp, Homo sapien
gtcacaaacaattctttagggagag

SEQ ID NO: 1883730 - DNA, 25 bp, Homo sapien
gacttgtgttggtgtccactgtcca

SEQ ID NO: 1883731 - DNA, 25 bp, Homo sapien
tagtctagagtggacttgtgttggt

SEQ ID NO: 1883732 - DNA, 25 bp, Homo sapien
gaggggttgaggcatagtctagagt

SEQ ID NO: 1883733 - DNA, 25 bp, Homo sapien
gggcagctggccatgatgtttggag

SEQ ID NO: 1883734 - DNA, 25 bp, Homo sapien
ctaaggagaaggttttggtggcagg

SEQ ID NO: 1883735 - DNA, 25 bp, Homo sapien
ttcctgtcttagtaccagagtgagt

SEQ ID NO: 1883736 - DNA, 25 bp, Homo sapien
tcctgtcttagtaccagagtgagtt

SEQ ID NO: 1883737 - DNA, 25 bp, Homo sapien
cttcctgtcttagtaccagagtgag

SEQ ID NO: 1883738 - DNA, 25 bp, Homo sapien
cctgtcttagtaccagagtgagttt

SEQ ID NO: 1883739 - DNA, 25 bp, Homo sapien
gggacaggatgggagtagtggacat

SEQ ID NO: 1883740 - DNA, 25 bp, Homo sapien
aacgggagctttgcagggacaggat

SEQ ID NO: 1883741 - DNA, 25 bp, Homo sapien
agtagtggacatggagaggcaccag

SEQ ID NO: 1883742 - DNA, 25 bp, Homo sapien
ctaacgggagctttgcagggacagg

SEQ ID NO: 1883743 - DNA, 25 bp, Homo sapien
catcatgtctaagaattatctttcc

SEQ ID NO: 1883744 - DNA, 25 bp, Homo sapien
attatctttccaccatttttgtcca

SEQ ID NO: 1883745 - DNA, 25 bp, Homo sapien
gtctaagaattatctttccaccatt

SEQ ID NO: 1883746 - DNA, 25 bp, Homo sapien
catgtcatcatgtctaagaattatc

SEQ ID NO: 1883747 - DNA, 25 bp, Homo sapien
attgcaaattttgccaaaacgattt

SEQ ID NO: 1883748 - DNA, 25 bp, Homo sapien
ttgcaaattttgccaaaacgatttc

SEQ ID NO: 1883749 - DNA, 25 bp, Homo sapien
gagatttatgtatgatttatgttcc

SEQ ID NO: 1883750 - DNA, 25 bp, Homo sapien
tacgcctacatgagaagtttaaaga

SEQ ID NO: 1883751 - DNA, 25 bp, Homo sapien
catcagagttgtttgtacgcctaca

SEQ ID NO: 1883752 - DNA, 25 bp, Homo sapien
ttatttgagtttctgctaggagtcc

SEQ ID NO: 1883753 - DNA, 25 bp, Homo sapien
ctgaattccacaacacaaaggctgc

SEQ ID NO: 1883754 - DNA, 25 bp, Homo sapien
gagtgaagtattatgccaatcacaa

SEQ ID NO: 1883755 - DNA, 25 bp, Homo sapien
tggctctaatacaagctgggcaaat

SEQ ID NO: 1883756 - DNA, 25 bp, Homo sapien
gaggccacgtgacttctgaattcca

SEQ ID NO: 1883757 - DNA, 25 bp, Homo sapien
tgactgatccactggcttgtaaaac

SEQ ID NO: 1883758 - DNA, 25 bp, Homo sapien
gactgatccactggcttgtaaaacc

SEQ ID NO: 1883759 - DNA, 25 bp, Homo sapien
ctgactgatccactggcttgtaaaa

SEQ ID NO: 1883760 - DNA, 25 bp, Homo sapien
agcccattgcacagcgctcagtggg

SEQ ID NO: 1883761 - DNA, 25 bp, Homo sapien
ccagcccattgcacagcgctcagtg

SEQ ID NO: 1883762 - DNA, 25 bp, Homo sapien
tgccagcccattgcacagcgctcag

SEQ ID NO: 1883763 - DNA, 25 bp, Homo sapien
cattgcacagcgctcagtggggtct

SEQ ID NO: 1883764 - DNA, 25 bp, Homo sapien
ctttggtggacatgtgaactgtcac

SEQ ID NO: 1883765 - DNA, 25 bp, Homo sapien
tactgtggaagtggacataactgtg

SEQ ID NO: 1883766 - DNA, 25 bp, Homo sapien
tggaagtggacataactgtggtcat

SEQ ID NO: 1883767 - DNA, 25 bp, Homo sapien
tttggtggacatgtgaactgtcaca

SEQ ID NO: 1883768 - DNA, 25 bp, Homo sapien
tgcatgttcttaactgctcttgctg

SEQ ID NO: 1883769 - DNA, 25 bp, Homo sapien
gttcttaactgctcttgctgagtca

SEQ ID NO: 1883770 - DNA, 25 bp, Homo sapien
cctgtgacctatgcatgttcttaac

SEQ ID NO: 1883771 - DNA, 25 bp, Homo sapien
catgttcttaactgctcttgctgag

SEQ ID NO: 1883772 - DNA, 25 bp, Homo sapien
aggaagagaacaattgtcaatggta

SEQ ID NO: 1883773 - DNA, 25 bp, Homo sapien
ccaagcaacaccaagggttggcttc

SEQ ID NO: 1883774 - DNA, 25 bp, Homo sapien
tgtcaatggtaaacggcagttgcag

SEQ ID NO: 1883775 - DNA, 25 bp, Homo sapien
aacgaactgaagaaaggatccctga

SEQ ID NO: 1883776 - DNA, 25 bp, Homo sapien
tgcttctgcagcagtgcgagtgcgt

SEQ ID NO: 1883777 - DNA, 25 bp, Homo sapien
gatggtggctccctcagatcagtga

SEQ ID NO: 1883778 - DNA, 25 bp, Homo sapien
tatgagctgctagaagaagacgcgc

SEQ ID NO: 1883779 - DNA, 25 bp, Homo sapien
agtgagcctgtggactctcgagccc

SEQ ID NO: 1883780 - DNA, 25 bp, Homo sapien
tgtcagcatgtttaataggatgctt

SEQ ID NO: 1883781 - DNA, 25 bp, Homo sapien
tttgtcagcatgtttaataggatgc

SEQ ID NO: 1883782 - DNA, 25 bp, Homo sapien
taataggatgcttatcagaattgtc

SEQ ID NO: 1883783 - DNA, 25 bp, Homo sapien
ttaataggatgcttatcagaattgt

SEQ ID NO: 1883784 - DNA, 25 bp, Homo sapien
gcctgttacttgctcggcaatcata

SEQ ID NO: 1883785 - DNA, 25 bp, Homo sapien
agtcagagcactgcctgttacttgc

SEQ ID NO: 1883786 - DNA, 25 bp, Homo sapien
agcagggttcccttcctgaacacca

SEQ ID NO: 1883787 - DNA, 25 bp, Homo sapien
aagtccagtgatgctcatgaaggtg

SEQ ID NO: 1883788 - DNA, 25 bp, Homo sapien
tgcaggttgcagcaaaggctagtca

SEQ ID NO: 1883789 - DNA, 25 bp, Homo sapien
gcaggttgcagcaaaggctagtcat

SEQ ID NO: 1883790 - DNA, 25 bp, Homo sapien
ctgcaggttgcagcaaaggctagtc

SEQ ID NO: 1883791 - DNA, 25 bp, Homo sapien
catgtttaaacttgaggtgcttttc

SEQ ID NO: 1883792 - DNA, 25 bp, Homo sapien
aacttgaggtgcttttcaatttgct

SEQ ID NO: 1883793 - DNA, 25 bp, Homo sapien
tgcttcatgtttaaacttgaggtgc

SEQ ID NO: 1883794 - DNA, 25 bp, Homo sapien
taaacttgaggtgcttttcaatttg

SEQ ID NO: 1883795 - DNA, 25 bp, Homo sapien
ctgactgatttagtttcttttagca

SEQ ID NO: 1883796 - DNA, 25 bp, Homo sapien
ctcacaggcactgactgatttagtt

SEQ ID NO: 1883797 - DNA, 25 bp, Homo sapien
gcactgactgatttagtttctttta

SEQ ID NO: 1883798 - DNA, 25 bp, Homo sapien
cacaggcactgactgatttagtttc

SEQ ID NO: 1883799 - DNA, 25 bp, Homo sapien
ggcttgctgattcccattagaactg

SEQ ID NO: 1883800 - DNA, 25 bp, Homo sapien
gttttgtctcttggattaagaatat

SEQ ID NO: 1883801 - DNA, 25 bp, Homo sapien
gctaacaggaattgaatgggcttgc

SEQ ID NO: 1883802 - DNA, 25 bp, Homo sapien
agaatattccccagataatgaagtc

SEQ ID NO: 1883803 - DNA, 25 bp, Homo sapien
ttccactttgggcttcctttccaca

SEQ ID NO: 1883804 - DNA, 25 bp, Homo sapien
attgtgaccctttggttcccctgat

SEQ ID NO: 1883805 - DNA, 25 bp, Homo sapien
tcggtggtgctaatagagatatttc

SEQ ID NO: 1883806 - DNA, 25 bp, Homo sapien
cctttccacagggtcctatcggtgg

SEQ ID NO: 1883807 - DNA, 25 bp, Homo sapien
cactaagaggccttgtgtagaagta

SEQ ID NO: 1883808 - DNA, 25 bp, Homo sapien
gccttgtgtagaagtacaccagcat

SEQ ID NO: 1883809 - DNA, 25 bp, Homo sapien
gattgacgtcactaagaggccttgt

SEQ ID NO: 1883810 - DNA, 25 bp, Homo sapien
ctccaattgattgacgtcactaaga

SEQ ID NO: 1883811 - DNA, 25 bp, Homo sapien
ggaagatgacaggtagggaagccaa

SEQ ID NO: 1883812 - DNA, 25 bp, Homo sapien
gaggaagatgacaggtagggaagcc

SEQ ID NO: 1883813 - DNA, 25 bp, Homo sapien
agaggaagatgacaggtagggaagc

SEQ ID NO: 1883814 - DNA, 25 bp, Homo sapien
gaagatgacaggtagggaagccaac

SEQ ID NO: 1883815 - DNA, 25 bp, Homo sapien
cctagtaaattacctctgctgccga

SEQ ID NO: 1883816 - DNA, 25 bp, Homo sapien
ctgccgatggcatcgcagatctggg

SEQ ID NO: 1883817 - DNA, 25 bp, Homo sapien
gtaaattacctctgctgccgatggc

SEQ ID NO: 1883818 - DNA, 25 bp, Homo sapien
cctctgctgccgatggcatcgcaga

SEQ ID NO: 1883819 - DNA, 25 bp, Homo sapien
catgaggagacatagataaccacac

SEQ ID NO: 1883820 - DNA, 25 bp, Homo sapien
aaacccaatggatgctgtcttcaag

SEQ ID NO: 1883821 - DNA, 25 bp, Homo sapien
aaaaaccatttcagtagtgctcgct

SEQ ID NO: 1883822 - DNA, 25 bp, Homo sapien
aagagacccatctcgcatccagtga

SEQ ID NO: 1883823 - DNA, 25 bp, Homo sapien
tgcagttcctctaatagcaaggtcc

SEQ ID NO: 1883824 - DNA, 25 bp, Homo sapien
gttcctctaatagcaaggtccaggc

SEQ ID NO: 1883825 - DNA, 25 bp, Homo sapien
tcctttgcagttcctctaatagcaa

SEQ ID NO: 1883826 - DNA, 25 bp, Homo sapien
ctttgcagttcctctaatagcaagg

SEQ ID NO: 1883827 - DNA, 25 bp, Homo sapien
tctgtctttggaccttaccactgga

SEQ ID NO: 1883828 - DNA, 25 bp, Homo sapien
gccttttgctcaattctggcccaga

SEQ ID NO: 1883829 - DNA, 25 bp, Homo sapien
ggaatcaagtcaattttgctgctac

SEQ ID NO: 1883830 - DNA, 25 bp, Homo sapien
tcttgccaggaaagatatgacttgg

SEQ ID NO: 1883831 - DNA, 25 bp, Homo sapien
tataccccagtgtatattaaaatat

SEQ ID NO: 1883832 - DNA, 25 bp, Homo sapien
tgtctgccaggtctgttatccagag

SEQ ID NO: 1883833 - DNA, 25 bp, Homo sapien
ggatgttgcctgctcaacttgttgg

SEQ ID NO: 1883834 - DNA, 25 bp, Homo sapien
cccagtgtatattataccccagtgt

SEQ ID NO: 1883835 - DNA, 25 bp, Homo sapien
catgattacaataggagagctgtcc

SEQ ID NO: 1883836 - DNA, 25 bp, Homo sapien
tctttagtatttgcggaggagccaa

SEQ ID NO: 1883837 - DNA, 25 bp, Homo sapien
cagtggtagtcggtatatagcctaa

SEQ ID NO: 1883838 - DNA, 25 bp, Homo sapien
gagtttgcccacatggatacgtagg

SEQ ID NO: 1883839 - DNA, 25 bp, Homo sapien
tccatgctcatgatagctcaggtga

SEQ ID NO: 1883840 - DNA, 25 bp, Homo sapien
ggtgctctcatacattctcacagct

SEQ ID NO: 1883841 - DNA, 25 bp, Homo sapien
taccatcaacattcaagcctagagt

SEQ ID NO: 1883842 - DNA, 25 bp, Homo sapien
caaattatgtcatgaacctgcctgt

SEQ ID NO: 1883843 - DNA, 25 bp, Homo sapien
ttggaataggtggttcagtgttccc

SEQ ID NO: 1883844 - DNA, 25 bp, Homo sapien
gctgtcttggaataggtggttcagt

SEQ ID NO: 1883845 - DNA, 25 bp, Homo sapien
acatagctttagcaatccttattcc

SEQ ID NO: 1883846 - DNA, 25 bp, Homo sapien
cacatagctttagcaatccttattc

SEQ ID NO: 1883847 - DNA, 25 bp, Homo sapien
gatattgcgctaagccataagcagt

SEQ ID NO: 1883848 - DNA, 25 bp, Homo sapien
tgccacctcctgtatcatgcactgt

SEQ ID NO: 1883849 - DNA, 25 bp, Homo sapien
tgcactgtcccagaagatattgcgc

SEQ ID NO: 1883850 - DNA, 25 bp, Homo sapien
tgtcctgcttatagcaccttcctgg

SEQ ID NO: 1883851 - DNA, 25 bp, Homo sapien
tcctgactgtcttggcacagaatgt

SEQ ID NO: 1883852 - DNA, 25 bp, Homo sapien
cccaggcttaacctcatggtacagg

SEQ ID NO: 1883853 - DNA, 25 bp, Homo sapien
cagatgaaggaactaaggtacagcc

SEQ ID NO: 1883854 - DNA, 25 bp, Homo sapien
ggaaacatggttgccctcctgactg

SEQ ID NO: 1883855 - DNA, 25 bp, Homo sapien
tttggtccctcgtgtcacctaagga

SEQ ID NO: 1883856 - DNA, 25 bp, Homo sapien
gtttatgaaccaccccagatccgca

SEQ ID NO: 1883857 - DNA, 25 bp, Homo sapien
catgacctgacaatatcttgcctcc

SEQ ID NO: 1883858 - DNA, 25 bp, Homo sapien
tccgcagtgactgaatctagcagtg

SEQ ID NO: 1883859 - DNA, 25 bp, Homo sapien
tcagcagtcgtcagcttttcacaaa

SEQ ID NO: 1883860 - DNA, 25 bp, Homo sapien
gaaaagaccattccctagacaaagc

SEQ ID NO: 1883861 - DNA, 25 bp, Homo sapien
tgagaagggtccaccaggtatctgg

SEQ ID NO: 1883862 - DNA, 25 bp, Homo sapien
tacctcaggtgctgcgtactaggac

SEQ ID NO: 1883863 - DNA, 25 bp, Homo sapien
cgcagagggctcagcctgccggctt

SEQ ID NO: 1883864 - DNA, 25 bp, Homo sapien
agaaggctactattgctgtcagaag

SEQ ID NO: 1883865 - DNA, 25 bp, Homo sapien
gccggctttactgctgtttttctgc

SEQ ID NO: 1883866 - DNA, 25 bp, Homo sapien
aggctactattgctgtcagaagcag

SEQ ID NO: 1883867 - DNA, 25 bp, Homo sapien
tcagtgtggtaatgtcactcatacg

SEQ ID NO: 1883868 - DNA, 25 bp, Homo sapien
ttacttaggttagttctgttctcca

SEQ ID NO: 1883869 - DNA, 25 bp, Homo sapien
cactcatacgttagactagtaacat

SEQ ID NO: 1883870 - DNA, 25 bp, Homo sapien
gcacatagcaactaggtacaatagt

SEQ ID NO: 1883871 - DNA, 25 bp, Homo sapien
gcttatccaagttttcctaacacag

SEQ ID NO: 1883872 - DNA, 25 bp, Homo sapien
gagacagggctagcagaggaatttc

SEQ ID NO: 1883873 - DNA, 25 bp, Homo sapien
ccattatgtagaaattccaggagac

SEQ ID NO: 1883874 - DNA, 25 bp, Homo sapien
tatgtagaaattccaggagacaggg

SEQ ID NO: 1883875 - DNA, 25 bp, Homo sapien
gcactaggcttactagttacagttg

SEQ ID NO: 1883876 - DNA, 25 bp, Homo sapien
catgcactaggcttactagttacag

SEQ ID NO: 1883877 - DNA, 25 bp, Homo sapien
taggcttactagttacagttgccat

SEQ ID NO: 1883878 - DNA, 25 bp, Homo sapien
tggcatgcactaggcttactagtta

SEQ ID NO: 1883879 - DNA, 25 bp, Homo sapien
tgctgaattatccaaataagaactc

SEQ ID NO: 1883880 - DNA, 25 bp, Homo sapien
cattgtatttgaacacgtcattatt

SEQ ID NO: 1883881 - DNA, 25 bp, Homo sapien
gaattatccaaataagaactctaaa

SEQ ID NO: 1883882 - DNA, 25 bp, Homo sapien
acattgtatttgaacacgtcattat

SEQ ID NO: 1883883 - DNA, 25 bp, Homo sapien
gaagatcctgggaaatttccagcaa

SEQ ID NO: 1883884 - DNA, 25 bp, Homo sapien
gaactctatgtgaggttgtacatgc

SEQ ID NO: 1883885 - DNA, 25 bp, Homo sapien
ccagcaagtcttgtctggtcaggaa

SEQ ID NO: 1883886 - DNA, 25 bp, Homo sapien
tatgtgaggttgtacatgctgtgtc

SEQ ID NO: 1883887 - DNA, 25 bp, Homo sapien
ttctcatgggtgctagcagaggccc

SEQ ID NO: 1883888 - DNA, 25 bp, Homo sapien
cactaagccctggagcaaaggtgtc

SEQ ID NO: 1883889 - DNA, 25 bp, Homo sapien
ggaaaatggcccttgatctgccctt

SEQ ID NO: 1883890 - DNA, 25 bp, Homo sapien
gaggcccttggctacagtcaatgga

SEQ ID NO: 1883891 - DNA, 25 bp, Homo sapien
ccaaaccttccgagagtgggcctct

SEQ ID NO: 1883892 - DNA, 25 bp, Homo sapien
ggtatttatttatcaggcaggagga

SEQ ID NO: 1883893 - DNA, 25 bp, Homo sapien
gaggtaaatggtttcaacatgccaa

SEQ ID NO: 1883894 - DNA, 25 bp, Homo sapien
gtgggcctctactacaaactggtga

SEQ ID NO: 1883895 - DNA, 25 bp, Homo sapien
tttcaaatgtgttcagaaactaatt

SEQ ID NO: 1883896 - DNA, 25 bp, Homo sapien
aaatgtgttcagaaactaatttgga

SEQ ID NO: 1883897 - DNA, 25 bp, Homo sapien
gatcttttcaaatgtgttcagaaac

SEQ ID NO: 1883898 - DNA, 25 bp, Homo sapien
tcagaaactaatttggattctttga

SEQ ID NO: 1883899 - DNA, 25 bp, Homo sapien
tggcctccccagcttatctatcagt

SEQ ID NO: 1883900 - DNA, 25 bp, Homo sapien
agtgaaatggatgtccttgtggagc

SEQ ID NO: 1883901 - DNA, 25 bp, Homo sapien
aaatggatgtccttgtggagctctg

SEQ ID NO: 1883902 - DNA, 25 bp, Homo sapien
ataagtgaaatggatgtccttgtgg

SEQ ID NO: 1883903 - DNA, 25 bp, Homo sapien
tctttctcagctagcgtgtgtgttt

SEQ ID NO: 1883904 - DNA, 25 bp, Homo sapien
tgtgtttctagtgtagttggccctc

SEQ ID NO: 1883905 - DNA, 25 bp, Homo sapien
tcagctagcgtgtgtgtttctagtg

SEQ ID NO: 1883906 - DNA, 25 bp, Homo sapien
gtgtgtttctagtgtagttggccct

SEQ ID NO: 1883907 - DNA, 25 bp, Homo sapien
gattttggtaactgcagagggtcct

SEQ ID NO: 1883908 - DNA, 25 bp, Homo sapien
gagcattcctagattttggtaactg

SEQ ID NO: 1883909 - DNA, 25 bp, Homo sapien
ccctacagatatcaagggaccacta

SEQ ID NO: 1883910 - DNA, 25 bp, Homo sapien
atatgtgcagtccttttatttgtca

SEQ ID NO: 1883911 - DNA, 25 bp, Homo sapien
caagacagtagtcccttaaaccatg

SEQ ID NO: 1883912 - DNA, 25 bp, Homo sapien
cagtgttctatggattacgaaatta

SEQ ID NO: 1883913 - DNA, 25 bp, Homo sapien
taaatttgatggttgattctgaatg

SEQ ID NO: 1883914 - DNA, 25 bp, Homo sapien
ttagtaatgttgcttagcccaaacg

SEQ ID NO: 1883915 - DNA, 25 bp, Homo sapien
tgcttgtagctgtgtctccgtagag

SEQ ID NO: 1883916 - DNA, 25 bp, Homo sapien
gctgtgtctccgtagagctcagtaa

SEQ ID NO: 1883917 - DNA, 25 bp, Homo sapien
gtggtgcttgtagctgtgtctccgt

SEQ ID NO: 1883918 - DNA, 25 bp, Homo sapien
tctccgtagagctcagtaaatagtt

SEQ ID NO: 1883919 - DNA, 25 bp, Homo sapien
tattagagcccttatgagtaaaaac

SEQ ID NO: 1883920 - DNA, 25 bp, Homo sapien
taatagtaaaagattgtgaccagat

SEQ ID NO: 1883921 - DNA, 25 bp, Homo sapien
tcgagaatatttagtctcaagagaa

SEQ ID NO: 1883922 - DNA, 25 bp, Homo sapien
aaacatttcatttagcaacttaact

SEQ ID NO: 1883923 - DNA, 25 bp, Homo sapien
ttattgttgtactgtggagtgcaag

SEQ ID NO: 1883924 - DNA, 25 bp, Homo sapien
tcgcttgattagtctagaacatttc

SEQ ID NO: 1883925 - DNA, 25 bp, Homo sapien
ggcaaatagatgttatatcgcttga

SEQ ID NO: 1883926 - DNA, 25 bp, Homo sapien
gagtgcaaggatactaaatattggc

SEQ ID NO: 1883927 - DNA, 25 bp, Homo sapien
ggtattggtgtgcaaacagatccca

SEQ ID NO: 1883928 - DNA, 25 bp, Homo sapien
ggacatgctttaagaatcagctctg

SEQ ID NO: 1883929 - DNA, 25 bp, Homo sapien
tactctgcgttgaagccctccagta

SEQ ID NO: 1883930 - DNA, 25 bp, Homo sapien
ctttgcctgtgtgtagcaacagttg

SEQ ID NO: 1883931 - DNA, 25 bp, Homo sapien
aaatggatgatttaactgttgtgag

SEQ ID NO: 1883932 - DNA, 25 bp, Homo sapien
gaacacggaggttgtttgacatctt

SEQ ID NO: 1883933 - DNA, 25 bp, Homo sapien
cttagaacacggaggttgtttgaca

SEQ ID NO: 1883934 - DNA, 25 bp, Homo sapien
tgatttaactgttgtgaggaagaga

SEQ ID NO: 1883935 - DNA, 25 bp, Homo sapien
gctttgtgagtttcttggaaggatt

SEQ ID NO: 1883936 - DNA, 25 bp, Homo sapien
tgctttgtgagtttcttggaaggat

SEQ ID NO: 1883937 - DNA, 25 bp, Homo sapien
catattccagacactcattaatagt

SEQ ID NO: 1883938 - DNA, 25 bp, Homo sapien
ggttgtgaaactgcgctgagattgt

SEQ ID NO: 1883939 - DNA, 25 bp, Homo sapien
ccagcgtagtccgagtgcatcgtcc

SEQ ID NO: 1883940 - DNA, 25 bp, Homo sapien
caccaccagggagtgtgatagaatt

SEQ ID NO: 1883941 - DNA, 25 bp, Homo sapien
tgcatgggtaagatttgtgtatttc

SEQ ID NO: 1883942 - DNA, 25 bp, Homo sapien
tgagcatctcctgaaagttaactag

SEQ ID NO: 1883943 - DNA, 25 bp, Homo sapien
cacttagtataagcagctgtgcact

SEQ ID NO: 1883944 - DNA, 25 bp, Homo sapien
tcaagtcccattatgaacccaaagc

SEQ ID NO: 1883945 - DNA, 25 bp, Homo sapien
tggccagctgtgtatgacatcagaa

SEQ ID NO: 1883946 - DNA, 25 bp, Homo sapien
ctcagagcagataaactccgactcc

SEQ ID NO: 1883947 - DNA, 25 bp, Homo sapien
gactcccgcttgagaaaagaactca

SEQ ID NO: 1883948 - DNA, 25 bp, Homo sapien
tggagcaactaacttgcccacctca

SEQ ID NO: 1883949 - DNA, 25 bp, Homo sapien
tgtttttggagcaactaacttgccc

SEQ ID NO: 1883950 - DNA, 25 bp, Homo sapien
ttctcagggaagcattggcccaaca

SEQ ID NO: 1883951 - DNA, 25 bp, Homo sapien
cttgtgctacgctgtctgtgtcctg

SEQ ID NO: 1883952 - DNA, 25 bp, Homo sapien
tttccacttccacatttctcaggga

SEQ ID NO: 1883953 - DNA, 25 bp, Homo sapien
gcattggcccaacagggcagttagg

SEQ ID NO: 1883954 - DNA, 25 bp, Homo sapien
tttggctggcgatgtctctccctcc

SEQ ID NO: 1883955 - DNA, 25 bp, Homo sapien
tcagtggggttatagccataggcat

SEQ ID NO: 1883956 - DNA, 25 bp, Homo sapien
ttaagagtcagtggggttatagcca

SEQ ID NO: 1883957 - DNA, 25 bp, Homo sapien
catttgcagccccaagttaagcttt

SEQ ID NO: 1883958 - DNA, 25 bp, Homo sapien
gttatagccataggcatttgcagaa

SEQ ID NO: 1883959 - DNA, 25 bp, Homo sapien
aacccaagacaagggccctcacttg

SEQ ID NO: 1883960 - DNA, 25 bp, Homo sapien
tacacttgctgactaccccatgata

SEQ ID NO: 1883961 - DNA, 25 bp, Homo sapien
tgaatttatgatggccacattacac

SEQ ID NO: 1883962 - DNA, 25 bp, Homo sapien
gacaagggccctcacttgatctgaa

SEQ ID NO: 1883963 - DNA, 25 bp, Homo sapien
tggcgactgtttcgtcagaagttag

SEQ ID NO: 1883964 - DNA, 25 bp, Homo sapien
aggtgactgctccttttagaaaaag

SEQ ID NO: 1883965 - DNA, 25 bp, Homo sapien
ttgtcattgtcatagagagatctct

SEQ ID NO: 1883966 - DNA, 25 bp, Homo sapien
gaactcagctagtggtcaggaagga

SEQ ID NO: 1883967 - DNA, 25 bp, Homo sapien
tattctactagatccaggagtaaag

SEQ ID NO: 1883968 - DNA, 25 bp, Homo sapien
attctactagatccaggagtaaagt

SEQ ID NO: 1883969 - DNA, 25 bp, Homo sapien
atattctactagatccaggagtaaa

SEQ ID NO: 1883970 - DNA, 25 bp, Homo sapien
ggtggtagattatccccagtaagtc

SEQ ID NO: 1883971 - DNA, 25 bp, Homo sapien
gacaggactagatacacaagaaatt

SEQ ID NO: 1883972 - DNA, 25 bp, Homo sapien
aactgacaattagctgccactgctg

SEQ ID NO: 1883973 - DNA, 25 bp, Homo sapien
agtgcatatcagttcaagtcctcca

SEQ ID NO: 1883974 - DNA, 25 bp, Homo sapien
tgtggtctccgtaggattaagtcct

SEQ ID NO: 1883975 - DNA, 25 bp, Homo sapien
tttgccctgggccaatgaacatcat

SEQ ID NO: 1883976 - DNA, 25 bp, Homo sapien
gaagccatgctagtattgagtgcct

SEQ ID NO: 1883977 - DNA, 25 bp, Homo sapien
cagtgtggagcccatactactcatc

SEQ ID NO: 1883978 - DNA, 25 bp, Homo sapien
ggctccatctgcattctgctgccat

SEQ ID NO: 1883979 - DNA, 25 bp, Homo sapien
gctggctccatctgcattctgctgc

SEQ ID NO: 1883980 - DNA, 25 bp, Homo sapien
ctcctctccccgctggctccatctg

SEQ ID NO: 1883981 - DNA, 25 bp, Homo sapien
tcctctccccgctggctccatctgc

SEQ ID NO: 1883982 - DNA, 25 bp, Homo sapien
tgttctagtgaagctgccctctctg

SEQ ID NO: 1883983 - DNA, 25 bp, Homo sapien
ggcaatggctccatcagtccttctc

SEQ ID NO: 1883984 - DNA, 25 bp, Homo sapien
ctctgaggctacagtggcaatggct

SEQ ID NO: 1883985 - DNA, 25 bp, Homo sapien
tccatcagtccttctctggctcaga

SEQ ID NO: 1883986 - DNA, 25 bp, Homo sapien
ttgatacagtgcttgtggagcccat

SEQ ID NO: 1883987 - DNA, 25 bp, Homo sapien
tcttgatacagtgcttgtggagccc

SEQ ID NO: 1883988 - DNA, 25 bp, Homo sapien
aatgcctcttgatacagtgcttgtg

SEQ ID NO: 1883989 - DNA, 25 bp, Homo sapien
cctcttgatacagtgcttgtggagc

SEQ ID NO: 1883990 - DNA, 25 bp, Homo sapien
gggaccgtagtcacacttagaaagc

SEQ ID NO: 1883991 - DNA, 25 bp, Homo sapien
taaacagagcatttttgtccgagtg

SEQ ID NO: 1883992 - DNA, 25 bp, Homo sapien
tagtccccacactgtatagtaaaca

SEQ ID NO: 1883993 - DNA, 25 bp, Homo sapien
tgtcagctgtctttgacttagtggt

SEQ ID NO: 1883994 - DNA, 25 bp, Homo sapien
gaaggaaggaacatgctactatcat

SEQ ID NO: 1883995 - DNA, 25 bp, Homo sapien
gatagccattttattcctgactgtg

SEQ ID NO: 1883996 - DNA, 25 bp, Homo sapien
caatagaacccgcaaatgtatccat

SEQ ID NO: 1883997 - DNA, 25 bp, Homo sapien
tcatgttctgatagctcctgcttca

SEQ ID NO: 1883998 - DNA, 25 bp, Homo sapien
agtattccatgtgacatattttctt

SEQ ID NO: 1883999 - DNA, 25 bp, Homo sapien
catagtattccatgtgacatatttt

SEQ ID NO: 1884000 - DNA, 25 bp, Homo sapien
cccattttttgatcagtgtttttgt

SEQ ID NO: 1884001 - DNA, 25 bp, Homo sapien
gcccattttttgatcagtgtttttg

SEQ ID NO: 1884002 - DNA, 25 bp, Homo sapien
ttgaacacatcccttgcatcccagg

SEQ ID NO: 1884003 - DNA, 25 bp, Homo sapien
atttggaattttactagctcctctt

SEQ ID NO: 1884004 - DNA, 25 bp, Homo sapien
tcctctttgtatccctggtaaatgg

SEQ ID NO: 1884005 - DNA, 25 bp, Homo sapien
cccaggaatggagacgacttgattg

SEQ ID NO: 1884006 - DNA, 25 bp, Homo sapien
cttgcccaggtctggtgttaaaact

SEQ ID NO: 1884007 - DNA, 25 bp, Homo sapien
tatctgagccggaatgtaccatttc

SEQ ID NO: 1884008 - DNA, 25 bp, Homo sapien
gaaaagcgaagtatctgagccggaa

SEQ ID NO: 1884009 - DNA, 25 bp, Homo sapien
gaaatcacccgcctctgtgttgata

SEQ ID NO: 1884010 - DNA, 25 bp, Homo sapien
tgtggtgaaattcccaagaccctgt

SEQ ID NO: 1884011 - DNA, 25 bp, Homo sapien
tactcatgtcacaaaacaggctagt

SEQ ID NO: 1884012 - DNA, 25 bp, Homo sapien
ccctgatggagcttactctgagaaa

SEQ ID NO: 1884013 - DNA, 25 bp, Homo sapien
ccaagcagtcaagagctaaggtcat

SEQ ID NO: 1884014 - DNA, 25 bp, Homo sapien
tgttgcttttacagatcagactgca

SEQ ID NO: 1884015 - DNA, 25 bp, Homo sapien
gacttcagtgtggaatgctctcagg

SEQ ID NO: 1884016 - DNA, 25 bp, Homo sapien
cacgggataggatcaattctaagac

SEQ ID NO: 1884017 - DNA, 25 bp, Homo sapien
tgatccctgataaaatagcaagtcc

SEQ ID NO: 1884018 - DNA, 25 bp, Homo sapien
gaaagagtaaacagccttctcccag

SEQ ID NO: 1884019 - DNA, 25 bp, Homo sapien
tagctttgagcttgcacactcacgg

SEQ ID NO: 1884020 - DNA, 25 bp, Homo sapien
actgttgggagacatgaaatgcagc

SEQ ID NO: 1884021 - DNA, 25 bp, Homo sapien
cactctctgggctatacaactttgt

SEQ ID NO: 1884022 - DNA, 25 bp, Homo sapien
tatacttgggactaaattatggctc

SEQ ID NO: 1884023 - DNA, 25 bp, Homo sapien
cccaaatcaagtattctctcttgtg

SEQ ID NO: 1884024 - DNA, 25 bp, Homo sapien
ctggcaagtgcccatacagtcttca

SEQ ID NO: 1884025 - DNA, 25 bp, Homo sapien
ccaaatcaagtattctctcttgtga

SEQ ID NO: 1884026 - DNA, 25 bp, Homo sapien
tctattgaatggtgtgggcagaatc

SEQ ID NO: 1884027 - DNA, 25 bp, Homo sapien
tttgctctgagaaagtccacttcct

SEQ ID NO: 1884028 - DNA, 25 bp, Homo sapien
ggagaccagtcagtctgatataacc

SEQ ID NO: 1884029 - DNA, 25 bp, Homo sapien
tgttcatcccaagggaaaagctctc

SEQ ID NO: 1884030 - DNA, 25 bp, Homo sapien
tatttatgaaatagatatgaatttc

SEQ ID NO: 1884031 - DNA, 25 bp, Homo sapien
tatatgacattcatatatatgaaaa

SEQ ID NO: 1884032 - DNA, 25 bp, Homo sapien
tatatgaaatagatatgaatttcat

SEQ ID NO: 1884033 - DNA, 25 bp, Homo sapien
tatatatgaaatagatatgaatttc

SEQ ID NO: 1884034 - DNA, 25 bp, Homo sapien
aaggtggaaatgtaagggacattgg

SEQ ID NO: 1884035 - DNA, 25 bp, Homo sapien
aatgtaagggacattggctgctttc

SEQ ID NO: 1884036 - DNA, 25 bp, Homo sapien
ggaaatgtaagggacattggctgct

SEQ ID NO: 1884037 - DNA, 25 bp, Homo sapien
ggtggaaatgtaagggacattggct

SEQ ID NO: 1884038 - DNA, 25 bp, Homo sapien
caccaggtgtcactataacccaaag

SEQ ID NO: 1884039 - DNA, 25 bp, Homo sapien
taaatgagtactgtcttacaaggct

SEQ ID NO: 1884040 - DNA, 25 bp, Homo sapien
gggagaggcctcttgtcatcctagt

SEQ ID NO: 1884041 - DNA, 25 bp, Homo sapien
aaagtgatgtgcaaccaggatggga

SEQ ID NO: 1884042 - DNA, 25 bp, Homo sapien
atacacatattatagtccctatagt

SEQ ID NO: 1884043 - DNA, 25 bp, Homo sapien
tagtaatcattataagaagaatgca

SEQ ID NO: 1884044 - DNA, 25 bp, Homo sapien
ttatagtccctatagtaatcattat

SEQ ID NO: 1884045 - DNA, 25 bp, Homo sapien
taatcattataagaagaatgcaaag

SEQ ID NO: 1884046 - DNA, 25 bp, Homo sapien
cctccatgtgggtaaggattatatg

SEQ ID NO: 1884047 - DNA, 25 bp, Homo sapien
aaccacatgctaaaacagttctgga

SEQ ID NO: 1884048 - DNA, 25 bp, Homo sapien
tgtcgacttgtgaaacagcaactgt

SEQ ID NO: 1884049 - DNA, 25 bp, Homo sapien
tgaattacctgaataaaccacatgc

SEQ ID NO: 1884050 - DNA, 25 bp, Homo sapien
gtctaatctgtctcctcccaagcaa

SEQ ID NO: 1884051 - DNA, 25 bp, Homo sapien
tgcaaaatcaagactccgaatccag

SEQ ID NO: 1884052 - DNA, 25 bp, Homo sapien
aaacaggacccagtagaattaagca

SEQ ID NO: 1884053 - DNA, 25 bp, Homo sapien
taaacaaaagcctgactggctccaa

SEQ ID NO: 1884054 - DNA, 25 bp, Homo sapien
tcaccagggcccaagtgggcagtaa

SEQ ID NO: 1884055 - DNA, 25 bp, Homo sapien
atcaccagggcccaagtgggcagta

SEQ ID NO: 1884056 - DNA, 25 bp, Homo sapien
ttaatcaccagggcccaagtgggca

SEQ ID NO: 1884057 - DNA, 25 bp, Homo sapien
accagggcccaagtgggcagtaaga

SEQ ID NO: 1884058 - DNA, 25 bp, Homo sapien
tgtgataaaggttaacgcattgccc

SEQ ID NO: 1884059 - DNA, 25 bp, Homo sapien
taagggctatgtaccagcactgttc

SEQ ID NO: 1884060 - DNA, 25 bp, Homo sapien
catgaagcttctgcagttgagcaca

SEQ ID NO: 1884061 - DNA, 25 bp, Homo sapien
gatctatgtttgaagcttggctcca

SEQ ID NO: 1884062 - DNA, 25 bp, Homo sapien
caggatccctagagagtggaaggga

SEQ ID NO: 1884063 - DNA, 25 bp, Homo sapien
acaggatccctagagagtggaaggg

SEQ ID NO: 1884064 - DNA, 25 bp, Homo sapien
aggatccctagagagtggaagggaa

SEQ ID NO: 1884065 - DNA, 25 bp, Homo sapien
cagcaagctccaaggggtgcttaac

SEQ ID NO: 1884066 - DNA, 25 bp, Homo sapien
ctccaaggggtgcttaactattcct

SEQ ID NO: 1884067 - DNA, 25 bp, Homo sapien
ttcctagtggggctactcaacttta

SEQ ID NO: 1884068 - DNA, 25 bp, Homo sapien
gctactcaactttaggtacaaggat

SEQ ID NO: 1884069 - DNA, 25 bp, Homo sapien
gttacgtgaaacaagctctcgctag

SEQ ID NO: 1884070 - DNA, 25 bp, Homo sapien
tagattatcaacctggaggagagcg

SEQ ID NO: 1884071 - DNA, 25 bp, Homo sapien
tagtctgaatccgaataccgttagg

SEQ ID NO: 1884072 - DNA, 25 bp, Homo sapien
tcagtataagagtcagcccaggtgt

SEQ ID NO: 1884073 - DNA, 25 bp, Homo sapien
tgcacaagctctttagctttctggg

SEQ ID NO: 1884074 - DNA, 25 bp, Homo sapien
tctttccatggttgtcttctcacac

SEQ ID NO: 1884075 - DNA, 25 bp, Homo sapien
tagatgtcctattcccccatagtca

SEQ ID NO: 1884076 - DNA, 25 bp, Homo sapien
tgggcagcatattccactagctctt

SEQ ID NO: 1884077 - DNA, 25 bp, Homo sapien
atcagggttatactttggcacacat

SEQ ID NO: 1884078 - DNA, 25 bp, Homo sapien
ttttctacaaaggatgcagctttcc

SEQ ID NO: 1884079 - DNA, 25 bp, Homo sapien
ggaatatatgacctcctcccactgc

SEQ ID NO: 1884080 - DNA, 25 bp, Homo sapien
tgttcaaacagacaaggaatatatg

SEQ ID NO: 1884081 - DNA, 25 bp, Homo sapien
acatgtaggcatggtcgttacgcca

SEQ ID NO: 1884082 - DNA, 25 bp, Homo sapien
gaactgtccaatatagggctctagg

SEQ ID NO: 1884083 - DNA, 25 bp, Homo sapien
gttacgccatttgcacagacttcca

SEQ ID NO: 1884084 - DNA, 25 bp, Homo sapien
catccagagggagtaaggtgcatat

SEQ ID NO: 1884085 - DNA, 25 bp, Homo sapien
tagccccttgaagtccgaggcagta

SEQ ID NO: 1884086 - DNA, 25 bp, Homo sapien
tgctcctaaagtagccccttgaagt

SEQ ID NO: 1884087 - DNA, 25 bp, Homo sapien
aacaagataattgctcctaaagtag

SEQ ID NO: 1884088 - DNA, 25 bp, Homo sapien
taaacaagataattgctcctaaagt

SEQ ID NO: 1884089 - DNA, 25 bp, Homo sapien
tccagtcgaggatgtttacagtcgc

SEQ ID NO: 1884090 - DNA, 25 bp, Homo sapien
tcactgtcaacagcaatataccttc

SEQ ID NO: 1884091 - DNA, 25 bp, Homo sapien
ttattgtaagcttttctgaatcatt

SEQ ID NO: 1884092 - DNA, 25 bp, Homo sapien
ctggagggtgtgggtttcaataaat

SEQ ID NO: 1884093 - DNA, 25 bp, Homo sapien
aatcatttgtggagtactggagggt

SEQ ID NO: 1884094 - DNA, 25 bp, Homo sapien
caataaatatgaagtagtcaatcat

SEQ ID NO: 1884095 - DNA, 25 bp, Homo sapien
agatcaaagctgtaagattaaatta

SEQ ID NO: 1884096 - DNA, 25 bp, Homo sapien
cagaggaacataactctataatata

SEQ ID NO: 1884097 - DNA, 25 bp, Homo sapien
ttaaaaaagatcaaagctgtaagat

SEQ ID NO: 1884098 - DNA, 25 bp, Homo sapien
gaaattattacagaggaacataact

SEQ ID NO: 1884099 - DNA, 25 bp, Homo sapien
tatcccatcaagttaaagaaacgcc

SEQ ID NO: 1884100 - DNA, 25 bp, Homo sapien
cctgaaggctatgattctgtctcga

SEQ ID NO: 1884101 - DNA, 25 bp, Homo sapien
gatcactgctgtacctactggagca

SEQ ID NO: 1884102 - DNA, 25 bp, Homo sapien
taataattggtacaggttagagccc

SEQ ID NO: 1884103 - DNA, 25 bp, Homo sapien
ttgccaaggtaggaagacacatagc

SEQ ID NO: 1884104 - DNA, 25 bp, Homo sapien
gactgttctgatagtgactggcaca

SEQ ID NO: 1884105 - DNA, 25 bp, Homo sapien
cacagacaggtctcttaggctcata

SEQ ID NO: 1884106 - DNA, 25 bp, Homo sapien
tggaaaccaggataccgacacctta

SEQ ID NO: 1884107 - DNA, 25 bp, Homo sapien
agcttgagcgacagagataacctga

SEQ ID NO: 1884108 - DNA, 25 bp, Homo sapien
agcgacagagataacctgactcaaa

SEQ ID NO: 1884109 - DNA, 25 bp, Homo sapien
gcttgagcgacagagataacctgac

SEQ ID NO: 1884110 - DNA, 25 bp, Homo sapien
ttgagcgacagagataacctgactc

SEQ ID NO: 1884111 - DNA, 25 bp, Homo sapien
ttgatttaaactgttgtgggctacc

SEQ ID NO: 1884112 - DNA, 25 bp, Homo sapien
ttgaaacagctctctgcacctcaaa

SEQ ID NO: 1884113 - DNA, 25 bp, Homo sapien
tcatagagttaagcgtcaagagtgg

SEQ ID NO: 1884114 - DNA, 25 bp, Homo sapien
taatatgtactcacagcaggtttgt

SEQ ID NO: 1884115 - DNA, 25 bp, Homo sapien
gatagggatctaaccaaacctgcta

SEQ ID NO: 1884116 - DNA, 25 bp, Homo sapien
gataccagtggcatcttaaagcagc

SEQ ID NO: 1884117 - DNA, 25 bp, Homo sapien
gaaaaccttggtgtggtggcaatct

SEQ ID NO: 1884118 - DNA, 25 bp, Homo sapien
aaattttccactcccacgatgccag

SEQ ID NO: 1884119 - DNA, 25 bp, Homo sapien
tatacagttttgaagtgttaagctt

SEQ ID NO: 1884120 - DNA, 25 bp, Homo sapien
aacacctgttctctaagttatagta

SEQ ID NO: 1884121 - DNA, 25 bp, Homo sapien
tgaaatgtcaacttataaacctgta

SEQ ID NO: 1884122 - DNA, 25 bp, Homo sapien
aattctactcatagcaattcaagga

SEQ ID NO: 1884123 - DNA, 25 bp, Homo sapien
tgcaaaagctagatcccaagggaga

SEQ ID NO: 1884124 - DNA, 25 bp, Homo sapien
ttgaggcagaccacataatcagtgt

SEQ ID NO: 1884125 - DNA, 25 bp, Homo sapien
tgatgaacgcagagactagtctagc

SEQ ID NO: 1884126 - DNA, 25 bp, Homo sapien
caagcatagtgttgagcctgccata

SEQ ID NO: 1884127 - DNA, 25 bp, Homo sapien
gtccagaggtacttatcccctcctg

SEQ ID NO: 1884128 - DNA, 25 bp, Homo sapien
tccctctgctcaacaactactactt

SEQ ID NO: 1884129 - DNA, 25 bp, Homo sapien
ccattgtgtccagaggtacttatcc

SEQ ID NO: 1884130 - DNA, 25 bp, Homo sapien
tgtgtccagaggtacttatcccctc

SEQ ID NO: 1884131 - DNA, 25 bp, Homo sapien
ggccacatggcccaactaagagatg

SEQ ID NO: 1884132 - DNA, 25 bp, Homo sapien
cagaggtggtttcatgaagggttcc

SEQ ID NO: 1884133 - DNA, 25 bp, Homo sapien
tggtttcatgaagggttccctggcc

SEQ ID NO: 1884134 - DNA, 25 bp, Homo sapien
agagatgatgccaacatgtctggtg

SEQ ID NO: 1884135 - DNA, 25 bp, Homo sapien
ggggaaatgatcagagcagtgagca

SEQ ID NO: 1884136 - DNA, 25 bp, Homo sapien
ggaaatgatcagagcagtgagcatc

SEQ ID NO: 1884137 - DNA, 25 bp, Homo sapien
aaatgatcagagcagtgagcatctg

SEQ ID NO: 1884138 - DNA, 25 bp, Homo sapien
ctgtaggggaaatgatcagagcagt

SEQ ID NO: 1884139 - DNA, 25 bp, Homo sapien
cattctctccactaaagcatgatca

SEQ ID NO: 1884140 - DNA, 25 bp, Homo sapien
tactggaactaagctctgtttttct

SEQ ID NO: 1884141 - DNA, 25 bp, Homo sapien
tctccactaaagcatgatcatcatt

SEQ ID NO: 1884142 - DNA, 25 bp, Homo sapien
gcataaacatttaggctagatactg

SEQ ID NO: 1884143 - DNA, 25 bp, Homo sapien
aaatgcccagtggagtacctgaaat

SEQ ID NO: 1884144 - DNA, 25 bp, Homo sapien
agaaaatgcccagtggagtacctga

SEQ ID NO: 1884145 - DNA, 25 bp, Homo sapien
gagaaaatgcccagtggagtacctg

SEQ ID NO: 1884146 - DNA, 25 bp, Homo sapien
cctcaactggatccggcagggatcg

SEQ ID NO: 1884147 - DNA, 25 bp, Homo sapien
ggcctatcgcttgataactcgcgca

SEQ ID NO: 1884148 - DNA, 25 bp, Homo sapien
gaatccaggcgcatgtaaacatatc

SEQ ID NO: 1884149 - DNA, 25 bp, Homo sapien
ccctggcccctaggattccaaatgg

SEQ ID NO: 1884150 - DNA, 25 bp, Homo sapien
ggccccacatattacccacgagaaa

SEQ ID NO: 1884151 - DNA, 25 bp, Homo sapien
taaaaactggacgacagcatagacc

SEQ ID NO: 1884152 - DNA, 25 bp, Homo sapien
catagaccacgttgctgtggcccca

SEQ ID NO: 1884153 - DNA, 25 bp, Homo sapien
gagatgtagtctaaaaactggacga

SEQ ID NO: 1884154 - DNA, 25 bp, Homo sapien
cccacggatacggttcccaagtcag

SEQ ID NO: 1884155 - DNA, 25 bp, Homo sapien
ggcacccgaagagttcccacggata

SEQ ID NO: 1884156 - DNA, 25 bp, Homo sapien
gatacggttcccaagtcagtggcat

SEQ ID NO: 1884157 - DNA, 25 bp, Homo sapien
acccagccgcgcacaggcccttggt

SEQ ID NO: 1884158 - DNA, 25 bp, Homo sapien
aagtcacccgcgatgaccgcggacg

SEQ ID NO: 1884159 - DNA, 25 bp, Homo sapien
ccccggctgacgacgagtcgagaaa

SEQ ID NO: 1884160 - DNA, 25 bp, Homo sapien
tgggcgagccgggagacggtcaagt

SEQ ID NO: 1884161 - DNA, 25 bp, Homo sapien
cggttcgcaagttgccgggatctgc

SEQ ID NO: 1884162 - DNA, 25 bp, Homo sapien
caccgcgttctttgtgtgtctctcg

SEQ ID NO: 1884163 - DNA, 25 bp, Homo sapien
aagaggagcgttgacagatgctgtc

SEQ ID NO: 1884164 - DNA, 25 bp, Homo sapien
caaagaccccaattggctaggagcc

SEQ ID NO: 1884165 - DNA, 25 bp, Homo sapien
gaaaagtctggactgcctcggcgag

SEQ ID NO: 1884166 - DNA, 25 bp, Homo sapien
tgttcgtggtctgctgataggctcc

SEQ ID NO: 1884167 - DNA, 25 bp, Homo sapien
tttgggttgccagtagattaaaggc

SEQ ID NO: 1884168 - DNA, 25 bp, Homo sapien
tatcataaccatactcagaactgct

SEQ ID NO: 1884169 - DNA, 25 bp, Homo sapien
cctagagcataaagccgaggcatgt

SEQ ID NO: 1884170 - DNA, 25 bp, Homo sapien
attcttctgcaagctactgcatgtg

SEQ ID NO: 1884171 - DNA, 25 bp, Homo sapien
gcactgttgtgcactcattaagggc

SEQ ID NO: 1884172 - DNA, 25 bp, Homo sapien
tgcactcattaagggcctgaggtgc

SEQ ID NO: 1884173 - DNA, 25 bp, Homo sapien
cctattcttctgcaagctactgcat

SEQ ID NO: 1884174 - DNA, 25 bp, Homo sapien
cactcagggtacctctccagtttct

SEQ ID NO: 1884175 - DNA, 25 bp, Homo sapien
actcagggtacctctccagtttctc

SEQ ID NO: 1884176 - DNA, 25 bp, Homo sapien
ctcagggtacctctccagtttctcc

SEQ ID NO: 1884177 - DNA, 25 bp, Homo sapien
tgctgccacattggaagatttctct

SEQ ID NO: 1884178 - DNA, 25 bp, Homo sapien
gggctacatctgtctcgttcactgt

SEQ ID NO: 1884179 - DNA, 25 bp, Homo sapien
catctgtctcgttcactgtagtata

SEQ ID NO: 1884180 - DNA, 25 bp, Homo sapien
tctgagtaccggtgaaaggagaaac

SEQ ID NO: 1884181 - DNA, 25 bp, Homo sapien
ctgctgaagcgacccggctcccctg

SEQ ID NO: 1884182 - DNA, 25 bp, Homo sapien
tgctgctgaagcgacccggctcccc

SEQ ID NO: 1884183 - DNA, 25 bp, Homo sapien
ttgctgctgaagcgacccggctccc

SEQ ID NO: 1884184 - DNA, 25 bp, Homo sapien
catctccttcgtacatttgtcctgt

SEQ ID NO: 1884185 - DNA, 25 bp, Homo sapien
gatgacctaggactgcagcaagagg

SEQ ID NO: 1884186 - DNA, 25 bp, Homo sapien
agcctaccatcgtcagttcttctgg

SEQ ID NO: 1884187 - DNA, 25 bp, Homo sapien
tcacttggcagcctaccatcgtcag

SEQ ID NO: 1884188 - DNA, 25 bp, Homo sapien
tggatctactccatgggttcccatg

SEQ ID NO: 1884189 - DNA, 25 bp, Homo sapien
tttcaaagctatggtgtgattcggg

SEQ ID NO: 1884190 - DNA, 25 bp, Homo sapien
ttccttgtgtaaatactggatctac

SEQ ID NO: 1884191 - DNA, 25 bp, Homo sapien
gagccctggagctactggagcaagt

SEQ ID NO: 1884192 - DNA, 25 bp, Homo sapien
tgcagaggtctcttgccatacgagg

SEQ ID NO: 1884193 - DNA, 25 bp, Homo sapien
tgactgaaatcctacgcatatctgg

SEQ ID NO: 1884194 - DNA, 25 bp, Homo sapien
tttccaatatgcaaagtggtgctcc

SEQ ID NO: 1884195 - DNA, 25 bp, Homo sapien
tctaaagctactgacacacagggcc

SEQ ID NO: 1884196 - DNA, 25 bp, Homo sapien
tgatccttgagagtgcatattgtta

SEQ ID NO: 1884197 - DNA, 25 bp, Homo sapien
gggtaagcctttaatagagatataa

SEQ ID NO: 1884198 - DNA, 25 bp, Homo sapien
tacagatccagagacttagaaagct

SEQ ID NO: 1884199 - DNA, 25 bp, Homo sapien
cttttggtaatatgcagttatgtgc

SEQ ID NO: 1884200 - DNA, 25 bp, Homo sapien
gccactctacaagactatccaggac

SEQ ID NO: 1884201 - DNA, 25 bp, Homo sapien
cagccactctacaagactatccagg

SEQ ID NO: 1884202 - DNA, 25 bp, Homo sapien
tacagccactctacaagactatcca

SEQ ID NO: 1884203 - DNA, 25 bp, Homo sapien
tgactacagccactctacaagacta

SEQ ID NO: 1884204 - DNA, 25 bp, Homo sapien
acaacgcccgtctggctgcagatga

SEQ ID NO: 1884205 - DNA, 25 bp, Homo sapien
tcgacaacgcccgtctggctgcaga

SEQ ID NO: 1884206 - DNA, 25 bp, Homo sapien
caggattgtcctggagatcgacaac

SEQ ID NO: 1884207 - DNA, 25 bp, Homo sapien
gagaactccaggattgtcctggaga

SEQ ID NO: 1884208 - DNA, 25 bp, Homo sapien
accaagagtgagacggagcaggctc

SEQ ID NO: 1884209 - DNA, 25 bp, Homo sapien
acgagctgaccctggccattaccga

SEQ ID NO: 1884210 - DNA, 25 bp, Homo sapien
gcaggctctgcgcatgagcgcggag

SEQ ID NO: 1884211 - DNA, 25 bp, Homo sapien
cattaccgacctggagatgcagatc

SEQ ID NO: 1884212 - DNA, 25 bp, Homo sapien
tgcaacatcaactgaagcagccgcc

SEQ ID NO: 1884213 - DNA, 25 bp, Homo sapien
ggtccccgcgcagcgaaatgcgctt

SEQ ID NO: 1884214 - DNA, 25 bp, Homo sapien
ggcaccagttgcaacacgacattga

SEQ ID NO: 1884215 - DNA, 25 bp, Homo sapien
tctcttttagcagcaggcaccagtt

SEQ ID NO: 1884216 - DNA, 25 bp, Homo sapien
cctgcgagagttccccatggaagga

SEQ ID NO: 1884217 - DNA, 25 bp, Homo sapien
cattttgtgcctgtagaccgtggga

SEQ ID NO: 1884218 - DNA, 25 bp, Homo sapien
ggacaggcagcaccagttgcagaag

SEQ ID NO: 1884219 - DNA, 25 bp, Homo sapien
gttgcagaaggtaccgcgggcccat

SEQ ID NO: 1884220 - DNA, 25 bp, Homo sapien
tagtagttcctcttggtgtcgtctc

SEQ ID NO: 1884221 - DNA, 25 bp, Homo sapien
ggtgtcgtctcctatccgcacactg

SEQ ID NO: 1884222 - DNA, 25 bp, Homo sapien
tcctgactggacatcgctgcttggc

SEQ ID NO: 1884223 - DNA, 25 bp, Homo sapien
ttatttaacactgctcttacatgca

SEQ ID NO: 1884224 - DNA, 25 bp, Homo sapien
caggaactgtgtctgccagcttttc

SEQ ID NO: 1884225 - DNA, 25 bp, Homo sapien
ggaactgtgtctgccagcttttcca

SEQ ID NO: 1884226 - DNA, 25 bp, Homo sapien
ctgtagaaaggcccaggaactgtgt

SEQ ID NO: 1884227 - DNA, 25 bp, Homo sapien
gaaaggcccaggaactgtgtctgcc

SEQ ID NO: 1884228 - DNA, 25 bp, Homo sapien
gtagttccctgccttgtgatttggt

SEQ ID NO: 1884229 - DNA, 25 bp, Homo sapien
agttccctgccttgtgatttggtac

SEQ ID NO: 1884230 - DNA, 25 bp, Homo sapien
gttccctgccttgtgatttggtaca

SEQ ID NO: 1884231 - DNA, 25 bp, Homo sapien
tagttccctgccttgtgatttggta

SEQ ID NO: 1884232 - DNA, 25 bp, Homo sapien
tctctctgcctttactgagtttgta

SEQ ID NO: 1884233 - DNA, 25 bp, Homo sapien
tggctgatttctacatctgcctaac

SEQ ID NO: 1884234 - DNA, 25 bp, Homo sapien
tccatgatgaggcattctctctgcc

SEQ ID NO: 1884235 - DNA, 25 bp, Homo sapien
tctgcctaacacctttagtcgtgcg

SEQ ID NO: 1884236 - DNA, 25 bp, Homo sapien
ctggctatgtcagtcctcttccggt

SEQ ID NO: 1884237 - DNA, 25 bp, Homo sapien
acctcctggctatgtcagtcctctt

SEQ ID NO: 1884238 - DNA, 25 bp, Homo sapien
tgttgaacctcctggctatgtcagt

SEQ ID NO: 1884239 - DNA, 25 bp, Homo sapien
gctatgtcagtcctcttccggtcca

SEQ ID NO: 1884240 - DNA, 25 bp, Homo sapien
tttctaatttagaatcccacttcat

SEQ ID NO: 1884241 - DNA, 25 bp, Homo sapien
tttcctccaactgcctgatttctaa

SEQ ID NO: 1884242 - DNA, 25 bp, Homo sapien
gtggctgtgatactaccactgtgca

SEQ ID NO: 1884243 - DNA, 25 bp, Homo sapien
atcatgacaggggttttgggaaaag

SEQ ID NO: 1884244 - DNA, 25 bp, Homo sapien
tcaatgagcaataattgcatctcag

SEQ ID NO: 1884245 - DNA, 25 bp, Homo sapien
aataattgcatctcagacctcagtg

SEQ ID NO: 1884246 - DNA, 25 bp, Homo sapien
ggttcagagaggtaaaagatttctg

SEQ ID NO: 1884247 - DNA, 25 bp, Homo sapien
tccttggttcagagaggtaaaagat

SEQ ID NO: 1884248 - DNA, 25 bp, Homo sapien
ttggttcagagaggtaaaagatttc

SEQ ID NO: 1884249 - DNA, 25 bp, Homo sapien
tcagagaggtaaaagatttctgatt

SEQ ID NO: 1884250 - DNA, 25 bp, Homo sapien
tgtatagagtttaactttttctgct

SEQ ID NO: 1884251 - DNA, 25 bp, Homo sapien
ttttctgcttgcactatgagcttca

SEQ ID NO: 1884252 - DNA, 25 bp, Homo sapien
aaatgattgtcccactggactaaaa

SEQ ID NO: 1884253 - DNA, 25 bp, Homo sapien
ttgtcccactggactaaaatgattg

SEQ ID NO: 1884254 - DNA, 25 bp, Homo sapien
taggaccgcagtacctccagtggtt

SEQ ID NO: 1884255 - DNA, 25 bp, Homo sapien
tctttgcaatgtctgcactcttctc

SEQ ID NO: 1884256 - DNA, 25 bp, Homo sapien
tcctttcgttcaggttcactgctcc

SEQ ID NO: 1884257 - DNA, 25 bp, Homo sapien
cccttgagctagctgcctgcattga

SEQ ID NO: 1884258 - DNA, 25 bp, Homo sapien
cttcagtcatggtcactagttgttc

SEQ ID NO: 1884259 - DNA, 25 bp, Homo sapien
aaagtgcctcctccataggccagag

SEQ ID NO: 1884260 - DNA, 25 bp, Homo sapien
tgttctcggttgtgctgaggcaaca

SEQ ID NO: 1884261 - DNA, 25 bp, Homo sapien
ccatctgtagccaagtgagcgagtg

SEQ ID NO: 1884262 - DNA, 25 bp, Homo sapien
ctttccctcttctactgtggtgcac

SEQ ID NO: 1884263 - DNA, 25 bp, Homo sapien
tactgtggtgcacatttcctttcca

SEQ ID NO: 1884264 - DNA, 25 bp, Homo sapien
catcatcatctgctgtgaatctttt

SEQ ID NO: 1884265 - DNA, 25 bp, Homo sapien
catcatctgctgtgaatcttttcat

SEQ ID NO: 1884266 - DNA, 25 bp, Homo sapien
cacaatagattcttttatcactgat

SEQ ID NO: 1884267 - DNA, 25 bp, Homo sapien
ttttatcactgatgacggaagccaa

SEQ ID NO: 1884268 - DNA, 25 bp, Homo sapien
ttaagctccaggtcacaatagattc

SEQ ID NO: 1884269 - DNA, 25 bp, Homo sapien
acttgtactctgaagtagagtgtgt

SEQ ID NO: 1884270 - DNA, 25 bp, Homo sapien
tgccaatagcatgatggtgccaaga

SEQ ID NO: 1884271 - DNA, 25 bp, Homo sapien
gccagtaaggtgaccatgccaacag

SEQ ID NO: 1884272 - DNA, 25 bp, Homo sapien
tctgtcccttccatatcccaggaag

SEQ ID NO: 1884273 - DNA, 25 bp, Homo sapien
gaagtacacctaatggagagataaa

SEQ ID NO: 1884274 - DNA, 25 bp, Homo sapien
atttgttgcttcaatgatgattagg

SEQ ID NO: 1884275 - DNA, 25 bp, Homo sapien
tgcttcaatgatgattaggttacac

SEQ ID NO: 1884276 - DNA, 25 bp, Homo sapien
gaggtagtaaatggacagctatttg

SEQ ID NO: 1884277 - DNA, 25 bp, Homo sapien
tcactggtaaatagaggtagtaaat

SEQ ID NO: 1884278 - DNA, 25 bp, Homo sapien
ccttctgagaacctgcatactgcac

SEQ ID NO: 1884279 - DNA, 25 bp, Homo sapien
tgcatactgcactcttccccaatat

SEQ ID NO: 1884280 - DNA, 25 bp, Homo sapien
gcatctctctagagatccccttctg

SEQ ID NO: 1884281 - DNA, 25 bp, Homo sapien
cccaatatggtgttattctctctgg

SEQ ID NO: 1884282 - DNA, 25 bp, Homo sapien
caagggcactatggctttacataag

SEQ ID NO: 1884283 - DNA, 25 bp, Homo sapien
ggtagtggattagcaagggcactat

SEQ ID NO: 1884284 - DNA, 25 bp, Homo sapien
cataggtcatgctagagagcacctg

SEQ ID NO: 1884285 - DNA, 25 bp, Homo sapien
ttacataagggttcataggtcatgc

SEQ ID NO: 1884286 - DNA, 25 bp, Homo sapien
taagaaggtcatagggccacttagt

SEQ ID NO: 1884287 - DNA, 25 bp, Homo sapien
tataaattgaatgagtgcggcagag

SEQ ID NO: 1884288 - DNA, 25 bp, Homo sapien
tctttcaggttgtaaaacgctggcc

SEQ ID NO: 1884289 - DNA, 25 bp, Homo sapien
gaagttacatagaccttgaagaggc

SEQ ID NO: 1884290 - DNA, 25 bp, Homo sapien
attagtatgttgcaggctgcctgtg

SEQ ID NO: 1884291 - DNA, 25 bp, Homo sapien
gcctgtggggtgaccatcaacatca

SEQ ID NO: 1884292 - DNA, 25 bp, Homo sapien
catgttttctagaggtaaattagta

SEQ ID NO: 1884293 - DNA, 25 bp, Homo sapien
caacatcatcaccttcagttccact

SEQ ID NO: 1884294 - DNA, 25 bp, Homo sapien
atagccgtagatatgtggcgttatt

SEQ ID NO: 1884295 - DNA, 25 bp, Homo sapien
gatagccgtagatatgtggcgttat

SEQ ID NO: 1884296 - DNA, 25 bp, Homo sapien
agatagccgtagatatgtggcgtta

SEQ ID NO: 1884297 - DNA, 25 bp, Homo sapien
cagatagccgtagatatgtggcgtt

SEQ ID NO: 1884298 - DNA, 25 bp, Homo sapien
ccgatggcgtattcgaacactaaag

SEQ ID NO: 1884299 - DNA, 25 bp, Homo sapien
tcatttcagcgtatcagctttccga

SEQ ID NO: 1884300 - DNA, 25 bp, Homo sapien
gaacactaaagttatgatccattct

SEQ ID NO: 1884301 - DNA, 25 bp, Homo sapien
ggaagccctcacatgtaaaattgcc

SEQ ID NO: 1884302 - DNA, 25 bp, Homo sapien
ctggggcacagtgttgggagtggag

SEQ ID NO: 1884303 - DNA, 25 bp, Homo sapien
ttgtcggggcataacgtgcaaccat

SEQ ID NO: 1884304 - DNA, 25 bp, Homo sapien
ttgggagtggaggacaagccggcac

SEQ ID NO: 1884305 - DNA, 25 bp, Homo sapien
gccggcacttgtcggggcataacgt

SEQ ID NO: 1884306 - DNA, 25 bp, Homo sapien
cagtacagctttcatctatgtttgt

SEQ ID NO: 1884307 - DNA, 25 bp, Homo sapien
atcttcccttcattataccctcttt

SEQ ID NO: 1884308 - DNA, 25 bp, Homo sapien
tcagtacagctttcatctatgtttg

SEQ ID NO: 1884309 - DNA, 25 bp, Homo sapien
ttctcagtacagctttcatctatgt

SEQ ID NO: 1884310 - DNA, 25 bp, Homo sapien
ggcagttggcaaccattcatcgcat

SEQ ID NO: 1884311 - DNA, 25 bp, Homo sapien
tcatcgcattgattgcagtcattca

SEQ ID NO: 1884312 - DNA, 25 bp, Homo sapien
tcccgtgtgtacgtgcactgaagag

SEQ ID NO: 1884313 - DNA, 25 bp, Homo sapien
cttgtggcaatgttagtttctcccg

SEQ ID NO: 1884314 - DNA, 25 bp, Homo sapien
cacatgcagttagaagactgtcgaa

SEQ ID NO: 1884315 - DNA, 25 bp, Homo sapien
gagcattcccctgaggcggttgcag

SEQ ID NO: 1884316 - DNA, 25 bp, Homo sapien
gactgtcgaagagccccaatctgat

SEQ ID NO: 1884317 - DNA, 25 bp, Homo sapien
tgatgagggaatgctcacatgcagt

SEQ ID NO: 1884318 - DNA, 25 bp, Homo sapien
tgtgcacgtttctgtgtgttgtgtc

SEQ ID NO: 1884319 - DNA, 25 bp, Homo sapien
gcacgtttctgtgtgttgtgtccat

SEQ ID NO: 1884320 - DNA, 25 bp, Homo sapien
tgtgtgcacgtttctgtgtgttgtg

SEQ ID NO: 1884321 - DNA, 25 bp, Homo sapien
cttgtttggaatgagcagtgtgtgt

SEQ ID NO: 1884322 - DNA, 25 bp, Homo sapien
agaggctagcacagattttattcgg

SEQ ID NO: 1884323 - DNA, 25 bp, Homo sapien
tcatatggtcatgccaaagctttca

SEQ ID NO: 1884324 - DNA, 25 bp, Homo sapien
gattttattcgggtataattgagct

SEQ ID NO: 1884325 - DNA, 25 bp, Homo sapien
gcttttctgctatgggaaaagctgc

SEQ ID NO: 1884326 - DNA, 25 bp, Homo sapien
tgggagctcttgcacccttgctgct

SEQ ID NO: 1884327 - DNA, 25 bp, Homo sapien
ttgggagctcttgcacccttgctgc

SEQ ID NO: 1884328 - DNA, 25 bp, Homo sapien
gagctcttgcacccttgctgctgct

SEQ ID NO: 1884329 - DNA, 25 bp, Homo sapien
ggagctcttgcacccttgctgctgc

SEQ ID NO: 1884330 - DNA, 25 bp, Homo sapien
tccttcactgctaaaacagctttgg

SEQ ID NO: 1884331 - DNA, 25 bp, Homo sapien
gtggtctttccttcactgctaaaac

SEQ ID NO: 1884332 - DNA, 25 bp, Homo sapien
gtctttccttcactgctaaaacagc

SEQ ID NO: 1884333 - DNA, 25 bp, Homo sapien
ctttccttcactgctaaaacagctt

SEQ ID NO: 1884334 - DNA, 25 bp, Homo sapien
tctactggtggcaactgagatcggt

SEQ ID NO: 1884335 - DNA, 25 bp, Homo sapien
gagatcggtacccactggctactgc

SEQ ID NO: 1884336 - DNA, 25 bp, Homo sapien
tctgcccgtgccaagaaaatagttg

SEQ ID NO: 1884337 - DNA, 25 bp, Homo sapien
ccaggatgagaacagtctgcccgtg

SEQ ID NO: 1884338 - DNA, 25 bp, Homo sapien
gttgaggccagtttatgaatgtcct

SEQ ID NO: 1884339 - DNA, 25 bp, Homo sapien
catggagctatctagttgaaaggaa

SEQ ID NO: 1884340 - DNA, 25 bp, Homo sapien
caccaaagtatctgaacatggagct

SEQ ID NO: 1884341 - DNA, 25 bp, Homo sapien
gagacaccaaagtatctgaacatgg

SEQ ID NO: 1884342 - DNA, 25 bp, Homo sapien
tctgaagggagacaccaaagtatct

SEQ ID NO: 1884343 - DNA, 25 bp, Homo sapien
agcaattttgagttgatgagaaggc

SEQ ID NO: 1884344 - DNA, 25 bp, Homo sapien
gcatttgcatttgaacagtgagtgt

SEQ ID NO: 1884345 - DNA, 25 bp, Homo sapien
taaggaaagtaagactgccaaagtc

SEQ ID NO: 1884346 - DNA, 25 bp, Homo sapien
tagttctgttactcaaggagtttct

SEQ ID NO: 1884347 - DNA, 25 bp, Homo sapien
ggggtagcctgcattgaagttttgt

SEQ ID NO: 1884348 - DNA, 25 bp, Homo sapien
gtagcctgcattgaagttttgtttt

SEQ ID NO: 1884349 - DNA, 25 bp, Homo sapien
gggtagcctgcattgaagttttgtt

SEQ ID NO: 1884350 - DNA, 25 bp, Homo sapien
agggggtagcctgcattgaagtttt

SEQ ID NO: 1884351 - DNA, 25 bp, Homo sapien
aaaggtgatgtagcagccgtggcac

SEQ ID NO: 1884352 - DNA, 25 bp, Homo sapien
cagccgtggcactattattgtcaga

SEQ ID NO: 1884353 - DNA, 25 bp, Homo sapien
tatagaatatgaaaggtgatgtagc

SEQ ID NO: 1884354 - DNA, 25 bp, Homo sapien
gtcagacttggcaacaataccccag

SEQ ID NO: 1884355 - DNA, 25 bp, Homo sapien
gtttaccctttcatccaatgaaaga

SEQ ID NO: 1884356 - DNA, 25 bp, Homo sapien
tttaccctttcatccaatgaaagaa

SEQ ID NO: 1884357 - DNA, 25 bp, Homo sapien
ctttctagccactaatgaaatatcc

SEQ ID NO: 1884358 - DNA, 25 bp, Homo sapien
tgcaccagtggggtcacaggtatgc

SEQ ID NO: 1884359 - DNA, 25 bp, Homo sapien
acaggtatgctttctagccactaat

SEQ ID NO: 1884360 - DNA, 25 bp, Homo sapien
ccagtggggtcacaggtatgctttc

SEQ ID NO: 1884361 - DNA, 25 bp, Homo sapien
tacgcaaactcaatcttacatcgga

SEQ ID NO: 1884362 - DNA, 25 bp, Homo sapien
gaaatagatgaacccggaacctgag

SEQ ID NO: 1884363 - DNA, 25 bp, Homo sapien
gagcccaggaggccttgtggttcat

SEQ ID NO: 1884364 - DNA, 25 bp, Homo sapien
ttgccaaataggtcatgtggccctg

SEQ ID NO: 1884365 - DNA, 25 bp, Homo sapien
tgcatgttacagtatgctgacctca

SEQ ID NO: 1884366 - DNA, 25 bp, Homo sapien
aattaaagccctcttgacaagttgc

SEQ ID NO: 1884367 - DNA, 25 bp, Homo sapien
cctcttgacaagttgcatgttacag

SEQ ID NO: 1884368 - DNA, 25 bp, Homo sapien
tgttcactaaccatccaaattaaag

SEQ ID NO: 1884369 - DNA, 25 bp, Homo sapien
ggaacgcgtgatggcactgatctgt

SEQ ID NO: 1884370 - DNA, 25 bp, Homo sapien
tgcccatgtgctaaggttgacgaag

SEQ ID NO: 1884371 - DNA, 25 bp, Homo sapien
cttcataaggacttggtggtgccca

SEQ ID NO: 1884372 - DNA, 25 bp, Homo sapien
ttttctgtgccaaaggcgtcaaggg

SEQ ID NO: 1884373 - DNA, 25 bp, Homo sapien
aaagacgatgctccgacttgtggaa

SEQ ID NO: 1884374 - DNA, 25 bp, Homo sapien
actaagttctgtgcgcgctgcggag

SEQ ID NO: 1884375 - DNA, 25 bp, Homo sapien
caaagtttgctgatgggtgcggtca

SEQ ID NO: 1884376 - DNA, 25 bp, Homo sapien
tctctgctcctattgtcgcactaag

SEQ ID NO: 1884377 - DNA, 25 bp, Homo sapien
ctctggaggtgcctctgaacttcca

SEQ ID NO: 1884378 - DNA, 25 bp, Homo sapien
tgcaacgagtaggatgccaggcagc

SEQ ID NO: 1884379 - DNA, 25 bp, Homo sapien
tgcattcctttggtagcgtcctcag

SEQ ID NO: 1884380 - DNA, 25 bp, Homo sapien
agttgtcccatggatcatacttgtc

SEQ ID NO: 1884381 - DNA, 25 bp, Homo sapien
tgtgatctaatgtcacgaactagtt

SEQ ID NO: 1884382 - DNA, 25 bp, Homo sapien
tcacgaactagtttcgtaggaattg

SEQ ID NO: 1884383 - DNA, 25 bp, Homo sapien
tatgcaatagtaattgcctgttcat

SEQ ID NO: 1884384 - DNA, 25 bp, Homo sapien
aaatgaatatgcaatagtaattgcc

SEQ ID NO: 1884385 - DNA, 25 bp, Homo sapien
aaggccggcaaacgcgcgccggcgg

SEQ ID NO: 1884386 - DNA, 25 bp, Homo sapien
ggcgctgccggagggcaaggccggc

SEQ ID NO: 1884387 - DNA, 25 bp, Homo sapien
cgcggcgctgccggagggcaaggcc

SEQ ID NO: 1884388 - DNA, 25 bp, Homo sapien
ggcaaggccggcaaacgcgcgccgg

SEQ ID NO: 1884389 - DNA, 25 bp, Homo sapien
acaatatcaagagtggtgactttgt

SEQ ID NO: 1884390 - DNA, 25 bp, Homo sapien
gctccctagttgttcagcaacatct

SEQ ID NO: 1884391 - DNA, 25 bp, Homo sapien
gtttacattggctccctagttgttc

SEQ ID NO: 1884392 - DNA, 25 bp, Homo sapien
tacattggctccctagttgttcagc

SEQ ID NO: 1884393 - DNA, 25 bp, Homo sapien
ttggctccctagttgttcagcaaca

SEQ ID NO: 1884394 - DNA, 25 bp, Homo sapien
gctttttgcctgcagaatgcaccga

SEQ ID NO: 1884395 - DNA, 25 bp, Homo sapien
agcggcagtatagaacaaggtatcc

SEQ ID NO: 1884396 - DNA, 25 bp, Homo sapien
tccagcagacacatcgttcagcagt

SEQ ID NO: 1884397 - DNA, 25 bp, Homo sapien
caagtgccagtgagaagcggcagta

SEQ ID NO: 1884398 - DNA, 25 bp, Homo sapien
caagagagcaaccagcctggagcag

SEQ ID NO: 1884399 - DNA, 25 bp, Homo sapien
gggtgtctagatcccagagcagcct

SEQ ID NO: 1884400 - DNA, 25 bp, Homo sapien
ctggaagagggtgtctagatcccag

SEQ ID NO: 1884401 - DNA, 25 bp, Homo sapien
gtaggcagggccagttgacggtaga

SEQ ID NO: 1884402 - DNA, 25 bp, Homo sapien
aggcagggccagttgacggtagaca

SEQ ID NO: 1884403 - DNA, 25 bp, Homo sapien
gcagggccagttgacggtagacact

SEQ ID NO: 1884404 - DNA, 25 bp, Homo sapien
agggccagttgacggtagacactgg

SEQ ID NO: 1884405 - DNA, 25 bp, Homo sapien
acagccacccaagaactgaggtgtc

SEQ ID NO: 1884406 - DNA, 25 bp, Homo sapien
gacagccacccaagaactgaggtgt

SEQ ID NO: 1884407 - DNA, 25 bp, Homo sapien
tggagagggtcgagggcccagtggc

SEQ ID NO: 1884408 - DNA, 25 bp, Homo sapien
tccccctccattcttatggggctgg

SEQ ID NO: 1884409 - DNA, 25 bp, Homo sapien
ggagagggtcgagggcccagtggct

SEQ ID NO: 1884410 - DNA, 25 bp, Homo sapien
tgggctgctctgtggcaccagtccc

SEQ ID NO: 1884411 - DNA, 25 bp, Homo sapien
tccccatgcctgaaggagctgggct

SEQ ID NO: 1884412 - DNA, 25 bp, Homo sapien
actgctccccatgcctgaaggagct

SEQ ID NO: 1884413 - DNA, 25 bp, Homo sapien
ggctgctctgtggcaccagtcccga

SEQ ID NO: 1884414 - DNA, 25 bp, Homo sapien
tagcgactctgctgggatcaggctt

SEQ ID NO: 1884415 - DNA, 25 bp, Homo sapien
gactgggagcatctcgcagcaagta

SEQ ID NO: 1884416 - DNA, 25 bp, Homo sapien
tctcgcagcaagtagggccgcaggt

SEQ ID NO: 1884417 - DNA, 25 bp, Homo sapien
gggctgtgttctgccaccatagcga

SEQ ID NO: 1884418 - DNA, 25 bp, Homo sapien
ctatacatttagtaaaatttggcat

SEQ ID NO: 1884419 - DNA, 25 bp, Homo sapien
tggagagatgtacacactggagcat

SEQ ID NO: 1884420 - DNA, 25 bp, Homo sapien
tggagcataatgacggcagccagtc

SEQ ID NO: 1884421 - DNA, 25 bp, Homo sapien
gaaagaaacggagatccagccttag

SEQ ID NO: 1884422 - DNA, 25 bp, Homo sapien
aagagcaccagtgtcagtggagaga

SEQ ID NO: 1884423 - DNA, 25 bp, Homo sapien
ttactccttcatgctgttgacacag

SEQ ID NO: 1884424 - DNA, 25 bp, Homo sapien
tactccttcatgctgttgacacagc

SEQ ID NO: 1884425 - DNA, 25 bp, Homo sapien
actccttcatgctgttgacacagcc

SEQ ID NO: 1884426 - DNA, 25 bp, Homo sapien
tctgttttcatagagtagttcatgg

SEQ ID NO: 1884427 - DNA, 25 bp, Homo sapien
catagagtagttcatggtcaattat

SEQ ID NO: 1884428 - DNA, 25 bp, Homo sapien
agagtagttcatggtcaattattta

SEQ ID NO: 1884429 - DNA, 25 bp, Homo sapien
gttttcatagagtagttcatggtca

SEQ ID NO: 1884430 - DNA, 25 bp, Homo sapien
tcacacttggttgttgggaagatgt

SEQ ID NO: 1884431 - DNA, 25 bp, Homo sapien
gatgttttgaggcaatcttaaagga

SEQ ID NO: 1884432 - DNA, 25 bp, Homo sapien
tacagcttagggtggtcacacttgg

SEQ ID NO: 1884433 - DNA, 25 bp, Homo sapien
ggaaaagcttggaggcagaacatgt

SEQ ID NO: 1884434 - DNA, 25 bp, Homo sapien
tacccagtgaagcagaatctgtagg

SEQ ID NO: 1884435 - DNA, 25 bp, Homo sapien
aggccggttgggtctgtatatctca

SEQ ID NO: 1884436 - DNA, 25 bp, Homo sapien
tagtgagtgatagagagcagtgcct

SEQ ID NO: 1884437 - DNA, 25 bp, Homo sapien
gcagtgcctttaccagaaatgggaa

SEQ ID NO: 1884438 - DNA, 25 bp, Homo sapien
tattggaaattatgatttgcaactc

SEQ ID NO: 1884439 - DNA, 25 bp, Homo sapien
gcagccagaagtctattggaaatta

SEQ ID NO: 1884440 - DNA, 25 bp, Homo sapien
tttgcaactcatgaaagctatggag

SEQ ID NO: 1884441 - DNA, 25 bp, Homo sapien
gagattagagataccaccctgggag

SEQ ID NO: 1884442 - DNA, 25 bp, Homo sapien
gtgttttccttctcaggaagagtta

SEQ ID NO: 1884443 - DNA, 25 bp, Homo sapien
ccttctcaggaagagttatcaattc

SEQ ID NO: 1884444 - DNA, 25 bp, Homo sapien
aggaagagttatcaattccacattc

SEQ ID NO: 1884445 - DNA, 25 bp, Homo sapien
cttgtgaattacagtgttttccttc

SEQ ID NO: 1884446 - DNA, 25 bp, Homo sapien
tttctatgatgacagaatctcctag

SEQ ID NO: 1884447 - DNA, 25 bp, Homo sapien
tgcttttcacagttgaatttgcttt

SEQ ID NO: 1884448 - DNA, 25 bp, Homo sapien
gatgacagaatctcctagagttgta

SEQ ID NO: 1884449 - DNA, 25 bp, Homo sapien
tctcctagagttgtatgcaggtact

SEQ ID NO: 1884450 - DNA, 25 bp, Homo sapien
cctaaacctctgactaccctgctgt

SEQ ID NO: 1884451 - DNA, 25 bp, Homo sapien
ctaccctaaacctctgactaccctg

SEQ ID NO: 1884452 - DNA, 25 bp, Homo sapien
taccctaaacctctgactaccctgc

SEQ ID NO: 1884453 - DNA, 25 bp, Homo sapien
aaacctctgactaccctgctgtcat

SEQ ID NO: 1884454 - DNA, 25 bp, Homo sapien
catgaggaatattttgtctgggtct

SEQ ID NO: 1884455 - DNA, 25 bp, Homo sapien
gagtctccagtaagagctgttactc

SEQ ID NO: 1884456 - DNA, 25 bp, Homo sapien
gttaatgtgagaattgagtctccag

SEQ ID NO: 1884457 - DNA, 25 bp, Homo sapien
atagattttcccagtccccggtgtg

SEQ ID NO: 1884458 - DNA, 25 bp, Homo sapien
gcacctcaccgtttagatttaatgt

SEQ ID NO: 1884459 - DNA, 25 bp, Homo sapien
cagcagcacctcaccgtttagattt

SEQ ID NO: 1884460 - DNA, 25 bp, Homo sapien
ctgaacccgccatattgttgatcct

SEQ ID NO: 1884461 - DNA, 25 bp, Homo sapien
gccatattgttgatcctcttaactg

SEQ ID NO: 1884462 - DNA, 25 bp, Homo sapien
taaagtcttatgtgtggatacccaa

SEQ ID NO: 1884463 - DNA, 25 bp, Homo sapien
caaggaagggtttcactagctttca

SEQ ID NO: 1884464 - DNA, 25 bp, Homo sapien
taaacagctacataaggtgaagcca

SEQ ID NO: 1884465 - DNA, 25 bp, Homo sapien
tgacaggcctcatgatgctaacaga

SEQ ID NO: 1884466 - DNA, 25 bp, Homo sapien
tcaccatgctgagtaggaggaactg

SEQ ID NO: 1884467 - DNA, 25 bp, Homo sapien
gattccgttctgtcttagtggccaa

SEQ ID NO: 1884468 - DNA, 25 bp, Homo sapien
gacatactgcctgcaccaagtgaat

SEQ ID NO: 1884469 - DNA, 25 bp, Homo sapien
gaaaacgtgatgtagtacggaccaa

SEQ ID NO: 1884470 - DNA, 25 bp, Homo sapien
tgcatcttcagtagggctggttgtt

SEQ ID NO: 1884471 - DNA, 25 bp, Homo sapien
ttcaggccattctgtgcatcttcag

SEQ ID NO: 1884472 - DNA, 25 bp, Homo sapien
caggccattctgtgcatctttgtct

SEQ ID NO: 1884473 - DNA, 25 bp, Homo sapien
gaccaacctttgcatttagtgagca

SEQ ID NO: 1884474 - DNA, 25 bp, Homo sapien
ctgtatagtcagtctaggttctctc

SEQ ID NO: 1884475 - DNA, 25 bp, Homo sapien
aaatctgctcccatatcactgaatt

SEQ ID NO: 1884476 - DNA, 25 bp, Homo sapien
gcagaggaactgagtcgtttcactg

SEQ ID NO: 1884477 - DNA, 25 bp, Homo sapien
ctgagtcgtttcactgaaattacca

SEQ ID NO: 1884478 - DNA, 25 bp, Homo sapien
gaacattttctggtagtgctcagag

SEQ ID NO: 1884479 - DNA, 25 bp, Homo sapien
tcatgaataagggtaaggcacagcg

SEQ ID NO: 1884480 - DNA, 25 bp, Homo sapien
cagcgtcatcttgtcgaacataaaa

SEQ ID NO: 1884481 - DNA, 25 bp, Homo sapien
taagaacattttctggtagtgctca

SEQ ID NO: 1884482 - DNA, 25 bp, Homo sapien
ggaaatcatcctttggctagctctg

SEQ ID NO: 1884483 - DNA, 25 bp, Homo sapien
ctgggatagtcagtcccttgctgga

SEQ ID NO: 1884484 - DNA, 25 bp, Homo sapien
tagatgcaaggctcctgggatagtc

SEQ ID NO: 1884485 - DNA, 25 bp, Homo sapien
cagcagtcgattatttgttccagta

SEQ ID NO: 1884486 - DNA, 25 bp, Homo sapien
tatcagattagtattagcttctgga

SEQ ID NO: 1884487 - DNA, 25 bp, Homo sapien
gattagtattagcttctggaggaag

SEQ ID NO: 1884488 - DNA, 25 bp, Homo sapien
tattagcttctggaggaagccaaac

SEQ ID NO: 1884489 - DNA, 25 bp, Homo sapien
tatatttccatgattatcagattag

SEQ ID NO: 1884490 - DNA, 25 bp, Homo sapien
atatcatattctgctgtcagagtaa

SEQ ID NO: 1884491 - DNA, 25 bp, Homo sapien
tatcatattctgctgtcagagtaat

SEQ ID NO: 1884492 - DNA, 25 bp, Homo sapien
tctttggctataaatctgcttgcag

SEQ ID NO: 1884493 - DNA, 25 bp, Homo sapien
caccaaaatagtgtgtctcagggtt

SEQ ID NO: 1884494 - DNA, 25 bp, Homo sapien
gcttgcagatccacagacattgttg

SEQ ID NO: 1884495 - DNA, 25 bp, Homo sapien
ttgaccattgtgagaacaccactgt

SEQ ID NO: 1884496 - DNA, 25 bp, Homo sapien
cattgtgtgaacgactaaccgtttt

SEQ ID NO: 1884497 - DNA, 25 bp, Homo sapien
caatgttagaaaattgacaatcacc

SEQ ID NO: 1884498 - DNA, 25 bp, Homo sapien
tgtgaacgactaaccgttttagcaa

SEQ ID NO: 1884499 - DNA, 25 bp, Homo sapien
gcttcattgtgtgaacgactaaccg

SEQ ID NO: 1884500 - DNA, 25 bp, Homo sapien
taagtgctagaagttggcaatcgat

SEQ ID NO: 1884501 - DNA, 25 bp, Homo sapien
gtgctagaagttggcaatcgatgaa

SEQ ID NO: 1884502 - DNA, 25 bp, Homo sapien
aagtaagtgctagaagttggcaatc

SEQ ID NO: 1884503 - DNA, 25 bp, Homo sapien
tgaagtaagtgctagaagttggcaa

SEQ ID NO: 1884504 - DNA, 25 bp, Homo sapien
ggtgatcaccaccatttctgccaaa

SEQ ID NO: 1884505 - DNA, 25 bp, Homo sapien
catgctgctgcgtagggaatgcaaa

SEQ ID NO: 1884506 - DNA, 25 bp, Homo sapien
ttctgacaagcaaggtggcgacctc

SEQ ID NO: 1884507 - DNA, 25 bp, Homo sapien
gctgcctgccagaagtatgaggatc

SEQ ID NO: 1884508 - DNA, 25 bp, Homo sapien
ggctgcacacactagaaggtaattg

SEQ ID NO: 1884509 - DNA, 25 bp, Homo sapien
gtaattgacgccagccatgactgct

SEQ ID NO: 1884510 - DNA, 25 bp, Homo sapien
tcacacttctgggcctgatgccagc

SEQ ID NO: 1884511 - DNA, 25 bp, Homo sapien
tgaatgcccagaaggagtgtttctc

SEQ ID NO: 1884512 - DNA, 25 bp, Homo sapien
tgtcaaacccctaaagcccagaaga

SEQ ID NO: 1884513 - DNA, 25 bp, Homo sapien
gatgtcaaacccctaaagcccagaa

SEQ ID NO: 1884514 - DNA, 25 bp, Homo sapien
agatgtcaaacccctaaagcccaga

SEQ ID NO: 1884515 - DNA, 25 bp, Homo sapien
caaacccctaaagcccagaagatgc

SEQ ID NO: 1884516 - DNA, 25 bp, Homo sapien
aggcaggaattatacagggtggtcg

SEQ ID NO: 1884517 - DNA, 25 bp, Homo sapien
ggcaggaattatacagggtggtcgc

SEQ ID NO: 1884518 - DNA, 25 bp, Homo sapien
gcaggaattatacagggtggtcgca

SEQ ID NO: 1884519 - DNA, 25 bp, Homo sapien
gggtagaaaccatagcttgctcatc

SEQ ID NO: 1884520 - DNA, 25 bp, Homo sapien
tttcccttgatagcatgtaagcttc

SEQ ID NO: 1884521 - DNA, 25 bp, Homo sapien
ctctctggcgtttccacaaatagca

SEQ ID NO: 1884522 - DNA, 25 bp, Homo sapien
agaagaattactagcttcctctctg

SEQ ID NO: 1884523 - DNA, 25 bp, Homo sapien
tcagcaaggtcagttgccgtttgga

SEQ ID NO: 1884524 - DNA, 25 bp, Homo sapien
agcaaggtcagttgccgtttggaga

SEQ ID NO: 1884525 - DNA, 25 bp, Homo sapien
caaggtcagttgccgtttggagagc

SEQ ID NO: 1884526 - DNA, 25 bp, Homo sapien
aggtcagttgccgtttggagagcca

SEQ ID NO: 1884527 - DNA, 25 bp, Homo sapien
ttgtggagcaattaaggaagacctc

SEQ ID NO: 1884528 - DNA, 25 bp, Homo sapien
cttgtggagcaattaaggaagacct

SEQ ID NO: 1884529 - DNA, 25 bp, Homo sapien
gcgagtgatggagcactattctccc

SEQ ID NO: 1884530 - DNA, 25 bp, Homo sapien
tatacctcacaatttcatcatcctc

SEQ ID NO: 1884531 - DNA, 25 bp, Homo sapien
tttatacctcacaatttcatcatcc

SEQ ID NO: 1884532 - DNA, 25 bp, Homo sapien
cttgactagaagaatgcgagtgatg

SEQ ID NO: 1884533 - DNA, 25 bp, Homo sapien
tcttccattttagtttcaatgtcca

SEQ ID NO: 1884534 - DNA, 25 bp, Homo sapien
ccattttagtttcaatgtccaaatc

SEQ ID NO: 1884535 - DNA, 25 bp, Homo sapien
tccattttagtttcaatgtccaaat

SEQ ID NO: 1884536 - DNA, 25 bp, Homo sapien
cttccattttagtttcaatgtccaa

SEQ ID NO: 1884537 - DNA, 25 bp, Homo sapien
ggtgtcagtacataacatgctagac

SEQ ID NO: 1884538 - DNA, 25 bp, Homo sapien
tataatgcgcctggtcatcttctgc

SEQ ID NO: 1884539 - DNA, 25 bp, Homo sapien
catgctagactcattgctttggctt

SEQ ID NO: 1884540 - DNA, 25 bp, Homo sapien
tgtatatagctagaacagccatgct

SEQ ID NO: 1884541 - DNA, 25 bp, Homo sapien
tcgtaacatcctagtatccatttca

SEQ ID NO: 1884542 - DNA, 25 bp, Homo sapien
aaagcatcgtaacatcctagtatcc

SEQ ID NO: 1884543 - DNA, 25 bp, Homo sapien
cgtaacatcctagtatccatttcac

SEQ ID NO: 1884544 - DNA, 25 bp, Homo sapien
gcatcgtaacatcctagtatccatt

SEQ ID NO: 1884545 - DNA, 25 bp, Homo sapien
cataagcacatgctggaaatattcc

SEQ ID NO: 1884546 - DNA, 25 bp, Homo sapien
gaaataccagtgcagtcatggaagt

SEQ ID NO: 1884547 - DNA, 25 bp, Homo sapien
gaaactgtgaggaaactcttcacta

SEQ ID NO: 1884548 - DNA, 25 bp, Homo sapien
ggtggtatcttattgagaaatacca

SEQ ID NO: 1884549 - DNA, 25 bp, Homo sapien
catctttgagtctccacttggaaca

SEQ ID NO: 1884550 - DNA, 25 bp, Homo sapien
tctcaaagtatggtcagctctcaaa

SEQ ID NO: 1884551 - DNA, 25 bp, Homo sapien
aacatgtagtgtttctggcttcacg

SEQ ID NO: 1884552 - DNA, 25 bp, Homo sapien
ccatggattggtagcttcacaaacc

SEQ ID NO: 1884553 - DNA, 25 bp, Homo sapien
cctgggactcctactgtgttatgac

SEQ ID NO: 1884554 - DNA, 25 bp, Homo sapien
tatgatctctgacgttgtcctgggt

SEQ ID NO: 1884555 - DNA, 25 bp, Homo sapien
catgcagtctggtgaggctcatatg

SEQ ID NO: 1884556 - DNA, 25 bp, Homo sapien
catttgccatgtgaggtaggcctgg

SEQ ID NO: 1884557 - DNA, 25 bp, Homo sapien
ggttagaacttcagctaagccagtc

SEQ ID NO: 1884558 - DNA, 25 bp, Homo sapien
tcagcagctcaaaacggctaccagt

SEQ ID NO: 1884559 - DNA, 25 bp, Homo sapien
cactacccgcgaaaacttgagcagg

SEQ ID NO: 1884560 - DNA, 25 bp, Homo sapien
tccaaatggcggttactctagaaga

SEQ ID NO: 1884561 - DNA, 25 bp, Homo sapien
tctgttggaagaagtccccgagcct

SEQ ID NO: 1884562 - DNA, 25 bp, Homo sapien
gattttgacgtttaaagcgggcaca

SEQ ID NO: 1884563 - DNA, 25 bp, Homo sapien
taaatcgagctattgcagaagacag

SEQ ID NO: 1884564 - DNA, 25 bp, Homo sapien
gcgggcacacgagtcattttaagtc

SEQ ID NO: 1884565 - DNA, 25 bp, Homo sapien
tcgccgccgctgctgaacttctcaa

SEQ ID NO: 1884566 - DNA, 25 bp, Homo sapien
ttcccagacactgggtcctcgccgc

SEQ ID NO: 1884567 - DNA, 25 bp, Homo sapien
cgccgccgctgctgaacttctcaat

SEQ ID NO: 1884568 - DNA, 25 bp, Homo sapien
gccgccgctgctgaacttctcaatc

SEQ ID NO: 1884569 - DNA, 25 bp, Homo sapien
cccacccatggactggaaaggatgt

SEQ ID NO: 1884570 - DNA, 25 bp, Homo sapien
tctgatactgggatggaaagtcaca

SEQ ID NO: 1884571 - DNA, 25 bp, Homo sapien
tactcgcgagcttgtctgatactgg

SEQ ID NO: 1884572 - DNA, 25 bp, Homo sapien
gaaaggatgttcagttactcgcgag

SEQ ID NO: 1884573 - DNA, 25 bp, Homo sapien
aggctgacttcaccttccggacagc

SEQ ID NO: 1884574 - DNA, 25 bp, Homo sapien
ggagggcacagcgacctgcatctcc

SEQ ID NO: 1884575 - DNA, 25 bp, Homo sapien
agcgacgtagcagcgggagggcaca

SEQ ID NO: 1884576 - DNA, 25 bp, Homo sapien
gaaggatggcaggatccggcgcagc

SEQ ID NO: 1884577 - DNA, 25 bp, Homo sapien
gccccgccaccacgcgggaggagag

SEQ ID NO: 1884578 - DNA, 25 bp, Homo sapien
gccccctcgcggtgcccgtggtgat

SEQ ID NO: 1884579 - DNA, 25 bp, Homo sapien
ggccccctcgcggtgcccgtggtga

SEQ ID NO: 1884580 - DNA, 25 bp, Homo sapien
cggccccctcgcggtgcccgtggtg

SEQ ID NO: 1884581 - DNA, 25 bp, Homo sapien
ggaagccgctctcttacacgagtag

SEQ ID NO: 1884582 - DNA, 25 bp, Homo sapien
tcttacacgagtagccagagctgcc

SEQ ID NO: 1884583 - DNA, 25 bp, Homo sapien
gtagccagagctgccggcgcaacgt

SEQ ID NO: 1884584 - DNA, 25 bp, Homo sapien
caacgtcaagtaccggcgggtgcag

SEQ ID NO: 1884585 - DNA, 25 bp, Homo sapien
ggctgggcgttcatctaccacgctt

SEQ ID NO: 1884586 - DNA, 25 bp, Homo sapien
catctaccacgctttcgtgtgagta

SEQ ID NO: 1884587 - DNA, 25 bp, Homo sapien
agaccccgcggctgggcgttcatct

SEQ ID NO: 1884588 - DNA, 25 bp, Homo sapien
gcgttcatctaccacgctttcgtgt

SEQ ID NO: 1884589 - DNA, 25 bp, Homo sapien
gcgtgctccgcgctcgcgcccttgg

SEQ ID NO: 1884590 - DNA, 25 bp, Homo sapien
gctatgcccgctgcaggggaccact

SEQ ID NO: 1884591 - DNA, 25 bp, Homo sapien
gtgctccgcgctcgcgcccttgggc

SEQ ID NO: 1884592 - DNA, 25 bp, Homo sapien
gcgccccctgctatgcccgctgcag

SEQ ID NO: 1884593 - DNA, 25 bp, Homo sapien
tgttcgtggtcttccttctggagcc

SEQ ID NO: 1884594 - DNA, 25 bp, Homo sapien
gtgttcgtggtcttccttctggagc

SEQ ID NO: 1884595 - DNA, 25 bp, Homo sapien
tgcccggtagcttcaggctcccggg

SEQ ID NO: 1884596 - DNA, 25 bp, Homo sapien
cgaggacacccaatgaactgcccgg

SEQ ID NO: 1884597 - DNA, 25 bp, Homo sapien
agagccaggcagacgcgggacttag

SEQ ID NO: 1884598 - DNA, 25 bp, Homo sapien
cacccaatgaactgcccggtagctt

SEQ ID NO: 1884599 - DNA, 25 bp, Homo sapien
taggtcccaagatacgtaaacttca

SEQ ID NO: 1884600 - DNA, 25 bp, Homo sapien
ggataattgggagcaattaggtccc

SEQ ID NO: 1884601 - DNA, 25 bp, Homo sapien
gataattgggagcaattaggtccca

SEQ ID NO: 1884602 - DNA, 25 bp, Homo sapien
gcaattaggtcccaagatacgtaaa

SEQ ID NO: 1884603 - DNA, 25 bp, Homo sapien
tgtgaccacgcagaagttactcaat

SEQ ID NO: 1884604 - DNA, 25 bp, Homo sapien
cttctggttggcaaaagagatgaaa

SEQ ID NO: 1884605 - DNA, 25 bp, Homo sapien
tctggttggcaaaagagatgaaaga

SEQ ID NO: 1884606 - DNA, 25 bp, Homo sapien
ccaagcaagtgtgactgtgaccacg

SEQ ID NO: 1884607 - DNA, 25 bp, Homo sapien
acaagtagacatgtggcctgtttgg

SEQ ID NO: 1884608 - DNA, 25 bp, Homo sapien
caagtagacatgtggcctgtttggg

SEQ ID NO: 1884609 - DNA, 25 bp, Homo sapien
tttatcataaccctctttgccctac

SEQ ID NO: 1884610 - DNA, 25 bp, Homo sapien
ttttatcataaccctctttgcccta

SEQ ID NO: 1884611 - DNA, 25 bp, Homo sapien
cttttatcataaccctctttgccct

SEQ ID NO: 1884612 - DNA, 25 bp, Homo sapien
tgtgtgcatcccgtagtccttctta

SEQ ID NO: 1884613 - DNA, 25 bp, Homo sapien
cactatcatcgtcattctctcagca

SEQ ID NO: 1884614 - DNA, 25 bp, Homo sapien
ttttttactgtgtgcatcccgtagt

SEQ ID NO: 1884615 - DNA, 25 bp, Homo sapien
tcattctctcagcaagccagtgcat

SEQ ID NO: 1884616 - DNA, 25 bp, Homo sapien
catctatggacagcagtagagggct

SEQ ID NO: 1884617 - DNA, 25 bp, Homo sapien
cagggtaccacttcatgtgaccaaa

SEQ ID NO: 1884618 - DNA, 25 bp, Homo sapien
cacgaagcctggagatggctgtgtt

SEQ ID NO: 1884619 - DNA, 25 bp, Homo sapien
tgaccaaacaaatgcacgaagcctg

SEQ ID NO: 1884620 - DNA, 25 bp, Homo sapien
gcacatcctatttcgtacttcatga

SEQ ID NO: 1884621 - DNA, 25 bp, Homo sapien
gaaaaagactgggtattctctactc

SEQ ID NO: 1884622 - DNA, 25 bp, Homo sapien
ctgacttgatctactgcacatccta

SEQ ID NO: 1884623 - DNA, 25 bp, Homo sapien
tactcttatcttgaacacaaagaca

SEQ ID NO: 1884624 - DNA, 25 bp, Homo sapien
agaagaagcagattggtgtctctgt

SEQ ID NO: 1884625 - DNA, 25 bp, Homo sapien
gagaagatgtttccgttgtatggta

SEQ ID NO: 1884626 - DNA, 25 bp, Homo sapien
tgtatggtaagtctgagaagaagca

SEQ ID NO: 1884627 - DNA, 25 bp, Homo sapien
aagaagcagattggtgtctctgttc

SEQ ID NO: 1884628 - DNA, 25 bp, Homo sapien
cagttactggggtaagaaactctgg

SEQ ID NO: 1884629 - DNA, 25 bp, Homo sapien
acatcagctacatcagttactgggg

SEQ ID NO: 1884630 - DNA, 25 bp, Homo sapien
tgggcttttcagatactgtcctcca

SEQ ID NO: 1884631 - DNA, 25 bp, Homo sapien
tttgggtttaagatcacctggtgag

SEQ ID NO: 1884632 - DNA, 25 bp, Homo sapien
tttagggaatggtgcagatgggata

SEQ ID NO: 1884633 - DNA, 25 bp, Homo sapien
tagggaatggtgcagatgggatagt

SEQ ID NO: 1884634 - DNA, 25 bp, Homo sapien
ttagggaatggtgcagatgggatag

SEQ ID NO: 1884635 - DNA, 25 bp, Homo sapien
gggaatggtgcagatgggatagttt

SEQ ID NO: 1884636 - DNA, 25 bp, Homo sapien
agcttctttaaggatggctctgccc

SEQ ID NO: 1884637 - DNA, 25 bp, Homo sapien
cttctttaaggatggctctgccctc

SEQ ID NO: 1884638 - DNA, 25 bp, Homo sapien
cacttagaaatgtctcactaccttc

SEQ ID NO: 1884639 - DNA, 25 bp, Homo sapien
agaaatgtctcactaccttctctgg

SEQ ID NO: 1884640 - DNA, 25 bp, Homo sapien
ttaatctaactatactgagcagagt

SEQ ID NO: 1884641 - DNA, 25 bp, Homo sapien
gctttcttaatctaactatactgag

SEQ ID NO: 1884642 - DNA, 25 bp, Homo sapien
tactgagcagagtttacactttatt

SEQ ID NO: 1884643 - DNA, 25 bp, Homo sapien
gcagagtttacactttatactgagc

SEQ ID NO: 1884644 - DNA, 25 bp, Homo sapien
agtctagactaagatccaagtttac

SEQ ID NO: 1884645 - DNA, 25 bp, Homo sapien
tgtctaagtctagactaagatccaa

SEQ ID NO: 1884646 - DNA, 25 bp, Homo sapien
tagactaagatccaagtttacttcc

SEQ ID NO: 1884647 - DNA, 25 bp, Homo sapien
tttcccattgtctaagtctagacta

SEQ ID NO: 1884648 - DNA, 25 bp, Homo sapien
gaaactggtccaaattacagtatac

SEQ ID NO: 1884649 - DNA, 25 bp, Homo sapien
agaaactggtccaaattacagtata

SEQ ID NO: 1884650 - DNA, 25 bp, Homo sapien
tctaagtatatacggagtatggtca

SEQ ID NO: 1884651 - DNA, 25 bp, Homo sapien
ggcagaatggagttcccgcttgtaa

SEQ ID NO: 1884652 - DNA, 25 bp, Homo sapien
aaatacaaaaggtttcagacagcat

SEQ ID NO: 1884653 - DNA, 25 bp, Homo sapien
ccacctaacttgtttgaatgttcta

SEQ ID NO: 1884654 - DNA, 25 bp, Homo sapien
cttctgaatctctgttctttggttc

SEQ ID NO: 1884655 - DNA, 25 bp, Homo sapien
ctctgttctttggttcccactcttc

SEQ ID NO: 1884656 - DNA, 25 bp, Homo sapien
ttggttcccactcttctctttgcct

SEQ ID NO: 1884657 - DNA, 25 bp, Homo sapien
tgcttctgaatctctgttctttggt

SEQ ID NO: 1884658 - DNA, 25 bp, Homo sapien
aagcatcaccatcccatcaacctgt

SEQ ID NO: 1884659 - DNA, 25 bp, Homo sapien
caggcgtcccaaacgtgactctttc

SEQ ID NO: 1884660 - DNA, 25 bp, Homo sapien
ccagccgtcataagttcgcctctga

SEQ ID NO: 1884661 - DNA, 25 bp, Homo sapien
cagccccatttcggatgtttccaca

SEQ ID NO: 1884662 - DNA, 25 bp, Homo sapien
ccctctgacctgtggaatagtccgt

SEQ ID NO: 1884663 - DNA, 25 bp, Homo sapien
gacctgtggaatagtccgttctttc

SEQ ID NO: 1884664 - DNA, 25 bp, Homo sapien
gtttcccctctgacctgtggaatag

SEQ ID NO: 1884665 - DNA, 25 bp, Homo sapien
gggagtttcccctctgacctgtgga

SEQ ID NO: 1884666 - DNA, 25 bp, Homo sapien
gcagctctactgactattcgatagt

SEQ ID NO: 1884667 - DNA, 25 bp, Homo sapien
ggaactgttaattcccacagcagct

SEQ ID NO: 1884668 - DNA, 25 bp, Homo sapien
tcccaggacctgaagtctttcagag

SEQ ID NO: 1884669 - DNA, 25 bp, Homo sapien
agacggtctgttcagtcagctgagg

SEQ ID NO: 1884670 - DNA, 25 bp, Homo sapien
tgtaccttgcctgttttttggagta

SEQ ID NO: 1884671 - DNA, 25 bp, Homo sapien
caggtctgctgacactgagtctcag

SEQ ID NO: 1884672 - DNA, 25 bp, Homo sapien
actgcggactctaatctgtaccttg

SEQ ID NO: 1884673 - DNA, 25 bp, Homo sapien
agctttctctttgacgaactgcgga

SEQ ID NO: 1884674 - DNA, 25 bp, Homo sapien
tctcctgttgtagtggctaagaggc

SEQ ID NO: 1884675 - DNA, 25 bp, Homo sapien
tgatacgtagaagtcccccagattc

SEQ ID NO: 1884676 - DNA, 25 bp, Homo sapien
ctttgatacgtagaagtcccccaga

SEQ ID NO: 1884677 - DNA, 25 bp, Homo sapien
ctagatagtatctggaagcatccag

SEQ ID NO: 1884678 - DNA, 25 bp, Homo sapien
ggcaacccagttttgctcaatgcat

SEQ ID NO: 1884679 - DNA, 25 bp, Homo sapien
ggcatctgagcactgactaggtctg

SEQ ID NO: 1884680 - DNA, 25 bp, Homo sapien
tgtgagaaggcaacccagttttgct

SEQ ID NO: 1884681 - DNA, 25 bp, Homo sapien
tattcaccaggtggacaaggagtct

SEQ ID NO: 1884682 - DNA, 25 bp, Homo sapien
tctcctggctctattacctctggtg

SEQ ID NO: 1884683 - DNA, 25 bp, Homo sapien
cacattccaacatgaggagctgcca

SEQ ID NO: 1884684 - DNA, 25 bp, Homo sapien
gtggcaatctcatccctcctcgaat

SEQ ID NO: 1884685 - DNA, 25 bp, Homo sapien
ggctctattacctctggtggcaatc

SEQ ID NO: 1884686 - DNA, 25 bp, Homo sapien
agggtcgggtacacattcagccaag

SEQ ID NO: 1884687 - DNA, 25 bp, Homo sapien
gccaagggtcgggtacacattcagc

SEQ ID NO: 1884688 - DNA, 25 bp, Homo sapien
aagggtcgggtacacattcagccaa

SEQ ID NO: 1884689 - DNA, 25 bp, Homo sapien
ctggccaagggtcgggtacacattc

SEQ ID NO: 1884690 - DNA, 25 bp, Homo sapien
taatcagctcctctattgattggca

SEQ ID NO: 1884691 - DNA, 25 bp, Homo sapien
gcattcaccagttaatcctgcctta

SEQ ID NO: 1884692 - DNA, 25 bp, Homo sapien
tctgtgaccttgatgttcctacatt

SEQ ID NO: 1884693 - DNA, 25 bp, Homo sapien
tcctacatttccaaacttaatcagc

SEQ ID NO: 1884694 - DNA, 25 bp, Homo sapien
gcccagtgcgagagaacagaagaat

SEQ ID NO: 1884695 - DNA, 25 bp, Homo sapien
tagaattagaactagacgccacttg

SEQ ID NO: 1884696 - DNA, 25 bp, Homo sapien
cagaagaatagtattgagatgaggg

SEQ ID NO: 1884697 - DNA, 25 bp, Homo sapien
tcctgcagcgtccaaatagaattag

SEQ ID NO: 1884698 - DNA, 25 bp, Homo sapien
gctgccactaactggcattgagctt

SEQ ID NO: 1884699 - DNA, 25 bp, Homo sapien
gagccttcgtgcaaaataagctgcc

SEQ ID NO: 1884700 - DNA, 25 bp, Homo sapien
gagttgccagggtcagagccttcgt

SEQ ID NO: 1884701 - DNA, 25 bp, Homo sapien
cataactccctgtgctgggtttgca

SEQ ID NO: 1884702 - DNA, 25 bp, Homo sapien
tccttatgtgttatctgctgagctt

SEQ ID NO: 1884703 - DNA, 25 bp, Homo sapien
attccttatgtgttatctgctgagc

SEQ ID NO: 1884704 - DNA, 25 bp, Homo sapien
tattccttatgtgttatctgctgag

SEQ ID NO: 1884705 - DNA, 25 bp, Homo sapien
ctattccttatgtgttatctgctga

SEQ ID NO: 1884706 - DNA, 25 bp, Homo sapien
aggaaggatatttgggatctagaag

SEQ ID NO: 1884707 - DNA, 25 bp, Homo sapien
gatatttgggatctagaaggccaac

SEQ ID NO: 1884708 - DNA, 25 bp, Homo sapien
atataggaaggatatttgggatcta

SEQ ID NO: 1884709 - DNA, 25 bp, Homo sapien
tcagattaaatataggaaggatatt

SEQ ID NO: 1884710 - DNA, 25 bp, Homo sapien
tcacagttgcctccatgggggtcaa

SEQ ID NO: 1884711 - DNA, 25 bp, Homo sapien
aatcacagttgcctccatgggggtc

SEQ ID NO: 1884712 - DNA, 25 bp, Homo sapien
tgttcaatcacagttgcctccatgg

SEQ ID NO: 1884713 - DNA, 25 bp, Homo sapien
ccagttgttcaatcacagttgcctc

SEQ ID NO: 1884714 - DNA, 25 bp, Homo sapien
atcacacttctctggtggaaaagcc

SEQ ID NO: 1884715 - DNA, 25 bp, Homo sapien
cttaagcgttgtgcctgcaagcaat

SEQ ID NO: 1884716 - DNA, 25 bp, Homo sapien
taagcgttgtgcctgcaagcaatca

SEQ ID NO: 1884717 - DNA, 25 bp, Homo sapien
tgcaagcaatcacacttctctggtg

SEQ ID NO: 1884718 - DNA, 25 bp, Homo sapien
atcaactaggtagtgctcatttctg

SEQ ID NO: 1884719 - DNA, 25 bp, Homo sapien
tccaagagccccaatatgtgtcctg

SEQ ID NO: 1884720 - DNA, 25 bp, Homo sapien
tgttctgcagcaggaccgcttatgg

SEQ ID NO: 1884721 - DNA, 25 bp, Homo sapien
gaggctctcatatataccctgctcc

SEQ ID NO: 1884722 - DNA, 25 bp, Homo sapien
ccatgtacttgagcagcccaggtct

SEQ ID NO: 1884723 - DNA, 25 bp, Homo sapien
gtctgcctttgaaccttctttcctg

SEQ ID NO: 1884724 - DNA, 25 bp, Homo sapien
gcccaggtctgcctttgaaccttct

SEQ ID NO: 1884725 - DNA, 25 bp, Homo sapien
tgtacttgagcagcccaggtctgcc

SEQ ID NO: 1884726 - DNA, 25 bp, Homo sapien
cattgatctacatgggctgtgttgt

SEQ ID NO: 1884727 - DNA, 25 bp, Homo sapien
ggacagcattgatctacatgggctg

SEQ ID NO: 1884728 - DNA, 25 bp, Homo sapien
atctacatgggctgtgttgtgcttg

SEQ ID NO: 1884729 - DNA, 25 bp, Homo sapien
cagcattgatctacatgggctgtgt

SEQ ID NO: 1884730 - DNA, 25 bp, Homo sapien
catgaaggttgtgacatttcgtggc

SEQ ID NO: 1884731 - DNA, 25 bp, Homo sapien
catttcgtggccactggtacagcta

SEQ ID NO: 1884732 - DNA, 25 bp, Homo sapien
ggtacagctaaatataaacggatta

SEQ ID NO: 1884733 - DNA, 25 bp, Homo sapien
aacggattattctgtgcctgctccc

SEQ ID NO: 1884734 - DNA, 25 bp, Homo sapien
aagtctttacagttccatttccatt

SEQ ID NO: 1884735 - DNA, 25 bp, Homo sapien
caacaatagcccaagtctttacagt

SEQ ID NO: 1884736 - DNA, 25 bp, Homo sapien
caaagtaattcatcagtagtaccct

SEQ ID NO: 1884737 - DNA, 25 bp, Homo sapien
tagtaccctttccaacaatagccca

SEQ ID NO: 1884738 - DNA, 25 bp, Homo sapien
gggagggtcctgtcatgggcccata

SEQ ID NO: 1884739 - DNA, 25 bp, Homo sapien
gagggtcctgtcatgggcccataga

SEQ ID NO: 1884740 - DNA, 25 bp, Homo sapien
gggtcctgtcatgggcccatagaac

SEQ ID NO: 1884741 - DNA, 25 bp, Homo sapien
ctggatccagtcagctgtagctggg

SEQ ID NO: 1884742 - DNA, 25 bp, Homo sapien
tatagagtgcttttaagtcctcaga

SEQ ID NO: 1884743 - DNA, 25 bp, Homo sapien
tcagtgtgtagcagccatttaagtc

SEQ ID NO: 1884744 - DNA, 25 bp, Homo sapien
ggaggaatccaagtcattttatcag

SEQ ID NO: 1884745 - DNA, 25 bp, Homo sapien
gaatctttattgtggagcagcgctt

SEQ ID NO: 1884746 - DNA, 25 bp, Homo sapien
aattccttctatcccggacatgtgg

SEQ ID NO: 1884747 - DNA, 25 bp, Homo sapien
tatagtgcaggatttgtgatgaggc

SEQ ID NO: 1884748 - DNA, 25 bp, Homo sapien
cagttgtcaaaccggaattccttct

SEQ ID NO: 1884749 - DNA, 25 bp, Homo sapien
ccggaattccttctatcccggacat

SEQ ID NO: 1884750 - DNA, 25 bp, Homo sapien
gtgcttttagcatgtgtctgagtca

SEQ ID NO: 1884751 - DNA, 25 bp, Homo sapien
agtgcttttagcatgtgtctgagtc

SEQ ID NO: 1884752 - DNA, 25 bp, Homo sapien
tgcttttagcatgtgtctgagtcat

SEQ ID NO: 1884753 - DNA, 25 bp, Homo sapien
caatggctttaactggcttagaaga

SEQ ID NO: 1884754 - DNA, 25 bp, Homo sapien
tactgagtaaggcaactggcacaat

SEQ ID NO: 1884755 - DNA, 25 bp, Homo sapien
ttctgcttccagatatcagatgtga

SEQ ID NO: 1884756 - DNA, 25 bp, Homo sapien
gcttagaagagcctaactgtacttt

SEQ ID NO: 1884757 - DNA, 25 bp, Homo sapien
aggtataaaatgaagcagtaccacc

SEQ ID NO: 1884758 - DNA, 25 bp, Homo sapien
taaaatgaagcagtaccaccaaggc

SEQ ID NO: 1884759 - DNA, 25 bp, Homo sapien
aatgaagcagtaccaccaaggccat

SEQ ID NO: 1884760 - DNA, 25 bp, Homo sapien
catctctgattattgaaggtataaa

SEQ ID NO: 1884761 - DNA, 25 bp, Homo sapien
tatcactattaaccatggctaaaaa

SEQ ID NO: 1884762 - DNA, 25 bp, Homo sapien
tatggcaacttgagtggcattgagc

SEQ ID NO: 1884763 - DNA, 25 bp, Homo sapien
cattgagctctgatagaaggtcata

SEQ ID NO: 1884764 - DNA, 25 bp, Homo sapien
caggaacttagttcttgtatggcaa

SEQ ID NO: 1884765 - DNA, 25 bp, Homo sapien
tgccggcattcagcccaacagctgt

SEQ ID NO: 1884766 - DNA, 25 bp, Homo sapien
catcttcaaggccactagatcatca

SEQ ID NO: 1884767 - DNA, 25 bp, Homo sapien
catcatgagagtttacggtagtaag

SEQ ID NO: 1884768 - DNA, 25 bp, Homo sapien
tggcaccatgtcaacgtaactactc

SEQ ID NO: 1884769 - DNA, 25 bp, Homo sapien
cgtaactactccctagagcagtggt

SEQ ID NO: 1884770 - DNA, 25 bp, Homo sapien
cttacattcgggtctcaagccaggg

SEQ ID NO: 1884771 - DNA, 25 bp, Homo sapien
cattggctggatccttacattcggg

SEQ ID NO: 1884772 - DNA, 25 bp, Homo sapien
gtggccatggaattgccattggctg

SEQ ID NO: 1884773 - DNA, 25 bp, Homo sapien
gggctcgggcagtaatgtattatac

SEQ ID NO: 1884774 - DNA, 25 bp, Homo sapien
cacatgaatgctcattttcttgtcc

SEQ ID NO: 1884775 - DNA, 25 bp, Homo sapien
gagagatgtctaatatttccacatg

SEQ ID NO: 1884776 - DNA, 25 bp, Homo sapien
ttgtcctcttcctgtatcatgaaca

SEQ ID NO: 1884777 - DNA, 25 bp, Homo sapien
tgtatcatgaacatattccctggcc

SEQ ID NO: 1884778 - DNA, 25 bp, Homo sapien
aataaggcatcagcgttcttacaca

SEQ ID NO: 1884779 - DNA, 25 bp, Homo sapien
ggaataaggcatcagcgttcttaca

SEQ ID NO: 1884780 - DNA, 25 bp, Homo sapien
ggaggaataaggcatcagcgttctt

SEQ ID NO: 1884781 - DNA, 25 bp, Homo sapien
gaggaataaggcatcagcgttctta

SEQ ID NO: 1884782 - DNA, 25 bp, Homo sapien
ccctgattctagatggctttttccc

SEQ ID NO: 1884783 - DNA, 25 bp, Homo sapien
caaaatgacttgatcgttcatggcc

SEQ ID NO: 1884784 - DNA, 25 bp, Homo sapien
caatggacgaggtggccttgcatca

SEQ ID NO: 1884785 - DNA, 25 bp, Homo sapien
caaggtgtttgcctctggtccagtc

SEQ ID NO: 1884786 - DNA, 25 bp, Homo sapien
gcgcccagccaggacacatttcttt

SEQ ID NO: 1884787 - DNA, 25 bp, Homo sapien
gcccagccaggacacatttctttat

SEQ ID NO: 1884788 - DNA, 25 bp, Homo sapien
ccagccaggacacatttctttatcc

SEQ ID NO: 1884789 - DNA, 25 bp, Homo sapien
cgcgcccagccaggacacatttctt

SEQ ID NO: 1884790 - DNA, 25 bp, Homo sapien
gctgttgaaaattgtctgctaaagc

SEQ ID NO: 1884791 - DNA, 25 bp, Homo sapien
ttgaaaattgtctgctaaagcttca

SEQ ID NO: 1884792 - DNA, 25 bp, Homo sapien
tggaaaacagctgttgaaaattgtc

SEQ ID NO: 1884793 - DNA, 25 bp, Homo sapien
tgtctgctaaagcttcatttcttcc

SEQ ID NO: 1884794 - DNA, 25 bp, Homo sapien
gagacccatgagattagcctttcct

SEQ ID NO: 1884795 - DNA, 25 bp, Homo sapien
tgcctttgcttctgtcgggatgcca

SEQ ID NO: 1884796 - DNA, 25 bp, Homo sapien
tcctggccggaatgttttatctctc

SEQ ID NO: 1884797 - DNA, 25 bp, Homo sapien
ctatagataagagccaaaaggagac

SEQ ID NO: 1884798 - DNA, 25 bp, Homo sapien
ccattttacttcaggcaaagaacta

SEQ ID NO: 1884799 - DNA, 25 bp, Homo sapien
tcagctgccaactgaagtccatttt

SEQ ID NO: 1884800 - DNA, 25 bp, Homo sapien
tttacttcaggcaaagaactatgtc

SEQ ID NO: 1884801 - DNA, 25 bp, Homo sapien
cagctgccaactgaagtccatttta

SEQ ID NO: 1884802 - DNA, 25 bp, Homo sapien
catgccttgtctggaaatgttgcca

SEQ ID NO: 1884803 - DNA, 25 bp, Homo sapien
tccactcggagtaagtctgcaattc

SEQ ID NO: 1884804 - DNA, 25 bp, Homo sapien
tacagaacgctcagtgcttttggcg

SEQ ID NO: 1884805 - DNA, 25 bp, Homo sapien
cccgggtcatcacaaagcaagcagg

SEQ ID NO: 1884806 - DNA, 25 bp, Homo sapien
ctgagctggtatttggcccctggct

SEQ ID NO: 1884807 - DNA, 25 bp, Homo sapien
aactgagctggtatttggcccctgg

SEQ ID NO: 1884808 - DNA, 25 bp, Homo sapien
ctacacatctcccaactgagctggt

SEQ ID NO: 1884809 - DNA, 25 bp, Homo sapien
acacatctcccaactgagctggtat

SEQ ID NO: 1884810 - DNA, 25 bp, Homo sapien
gaatcacaggaaccattggttgcag

SEQ ID NO: 1884811 - DNA, 25 bp, Homo sapien
tatggtttccatgcatgaatcacag

SEQ ID NO: 1884812 - DNA, 25 bp, Homo sapien
gctgtaccttgtattcacctggtga

SEQ ID NO: 1884813 - DNA, 25 bp, Homo sapien
cagtgatgaccaagatgtttacacc

SEQ ID NO: 1884814 - DNA, 25 bp, Homo sapien
ccctttcttggatagtaactgcttc

SEQ ID NO: 1884815 - DNA, 25 bp, Homo sapien
ctttctcgggaatcttccctaccat

SEQ ID NO: 1884816 - DNA, 25 bp, Homo sapien
gaggtgccctttcttggatagtaac

SEQ ID NO: 1884817 - DNA, 25 bp, Homo sapien
ttctcgggaatcttccctaccattc

SEQ ID NO: 1884818 - DNA, 25 bp, Homo sapien
acacacactggcctgcgcccactgt

SEQ ID NO: 1884819 - DNA, 25 bp, Homo sapien
ctttggctcgcgcacggtgcgcaca

SEQ ID NO: 1884820 - DNA, 25 bp, Homo sapien
ttggctcgcgcacggtgcgcacaca

SEQ ID NO: 1884821 - DNA, 25 bp, Homo sapien
cgcacggtgcgcacacacactggcc

SEQ ID NO: 1884822 - DNA, 25 bp, Homo sapien
tagcactgtacactctaatcacatc

SEQ ID NO: 1884823 - DNA, 25 bp, Homo sapien
cacatctgattgaaagtttggttca

SEQ ID NO: 1884824 - DNA, 25 bp, Homo sapien
ctaaactatagcactgtacactcta

SEQ ID NO: 1884825 - DNA, 25 bp, Homo sapien
taatcacatctgattgaaagtttgg

SEQ ID NO: 1884826 - DNA, 25 bp, Homo sapien
gtccaaaattatcagatttgacagt

SEQ ID NO: 1884827 - DNA, 25 bp, Homo sapien
acaaactggaacagctcactgtttc

SEQ ID NO: 1884828 - DNA, 25 bp, Homo sapien
tttgtccaaaattatcagatttgac

SEQ ID NO: 1884829 - DNA, 25 bp, Homo sapien
agctatttgaatgaactacaaactg

SEQ ID NO: 1884830 - DNA, 25 bp, Homo sapien
ggccatccctttagacatctcttgc

SEQ ID NO: 1884831 - DNA, 25 bp, Homo sapien
accagcgtgttaggtgcaggccatc

SEQ ID NO: 1884832 - DNA, 25 bp, Homo sapien
ttcccttgagggcaccagcgtgtta

SEQ ID NO: 1884833 - DNA, 25 bp, Homo sapien
aaggactttcgctgtccatcccaca

SEQ ID NO: 1884834 - DNA, 25 bp, Homo sapien
aaagacattcttggaaacttgtccg

SEQ ID NO: 1884835 - DNA, 25 bp, Homo sapien
cctcaaagacattcttggaaacttg

SEQ ID NO: 1884836 - DNA, 25 bp, Homo sapien
gacattcttggaaacttgtccgttc

SEQ ID NO: 1884837 - DNA, 25 bp, Homo sapien
cattcttggaaacttgtccgttcat

SEQ ID NO: 1884838 - DNA, 25 bp, Homo sapien
tgagtcccattaacttctgtggaag

SEQ ID NO: 1884839 - DNA, 25 bp, Homo sapien
agaagcattaaactgtcactatggg

SEQ ID NO: 1884840 - DNA, 25 bp, Homo sapien
tttcaaagtggtgcctgcaatttgc

SEQ ID NO: 1884841 - DNA, 25 bp, Homo sapien
tgcaatttgccagtatgagtcccat

SEQ ID NO: 1884842 - DNA, 25 bp, Homo sapien
attggaccccttgtttataccatat

SEQ ID NO: 1884843 - DNA, 25 bp, Homo sapien
tgtgtgacttcaatctatattacaa

SEQ ID NO: 1884844 - DNA, 25 bp, Homo sapien
ccgtagcaggtttgttgatattaac

SEQ ID NO: 1884845 - DNA, 25 bp, Homo sapien
ttattggtccgtagcaggtttgttg

SEQ ID NO: 1884846 - DNA, 25 bp, Homo sapien
tggtccgtagcaggtttgttgatat

SEQ ID NO: 1884847 - DNA, 25 bp, Homo sapien
gcaggtttgttgatattaactgact

SEQ ID NO: 1884848 - DNA, 25 bp, Homo sapien
cctatccgtgagcattggatatgtt

SEQ ID NO: 1884849 - DNA, 25 bp, Homo sapien
tatccgtgagcattggatatgtttc

SEQ ID NO: 1884850 - DNA, 25 bp, Homo sapien
tacctatccgtgagcattggatatg

SEQ ID NO: 1884851 - DNA, 25 bp, Homo sapien
tctacctatccgtgagcattggata

SEQ ID NO: 1884852 - DNA, 25 bp, Homo sapien
ttacgcagctgatgagaaatctgtt

SEQ ID NO: 1884853 - DNA, 25 bp, Homo sapien
tacgcagctgatgagaaatctgttt

SEQ ID NO: 1884854 - DNA, 25 bp, Homo sapien
acgcagctgatgagaaatctgtttc

SEQ ID NO: 1884855 - DNA, 25 bp, Homo sapien
tgcaagcaaataaggtgcctgccca

SEQ ID NO: 1884856 - DNA, 25 bp, Homo sapien
gagtacagaccctacaccatggtgc

SEQ ID NO: 1884857 - DNA, 25 bp, Homo sapien
caccttgtggtaccttaagaagtgg

SEQ ID NO: 1884858 - DNA, 25 bp, Homo sapien
ggcacacagctcgtttgcaaagagt

SEQ ID NO: 1884859 - DNA, 25 bp, Homo sapien
tccccaatctccaatttggccatta

SEQ ID NO: 1884860 - DNA, 25 bp, Homo sapien
cttaaggtatttgattccccaatct

SEQ ID NO: 1884861 - DNA, 25 bp, Homo sapien
caatttggccattatcaagtgctat

SEQ ID NO: 1884862 - DNA, 25 bp, Homo sapien
taaggtatttgattccccaatctcc

SEQ ID NO: 1884863 - DNA, 25 bp, Homo sapien
cctagtaagttctgtagtaataagc

SEQ ID NO: 1884864 - DNA, 25 bp, Homo sapien
cagcatccgggctattgacatgaga

SEQ ID NO: 1884865 - DNA, 25 bp, Homo sapien
gagaatgccaactaacctcaggtgc

SEQ ID NO: 1884866 - DNA, 25 bp, Homo sapien
agaatgtacacctcacggaagcaga

SEQ ID NO: 1884867 - DNA, 25 bp, Homo sapien
gccttatccatgagaacgctgcttt

SEQ ID NO: 1884868 - DNA, 25 bp, Homo sapien
tgcggtaagtggacaaaacaaggcc

SEQ ID NO: 1884869 - DNA, 25 bp, Homo sapien
ctttcataccccacaaaggctgcgg

SEQ ID NO: 1884870 - DNA, 25 bp, Homo sapien
aaggctgcggctttactctctcaga

SEQ ID NO: 1884871 - DNA, 25 bp, Homo sapien
tcctcctaggattttggctgaaagc

SEQ ID NO: 1884872 - DNA, 25 bp, Homo sapien
tcaagagttaccagtgacagggctt

SEQ ID NO: 1884873 - DNA, 25 bp, Homo sapien
gaaagcccttgagcagctgagtcaa

SEQ ID NO: 1884874 - DNA, 25 bp, Homo sapien
catcgagccacttgcaggatctgag

SEQ ID NO: 1884875 - DNA, 25 bp, Homo sapien
gagtggtgagatcacagttatattt

SEQ ID NO: 1884876 - DNA, 25 bp, Homo sapien
cattttttaatctgtatttcctaat

SEQ ID NO: 1884877 - DNA, 25 bp, Homo sapien
ggtgagatcacagttatattttgtt

SEQ ID NO: 1884878 - DNA, 25 bp, Homo sapien
ctttgagtggtgagatcacagttat

SEQ ID NO: 1884879 - DNA, 25 bp, Homo sapien
caaacagtcgcattcggaggtacta

SEQ ID NO: 1884880 - DNA, 25 bp, Homo sapien
cagcttgtcttaatggtgggaacca

SEQ ID NO: 1884881 - DNA, 25 bp, Homo sapien
tcacagtctagaggctagaaggcca

SEQ ID NO: 1884882 - DNA, 25 bp, Homo sapien
ttcagcccatagacaaagctcatgc

SEQ ID NO: 1884883 - DNA, 25 bp, Homo sapien
atatcttcatccccggccctggttt

SEQ ID NO: 1884884 - DNA, 25 bp, Homo sapien
cctggaaagctgagatgtgtccata

SEQ ID NO: 1884885 - DNA, 25 bp, Homo sapien
cacatcacagcatccctggaaagct

SEQ ID NO: 1884886 - DNA, 25 bp, Homo sapien
gatgtgtccatatcttcatccccgg

SEQ ID NO: 1884887 - DNA, 25 bp, Homo sapien
aagagatagtagctcctgcctcctc

SEQ ID NO: 1884888 - DNA, 25 bp, Homo sapien
gattgaattcaatgttgcgtcttgg

SEQ ID NO: 1884889 - DNA, 25 bp, Homo sapien
taatccaatagtccagaatctttac

SEQ ID NO: 1884890 - DNA, 25 bp, Homo sapien
caatgttgcgtcttgggaaactgga

SEQ ID NO: 1884891 - DNA, 25 bp, Homo sapien
actcaggataacagccatactggtc

SEQ ID NO: 1884892 - DNA, 25 bp, Homo sapien
ggaggccaatggtagggtcatctga

SEQ ID NO: 1884893 - DNA, 25 bp, Homo sapien
tatctgggaagagactcaggataac

SEQ ID NO: 1884894 - DNA, 25 bp, Homo sapien
caagtatctgggaagagactcagga

SEQ ID NO: 1884895 - DNA, 25 bp, Homo sapien
ccgagaaaagtgctacccgctgctt

SEQ ID NO: 1884896 - DNA, 25 bp, Homo sapien
tagtttcacgtctctttgataccga

SEQ ID NO: 1884897 - DNA, 25 bp, Homo sapien
tttgataccgagaaaagtgctaccc

SEQ ID NO: 1884898 - DNA, 25 bp, Homo sapien
aagtgctacccgctgcttcttgcct

SEQ ID NO: 1884899 - DNA, 25 bp, Homo sapien
ctaacagaactgacgatacttccat

SEQ ID NO: 1884900 - DNA, 25 bp, Homo sapien
actgacgatacttccatccttgctg

SEQ ID NO: 1884901 - DNA, 25 bp, Homo sapien
cagaactgacgatacttccatcctt

SEQ ID NO: 1884902 - DNA, 25 bp, Homo sapien
ggtgtcagaggaagggaaccagcgc

SEQ ID NO: 1884903 - DNA, 25 bp, Homo sapien
gttttcgggatctaagcgaatatcg

SEQ ID NO: 1884904 - DNA, 25 bp, Homo sapien
aaactctagcctcatgatctgtggg

SEQ ID NO: 1884905 - DNA, 25 bp, Homo sapien
tagcctcatgatctgtgggttttcg

SEQ ID NO: 1884906 - DNA, 25 bp, Homo sapien
catgatctgtgggttttcgggatct

SEQ ID NO: 1884907 - DNA, 25 bp, Homo sapien
cggccggaagatcaagtagggttct

SEQ ID NO: 1884908 - DNA, 25 bp, Homo sapien
cttgaacggccggaagatcaagtag

SEQ ID NO: 1884909 - DNA, 25 bp, Homo sapien
cggaagatcaagtagggttctctgg

SEQ ID NO: 1884910 - DNA, 25 bp, Homo sapien
gccggaagatcaagtagggttctct

SEQ ID NO: 1884911 - DNA, 25 bp, Homo sapien
ttagcgctgtggcaagcaattttgc

SEQ ID NO: 1884912 - DNA, 25 bp, Homo sapien
caagcaattttgcacatcattttca

SEQ ID NO: 1884913 - DNA, 25 bp, Homo sapien
tagcgctgtggcaagcaattttgca

SEQ ID NO: 1884914 - DNA, 25 bp, Homo sapien
gtggcaagcaattttgcacatcatt

SEQ ID NO: 1884915 - DNA, 25 bp, Homo sapien
aagctataaggttctgtctgtcgtg

SEQ ID NO: 1884916 - DNA, 25 bp, Homo sapien
gcattgctgacgactgaagattcag

SEQ ID NO: 1884917 - DNA, 25 bp, Homo sapien
gggtctcccatttacactaagcaaa

SEQ ID NO: 1884918 - DNA, 25 bp, Homo sapien
cagcactgaggtcttaatcatagca

SEQ ID NO: 1884919 - DNA, 25 bp, Homo sapien
tgaaacctggctaactaaattaatg

SEQ ID NO: 1884920 - DNA, 25 bp, Homo sapien
gaggaaatcaggcacaaattgacca

SEQ ID NO: 1884921 - DNA, 25 bp, Homo sapien
caaataaatcgggaacaccatatcc

SEQ ID NO: 1884922 - DNA, 25 bp, Homo sapien
aatattaacttgtctccctagaagc

SEQ ID NO: 1884923 - DNA, 25 bp, Homo sapien
ctaatggaggcgaccagatcatggt

SEQ ID NO: 1884924 - DNA, 25 bp, Homo sapien
tctggtgtacggtggcacactaatg

SEQ ID NO: 1884925 - DNA, 25 bp, Homo sapien
gaatacctaacgaccaatcacttgg

SEQ ID NO: 1884926 - DNA, 25 bp, Homo sapien
gaaaggctgaggtacgctaagacag

SEQ ID NO: 1884927 - DNA, 25 bp, Homo sapien
tggctccggacacgctccagcatct

SEQ ID NO: 1884928 - DNA, 25 bp, Homo sapien
ctggctccggacacgctccagcatc

SEQ ID NO: 1884929 - DNA, 25 bp, Homo sapien
tccggacacgctccagcatcttgag

SEQ ID NO: 1884930 - DNA, 25 bp, Homo sapien
gctccggacacgctccagcatcttg

SEQ ID NO: 1884931 - DNA, 25 bp, Homo sapien
ctatgtggtccaactacagtcacat

SEQ ID NO: 1884932 - DNA, 25 bp, Homo sapien
tatgtggtccaactacagtcacatg

SEQ ID NO: 1884933 - DNA, 25 bp, Homo sapien
gattgtgacgacaggagtcctggct

SEQ ID NO: 1884934 - DNA, 25 bp, Homo sapien
cttgattgtgacgacaggagtcctg

SEQ ID NO: 1884935 - DNA, 25 bp, Homo sapien
tgtgcacctcaatgcagtgaaggta

SEQ ID NO: 1884936 - DNA, 25 bp, Homo sapien
tcaatgcagtgaaggtatgtgtcac

SEQ ID NO: 1884937 - DNA, 25 bp, Homo sapien
ctgtgcacctcaatgcagtgaaggt

SEQ ID NO: 1884938 - DNA, 25 bp, Homo sapien
cacctcaatgcagtgaaggtatgtg

SEQ ID NO: 1884939 - DNA, 25 bp, Homo sapien
gagaggagggtctatcaagcaccag

SEQ ID NO: 1884940 - DNA, 25 bp, Homo sapien
ctgtgagcataagaggcgagaggag

SEQ ID NO: 1884941 - DNA, 25 bp, Homo sapien
tgtgactgatgaaggtaggaaagaa

SEQ ID NO: 1884942 - DNA, 25 bp, Homo sapien
gaaccgatgtgtgactgatgaaggt

SEQ ID NO: 1884943 - DNA, 25 bp, Homo sapien
tgagctcctcctggtcctcttccat

SEQ ID NO: 1884944 - DNA, 25 bp, Homo sapien
caaagatgagctcctcctggtcctc

SEQ ID NO: 1884945 - DNA, 25 bp, Homo sapien
gatgagctcctcctggtcctcttcc

SEQ ID NO: 1884946 - DNA, 25 bp, Homo sapien
aagatgagctcctcctggtcctctt

SEQ ID NO: 1884947 - DNA, 25 bp, Homo sapien
gagggcacttgttcccatggccatg

SEQ ID NO: 1884948 - DNA, 25 bp, Homo sapien
caccattggatcatgaaagttttca

SEQ ID NO: 1884949 - DNA, 25 bp, Homo sapien
tttcaggcagggtctaccacggctt

SEQ ID NO: 1884950 - DNA, 25 bp, Homo sapien
taccacggcttcttgctgagggcac

SEQ ID NO: 1884951 - DNA, 25 bp, Homo sapien
ttcagaagaggggcaagtccaagca

SEQ ID NO: 1884952 - DNA, 25 bp, Homo sapien
ctgattcagaagaggggcaagtcca

SEQ ID NO: 1884953 - DNA, 25 bp, Homo sapien
tcagaagaggggcaagtccaagcaa

SEQ ID NO: 1884954 - DNA, 25 bp, Homo sapien
gattcagaagaggggcaagtccaag

SEQ ID NO: 1884955 - DNA, 25 bp, Homo sapien
gtggctgagttcgcaccattgtact

SEQ ID NO: 1884956 - DNA, 25 bp, Homo sapien
ggtggctgagttcgcaccattgtac

SEQ ID NO: 1884957 - DNA, 25 bp, Homo sapien
aggtggctgagttcgcaccattgta

SEQ ID NO: 1884958 - DNA, 25 bp, Homo sapien
agcaggtggctgagttcgcaccatt

SEQ ID NO: 1884959 - DNA, 25 bp, Homo sapien
ttgccaataacacttctaacactca

SEQ ID NO: 1884960 - DNA, 25 bp, Homo sapien
gtctggccacaaattcaaactttct

SEQ ID NO: 1884961 - DNA, 25 bp, Homo sapien
cacatgcctagaaggcctgagaggg

SEQ ID NO: 1884962 - DNA, 25 bp, Homo sapien
gacacatgcctagaaggcctgagag

SEQ ID NO: 1884963 - DNA, 25 bp, Homo sapien
ggcaggtctggccacaaattcaaac

SEQ ID NO: 1884964 - DNA, 25 bp, Homo sapien
aaaagcgaagccaagacttctcctc

SEQ ID NO: 1884965 - DNA, 25 bp, Homo sapien
acttctcctctcatcccctcttccc

SEQ ID NO: 1884966 - DNA, 25 bp, Homo sapien
tctcatcccctcttcccaggggaga

SEQ ID NO: 1884967 - DNA, 25 bp, Homo sapien
caaaagcgaagccaagacttctcct

SEQ ID NO: 1884968 - DNA, 25 bp, Homo sapien
gcaggctaacggaggtgaccaggtc

SEQ ID NO: 1884969 - DNA, 25 bp, Homo sapien
tcagtctccggtgtacggtggcagg

SEQ ID NO: 1884970 - DNA, 25 bp, Homo sapien
ttcggacacgctctagcatcttcag

SEQ ID NO: 1884971 - DNA, 25 bp, Homo sapien
ctccggtgtacggtggcaggctaac

SEQ ID NO: 1884972 - DNA, 25 bp, Homo sapien
tgtctggcctgtagctgtgaaacac

SEQ ID NO: 1884973 - DNA, 25 bp, Homo sapien
cagcgaaggtacgtgtcatcaagtc

SEQ ID NO: 1884974 - DNA, 25 bp, Homo sapien
tggtggtccgactacagtcacacgt

SEQ ID NO: 1884975 - DNA, 25 bp, Homo sapien
ccacgcaatggaacatgagcagcag

SEQ ID NO: 1884976 - DNA, 25 bp, Homo sapien
tttcgggcagggtccaccacggctc

SEQ ID NO: 1884977 - DNA, 25 bp, Homo sapien
cttgctgagagcactcgttcccacg

SEQ ID NO: 1884978 - DNA, 25 bp, Homo sapien
ttcgggcagggtccaccacggctcc

SEQ ID NO: 1884979 - DNA, 25 bp, Homo sapien
taagaattctcagtttatggtttct

SEQ ID NO: 1884980 - DNA, 25 bp, Homo sapien
ctgaagacattggtttggtcatctt

SEQ ID NO: 1884981 - DNA, 25 bp, Homo sapien
ggtcatcaaagcttgatctgaagac

SEQ ID NO: 1884982 - DNA, 25 bp, Homo sapien
caaaaatcgttgttctggaagatac

SEQ ID NO: 1884983 - DNA, 25 bp, Homo sapien
cttttccaaaagacaaatcttcaga

SEQ ID NO: 1884984 - DNA, 25 bp, Homo sapien
ccaaaagacaaatcttcagatttct

SEQ ID NO: 1884985 - DNA, 25 bp, Homo sapien
tccaaaagacaaatcttcagatttc

SEQ ID NO: 1884986 - DNA, 25 bp, Homo sapien
tttccaaaagacaaatcttcagatt

SEQ ID NO: 1884987 - DNA, 25 bp, Homo sapien
ggtgggaacaccttccatctctgtc

SEQ ID NO: 1884988 - DNA, 25 bp, Homo sapien
gcagttgtggtgggaacaccttcca

SEQ ID NO: 1884989 - DNA, 25 bp, Homo sapien
accaggcagttgtggtgggaacacc

SEQ ID NO: 1884990 - DNA, 25 bp, Homo sapien
agttgtggtgggaacaccttccatc

SEQ ID NO: 1884991 - DNA, 25 bp, Homo sapien
cactttaaggtgcaagaaaactctg

SEQ ID NO: 1884992 - DNA, 25 bp, Homo sapien
aaactctggggtgaataatttcatc

SEQ ID NO: 1884993 - DNA, 25 bp, Homo sapien
cattctccccatttgtctgcacttt

SEQ ID NO: 1884994 - DNA, 25 bp, Homo sapien
tccccatttgtctgcactttaaggt

SEQ ID NO: 1884995 - DNA, 25 bp, Homo sapien
agacttccctcagacatgtctagaa

SEQ ID NO: 1884996 - DNA, 25 bp, Homo sapien
cctcagacatgtctagaagacctga

SEQ ID NO: 1884997 - DNA, 25 bp, Homo sapien
gacttccctcagacatgtctagaag

SEQ ID NO: 1884998 - DNA, 25 bp, Homo sapien
ttccctcagacatgtctagaagacc

SEQ ID NO: 1884999 - DNA, 25 bp, Homo sapien
atggaaacccgaacaaccaatcact

SEQ ID NO: 1885000 - DNA, 25 bp, Homo sapien
ggtggcacactaatggaggtgacca

SEQ ID NO: 1885001 - DNA, 25 bp, Homo sapien
agacaggtctccagtgtatggtggc

SEQ ID NO: 1885002 - DNA, 25 bp, Homo sapien
ggcttcggacacgttccagcatctc

SEQ ID NO: 1885003 - DNA, 25 bp, Homo sapien
agaggctggcttcggacacgttcca

SEQ ID NO: 1885004 - DNA, 25 bp, Homo sapien
gtgtggtccgactacagtcacacga

SEQ ID NO: 1885005 - DNA, 25 bp, Homo sapien
ctcgagcatgatgataggagtcctg

SEQ ID NO: 1885006 - DNA, 25 bp, Homo sapien
tcctggtcctcttccatgtgaaaca

SEQ ID NO: 1885007 - DNA, 25 bp, Homo sapien
cctggtcctcttccatgtgaaacac

SEQ ID NO: 1885008 - DNA, 25 bp, Homo sapien
ggtcctcttccatgtgaaacaccat

SEQ ID NO: 1885009 - DNA, 25 bp, Homo sapien
cgaagatgagctcctcctggtcctc

SEQ ID NO: 1885010 - DNA, 25 bp, Homo sapien
aggcagggtccaccacggcttcttg

SEQ ID NO: 1885011 - DNA, 25 bp, Homo sapien
ggtccaccacggcttcttgctgaga

SEQ ID NO: 1885012 - DNA, 25 bp, Homo sapien
tggtgcatgaaagttttgaggcagg

SEQ ID NO: 1885013 - DNA, 25 bp, Homo sapien
tcttgctgagagcactcgttcccat

SEQ ID NO: 1885014 - DNA, 25 bp, Homo sapien
acagaatagggccaagtccaagcaa

SEQ ID NO: 1885015 - DNA, 25 bp, Homo sapien
ctgatacagaatagggccaagtcca

SEQ ID NO: 1885016 - DNA, 25 bp, Homo sapien
gatacagaatagggccaagtccaag

SEQ ID NO: 1885017 - DNA, 25 bp, Homo sapien
tacagaatagggccaagtccaagca

SEQ ID NO: 1885018 - DNA, 25 bp, Homo sapien
ctggtcctccctccaggtaaggcat

SEQ ID NO: 1885019 - DNA, 25 bp, Homo sapien
ggagtcccagacctggcatcaggtc

SEQ ID NO: 1885020 - DNA, 25 bp, Homo sapien
ccaacaagtctgttcagggacagca

SEQ ID NO: 1885021 - DNA, 25 bp, Homo sapien
acaagtctgttcagggacagcagtg

SEQ ID NO: 1885022 - DNA, 25 bp, Homo sapien
gtgagctttcatcataccactgcaa

SEQ ID NO: 1885023 - DNA, 25 bp, Homo sapien
caatagcaaccaattgagggtgtct

SEQ ID NO: 1885024 - DNA, 25 bp, Homo sapien
ggtgacagggtagagttcgtctcaa

SEQ ID NO: 1885025 - DNA, 25 bp, Homo sapien
tatattaaaaggcatggccagtggg

SEQ ID NO: 1885026 - DNA, 25 bp, Homo sapien
cacatactagttacatgcagcaaga

SEQ ID NO: 1885027 - DNA, 25 bp, Homo sapien
gaatgcagaagcagtcacatactag

SEQ ID NO: 1885028 - DNA, 25 bp, Homo sapien
tatagtgcactagcctggagttcct

SEQ ID NO: 1885029 - DNA, 25 bp, Homo sapien
ccaaggatagatcgaagggaatgca

SEQ ID NO: 1885030 - DNA, 25 bp, Homo sapien
attgtgcctttatgccttcaaattg

SEQ ID NO: 1885031 - DNA, 25 bp, Homo sapien
tcattcctactttagagtccgctat

SEQ ID NO: 1885032 - DNA, 25 bp, Homo sapien
gtaatcattacaggggagtccagtg

SEQ ID NO: 1885033 - DNA, 25 bp, Homo sapien
caaattggggtatacccatatatcc

SEQ ID NO: 1885034 - DNA, 25 bp, Homo sapien
tgctctcttgcagacacgcaactca

SEQ ID NO: 1885035 - DNA, 25 bp, Homo sapien
gcatctcagtgatgccgccgggaac

SEQ ID NO: 1885036 - DNA, 25 bp, Homo sapien
aaccaatgaggaaattatcccacaa

SEQ ID NO: 1885037 - DNA, 25 bp, Homo sapien
caaagcagataatcctaatggaggg

SEQ ID NO: 1885038 - DNA, 25 bp, Homo sapien
ttcgagaccacaggggggtcaggta

SEQ ID NO: 1885039 - DNA, 25 bp, Homo sapien
agggtggcgcgccgcaggcctgggc

SEQ ID NO: 1885040 - DNA, 25 bp, Homo sapien
gggccactccctgagtagggcggcg

SEQ ID NO: 1885041 - DNA, 25 bp, Homo sapien
gctgggctttgacggtaggaatgaa

SEQ ID NO: 1885042 - DNA, 25 bp, Homo sapien
agacagcggtacctcctgggccgcg

SEQ ID NO: 1885043 - DNA, 25 bp, Homo sapien
caggcctggccgattgtgaggagac

SEQ ID NO: 1885044 - DNA, 25 bp, Homo sapien
ccgattgtgaggagacagcggtacc

SEQ ID NO: 1885045 - DNA, 25 bp, Homo sapien
gcgcgaggcgcgctcgagcggaagt

SEQ ID NO: 1885046 - DNA, 25 bp, Homo sapien
acgagccagtggcaatgacccagac

SEQ ID NO: 1885047 - DNA, 25 bp, Homo sapien
tgctctgtgtaggagacagcctgcg

SEQ ID NO: 1885048 - DNA, 25 bp, Homo sapien
tgccttcagttcaccccgatatggg

SEQ ID NO: 1885049 - DNA, 25 bp, Homo sapien
gtgtcggtccaccaagggaggtcca

SEQ ID NO: 1885050 - DNA, 25 bp, Homo sapien
cccagtctcgtgtagcagcataaca

SEQ ID NO: 1885051 - DNA, 25 bp, Homo sapien
gaaggaactaacctggcaccatggg

SEQ ID NO: 1885052 - DNA, 25 bp, Homo sapien
acctaatgttggtgagcagtgtgcc

SEQ ID NO: 1885053 - DNA, 25 bp, Homo sapien
ccatgggccaatctagagcagtctt

SEQ ID NO: 1885054 - DNA, 25 bp, Homo sapien
ccagtctgtttgcaggcagtggcac

SEQ ID NO: 1885055 - DNA, 25 bp, Homo sapien
aaaaacagatcccagtctgtttgca

SEQ ID NO: 1885056 - DNA, 25 bp, Homo sapien
acaaaaacagatcccagtctgtttg

SEQ ID NO: 1885057 - DNA, 25 bp, Homo sapien
cagatcccagtctgtttgcaggcag

SEQ ID NO: 1885058 - DNA, 25 bp, Homo sapien
cactggtgcaggtttaggcacattc

SEQ ID NO: 1885059 - DNA, 25 bp, Homo sapien
gaagtgtgtccatcccggaaaggga

SEQ ID NO: 1885060 - DNA, 25 bp, Homo sapien
ggcacattctgaaaccatcagtgct

SEQ ID NO: 1885061 - DNA, 25 bp, Homo sapien
ccctgtgcggggtgacacggctcta

SEQ ID NO: 1885062 - DNA, 25 bp, Homo sapien
aaagaggcctggtgtggcggctcag

SEQ ID NO: 1885063 - DNA, 25 bp, Homo sapien
agtctagccctagctctttattttt

SEQ ID NO: 1885064 - DNA, 25 bp, Homo sapien
tttgcctatatttctattgatgtgt

SEQ ID NO: 1885065 - DNA, 25 bp, Homo sapien
gagccactgtagtctagccctagct

SEQ ID NO: 1885066 - DNA, 25 bp, Homo sapien
ctggccagaatgccttctcatgtcc

SEQ ID NO: 1885067 - DNA, 25 bp, Homo sapien
tacatcattattgtaaggtactgtt

SEQ ID NO: 1885068 - DNA, 25 bp, Homo sapien
tattgtaaggtactgttgggccctc

SEQ ID NO: 1885069 - DNA, 25 bp, Homo sapien
accttgcccggccaagatgaggtat

SEQ ID NO: 1885070 - DNA, 25 bp, Homo sapien
cccggccaagatgaggtattattac

SEQ ID NO: 1885071 - DNA, 25 bp, Homo sapien
agagttgtgaggatagtacagagtg

SEQ ID NO: 1885072 - DNA, 25 bp, Homo sapien
gttgtgaggatagtacagagtgccc

SEQ ID NO: 1885073 - DNA, 25 bp, Homo sapien
ttgtgaggatagtacagagtgccca

SEQ ID NO: 1885074 - DNA, 25 bp, Homo sapien
agttgtgaggatagtacagagtgcc

SEQ ID NO: 1885075 - DNA, 25 bp, Homo sapien
tggatcggcatctagtctttccgct

SEQ ID NO: 1885076 - DNA, 25 bp, Homo sapien
ttttggatcggcatctagtctttcc

SEQ ID NO: 1885077 - DNA, 25 bp, Homo sapien
tttggatcggcatctagtctttccg

SEQ ID NO: 1885078 - DNA, 25 bp, Homo sapien
ttggatcggcatctagtctttccgc

SEQ ID NO: 1885079 - DNA, 25 bp, Homo sapien
gagaatagaaccacagttgttgcac

SEQ ID NO: 1885080 - DNA, 25 bp, Homo sapien
ggatgctctttgactacctggcgga

SEQ ID NO: 1885081 - DNA, 25 bp, Homo sapien
caaatgcggtcaaccagggatggta

SEQ ID NO: 1885082 - DNA, 25 bp, Homo sapien
caagcatggttttaggcaggagtat

SEQ ID NO: 1885083 - DNA, 25 bp, Homo sapien
tgttcgaaaacgttggcaggtgcta

SEQ ID NO: 1885084 - DNA, 25 bp, Homo sapien
taggtaaagttactcaacaggagtc

SEQ ID NO: 1885085 - DNA, 25 bp, Homo sapien
tgcttgtgaacgacttcttggtggc

SEQ ID NO: 1885086 - DNA, 25 bp, Homo sapien
gcagacaaattgaacatgactccag

SEQ ID NO: 1885087 - DNA, 25 bp, Homo sapien
ctttgttggagacagcgcggttcac

SEQ ID NO: 1885088 - DNA, 25 bp, Homo sapien
gaccagcagccaagttaaacgcact

SEQ ID NO: 1885089 - DNA, 25 bp, Homo sapien
gagtctgaccgttctctggcgcaca

SEQ ID NO: 1885090 - DNA, 25 bp, Homo sapien
taaacgcactgttccgtgagcagct

SEQ ID NO: 1885091 - DNA, 25 bp, Homo sapien
gggctgcgctgggtggcgtcaagga

SEQ ID NO: 1885092 - DNA, 25 bp, Homo sapien
gctgggtggcgtcaaggagccgccc

SEQ ID NO: 1885093 - DNA, 25 bp, Homo sapien
gcgctgggtggcgtcaaggagccgc

SEQ ID NO: 1885094 - DNA, 25 bp, Homo sapien
ggtggcgtcaaggagccgcccctct

SEQ ID NO: 1885095 - DNA, 25 bp, Homo sapien
ctgcacactggccctgtgtggccgg

SEQ ID NO: 1885096 - DNA, 25 bp, Homo sapien
gcacactggccctgtgtggccggcg

SEQ ID NO: 1885097 - DNA, 25 bp, Homo sapien
ccctgcacactggccctgtgtggcc

SEQ ID NO: 1885098 - DNA, 25 bp, Homo sapien
acactggccctgtgtggccggcggg

SEQ ID NO: 1885099 - DNA, 25 bp, Homo sapien
caccattctgatggttacgacgcca

SEQ ID NO: 1885100 - DNA, 25 bp, Homo sapien
tacgacgccactgttataggaattt

SEQ ID NO: 1885101 - DNA, 25 bp, Homo sapien
ccattattgtatttgaggcccatca

SEQ ID NO: 1885102 - DNA, 25 bp, Homo sapien
tgtgccgatcacatgaggacaggag

SEQ ID NO: 1885103 - DNA, 25 bp, Homo sapien
gcaggctttccgcaagcaacgccgt

SEQ ID NO: 1885104 - DNA, 25 bp, Homo sapien
aagcaacgccgtccctgcctgagat

SEQ ID NO: 1885105 - DNA, 25 bp, Homo sapien
ccagcaggctttccgcaagcaacgc

SEQ ID NO: 1885106 - DNA, 25 bp, Homo sapien
gcaagcaacgccgtccctgcctgag

SEQ ID NO: 1885107 - DNA, 25 bp, Homo sapien
tctgcggatccaaaggtggaaagac

SEQ ID NO: 1885108 - DNA, 25 bp, Homo sapien
gatttctgcggatccaaaggtggaa

SEQ ID NO: 1885109 - DNA, 25 bp, Homo sapien
gaaagacactgtcccgatcaggagc

SEQ ID NO: 1885110 - DNA, 25 bp, Homo sapien
tcgatttctgcggatccaaaggtgg

SEQ ID NO: 1885111 - DNA, 25 bp, Homo sapien
taaatgaagatcaggactccgtatt

SEQ ID NO: 1885112 - DNA, 25 bp, Homo sapien
tggagaaagggccatccataaatga

SEQ ID NO: 1885113 - DNA, 25 bp, Homo sapien
aataagactcggaacagcctctgga

SEQ ID NO: 1885114 - DNA, 25 bp, Homo sapien
caggactccgtattctgagactgtt

SEQ ID NO: 1885115 - DNA, 25 bp, Homo sapien
gctaaggcacgagtagtacagctcc

SEQ ID NO: 1885116 - DNA, 25 bp, Homo sapien
cacagtctaggtggattaacgcgcc

SEQ ID NO: 1885117 - DNA, 25 bp, Homo sapien
tgaccaaacgacaagaaccggagga

SEQ ID NO: 1885118 - DNA, 25 bp, Homo sapien
caataaccgactgaactgagggcgt

SEQ ID NO: 1885119 - DNA, 25 bp, Homo sapien
tcacactccgtttcttcgatccttt

SEQ ID NO: 1885120 - DNA, 25 bp, Homo sapien
tgctgtcccgcccacggactcgctc

SEQ ID NO: 1885121 - DNA, 25 bp, Homo sapien
cgtttcttcgatcctttagacgact

SEQ ID NO: 1885122 - DNA, 25 bp, Homo sapien
gactcgctcacactccgtttcttcg

SEQ ID NO: 1885123 - DNA, 25 bp, Homo sapien
tcagggatgctctccgttaccgcct

SEQ ID NO: 1885124 - DNA, 25 bp, Homo sapien
tccgttaccgcctctgccatttggt

SEQ ID NO: 1885125 - DNA, 25 bp, Homo sapien
cgttcagggatgctctccgttaccg

SEQ ID NO: 1885126 - DNA, 25 bp, Homo sapien
ccgttaccgcctctgccatttggtt

SEQ ID NO: 1885127 - DNA, 25 bp, Homo sapien
ctgcaacccggcttcattgcattgg

SEQ ID NO: 1885128 - DNA, 25 bp, Homo sapien
tagctctggccacaacctaatctct

SEQ ID NO: 1885129 - DNA, 25 bp, Homo sapien
cttaaggaatcactctagctctggc

SEQ ID NO: 1885130 - DNA, 25 bp, Homo sapien
cttaactctttaggctggagcagat

SEQ ID NO: 1885131 - DNA, 25 bp, Homo sapien
caagggcctagttcgagggcattca

SEQ ID NO: 1885132 - DNA, 25 bp, Homo sapien
gagggcattcatggcttcggcaagt

SEQ ID NO: 1885133 - DNA, 25 bp, Homo sapien
catggcttcggcaagtttgagcatc

SEQ ID NO: 1885134 - DNA, 25 bp, Homo sapien
tcacttcatccaagggcctagttcg

SEQ ID NO: 1885135 - DNA, 25 bp, Homo sapien
agatagctcagataaccctgcccag

SEQ ID NO: 1885136 - DNA, 25 bp, Homo sapien
ggcccattcgaacattctccaagaa

SEQ ID NO: 1885137 - DNA, 25 bp, Homo sapien
cagaaccttggaacccgagactact

SEQ ID NO: 1885138 - DNA, 25 bp, Homo sapien
tctgggacttctgatccaggcgttc

SEQ ID NO: 1885139 - DNA, 25 bp, Homo sapien
tcttgggaaggcccagatgccaagg

SEQ ID NO: 1885140 - DNA, 25 bp, Homo sapien
gtctccaagaccgacggccggcatt

SEQ ID NO: 1885141 - DNA, 25 bp, Homo sapien
gggtcttgggaaggcccagatgcca

SEQ ID NO: 1885142 - DNA, 25 bp, Homo sapien
ggcacccctggtgacgcccaaggtg

SEQ ID NO: 1885143 - DNA, 25 bp, Homo sapien
ccccgcgagcctgtgttccgcgtac

SEQ ID NO: 1885144 - DNA, 25 bp, Homo sapien
ctgtgttccgcgtacccagtctctg

SEQ ID NO: 1885145 - DNA, 25 bp, Homo sapien
gctggaggagaggcgcgaagcggcc

SEQ ID NO: 1885146 - DNA, 25 bp, Homo sapien
cgagcctgtgttccgcgtacccagt

SEQ ID NO: 1885147 - DNA, 25 bp, Homo sapien
tcgatgtaagggattcgagatccgt

SEQ ID NO: 1885148 - DNA, 25 bp, Homo sapien
tgtaagggattcgagatccgtccgg

SEQ ID NO: 1885149 - DNA, 25 bp, Homo sapien
taagggattcgagatccgtccgggc

SEQ ID NO: 1885150 - DNA, 25 bp, Homo sapien
gatgtaagggattcgagatccgtcc

SEQ ID NO: 1885151 - DNA, 25 bp, Homo sapien
ggccggctgagactcccgagccggg

SEQ ID NO: 1885152 - DNA, 25 bp, Homo sapien
gatccccgggccggctgagactccc

SEQ ID NO: 1885153 - DNA, 25 bp, Homo sapien
cgagccggggcagcccgccagtact

SEQ ID NO: 1885154 - DNA, 25 bp, Homo sapien
ccgggccggctgagactcccgagcc

SEQ ID NO: 1885155 - DNA, 25 bp, Homo sapien
tttcacccacggcgggatatgtcta

SEQ ID NO: 1885156 - DNA, 25 bp, Homo sapien
gggatatgtctacgtgccgggagag

SEQ ID NO: 1885157 - DNA, 25 bp, Homo sapien
actttcacccacggcgggatatgtc

SEQ ID NO: 1885158 - DNA, 25 bp, Homo sapien
gatatgtctacgtgccgggagagtt

SEQ ID NO: 1885159 - DNA, 25 bp, Homo sapien
aagaccactctccagcgcaaaccag

SEQ ID NO: 1885160 - DNA, 25 bp, Homo sapien
caagaccactctccagcgcaaacca

SEQ ID NO: 1885161 - DNA, 25 bp, Homo sapien
ccaagaccactctccagcgcaaacc

SEQ ID NO: 1885162 - DNA, 25 bp, Homo sapien
cccgctgtcgttctactcaaggtga

SEQ ID NO: 1885163 - DNA, 25 bp, Homo sapien
gaaggccctgggtgtattgctactc

SEQ ID NO: 1885164 - DNA, 25 bp, Homo sapien
tcaaggtgacttgggatgagaaaac

SEQ ID NO: 1885165 - DNA, 25 bp, Homo sapien
taggaaatctctccaagcccgctgt

SEQ ID NO: 1885166 - DNA, 25 bp, Homo sapien
gttactatggcagcgagaagcccca

SEQ ID NO: 1885167 - DNA, 25 bp, Homo sapien
ccacgaaggtcgtggacaccagcaa

SEQ ID NO: 1885168 - DNA, 25 bp, Homo sapien
gcaagatacaggcatcggctactct

SEQ ID NO: 1885169 - DNA, 25 bp, Homo sapien
cagcagagaacactttggcttccct

SEQ ID NO: 1885170 - DNA, 25 bp, Homo sapien
aaggatgcaagccaacagctgggtg

SEQ ID NO: 1885171 - DNA, 25 bp, Homo sapien
ctagaaggatgcaagccaacagctg

SEQ ID NO: 1885172 - DNA, 25 bp, Homo sapien
agaaggatgcaagccaacagctggg

SEQ ID NO: 1885173 - DNA, 25 bp, Homo sapien
tagaaggatgcaagccaacagctgg

SEQ ID NO: 1885174 - DNA, 25 bp, Homo sapien
cagtacaacacgtagtggaaaaaca

SEQ ID NO: 1885175 - DNA, 25 bp, Homo sapien
taatttcagtacaacacgtagtgga

SEQ ID NO: 1885176 - DNA, 25 bp, Homo sapien
ttggtaatttcagtacaacacgtag

SEQ ID NO: 1885177 - DNA, 25 bp, Homo sapien
tggcccatgccggacacccgtgcag

SEQ ID NO: 1885178 - DNA, 25 bp, Homo sapien
ctttattataagtgtgtgaagatct

SEQ ID NO: 1885179 - DNA, 25 bp, Homo sapien
tttattataagtgtgtgaagatctt

SEQ ID NO: 1885180 - DNA, 25 bp, Homo sapien
gctttattataagtgtgtgaagatc

SEQ ID NO: 1885181 - DNA, 25 bp, Homo sapien
tattataagtgtgtgaagatcttaa

SEQ ID NO: 1885182 - DNA, 25 bp, Homo sapien
tttattagaatagttcaaactcact

SEQ ID NO: 1885183 - DNA, 25 bp, Homo sapien
cactcttgcaacaaaataaaccaca

SEQ ID NO: 1885184 - DNA, 25 bp, Homo sapien
tagcagcaaaagttagaaagttaag

SEQ ID NO: 1885185 - DNA, 25 bp, Homo sapien
taagatgttcccaacagtaactatg

SEQ ID NO: 1885186 - DNA, 25 bp, Homo sapien
agagtgggggtctgatgcatgggcc

SEQ ID NO: 1885187 - DNA, 25 bp, Homo sapien
ggtctgatgcatgggccttcaagtt

SEQ ID NO: 1885188 - DNA, 25 bp, Homo sapien
tgggggtctgatgcatgggccttca

SEQ ID NO: 1885189 - DNA, 25 bp, Homo sapien
cttctcaaggtgtttcatcttctca

SEQ ID NO: 1885190 - DNA, 25 bp, Homo sapien
tgctcttcacccgattctgtacacg

SEQ ID NO: 1885191 - DNA, 25 bp, Homo sapien
tgagtcaactatgtccactgtcagc

SEQ ID NO: 1885192 - DNA, 25 bp, Homo sapien
ggagcatgctcttcacccgattctg

SEQ ID NO: 1885193 - DNA, 25 bp, Homo sapien
tttcgactaggttccctgagtcaac

SEQ ID NO: 1885194 - DNA, 25 bp, Homo sapien
cgctgggactcagcggcaccagcat

SEQ ID NO: 1885195 - DNA, 25 bp, Homo sapien
cggagtctgtttgccccgctgggac

SEQ ID NO: 1885196 - DNA, 25 bp, Homo sapien
aagtggtaacctacgcagctgctcc

SEQ ID NO: 1885197 - DNA, 25 bp, Homo sapien
aaagagctcgtctgccagccatgcc

SEQ ID NO: 1885198 - DNA, 25 bp, Homo sapien
gctcgaggcggctttcgcaagacct

SEQ ID NO: 1885199 - DNA, 25 bp, Homo sapien
agcgcgctcgaggcggctttcgcaa

SEQ ID NO: 1885200 - DNA, 25 bp, Homo sapien
ccgcggagcgcgctcgaggcggctt

SEQ ID NO: 1885201 - DNA, 25 bp, Homo sapien
gcggagcgcgctcgaggcggctttc

SEQ ID NO: 1885202 - DNA, 25 bp, Homo sapien
ttccggcggcgcctcgcaccgcgtc

SEQ ID NO: 1885203 - DNA, 25 bp, Homo sapien
gggtgagcgggtgcaagcgacgccc

SEQ ID NO: 1885204 - DNA, 25 bp, Homo sapien
cctcgcaccgcgtcggggtgagcgg

SEQ ID NO: 1885205 - DNA, 25 bp, Homo sapien
gcgggtgcaagcgacgccccggcat

SEQ ID NO: 1885206 - DNA, 25 bp, Homo sapien
cacgtcgaaatctccagatagtggt

SEQ ID NO: 1885207 - DNA, 25 bp, Homo sapien
actgaatccagccaaccaacgtgtt

SEQ ID NO: 1885208 - DNA, 25 bp, Homo sapien
agaggaaaacacgtcgaaatctcca

SEQ ID NO: 1885209 - DNA, 25 bp, Homo sapien
tgaatccagccaaccaacgtgttca

SEQ ID NO: 1885210 - DNA, 25 bp, Homo sapien
ccagcttggttcttctccaatgtct

SEQ ID NO: 1885211 - DNA, 25 bp, Homo sapien
agcttggttcttctccaatgtctcc

SEQ ID NO: 1885212 - DNA, 25 bp, Homo sapien
tggttcttctccaatgtctcctttt

SEQ ID NO: 1885213 - DNA, 25 bp, Homo sapien
tcttctccaatgtctccttttggag

SEQ ID NO: 1885214 - DNA, 25 bp, Homo sapien
gccaggaatcgcttaatcctgaaag

SEQ ID NO: 1885215 - DNA, 25 bp, Homo sapien
aatcgcttaatcctgaaagtcttgt

SEQ ID NO: 1885216 - DNA, 25 bp, Homo sapien
ttggccaggaatcgcttaatcctga

SEQ ID NO: 1885217 - DNA, 25 bp, Homo sapien
ttatttccagttttcatccgaatcc

SEQ ID NO: 1885218 - DNA, 25 bp, Homo sapien
cgagcagcggagtcaagaacacacc

SEQ ID NO: 1885219 - DNA, 25 bp, Homo sapien
ccacgatggcggagaaaggaagagg

SEQ ID NO: 1885220 - DNA, 25 bp, Homo sapien
ggcgagcagcggagtcaagaacaca

SEQ ID NO: 1885221 - DNA, 25 bp, Homo sapien
gcgagcagcggagtcaagaacacac

SEQ ID NO: 1885222 - DNA, 25 bp, Homo sapien
gatattgccaccttctctagtccag

SEQ ID NO: 1885223 - DNA, 25 bp, Homo sapien
gagtctggcaggttgtaagtgccca

SEQ ID NO: 1885224 - DNA, 25 bp, Homo sapien
taagtgcccagtataagatattgcc

SEQ ID NO: 1885225 - DNA, 25 bp, Homo sapien
caagggtgcggtgtttgctgcctcc

SEQ ID NO: 1885226 - DNA, 25 bp, Homo sapien
ttaccgttttagatatctttcctca

SEQ ID NO: 1885227 - DNA, 25 bp, Homo sapien
cctggaattaccgttttagatatct

SEQ ID NO: 1885228 - DNA, 25 bp, Homo sapien
ctggaattaccgttttagatatctt

SEQ ID NO: 1885229 - DNA, 25 bp, Homo sapien
aaaataacagaactcataggtggga

SEQ ID NO: 1885230 - DNA, 25 bp, Homo sapien
tggcaatttgttcctggtgtttttc

SEQ ID NO: 1885231 - DNA, 25 bp, Homo sapien
agccaggtgtttgtgttgcgggaca

SEQ ID NO: 1885232 - DNA, 25 bp, Homo sapien
gccaggtgtttgtgttgcgggacat

SEQ ID NO: 1885233 - DNA, 25 bp, Homo sapien
ggagtaacaacacactgagtcttgg

SEQ ID NO: 1885234 - DNA, 25 bp, Homo sapien
acactgagtcttgggtgctttggcc

SEQ ID NO: 1885235 - DNA, 25 bp, Homo sapien
actgagtcttgggtgctttggccct

SEQ ID NO: 1885236 - DNA, 25 bp, Homo sapien
gaggagtaacaacacactgagtctt

SEQ ID NO: 1885237 - DNA, 25 bp, Homo sapien
ggcagttcaggattagccttctctc

SEQ ID NO: 1885238 - DNA, 25 bp, Homo sapien
gcagtatattatcaggcagttcagg

SEQ ID NO: 1885239 - DNA, 25 bp, Homo sapien
tcaggattagccttctctctctaac

SEQ ID NO: 1885240 - DNA, 25 bp, Homo sapien
tcccgggggatgaggcagtatatta

SEQ ID NO: 1885241 - DNA, 25 bp, Homo sapien
tggaggagaggaataccccttactc

SEQ ID NO: 1885242 - DNA, 25 bp, Homo sapien
agacacagtcttgggtcaaaatacc

SEQ ID NO: 1885243 - DNA, 25 bp, Homo sapien
ctcagtagcaggcagacacagtctt

SEQ ID NO: 1885244 - DNA, 25 bp, Homo sapien
gaggagaggaataccccttactcag

SEQ ID NO: 1885245 - DNA, 25 bp, Homo sapien
aggaagcctcgtctgttgtccccac

SEQ ID NO: 1885246 - DNA, 25 bp, Homo sapien
tgacatttgcaatcctcatccactt

SEQ ID NO: 1885247 - DNA, 25 bp, Homo sapien
atagcttctcagaaaaagtatgaca

SEQ ID NO: 1885248 - DNA, 25 bp, Homo sapien
caacatctgtgactatagcttctca

SEQ ID NO: 1885249 - DNA, 25 bp, Homo sapien
tagtgtgcccacttcgtaacaaggt

SEQ ID NO: 1885250 - DNA, 25 bp, Homo sapien
gggaggcacatttgacacaagagca

SEQ ID NO: 1885251 - DNA, 25 bp, Homo sapien
catcaggtgggtagtgtgcccactt

SEQ ID NO: 1885252 - DNA, 25 bp, Homo sapien
tttgacacaagagcatgaaaaccca

SEQ ID NO: 1885253 - DNA, 25 bp, Homo sapien
ctttatgggtcacggttgaaaacat

SEQ ID NO: 1885254 - DNA, 25 bp, Homo sapien
cttgaagccagaagccaagagttca

SEQ ID NO: 1885255 - DNA, 25 bp, Homo sapien
atcacttgaagccagaagccaagag

SEQ ID NO: 1885256 - DNA, 25 bp, Homo sapien
cacttgaagccagaagccaagagtt

SEQ ID NO: 1885257 - DNA, 25 bp, Homo sapien
ccgaggctggaagatcacttgaagc

SEQ ID NO: 1885258 - DNA, 25 bp, Homo sapien
ggcacatcgactacttcaaggcaca

SEQ ID NO: 1885259 - DNA, 25 bp, Homo sapien
aaggcacactcccacggttcagaaa

SEQ ID NO: 1885260 - DNA, 25 bp, Homo sapien
gccaggaacccgaggtgtgtgtcca

SEQ ID NO: 1885261 - DNA, 25 bp, Homo sapien
agtcccacgcctggaaaggaataca

SEQ ID NO: 1885262 - DNA, 25 bp, Homo sapien
aacaatgtcccaccacggaggagct

SEQ ID NO: 1885263 - DNA, 25 bp, Homo sapien
tcgtgcgggctccttaagtagcggc

SEQ ID NO: 1885264 - DNA, 25 bp, Homo sapien
tagtcggcgaagctcgacagtgtcc

SEQ ID NO: 1885265 - DNA, 25 bp, Homo sapien
tacgacgtcacggtcaggtggtgca

SEQ ID NO: 1885266 - DNA, 25 bp, Homo sapien
tgcggtctcaccctcaatcatgatg

SEQ ID NO: 1885267 - DNA, 25 bp, Homo sapien
tataattgtaaccaccgaggaagag

SEQ ID NO: 1885268 - DNA, 25 bp, Homo sapien
tatcttttgcttcagtgcggatcac

SEQ ID NO: 1885269 - DNA, 25 bp, Homo sapien
cgtttctcgaaaagctgtgtaggta

SEQ ID NO: 1885270 - DNA, 25 bp, Homo sapien
gatgctccctataagagcagaacct

SEQ ID NO: 1885271 - DNA, 25 bp, Homo sapien
tgccagaaatcttggacttacaaag

SEQ ID NO: 1885272 - DNA, 25 bp, Homo sapien
tcagtgacatcgtaggaacctctag

SEQ ID NO: 1885273 - DNA, 25 bp, Homo sapien
gcagaaccttaacctcactcagtga

SEQ ID NO: 1885274 - DNA, 25 bp, Homo sapien
catttactgacttcccactataagg

SEQ ID NO: 1885275 - DNA, 25 bp, Homo sapien
tcattttccactcccaagatgtaac

SEQ ID NO: 1885276 - DNA, 25 bp, Homo sapien
ggtttttgccaactatattcacatt

SEQ ID NO: 1885277 - DNA, 25 bp, Homo sapien
catacctgtgacagtcggaccctca

SEQ ID NO: 1885278 - DNA, 25 bp, Homo sapien
cagcgctggctgacgtcttaattat

SEQ ID NO: 1885279 - DNA, 25 bp, Homo sapien
gaagccctcagtcctacaaatgtaa

SEQ ID NO: 1885280 - DNA, 25 bp, Homo sapien
aatcgagctactgttgtgggctgcc

SEQ ID NO: 1885281 - DNA, 25 bp, Homo sapien
tagaatacagtacaggcaacggact

SEQ ID NO: 1885282 - DNA, 25 bp, Homo sapien
cctctaggctgaatgctacctaaaa

SEQ ID NO: 1885283 - DNA, 25 bp, Homo sapien
tattaagaacttcccaaaacaatga

SEQ ID NO: 1885284 - DNA, 25 bp, Homo sapien
tgttacacagacaacgaatgaaaga

SEQ ID NO: 1885285 - DNA, 25 bp, Homo sapien
gacaacccatatggcagaagttatt

SEQ ID NO: 1885286 - DNA, 25 bp, Homo sapien
caattattgctgtgacaaatttcaa

SEQ ID NO: 1885287 - DNA, 25 bp, Homo sapien
ctgtttttcagtaagaacttgatga

SEQ ID NO: 1885288 - DNA, 25 bp, Homo sapien
tatttgcctgcatgataaagcaaac

SEQ ID NO: 1885289 - DNA, 25 bp, Homo sapien
ttgactaatctttttcctaggatag

SEQ ID NO: 1885290 - DNA, 25 bp, Homo sapien
cagcgtctggccccttttcaaattt

SEQ ID NO: 1885291 - DNA, 25 bp, Homo sapien
ggtgactctagttcttagatctttc

SEQ ID NO: 1885292 - DNA, 25 bp, Homo sapien
cacagcgtctggccccttttcaaat

SEQ ID NO: 1885293 - DNA, 25 bp, Homo sapien
tattctccaggatttagggtgactc

SEQ ID NO: 1885294 - DNA, 25 bp, Homo sapien
gaagaaagtatgtcacgcagttatc

SEQ ID NO: 1885295 - DNA, 25 bp, Homo sapien
taagttgctagagaatagattgaat

SEQ ID NO: 1885296 - DNA, 25 bp, Homo sapien
gctagagaatagattgaattcagga

SEQ ID NO: 1885297 - DNA, 25 bp, Homo sapien
caggtctttgcggtcccactgactg

SEQ ID NO: 1885298 - DNA, 25 bp, Homo sapien
ttttcacatgataagaagagaattt

SEQ ID NO: 1885299 - DNA, 25 bp, Homo sapien
gttttcacatgataagaagagaatt

SEQ ID NO: 1885300 - DNA, 25 bp, Homo sapien
tcaaagcctgcatatgagatcttaa

SEQ ID NO: 1885301 - DNA, 25 bp, Homo sapien
atgagatcttaaagaacctctgtgc

SEQ ID NO: 1885302 - DNA, 25 bp, Homo sapien
gagatcttaaagaacctctgtgcct

SEQ ID NO: 1885303 - DNA, 25 bp, Homo sapien
caaagcctgcatatgagatcttaaa

SEQ ID NO: 1885304 - DNA, 25 bp, Homo sapien
ctttgttttcacagcacgttttaga

SEQ ID NO: 1885305 - DNA, 25 bp, Homo sapien
ttcacagcacgttttagattttcca

SEQ ID NO: 1885306 - DNA, 25 bp, Homo sapien
tgttttcacagcacgttttagattt

SEQ ID NO: 1885307 - DNA, 25 bp, Homo sapien
tcacagcacgttttagattttccat

SEQ ID NO: 1885308 - DNA, 25 bp, Homo sapien
aaaatttccttttcgatgtgagaga

SEQ ID NO: 1885309 - DNA, 25 bp, Homo sapien
gagagaaggatagccgccatgtttc

SEQ ID NO: 1885310 - DNA, 25 bp, Homo sapien
tcaaaatttccttttcgatgtgaga

SEQ ID NO: 1885311 - DNA, 25 bp, Homo sapien
tttccttttcgatgtgagagaagga

SEQ ID NO: 1885312 - DNA, 25 bp, Homo sapien
caaaagaatctacaatgctgggcat

SEQ ID NO: 1885313 - DNA, 25 bp, Homo sapien
catggctagctcttttatgctctga

SEQ ID NO: 1885314 - DNA, 25 bp, Homo sapien
aatttctccccgagtcttaccatgg

SEQ ID NO: 1885315 - DNA, 25 bp, Homo sapien
gctctgaccaccctgttacttcgtg

SEQ ID NO: 1885316 - DNA, 25 bp, Homo sapien
gtaggtgccaaaagtcctatataaa

SEQ ID NO: 1885317 - DNA, 25 bp, Homo sapien
gaatccaatagtagtaggtgccaaa

SEQ ID NO: 1885318 - DNA, 25 bp, Homo sapien
caatagtagtaggtgccaaaagtcc

SEQ ID NO: 1885319 - DNA, 25 bp, Homo sapien
tccctggaatccaatagtagtaggt

SEQ ID NO: 1885320 - DNA, 25 bp, Homo sapien
aaatggctttagtcgtagttgcttc

SEQ ID NO: 1885321 - DNA, 25 bp, Homo sapien
aaagccagttttgaatgcgcaggcc

SEQ ID NO: 1885322 - DNA, 25 bp, Homo sapien
gcaggccagctactttttgattcca

SEQ ID NO: 1885323 - DNA, 25 bp, Homo sapien
taagaagtgttacagcagggctccc

SEQ ID NO: 1885324 - DNA, 25 bp, Homo sapien
gtttcactcttattgtcttgttgcc

SEQ ID NO: 1885325 - DNA, 25 bp, Homo sapien
tgccactgtgcctggttaaattttc

SEQ ID NO: 1885326 - DNA, 25 bp, Homo sapien
tttcactcttattgtcttgttgccc

SEQ ID NO: 1885327 - DNA, 25 bp, Homo sapien
actgtgcctggttaaattttcatta

SEQ ID NO: 1885328 - DNA, 25 bp, Homo sapien
cactctacttaacattgcaacttcc

SEQ ID NO: 1885329 - DNA, 25 bp, Homo sapien
cccaaactctaatggaattctcttc

SEQ ID NO: 1885330 - DNA, 25 bp, Homo sapien
tctcactttgctatacttcttcaca

SEQ ID NO: 1885331 - DNA, 25 bp, Homo sapien
cacaacagcacttactactttccag

SEQ ID NO: 1885332 - DNA, 25 bp, Homo sapien
gggacttccagtttaaacatgacat

SEQ ID NO: 1885333 - DNA, 25 bp, Homo sapien
tcttagaagctgataatatttcacc

SEQ ID NO: 1885334 - DNA, 25 bp, Homo sapien
ctgactcagaggattttctttcgga

SEQ ID NO: 1885335 - DNA, 25 bp, Homo sapien
caaagtaatatgcacgagtgttgga

SEQ ID NO: 1885336 - DNA, 25 bp, Homo sapien
agatgaataaacgaacggtttgtcg

SEQ ID NO: 1885337 - DNA, 25 bp, Homo sapien
ttggttgtctgatcgttggatgtgt

SEQ ID NO: 1885338 - DNA, 25 bp, Homo sapien
tctgatcgttggatgtgtagatgaa

SEQ ID NO: 1885339 - DNA, 25 bp, Homo sapien
tgtagatgaataaacgaacggtttg

SEQ ID NO: 1885340 - DNA, 25 bp, Homo sapien
cgtggagatatcatcgcggctgagc

SEQ ID NO: 1885341 - DNA, 25 bp, Homo sapien
aacgcggagtcgcacttcagtctga

SEQ ID NO: 1885342 - DNA, 25 bp, Homo sapien
tagtagctcccggtgttcagcagcc

SEQ ID NO: 1885343 - DNA, 25 bp, Homo sapien
cagccggagactcggtgggatccat

SEQ ID NO: 1885344 - DNA, 25 bp, Homo sapien
aaaaggccgcaagaggaagagccag

SEQ ID NO: 1885345 - DNA, 25 bp, Homo sapien
ggctggcgctttctgttccccgaaa

SEQ ID NO: 1885346 - DNA, 25 bp, Homo sapien
atccgtttcaggaaaaggccgcaag

SEQ ID NO: 1885347 - DNA, 25 bp, Homo sapien
gcgctttctgttccccgaaagaaga

SEQ ID NO: 1885348 - DNA, 25 bp, Homo sapien
tcagcgtagagcactacagtccaga

SEQ ID NO: 1885349 - DNA, 25 bp, Homo sapien
gctggctcacgccttcttaggcaac

SEQ ID NO: 1885350 - DNA, 25 bp, Homo sapien
cacaggagttttggctgacctgggc

SEQ ID NO: 1885351 - DNA, 25 bp, Homo sapien
agtgtggagacccaatcagcgtaga

SEQ ID NO: 1885352 - DNA, 25 bp, Homo sapien
ccttaggtctttaatacatattgtg

SEQ ID NO: 1885353 - DNA, 25 bp, Homo sapien
ggtgtcagccaagaaatcactggca

SEQ ID NO: 1885354 - DNA, 25 bp, Homo sapien
cactggcaaagctaatgtcatgaag

SEQ ID NO: 1885355 - DNA, 25 bp, Homo sapien
ccccattgggtggtcttggtatgct

SEQ ID NO: 1885356 - DNA, 25 bp, Homo sapien
ccattttaggagaaggtctgggtca

SEQ ID NO: 1885357 - DNA, 25 bp, Homo sapien
ttaacagagcaacaagtgacctagc

SEQ ID NO: 1885358 - DNA, 25 bp, Homo sapien
gattaaagtggtcataggagctcca

SEQ ID NO: 1885359 - DNA, 25 bp, Homo sapien
gtttgatctcaacaagtgccaatga

SEQ ID NO: 1885360 - DNA, 25 bp, Homo sapien
tgcactacagttgatgggcgacaga

SEQ ID NO: 1885361 - DNA, 25 bp, Homo sapien
gagctctcgatgttctgaagtatga

SEQ ID NO: 1885362 - DNA, 25 bp, Homo sapien
tccagagcccttgaagaagtatact

SEQ ID NO: 1885363 - DNA, 25 bp, Homo sapien
tgacatggattcattagccaaggct

SEQ ID NO: 1885364 - DNA, 25 bp, Homo sapien
agtgccaactactatggagacagag

SEQ ID NO: 1885365 - DNA, 25 bp, Homo sapien
tagtgccaactactatggagacaga

SEQ ID NO: 1885366 - DNA, 25 bp, Homo sapien
gtagtgccaactactatggagacag

SEQ ID NO: 1885367 - DNA, 25 bp, Homo sapien
ggttcttccttgagtcactgccgag

SEQ ID NO: 1885368 - DNA, 25 bp, Homo sapien
gaagtcaggactgcagttagccgtt

SEQ ID NO: 1885369 - DNA, 25 bp, Homo sapien
tcgtgtcccactaagagcacatggg

SEQ ID NO: 1885370 - DNA, 25 bp, Homo sapien
tagtaggtctgaacaaatcgtgtcc

SEQ ID NO: 1885371 - DNA, 25 bp, Homo sapien
tgtaatgaataccagcaggtggtgc

SEQ ID NO: 1885372 - DNA, 25 bp, Homo sapien
tgctcaagccacagttgtctaagac

SEQ ID NO: 1885373 - DNA, 25 bp, Homo sapien
taagaggccttatctcttgggctgc

SEQ ID NO: 1885374 - DNA, 25 bp, Homo sapien
tacagacttgtctatggccaattca

SEQ ID NO: 1885375 - DNA, 25 bp, Homo sapien
aaaacaccaaattagcacatgcctg

SEQ ID NO: 1885376 - DNA, 25 bp, Homo sapien
aaacaccaaattagcacatgcctgt

SEQ ID NO: 1885377 - DNA, 25 bp, Homo sapien
agcatgtcctttaattttacctatc

SEQ ID NO: 1885378 - DNA, 25 bp, Homo sapien
tacctatccttcaaacttaagcaaa

SEQ ID NO: 1885379 - DNA, 25 bp, Homo sapien
acttttacatatgggaggtcaggca

SEQ ID NO: 1885380 - DNA, 25 bp, Homo sapien
aaacctttagacacttttacatatg

SEQ ID NO: 1885381 - DNA, 25 bp, Homo sapien
taaatgtctcggtgttgaccaaagg

SEQ ID NO: 1885382 - DNA, 25 bp, Homo sapien
taaaaggtattagactctgcaggag

SEQ ID NO: 1885383 - DNA, 25 bp, Homo sapien
tccactcatagggtgtacactagcc

SEQ ID NO: 1885384 - DNA, 25 bp, Homo sapien
gaagctttctatgcaacacaaggac

SEQ ID NO: 1885385 - DNA, 25 bp, Homo sapien
gaaggttttacgatgcattgttatc

SEQ ID NO: 1885386 - DNA, 25 bp, Homo sapien
ataacttaaaactgccacacgcaaa

SEQ ID NO: 1885387 - DNA, 25 bp, Homo sapien
cttaaaactgccacacgcaaaaaag

SEQ ID NO: 1885388 - DNA, 25 bp, Homo sapien
caaacagttctgagaccgttcttcc

SEQ ID NO: 1885389 - DNA, 25 bp, Homo sapien
ctgattaagagtggggtggcaggta

SEQ ID NO: 1885390 - DNA, 25 bp, Homo sapien
attaagagtggggtggcaggtatta

SEQ ID NO: 1885391 - DNA, 25 bp, Homo sapien
gtggggtggcaggtattagggataa

SEQ ID NO: 1885392 - DNA, 25 bp, Homo sapien
gagtggggtggcaggtattagggat

SEQ ID NO: 1885393 - DNA, 25 bp, Homo sapien
tttagccttctgagctttctgggca

SEQ ID NO: 1885394 - DNA, 25 bp, Homo sapien
agccttctgagctttctgggcagac

SEQ ID NO: 1885395 - DNA, 25 bp, Homo sapien
tcatttagccttctgagctttctgg

SEQ ID NO: 1885396 - DNA, 25 bp, Homo sapien
tagccttctgagctttctgggcaga

SEQ ID NO: 1885397 - DNA, 25 bp, Homo sapien
tggtgaccttgccagctccagcagc

SEQ ID NO: 1885398 - DNA, 25 bp, Homo sapien
ttggtgaccttgccagctccagcag

SEQ ID NO: 1885399 - DNA, 25 bp, Homo sapien
gacacccaccgcaactgtctgtctc

SEQ ID NO: 1885400 - DNA, 25 bp, Homo sapien
gctttgatgacacccaccgcaactg

SEQ ID NO: 1885401 - DNA, 25 bp, Homo sapien
tgtctcatatcacgaacagcaaagc

SEQ ID NO: 1885402 - DNA, 25 bp, Homo sapien
tctcatatcacgaacagcaaagcga

SEQ ID NO: 1885403 - DNA, 25 bp, Homo sapien
acccaaagtactgttcagttgtatt

SEQ ID NO: 1885404 - DNA, 25 bp, Homo sapien
cccaaagtactgttcagttgtattt

SEQ ID NO: 1885405 - DNA, 25 bp, Homo sapien
tacccaaagtactgttcagttgtat

SEQ ID NO: 1885406 - DNA, 25 bp, Homo sapien
ttacccaaagtactgttcagttgta

SEQ ID NO: 1885407 - DNA, 25 bp, Homo sapien
gagaagctctcaacacacatgggct

SEQ ID NO: 1885408 - DNA, 25 bp, Homo sapien
ccaaaggtggatagtctgagaagct

SEQ ID NO: 1885409 - DNA, 25 bp, Homo sapien
aaaggtggatagtctgagaagctct

SEQ ID NO: 1885410 - DNA, 25 bp, Homo sapien
gaagctctcaacacacatgggcttg

SEQ ID NO: 1885411 - DNA, 25 bp, Homo sapien
ccaatacaggggcatagccggcgct

SEQ ID NO: 1885412 - DNA, 25 bp, Homo sapien
atccaatacaggggcatagccggcg

SEQ ID NO: 1885413 - DNA, 25 bp, Homo sapien
atacaggggcatagccggcgcttat

SEQ ID NO: 1885414 - DNA, 25 bp, Homo sapien
aatacaggggcatagccggcgctta

SEQ ID NO: 1885415 - DNA, 25 bp, Homo sapien
aatccaaagtctcaaatgactttag

SEQ ID NO: 1885416 - DNA, 25 bp, Homo sapien
ttagcctctgcaataagttaatgtt

SEQ ID NO: 1885417 - DNA, 25 bp, Homo sapien
gactttagcctctgcaataagttaa

SEQ ID NO: 1885418 - DNA, 25 bp, Homo sapien
tcaaatgactttagcctctgcaata

SEQ ID NO: 1885419 - DNA, 25 bp, Homo sapien
gcaacgttgccacgacgaacatcct

SEQ ID NO: 1885420 - DNA, 25 bp, Homo sapien
accagcaacgttgccacgacgaaca

SEQ ID NO: 1885421 - DNA, 25 bp, Homo sapien
tcaccagcaacgttgccacgacgaa

SEQ ID NO: 1885422 - DNA, 25 bp, Homo sapien
cagcaacgttgccacgacgaacatc

SEQ ID NO: 1885423 - DNA, 25 bp, Homo sapien
tcgacagattttacttccgttgtaa

SEQ ID NO: 1885424 - DNA, 25 bp, Homo sapien
atttcgacagattttacttccgttg

SEQ ID NO: 1885425 - DNA, 25 bp, Homo sapien
tacttccgttgtaacgttgactgga

SEQ ID NO: 1885426 - DNA, 25 bp, Homo sapien
gtgcatttcgacagattttacttcc

SEQ ID NO: 1885427 - DNA, 25 bp, Homo sapien
tctccactcggccaacaggaacagt

SEQ ID NO: 1885428 - DNA, 25 bp, Homo sapien
ccagtctccactcggccaacaggaa

SEQ ID NO: 1885429 - DNA, 25 bp, Homo sapien
caccagtctccactcggccaacagg

SEQ ID NO: 1885430 - DNA, 25 bp, Homo sapien
cataccgggtttgagaacaccagtc

SEQ ID NO: 1885431 - DNA, 25 bp, Homo sapien
aaatatttacagcatactaaatacc

SEQ ID NO: 1885432 - DNA, 25 bp, Homo sapien
tatttacagcatactaaatacctat

SEQ ID NO: 1885433 - DNA, 25 bp, Homo sapien
aatatttacagcatactaaatacct

SEQ ID NO: 1885434 - DNA, 25 bp, Homo sapien
atatttacagcatactaaataccta

SEQ ID NO: 1885435 - DNA, 25 bp, Homo sapien
ggcagacagtactctatcaactcaa

SEQ ID NO: 1885436 - DNA, 25 bp, Homo sapien
gacagtactctatcaactcaaattc

SEQ ID NO: 1885437 - DNA, 25 bp, Homo sapien
tactctatcaactcaaattcaactt

SEQ ID NO: 1885438 - DNA, 25 bp, Homo sapien
tctatcaactcaaattcaactttgt

SEQ ID NO: 1885439 - DNA, 25 bp, Homo sapien
tggagaggcaggcgcaagggcttgt

SEQ ID NO: 1885440 - DNA, 25 bp, Homo sapien
catccttacgggtgactttccatcc

SEQ ID NO: 1885441 - DNA, 25 bp, Homo sapien
gaggcaggcgcaagggcttgtcagt

SEQ ID NO: 1885442 - DNA, 25 bp, Homo sapien
tggcattgccatccttacgggtgac

SEQ ID NO: 1885443 - DNA, 25 bp, Homo sapien
gccattcccagagctttttaacaat

SEQ ID NO: 1885444 - DNA, 25 bp, Homo sapien
caatttgtgtaagcatgaaatcgcc

SEQ ID NO: 1885445 - DNA, 25 bp, Homo sapien
gcatgaaatcgccattcccagagct

SEQ ID NO: 1885446 - DNA, 25 bp, Homo sapien
tgtgtaagcatgaaatcgccattcc

SEQ ID NO: 1885447 - DNA, 25 bp, Homo sapien
tgtgtcggggttgtagccaattttc

SEQ ID NO: 1885448 - DNA, 25 bp, Homo sapien
ggctccagcatgttgtcaccattcc

SEQ ID NO: 1885449 - DNA, 25 bp, Homo sapien
tgctactgtgtcggggttgtagcca

SEQ ID NO: 1885450 - DNA, 25 bp, Homo sapien
cacaaatgctactgtgtcggggttg

SEQ ID NO: 1885451 - DNA, 25 bp, Homo sapien
catgctctcgggtctgcccattctt

SEQ ID NO: 1885452 - DNA, 25 bp, Homo sapien
agaagggcatgctctcgggtctgcc

SEQ ID NO: 1885453 - DNA, 25 bp, Homo sapien
tccttaacaatttcctcatatctct

SEQ ID NO: 1885454 - DNA, 25 bp, Homo sapien
cttaacaatttcctcatatctcttc

SEQ ID NO: 1885455 - DNA, 25 bp, Homo sapien
caaagcaagccttttgggataaaga

SEQ ID NO: 1885456 - DNA, 25 bp, Homo sapien
gaaagcaaagacatatccctgtcaa

SEQ ID NO: 1885457 - DNA, 25 bp, Homo sapien
tatccctgtcaactctccaaatgac

SEQ ID NO: 1885458 - DNA, 25 bp, Homo sapien
aatgacaaaaccagtgtacaaagca

SEQ ID NO: 1885459 - DNA, 25 bp, Homo sapien
gtccctgtaatcatgtttttgataa

SEQ ID NO: 1885460 - DNA, 25 bp, Homo sapien
gtcctggggcatcaatgatagtcac

SEQ ID NO: 1885461 - DNA, 25 bp, Homo sapien
ttttgataaagtctctgtgtcctgg

SEQ ID NO: 1885462 - DNA, 25 bp, Homo sapien
ataaagtctctgtgtcctggggcat

SEQ ID NO: 1885463 - DNA, 25 bp, Homo sapien
taccacgttcacgctcagctttcag

SEQ ID NO: 1885464 - DNA, 25 bp, Homo sapien
atatcaatggtgataccacgttcac

SEQ ID NO: 1885465 - DNA, 25 bp, Homo sapien
atttccacaaggagatatcaatggt

SEQ ID NO: 1885466 - DNA, 25 bp, Homo sapien
tcaatggtgataccacgttcacgct

SEQ ID NO: 1885467 - DNA, 25 bp, Homo sapien
caagacccaggcatacttgaaggag

SEQ ID NO: 1885468 - DNA, 25 bp, Homo sapien
catacttgaaggagccctttcccat

SEQ ID NO: 1885469 - DNA, 25 bp, Homo sapien
gacccaggcatacttgaaggagccc

SEQ ID NO: 1885470 - DNA, 25 bp, Homo sapien
gcatacttgaaggagccctttccca

SEQ ID NO: 1885471 - DNA, 25 bp, Homo sapien
tcactttgggttacagaagcaacca

SEQ ID NO: 1885472 - DNA, 25 bp, Homo sapien
tagcaatacgattacagaagtcacc

SEQ ID NO: 1885473 - DNA, 25 bp, Homo sapien
taaggtcttaactattagcattcag

SEQ ID NO: 1885474 - DNA, 25 bp, Homo sapien
tccccagcccttaattggcagtttc

SEQ ID NO: 1885475 - DNA, 25 bp, Homo sapien
tagttctggggaaatcacctaatga

SEQ ID NO: 1885476 - DNA, 25 bp, Homo sapien
gtcgatgccaccgcatttatagatc

SEQ ID NO: 1885477 - DNA, 25 bp, Homo sapien
ttgtcgatgccaccgcatttataga

SEQ ID NO: 1885478 - DNA, 25 bp, Homo sapien
cgatgccaccgcatttatagatcag

SEQ ID NO: 1885479 - DNA, 25 bp, Homo sapien
ttttgtcgatgccaccgcatttata

SEQ ID NO: 1885480 - DNA, 25 bp, Homo sapien
caatgacgacaatgttgatatgagt

SEQ ID NO: 1885481 - DNA, 25 bp, Homo sapien
tgatatgagtcttttcctttcccat

SEQ ID NO: 1885482 - DNA, 25 bp, Homo sapien
aatgacgacaatgttgatatgagtc

SEQ ID NO: 1885483 - DNA, 25 bp, Homo sapien
tgttgatatgagtcttttcctttcc

SEQ ID NO: 1885484 - DNA, 25 bp, Homo sapien
ttccaaggagaattacatcaagtgc

SEQ ID NO: 1885485 - DNA, 25 bp, Homo sapien
tgccaagctggcctaacttcagtct

SEQ ID NO: 1885486 - DNA, 25 bp, Homo sapien
ggcttgagaatgaaccaagatccaa

SEQ ID NO: 1885487 - DNA, 25 bp, Homo sapien
aaaaaactttgaaccactgtctgag

SEQ ID NO: 1885488 - DNA, 25 bp, Homo sapien
actaatcgaggtgcctggacggcgc

SEQ ID NO: 1885489 - DNA, 25 bp, Homo sapien
tccaaaagctcgagaactaatcgag

SEQ ID NO: 1885490 - DNA, 25 bp, Homo sapien
cggcgcccggtactccgtggagtca

SEQ ID NO: 1885491 - DNA, 25 bp, Homo sapien
cgtggagtcacatgaagcgacggct

SEQ ID NO: 1885492 - DNA, 25 bp, Homo sapien
atctttccgctcacgcaactggtgc

SEQ ID NO: 1885493 - DNA, 25 bp, Homo sapien
gctcacgcaactggtgccgaccggg

SEQ ID NO: 1885494 - DNA, 25 bp, Homo sapien
tttccgctcacgcaactggtgccga

SEQ ID NO: 1885495 - DNA, 25 bp, Homo sapien
cggccatctttccgctcacgcaact

SEQ ID NO: 1885496 - DNA, 25 bp, Homo sapien
ccagtgtgcagatcttggcccgcat

SEQ ID NO: 1885497 - DNA, 25 bp, Homo sapien
agcttgagactacccccgtccgatt

SEQ ID NO: 1885498 - DNA, 25 bp, Homo sapien
gcctcgccgaacatgtgcgctggga

SEQ ID NO: 1885499 - DNA, 25 bp, Homo sapien
caaaaaccgaaataccagtgtgcag

SEQ ID NO: 1885500 - DNA, 25 bp, Homo sapien
gagacttatcgaaagcagcgagaca

SEQ ID NO: 1885501 - DNA, 25 bp, Homo sapien
gcgtcgcagcaggtcatcaaaaatt

SEQ ID NO: 1885502 - DNA, 25 bp, Homo sapien
gaagtaattcaaggcacgcaagggc

SEQ ID NO: 1885503 - DNA, 25 bp, Homo sapien
gaagctcgggatcaagaatcacgta

SEQ ID NO: 1885504 - DNA, 25 bp, Homo sapien
tactgcacttatatacggttctccc

SEQ ID NO: 1885505 - DNA, 25 bp, Homo sapien
aaagaacgttcacggcgactactgc

SEQ ID NO: 1885506 - DNA, 25 bp, Homo sapien
ttgcgaaaaagaacgttcacggcga

SEQ ID NO: 1885507 - DNA, 25 bp, Homo sapien
cgttcacggcgactactgcacttat

SEQ ID NO: 1885508 - DNA, 25 bp, Homo sapien
gcggagccagtacacgacatcactt

SEQ ID NO: 1885509 - DNA, 25 bp, Homo sapien
aaggcggagccagtacacgacatca

SEQ ID NO: 1885510 - DNA, 25 bp, Homo sapien
aaaaggcggagccagtacacgacat

SEQ ID NO: 1885511 - DNA, 25 bp, Homo sapien
gagccagtacacgacatcactttcc

SEQ ID NO: 1885512 - DNA, 25 bp, Homo sapien
taggcaccggttcaattgccgaccc

SEQ ID NO: 1885513 - DNA, 25 bp, Homo sapien
taccattgctggcttagctccaaag

SEQ ID NO: 1885514 - DNA, 25 bp, Homo sapien
aacgcagcgatctctgggttctacg

SEQ ID NO: 1885515 - DNA, 25 bp, Homo sapien
actgtgggcgatgtgcgctctgccc

SEQ ID NO: 1885516 - DNA, 25 bp, Homo sapien
tcgctagtccgggacaaatccctag

SEQ ID NO: 1885517 - DNA, 25 bp, Homo sapien
tccctagagcgtcttcctctgcggg

SEQ ID NO: 1885518 - DNA, 25 bp, Homo sapien
cgcccctcccgtgtggcaaggagta

SEQ ID NO: 1885519 - DNA, 25 bp, Homo sapien
agccttgccatctcgctagtccggg

SEQ ID NO: 1885520 - DNA, 25 bp, Homo sapien
ctgggggcctccttaacggctcacg

SEQ ID NO: 1885521 - DNA, 25 bp, Homo sapien
gactgggggcctccttaacggctca

SEQ ID NO: 1885522 - DNA, 25 bp, Homo sapien
ttatggaagcccgtaacacgtcatc

SEQ ID NO: 1885523 - DNA, 25 bp, Homo sapien
tgaaagcgacgaatccgctcctgtg

SEQ ID NO: 1885524 - DNA, 25 bp, Homo sapien
ttgcgagaggttcggctcgatggcc

SEQ ID NO: 1885525 - DNA, 25 bp, Homo sapien
tggaagcccgtaacacgtcatctcc

SEQ ID NO: 1885526 - DNA, 25 bp, Homo sapien
ctttgagcccatcggagccatatta

SEQ ID NO: 1885527 - DNA, 25 bp, Homo sapien
tagtcactggccacgagcattttct

SEQ ID NO: 1885528 - DNA, 25 bp, Homo sapien
ggagccatattattgtgcgttaggg

SEQ ID NO: 1885529 - DNA, 25 bp, Homo sapien
gccacgagcattttctcagggcaga

SEQ ID NO: 1885530 - DNA, 25 bp, Homo sapien
caccggggcgcaccctgcttcctag

SEQ ID NO: 1885531 - DNA, 25 bp, Homo sapien
gcgcgcaccggggcgcaccctgctt

SEQ ID NO: 1885532 - DNA, 25 bp, Homo sapien
cggggcgcaccctgcttcctaggga

SEQ ID NO: 1885533 - DNA, 25 bp, Homo sapien
cgcaccggggcgcaccctgcttcct

SEQ ID NO: 1885534 - DNA, 25 bp, Homo sapien
tcgctggcgtttttccagcgctggg

SEQ ID NO: 1885535 - DNA, 25 bp, Homo sapien
cacgtcgctggcgtttttccagcgc

SEQ ID NO: 1885536 - DNA, 25 bp, Homo sapien
ggccacgtcgctggcgtttttccag

SEQ ID NO: 1885537 - DNA, 25 bp, Homo sapien
tggcgtttttccagcgctgggtcac

SEQ ID NO: 1885538 - DNA, 25 bp, Homo sapien
ggttcccgcggcgaacagctgggtg

SEQ ID NO: 1885539 - DNA, 25 bp, Homo sapien
tcgagcctccgcagcgtcaggtcgc

SEQ ID NO: 1885540 - DNA, 25 bp, Homo sapien
gtggtatggatacgccgctcgagcc

SEQ ID NO: 1885541 - DNA, 25 bp, Homo sapien
tccgcagcgtcaggtcgccagggtc

SEQ ID NO: 1885542 - DNA, 25 bp, Homo sapien
catcaatggttagattattggcagc

SEQ ID NO: 1885543 - DNA, 25 bp, Homo sapien
acaggtcatcaatggttagattatt

SEQ ID NO: 1885544 - DNA, 25 bp, Homo sapien
ggtcatcaatggttagattattggc

SEQ ID NO: 1885545 - DNA, 25 bp, Homo sapien
caatggttagattattggcagcatc

SEQ ID NO: 1885546 - DNA, 25 bp, Homo sapien
caaacttcacttctgacaagtttgg

SEQ ID NO: 1885547 - DNA, 25 bp, Homo sapien
tggtaagctcttagatcatcatctt

SEQ ID NO: 1885548 - DNA, 25 bp, Homo sapien
gaaaaccaggtctcaataactagaa

SEQ ID NO: 1885549 - DNA, 25 bp, Homo sapien
ataactagaaaaccgctatggtaag

SEQ ID NO: 1885550 - DNA, 25 bp, Homo sapien
ttctgctatatctattggcaagctg

SEQ ID NO: 1885551 - DNA, 25 bp, Homo sapien
agctatggggattattttagctatc

SEQ ID NO: 1885552 - DNA, 25 bp, Homo sapien
ggtttgtgttccaagtgtgaagaca

SEQ ID NO: 1885553 - DNA, 25 bp, Homo sapien
tttgtgttccaagtgtgaagacatc

SEQ ID NO: 1885554 - DNA, 25 bp, Homo sapien
tctagtctgggtttgtgttccaagt

SEQ ID NO: 1885555 - DNA, 25 bp, Homo sapien
aacttgtgggaacagagcagtctgg

SEQ ID NO: 1885556 - DNA, 25 bp, Homo sapien
tgtaaaaattactaccgctgcactg

SEQ ID NO: 1885557 - DNA, 25 bp, Homo sapien
tctgggaaccgaacagcaggatttg

SEQ ID NO: 1885558 - DNA, 25 bp, Homo sapien
ggctttcaactgaggcagtcgttca

SEQ ID NO: 1885559 - DNA, 25 bp, Homo sapien
tgatcaggaagaagacgtataagcc

SEQ ID NO: 1885560 - DNA, 25 bp, Homo sapien
tcattccagttgtcagcattgtgca

SEQ ID NO: 1885561 - DNA, 25 bp, Homo sapien
tgtcacccctgatgtataagcctta

SEQ ID NO: 1885562 - DNA, 25 bp, Homo sapien
acctttgggttctgtgcatttggcc

SEQ ID NO: 1885563 - DNA, 25 bp, Homo sapien
tatttgctgcccaaatgaccctggc

SEQ ID NO: 1885564 - DNA, 25 bp, Homo sapien
ggcctcttggaggtacagcaaagac

SEQ ID NO: 1885565 - DNA, 25 bp, Homo sapien
cccagcccaggcgagttgatgtgtg

SEQ ID NO: 1885566 - DNA, 25 bp, Homo sapien
gcaaattcattatcctgtgaggtcc

SEQ ID NO: 1885567 - DNA, 25 bp, Homo sapien
tataatagatattgtaggccgggcg

SEQ ID NO: 1885568 - DNA, 25 bp, Homo sapien
actccgaggcttaagtgtcagcctc

SEQ ID NO: 1885569 - DNA, 25 bp, Homo sapien
tgcattataatagatattgtaggcc

SEQ ID NO: 1885570 - DNA, 25 bp, Homo sapien
aaagagagaagtgcattataataga

SEQ ID NO: 1885571 - DNA, 25 bp, Homo sapien
tgaaagcatgctcaacaaccacagc

SEQ ID NO: 1885572 - DNA, 25 bp, Homo sapien
taagccacataggtgttctgaaagc

SEQ ID NO: 1885573 - DNA, 25 bp, Homo sapien
taaagatgattaccctagtctcagg

SEQ ID NO: 1885574 - DNA, 25 bp, Homo sapien
tatttgtgattgactgggcatcgca

SEQ ID NO: 1885575 - DNA, 25 bp, Homo sapien
tacacattgatagcccctcagagga

SEQ ID NO: 1885576 - DNA, 25 bp, Homo sapien
ctgataaacgctgggcactctgacc

SEQ ID NO: 1885577 - DNA, 25 bp, Homo sapien
tactcagggctttatctacacattg

SEQ ID NO: 1885578 - DNA, 25 bp, Homo sapien
gaagagtcgacactggctctgggct

SEQ ID NO: 1885579 - DNA, 25 bp, Homo sapien
cgactagcaggcaggtatgtgaacc

SEQ ID NO: 1885580 - DNA, 25 bp, Homo sapien
cagttgccaggcgaaattatacagt

SEQ ID NO: 1885581 - DNA, 25 bp, Homo sapien
taagcaaaggtatcaggaggtctgt

SEQ ID NO: 1885582 - DNA, 25 bp, Homo sapien
gaactgtcctacttcatgttgcccg

SEQ ID NO: 1885583 - DNA, 25 bp, Homo sapien
tgtccatggtgatcattgagagccc

SEQ ID NO: 1885584 - DNA, 25 bp, Homo sapien
gtccatggtgatcattgagagccca

SEQ ID NO: 1885585 - DNA, 25 bp, Homo sapien
tccatggtgatcattgagagcccag

SEQ ID NO: 1885586 - DNA, 25 bp, Homo sapien
atagcagcagcaatatagaacacgg

SEQ ID NO: 1885587 - DNA, 25 bp, Homo sapien
agaacacggtttgccattctccaac

SEQ ID NO: 1885588 - DNA, 25 bp, Homo sapien
cgaatagtgtaaagaaaatggcacc

SEQ ID NO: 1885589 - DNA, 25 bp, Homo sapien
tggcgaatagtgtaaagaaaatggc

SEQ ID NO: 1885590 - DNA, 25 bp, Homo sapien
ccattcctggaatagtggcaaatgt

SEQ ID NO: 1885591 - DNA, 25 bp, Homo sapien
agtggcaaatgtatttgtgatgccc

SEQ ID NO: 1885592 - DNA, 25 bp, Homo sapien
tcagacttttagcaatgacgggccc

SEQ ID NO: 1885593 - DNA, 25 bp, Homo sapien
aatgacgggcccaaccattcctgga

SEQ ID NO: 1885594 - DNA, 25 bp, Homo sapien
acagcagtcctcattatctgaggca

SEQ ID NO: 1885595 - DNA, 25 bp, Homo sapien
agctgagaaccagtacagcagtcct

SEQ ID NO: 1885596 - DNA, 25 bp, Homo sapien
tcagtcagctgagaaccagtacagc

SEQ ID NO: 1885597 - DNA, 25 bp, Homo sapien
agcagtcctcattatctgaggcaca

SEQ ID NO: 1885598 - DNA, 25 bp, Homo sapien
ggatggctgctgaaccaattttatg

SEQ ID NO: 1885599 - DNA, 25 bp, Homo sapien
gacttaccaccttctggctggatgg

SEQ ID NO: 1885600 - DNA, 25 bp, Homo sapien
ccagagattctaataagacttcagg

SEQ ID NO: 1885601 - DNA, 25 bp, Homo sapien
gaacctgatgaatcctaagctacct

SEQ ID NO: 1885602 - DNA, 25 bp, Homo sapien
tgtgattttataagcagacccagtc

SEQ ID NO: 1885603 - DNA, 25 bp, Homo sapien
tgaagcccaggacttatttccatgg

SEQ ID NO: 1885604 - DNA, 25 bp, Homo sapien
ttagtaggcagctggatatcaactc

SEQ ID NO: 1885605 - DNA, 25 bp, Homo sapien
tcatgtgactcagtttgggtcaacc

SEQ ID NO: 1885606 - DNA, 25 bp, Homo sapien
ttgatatagttaggaaagcaacggc

SEQ ID NO: 1885607 - DNA, 25 bp, Homo sapien
agcaacggccaaagaataatcacag

SEQ ID NO: 1885608 - DNA, 25 bp, Homo sapien
ggagcaatatccagatggttgatgc

SEQ ID NO: 1885609 - DNA, 25 bp, Homo sapien
gcctcccagtgttgttgatatagtt

SEQ ID NO: 1885610 - DNA, 25 bp, Homo sapien
ttgaaatagggtcgcattctgttac

SEQ ID NO: 1885611 - DNA, 25 bp, Homo sapien
tttgaaatagggtcgcattctgtta

SEQ ID NO: 1885612 - DNA, 25 bp, Homo sapien
attttgaaatagggtcgcattctgt

SEQ ID NO: 1885613 - DNA, 25 bp, Homo sapien
aattctgcgaacacataaagttgaa

SEQ ID NO: 1885614 - DNA, 25 bp, Homo sapien
attttgcccttaaattgtcagcagc

SEQ ID NO: 1885615 - DNA, 25 bp, Homo sapien
gcagcttgaccagacaggatcatac

SEQ ID NO: 1885616 - DNA, 25 bp, Homo sapien
ggctaaaaattctgcgaacacataa

SEQ ID NO: 1885617 - DNA, 25 bp, Homo sapien
ctaaataaggcaatgaagataaaaa

SEQ ID NO: 1885618 - DNA, 25 bp, Homo sapien
taaataaggcaatgaagataaaaac

SEQ ID NO: 1885619 - DNA, 25 bp, Homo sapien
aaggcaatgaagataaaaacccatt

SEQ ID NO: 1885620 - DNA, 25 bp, Homo sapien
ataaggcaatgaagataaaaaccca

SEQ ID NO: 1885621 - DNA, 25 bp, Homo sapien
ggatctccttcatataagtaggcaa

SEQ ID NO: 1885622 - DNA, 25 bp, Homo sapien
agtccagttgtaagaaaagtgtgca

SEQ ID NO: 1885623 - DNA, 25 bp, Homo sapien
gatagcccaaagtggcagggatttt

SEQ ID NO: 1885624 - DNA, 25 bp, Homo sapien
aaagtgtgcaactacgatagcccaa

SEQ ID NO: 1885625 - DNA, 25 bp, Homo sapien
ccactgcccccagcgtaagtgattt

SEQ ID NO: 1885626 - DNA, 25 bp, Homo sapien
actgcccccagcgtaagtgatttat

SEQ ID NO: 1885627 - DNA, 25 bp, Homo sapien
gccactgcccccagcgtaagtgatt

SEQ ID NO: 1885628 - DNA, 25 bp, Homo sapien
tgcccccagcgtaagtgatttattt

SEQ ID NO: 1885629 - DNA, 25 bp, Homo sapien
gtcgtcccaactacttggtaggctg

SEQ ID NO: 1885630 - DNA, 25 bp, Homo sapien
tgagccaagatcatgctactgcact

SEQ ID NO: 1885631 - DNA, 25 bp, Homo sapien
aggtgggaggatggcttgaacccgg

SEQ ID NO: 1885632 - DNA, 25 bp, Homo sapien
cccgggaggcagagggaggctgcag

SEQ ID NO: 1885633 - DNA, 25 bp, Homo sapien
tctttggcaaagatcaagacaggtc

SEQ ID NO: 1885634 - DNA, 25 bp, Homo sapien
cttaaagttcagctgcttgtagaga

SEQ ID NO: 1885635 - DNA, 25 bp, Homo sapien
gatcaagacaggtcataattcttaa

SEQ ID NO: 1885636 - DNA, 25 bp, Homo sapien
tcataattcttaaagttcagctgct

SEQ ID NO: 1885637 - DNA, 25 bp, Homo sapien
actttggatgttcatttcatttgcc

SEQ ID NO: 1885638 - DNA, 25 bp, Homo sapien
cagacaatactttggatgttcattt

SEQ ID NO: 1885639 - DNA, 25 bp, Homo sapien
ttcatttgcctattctactttgtct

SEQ ID NO: 1885640 - DNA, 25 bp, Homo sapien
cctattctactttgtctagagcatg

SEQ ID NO: 1885641 - DNA, 25 bp, Homo sapien
tattccttttcataatgggaaattc

SEQ ID NO: 1885642 - DNA, 25 bp, Homo sapien
tcttaatgatgaaagaatgtattcc

SEQ ID NO: 1885643 - DNA, 25 bp, Homo sapien
tcataatgggaaattctcttgtgtt

SEQ ID NO: 1885644 - DNA, 25 bp, Homo sapien
ctcttgtgtttttgtggtgtgtcac

SEQ ID NO: 1885645 - DNA, 25 bp, Homo sapien
ctaaccagatccacaaaagaaacca

SEQ ID NO: 1885646 - DNA, 25 bp, Homo sapien
agatccacaaaagaaaccaaaatat

SEQ ID NO: 1885647 - DNA, 25 bp, Homo sapien
ccagatccacaaaagaaaccaaaat

SEQ ID NO: 1885648 - DNA, 25 bp, Homo sapien
taaccagatccacaaaagaaaccaa

SEQ ID NO: 1885649 - DNA, 25 bp, Homo sapien
caattcatatagtagcaaattattc

SEQ ID NO: 1885650 - DNA, 25 bp, Homo sapien
aagtccaattcatatagtagcaaat

SEQ ID NO: 1885651 - DNA, 25 bp, Homo sapien
ggaagagaaattactgtcccaagct

SEQ ID NO: 1885652 - DNA, 25 bp, Homo sapien
tatagtagcaaattattccagaaag

SEQ ID NO: 1885653 - DNA, 25 bp, Homo sapien
catatgaaatgctaagaagtttgct

SEQ ID NO: 1885654 - DNA, 25 bp, Homo sapien
tgcatatgaaatgctaagaagtttg

SEQ ID NO: 1885655 - DNA, 25 bp, Homo sapien
tatgaaatgctaagaagtttgcttc

SEQ ID NO: 1885656 - DNA, 25 bp, Homo sapien
tgaaatgctaagaagtttgcttctt

SEQ ID NO: 1885657 - DNA, 25 bp, Homo sapien
ttctatttagttgttggctggacac

SEQ ID NO: 1885658 - DNA, 25 bp, Homo sapien
atgaagaaggacgagagaacctgag

SEQ ID NO: 1885659 - DNA, 25 bp, Homo sapien
tctagtgctctgagtacaatgagtg

SEQ ID NO: 1885660 - DNA, 25 bp, Homo sapien
gacagcagtgccaaggatcccaaat

SEQ ID NO: 1885661 - DNA, 25 bp, Homo sapien
ggtccaactcctaaatctgcagcaa

SEQ ID NO: 1885662 - DNA, 25 bp, Homo sapien
aaaaggaaccgagaatccatccttg

SEQ ID NO: 1885663 - DNA, 25 bp, Homo sapien
tctggacacgccttggaagttctat

SEQ ID NO: 1885664 - DNA, 25 bp, Homo sapien
agttgtaacgagcagagcagcacac

SEQ ID NO: 1885665 - DNA, 25 bp, Homo sapien
catatccactaacgcaacactcaga

SEQ ID NO: 1885666 - DNA, 25 bp, Homo sapien
cagattcacacgtaatgcatacaca

SEQ ID NO: 1885667 - DNA, 25 bp, Homo sapien
aagagtatcctcaaaggctgggttt

SEQ ID NO: 1885668 - DNA, 25 bp, Homo sapien
tcctcaaaggctgggtttgaatcag

SEQ ID NO: 1885669 - DNA, 25 bp, Homo sapien
ctcgaagagtatcctcaaaggctgg

SEQ ID NO: 1885670 - DNA, 25 bp, Homo sapien
gagtatcctcaaaggctgggtttga

SEQ ID NO: 1885671 - DNA, 25 bp, Homo sapien
aactctgagtggctgataaatacct

SEQ ID NO: 1885672 - DNA, 25 bp, Homo sapien
gaaattagctaatccagagtctgaa

SEQ ID NO: 1885673 - DNA, 25 bp, Homo sapien
tatttggtaatgacacatcaacatc

SEQ ID NO: 1885674 - DNA, 25 bp, Homo sapien
tgctgactaaggataatcaacctct

SEQ ID NO: 1885675 - DNA, 25 bp, Homo sapien
gttaatgacggtttggatattgtga

SEQ ID NO: 1885676 - DNA, 25 bp, Homo sapien
gctgcaaccaaatgggcagttgtcc

SEQ ID NO: 1885677 - DNA, 25 bp, Homo sapien
gatattgtgaggcatgttttgtaaa

SEQ ID NO: 1885678 - DNA, 25 bp, Homo sapien
ggcatatggcagcatatctgactaa

SEQ ID NO: 1885679 - DNA, 25 bp, Homo sapien
gcaagaaaataaagtgttgggctgg

SEQ ID NO: 1885680 - DNA, 25 bp, Homo sapien
tcacatgctggcggatacgcagtgg

SEQ ID NO: 1885681 - DNA, 25 bp, Homo sapien
aggtcacatgctggcggatacgcag

SEQ ID NO: 1885682 - DNA, 25 bp, Homo sapien
cacatgctggcggatacgcagtggc

SEQ ID NO: 1885683 - DNA, 25 bp, Homo sapien
catgctggcggatacgcagtggcgg

SEQ ID NO: 1885684 - DNA, 25 bp, Homo sapien
tgctcagcactacccaaaataacca

SEQ ID NO: 1885685 - DNA, 25 bp, Homo sapien
attctctcccagttcgttcttccac

SEQ ID NO: 1885686 - DNA, 25 bp, Homo sapien
ggaccttagcccattcatttgatga

SEQ ID NO: 1885687 - DNA, 25 bp, Homo sapien
aaaataaccaccagctcagcgccgg

SEQ ID NO: 1885688 - DNA, 25 bp, Homo sapien
gctcggctccgcgatcacggtcgcg

SEQ ID NO: 1885689 - DNA, 25 bp, Homo sapien
cggctccgcgatcacggtcgcggcc

SEQ ID NO: 1885690 - DNA, 25 bp, Homo sapien
tcggctccgcgatcacggtcgcggc

SEQ ID NO: 1885691 - DNA, 25 bp, Homo sapien
gctccgcgatcacggtcgcggcccc

SEQ ID NO: 1885692 - DNA, 25 bp, Homo sapien
gactgagcggcactctgaacgggct

SEQ ID NO: 1885693 - DNA, 25 bp, Homo sapien
gggactgagcggcactctgaacggg

SEQ ID NO: 1885694 - DNA, 25 bp, Homo sapien
gcaggcgggactgagcggcactctg

SEQ ID NO: 1885695 - DNA, 25 bp, Homo sapien
cgaggcaggcgggactgagcggcac

SEQ ID NO: 1885696 - DNA, 25 bp, Homo sapien
ctcgcgcctgagcagctccggtccc

SEQ ID NO: 1885697 - DNA, 25 bp, Homo sapien
ccctcgcgcctgagcagctccggtc

SEQ ID NO: 1885698 - DNA, 25 bp, Homo sapien
ttaatgtcccctcgcgcctgagcag

SEQ ID NO: 1885699 - DNA, 25 bp, Homo sapien
gcctgagcagctccggtcccgccgg

SEQ ID NO: 1885700 - DNA, 25 bp, Homo sapien
cactcgaagcccctggacgaccccg

SEQ ID NO: 1885701 - DNA, 25 bp, Homo sapien
gcccccggtaccgctgcccactcga

SEQ ID NO: 1885702 - DNA, 25 bp, Homo sapien
cgcccccggtaccgctgcccactcg

SEQ ID NO: 1885703 - DNA, 25 bp, Homo sapien
ggtagaagaggcgtgcggtccgtgc

SEQ ID NO: 1885704 - DNA, 25 bp, Homo sapien
tagaagaggcgtgcggtccgtgctc

SEQ ID NO: 1885705 - DNA, 25 bp, Homo sapien
ccggtagaagaggcgtgcggtccgt

SEQ ID NO: 1885706 - DNA, 25 bp, Homo sapien
gaagaggcgtgcggtccgtgctctc

SEQ ID NO: 1885707 - DNA, 25 bp, Homo sapien
ccaggtctcgaaccggagacctcat

SEQ ID NO: 1885708 - DNA, 25 bp, Homo sapien
gccaggtctcgaaccggagacctca

SEQ ID NO: 1885709 - DNA, 25 bp, Homo sapien
gagcgccggcccgacagcccgaagc

SEQ ID NO: 1885710 - DNA, 25 bp, Homo sapien
gcaggtgtactcgccacctggcaga

SEQ ID NO: 1885711 - DNA, 25 bp, Homo sapien
tgtactcgccacctggcagagaagg

SEQ ID NO: 1885712 - DNA, 25 bp, Homo sapien
cgcggccacgtctagtccccgcggt

SEQ ID NO: 1885713 - DNA, 25 bp, Homo sapien
gagccggtgttcggacgaccgtctc

SEQ ID NO: 1885714 - DNA, 25 bp, Homo sapien
ggattggcgcaaagtgagcccgctc

SEQ ID NO: 1885715 - DNA, 25 bp, Homo sapien
aagcggagttctgggagttctcgta

SEQ ID NO: 1885716 - DNA, 25 bp, Homo sapien
cttgggttggactagggaagcggag

SEQ ID NO: 1885717 - DNA, 25 bp, Homo sapien
aatgactccaatccctactgacagg

SEQ ID NO: 1885718 - DNA, 25 bp, Homo sapien
tctagagcagagcaatagtttatcc

SEQ ID NO: 1885719 - DNA, 25 bp, Homo sapien
ctgacaggcctctttgtggaaataa

SEQ ID NO: 1885720 - DNA, 25 bp, Homo sapien
gattgattgatctactccctaaacc

SEQ ID NO: 1885721 - DNA, 25 bp, Homo sapien
tctgactgacttctatggacaccag

SEQ ID NO: 1885722 - DNA, 25 bp, Homo sapien
gttctgactgacttctatggacacc

SEQ ID NO: 1885723 - DNA, 25 bp, Homo sapien
gcagctgctagggaaactggacagt

SEQ ID NO: 1885724 - DNA, 25 bp, Homo sapien
gaaactggacagtgttctgactgac

SEQ ID NO: 1885725 - DNA, 25 bp, Homo sapien
ctccatgggagtgacgttgttgtct

SEQ ID NO: 1885726 - DNA, 25 bp, Homo sapien
tccatgggagtgacgttgttgtctg

SEQ ID NO: 1885727 - DNA, 25 bp, Homo sapien
ggttgagctactgcctctggttctt

SEQ ID NO: 1885728 - DNA, 25 bp, Homo sapien
tgttgtctggttgagctactgcctc

SEQ ID NO: 1885729 - DNA, 25 bp, Homo sapien
ggcaattaacactttctggacaaag

SEQ ID NO: 1885730 - DNA, 25 bp, Homo sapien
tctgggtagtggtaagactgtagca

SEQ ID NO: 1885731 - DNA, 25 bp, Homo sapien
caccttcatgtttctgccgtgttcc

SEQ ID NO: 1885732 - DNA, 25 bp, Homo sapien
gtactgagcagctactctacctgac

SEQ ID NO: 1885733 - DNA, 25 bp, Homo sapien
taaggacctttgcaagctgttcagc

SEQ ID NO: 1885734 - DNA, 25 bp, Homo sapien
aagtaaagcagaatcccagtcctcg

SEQ ID NO: 1885735 - DNA, 25 bp, Homo sapien
tctgtaagtcttctcgggaggcaac

SEQ ID NO: 1885736 - DNA, 25 bp, Homo sapien
cgttgggcatcaataactcctgggc

SEQ ID NO: 1885737 - DNA, 25 bp, Homo sapien
cctgggcatcgttggtagagcgcta

SEQ ID NO: 1885738 - DNA, 25 bp, Homo sapien
ggcgcgcccatttcagattactaaa

SEQ ID NO: 1885739 - DNA, 25 bp, Homo sapien
tctctcactctgctgttaggcgcgc

SEQ ID NO: 1885740 - DNA, 25 bp, Homo sapien
cagcagcgagaagcgccattgtaat

SEQ ID NO: 1885741 - DNA, 25 bp, Homo sapien
agttctgggaaggtgtatcaatgcc

SEQ ID NO: 1885742 - DNA, 25 bp, Homo sapien
gattcaaaagattgcttgtcactgt

SEQ ID NO: 1885743 - DNA, 25 bp, Homo sapien
gaaagaagatggcacagctattggc

SEQ ID NO: 1885744 - DNA, 25 bp, Homo sapien
tggcaaaacgtagtaaaagttcagc

SEQ ID NO: 1885745 - DNA, 25 bp, Homo sapien
tgtgccaaatgcgaagccttcaaac

SEQ ID NO: 1885746 - DNA, 25 bp, Homo sapien
caaatgcgaagccttcaaacaaggt

SEQ ID NO: 1885747 - DNA, 25 bp, Homo sapien
tcaggctgtgccaaatgcgaagcct

SEQ ID NO: 1885748 - DNA, 25 bp, Homo sapien
aatgcgaagccttcaaacaaggttt

SEQ ID NO: 1885749 - DNA, 25 bp, Homo sapien
gtactatgtatatctgttccacgat

SEQ ID NO: 1885750 - DNA, 25 bp, Homo sapien
tgttccacgatacttccttcttcac

SEQ ID NO: 1885751 - DNA, 25 bp, Homo sapien
ctgttccacgatacttccttcttca

SEQ ID NO: 1885752 - DNA, 25 bp, Homo sapien
tgtatatctgttccacgatacttcc

SEQ ID NO: 1885753 - DNA, 25 bp, Homo sapien
cgaggttattagaaggtgattttag

SEQ ID NO: 1885754 - DNA, 25 bp, Homo sapien
caggtctttgcgtgacccacgcact

SEQ ID NO: 1885755 - DNA, 25 bp, Homo sapien
gacccacgcactggtgctcatgttc

SEQ ID NO: 1885756 - DNA, 25 bp, Homo sapien
tatattcgaggttattagaaggtga

SEQ ID NO: 1885757 - DNA, 25 bp, Homo sapien
ttgcagggatggtgtacaacaggtc

SEQ ID NO: 1885758 - DNA, 25 bp, Homo sapien
ggtcctagcatgtatagctgcatag

SEQ ID NO: 1885759 - DNA, 25 bp, Homo sapien
tcacctgatctttgtgtggaagatc

SEQ ID NO: 1885760 - DNA, 25 bp, Homo sapien
gcatgtatagctgcatagatttctt

SEQ ID NO: 1885761 - DNA, 25 bp, Homo sapien
tatttcatttgacatgtctggcaga

SEQ ID NO: 1885762 - DNA, 25 bp, Homo sapien
tgttgtaaattctcccttggcaaga

SEQ ID NO: 1885763 - DNA, 25 bp, Homo sapien
gggtagttattatttgagtctgcca

SEQ ID NO: 1885764 - DNA, 25 bp, Homo sapien
cttgggtgcattggttttttgcgca

SEQ ID NO: 1885765 - DNA, 25 bp, Homo sapien
agtgcgtcctcttttatagtcatag

SEQ ID NO: 1885766 - DNA, 25 bp, Homo sapien
cccagtgcgtcctcttttatagtca

SEQ ID NO: 1885767 - DNA, 25 bp, Homo sapien
tatgtttctccccagtgcgtcctct

SEQ ID NO: 1885768 - DNA, 25 bp, Homo sapien
gtacttgaagtatgtttctccccag

SEQ ID NO: 1885769 - DNA, 25 bp, Homo sapien
cataaggcccagccatcctcttttt

SEQ ID NO: 1885770 - DNA, 25 bp, Homo sapien
taaggcccagccatcctctttttcc

SEQ ID NO: 1885771 - DNA, 25 bp, Homo sapien
tccataaggcccagccatcctcttt

SEQ ID NO: 1885772 - DNA, 25 bp, Homo sapien
ctccataaggcccagccatcctctt

SEQ ID NO: 1885773 - DNA, 25 bp, Homo sapien
gtcctggggtgggagtttcatctcc

SEQ ID NO: 1885774 - DNA, 25 bp, Homo sapien
tgagagagggaaggtcctggggtgg

SEQ ID NO: 1885775 - DNA, 25 bp, Homo sapien
aggtcctggggtgggagtttcatct

SEQ ID NO: 1885776 - DNA, 25 bp, Homo sapien
ctggtgagagagggaaggtcctggg

SEQ ID NO: 1885777 - DNA, 25 bp, Homo sapien
tatttcaaggactctgggaccccga

SEQ ID NO: 1885778 - DNA, 25 bp, Homo sapien
gcctattggttgaagggctgaaata

SEQ ID NO: 1885779 - DNA, 25 bp, Homo sapien
tctgcaggccctgtgttgaaagtgg

SEQ ID NO: 1885780 - DNA, 25 bp, Homo sapien
cagtgctgagcaatattaggtgtta

SEQ ID NO: 1885781 - DNA, 25 bp, Homo sapien
gctgtcaacagcagaaccatgattt

SEQ ID NO: 1885782 - DNA, 25 bp, Homo sapien
gtcaacagcagaaccatgattttgc

SEQ ID NO: 1885783 - DNA, 25 bp, Homo sapien
gactcacacttcagttgactgtgtg

SEQ ID NO: 1885784 - DNA, 25 bp, Homo sapien
cccaggactcacacttcagttgact

SEQ ID NO: 1885785 - DNA, 25 bp, Homo sapien
ggagaaggccctgtatccagcccca

SEQ ID NO: 1885786 - DNA, 25 bp, Homo sapien
tgtcgggtgagacgagctggctgtg

SEQ ID NO: 1885787 - DNA, 25 bp, Homo sapien
tgtgggggaccagtgctcacttatt

SEQ ID NO: 1885788 - DNA, 25 bp, Homo sapien
cagtgctcacttattaaagctgatc

SEQ ID NO: 1885789 - DNA, 25 bp, Homo sapien
ctgcattggctgtcgggtgagacga

SEQ ID NO: 1885790 - DNA, 25 bp, Homo sapien
tataggaaaacgcttgattgacata

SEQ ID NO: 1885791 - DNA, 25 bp, Homo sapien
tagtttagtgcattagttaaggtgc

SEQ ID NO: 1885792 - DNA, 25 bp, Homo sapien
taaggtgcgttcagtggcaagcacc

SEQ ID NO: 1885793 - DNA, 25 bp, Homo sapien
gaaaacgcttgattgacatagaaga

SEQ ID NO: 1885794 - DNA, 25 bp, Homo sapien
agagtttaggcgctgcacactggca

SEQ ID NO: 1885795 - DNA, 25 bp, Homo sapien
ctctcaacagtcagccagcaaggat

SEQ ID NO: 1885796 - DNA, 25 bp, Homo sapien
cacactggcaagcagctcctttgac

SEQ ID NO: 1885797 - DNA, 25 bp, Homo sapien
tctcaacagtcagccagcaaggatc

SEQ ID NO: 1885798 - DNA, 25 bp, Homo sapien
tagtgtatccaccatgtcttctcct

SEQ ID NO: 1885799 - DNA, 25 bp, Homo sapien
tgggcttagcatgcctatcctttgg

SEQ ID NO: 1885800 - DNA, 25 bp, Homo sapien
tgaagatgaatccagggtgttggct

SEQ ID NO: 1885801 - DNA, 25 bp, Homo sapien
tggattccaagtaggccagtctttg

SEQ ID NO: 1885802 - DNA, 25 bp, Homo sapien
ttgagtctcagtcctaaaagtggca

SEQ ID NO: 1885803 - DNA, 25 bp, Homo sapien
cagtcctaaaagtggcatcctgcac

SEQ ID NO: 1885804 - DNA, 25 bp, Homo sapien
tctcagtcctaaaagtggcatcctg

SEQ ID NO: 1885805 - DNA, 25 bp, Homo sapien
gagtctcagtcctaaaagtggcatc

SEQ ID NO: 1885806 - DNA, 25 bp, Homo sapien
ccctgtactgtgtgataaggcttat

SEQ ID NO: 1885807 - DNA, 25 bp, Homo sapien
tctgcagaaaccctgtactgtgtga

SEQ ID NO: 1885808 - DNA, 25 bp, Homo sapien
ttattggttgttgaccagtcactga

SEQ ID NO: 1885809 - DNA, 25 bp, Homo sapien
aaggcttattggttgttgaccagtc

SEQ ID NO: 1885810 - DNA, 25 bp, Homo sapien
tcaataagcaccgttgattgctttg

SEQ ID NO: 1885811 - DNA, 25 bp, Homo sapien
agcaccgttgattgctttgaaagaa

SEQ ID NO: 1885812 - DNA, 25 bp, Homo sapien
tgactgcattacatccactagatgg

SEQ ID NO: 1885813 - DNA, 25 bp, Homo sapien
tgacttgactgcattacatccacta

SEQ ID NO: 1885814 - DNA, 25 bp, Homo sapien
cttgccagtgtgcagcaccaaaact

SEQ ID NO: 1885815 - DNA, 25 bp, Homo sapien
tgtgcagcaccaaaactctagccat

SEQ ID NO: 1885816 - DNA, 25 bp, Homo sapien
tgcctggggtcgaaggagctgcttg

SEQ ID NO: 1885817 - DNA, 25 bp, Homo sapien
ggatccttgctggctgactgttgag

SEQ ID NO: 1885818 - DNA, 25 bp, Homo sapien
cagtagttgactgtggccaagaaca

SEQ ID NO: 1885819 - DNA, 25 bp, Homo sapien
aattaagccagtgatttgggagcca

SEQ ID NO: 1885820 - DNA, 25 bp, Homo sapien
cacttgtgtgggcaatagcaggatt

SEQ ID NO: 1885821 - DNA, 25 bp, Homo sapien
gatgtccgggtctgaattaagccag

SEQ ID NO: 1885822 - DNA, 25 bp, Homo sapien
aattcattaatggtgccttcaaatt

SEQ ID NO: 1885823 - DNA, 25 bp, Homo sapien
gaaagttggcatgcattagacttcc

SEQ ID NO: 1885824 - DNA, 25 bp, Homo sapien
catgcattagacttccactctgaag

SEQ ID NO: 1885825 - DNA, 25 bp, Homo sapien
aagtggaaagttggcatgcattaga

SEQ ID NO: 1885826 - DNA, 25 bp, Homo sapien
gttggcatgcattagacttccactc

SEQ ID NO: 1885827 - DNA, 25 bp, Homo sapien
aaggcctgcaccacgagtctaaaga

SEQ ID NO: 1885828 - DNA, 25 bp, Homo sapien
cactctggtatacttttcagagaga

SEQ ID NO: 1885829 - DNA, 25 bp, Homo sapien
gtctaaagaggcaactactatgagt

SEQ ID NO: 1885830 - DNA, 25 bp, Homo sapien
gagagaatgcaagaaaggcttgatc

SEQ ID NO: 1885831 - DNA, 25 bp, Homo sapien
ccagtttatgagcagagagccttac

SEQ ID NO: 1885832 - DNA, 25 bp, Homo sapien
tatgagcagagagccttactctgga

SEQ ID NO: 1885833 - DNA, 25 bp, Homo sapien
ccttgtaccagtttatgagcagaga

SEQ ID NO: 1885834 - DNA, 25 bp, Homo sapien
gagagccttactctggagctcttgg

SEQ ID NO: 1885835 - DNA, 25 bp, Homo sapien
tttcaggtgagtcatgacgatgagc

SEQ ID NO: 1885836 - DNA, 25 bp, Homo sapien
gctccagtggaaataagccagtgag

SEQ ID NO: 1885837 - DNA, 25 bp, Homo sapien
gctgattaagcagccaagctgtatc

SEQ ID NO: 1885838 - DNA, 25 bp, Homo sapien
tcaggacaagttttgatgtccatca

SEQ ID NO: 1885839 - DNA, 25 bp, Homo sapien
gatgaagattgatgctataacttta

SEQ ID NO: 1885840 - DNA, 25 bp, Homo sapien
tcaggaaagatgaagattgatgcta

SEQ ID NO: 1885841 - DNA, 25 bp, Homo sapien
gaaagatgaagattgatgctataac

SEQ ID NO: 1885842 - DNA, 25 bp, Homo sapien
tgaagattgatgctataactttatc

SEQ ID NO: 1885843 - DNA, 25 bp, Homo sapien
cagcacataagagtgactatacaat

SEQ ID NO: 1885844 - DNA, 25 bp, Homo sapien
agcacataagagtgactatacaatg

SEQ ID NO: 1885845 - DNA, 25 bp, Homo sapien
tataatcggaatataactgagtccc

SEQ ID NO: 1885846 - DNA, 25 bp, Homo sapien
tggaagagaaccctccttggaaaga

SEQ ID NO: 1885847 - DNA, 25 bp, Homo sapien
tataatgaaccctccttggaagaga

SEQ ID NO: 1885848 - DNA, 25 bp, Homo sapien
tgacccagggtctgcgttgtatcac

SEQ ID NO: 1885849 - DNA, 25 bp, Homo sapien
ctctgtacacatgaggcctccttct

SEQ ID NO: 1885850 - DNA, 25 bp, Homo sapien
tctgtacacatgaggcctccttctt

SEQ ID NO: 1885851 - DNA, 25 bp, Homo sapien
aagtcatcatggagagcaagatcac

SEQ ID NO: 1885852 - DNA, 25 bp, Homo sapien
cttgcttataagctttaccttgatg

SEQ ID NO: 1885853 - DNA, 25 bp, Homo sapien
agctttaccttgatgcatgtctaag

SEQ ID NO: 1885854 - DNA, 25 bp, Homo sapien
tataagctttaccttgatgcatgtc

SEQ ID NO: 1885855 - DNA, 25 bp, Homo sapien
gaaatactacactgctagagctcat

SEQ ID NO: 1885856 - DNA, 25 bp, Homo sapien
ggagagagaaatactacactgctag

SEQ ID NO: 1885857 - DNA, 25 bp, Homo sapien
aggagagagaaatactacactgcta

SEQ ID NO: 1885858 - DNA, 25 bp, Homo sapien
tcccataatagagagatggttgcgt

SEQ ID NO: 1885859 - DNA, 25 bp, Homo sapien
tagagagatggttgcgttcattcat

SEQ ID NO: 1885860 - DNA, 25 bp, Homo sapien
tttttcccataatagagagatggtt

SEQ ID NO: 1885861 - DNA, 25 bp, Homo sapien
cataatagagagatggttgcgttca

SEQ ID NO: 1885862 - DNA, 25 bp, Homo sapien
tatgccttgtcatgagggtaaccgg

SEQ ID NO: 1885863 - DNA, 25 bp, Homo sapien
cagggttgtgtcagacttctatgcc

SEQ ID NO: 1885864 - DNA, 25 bp, Homo sapien
gggcgctgaaggataggattttatt

SEQ ID NO: 1885865 - DNA, 25 bp, Homo sapien
cttcagtgaggcaaggatggaaatg

SEQ ID NO: 1885866 - DNA, 25 bp, Homo sapien
cacgcgtgcgcagttaccatttcta

SEQ ID NO: 1885867 - DNA, 25 bp, Homo sapien
atagacactgcttccacggcctgaa

SEQ ID NO: 1885868 - DNA, 25 bp, Homo sapien
ttctacttctggacgctctagccct

SEQ ID NO: 1885869 - DNA, 25 bp, Homo sapien
tggtgtacccaactccacgcgtgcg

SEQ ID NO: 1885870 - DNA, 25 bp, Homo sapien
tctctgtaggggcaattattatgag

SEQ ID NO: 1885871 - DNA, 25 bp, Homo sapien
aatgatggataagagacatgggtga

SEQ ID NO: 1885872 - DNA, 25 bp, Homo sapien
gaagtccctgtaatatgccaaatga

SEQ ID NO: 1885873 - DNA, 25 bp, Homo sapien
gataagagacatgggtgaaacagtt

SEQ ID NO: 1885874 - DNA, 25 bp, Homo sapien
taaattcctgctgggcgccaggcat

SEQ ID NO: 1885875 - DNA, 25 bp, Homo sapien
ttctctttaaattcctgctgggcgc

SEQ ID NO: 1885876 - DNA, 25 bp, Homo sapien
atattctctttaaattcctgctggg

SEQ ID NO: 1885877 - DNA, 25 bp, Homo sapien
ttaaattcctgctgggcgccaggca

SEQ ID NO: 1885878 - DNA, 25 bp, Homo sapien
tcctggcaagagaaaagccgtttct

SEQ ID NO: 1885879 - DNA, 25 bp, Homo sapien
gattcccagatcatgttcttaggct

SEQ ID NO: 1885880 - DNA, 25 bp, Homo sapien
gctctgtggcaatgttgaaactgat

SEQ ID NO: 1885881 - DNA, 25 bp, Homo sapien
gacttgtgaaactggactgaggcac

SEQ ID NO: 1885882 - DNA, 25 bp, Homo sapien
tgcacactggccgagggcattgctg

SEQ ID NO: 1885883 - DNA, 25 bp, Homo sapien
gggagctttgagagcactgccaaaa

SEQ ID NO: 1885884 - DNA, 25 bp, Homo sapien
tacttgtagtagtgtgctagagtgc

SEQ ID NO: 1885885 - DNA, 25 bp, Homo sapien
tcattgcttatactggcagagagaa

SEQ ID NO: 1885886 - DNA, 25 bp, Homo sapien
ctgcattcatatctatctttggcat

SEQ ID NO: 1885887 - DNA, 25 bp, Homo sapien
ggctcttttaaagctgctatagcac

SEQ ID NO: 1885888 - DNA, 25 bp, Homo sapien
agtaaggggctcttttaaagctgct

SEQ ID NO: 1885889 - DNA, 25 bp, Homo sapien
aagctgctatagcactttctgattt

SEQ ID NO: 1885890 - DNA, 25 bp, Homo sapien
cttgtgccttgtgttgtgcatttga

SEQ ID NO: 1885891 - DNA, 25 bp, Homo sapien
taaatgaacgagaccttgcaattct

SEQ ID NO: 1885892 - DNA, 25 bp, Homo sapien
cattataaatgaacgagaccttgca

SEQ ID NO: 1885893 - DNA, 25 bp, Homo sapien
cttggcattataaatgaacgagacc

SEQ ID NO: 1885894 - DNA, 25 bp, Homo sapien
tgaacgagaccttgcaattctgcat

SEQ ID NO: 1885895 - DNA, 25 bp, Homo sapien
tttgtatagcccagtgaggaaagcc

SEQ ID NO: 1885896 - DNA, 25 bp, Homo sapien
gaagtaccctaattgctatgttcgc

SEQ ID NO: 1885897 - DNA, 25 bp, Homo sapien
tccgtggaggttgtacaagatgccc

SEQ ID NO: 1885898 - DNA, 25 bp, Homo sapien
cgcataattaagtcttctggaacag

SEQ ID NO: 1885899 - DNA, 25 bp, Homo sapien
cctggtcaaattttgggctgagttt

SEQ ID NO: 1885900 - DNA, 25 bp, Homo sapien
atttatgtgatgaaacctggtcaaa

SEQ ID NO: 1885901 - DNA, 25 bp, Homo sapien
gatgaaacctggtcaaattttgggc

SEQ ID NO: 1885902 - DNA, 25 bp, Homo sapien
tgtgatgaaacctggtcaaattttg

SEQ ID NO: 1885903 - DNA, 25 bp, Homo sapien
acacttggagattctgcaaagaggc

SEQ ID NO: 1885904 - DNA, 25 bp, Homo sapien
aagtgtccacacttggagattctgc

SEQ ID NO: 1885905 - DNA, 25 bp, Homo sapien
gcaatgattctttatgcagcccata

SEQ ID NO: 1885906 - DNA, 25 bp, Homo sapien
gggatggccatccaagtgtccacac

SEQ ID NO: 1885907 - DNA, 25 bp, Homo sapien
ttgtttaagagactgaaagaacctg

SEQ ID NO: 1885908 - DNA, 25 bp, Homo sapien
cttgtcaccttgtttaagagactga

SEQ ID NO: 1885909 - DNA, 25 bp, Homo sapien
caccttgtttaagagactgaaagaa

SEQ ID NO: 1885910 - DNA, 25 bp, Homo sapien
ctgaaagaacctgacctttccttct

SEQ ID NO: 1885911 - DNA, 25 bp, Homo sapien
cagagtcttatgttcccgtgcagca

SEQ ID NO: 1885912 - DNA, 25 bp, Homo sapien
ggacagctaggcatccatgcagtaa

SEQ ID NO: 1885913 - DNA, 25 bp, Homo sapien
ttggagaagttccatgaccgccagg

SEQ ID NO: 1885914 - DNA, 25 bp, Homo sapien
ccagtgcatcgagcgctgccatgca

SEQ ID NO: 1885915 - DNA, 25 bp, Homo sapien
gaaatagaagtccttgccagtggcc

SEQ ID NO: 1885916 - DNA, 25 bp, Homo sapien
aatagaagtccttgccagtggccat

SEQ ID NO: 1885917 - DNA, 25 bp, Homo sapien
ccattgggaaatagaagtccttgcc

SEQ ID NO: 1885918 - DNA, 25 bp, Homo sapien
gggaaatagaagtccttgccagtgg

SEQ ID NO: 1885919 - DNA, 25 bp, Homo sapien
cctgatggagtttgaggagagatat

SEQ ID NO: 1885920 - DNA, 25 bp, Homo sapien
taccagaagggtcatcacaccattt

SEQ ID NO: 1885921 - DNA, 25 bp, Homo sapien
gaaggttagacctgatggagtttga

SEQ ID NO: 1885922 - DNA, 25 bp, Homo sapien
ggtaccaataggctggaaggttaga

SEQ ID NO: 1885923 - DNA, 25 bp, Homo sapien
ttgtgtaggccagaagtctaggtac

SEQ ID NO: 1885924 - DNA, 25 bp, Homo sapien
caagtggtccgcctttctgggtctc

SEQ ID NO: 1885925 - DNA, 25 bp, Homo sapien
gaaagcttattgactgagctcccca

SEQ ID NO: 1885926 - DNA, 25 bp, Homo sapien
ccaagttcattgtttgtaggcagaa

SEQ ID NO: 1885927 - DNA, 25 bp, Homo sapien
gcccctagtgtttgactgtcagtgt

SEQ ID NO: 1885928 - DNA, 25 bp, Homo sapien
tttcatccctaataaaatgctgcca

SEQ ID NO: 1885929 - DNA, 25 bp, Homo sapien
acttacttgtttacctgaaggctgg

SEQ ID NO: 1885930 - DNA, 25 bp, Homo sapien
aactgactctacatgctgaaccaag

SEQ ID NO: 1885931 - DNA, 25 bp, Homo sapien
aaagaacttcatcaacttgaacatt

SEQ ID NO: 1885932 - DNA, 25 bp, Homo sapien
ttcacaagccaatggttgcttgtat

SEQ ID NO: 1885933 - DNA, 25 bp, Homo sapien
gaacttcatcaacttgaacattttc

SEQ ID NO: 1885934 - DNA, 25 bp, Homo sapien
tcacaagccaatggttgcttgtatt

SEQ ID NO: 1885935 - DNA, 25 bp, Homo sapien
cttcactaggatattctatgctttc

SEQ ID NO: 1885936 - DNA, 25 bp, Homo sapien
tctacgtcattgcttatgagtctca

SEQ ID NO: 1885937 - DNA, 25 bp, Homo sapien
ttctatgctttctacgtcattgctt

SEQ ID NO: 1885938 - DNA, 25 bp, Homo sapien
tatgctttctacgtcattgcttatg

SEQ ID NO: 1885939 - DNA, 25 bp, Homo sapien
tctcattgatggaggagtaaggaca

SEQ ID NO: 1885940 - DNA, 25 bp, Homo sapien
tccctttgacacaatctcattgatg

SEQ ID NO: 1885941 - DNA, 25 bp, Homo sapien
cacaatctcattgatggaggagtaa

SEQ ID NO: 1885942 - DNA, 25 bp, Homo sapien
ctcatttcatctccctttgacacaa

SEQ ID NO: 1885943 - DNA, 25 bp, Homo sapien
tgtttatcttttggagaactgactt

SEQ ID NO: 1885944 - DNA, 25 bp, Homo sapien
taatagtccccattatcttttgtat

SEQ ID NO: 1885945 - DNA, 25 bp, Homo sapien
cttcataggttgtatatatccagga

SEQ ID NO: 1885946 - DNA, 25 bp, Homo sapien
cccttttcatgtatgcttttgcata

SEQ ID NO: 1885947 - DNA, 25 bp, Homo sapien
ctcctgtggagcaaatgtggggata

SEQ ID NO: 1885948 - DNA, 25 bp, Homo sapien
tcaatgagtactgggcctagatgaa

SEQ ID NO: 1885949 - DNA, 25 bp, Homo sapien
atgagtactgggcctagatgaagga

SEQ ID NO: 1885950 - DNA, 25 bp, Homo sapien
tcctgtggagcaaatgtggggatac

SEQ ID NO: 1885951 - DNA, 25 bp, Homo sapien
gacaacctatggtgtttgaacttgg

SEQ ID NO: 1885952 - DNA, 25 bp, Homo sapien
tgccggagattttagagtcctcaag

SEQ ID NO: 1885953 - DNA, 25 bp, Homo sapien
ttataggccgtggaaagttgccgga

SEQ ID NO: 1885954 - DNA, 25 bp, Homo sapien
cctcaagtgacatgatgaaagggtt

SEQ ID NO: 1885955 - DNA, 25 bp, Homo sapien
ctgcattgaggtcaagctgtacgtt

SEQ ID NO: 1885956 - DNA, 25 bp, Homo sapien
ctctgttctttgacgtgactgcatt

SEQ ID NO: 1885957 - DNA, 25 bp, Homo sapien
tctttgacgtgactgcattgaggtc

SEQ ID NO: 1885958 - DNA, 25 bp, Homo sapien
gaggtcaagctgtacgttgtgttca

SEQ ID NO: 1885959 - DNA, 25 bp, Homo sapien
tgtttgcagaccaaactgcggtaca

SEQ ID NO: 1885960 - DNA, 25 bp, Homo sapien
atgtctaaaaccaagcagctgtacc

SEQ ID NO: 1885961 - DNA, 25 bp, Homo sapien
gaattctgattgtaagctgcttgag

SEQ ID NO: 1885962 - DNA, 25 bp, Homo sapien
actgcctgagttctcagccagaggg

SEQ ID NO: 1885963 - DNA, 25 bp, Homo sapien
gctcactgccacctgattgtcttca

SEQ ID NO: 1885964 - DNA, 25 bp, Homo sapien
ttcagcggagacacttaagtacaat

SEQ ID NO: 1885965 - DNA, 25 bp, Homo sapien
atgattgtgaacagagacccatggg

SEQ ID NO: 1885966 - DNA, 25 bp, Homo sapien
gagtggataggacttattggttgat

SEQ ID NO: 1885967 - DNA, 25 bp, Homo sapien
tggataggacttattggttgatagg

SEQ ID NO: 1885968 - DNA, 25 bp, Homo sapien
ggtgtgagtggataggacttattgg

SEQ ID NO: 1885969 - DNA, 25 bp, Homo sapien
tgacatgcaaattgggtcttagaaa

SEQ ID NO: 1885970 - DNA, 25 bp, Homo sapien
cattgcctgttcaaatcggcattct

SEQ ID NO: 1885971 - DNA, 25 bp, Homo sapien
caaatgcattgcctgttcaaatcgg

SEQ ID NO: 1885972 - DNA, 25 bp, Homo sapien
gttcaaatcggcattctttgatcat

SEQ ID NO: 1885973 - DNA, 25 bp, Homo sapien
ctgttcaaatgcattgcctgttcaa

SEQ ID NO: 1885974 - DNA, 25 bp, Homo sapien
ttaattggtagacaagagttaggta

SEQ ID NO: 1885975 - DNA, 25 bp, Homo sapien
ggccattctcacaaccaaagtcata

SEQ ID NO: 1885976 - DNA, 25 bp, Homo sapien
agtcatacactttaattggtagaca

SEQ ID NO: 1885977 - DNA, 25 bp, Homo sapien
gcagagagtttgaggtggtttttcc

SEQ ID NO: 1885978 - DNA, 25 bp, Homo sapien
aaacttaggaccagccaaatataca

SEQ ID NO: 1885979 - DNA, 25 bp, Homo sapien
aggagagactccttaacttactcca

SEQ ID NO: 1885980 - DNA, 25 bp, Homo sapien
aatttcccaaggctgaacaagggag

SEQ ID NO: 1885981 - DNA, 25 bp, Homo sapien
ctccttaacttactccatgaggcca

SEQ ID NO: 1885982 - DNA, 25 bp, Homo sapien
gggcattacgaaggcatcagtgaaa

SEQ ID NO: 1885983 - DNA, 25 bp, Homo sapien
gaaagtgatataaacatactgttgt

SEQ ID NO: 1885984 - DNA, 25 bp, Homo sapien
ccagttagcaggaacatagatgtca

SEQ ID NO: 1885985 - DNA, 25 bp, Homo sapien
tatttcagtcaaataccagttagca

SEQ ID NO: 1885986 - DNA, 25 bp, Homo sapien
aatatagacgtgaatatggaaactg

SEQ ID NO: 1885987 - DNA, 25 bp, Homo sapien
ttctggcatgacaaatatagacgtg

SEQ ID NO: 1885988 - DNA, 25 bp, Homo sapien
tgatgtaaagcctgaatccctgaag

SEQ ID NO: 1885989 - DNA, 25 bp, Homo sapien
cctctccagacgctgacattccttt

SEQ ID NO: 1885990 - DNA, 25 bp, Homo sapien
ccatctaaagtgtcctaaggcacag

SEQ ID NO: 1885991 - DNA, 25 bp, Homo sapien
tatttgtgactaggagagacagcca

SEQ ID NO: 1885992 - DNA, 25 bp, Homo sapien
cgtttgtccttaaggccagaccaca

SEQ ID NO: 1885993 - DNA, 25 bp, Homo sapien
ccaggactcagctttacgcaattgc

SEQ ID NO: 1885994 - DNA, 25 bp, Homo sapien
tcgtgcctagacaagcctctcaagc

SEQ ID NO: 1885995 - DNA, 25 bp, Homo sapien
taataagtttcaccagggctctctg

SEQ ID NO: 1885996 - DNA, 25 bp, Homo sapien
tcttcctttcattgctcgtgcctag

SEQ ID NO: 1885997 - DNA, 25 bp, Homo sapien
tgaatattttgcccatggacagaaa

SEQ ID NO: 1885998 - DNA, 25 bp, Homo sapien
gaatctcctgtctctgttgatgcca

SEQ ID NO: 1885999 - DNA, 25 bp, Homo sapien
tgctgcaagtagtgtccttggccac

SEQ ID NO: 1886000 - DNA, 25 bp, Homo sapien
tggccactggttagcacccaccatt

SEQ ID NO: 1886001 - DNA, 25 bp, Homo sapien
tacattcgccgctcattgtttgcgg

SEQ ID NO: 1886002 - DNA, 25 bp, Homo sapien
tagttatttgggtagcctgtgggcc

SEQ ID NO: 1886003 - DNA, 25 bp, Homo sapien
agttatttgggtagcctgtgggcct

SEQ ID NO: 1886004 - DNA, 25 bp, Homo sapien
acacgtgtagttatttgggtagcct

SEQ ID NO: 1886005 - DNA, 25 bp, Homo sapien
cgtgtagttatttgggtagcctgtg

SEQ ID NO: 1886006 - DNA, 25 bp, Homo sapien
aagatacatgccccaaatgtccact

SEQ ID NO: 1886007 - DNA, 25 bp, Homo sapien
gatacatgccccaaatgtccactta

SEQ ID NO: 1886008 - DNA, 25 bp, Homo sapien
atacatgccccaaatgtccacttac

SEQ ID NO: 1886009 - DNA, 25 bp, Homo sapien
agatacatgccccaaatgtccactt

SEQ ID NO: 1886010 - DNA, 25 bp, Homo sapien
gccaccaagtcaatctgctgaaagg

SEQ ID NO: 1886011 - DNA, 25 bp, Homo sapien
gatggcatgtaagaaccagcaccaa

SEQ ID NO: 1886012 - DNA, 25 bp, Homo sapien
tggaggatggcatgtaagaaccagc

SEQ ID NO: 1886013 - DNA, 25 bp, Homo sapien
gaggatggcatgtaagaaccagcac

SEQ ID NO: 1886014 - DNA, 25 bp, Homo sapien
gcatgtaagaaccagcaccaaagcc

SEQ ID NO: 1886015 - DNA, 25 bp, Homo sapien
agcttggacatctgtatcagaaaag

SEQ ID NO: 1886016 - DNA, 25 bp, Homo sapien
atacagggcagagcaactcgactca

SEQ ID NO: 1886017 - DNA, 25 bp, Homo sapien
ctatacagggcagagcaactcgact

SEQ ID NO: 1886018 - DNA, 25 bp, Homo sapien
acagggcagagcaactcgactcact

SEQ ID NO: 1886019 - DNA, 25 bp, Homo sapien
gggcagagcaactcgactcactcat

SEQ ID NO: 1886020 - DNA, 25 bp, Homo sapien
cttatgaaggagaacatgtggaatt

SEQ ID NO: 1886021 - DNA, 25 bp, Homo sapien
tacacttgcacaggacgtaatcttg

SEQ ID NO: 1886022 - DNA, 25 bp, Homo sapien
taggccctagtgcatatagtttcac

SEQ ID NO: 1886023 - DNA, 25 bp, Homo sapien
caatgggattgctgaaccaaaggat

SEQ ID NO: 1886024 - DNA, 25 bp, Homo sapien
tgaaacctcttagggatgatcagat

SEQ ID NO: 1886025 - DNA, 25 bp, Homo sapien
gaaacctcttagggatgatcagatt

SEQ ID NO: 1886026 - DNA, 25 bp, Homo sapien
cttgaaacctcttagggatgatcag

SEQ ID NO: 1886027 - DNA, 25 bp, Homo sapien
ttgaaacctcttagggatgatcaga

SEQ ID NO: 1886028 - DNA, 25 bp, Homo sapien
ccttcgcaaagaaagaccagaagag

SEQ ID NO: 1886029 - DNA, 25 bp, Homo sapien
gcacagactgtcaaattggataaag

SEQ ID NO: 1886030 - DNA, 25 bp, Homo sapien
aaggcacagactgtcaaattggata

SEQ ID NO: 1886031 - DNA, 25 bp, Homo sapien
ggcacagactgtcaaattggataaa

SEQ ID NO: 1886032 - DNA, 25 bp, Homo sapien
taaaaggcacagactgtcaaattgg

SEQ ID NO: 1886033 - DNA, 25 bp, Homo sapien
gcttctttgcaaggccgatgggatc

SEQ ID NO: 1886034 - DNA, 25 bp, Homo sapien
gcatcatttagggtgcagggcttct

SEQ ID NO: 1886035 - DNA, 25 bp, Homo sapien
ttacagctgtgcatcatttagggtg

SEQ ID NO: 1886036 - DNA, 25 bp, Homo sapien
aaggccgatgggatcctgggctaca

SEQ ID NO: 1886037 - DNA, 25 bp, Homo sapien
ctttttcgtgtgtgggaagaactat

SEQ ID NO: 1886038 - DNA, 25 bp, Homo sapien
cgtgtgtgggaagaactatgcacat

SEQ ID NO: 1886039 - DNA, 25 bp, Homo sapien
ttcgtgtgtgggaagaactatgcac

SEQ ID NO: 1886040 - DNA, 25 bp, Homo sapien
tttcgtgtgtgggaagaactatgca

SEQ ID NO: 1886041 - DNA, 25 bp, Homo sapien
tttcacaacacatgctggaagctgt

SEQ ID NO: 1886042 - DNA, 25 bp, Homo sapien
cttacgaatacttgccatgacttgc

SEQ ID NO: 1886043 - DNA, 25 bp, Homo sapien
tatcctttgttgattatagcagtaa

SEQ ID NO: 1886044 - DNA, 25 bp, Homo sapien
tcagcatgtgtcagatgaagttaat

SEQ ID NO: 1886045 - DNA, 25 bp, Homo sapien
cacttagaccgtactgtttcatact

SEQ ID NO: 1886046 - DNA, 25 bp, Homo sapien
ccatcataaatcatgtgttcattca

SEQ ID NO: 1886047 - DNA, 25 bp, Homo sapien
gccatcataaatcatgtgttcattc

SEQ ID NO: 1886048 - DNA, 25 bp, Homo sapien
atttcacttagaccgtactgtttca

SEQ ID NO: 1886049 - DNA, 25 bp, Homo sapien
tgctcagatcatgattgggatacct

SEQ ID NO: 1886050 - DNA, 25 bp, Homo sapien
ttttatgattcctcagaaacagatt

SEQ ID NO: 1886051 - DNA, 25 bp, Homo sapien
tgttttcccaagaatattgctcaga

SEQ ID NO: 1886052 - DNA, 25 bp, Homo sapien
gggatacctggtacttcttttatga

SEQ ID NO: 1886053 - DNA, 25 bp, Homo sapien
tcagtactctccaaaagattccttt

SEQ ID NO: 1886054 - DNA, 25 bp, Homo sapien
ttcaaaagaggttagccccttcaca

SEQ ID NO: 1886055 - DNA, 25 bp, Homo sapien
agattcctttaaaccgctgtgttct

SEQ ID NO: 1886056 - DNA, 25 bp, Homo sapien
taaaccgctgtgttcttcaaaagag

SEQ ID NO: 1886057 - DNA, 25 bp, Homo sapien
gatcaggattgtctccctgccctgt

SEQ ID NO: 1886058 - DNA, 25 bp, Homo sapien
cctagacacatctttggatcaggat

SEQ ID NO: 1886059 - DNA, 25 bp, Homo sapien
tcaggccaggtttggctgacaggcc

SEQ ID NO: 1886060 - DNA, 25 bp, Homo sapien
tgacaggcccagcaagagtttccag

SEQ ID NO: 1886061 - DNA, 25 bp, Homo sapien
ctggctccacggttttccctgactc

SEQ ID NO: 1886062 - DNA, 25 bp, Homo sapien
tggctccacggttttccctgactcc

SEQ ID NO: 1886063 - DNA, 25 bp, Homo sapien
ggcatatccatgaccactgtaatga

SEQ ID NO: 1886064 - DNA, 25 bp, Homo sapien
catgtccctgatattcagtgaaaat

SEQ ID NO: 1886065 - DNA, 25 bp, Homo sapien
aatttagcctctcatcatgtccctg

SEQ ID NO: 1886066 - DNA, 25 bp, Homo sapien
cagtgaaaatgtccctggaaaactc

SEQ ID NO: 1886067 - DNA, 25 bp, Homo sapien
tccacctacaagcttatgaaacatt

SEQ ID NO: 1886068 - DNA, 25 bp, Homo sapien
cacctacaagcttatgaaacattac

SEQ ID NO: 1886069 - DNA, 25 bp, Homo sapien
ccatccacctacaagcttatgaaac

SEQ ID NO: 1886070 - DNA, 25 bp, Homo sapien
catccacctacaagcttatgaaaca

SEQ ID NO: 1886071 - DNA, 25 bp, Homo sapien
gaatgttacatgcaccataagaccc

SEQ ID NO: 1886072 - DNA, 25 bp, Homo sapien
cagaatgttacatgcaccataagac

SEQ ID NO: 1886073 - DNA, 25 bp, Homo sapien
atgttacatgcaccataagacccac

SEQ ID NO: 1886074 - DNA, 25 bp, Homo sapien
tctccagaatgttacatgcaccata

SEQ ID NO: 1886075 - DNA, 25 bp, Homo sapien
gggatgtttctcgagttgttggcat

SEQ ID NO: 1886076 - DNA, 25 bp, Homo sapien
gcattctctccataagctccagcag

SEQ ID NO: 1886077 - DNA, 25 bp, Homo sapien
cttcccctgaaaagcagcattctct

SEQ ID NO: 1886078 - DNA, 25 bp, Homo sapien
cagtggggatgtttctcgagttgtt

SEQ ID NO: 1886079 - DNA, 25 bp, Homo sapien
caaaacttcctcgttggccactgag

SEQ ID NO: 1886080 - DNA, 25 bp, Homo sapien
tgtctgctcctagtaaaagctgtgc

SEQ ID NO: 1886081 - DNA, 25 bp, Homo sapien
ggcacttattgctcctactgatggg

SEQ ID NO: 1886082 - DNA, 25 bp, Homo sapien
tgtacagggattaccacggcatgat

SEQ ID NO: 1886083 - DNA, 25 bp, Homo sapien
gagaacgctggcagtcttttaggtt

SEQ ID NO: 1886084 - DNA, 25 bp, Homo sapien
taacaccaaataatcgttccacctg

SEQ ID NO: 1886085 - DNA, 25 bp, Homo sapien
ctttccagctcattatggaagcaga

SEQ ID NO: 1886086 - DNA, 25 bp, Homo sapien
ggtactagagatcgtctttccagct

SEQ ID NO: 1886087 - DNA, 25 bp, Homo sapien
gaaaggctagatgtagtcagaccca

SEQ ID NO: 1886088 - DNA, 25 bp, Homo sapien
gcagcctttcaagcatatcactttg

SEQ ID NO: 1886089 - DNA, 25 bp, Homo sapien
gcaagagctgatgtgggtccgaatt

SEQ ID NO: 1886090 - DNA, 25 bp, Homo sapien
gaagtgatcattgtctaggcaagag

SEQ ID NO: 1886091 - DNA, 25 bp, Homo sapien
caggtatgagttaactgtttttcaa

SEQ ID NO: 1886092 - DNA, 25 bp, Homo sapien
tgtgctttctacaggtatgagttaa

SEQ ID NO: 1886093 - DNA, 25 bp, Homo sapien
gctttctacaggtatgagttaactg

SEQ ID NO: 1886094 - DNA, 25 bp, Homo sapien
acaggtatgagttaactgtttttca

SEQ ID NO: 1886095 - DNA, 25 bp, Homo sapien
ttagaggatcagcaataatggttct

SEQ ID NO: 1886096 - DNA, 25 bp, Homo sapien
atttagaggatcagcaataatggtt

SEQ ID NO: 1886097 - DNA, 25 bp, Homo sapien
tttagaggatcagcaataatggttc

SEQ ID NO: 1886098 - DNA, 25 bp, Homo sapien
agaggatcagcaataatggttctta

SEQ ID NO: 1886099 - DNA, 25 bp, Homo sapien
gatctcggttgaagatacaagtgaa

SEQ ID NO: 1886100 - DNA, 25 bp, Homo sapien
tagaaggtttataaggcttcattgt

SEQ ID NO: 1886101 - DNA, 25 bp, Homo sapien
cttcaaggtggatctcggttgaaga

SEQ ID NO: 1886102 - DNA, 25 bp, Homo sapien
caagtgaagaaagatagaaggttta

SEQ ID NO: 1886103 - DNA, 25 bp, Homo sapien
ttttctccttccaaaataatgtgcc

SEQ ID NO: 1886104 - DNA, 25 bp, Homo sapien
aataatgtgccataagactttctct

SEQ ID NO: 1886105 - DNA, 25 bp, Homo sapien
tttctccttccaaaataatgtgcca

SEQ ID NO: 1886106 - DNA, 25 bp, Homo sapien
gtgccataagactttctctttactt

SEQ ID NO: 1886107 - DNA, 25 bp, Homo sapien
ctagtttccaactgaaaatgagagg

SEQ ID NO: 1886108 - DNA, 25 bp, Homo sapien
ggaagcttcttcctgcaacctaagg

SEQ ID NO: 1886109 - DNA, 25 bp, Homo sapien
gaattctggttgtgtaaaggattct

SEQ ID NO: 1886110 - DNA, 25 bp, Homo sapien
cacgtttttcctgacatgtgaatga

SEQ ID NO: 1886111 - DNA, 25 bp, Homo sapien
gccctttttaggacacagcattgga

SEQ ID NO: 1886112 - DNA, 25 bp, Homo sapien
cttcaagccctttttaggacacagc

SEQ ID NO: 1886113 - DNA, 25 bp, Homo sapien
ggaggaacctctgtcttaaactcta

SEQ ID NO: 1886114 - DNA, 25 bp, Homo sapien
tttaggacacagcattggaggaacc

SEQ ID NO: 1886115 - DNA, 25 bp, Homo sapien
aagaagtcgaatgtgaagtggagcc

SEQ ID NO: 1886116 - DNA, 25 bp, Homo sapien
tgaagtggagccaagagcaatgaga

SEQ ID NO: 1886117 - DNA, 25 bp, Homo sapien
gaattgtgggtgaacttcttagaaa

SEQ ID NO: 1886118 - DNA, 25 bp, Homo sapien
ggtgaacttcttagaaagccaggga

SEQ ID NO: 1886119 - DNA, 25 bp, Homo sapien
aggtgtgactacagactgcacaggg

SEQ ID NO: 1886120 - DNA, 25 bp, Homo sapien
tgactacagactgcacagggattag

SEQ ID NO: 1886121 - DNA, 25 bp, Homo sapien
ctacagactgcacagggattagcaa

SEQ ID NO: 1886122 - DNA, 25 bp, Homo sapien
acagggattagcaatgggggtccaa

SEQ ID NO: 1886123 - DNA, 25 bp, Homo sapien
gtttgtcaggatataccgcttgcca

SEQ ID NO: 1886124 - DNA, 25 bp, Homo sapien
cgtgtttgtcaggatataccgcttg

SEQ ID NO: 1886125 - DNA, 25 bp, Homo sapien
tataccgcttgccactgaacccagg

SEQ ID NO: 1886126 - DNA, 25 bp, Homo sapien
caggatataccgcttgccactgaac

SEQ ID NO: 1886127 - DNA, 25 bp, Homo sapien
cctctggcttcacacaggatctttc

SEQ ID NO: 1886128 - DNA, 25 bp, Homo sapien
ctaagttcctagaagatgatctttt

SEQ ID NO: 1886129 - DNA, 25 bp, Homo sapien
caaatgtggcagtatcagctgagga

SEQ ID NO: 1886130 - DNA, 25 bp, Homo sapien
tagcattgataaatcttgaacacaa

SEQ ID NO: 1886131 - DNA, 25 bp, Homo sapien
tattttgtccacacccaaattcata

SEQ ID NO: 1886132 - DNA, 25 bp, Homo sapien
ttggaattattttgtccacacccaa

SEQ ID NO: 1886133 - DNA, 25 bp, Homo sapien
gagacccattattggactttccatt

SEQ ID NO: 1886134 - DNA, 25 bp, Homo sapien
tcatagagacccattattggacttt

SEQ ID NO: 1886135 - DNA, 25 bp, Homo sapien
tgttctggtgccttagcaagggctg

SEQ ID NO: 1886136 - DNA, 25 bp, Homo sapien
catgttctggtgccttagcaagggc

SEQ ID NO: 1886137 - DNA, 25 bp, Homo sapien
gttctggtgccttagcaagggctgt

SEQ ID NO: 1886138 - DNA, 25 bp, Homo sapien
tagttatattcatcagaagttagag

SEQ ID NO: 1886139 - DNA, 25 bp, Homo sapien
ccctcttttgtgtttctccgacata

SEQ ID NO: 1886140 - DNA, 25 bp, Homo sapien
ttccctacatctccaggttttgctg

SEQ ID NO: 1886141 - DNA, 25 bp, Homo sapien
cagaagttagagaattggtccacca

SEQ ID NO: 1886142 - DNA, 25 bp, Homo sapien
tagagtctttgaaccatataagtgg

SEQ ID NO: 1886143 - DNA, 25 bp, Homo sapien
ccattgaaaccgaaaatatctagga

SEQ ID NO: 1886144 - DNA, 25 bp, Homo sapien
tctaggatacattttgatagcccca

SEQ ID NO: 1886145 - DNA, 25 bp, Homo sapien
ccatataagtggaaaccattgaaac

SEQ ID NO: 1886146 - DNA, 25 bp, Homo sapien
acttgaggcagtccaaaaggccctt

SEQ ID NO: 1886147 - DNA, 25 bp, Homo sapien
caagatttgtaaccgtatccaagga

SEQ ID NO: 1886148 - DNA, 25 bp, Homo sapien
acttgtttgttgtaacaaccacttg

SEQ ID NO: 1886149 - DNA, 25 bp, Homo sapien
aaggcccttcaaagaaagaaacatg

SEQ ID NO: 1886150 - DNA, 25 bp, Homo sapien
tttcagtagttttattgaaaaatgc

SEQ ID NO: 1886151 - DNA, 25 bp, Homo sapien
taaatgttagtgtgtctaaaacaag

SEQ ID NO: 1886152 - DNA, 25 bp, Homo sapien
tacaacacaaacatgcaattccctc

SEQ ID NO: 1886153 - DNA, 25 bp, Homo sapien
aacaaggaggtttaaggcaatatgg

SEQ ID NO: 1886154 - DNA, 25 bp, Homo sapien
aattccctctctgcagaataatctg

SEQ ID NO: 1886155 - DNA, 25 bp, Homo sapien
tactcctggatgagcaacgctggaa

SEQ ID NO: 1886156 - DNA, 25 bp, Homo sapien
tatacgagcattctatgccccggcg

SEQ ID NO: 1886157 - DNA, 25 bp, Homo sapien
tgccccggcgtataacagagataga

SEQ ID NO: 1886158 - DNA, 25 bp, Homo sapien
tctacaatcagaaagggtactcctg

SEQ ID NO: 1886159 - DNA, 25 bp, Homo sapien
gtagtcctcgtattccgctgtccgc

SEQ ID NO: 1886160 - DNA, 25 bp, Homo sapien
tctgcaggctcgtctgcgccgtagt

SEQ ID NO: 1886161 - DNA, 25 bp, Homo sapien
ggctcctctgcaggctcgtctgcgc

SEQ ID NO: 1886162 - DNA, 25 bp, Homo sapien
tctgcgccgtagtcctcgtattccg

SEQ ID NO: 1886163 - DNA, 25 bp, Homo sapien
gctcaggcaggtaggccccgccctc

SEQ ID NO: 1886164 - DNA, 25 bp, Homo sapien
tcgcgctcaggcaggtaggccccgc

SEQ ID NO: 1886165 - DNA, 25 bp, Homo sapien
ggctcgcgctcaggcaggtaggccc

SEQ ID NO: 1886166 - DNA, 25 bp, Homo sapien
ctcaggcaggtaggccccgccctcg

SEQ ID NO: 1886167 - DNA, 25 bp, Homo sapien
tcacccgcggtgatggcactccagt

SEQ ID NO: 1886168 - DNA, 25 bp, Homo sapien
tatggcatgatttggaaggcacaca

SEQ ID NO: 1886169 - DNA, 25 bp, Homo sapien
agctaaatcatcacccgcggtgatg

SEQ ID NO: 1886170 - DNA, 25 bp, Homo sapien
atggcatgatttggaaggcacacac

SEQ ID NO: 1886171 - DNA, 25 bp, Homo sapien
tattccggcatagagcaagcggcag

SEQ ID NO: 1886172 - DNA, 25 bp, Homo sapien
caagcggcaggctttgatgcagaag

SEQ ID NO: 1886173 - DNA, 25 bp, Homo sapien
gactgggccaaagaactgtaaacgc

SEQ ID NO: 1886174 - DNA, 25 bp, Homo sapien
caaatacttgggaagggtcagagac

SEQ ID NO: 1886175 - DNA, 25 bp, Homo sapien
tcctttgtgatgtcgacccggttcg

SEQ ID NO: 1886176 - DNA, 25 bp, Homo sapien
aaagagtctccaccctcctttgtga

SEQ ID NO: 1886177 - DNA, 25 bp, Homo sapien
gcagcactggcgacttagaaaatgt

SEQ ID NO: 1886178 - DNA, 25 bp, Homo sapien
taagcacgtgcgcaaacatctcaga

SEQ ID NO: 1886179 - DNA, 25 bp, Homo sapien
ttcaagacatcttcaaatcagcctt

SEQ ID NO: 1886180 - DNA, 25 bp, Homo sapien
tactagcatgctttgaagtcccaag

SEQ ID NO: 1886181 - DNA, 25 bp, Homo sapien
gaaagagttgttatcttcaagacat

SEQ ID NO: 1886182 - DNA, 25 bp, Homo sapien
gggttcctacaatggcaacaacgta

SEQ ID NO: 1886183 - DNA, 25 bp, Homo sapien
ccgttgtatgggatgctggcacact

SEQ ID NO: 1886184 - DNA, 25 bp, Homo sapien
cttgaacctgtggaccctggtggac

SEQ ID NO: 1886185 - DNA, 25 bp, Homo sapien
cctggtggacctgttctggattctc

SEQ ID NO: 1886186 - DNA, 25 bp, Homo sapien
gggtcctcggatacctgagtttcca

SEQ ID NO: 1886187 - DNA, 25 bp, Homo sapien
gtcctgaagatccagtacccctttc

SEQ ID NO: 1886188 - DNA, 25 bp, Homo sapien
aggcagcccccgaggtcctgaagat

SEQ ID NO: 1886189 - DNA, 25 bp, Homo sapien
tgaagatccagtacccctttcacct

SEQ ID NO: 1886190 - DNA, 25 bp, Homo sapien
ccgaggtcctgaagatccagtaccc

SEQ ID NO: 1886191 - DNA, 25 bp, Homo sapien
gcgggcctggctggttgcgactgga

SEQ ID NO: 1886192 - DNA, 25 bp, Homo sapien
tggctcctgcgctaccaggaggtcc

SEQ ID NO: 1886193 - DNA, 25 bp, Homo sapien
ggactggtaatcatttggaatctga

SEQ ID NO: 1886194 - DNA, 25 bp, Homo sapien
ctggctcctgcgctaccaggaggtc

SEQ ID NO: 1886195 - DNA, 25 bp, Homo sapien
tatcaattgttcacagacttgtctt

SEQ ID NO: 1886196 - DNA, 25 bp, Homo sapien
tcaattgttcacagacttgtcttgc

SEQ ID NO: 1886197 - DNA, 25 bp, Homo sapien
caattgttcacagacttgtcttgca

SEQ ID NO: 1886198 - DNA, 25 bp, Homo sapien
attgttcacagacttgtcttgcaac

SEQ ID NO: 1886199 - DNA, 25 bp, Homo sapien
aaccactgtcagtagacatgcaagc

SEQ ID NO: 1886200 - DNA, 25 bp, Homo sapien
actgtcagtagacatgcaagctgtc

SEQ ID NO: 1886201 - DNA, 25 bp, Homo sapien
cactgtcagtagacatgcaagctgt

SEQ ID NO: 1886202 - DNA, 25 bp, Homo sapien
ccactgtcagtagacatgcaagctg

SEQ ID NO: 1886203 - DNA, 25 bp, Homo sapien
tcccacttggtcctgtgactcctgg

SEQ ID NO: 1886204 - DNA, 25 bp, Homo sapien
ttttcccaatatcttacgttgaaga

SEQ ID NO: 1886205 - DNA, 25 bp, Homo sapien
tgcaagtatacagatgccagtttca

SEQ ID NO: 1886206 - DNA, 25 bp, Homo sapien
caatatcttacgttgaagacccttt

SEQ ID NO: 1886207 - DNA, 25 bp, Homo sapien
ctggatgcaagtatacagatgccag

SEQ ID NO: 1886208 - DNA, 25 bp, Homo sapien
gcccctgggtcccattgcaccgtct

SEQ ID NO: 1886209 - DNA, 25 bp, Homo sapien
cattgcaccgtcttttccagtgaag

SEQ ID NO: 1886210 - DNA, 25 bp, Homo sapien
ccattgcaccgtcttttccagtgaa

SEQ ID NO: 1886211 - DNA, 25 bp, Homo sapien
ttgcaccgtcttttccagtgaagcc

SEQ ID NO: 1886212 - DNA, 25 bp, Homo sapien
tgtcacccatgtactctcactgttg

SEQ ID NO: 1886213 - DNA, 25 bp, Homo sapien
aaggcttcggtcgtagcagcagcaa

SEQ ID NO: 1886214 - DNA, 25 bp, Homo sapien
aataaagaagactgacttgtcaccc

SEQ ID NO: 1886215 - DNA, 25 bp, Homo sapien
gcaagcaagtcagcccattgccact

SEQ ID NO: 1886216 - DNA, 25 bp, Homo sapien
tctgtctcctggaggtcccattggt

SEQ ID NO: 1886217 - DNA, 25 bp, Homo sapien
aggtcccattggtcctggtgggcca

SEQ ID NO: 1886218 - DNA, 25 bp, Homo sapien
cattggtcctggtgggccaggtaat

SEQ ID NO: 1886219 - DNA, 25 bp, Homo sapien
tcccattggtcctggtgggccaggt

SEQ ID NO: 1886220 - DNA, 25 bp, Homo sapien
ttcggcctggaagtcctggctctcc

SEQ ID NO: 1886221 - DNA, 25 bp, Homo sapien
cggcctggaagtcctggctctccag

SEQ ID NO: 1886222 - DNA, 25 bp, Homo sapien
tgttcggcctggaagtcctggctct

SEQ ID NO: 1886223 - DNA, 25 bp, Homo sapien
tggaagtcctggctctccagcatca

SEQ ID NO: 1886224 - DNA, 25 bp, Homo sapien
ggcctggaggacctatgtctccacg

SEQ ID NO: 1886225 - DNA, 25 bp, Homo sapien
ttgctctcccggaatagagagtcca

SEQ ID NO: 1886226 - DNA, 25 bp, Homo sapien
acctatgtctccacgaggaccaggg

SEQ ID NO: 1886227 - DNA, 25 bp, Homo sapien
tagagagtccattgggtccctgagg

SEQ ID NO: 1886228 - DNA, 25 bp, Homo sapien
cacctctgggacctttagcaccagg

SEQ ID NO: 1886229 - DNA, 25 bp, Homo sapien
aattgccccactgatacctctttca

SEQ ID NO: 1886230 - DNA, 25 bp, Homo sapien
tgggacctttagcaccaggtcctcc

SEQ ID NO: 1886231 - DNA, 25 bp, Homo sapien
tctgggacctttagcaccaggtcct

SEQ ID NO: 1886232 - DNA, 25 bp, Homo sapien
gaggtccaacgctgtcctgtgtaca

SEQ ID NO: 1886233 - DNA, 25 bp, Homo sapien
ctggaggtccaacgctgtcctgtgt

SEQ ID NO: 1886234 - DNA, 25 bp, Homo sapien
ccaacgctgtcctgtgtacatgtgc

SEQ ID NO: 1886235 - DNA, 25 bp, Homo sapien
ggtccaacgctgtcctgtgtacatg

SEQ ID NO: 1886236 - DNA, 25 bp, Homo sapien
acactggactgcagacaatgtcaaa

SEQ ID NO: 1886237 - DNA, 25 bp, Homo sapien
catctgtctctactggtccacactg

SEQ ID NO: 1886238 - DNA, 25 bp, Homo sapien
tctctactggtccacactggactgc

SEQ ID NO: 1886239 - DNA, 25 bp, Homo sapien
cactggactgcagacaatgtcaaaa

SEQ ID NO: 1886240 - DNA, 25 bp, Homo sapien
tttgatacaggcagccgaatggctc

SEQ ID NO: 1886241 - DNA, 25 bp, Homo sapien
tcctctgtgagcaaatgtgggctct

SEQ ID NO: 1886242 - DNA, 25 bp, Homo sapien
ggtgcctggctttgattgacattta

SEQ ID NO: 1886243 - DNA, 25 bp, Homo sapien
gaaagttgcaactagtgtccccaaa

SEQ ID NO: 1886244 - DNA, 25 bp, Homo sapien
cttaacactttttgaggtcactaca

SEQ ID NO: 1886245 - DNA, 25 bp, Homo sapien
catagcagtcaatgtaaatcttaac

SEQ ID NO: 1886246 - DNA, 25 bp, Homo sapien
ttccttgatgtctttttctataatt

SEQ ID NO: 1886247 - DNA, 25 bp, Homo sapien
agaatttcataaccatcagttgtta

SEQ ID NO: 1886248 - DNA, 25 bp, Homo sapien
tgttgttggtcccagaccagtagaa

SEQ ID NO: 1886249 - DNA, 25 bp, Homo sapien
agagtgcttgaatccttggctcagt

SEQ ID NO: 1886250 - DNA, 25 bp, Homo sapien
aaatagggaccctcttgtcactcat

SEQ ID NO: 1886251 - DNA, 25 bp, Homo sapien
tacatttcagattgggcccttcatc

SEQ ID NO: 1886252 - DNA, 25 bp, Homo sapien
ttatttgaattaaccaaattctcta

SEQ ID NO: 1886253 - DNA, 25 bp, Homo sapien
tattatttgaattaaccaaattctc

SEQ ID NO: 1886254 - DNA, 25 bp, Homo sapien
gactcaaataatcttatgtttttac

SEQ ID NO: 1886255 - DNA, 25 bp, Homo sapien
taaaagacatagttataattctgcc

SEQ ID NO: 1886256 - DNA, 25 bp, Homo sapien
aatgtaacagtttgcacctcgcctc

SEQ ID NO: 1886257 - DNA, 25 bp, Homo sapien
acctcgcctcttgtatccttgttaa

SEQ ID NO: 1886258 - DNA, 25 bp, Homo sapien
aagaatgataacgtcttgctagaag

SEQ ID NO: 1886259 - DNA, 25 bp, Homo sapien
ataatgtctttacttcttctgtgtc

SEQ ID NO: 1886260 - DNA, 25 bp, Homo sapien
gaataataatataatcgtgtatgaa

SEQ ID NO: 1886261 - DNA, 25 bp, Homo sapien
aataatataatcgtgtatgaaggag

SEQ ID NO: 1886262 - DNA, 25 bp, Homo sapien
aatcgtgtatgaaggagggagtcca

SEQ ID NO: 1886263 - DNA, 25 bp, Homo sapien
tataatcgtgtatgaaggagggagt

SEQ ID NO: 1886264 - DNA, 25 bp, Homo sapien
ccctgactccaaagatactccttgt

SEQ ID NO: 1886265 - DNA, 25 bp, Homo sapien
gaccctgactccaaagatactcctt

SEQ ID NO: 1886266 - DNA, 25 bp, Homo sapien
ttctgtcaggttgtatgcttcaagc

SEQ ID NO: 1886267 - DNA, 25 bp, Homo sapien
gctgattcacaaacgcattcttctg

SEQ ID NO: 1886268 - DNA, 25 bp, Homo sapien
gccatccaaataaatgagaggacaa

SEQ ID NO: 1886269 - DNA, 25 bp, Homo sapien
agccatccaaataaatgagaggaca

SEQ ID NO: 1886270 - DNA, 25 bp, Homo sapien
ccatccaaataaatgagaggacaac

SEQ ID NO: 1886271 - DNA, 25 bp, Homo sapien
gtcgtccacaatgaacacgtgccgt

SEQ ID NO: 1886272 - DNA, 25 bp, Homo sapien
tcattgtagtcgacatcagccacac

SEQ ID NO: 1886273 - DNA, 25 bp, Homo sapien
cacgtgccgttcacttggtttgctg

SEQ ID NO: 1886274 - DNA, 25 bp, Homo sapien
ctcaaaagattcaaagtcgtccaca

SEQ ID NO: 1886275 - DNA, 25 bp, Homo sapien
agtagcatttatagaatgaatcacg

SEQ ID NO: 1886276 - DNA, 25 bp, Homo sapien
tttatagaatgaatcacgtatctct

SEQ ID NO: 1886277 - DNA, 25 bp, Homo sapien
gcatttatagaatgaatcacgtatc

SEQ ID NO: 1886278 - DNA, 25 bp, Homo sapien
aaagtagcatttatagaatgaatca

SEQ ID NO: 1886279 - DNA, 25 bp, Homo sapien
tgctggatgaccaaagccgccttct

SEQ ID NO: 1886280 - DNA, 25 bp, Homo sapien
accttagggacattcttcctcatgc

SEQ ID NO: 1886281 - DNA, 25 bp, Homo sapien
accacaaccaacaccttagggacat

SEQ ID NO: 1886282 - DNA, 25 bp, Homo sapien
tgccgctctcccaagtcaagacttt

SEQ ID NO: 1886283 - DNA, 25 bp, Homo sapien
ctccttgataaacgtgagggccttg

SEQ ID NO: 1886284 - DNA, 25 bp, Homo sapien
ctacagaatgtggcatggaaaattt

SEQ ID NO: 1886285 - DNA, 25 bp, Homo sapien
tacagaatgtggcatggaaaatttt

SEQ ID NO: 1886286 - DNA, 25 bp, Homo sapien
aattttagtgtcacttcagtgaaaa

SEQ ID NO: 1886287 - DNA, 25 bp, Homo sapien
caaatgccattagtcacacccaact

SEQ ID NO: 1886288 - DNA, 25 bp, Homo sapien
aatgccattagtcacacccaactga

SEQ ID NO: 1886289 - DNA, 25 bp, Homo sapien
gccattagtcacacccaactgataa

SEQ ID NO: 1886290 - DNA, 25 bp, Homo sapien
tgccattagtcacacccaactgata

SEQ ID NO: 1886291 - DNA, 25 bp, Homo sapien
catcgctgtattgcacaaatgaaac

SEQ ID NO: 1886292 - DNA, 25 bp, Homo sapien
tacgtgttcagcttgaactcagact

SEQ ID NO: 1886293 - DNA, 25 bp, Homo sapien
tacctaatattctggagggccccaa

SEQ ID NO: 1886294 - DNA, 25 bp, Homo sapien
ccccaagggctagggccttgtcatt

SEQ ID NO: 1886295 - DNA, 25 bp, Homo sapien
taaaattatcgtccccaatgctcca

SEQ ID NO: 1886296 - DNA, 25 bp, Homo sapien
ccaggaggcatcagtcaagaacaca

SEQ ID NO: 1886297 - DNA, 25 bp, Homo sapien
atcccagcaggactgatttcatcaa

SEQ ID NO: 1886298 - DNA, 25 bp, Homo sapien
cagtcaagaacacaatatctgcctt

SEQ ID NO: 1886299 - DNA, 25 bp, Homo sapien
ttttattggaatatctagacttaga

SEQ ID NO: 1886300 - DNA, 25 bp, Homo sapien
aattaagccactagaatcatatgca

SEQ ID NO: 1886301 - DNA, 25 bp, Homo sapien
agccactagaatcatatgcaggaaa

SEQ ID NO: 1886302 - DNA, 25 bp, Homo sapien
gaatatctagacttagaggctaaga

SEQ ID NO: 1886303 - DNA, 25 bp, Homo sapien
tgggtggctctgtaggggcttctgt

SEQ ID NO: 1886304 - DNA, 25 bp, Homo sapien
ggtggctctgtaggggcttctgttg

SEQ ID NO: 1886305 - DNA, 25 bp, Homo sapien
catcccgggctggtggaatggtggg

SEQ ID NO: 1886306 - DNA, 25 bp, Homo sapien
tgtgggtggctctgtaggggcttct

SEQ ID NO: 1886307 - DNA, 25 bp, Homo sapien
taaggccttcagatagggtcaaatg

SEQ ID NO: 1886308 - DNA, 25 bp, Homo sapien
tcattattgctacccctacggagag

SEQ ID NO: 1886309 - DNA, 25 bp, Homo sapien
aagtagcaccaactcaataacaggg

SEQ ID NO: 1886310 - DNA, 25 bp, Homo sapien
tacagaaaaaggtcctgaaccagct

SEQ ID NO: 1886311 - DNA, 25 bp, Homo sapien
gactggtttctgatccacgcactgt

SEQ ID NO: 1886312 - DNA, 25 bp, Homo sapien
ccctcgagatttggtgtctgcacaa

SEQ ID NO: 1886313 - DNA, 25 bp, Homo sapien
tgtctggtgaaaggccagtgaagca

SEQ ID NO: 1886314 - DNA, 25 bp, Homo sapien
tgttctttaacagagactcctggtc

SEQ ID NO: 1886315 - DNA, 25 bp, Homo sapien
gccagtgtcatcaccaattatattt

SEQ ID NO: 1886316 - DNA, 25 bp, Homo sapien
tatgacaacaaaggaaaatgccagt

SEQ ID NO: 1886317 - DNA, 25 bp, Homo sapien
ctgattatgacaacaaaggaaaatg

SEQ ID NO: 1886318 - DNA, 25 bp, Homo sapien
aatgccagtgtcatcaccaattata

SEQ ID NO: 1886319 - DNA, 25 bp, Homo sapien
gctgcccggtgaggtgaccatttga

SEQ ID NO: 1886320 - DNA, 25 bp, Homo sapien
catttgacacagaatgtatcccacc

SEQ ID NO: 1886321 - DNA, 25 bp, Homo sapien
gaatgtatcccacccaatctggtaa

SEQ ID NO: 1886322 - DNA, 25 bp, Homo sapien
agggcttagttttagcctgtaggag

SEQ ID NO: 1886323 - DNA, 25 bp, Homo sapien
ccaacaaaggcttccatgggctcat

SEQ ID NO: 1886324 - DNA, 25 bp, Homo sapien
gagtccagaatcatattgagcataa

SEQ ID NO: 1886325 - DNA, 25 bp, Homo sapien
taaacattcacatcgtaggtggtgc

SEQ ID NO: 1886326 - DNA, 25 bp, Homo sapien
ctgggattgagattgtgtaaggtat

SEQ ID NO: 1886327 - DNA, 25 bp, Homo sapien
acacagaaacatgccatcaatagca

SEQ ID NO: 1886328 - DNA, 25 bp, Homo sapien
cacagaaacatgccatcaatagcat

SEQ ID NO: 1886329 - DNA, 25 bp, Homo sapien
agaactggagaaggtgaaggatccc

SEQ ID NO: 1886330 - DNA, 25 bp, Homo sapien
taccattcgtcagagatgtgtatgt

SEQ ID NO: 1886331 - DNA, 25 bp, Homo sapien
caccctgaatcttgtataccattcg

SEQ ID NO: 1886332 - DNA, 25 bp, Homo sapien
gaaggtgaaggatcccaggacaccc

SEQ ID NO: 1886333 - DNA, 25 bp, Homo sapien
tttatatggagtgtcaggttgcagg

SEQ ID NO: 1886334 - DNA, 25 bp, Homo sapien
attttatatggagtgtcaggttgca

SEQ ID NO: 1886335 - DNA, 25 bp, Homo sapien
taacagtaattttatatggagtgtc

SEQ ID NO: 1886336 - DNA, 25 bp, Homo sapien
cagcaataacagtaattttatatgg

SEQ ID NO: 1886337 - DNA, 25 bp, Homo sapien
agcatgatcccaggctaccgagagg

SEQ ID NO: 1886338 - DNA, 25 bp, Homo sapien
tattcatcaattggatcaccaacag

SEQ ID NO: 1886339 - DNA, 25 bp, Homo sapien
ccgagaggctattggttgtttcacc

SEQ ID NO: 1886340 - DNA, 25 bp, Homo sapien
gatcctgtactgctgaactggccca

SEQ ID NO: 1886341 - DNA, 25 bp, Homo sapien
catccgagtacagagccacaaggtt

SEQ ID NO: 1886342 - DNA, 25 bp, Homo sapien
gaatagagtgtgtccggaatcagcc

SEQ ID NO: 1886343 - DNA, 25 bp, Homo sapien
gccacaaggttcacggaatagagtg

SEQ ID NO: 1886344 - DNA, 25 bp, Homo sapien
ccagatgcaccatgcgcgtgtttcc

SEQ ID NO: 1886345 - DNA, 25 bp, Homo sapien
caggagaatacacaacgcgatattg

SEQ ID NO: 1886346 - DNA, 25 bp, Homo sapien
gggtcccagcgaacatcgaggctgt

SEQ ID NO: 1886347 - DNA, 25 bp, Homo sapien
gattctgagggtcttgtgccatcca

SEQ ID NO: 1886348 - DNA, 25 bp, Homo sapien
cgatattgcagcacaggtcctggag

SEQ ID NO: 1886349 - DNA, 25 bp, Homo sapien
aaacgggaactacagtcacagtgta

SEQ ID NO: 1886350 - DNA, 25 bp, Homo sapien
agtgtatgaggtatctggctgcaga

SEQ ID NO: 1886351 - DNA, 25 bp, Homo sapien
gctgcagattcctaagaatggcata

SEQ ID NO: 1886352 - DNA, 25 bp, Homo sapien
gaatggcataattggtattcccggg

SEQ ID NO: 1886353 - DNA, 25 bp, Homo sapien
ggtcccagcggacattcaaggtgct

SEQ ID NO: 1886354 - DNA, 25 bp, Homo sapien
gaagggtcatacactctcaggttcc

SEQ ID NO: 1886355 - DNA, 25 bp, Homo sapien
tgctgctggtgcatagaagagcttg

SEQ ID NO: 1886356 - DNA, 25 bp, Homo sapien
gagcttgtactgacgaggatttccc

SEQ ID NO: 1886357 - DNA, 25 bp, Homo sapien
tccttcaccatcaggatacagagag

SEQ ID NO: 1886358 - DNA, 25 bp, Homo sapien
tacagagaggatacggtgatagtgt

SEQ ID NO: 1886359 - DNA, 25 bp, Homo sapien
tggtcttgcctcttcccgtcatccg

SEQ ID NO: 1886360 - DNA, 25 bp, Homo sapien
tagtgtaaggagtgtctggcttcag

SEQ ID NO: 1886361 - DNA, 25 bp, Homo sapien
atgattcagcatacagtataaagct

SEQ ID NO: 1886362 - DNA, 25 bp, Homo sapien
aacactgtcactctaacagccttag

SEQ ID NO: 1886363 - DNA, 25 bp, Homo sapien
gattcagcatacagtataaagctct

SEQ ID NO: 1886364 - DNA, 25 bp, Homo sapien
tcagcatacagtataaagctcttgg

SEQ ID NO: 1886365 - DNA, 25 bp, Homo sapien
ggctgataagtgatcctatatttct

SEQ ID NO: 1886366 - DNA, 25 bp, Homo sapien
aggctgataagtgatcctatatttc

SEQ ID NO: 1886367 - DNA, 25 bp, Homo sapien
tgataagtgatcctatatttctgca

SEQ ID NO: 1886368 - DNA, 25 bp, Homo sapien
gctgataagtgatcctatatttctg

SEQ ID NO: 1886369 - DNA, 25 bp, Homo sapien
agatgttgcattgtacacttgaagg

SEQ ID NO: 1886370 - DNA, 25 bp, Homo sapien
cattgtacacttgaaggtttcgtgg

SEQ ID NO: 1886371 - DNA, 25 bp, Homo sapien
agtcaggctgttagatgttgcattg

SEQ ID NO: 1886372 - DNA, 25 bp, Homo sapien
gatcccacttaacagtcaggctgtt

SEQ ID NO: 1886373 - DNA, 25 bp, Homo sapien
tattatgtatcttatggtacttttc

SEQ ID NO: 1886374 - DNA, 25 bp, Homo sapien
gtatcttatggtacttttcatttat

SEQ ID NO: 1886375 - DNA, 25 bp, Homo sapien
atcttatggtacttttcatttatac

SEQ ID NO: 1886376 - DNA, 25 bp, Homo sapien
atgtatcttatggtacttttcattt

SEQ ID NO: 1886377 - DNA, 25 bp, Homo sapien
aggatagatggcagtaatggaaact

SEQ ID NO: 1886378 - DNA, 25 bp, Homo sapien
gactcatcaggatagatggcagtaa

SEQ ID NO: 1886379 - DNA, 25 bp, Homo sapien
catcaggatagatggcagtaatgga

SEQ ID NO: 1886380 - DNA, 25 bp, Homo sapien
atagatggcagtaatggaaacttca

SEQ ID NO: 1886381 - DNA, 25 bp, Homo sapien
gaaaccctctgatgttacttcagta

SEQ ID NO: 1886382 - DNA, 25 bp, Homo sapien
ccaagttattctgtagagagacaca

SEQ ID NO: 1886383 - DNA, 25 bp, Homo sapien
gatcccaagtccctctgaaaccctc

SEQ ID NO: 1886384 - DNA, 25 bp, Homo sapien
tctttaagtttgttggggctggcac

SEQ ID NO: 1886385 - DNA, 25 bp, Homo sapien
tctaggaatattgccacaggaaagg

SEQ ID NO: 1886386 - DNA, 25 bp, Homo sapien
gagaatgtctgcctagctgtaaaca

SEQ ID NO: 1886387 - DNA, 25 bp, Homo sapien
gagaactgaacacctggagacccaa

SEQ ID NO: 1886388 - DNA, 25 bp, Homo sapien
gaactctgagcatgttacgatccag

SEQ ID NO: 1886389 - DNA, 25 bp, Homo sapien
tacaaggtctgtgagaagaggtctt

SEQ ID NO: 1886390 - DNA, 25 bp, Homo sapien
tgcagaaacgctgactgtgtacaag

SEQ ID NO: 1886391 - DNA, 25 bp, Homo sapien
ggtagtttcttgagcagtcactgga

SEQ ID NO: 1886392 - DNA, 25 bp, Homo sapien
cccctcgtcatgtactgcagaaacg

SEQ ID NO: 1886393 - DNA, 25 bp, Homo sapien
ttttcatatctactatcatcttcaa

SEQ ID NO: 1886394 - DNA, 25 bp, Homo sapien
tattttcatatctactatcatcttc

SEQ ID NO: 1886395 - DNA, 25 bp, Homo sapien
aaatattttcatatctactatcatc

SEQ ID NO: 1886396 - DNA, 25 bp, Homo sapien
tttcatatctactatcatcttcaac

SEQ ID NO: 1886397 - DNA, 25 bp, Homo sapien
tctctgagtttcagatcctgaggtc

SEQ ID NO: 1886398 - DNA, 25 bp, Homo sapien
cctcttctggtgttttgtatcgaac

SEQ ID NO: 1886399 - DNA, 25 bp, Homo sapien
atatttacgcacttttccaggcaca

SEQ ID NO: 1886400 - DNA, 25 bp, Homo sapien
aagacattcatagtgctgtgagtca

SEQ ID NO: 1886401 - DNA, 25 bp, Homo sapien
gcctggactgtgactgcatactccg

SEQ ID NO: 1886402 - DNA, 25 bp, Homo sapien
tgtcattcactgttggccccaaacg

SEQ ID NO: 1886403 - DNA, 25 bp, Homo sapien
ctagtgaggtcgtgcaggacagcct

SEQ ID NO: 1886404 - DNA, 25 bp, Homo sapien
gaacagtgacaggttcactagtgag

SEQ ID NO: 1886405 - DNA, 25 bp, Homo sapien
ctgagattacacaggcgtcagtcac

SEQ ID NO: 1886406 - DNA, 25 bp, Homo sapien
ccgtgggcagtccatgccaatgttt

SEQ ID NO: 1886407 - DNA, 25 bp, Homo sapien
caccgtgggcagtccatgccaatgt

SEQ ID NO: 1886408 - DNA, 25 bp, Homo sapien
accgtgggcagtccatgccaatgtt

SEQ ID NO: 1886409 - DNA, 25 bp, Homo sapien
caggtttgtatgacaagatgtagcc

SEQ ID NO: 1886410 - DNA, 25 bp, Homo sapien
ctctttgggtcttgttggctctgtg

SEQ ID NO: 1886411 - DNA, 25 bp, Homo sapien
tggctctgtgtccttaacaggtttg

SEQ ID NO: 1886412 - DNA, 25 bp, Homo sapien
atgtagccagtagctcctcccacag

SEQ ID NO: 1886413 - DNA, 25 bp, Homo sapien
ggtggtagggccaacatcataaata

SEQ ID NO: 1886414 - DNA, 25 bp, Homo sapien
taaatattcaggctgactacaggca

SEQ ID NO: 1886415 - DNA, 25 bp, Homo sapien
ataaatattcaggctgactacaggc

SEQ ID NO: 1886416 - DNA, 25 bp, Homo sapien
tggtagggccaacatcataaatatt

SEQ ID NO: 1886417 - DNA, 25 bp, Homo sapien
aaaagcagaccatcagtctagttcc

SEQ ID NO: 1886418 - DNA, 25 bp, Homo sapien
aagcagaccatcagtctagttcctt

SEQ ID NO: 1886419 - DNA, 25 bp, Homo sapien
gaaaagcagaccatcagtctagttc

SEQ ID NO: 1886420 - DNA, 25 bp, Homo sapien
cagaaaagcagaccatcagtctagt

SEQ ID NO: 1886421 - DNA, 25 bp, Homo sapien
tggaaggtaggcaaaaatgggccat

SEQ ID NO: 1886422 - DNA, 25 bp, Homo sapien
gactctaagaagtgaataactccat

SEQ ID NO: 1886423 - DNA, 25 bp, Homo sapien
aaaaccactgagtattttctgggca

SEQ ID NO: 1886424 - DNA, 25 bp, Homo sapien
tctagattattatggcagtgacccc

SEQ ID NO: 1886425 - DNA, 25 bp, Homo sapien
ttctgtccccttcagaggctcacta

SEQ ID NO: 1886426 - DNA, 25 bp, Homo sapien
caacatattcagtttcaggtttcag

SEQ ID NO: 1886427 - DNA, 25 bp, Homo sapien
tcagaggctcactatattcatcttc

SEQ ID NO: 1886428 - DNA, 25 bp, Homo sapien
actgtgctagtttccattcgactca

SEQ ID NO: 1886429 - DNA, 25 bp, Homo sapien
tccagaaactggatagtattccacc

SEQ ID NO: 1886430 - DNA, 25 bp, Homo sapien
tatatcgatccacactgtcagaagg

SEQ ID NO: 1886431 - DNA, 25 bp, Homo sapien
aaagaacgatgggttcgctcagaaa

SEQ ID NO: 1886432 - DNA, 25 bp, Homo sapien
taactaagttagaaggtgcttccaa

SEQ ID NO: 1886433 - DNA, 25 bp, Homo sapien
gagtgactcaaaatctgccacattg

SEQ ID NO: 1886434 - DNA, 25 bp, Homo sapien
tgggtatcatcaggatcagttgcaa

SEQ ID NO: 1886435 - DNA, 25 bp, Homo sapien
gccacattgtatgcatgggtatcat

SEQ ID NO: 1886436 - DNA, 25 bp, Homo sapien
tgagatcatccactatcctggagag

SEQ ID NO: 1886437 - DNA, 25 bp, Homo sapien
ccatcagtaatgagcacaccaattt

SEQ ID NO: 1886438 - DNA, 25 bp, Homo sapien
ttcgagctcgaggtctcatgccagc

SEQ ID NO: 1886439 - DNA, 25 bp, Homo sapien
cctgaagttctgttggcgaatgaaa

SEQ ID NO: 1886440 - DNA, 25 bp, Homo sapien
gaaggtgcttcaacatcgtcttgtg

SEQ ID NO: 1886441 - DNA, 25 bp, Homo sapien
agtcacatcaccattcagccacaaa

SEQ ID NO: 1886442 - DNA, 25 bp, Homo sapien
agagaatcagtcacatcaccattca

SEQ ID NO: 1886443 - DNA, 25 bp, Homo sapien
gaatcagtcacatcaccattcagcc

SEQ ID NO: 1886444 - DNA, 25 bp, Homo sapien
tttaaaagagaatcagtcacatcac

SEQ ID NO: 1886445 - DNA, 25 bp, Homo sapien
tgtacggcaagtttgccacagcttg

SEQ ID NO: 1886446 - DNA, 25 bp, Homo sapien
tgtgagagtattgcctcctttgtac

SEQ ID NO: 1886447 - DNA, 25 bp, Homo sapien
tgggatccccactatactgagcaag

SEQ ID NO: 1886448 - DNA, 25 bp, Homo sapien
cttgtctctgtgtgcatttaactgc

SEQ ID NO: 1886449 - DNA, 25 bp, Homo sapien
gaaatgaaactcctcacggttctaa

SEQ ID NO: 1886450 - DNA, 25 bp, Homo sapien
caaagacttccacaatacgagaaat

SEQ ID NO: 1886451 - DNA, 25 bp, Homo sapien
atttgcccggccgatgctccatgat

SEQ ID NO: 1886452 - DNA, 25 bp, Homo sapien
atccatccaccagcaacacaatgtc

SEQ ID NO: 1886453 - DNA, 25 bp, Homo sapien
tgtccaacaagtggtgagctttctc

SEQ ID NO: 1886454 - DNA, 25 bp, Homo sapien
atttcttgtccaacaagtggtgagc

SEQ ID NO: 1886455 - DNA, 25 bp, Homo sapien
gaagataaaattggcataacagttg

SEQ ID NO: 1886456 - DNA, 25 bp, Homo sapien
cagttgtgtcggaaagggttgtcat

SEQ ID NO: 1886457 - DNA, 25 bp, Homo sapien
tgtgactttataacccttcacttcc

SEQ ID NO: 1886458 - DNA, 25 bp, Homo sapien
gggcaggctcccaagtcactcggaa

SEQ ID NO: 1886459 - DNA, 25 bp, Homo sapien
aactgtgttgtcatagggtccaacc

SEQ ID NO: 1886460 - DNA, 25 bp, Homo sapien
tcactcggaagcttgacatggttgg

SEQ ID NO: 1886461 - DNA, 25 bp, Homo sapien
cacggtagttgacgactttccctgg

SEQ ID NO: 1886462 - DNA, 25 bp, Homo sapien
ccatgagggcgatagacaacacggt

SEQ ID NO: 1886463 - DNA, 25 bp, Homo sapien
tctgtggctgaagtcgctttaacac

SEQ ID NO: 1886464 - DNA, 25 bp, Homo sapien
ttaacactgtcgaagtgactgtggg

SEQ ID NO: 1886465 - DNA, 25 bp, Homo sapien
ccccaattgatgtgtcagtgatgtc

SEQ ID NO: 1886466 - DNA, 25 bp, Homo sapien
tctatcatcgtatgaattgcatctt

SEQ ID NO: 1886467 - DNA, 25 bp, Homo sapien
atttccatgagaccctgtaaccgcg

SEQ ID NO: 1886468 - DNA, 25 bp, Homo sapien
tgtaaccgcgaaccattcctggagc

SEQ ID NO: 1886469 - DNA, 25 bp, Homo sapien
ttatattcattgatcctggtagaga

SEQ ID NO: 1886470 - DNA, 25 bp, Homo sapien
cctggtagagattctgacttgctgg

SEQ ID NO: 1886471 - DNA, 25 bp, Homo sapien
aaatgtctagtaggtatttaagtat

SEQ ID NO: 1886472 - DNA, 25 bp, Homo sapien
ggtagagattctgacttgctggact

SEQ ID NO: 1886473 - DNA, 25 bp, Homo sapien
cgtcgtagggtcagaaactcttaag

SEQ ID NO: 1886474 - DNA, 25 bp, Homo sapien
cccagacgcatacaaggctgtcaca

SEQ ID NO: 1886475 - DNA, 25 bp, Homo sapien
ggctgtcacagataaggcgtattgt

SEQ ID NO: 1886476 - DNA, 25 bp, Homo sapien
taatttcatagtagacgtcgtaggg

SEQ ID NO: 1886477 - DNA, 25 bp, Homo sapien
catttccagttaatggagtaccagg

SEQ ID NO: 1886478 - DNA, 25 bp, Homo sapien
tcacctttaggtttcgaggtgctcc

SEQ ID NO: 1886479 - DNA, 25 bp, Homo sapien
tggaatcaagttctccagtgttctc

SEQ ID NO: 1886480 - DNA, 25 bp, Homo sapien
gatacttcatatttcgtgtctggaa

SEQ ID NO: 1886481 - DNA, 25 bp, Homo sapien
aggctgctgagaacaacactggtgc

SEQ ID NO: 1886482 - DNA, 25 bp, Homo sapien
tggagaccagttggttttgaaacca

SEQ ID NO: 1886483 - DNA, 25 bp, Homo sapien
taagggaatgctgaagccatcctca

SEQ ID NO: 1886484 - DNA, 25 bp, Homo sapien
cattgaccaaatacaaggtctctgg

SEQ ID NO: 1886485 - DNA, 25 bp, Homo sapien
gactaatctggaccctatttggtga

SEQ ID NO: 1886486 - DNA, 25 bp, Homo sapien
aattctgagcgaacggcatccttca

SEQ ID NO: 1886487 - DNA, 25 bp, Homo sapien
gaggatcccggctgtattgcacaag

SEQ ID NO: 1886488 - DNA, 25 bp, Homo sapien
gcaatcccaatgctataggagccat

SEQ ID NO: 1886489 - DNA, 25 bp, Homo sapien
tctgctgagaggtcgcgaacactga

SEQ ID NO: 1886490 - DNA, 25 bp, Homo sapien
ttcatggcggaaacactgatctggt

SEQ ID NO: 1886491 - DNA, 25 bp, Homo sapien
cactggactaggagatggattccaa

SEQ ID NO: 1886492 - DNA, 25 bp, Homo sapien
cactgagcgtggttgtctgaggccc

SEQ ID NO: 1886493 - DNA, 25 bp, Homo sapien
ctgaatatccacaattgcatcaaag

SEQ ID NO: 1886494 - DNA, 25 bp, Homo sapien
tccactaaccaattcaccaagttgt

SEQ ID NO: 1886495 - DNA, 25 bp, Homo sapien
agttgttcatcaacacctgagcaca

SEQ ID NO: 1886496 - DNA, 25 bp, Homo sapien
aaagttggccacattgaaaacatgg

SEQ ID NO: 1886497 - DNA, 25 bp, Homo sapien
aggataaggacatattgaaatggga

SEQ ID NO: 1886498 - DNA, 25 bp, Homo sapien
aaggataaggacatattgaaatggg

SEQ ID NO: 1886499 - DNA, 25 bp, Homo sapien
aaaaggataaggacatattgaaatg

SEQ ID NO: 1886500 - DNA, 25 bp, Homo sapien
aaaggataaggacatattgaaatgg

SEQ ID NO: 1886501 - DNA, 25 bp, Homo sapien
tacgaagctctcttgctggaatttc

SEQ ID NO: 1886502 - DNA, 25 bp, Homo sapien
tgccccagcagattccgtgaaagta

SEQ ID NO: 1886503 - DNA, 25 bp, Homo sapien
tttaggaaagccaactcttgcccca

SEQ ID NO: 1886504 - DNA, 25 bp, Homo sapien
tcctgggattttccatccgtaataa

SEQ ID NO: 1886505 - DNA, 25 bp, Homo sapien
tattgcagcaagaagttcatccctt

SEQ ID NO: 1886506 - DNA, 25 bp, Homo sapien
cagtcctggtatcagagctgtattg

SEQ ID NO: 1886507 - DNA, 25 bp, Homo sapien
gcagacacaagagcagcaatgaagt

SEQ ID NO: 1886508 - DNA, 25 bp, Homo sapien
catccacgaggaaaaccaaatcagt

SEQ ID NO: 1886509 - DNA, 25 bp, Homo sapien
cttctccactggctttgtcgaacta

SEQ ID NO: 1886510 - DNA, 25 bp, Homo sapien
ttctccactggctttgtcgaactac

SEQ ID NO: 1886511 - DNA, 25 bp, Homo sapien
tctgtttcaggtacaagttctgaca

SEQ ID NO: 1886512 - DNA, 25 bp, Homo sapien
gaagttattgtcaccacatactctg

SEQ ID NO: 1886513 - DNA, 25 bp, Homo sapien
gtcctataactggtacactttcttc

SEQ ID NO: 1886514 - DNA, 25 bp, Homo sapien
gttctgacaataaagtttcagtggt

SEQ ID NO: 1886515 - DNA, 25 bp, Homo sapien
gacatatgaacagtattttcatcta

SEQ ID NO: 1886516 - DNA, 25 bp, Homo sapien
cgttattctgtaacccacaattgga

SEQ ID NO: 1886517 - DNA, 25 bp, Homo sapien
cgttgtagggtccaccgttattctg

SEQ ID NO: 1886518 - DNA, 25 bp, Homo sapien
gatcaactggttttgcccatgacat

SEQ ID NO: 1886519 - DNA, 25 bp, Homo sapien
ccatagttgcataggatgagaatcc

SEQ ID NO: 1886520 - DNA, 25 bp, Homo sapien
aaattttcaattatgcactagctgc

SEQ ID NO: 1886521 - DNA, 25 bp, Homo sapien
tgcccagcccggaaattttcaatta

SEQ ID NO: 1886522 - DNA, 25 bp, Homo sapien
catattgattataactgcaaagagc

SEQ ID NO: 1886523 - DNA, 25 bp, Homo sapien
tgagtgttctctataacaggcagag

SEQ ID NO: 1886524 - DNA, 25 bp, Homo sapien
caatgatgggccttattatccctgc

SEQ ID NO: 1886525 - DNA, 25 bp, Homo sapien
tcaaaacgctatgctacgaagactc

SEQ ID NO: 1886526 - DNA, 25 bp, Homo sapien
cagccaataggcaacaacacttgga

SEQ ID NO: 1886527 - DNA, 25 bp, Homo sapien
agttctcagggaatactgaccatta

SEQ ID NO: 1886528 - DNA, 25 bp, Homo sapien
tagacacaagacaaagctatagcca

SEQ ID NO: 1886529 - DNA, 25 bp, Homo sapien
gctatagccacaactcaccgatgaa

SEQ ID NO: 1886530 - DNA, 25 bp, Homo sapien
gatgatctctatgttagcctctagt

SEQ ID NO: 1886531 - DNA, 25 bp, Homo sapien
ccttgaaaaccttggcataatcatg

SEQ ID NO: 1886532 - DNA, 25 bp, Homo sapien
attgggtgggacatctaacaaaagc

SEQ ID NO: 1886533 - DNA, 25 bp, Homo sapien
gatatctttcatgacattaccccat

SEQ ID NO: 1886534 - DNA, 25 bp, Homo sapien
tctaaaaaagcacacctcaacccag

SEQ ID NO: 1886535 - DNA, 25 bp, Homo sapien
gttgcgctgattagagccgtcgccc

SEQ ID NO: 1886536 - DNA, 25 bp, Homo sapien
cggctggtcctcttattaggcggca

SEQ ID NO: 1886537 - DNA, 25 bp, Homo sapien
cacccggaggtgtcctgttggttgc

SEQ ID NO: 1886538 - DNA, 25 bp, Homo sapien
cagtgtggacagcacaccgcagaga

SEQ ID NO: 1886539 - DNA, 25 bp, Homo sapien
gcgctgggggaagcctactccgcat

SEQ ID NO: 1886540 - DNA, 25 bp, Homo sapien
gcctccgagcttacagcggcatgaa

SEQ ID NO: 1886541 - DNA, 25 bp, Homo sapien
tggcctccgagcttacagcggcatg

SEQ ID NO: 1886542 - DNA, 25 bp, Homo sapien
cttggcctccgagcttacagcggca

SEQ ID NO: 1886543 - DNA, 25 bp, Homo sapien
tccgagcttacagcggcatgaagag

SEQ ID NO: 1886544 - DNA, 25 bp, Homo sapien
gaagactacagagtccggatcgaga

SEQ ID NO: 1886545 - DNA, 25 bp, Homo sapien
attcactagaagactacagagtccg

SEQ ID NO: 1886546 - DNA, 25 bp, Homo sapien
gagtccggatcgagagtctccctgg

SEQ ID NO: 1886547 - DNA, 25 bp, Homo sapien
tacagagtccggatcgagagtctcc

SEQ ID NO: 1886548 - DNA, 25 bp, Homo sapien
tgaagggctcccgaggtcgcccgct

SEQ ID NO: 1886549 - DNA, 25 bp, Homo sapien
actgaagggctcccgaggtcgcccg

SEQ ID NO: 1886550 - DNA, 25 bp, Homo sapien
tcactgaagggctcccgaggtcgcc

SEQ ID NO: 1886551 - DNA, 25 bp, Homo sapien
aagggctcccgaggtcgcccgcttg

SEQ ID NO: 1886552 - DNA, 25 bp, Homo sapien
gagtccggcgacccacgctttctga

SEQ ID NO: 1886553 - DNA, 25 bp, Homo sapien
tttctgatccccacaagtctaggat

SEQ ID NO: 1886554 - DNA, 25 bp, Homo sapien
ttccgctcgctgaacgagtccggcg

SEQ ID NO: 1886555 - DNA, 25 bp, Homo sapien
ctgttccgctcgctgaacgagtccg

SEQ ID NO: 1886556 - DNA, 25 bp, Homo sapien
gaaaccgccgcggagatctcacaga

SEQ ID NO: 1886557 - DNA, 25 bp, Homo sapien
cgcggagatctcacagaccccgaat

SEQ ID NO: 1886558 - DNA, 25 bp, Homo sapien
ggagatctcacagaccccgaatagg

SEQ ID NO: 1886559 - DNA, 25 bp, Homo sapien
agatctcacagaccccgaatagggc

SEQ ID NO: 1886560 - DNA, 25 bp, Homo sapien
tgtcctcgcccaggattcttcaccg

SEQ ID NO: 1886561 - DNA, 25 bp, Homo sapien
gctagacgccgtttcccgagttgtc

SEQ ID NO: 1886562 - DNA, 25 bp, Homo sapien
gattcttcaccgctccgggcaaggt

SEQ ID NO: 1886563 - DNA, 25 bp, Homo sapien
gctccgggcaaggtgcaagctagac

SEQ ID NO: 1886564 - DNA, 25 bp, Homo sapien
ttcccggcgtcggagaagctggtgc

SEQ ID NO: 1886565 - DNA, 25 bp, Homo sapien
tggtgctcggtgtggcccccacacg

SEQ ID NO: 1886566 - DNA, 25 bp, Homo sapien
acgccccggcgataggcgctgcact

SEQ ID NO: 1886567 - DNA, 25 bp, Homo sapien
aggagcacctggcggccgccgaggc

SEQ ID NO: 1886568 - DNA, 25 bp, Homo sapien
tcctccggcggtgaaggaggtctac

SEQ ID NO: 1886569 - DNA, 25 bp, Homo sapien
tgagaaggtggacggctgccacggg

SEQ ID NO: 1886570 - DNA, 25 bp, Homo sapien
tgccacggggtgatgtatgctcctc

SEQ ID NO: 1886571 - DNA, 25 bp, Homo sapien
gaaacgcctgagaaggtggacggct

SEQ ID NO: 1886572 - DNA, 25 bp, Homo sapien
tggcgatcgccgtagtagcagtgcc

SEQ ID NO: 1886573 - DNA, 25 bp, Homo sapien
ttttgggaacgtgtgcatacttcga

SEQ ID NO: 1886574 - DNA, 25 bp, Homo sapien
cattccttcggcgtgaggtggcgat

SEQ ID NO: 1886575 - DNA, 25 bp, Homo sapien
gtgcatacttcgagcattccttcgg

SEQ ID NO: 1886576 - DNA, 25 bp, Homo sapien
ctttcctgcggctggaggccgcaga

SEQ ID NO: 1886577 - DNA, 25 bp, Homo sapien
tcacgggcttccctttcctgcggct

SEQ ID NO: 1886578 - DNA, 25 bp, Homo sapien
gctggaggccgcagactgggtggaa

SEQ ID NO: 1886579 - DNA, 25 bp, Homo sapien
cacgggcttccctttcctgcggctg

SEQ ID NO: 1886580 - DNA, 25 bp, Homo sapien
tcaggcgatatcacgggctctgcct

SEQ ID NO: 1886581 - DNA, 25 bp, Homo sapien
caggcgatatcacgggctctgcctc

SEQ ID NO: 1886582 - DNA, 25 bp, Homo sapien
tctgcctccttcgcgcttcctctgt

SEQ ID NO: 1886583 - DNA, 25 bp, Homo sapien
tccttcgcgcttcctctgttcagct

SEQ ID NO: 1886584 - DNA, 25 bp, Homo sapien
cctcagatttcttgtccgacagcgc

SEQ ID NO: 1886585 - DNA, 25 bp, Homo sapien
cggcggttccgagccctcagatttc

SEQ ID NO: 1886586 - DNA, 25 bp, Homo sapien
cagatttcttgtccgacagcgctat

SEQ ID NO: 1886587 - DNA, 25 bp, Homo sapien
ggctcccggcggttccgagccctca

SEQ ID NO: 1886588 - DNA, 25 bp, Homo sapien
cagattcccatactctgaatggctc

SEQ ID NO: 1886589 - DNA, 25 bp, Homo sapien
cctgaactcagattcccatactctg

SEQ ID NO: 1886590 - DNA, 25 bp, Homo sapien
gctgcacctgaactcagattcccat

SEQ ID NO: 1886591 - DNA, 25 bp, Homo sapien
agcccgctgcacctgaactcagatt

SEQ ID NO: 1886592 - DNA, 25 bp, Homo sapien
gttaactgtttagctgaaccacctc

SEQ ID NO: 1886593 - DNA, 25 bp, Homo sapien
gaaccacctcttaattcacctgtga

SEQ ID NO: 1886594 - DNA, 25 bp, Homo sapien
catcacatactccttagagattgcc

SEQ ID NO: 1886595 - DNA, 25 bp, Homo sapien
tgaacctgctttctatggccacctg

SEQ ID NO: 1886596 - DNA, 25 bp, Homo sapien
atccttacctaagatttacaaggct

SEQ ID NO: 1886597 - DNA, 25 bp, Homo sapien
agatttacaaggctgaccaaaagtt

SEQ ID NO: 1886598 - DNA, 25 bp, Homo sapien
ttctttgatccttacctaagattta

SEQ ID NO: 1886599 - DNA, 25 bp, Homo sapien
gatttacaaggctgaccaaaagttg

SEQ ID NO: 1886600 - DNA, 25 bp, Homo sapien
aatgaaactgaaccaagcgattgct

SEQ ID NO: 1886601 - DNA, 25 bp, Homo sapien
aaactgaaccaagcgattgctggga

SEQ ID NO: 1886602 - DNA, 25 bp, Homo sapien
gatccccaaagaagagctcggttat

SEQ ID NO: 1886603 - DNA, 25 bp, Homo sapien
cggttatttatcagattactggtcc

SEQ ID NO: 1886604 - DNA, 25 bp, Homo sapien
agccagctcatatatggcatatgct

SEQ ID NO: 1886605 - DNA, 25 bp, Homo sapien
tcttgggaaatgaagccacagccag

SEQ ID NO: 1886606 - DNA, 25 bp, Homo sapien
cacagccagctcatatatggcatat

SEQ ID NO: 1886607 - DNA, 25 bp, Homo sapien
cagctcatatatggcatatgctgtt

SEQ ID NO: 1886608 - DNA, 25 bp, Homo sapien
catattaacccaagactgcctgaga

SEQ ID NO: 1886609 - DNA, 25 bp, Homo sapien
taagactaccttaattggaacacaa

SEQ ID NO: 1886610 - DNA, 25 bp, Homo sapien
taaaaaatagctgataactgggccg

SEQ ID NO: 1886611 - DNA, 25 bp, Homo sapien
aactgggccgggcatagttgctgaa

SEQ ID NO: 1886612 - DNA, 25 bp, Homo sapien
tgtttccccaacgaggagattgtgg

SEQ ID NO: 1886613 - DNA, 25 bp, Homo sapien
caacgaggagattgtgggaacccca

SEQ ID NO: 1886614 - DNA, 25 bp, Homo sapien
aatgtgtttccccaacgaggagatt

SEQ ID NO: 1886615 - DNA, 25 bp, Homo sapien
tccccaacgaggagattgtgggaac

SEQ ID NO: 1886616 - DNA, 25 bp, Homo sapien
cttatacagtatgtatcagtcaccc

SEQ ID NO: 1886617 - DNA, 25 bp, Homo sapien
tagtaagatatcaaattctggagac

SEQ ID NO: 1886618 - DNA, 25 bp, Homo sapien
agtcaccctcttgaatcattatgag

SEQ ID NO: 1886619 - DNA, 25 bp, Homo sapien
cattaaaatactggcatagcaaaag

SEQ ID NO: 1886620 - DNA, 25 bp, Homo sapien
cccaccctttagatacagtggaatt

SEQ ID NO: 1886621 - DNA, 25 bp, Homo sapien
caccaactgtaagaatcatggtggc

SEQ ID NO: 1886622 - DNA, 25 bp, Homo sapien
actgtaagaatcatggtggctctat

SEQ ID NO: 1886623 - DNA, 25 bp, Homo sapien
caactgtaagaatcatggtggctct

SEQ ID NO: 1886624 - DNA, 25 bp, Homo sapien
caggtctttccccaagagacaacca

SEQ ID NO: 1886625 - DNA, 25 bp, Homo sapien
gcatctaatccagcatacagtagct

SEQ ID NO: 1886626 - DNA, 25 bp, Homo sapien
gagatccattaatgacggtctttcc

SEQ ID NO: 1886627 - DNA, 25 bp, Homo sapien
ctattagcactatggtacatgtcct

SEQ ID NO: 1886628 - DNA, 25 bp, Homo sapien
tggtaatctaataattacaagtaac

SEQ ID NO: 1886629 - DNA, 25 bp, Homo sapien
ttacaagtaacatctcctataaaat

SEQ ID NO: 1886630 - DNA, 25 bp, Homo sapien
catctcctataaaatacttcagtac

SEQ ID NO: 1886631 - DNA, 25 bp, Homo sapien
taatctaataattacaagtaacatc

SEQ ID NO: 1886632 - DNA, 25 bp, Homo sapien
cctgcgggaagcagtgcttatcgtc

SEQ ID NO: 1886633 - DNA, 25 bp, Homo sapien
gggaagcagtgcttatcgtcctctg

SEQ ID NO: 1886634 - DNA, 25 bp, Homo sapien
tcctctgcccaatctgacgaagagc

SEQ ID NO: 1886635 - DNA, 25 bp, Homo sapien
gcttatcgtcctctgcccaatctga

SEQ ID NO: 1886636 - DNA, 25 bp, Homo sapien
cctctccactccttacatctaccca

SEQ ID NO: 1886637 - DNA, 25 bp, Homo sapien
actccttacatctacccagtaacgg

SEQ ID NO: 1886638 - DNA, 25 bp, Homo sapien
tctccactccttacatctacccagt

SEQ ID NO: 1886639 - DNA, 25 bp, Homo sapien
agcctctccactccttacatctacc

SEQ ID NO: 1886640 - DNA, 25 bp, Homo sapien
cttggctgttactgaccagcaaccg

SEQ ID NO: 1886641 - DNA, 25 bp, Homo sapien
actacctccgagtcttgcgtatgca

SEQ ID NO: 1886642 - DNA, 25 bp, Homo sapien
caccaacgaaaatggccacgccgga

SEQ ID NO: 1886643 - DNA, 25 bp, Homo sapien
tgaacaccaccaacgaaaatggcca

SEQ ID NO: 1886644 - DNA, 25 bp, Homo sapien
ccgggccgaagagaggcttgcgctc

SEQ ID NO: 1886645 - DNA, 25 bp, Homo sapien
tccgggccgaagagaggcttgcgct

SEQ ID NO: 1886646 - DNA, 25 bp, Homo sapien
aatctttccgggccgaagagaggct

SEQ ID NO: 1886647 - DNA, 25 bp, Homo sapien
ctttccgggccgaagagaggcttgc

SEQ ID NO: 1886648 - DNA, 25 bp, Homo sapien
cgtgatctcgttcctgaccttttcg

SEQ ID NO: 1886649 - DNA, 25 bp, Homo sapien
gtacggctctatccgctctagccgg

SEQ ID NO: 1886650 - DNA, 25 bp, Homo sapien
agaaaaactagagcggcagtacggc

SEQ ID NO: 1886651 - DNA, 25 bp, Homo sapien
tcgatgttcagtaggctggtccctg

SEQ ID NO: 1886652 - DNA, 25 bp, Homo sapien
caaattgtggaagaggctcgctcgc

SEQ ID NO: 1886653 - DNA, 25 bp, Homo sapien
gactgctgcagaactccccaagcaa

SEQ ID NO: 1886654 - DNA, 25 bp, Homo sapien
gttcttccacagtgtccccaaattg

SEQ ID NO: 1886655 - DNA, 25 bp, Homo sapien
tgctgcagaactccccaagcaagaa

SEQ ID NO: 1886656 - DNA, 25 bp, Homo sapien
aatgattgctgcttgggccttacta

SEQ ID NO: 1886657 - DNA, 25 bp, Homo sapien
tgaccttattaaacccaggcttgtg

SEQ ID NO: 1886658 - DNA, 25 bp, Homo sapien
caaggtggttggctataccattcac

SEQ ID NO: 1886659 - DNA, 25 bp, Homo sapien
caagacagatgtcaaggcacaagaa

SEQ ID NO: 1886660 - DNA, 25 bp, Homo sapien
aggaaataaggccaccacggtctga

SEQ ID NO: 1886661 - DNA, 25 bp, Homo sapien
tagatatacaaaaggaaataaggcc

SEQ ID NO: 1886662 - DNA, 25 bp, Homo sapien
tgtgtacatgttactttgataaatt

SEQ ID NO: 1886663 - DNA, 25 bp, Homo sapien
tatacaaaaggaaataaggccacca

SEQ ID NO: 1886664 - DNA, 25 bp, Homo sapien
tactgaatggtgcatgggataaaaa

SEQ ID NO: 1886665 - DNA, 25 bp, Homo sapien
tgctcctcctcactagtcaggtttt

SEQ ID NO: 1886666 - DNA, 25 bp, Homo sapien
caatggttctatgaagacaggagag

SEQ ID NO: 1886667 - DNA, 25 bp, Homo sapien
tagcaggctgaaccgcattcactga

SEQ ID NO: 1886668 - DNA, 25 bp, Homo sapien
tgtaactcagatgataatctgacca

SEQ ID NO: 1886669 - DNA, 25 bp, Homo sapien
caaacttagccagtctaactgtaac

SEQ ID NO: 1886670 - DNA, 25 bp, Homo sapien
tctctgtttactggacattcccctt

SEQ ID NO: 1886671 - DNA, 25 bp, Homo sapien
tccccttgatctaataccaaactta

SEQ ID NO: 1886672 - DNA, 25 bp, Homo sapien
agaagttaaaacctggactcactga

SEQ ID NO: 1886673 - DNA, 25 bp, Homo sapien
gactcactgacgctgtgttaaaatt

SEQ ID NO: 1886674 - DNA, 25 bp, Homo sapien
tttatcaagacacctgaacatagca

SEQ ID NO: 1886675 - DNA, 25 bp, Homo sapien
agaacaaatggttaatgttgtcaca

SEQ ID NO: 1886676 - DNA, 25 bp, Homo sapien
gagttccttagagatcaaacagcag

SEQ ID NO: 1886677 - DNA, 25 bp, Homo sapien
tggtagtcctccttaaacagcacag

SEQ ID NO: 1886678 - DNA, 25 bp, Homo sapien
gaaaacaggaggaacttaggccatc

SEQ ID NO: 1886679 - DNA, 25 bp, Homo sapien
tgccaagtgcaagagggacaatctt

SEQ ID NO: 1886680 - DNA, 25 bp, Homo sapien
tatgccagacaaggtaagcgtgtcc

SEQ ID NO: 1886681 - DNA, 25 bp, Homo sapien
gaagtcatccgtagggaagaagcaa

SEQ ID NO: 1886682 - DNA, 25 bp, Homo sapien
aaagaggctctatgcatcatgtggc

SEQ ID NO: 1886683 - DNA, 25 bp, Homo sapien
catgtggcctgtccgaataaaaagc

SEQ ID NO: 1886684 - DNA, 25 bp, Homo sapien
gtcagctgtattactactgtttcta

SEQ ID NO: 1886685 - DNA, 25 bp, Homo sapien
gaaggaaggagatggatccaacagc

SEQ ID NO: 1886686 - DNA, 25 bp, Homo sapien
gatgtaagcaatccccaaaaatgga

SEQ ID NO: 1886687 - DNA, 25 bp, Homo sapien
tgaaatagtgctcaagatcatccgt

SEQ ID NO: 1886688 - DNA, 25 bp, Homo sapien
tcactcctacgttctaaatcacaca

SEQ ID NO: 1886689 - DNA, 25 bp, Homo sapien
gccatttaattgttggtaattcatt

SEQ ID NO: 1886690 - DNA, 25 bp, Homo sapien
cttgaaagactgatttagcaaacta

SEQ ID NO: 1886691 - DNA, 25 bp, Homo sapien
tttgtgtaattctaggatatacagg

SEQ ID NO: 1886692 - DNA, 25 bp, Homo sapien
tagtctttagttcccaccttatgcc

SEQ ID NO: 1886693 - DNA, 25 bp, Homo sapien
tgttttgcaggtccaaattcctgtc

SEQ ID NO: 1886694 - DNA, 25 bp, Homo sapien
acattctgtgggatacagtatcaaa

SEQ ID NO: 1886695 - DNA, 25 bp, Homo sapien
gattttaagacctctagctaaccca

SEQ ID NO: 1886696 - DNA, 25 bp, Homo sapien
cacttgaagtgggtctgtctgtcca

SEQ ID NO: 1886697 - DNA, 25 bp, Homo sapien
tgagtgaactagctaagacgcaggc

SEQ ID NO: 1886698 - DNA, 25 bp, Homo sapien
ctgtaatagggagatatgctgctgc

SEQ ID NO: 1886699 - DNA, 25 bp, Homo sapien
tggtcacttttagcctgccatagca

SEQ ID NO: 1886700 - DNA, 25 bp, Homo sapien
aaaatgttttgatactaccaataga

SEQ ID NO: 1886701 - DNA, 25 bp, Homo sapien
atgtgaacttattaatatggaacaa

SEQ ID NO: 1886702 - DNA, 25 bp, Homo sapien
ccaatagatcaaaatcatgaacaat

SEQ ID NO: 1886703 - DNA, 25 bp, Homo sapien
tcatgaacaattacattgatacaaa

SEQ ID NO: 1886704 - DNA, 25 bp, Homo sapien
caattttaggtactctcattggcct

SEQ ID NO: 1886705 - DNA, 25 bp, Homo sapien
caaaccccagtaccaagtatatgcg

SEQ ID NO: 1886706 - DNA, 25 bp, Homo sapien
cagatataaggttggactcgactcc

SEQ ID NO: 1886707 - DNA, 25 bp, Homo sapien
taaagcacaaggtaacatgccacat

SEQ ID NO: 1886708 - DNA, 25 bp, Homo sapien
tctataagacgatacaacttgcgaa

SEQ ID NO: 1886709 - DNA, 25 bp, Homo sapien
cgaaaagtaggtaatgctgcagtac

SEQ ID NO: 1886710 - DNA, 25 bp, Homo sapien
ttcaaagagtatcggccagctggta

SEQ ID NO: 1886711 - DNA, 25 bp, Homo sapien
gctgcagtacgcatccaaacaataa

SEQ ID NO: 1886712 - DNA, 25 bp, Homo sapien
tatctgtccaccaagcaataccttt

SEQ ID NO: 1886713 - DNA, 25 bp, Homo sapien
cacatttttatctgtccaccaagca

SEQ ID NO: 1886714 - DNA, 25 bp, Homo sapien
cattgccaatgagaaacaattctaa

SEQ ID NO: 1886715 - DNA, 25 bp, Homo sapien
ctttttcaaagcgataggtatagga

SEQ ID NO: 1886716 - DNA, 25 bp, Homo sapien
caaggagcaattggtttgtcttcat

SEQ ID NO: 1886717 - DNA, 25 bp, Homo sapien
tttcttcgataaggttcacattcct

SEQ ID NO: 1886718 - DNA, 25 bp, Homo sapien
ttcatttcttcgataaggttcacat

SEQ ID NO: 1886719 - DNA, 25 bp, Homo sapien
ttggcaatagctccacaaggagcaa

SEQ ID NO: 1886720 - DNA, 25 bp, Homo sapien
ttttcttatcacagaaacattacca

SEQ ID NO: 1886721 - DNA, 25 bp, Homo sapien
ttttaatataacctttacttgcata

SEQ ID NO: 1886722 - DNA, 25 bp, Homo sapien
ataacctttacttgcatatgttttg

SEQ ID NO: 1886723 - DNA, 25 bp, Homo sapien
gattttcttatcacagaaacattac

SEQ ID NO: 1886724 - DNA, 25 bp, Homo sapien
gtccataatacataaacacgttgcc

SEQ ID NO: 1886725 - DNA, 25 bp, Homo sapien
cgtaacgacgatggttttgatagaa

SEQ ID NO: 1886726 - DNA, 25 bp, Homo sapien
catttagttgactatcatctcgaga

SEQ ID NO: 1886727 - DNA, 25 bp, Homo sapien
tgatagaaattagacagtccataat

SEQ ID NO: 1886728 - DNA, 25 bp, Homo sapien
gctttagtatcgtaagtatgcacaa

SEQ ID NO: 1886729 - DNA, 25 bp, Homo sapien
tcctcaaaagcctataaactccagt

SEQ ID NO: 1886730 - DNA, 25 bp, Homo sapien
taaagcatggcttttctagcacatt

SEQ ID NO: 1886731 - DNA, 25 bp, Homo sapien
taattaccagacagcaaaatccaac

SEQ ID NO: 1886732 - DNA, 25 bp, Homo sapien
agataaacatttattacagggactg

SEQ ID NO: 1886733 - DNA, 25 bp, Homo sapien
tgtcacatccggagataaacattta

SEQ ID NO: 1886734 - DNA, 25 bp, Homo sapien
tgtgaagttaatggtacaaaagcaa

SEQ ID NO: 1886735 - DNA, 25 bp, Homo sapien
aaaagcaaggtgtcacatccggaga

SEQ ID NO: 1886736 - DNA, 25 bp, Homo sapien
tataactaagcacttccttagagaa

SEQ ID NO: 1886737 - DNA, 25 bp, Homo sapien
actaagcacttccttagagaaagtg

SEQ ID NO: 1886738 - DNA, 25 bp, Homo sapien
taagcacttccttagagaaagtgga

SEQ ID NO: 1886739 - DNA, 25 bp, Homo sapien
taactaagcacttccttagagaaag

SEQ ID NO: 1886740 - DNA, 25 bp, Homo sapien
taaagactgcgtttctgagaggtcc

SEQ ID NO: 1886741 - DNA, 25 bp, Homo sapien
caaatcgggtatcagtttaaaactg

SEQ ID NO: 1886742 - DNA, 25 bp, Homo sapien
ccaatggatgcaggatacgacagta

SEQ ID NO: 1886743 - DNA, 25 bp, Homo sapien
tccaagttttgtggaactgtccatt

SEQ ID NO: 1886744 - DNA, 25 bp, Homo sapien
gaaggccgtgttatccggtctccga

SEQ ID NO: 1886745 - DNA, 25 bp, Homo sapien
gcagccgttgctgtttgaaggccgt

SEQ ID NO: 1886746 - DNA, 25 bp, Homo sapien
tgacaaaaatgccaatgccgatggg

SEQ ID NO: 1886747 - DNA, 25 bp, Homo sapien
tgaagaaaataggtagcaccgtgcc

SEQ ID NO: 1886748 - DNA, 25 bp, Homo sapien
ctggggcgccgctccgcgatttgca

SEQ ID NO: 1886749 - DNA, 25 bp, Homo sapien
gccgctccgcgatttgcaggtggac

SEQ ID NO: 1886750 - DNA, 25 bp, Homo sapien
ctccgcgatttgcaggtggaccacc

SEQ ID NO: 1886751 - DNA, 25 bp, Homo sapien
cgatttgcaggtggaccacccaggg

SEQ ID NO: 1886752 - DNA, 25 bp, Homo sapien
caaaggctgctgacgggaagcgaaa

SEQ ID NO: 1886753 - DNA, 25 bp, Homo sapien
tgacaggaaccgctcgagcgccgct

SEQ ID NO: 1886754 - DNA, 25 bp, Homo sapien
gaagaggcgggacactcttccgcca

SEQ ID NO: 1886755 - DNA, 25 bp, Homo sapien
ccacctccgctgtagagcggaagag

SEQ ID NO: 1886756 - DNA, 25 bp, Homo sapien
gaaaataaagagtgcttggtcctca

SEQ ID NO: 1886757 - DNA, 25 bp, Homo sapien
tttaggcttagtctgcagtaatgcc

SEQ ID NO: 1886758 - DNA, 25 bp, Homo sapien
taatttaccgttaagctgggctctg

SEQ ID NO: 1886759 - DNA, 25 bp, Homo sapien
tctttgaaatccaggccagagagta

SEQ ID NO: 1886760 - DNA, 25 bp, Homo sapien
tctaggataacagccaactgacatg

SEQ ID NO: 1886761 - DNA, 25 bp, Homo sapien
gaaacagagaatcgtcaaggataca

SEQ ID NO: 1886762 - DNA, 25 bp, Homo sapien
tgtgattctcacaagacttcggact

SEQ ID NO: 1886763 - DNA, 25 bp, Homo sapien
gacttccactgcatagaatctctca

SEQ ID NO: 1886764 - DNA, 25 bp, Homo sapien
caatgacctgtgaggaactgaaagc

SEQ ID NO: 1886765 - DNA, 25 bp, Homo sapien
ttttagcagaggcatagcactggag

SEQ ID NO: 1886766 - DNA, 25 bp, Homo sapien
gaatatctggccacattataagcct

SEQ ID NO: 1886767 - DNA, 25 bp, Homo sapien
tattactgcagtagcgctgttgtct

SEQ ID NO: 1886768 - DNA, 25 bp, Homo sapien
aactagagaaatgggccagcagtcc

SEQ ID NO: 1886769 - DNA, 25 bp, Homo sapien
tgatttgccaattccccaaggtgta

SEQ ID NO: 1886770 - DNA, 25 bp, Homo sapien
cagagactcagtttggatgcccgtg

SEQ ID NO: 1886771 - DNA, 25 bp, Homo sapien
tccttgtgacactcagaagcattct

SEQ ID NO: 1886772 - DNA, 25 bp, Homo sapien
tagtgatcagtagcatggaggacct

SEQ ID NO: 1886773 - DNA, 25 bp, Homo sapien
gatcagaaccatagcattgtacaag

SEQ ID NO: 1886774 - DNA, 25 bp, Homo sapien
catgtgcccatagacctgaaagctt

SEQ ID NO: 1886775 - DNA, 25 bp, Homo sapien
tagggattcagaggtcgtacacaca

SEQ ID NO: 1886776 - DNA, 25 bp, Homo sapien
tcgtaactggtgaatgatgatgctt

SEQ ID NO: 1886777 - DNA, 25 bp, Homo sapien
cgtaactggtgaatgatgatgcttt

SEQ ID NO: 1886778 - DNA, 25 bp, Homo sapien
attcgtaactggtgaatgatgatgc

SEQ ID NO: 1886779 - DNA, 25 bp, Homo sapien
tcattcgtaactggtgaatgatgat

SEQ ID NO: 1886780 - DNA, 25 bp, Homo sapien
catcactgagattatacacagcagg

SEQ ID NO: 1886781 - DNA, 25 bp, Homo sapien
ggtagtaattacaacagtccagcac

SEQ ID NO: 1886782 - DNA, 25 bp, Homo sapien
tacatgcatgatcaaaatgagacag

SEQ ID NO: 1886783 - DNA, 25 bp, Homo sapien
ggctgtatactgtgctaggtaggca

SEQ ID NO: 1886784 - DNA, 25 bp, Homo sapien
tagcattttgcacaacttagagttg

SEQ ID NO: 1886785 - DNA, 25 bp, Homo sapien
gaaacaatgtcttggttggaccata

SEQ ID NO: 1886786 - DNA, 25 bp, Homo sapien
ggtccgtacacagaagaaacaatgt

SEQ ID NO: 1886787 - DNA, 25 bp, Homo sapien
tgttttatatggagaccaacttcat

SEQ ID NO: 1886788 - DNA, 25 bp, Homo sapien
ggcccctttcttcacaggcctggtg

SEQ ID NO: 1886789 - DNA, 25 bp, Homo sapien
tacacttgatattcttagacttgtt

SEQ ID NO: 1886790 - DNA, 25 bp, Homo sapien
ttacacttgatattcttagacttgt

SEQ ID NO: 1886791 - DNA, 25 bp, Homo sapien
gcctgagcagcagctgtacacatca

SEQ ID NO: 1886792 - DNA, 25 bp, Homo sapien
tcccaagatttcagggtggggcctg

SEQ ID NO: 1886793 - DNA, 25 bp, Homo sapien
agcagcagctgtacacatcagccat

SEQ ID NO: 1886794 - DNA, 25 bp, Homo sapien
tgagcagcagctgtacacatcagcc

SEQ ID NO: 1886795 - DNA, 25 bp, Homo sapien
actggaactagaaaccacgccctgg

SEQ ID NO: 1886796 - DNA, 25 bp, Homo sapien
tgcaaaattttagaggtccaggccc

SEQ ID NO: 1886797 - DNA, 25 bp, Homo sapien
tgaagagcgtgtgattgagtcccca

SEQ ID NO: 1886798 - DNA, 25 bp, Homo sapien
gaaggttcactttcacggcagcagt

SEQ ID NO: 1886799 - DNA, 25 bp, Homo sapien
ttcatagactgagtctcagctcgag

SEQ ID NO: 1886800 - DNA, 25 bp, Homo sapien
ctcgaggctcgaatttggtcagatt

SEQ ID NO: 1886801 - DNA, 25 bp, Homo sapien
ggctgccactactggctttcctgct

SEQ ID NO: 1886802 - DNA, 25 bp, Homo sapien
ctgagtctcagctcgaggctcgaat

SEQ ID NO: 1886803 - DNA, 25 bp, Homo sapien
cttttgacataggaatgcgggtggg

SEQ ID NO: 1886804 - DNA, 25 bp, Homo sapien
ggccgctgggatgacccgtcttgtc

SEQ ID NO: 1886805 - DNA, 25 bp, Homo sapien
ccgctgggatgacccgtcttgtcct

SEQ ID NO: 1886806 - DNA, 25 bp, Homo sapien
aatgcgggtgggtgtaggccgctgg

SEQ ID NO: 1886807 - DNA, 25 bp, Homo sapien
aaagcagtatcggaccacctgagga

SEQ ID NO: 1886808 - DNA, 25 bp, Homo sapien
tgctttgaaatgctacccgtgtatg

SEQ ID NO: 1886809 - DNA, 25 bp, Homo sapien
ggagcctgcctcgagtctatgtttg

SEQ ID NO: 1886810 - DNA, 25 bp, Homo sapien
agtaattcacactttggagcctgcc

SEQ ID NO: 1886811 - DNA, 25 bp, Homo sapien
tatctccaaagtcgcagtgctgttc

SEQ ID NO: 1886812 - DNA, 25 bp, Homo sapien
tgaggattgtccgtcccatgggcat

SEQ ID NO: 1886813 - DNA, 25 bp, Homo sapien
ttcacactgggcctaagagctctgc

SEQ ID NO: 1886814 - DNA, 25 bp, Homo sapien
tgggttcctcgagcagatgacgttg

SEQ ID NO: 1886815 - DNA, 25 bp, Homo sapien
ctcttcatcctcttcatcttcctcc

SEQ ID NO: 1886816 - DNA, 25 bp, Homo sapien
ttattcatcatcgtcatcttcttca

SEQ ID NO: 1886817 - DNA, 25 bp, Homo sapien
ttcatcttcatcttcttcaccttct

SEQ ID NO: 1886818 - DNA, 25 bp, Homo sapien
tcttcatcttcttcaccttcttcct

SEQ ID NO: 1886819 - DNA, 25 bp, Homo sapien
gcttttttcagacttgacaattccc

SEQ ID NO: 1886820 - DNA, 25 bp, Homo sapien
cttgcttttttcagacttgacaatt

SEQ ID NO: 1886821 - DNA, 25 bp, Homo sapien
cttttttcagacttgacaattccct

SEQ ID NO: 1886822 - DNA, 25 bp, Homo sapien
tgcttttttcagacttgacaattcc

SEQ ID NO: 1886823 - DNA, 25 bp, Homo sapien
tcctttagcttgatatgcagcaata

SEQ ID NO: 1886824 - DNA, 25 bp, Homo sapien
cagcaatatccttttcttgtttttc

SEQ ID NO: 1886825 - DNA, 25 bp, Homo sapien
tttcctttagcttgatatgcagcaa

SEQ ID NO: 1886826 - DNA, 25 bp, Homo sapien
ttgtttttccttcagcttcgcagcc

SEQ ID NO: 1886827 - DNA, 25 bp, Homo sapien
cctttaggagggctatagatttcat

SEQ ID NO: 1886828 - DNA, 25 bp, Homo sapien
gccgaaggagagctcttgggtgccc

SEQ ID NO: 1886829 - DNA, 25 bp, Homo sapien
gagctcttgggtgccctggagtcct

SEQ ID NO: 1886830 - DNA, 25 bp, Homo sapien
ttaggagggctatagatttcatttc

SEQ ID NO: 1886831 - DNA, 25 bp, Homo sapien
ttcttatgctcctcctccggacaag

SEQ ID NO: 1886832 - DNA, 25 bp, Homo sapien
atgctcctcctccggacaagtttgc

SEQ ID NO: 1886833 - DNA, 25 bp, Homo sapien
caggataattgtgtgaacccggggg

SEQ ID NO: 1886834 - DNA, 25 bp, Homo sapien
gaatgcatatcatgacattttgcct

SEQ ID NO: 1886835 - DNA, 25 bp, Homo sapien
ctccccagtcgattcagcattccac

SEQ ID NO: 1886836 - DNA, 25 bp, Homo sapien
gcattccacttgcagatgttttttt

SEQ ID NO: 1886837 - DNA, 25 bp, Homo sapien
agcattccacttgcagatgtttttt

SEQ ID NO: 1886838 - DNA, 25 bp, Homo sapien
ccccagtcgattcagcattccactt

SEQ ID NO: 1886839 - DNA, 25 bp, Homo sapien
taatttgctgaccatccaggaggcc

SEQ ID NO: 1886840 - DNA, 25 bp, Homo sapien
acactctagtatgaagctccctgac

SEQ ID NO: 1886841 - DNA, 25 bp, Homo sapien
tatttgagattcactgagagggaac

SEQ ID NO: 1886842 - DNA, 25 bp, Homo sapien
tatggactctctgtgggttagccca

SEQ ID NO: 1886843 - DNA, 25 bp, Homo sapien
ccacagggaattaaccgtcacattc

SEQ ID NO: 1886844 - DNA, 25 bp, Homo sapien
gaattaaccgtcacattccagccct

SEQ ID NO: 1886845 - DNA, 25 bp, Homo sapien
ctactccacagggaattaaccgtca

SEQ ID NO: 1886846 - DNA, 25 bp, Homo sapien
gggaattaaccgtcacattccagcc

SEQ ID NO: 1886847 - DNA, 25 bp, Homo sapien
agagccccagggatgcagcgaccca

SEQ ID NO: 1886848 - DNA, 25 bp, Homo sapien
ccgtttccttattagcagcagtcca

SEQ ID NO: 1886849 - DNA, 25 bp, Homo sapien
tgttctcaaaaatgccgtttcctta

SEQ ID NO: 1886850 - DNA, 25 bp, Homo sapien
caaggtccgtggtccgtggtctccg

SEQ ID NO: 1886851 - DNA, 25 bp, Homo sapien
cctgcataggcttagtggatcctga

SEQ ID NO: 1886852 - DNA, 25 bp, Homo sapien
tgaataagtatggtcactccgccta

SEQ ID NO: 1886853 - DNA, 25 bp, Homo sapien
acgtagcactttgctcaggagaggc

SEQ ID NO: 1886854 - DNA, 25 bp, Homo sapien
aattgttagtctggagttgaccaac

SEQ ID NO: 1886855 - DNA, 25 bp, Homo sapien
tcaaagtctgtggaattcacagaca

SEQ ID NO: 1886856 - DNA, 25 bp, Homo sapien
gtctgtggaattcacagacataagc

SEQ ID NO: 1886857 - DNA, 25 bp, Homo sapien
tgtggaattcacagacataagcatt

SEQ ID NO: 1886858 - DNA, 25 bp, Homo sapien
gaattcacagacataagcattcagc

SEQ ID NO: 1886859 - DNA, 25 bp, Homo sapien
tagcatgcgccggtaggtttctttc

SEQ ID NO: 1886860 - DNA, 25 bp, Homo sapien
gcaggttggtgaagtcgtcgctctt

SEQ ID NO: 1886861 - DNA, 25 bp, Homo sapien
aactcgtatacggtgcgcctatgac

SEQ ID NO: 1886862 - DNA, 25 bp, Homo sapien
gcctatgacacttctcggccagcaa

SEQ ID NO: 1886863 - DNA, 25 bp, Homo sapien
attgaggaggacactgtaaatgggc

SEQ ID NO: 1886864 - DNA, 25 bp, Homo sapien
gaggaggacactgtaaatgggctga

SEQ ID NO: 1886865 - DNA, 25 bp, Homo sapien
gctccaggaaggcattgaggaggac

SEQ ID NO: 1886866 - DNA, 25 bp, Homo sapien
gaggacactgtaaatgggctgacag

SEQ ID NO: 1886867 - DNA, 25 bp, Homo sapien
caagaatggcatctcggtgcaggac

SEQ ID NO: 1886868 - DNA, 25 bp, Homo sapien
gcagcactttctctggctccgcaga

SEQ ID NO: 1886869 - DNA, 25 bp, Homo sapien
tggatttctcctgggcaagaatggc

SEQ ID NO: 1886870 - DNA, 25 bp, Homo sapien
cagacccgtaatgagcctccagaac

SEQ ID NO: 1886871 - DNA, 25 bp, Homo sapien
tcagacgactgacaatgtaaatcgc

SEQ ID NO: 1886872 - DNA, 25 bp, Homo sapien
tgtaaatcgcatactgggctcaaaa

SEQ ID NO: 1886873 - DNA, 25 bp, Homo sapien
gaaagtgcagcaagatcagacgact

SEQ ID NO: 1886874 - DNA, 25 bp, Homo sapien
aaaaatcaacagagagcttattgaa

SEQ ID NO: 1886875 - DNA, 25 bp, Homo sapien
ccgatcttaaaaaggtgtcatcacc

SEQ ID NO: 1886876 - DNA, 25 bp, Homo sapien
cacacccgaggtcagttttttgctt

SEQ ID NO: 1886877 - DNA, 25 bp, Homo sapien
tttgcttagaccaaatctgaaagag

SEQ ID NO: 1886878 - DNA, 25 bp, Homo sapien
ttaagtcatcctcacacccgaggtc

SEQ ID NO: 1886879 - DNA, 25 bp, Homo sapien
cacaactgtgttcgctgtgcactta

SEQ ID NO: 1886880 - DNA, 25 bp, Homo sapien
gagtctttggggcacacacaactgt

SEQ ID NO: 1886881 - DNA, 25 bp, Homo sapien
cataaacagaagagcgagtctttgg

SEQ ID NO: 1886882 - DNA, 25 bp, Homo sapien
tccaagtagacaacaactggcataa

SEQ ID NO: 1886883 - DNA, 25 bp, Homo sapien
ggggcagccatcagacccacagcag

SEQ ID NO: 1886884 - DNA, 25 bp, Homo sapien
aggggcagccatcagacccacagca

SEQ ID NO: 1886885 - DNA, 25 bp, Homo sapien
gggcagccatcagacccacagcagg

SEQ ID NO: 1886886 - DNA, 25 bp, Homo sapien
ctctactgagtttttgtggtcagga

SEQ ID NO: 1886887 - DNA, 25 bp, Homo sapien
ctgagctgtcataatcgtgcttcat

SEQ ID NO: 1886888 - DNA, 25 bp, Homo sapien
tctgagctgtcataatcgtgcttca

SEQ ID NO: 1886889 - DNA, 25 bp, Homo sapien
tggtcagatgaaagcatggtgaaga

SEQ ID NO: 1886890 - DNA, 25 bp, Homo sapien
aagtggtcagatgaaagcatggtga

SEQ ID NO: 1886891 - DNA, 25 bp, Homo sapien
agtggtcagatgaaagcatggtgaa

SEQ ID NO: 1886892 - DNA, 25 bp, Homo sapien
gtggtcagatgaaagcatggtgaag

SEQ ID NO: 1886893 - DNA, 25 bp, Homo sapien
taatgctatcctccctttgctatcc

SEQ ID NO: 1886894 - DNA, 25 bp, Homo sapien
ttgcctaatgctatcctccctttgc

SEQ ID NO: 1886895 - DNA, 25 bp, Homo sapien
gcctaatgctatcctccctttgcta

SEQ ID NO: 1886896 - DNA, 25 bp, Homo sapien
tatcctccctttgctatccctaatg

SEQ ID NO: 1886897 - DNA, 25 bp, Homo sapien
acaaactatgaaaatggctcctcaa

SEQ ID NO: 1886898 - DNA, 25 bp, Homo sapien
cagctaaggcgagagcactgcactt

SEQ ID NO: 1886899 - DNA, 25 bp, Homo sapien
tggtacactccatgttcagagaaac

SEQ ID NO: 1886900 - DNA, 25 bp, Homo sapien
caatgaagcaactgatttcacagct

SEQ ID NO: 1886901 - DNA, 25 bp, Homo sapien
agcaggaacccatctggttcctggc

SEQ ID NO: 1886902 - DNA, 25 bp, Homo sapien
gagcaggaacccatctggttcctgg

SEQ ID NO: 1886903 - DNA, 25 bp, Homo sapien
gcaggaacccatctggttcctggct

SEQ ID NO: 1886904 - DNA, 25 bp, Homo sapien
caggaacccatctggttcctggctg

SEQ ID NO: 1886905 - DNA, 25 bp, Homo sapien
gtggtattttcccatggccagattc

SEQ ID NO: 1886906 - DNA, 25 bp, Homo sapien
gacaggagatatgcccatcagatgc

SEQ ID NO: 1886907 - DNA, 25 bp, Homo sapien
tactgagtagttggatgaggtcttc

SEQ ID NO: 1886908 - DNA, 25 bp, Homo sapien
caccaccttggtttcgagatctcat

SEQ ID NO: 1886909 - DNA, 25 bp, Homo sapien
ccagcattgccgatgatggagggct

SEQ ID NO: 1886910 - DNA, 25 bp, Homo sapien
tttagacacatttctcattttccct

SEQ ID NO: 1886911 - DNA, 25 bp, Homo sapien
tagacacatttctcattttcccttc

SEQ ID NO: 1886912 - DNA, 25 bp, Homo sapien
gacacatttctcattttcccttcca

SEQ ID NO: 1886913 - DNA, 25 bp, Homo sapien
acacatttctcattttcccttccat

SEQ ID NO: 1886914 - DNA, 25 bp, Homo sapien
aattcactcttgtaacccctgcagc

SEQ ID NO: 1886915 - DNA, 25 bp, Homo sapien
cagcaattagcatagggctttcaca

SEQ ID NO: 1886916 - DNA, 25 bp, Homo sapien
agttctcagaatcataaggccccta

SEQ ID NO: 1886917 - DNA, 25 bp, Homo sapien
cagcaactgatgagtacagtcagcc

SEQ ID NO: 1886918 - DNA, 25 bp, Homo sapien
tacaggatgctcagttaagttggaa

SEQ ID NO: 1886919 - DNA, 25 bp, Homo sapien
catacactcatacaaaagagtattc

SEQ ID NO: 1886920 - DNA, 25 bp, Homo sapien
ggcgtgagacatcgtattcccaaaa

SEQ ID NO: 1886921 - DNA, 25 bp, Homo sapien
gatgctcagttaagttggaatctca

SEQ ID NO: 1886922 - DNA, 25 bp, Homo sapien
tcttcagcagtgtgtcttcacctct

SEQ ID NO: 1886923 - DNA, 25 bp, Homo sapien
cacacttgttcacagtgcccttctt

SEQ ID NO: 1886924 - DNA, 25 bp, Homo sapien
cttcttcagcagtgtgtcttcacct

SEQ ID NO: 1886925 - DNA, 25 bp, Homo sapien
ggccacacttgttcacagtgccctt

SEQ ID NO: 1886926 - DNA, 25 bp, Homo sapien
accacaaattatgcaactcagtttc

SEQ ID NO: 1886927 - DNA, 25 bp, Homo sapien
cacatttggggaaaccacaggagtc

SEQ ID NO: 1886928 - DNA, 25 bp, Homo sapien
gggaaagcacgaacgcagaccccca

SEQ ID NO: 1886929 - DNA, 25 bp, Homo sapien
aaattatgcaactcagtttcccaca

SEQ ID NO: 1886930 - DNA, 25 bp, Homo sapien
tatttcccgataatcctgagagcaa

SEQ ID NO: 1886931 - DNA, 25 bp, Homo sapien
caatctggcaggaaataatggatgc

SEQ ID NO: 1886932 - DNA, 25 bp, Homo sapien
aatggatgctcaattcctctcctga

SEQ ID NO: 1886933 - DNA, 25 bp, Homo sapien
gagcagttagccttccacaaggaaa

SEQ ID NO: 1886934 - DNA, 25 bp, Homo sapien
atgttctccctgtttctgagcatag

SEQ ID NO: 1886935 - DNA, 25 bp, Homo sapien
tagacactattcctcctaacagcac

SEQ ID NO: 1886936 - DNA, 25 bp, Homo sapien
atagtagacactattcctcctaaca

SEQ ID NO: 1886937 - DNA, 25 bp, Homo sapien
tagtagacactattcctcctaacag

SEQ ID NO: 1886938 - DNA, 25 bp, Homo sapien
gcacattctttgcaggatcaaagag

SEQ ID NO: 1886939 - DNA, 25 bp, Homo sapien
cacattctttgcaggatcaaagagc

SEQ ID NO: 1886940 - DNA, 25 bp, Homo sapien
tgagaagctccaaagccaagtgatg

SEQ ID NO: 1886941 - DNA, 25 bp, Homo sapien
tcagatatctagagccacaaatgtg

SEQ ID NO: 1886942 - DNA, 25 bp, Homo sapien
tgatgcttaggatacggcattgcac

SEQ ID NO: 1886943 - DNA, 25 bp, Homo sapien
gctccaaagccaagtgatgcttagg

SEQ ID NO: 1886944 - DNA, 25 bp, Homo sapien
agccatcccaattgtgaaaggagat

SEQ ID NO: 1886945 - DNA, 25 bp, Homo sapien
catagttctgttacctgccgaagag

SEQ ID NO: 1886946 - DNA, 25 bp, Homo sapien
gagatatccttttcattgcttagcc

SEQ ID NO: 1886947 - DNA, 25 bp, Homo sapien
caagctgcttagctagtttcagtaa

SEQ ID NO: 1886948 - DNA, 25 bp, Homo sapien
gaaatcccgatcagcagaaattgga

SEQ ID NO: 1886949 - DNA, 25 bp, Homo sapien
gaagaacccagtggcttgtctcaca

SEQ ID NO: 1886950 - DNA, 25 bp, Homo sapien
gcccaagacagattcgagttctcaa

SEQ ID NO: 1886951 - DNA, 25 bp, Homo sapien
caatagctgaagtcatgcaggaaac

SEQ ID NO: 1886952 - DNA, 25 bp, Homo sapien
taatagatctcaggataataataaa

SEQ ID NO: 1886953 - DNA, 25 bp, Homo sapien
catatattaaccaaactgattctca

SEQ ID NO: 1886954 - DNA, 25 bp, Homo sapien
cagacacagagttctaagggcttaa

SEQ ID NO: 1886955 - DNA, 25 bp, Homo sapien
ggaaagtaatagatctcaggataat

SEQ ID NO: 1886956 - DNA, 25 bp, Homo sapien
caacgcacccagaaagcaaatggct

SEQ ID NO: 1886957 - DNA, 25 bp, Homo sapien
ccactcgagagggagtgtaccctct

SEQ ID NO: 1886958 - DNA, 25 bp, Homo sapien
caaatggctaaaaaagccactcgag

SEQ ID NO: 1886959 - DNA, 25 bp, Homo sapien
aatcgaccagtgacaacgcacccag

SEQ ID NO: 1886960 - DNA, 25 bp, Homo sapien
tcacaagtttgggtatcagctcctc

SEQ ID NO: 1886961 - DNA, 25 bp, Homo sapien
ggagtttccagcaacacctgtagca

SEQ ID NO: 1886962 - DNA, 25 bp, Homo sapien
gctgcctgactaacgaactgaactg

SEQ ID NO: 1886963 - DNA, 25 bp, Homo sapien
tattctgtgtaaaggtagcgccaac

SEQ ID NO: 1886964 - DNA, 25 bp, Homo sapien
ccacatgataggagtataagaattg

SEQ ID NO: 1886965 - DNA, 25 bp, Homo sapien
tggtattttagttgcatactccaca

SEQ ID NO: 1886966 - DNA, 25 bp, Homo sapien
tccttgtgtcccaaatcatatacca

SEQ ID NO: 1886967 - DNA, 25 bp, Homo sapien
tatacattggacttgtgataagaag

SEQ ID NO: 1886968 - DNA, 25 bp, Homo sapien
gctatgtagcaacactctcgggcat

SEQ ID NO: 1886969 - DNA, 25 bp, Homo sapien
taaaaccaggtgtagtatacagagc

SEQ ID NO: 1886970 - DNA, 25 bp, Homo sapien
gatattaggatcagtctggaaccag

SEQ ID NO: 1886971 - DNA, 25 bp, Homo sapien
gaaaggacaagctaactcttctgct

SEQ ID NO: 1886972 - DNA, 25 bp, Homo sapien
gactgttactactacatctcaggca

SEQ ID NO: 1886973 - DNA, 25 bp, Homo sapien
gaaattgcccagttttaccagatgt

SEQ ID NO: 1886974 - DNA, 25 bp, Homo sapien
gcatgtatgatttactgtctcagat

SEQ ID NO: 1886975 - DNA, 25 bp, Homo sapien
aatttgctgggattcagattctggc

SEQ ID NO: 1886976 - DNA, 25 bp, Homo sapien
gcccagttacccctggcgatcaatg

SEQ ID NO: 1886977 - DNA, 25 bp, Homo sapien
tacccttgaaccaagatcggtcctc

SEQ ID NO: 1886978 - DNA, 25 bp, Homo sapien
tttggaagggatgcgcatggagcga

SEQ ID NO: 1886979 - DNA, 25 bp, Homo sapien
cttgtatacccttgaaccaagatcg

SEQ ID NO: 1886980 - DNA, 25 bp, Homo sapien
gtttagtgacattctagactttgca

SEQ ID NO: 1886981 - DNA, 25 bp, Homo sapien
tgccagtacccatgcttaatgtccc

SEQ ID NO: 1886982 - DNA, 25 bp, Homo sapien
tacatgccatctatacctaggtaag

SEQ ID NO: 1886983 - DNA, 25 bp, Homo sapien
cgataaggtctctcttcgttgctca

SEQ ID NO: 1886984 - DNA, 25 bp, Homo sapien
tcccccagccctccatcccacaaca

SEQ ID NO: 1886985 - DNA, 25 bp, Homo sapien
ccagccctccatcccacaacaggcc

SEQ ID NO: 1886986 - DNA, 25 bp, Homo sapien
ccccagccctccatcccacaacagg

SEQ ID NO: 1886987 - DNA, 25 bp, Homo sapien
agccctccatcccacaacaggccct

SEQ ID NO: 1886988 - DNA, 25 bp, Homo sapien
cccagaaagttgctgataggactaa

SEQ ID NO: 1886989 - DNA, 25 bp, Homo sapien
tctgccaagcctgtaattaagaaga

SEQ ID NO: 1886990 - DNA, 25 bp, Homo sapien
taattgattccaatcctgggcagga

SEQ ID NO: 1886991 - DNA, 25 bp, Homo sapien
tgagaatggcctacagaatgaaagt

SEQ ID NO: 1886992 - DNA, 25 bp, Homo sapien
gccaactgtggtggctaaaaaataa

SEQ ID NO: 1886993 - DNA, 25 bp, Homo sapien
cacagtgggtcacactttgtgctag

SEQ ID NO: 1886994 - DNA, 25 bp, Homo sapien
gacctagggtagttaaacaatctgc

SEQ ID NO: 1886995 - DNA, 25 bp, Homo sapien
gaagctagatcacttccagacacag

SEQ ID NO: 1886996 - DNA, 25 bp, Homo sapien
caagagtttggtggagcaaagcgac

SEQ ID NO: 1886997 - DNA, 25 bp, Homo sapien
gagatacagataacaaggctgctct

SEQ ID NO: 1886998 - DNA, 25 bp, Homo sapien
gaataccttggtcagaagaaacaac

SEQ ID NO: 1886999 - DNA, 25 bp, Homo sapien
caaagcgactggaatataacaatgg

SEQ ID NO: 1887000 - DNA, 25 bp, Homo sapien
acttccatagctactcgagggtggg

SEQ ID NO: 1887001 - DNA, 25 bp, Homo sapien
gaaactggtgagcagcacgttgact

SEQ ID NO: 1887002 - DNA, 25 bp, Homo sapien
ctatccagactgatgaagctctagg

SEQ ID NO: 1887003 - DNA, 25 bp, Homo sapien
gatgaagctctaggttgatacaaac

SEQ ID NO: 1887004 - DNA, 25 bp, Homo sapien
ccgagtgagcagtggttcttgccgc

SEQ ID NO: 1887005 - DNA, 25 bp, Homo sapien
agcccagtccaagccggcccgatcc

SEQ ID NO: 1887006 - DNA, 25 bp, Homo sapien
ctcgctgccgcccaagcgcggacac

SEQ ID NO: 1887007 - DNA, 25 bp, Homo sapien
agcagtggttcttgccgcaaccgcc

SEQ ID NO: 1887008 - DNA, 25 bp, Homo sapien
gacaggacctgctttgccgggactg

SEQ ID NO: 1887009 - DNA, 25 bp, Homo sapien
tccctgcttgaactgattctcgctg

SEQ ID NO: 1887010 - DNA, 25 bp, Homo sapien
gcacagtcacagtatccagccggac

SEQ ID NO: 1887011 - DNA, 25 bp, Homo sapien
cgctgttggtagactgcacagtcac

SEQ ID NO: 1887012 - DNA, 25 bp, Homo sapien
cctccagcttcacccgtacaggtag

SEQ ID NO: 1887013 - DNA, 25 bp, Homo sapien
gcaccggtgagtgtcccagagaccc

SEQ ID NO: 1887014 - DNA, 25 bp, Homo sapien
cacctgccttcgctcccgcaccggt

SEQ ID NO: 1887015 - DNA, 25 bp, Homo sapien
agcttcacccgtacaggtagccccg

SEQ ID NO: 1887016 - DNA, 25 bp, Homo sapien
cataaaacgtgaatcttgaacttgg

SEQ ID NO: 1887017 - DNA, 25 bp, Homo sapien
tcttgaacttggactggtagtggtc

SEQ ID NO: 1887018 - DNA, 25 bp, Homo sapien
tggtacaaaggttggcggcaaaaca

SEQ ID NO: 1887019 - DNA, 25 bp, Homo sapien
tagtggtcatggtacaaaggttggc

SEQ ID NO: 1887020 - DNA, 25 bp, Homo sapien
tttctgtggcagaattttttgattt

SEQ ID NO: 1887021 - DNA, 25 bp, Homo sapien
ttctgtggcagaattttttgatttc

SEQ ID NO: 1887022 - DNA, 25 bp, Homo sapien
atttctgatctatgtggatgaacat

SEQ ID NO: 1887023 - DNA, 25 bp, Homo sapien
cattcggaggtgattagttaatatt

SEQ ID NO: 1887024 - DNA, 25 bp, Homo sapien
ttttaactagcttcattcggaggtg

SEQ ID NO: 1887025 - DNA, 25 bp, Homo sapien
cagctttttaactagcttcattcgg

SEQ ID NO: 1887026 - DNA, 25 bp, Homo sapien
actagcttcattcggaggtgattag

SEQ ID NO: 1887027 - DNA, 25 bp, Homo sapien
gcccaggagctatggtgatcttctt

SEQ ID NO: 1887028 - DNA, 25 bp, Homo sapien
aggagctatggtgatcttctttgag

SEQ ID NO: 1887029 - DNA, 25 bp, Homo sapien
caggagctatggtgatcttctttga

SEQ ID NO: 1887030 - DNA, 25 bp, Homo sapien
cccaggagctatggtgatcttcttt

SEQ ID NO: 1887031 - DNA, 25 bp, Homo sapien
ggttcggaatgacagccacacaagt

SEQ ID NO: 1887032 - DNA, 25 bp, Homo sapien
tctgcagctgaaccattgtggagaa

SEQ ID NO: 1887033 - DNA, 25 bp, Homo sapien
tggagaaactaaggttcggaatgac

SEQ ID NO: 1887034 - DNA, 25 bp, Homo sapien
gaatgacagccacacaagttagaga

SEQ ID NO: 1887035 - DNA, 25 bp, Homo sapien
cttaaccagtttgttgctgtagctt

SEQ ID NO: 1887036 - DNA, 25 bp, Homo sapien
ttaaccagtttgttgctgtagcttg

SEQ ID NO: 1887037 - DNA, 25 bp, Homo sapien
gcgtagagatgggataaacctggaa

SEQ ID NO: 1887038 - DNA, 25 bp, Homo sapien
aacctggaatacttggaggaacttg

SEQ ID NO: 1887039 - DNA, 25 bp, Homo sapien
gatgggataaacctggaatacttgg

SEQ ID NO: 1887040 - DNA, 25 bp, Homo sapien
ctaaagcgtagagatgggataaacc

SEQ ID NO: 1887041 - DNA, 25 bp, Homo sapien
cccataaataacattcctttgagat

SEQ ID NO: 1887042 - DNA, 25 bp, Homo sapien
taacccataaataacattcctttga

SEQ ID NO: 1887043 - DNA, 25 bp, Homo sapien
taacattcctttgagatattgccat

SEQ ID NO: 1887044 - DNA, 25 bp, Homo sapien
ataacattcctttgagatattgcca

SEQ ID NO: 1887045 - DNA, 25 bp, Homo sapien
caaggtagggtttgtgtgtagccta

SEQ ID NO: 1887046 - DNA, 25 bp, Homo sapien
cagatgagattaggcgcattgagag

SEQ ID NO: 1887047 - DNA, 25 bp, Homo sapien
agattaggcgcattgagagtggtat

SEQ ID NO: 1887048 - DNA, 25 bp, Homo sapien
tgagattaggcgcattgagagtggt

SEQ ID NO: 1887049 - DNA, 25 bp, Homo sapien
taggcgcattgagagtggtatggcg

SEQ ID NO: 1887050 - DNA, 25 bp, Homo sapien
tattctctaactattacacatgggc

SEQ ID NO: 1887051 - DNA, 25 bp, Homo sapien
tcctttgccagaagactaccttaca

SEQ ID NO: 1887052 - DNA, 25 bp, Homo sapien
tctgtatcccgctgtaattcccaaa

SEQ ID NO: 1887053 - DNA, 25 bp, Homo sapien
gatggcacagtaccatataactgga

SEQ ID NO: 1887054 - DNA, 25 bp, Homo sapien
gtaattgtagacctgtttcataagc

SEQ ID NO: 1887055 - DNA, 25 bp, Homo sapien
tgtgtgctgttagtattgattcaaa

SEQ ID NO: 1887056 - DNA, 25 bp, Homo sapien
tatgctgacataattctaaggagtt

SEQ ID NO: 1887057 - DNA, 25 bp, Homo sapien
aaatacatcaaggagttatgctgac

SEQ ID NO: 1887058 - DNA, 25 bp, Homo sapien
gctgactagtgtttgtgagccacag

SEQ ID NO: 1887059 - DNA, 25 bp, Homo sapien
aagattacctcagttagggaagtat

SEQ ID NO: 1887060 - DNA, 25 bp, Homo sapien
gtgtctgtgctattgagaatgcaaa

SEQ ID NO: 1887061 - DNA, 25 bp, Homo sapien
ttagagaccctaacctttgaaatga

SEQ ID NO: 1887062 - DNA, 25 bp, Homo sapien
cattcatgcgtttagagagacctgc

SEQ ID NO: 1887063 - DNA, 25 bp, Homo sapien
tactggttgccaagtacatgactct

SEQ ID NO: 1887064 - DNA, 25 bp, Homo sapien
gatgccagtctaggtatacacacac

SEQ ID NO: 1887065 - DNA, 25 bp, Homo sapien
catctccctgcgtaagtagtcatct

SEQ ID NO: 1887066 - DNA, 25 bp, Homo sapien
tcccaatcttgatggttaaattctt

SEQ ID NO: 1887067 - DNA, 25 bp, Homo sapien
aattcttcatattctacggtcagta

SEQ ID NO: 1887068 - DNA, 25 bp, Homo sapien
cccaatcttgatggttaaattcttc

SEQ ID NO: 1887069 - DNA, 25 bp, Homo sapien
cttcatattctacggtcagtaattc

SEQ ID NO: 1887070 - DNA, 25 bp, Homo sapien
cacattttggttaatcccagccttc

SEQ ID NO: 1887071 - DNA, 25 bp, Homo sapien
tatccttgcactagaaaatgtcacc

SEQ ID NO: 1887072 - DNA, 25 bp, Homo sapien
gtatcttgcttatctctatttaaaa

SEQ ID NO: 1887073 - DNA, 25 bp, Homo sapien
aagtcaagtttagtaattgcaacca

SEQ ID NO: 1887074 - DNA, 25 bp, Homo sapien
tagttttgtatgcttgattttcaga

SEQ ID NO: 1887075 - DNA, 25 bp, Homo sapien
ctttttaacactagttttgtatgct

SEQ ID NO: 1887076 - DNA, 25 bp, Homo sapien
agttttgtatgcttgattttcagag

SEQ ID NO: 1887077 - DNA, 25 bp, Homo sapien
tttgtatgcttgattttcagagtga

SEQ ID NO: 1887078 - DNA, 25 bp, Homo sapien
cttaggcagtggtctcagaaggatg

SEQ ID NO: 1887079 - DNA, 25 bp, Homo sapien
caactctgtaatggcatattgttaa

SEQ ID NO: 1887080 - DNA, 25 bp, Homo sapien
tgcaggtgtcttccgtttgagttgg

SEQ ID NO: 1887081 - DNA, 25 bp, Homo sapien
caagttctgagttgtggttgctgaa

SEQ ID NO: 1887082 - DNA, 25 bp, Homo sapien
cgttcgttctttacacattgggcaa

SEQ ID NO: 1887083 - DNA, 25 bp, Homo sapien
tatcctggtttgcagcgacactccg

SEQ ID NO: 1887084 - DNA, 25 bp, Homo sapien
gaggacctcgcattcctttgtgcca

SEQ ID NO: 1887085 - DNA, 25 bp, Homo sapien
attgggcaaattcgccgcaggccag

SEQ ID NO: 1887086 - DNA, 25 bp, Homo sapien
tgatggcagaaccagaacaggcctc

SEQ ID NO: 1887087 - DNA, 25 bp, Homo sapien
cggagtcctcaagggctgatggcag

SEQ ID NO: 1887088 - DNA, 25 bp, Homo sapien
gctgatggcagaaccagaacaggcc

SEQ ID NO: 1887089 - DNA, 25 bp, Homo sapien
gggctgatggcagaaccagaacagg

SEQ ID NO: 1887090 - DNA, 25 bp, Homo sapien
ccagtgtaagggcatcggatgtatc

SEQ ID NO: 1887091 - DNA, 25 bp, Homo sapien
tacagtctgacactacagtggctcc

SEQ ID NO: 1887092 - DNA, 25 bp, Homo sapien
aaataagtgagctgccatgtagggc

SEQ ID NO: 1887093 - DNA, 25 bp, Homo sapien
ggtactgaaaagcaatcccaattgg

SEQ ID NO: 1887094 - DNA, 25 bp, Homo sapien
tccaatgcgatgaaacctagttctc

SEQ ID NO: 1887095 - DNA, 25 bp, Homo sapien
tgttggacagaaagtgatacatctc

SEQ ID NO: 1887096 - DNA, 25 bp, Homo sapien
gctcagcttgcctataaaattcagg

SEQ ID NO: 1887097 - DNA, 25 bp, Homo sapien
tccaagggcaaggtttcagctcagc

SEQ ID NO: 1887098 - DNA, 25 bp, Homo sapien
ggttttgttggtggcgaggaggtga

SEQ ID NO: 1887099 - DNA, 25 bp, Homo sapien
gttttgttggtggcgaggaggtgaa

SEQ ID NO: 1887100 - DNA, 25 bp, Homo sapien
tctagtgaaggcaaatgtcaaacag

SEQ ID NO: 1887101 - DNA, 25 bp, Homo sapien
ggcctctagtgaaggcaaatgtcaa

SEQ ID NO: 1887102 - DNA, 25 bp, Homo sapien
caaacagaaaatctgcagtgctgcg

SEQ ID NO: 1887103 - DNA, 25 bp, Homo sapien
aatctgcagtgctgcgtgtcccagg

SEQ ID NO: 1887104 - DNA, 25 bp, Homo sapien
aatgctggaagtgtgggcctaatgg

SEQ ID NO: 1887105 - DNA, 25 bp, Homo sapien
agatgctggtgcctgcggaaagatg

SEQ ID NO: 1887106 - DNA, 25 bp, Homo sapien
gtgcctgcggaaagatgagccaact

SEQ ID NO: 1887107 - DNA, 25 bp, Homo sapien
ttcttactctgtgagctcccaccag

SEQ ID NO: 1887108 - DNA, 25 bp, Homo sapien
tggatgggtccctaagtaagctgtc

SEQ ID NO: 1887109 - DNA, 25 bp, Homo sapien
ctggtggatgggtccctaagtaagc

SEQ ID NO: 1887110 - DNA, 25 bp, Homo sapien
gatgggtccctaagtaagctgtcag

SEQ ID NO: 1887111 - DNA, 25 bp, Homo sapien
ggtccctaagtaagctgtcagctcc

SEQ ID NO: 1887112 - DNA, 25 bp, Homo sapien
gcttccaaaaggttatttcatctgg

SEQ ID NO: 1887113 - DNA, 25 bp, Homo sapien
gctccatagcttccaaaaggttatt

SEQ ID NO: 1887114 - DNA, 25 bp, Homo sapien
ttccaaaaggttatttcatctggta

SEQ ID NO: 1887115 - DNA, 25 bp, Homo sapien
ccatagcttccaaaaggttatttca

SEQ ID NO: 1887116 - DNA, 25 bp, Homo sapien
ggttatacggcactgacttagcaaa

SEQ ID NO: 1887117 - DNA, 25 bp, Homo sapien
tcacactcccgtttctgaagttaag

SEQ ID NO: 1887118 - DNA, 25 bp, Homo sapien
gcagcagaacgaaaatcctccaaga

SEQ ID NO: 1887119 - DNA, 25 bp, Homo sapien
gattggatcgtagatatggaaccag

SEQ ID NO: 1887120 - DNA, 25 bp, Homo sapien
tgctccagagctcggtactccagag

SEQ ID NO: 1887121 - DNA, 25 bp, Homo sapien
tgaacaggtcgttggagaaggccat

SEQ ID NO: 1887122 - DNA, 25 bp, Homo sapien
gatctgggacagaaacatattcgct

SEQ ID NO: 1887123 - DNA, 25 bp, Homo sapien
gaaggccatgttagcaacacgcaga

SEQ ID NO: 1887124 - DNA, 25 bp, Homo sapien
tatcttcgccacctgcacttgatcg

SEQ ID NO: 1887125 - DNA, 25 bp, Homo sapien
cacttgatcggctgtcatctgaaga

SEQ ID NO: 1887126 - DNA, 25 bp, Homo sapien
tcccagagccagttggctgattgca

SEQ ID NO: 1887127 - DNA, 25 bp, Homo sapien
tggtgagccctggtactagcattgt

SEQ ID NO: 1887128 - DNA, 25 bp, Homo sapien
tggtgccttgatcagtcagagagaa

SEQ ID NO: 1887129 - DNA, 25 bp, Homo sapien
ggtgccttgatcagtcagagagaag

SEQ ID NO: 1887130 - DNA, 25 bp, Homo sapien
tgccttgatcagtcagagagaagat

SEQ ID NO: 1887131 - DNA, 25 bp, Homo sapien
gatgccataaagaaaggtggagctt

SEQ ID NO: 1887132 - DNA, 25 bp, Homo sapien
atagcaggtggagaccaagaagtgt

SEQ ID NO: 1887133 - DNA, 25 bp, Homo sapien
catagcaggtggagaccaagaagtg

SEQ ID NO: 1887134 - DNA, 25 bp, Homo sapien
tgacagggaggtagaggccatagca

SEQ ID NO: 1887135 - DNA, 25 bp, Homo sapien
ggtagaggccatagcaggtggagac

SEQ ID NO: 1887136 - DNA, 25 bp, Homo sapien
ctttagtagtctggttagcggtcta

SEQ ID NO: 1887137 - DNA, 25 bp, Homo sapien
agcattttttactctgtctatttga

SEQ ID NO: 1887138 - DNA, 25 bp, Homo sapien
tctttggtgggcatttagtggtata

SEQ ID NO: 1887139 - DNA, 25 bp, Homo sapien
atttggttgtgaatccatccagtcc

SEQ ID NO: 1887140 - DNA, 25 bp, Homo sapien
cttaggcagaaccactatagaagaa

SEQ ID NO: 1887141 - DNA, 25 bp, Homo sapien
ggatagaaggataggataataaact

SEQ ID NO: 1887142 - DNA, 25 bp, Homo sapien
ggtcttaggcagaaccactatagaa

SEQ ID NO: 1887143 - DNA, 25 bp, Homo sapien
ggcagaaccactatagaagaaaaat

SEQ ID NO: 1887144 - DNA, 25 bp, Homo sapien
ctggaacaaagtcagttctgatcag

SEQ ID NO: 1887145 - DNA, 25 bp, Homo sapien
caaagtcagttctgatcaggacata

SEQ ID NO: 1887146 - DNA, 25 bp, Homo sapien
cagttctgatcaggacatatctctg

SEQ ID NO: 1887147 - DNA, 25 bp, Homo sapien
aacaaagtcagttctgatcaggaca

SEQ ID NO: 1887148 - DNA, 25 bp, Homo sapien
catggactctcagtttccaagccca

SEQ ID NO: 1887149 - DNA, 25 bp, Homo sapien
tggctgtaggactgggaactagagc

SEQ ID NO: 1887150 - DNA, 25 bp, Homo sapien
gaactagagctgaaggaaggatgct

SEQ ID NO: 1887151 - DNA, 25 bp, Homo sapien
agttccattagaaaagggctgccgg

SEQ ID NO: 1887152 - DNA, 25 bp, Homo sapien
cactgtctcaagctggggttcaaca

SEQ ID NO: 1887153 - DNA, 25 bp, Homo sapien
ctggggttcaacaggaggaagttct

SEQ ID NO: 1887154 - DNA, 25 bp, Homo sapien
caggtagaccatgctctgctccgtc

SEQ ID NO: 1887155 - DNA, 25 bp, Homo sapien
tctgctccgtccactgtctcaagct

SEQ ID NO: 1887156 - DNA, 25 bp, Homo sapien
tgattgggtgtcaggaccaaaggct

SEQ ID NO: 1887157 - DNA, 25 bp, Homo sapien
caaaggctggcagtgatccagcaat

SEQ ID NO: 1887158 - DNA, 25 bp, Homo sapien
tctgattgggtgtcaggaccaaagg

SEQ ID NO: 1887159 - DNA, 25 bp, Homo sapien
aaggctggcagtgatccagcaattt

SEQ ID NO: 1887160 - DNA, 25 bp, Homo sapien
catggttccatgatagacttcctca

SEQ ID NO: 1887161 - DNA, 25 bp, Homo sapien
ccttttgaggtctgtagctgtgaga

SEQ ID NO: 1887162 - DNA, 25 bp, Homo sapien
aaagacaggaggtcacttgcagggc

SEQ ID NO: 1887163 - DNA, 25 bp, Homo sapien
agctgtgagatagatttctggttgc

SEQ ID NO: 1887164 - DNA, 25 bp, Homo sapien
gaatcctggaagtttcttaaatatc

SEQ ID NO: 1887165 - DNA, 25 bp, Homo sapien
tcctaacacatggatttttttgaat

SEQ ID NO: 1887166 - DNA, 25 bp, Homo sapien
ttgaatcctggaagtttcttaaata

SEQ ID NO: 1887167 - DNA, 25 bp, Homo sapien
ctaaatcctaacacatggatttttt

SEQ ID NO: 1887168 - DNA, 25 bp, Homo sapien
tctggggacaccgtcacatggacaa

SEQ ID NO: 1887169 - DNA, 25 bp, Homo sapien
gaagctcgactgtagatgctgtgct

SEQ ID NO: 1887170 - DNA, 25 bp, Homo sapien
ttcttctggaagctcgactgtagat

SEQ ID NO: 1887171 - DNA, 25 bp, Homo sapien
tcgactgtagatgctgtgctaggct

SEQ ID NO: 1887172 - DNA, 25 bp, Homo sapien
gaagggatagtggttgagtagtgaa

SEQ ID NO: 1887173 - DNA, 25 bp, Homo sapien
aagggatagtggttgagtagtgaag

SEQ ID NO: 1887174 - DNA, 25 bp, Homo sapien
taccagagatgctgttatatacatg

SEQ ID NO: 1887175 - DNA, 25 bp, Homo sapien
caggataccagagatgctgttatat

SEQ ID NO: 1887176 - DNA, 25 bp, Homo sapien
tatacatgaaaacagtcaatcgacc

SEQ ID NO: 1887177 - DNA, 25 bp, Homo sapien
gggactggcattgtagatgcctgca

SEQ ID NO: 1887178 - DNA, 25 bp, Homo sapien
gactgggagtcagcgagctctgcct

SEQ ID NO: 1887179 - DNA, 25 bp, Homo sapien
ttcctgctagctcctggtaatatgg

SEQ ID NO: 1887180 - DNA, 25 bp, Homo sapien
tgctcctccaacacagcgaattctg

SEQ ID NO: 1887181 - DNA, 25 bp, Homo sapien
tttaccagagagacgctgagctcca

SEQ ID NO: 1887182 - DNA, 25 bp, Homo sapien
cgttgagtgtattatcgagaatttc

SEQ ID NO: 1887183 - DNA, 25 bp, Homo sapien
tattatcgagaatttcattgaggag

SEQ ID NO: 1887184 - DNA, 25 bp, Homo sapien
tttcattgaggagggtgtcatcagg

SEQ ID NO: 1887185 - DNA, 25 bp, Homo sapien
taggcatcttggtgtcgttgagtgt

SEQ ID NO: 1887186 - DNA, 25 bp, Homo sapien
tctcccaatgtcttctctgcagata

SEQ ID NO: 1887187 - DNA, 25 bp, Homo sapien
tgacaatggtttcaccaggctctcc

SEQ ID NO: 1887188 - DNA, 25 bp, Homo sapien
ggtttcaccaggctctcccaatgtc

SEQ ID NO: 1887189 - DNA, 25 bp, Homo sapien
ctcccaatgtcttctctgcagatat

SEQ ID NO: 1887190 - DNA, 25 bp, Homo sapien
tcttgacatcagagataattgatga

SEQ ID NO: 1887191 - DNA, 25 bp, Homo sapien
cttgacatcagagataattgatgac

SEQ ID NO: 1887192 - DNA, 25 bp, Homo sapien
ttgacatcagagataattgatgaca

SEQ ID NO: 1887193 - DNA, 25 bp, Homo sapien
ctggtattatactatgtacttaata

SEQ ID NO: 1887194 - DNA, 25 bp, Homo sapien
tgtagaccatatttaacaactctcg

SEQ ID NO: 1887195 - DNA, 25 bp, Homo sapien
taacaactctcgttatatcaaatat

SEQ ID NO: 1887196 - DNA, 25 bp, Homo sapien
gcacttatagcctagacagtttgtt

SEQ ID NO: 1887197 - DNA, 25 bp, Homo sapien
ccttcttgttaatatcactttcatc

SEQ ID NO: 1887198 - DNA, 25 bp, Homo sapien
ttcttgttaatatcactttcatctc

SEQ ID NO: 1887199 - DNA, 25 bp, Homo sapien
aagatctccttcttgttaatatcac

SEQ ID NO: 1887200 - DNA, 25 bp, Homo sapien
ttatagtaagatctccttcttgtta

SEQ ID NO: 1887201 - DNA, 25 bp, Homo sapien
aagtcaacagtccattttgtgcagg

SEQ ID NO: 1887202 - DNA, 25 bp, Homo sapien
tgaaactggcagacttacgggttag

SEQ ID NO: 1887203 - DNA, 25 bp, Homo sapien
gactctgtgggatgacgttttcttg

SEQ ID NO: 1887204 - DNA, 25 bp, Homo sapien
ggcaatctataccatcaccgaggat

SEQ ID NO: 1887205 - DNA, 25 bp, Homo sapien
tgaggagtttatactcctacaggaa

SEQ ID NO: 1887206 - DNA, 25 bp, Homo sapien
cttgaggagtttatactcctacagg

SEQ ID NO: 1887207 - DNA, 25 bp, Homo sapien
ttgaggagtttatactcctacagga

SEQ ID NO: 1887208 - DNA, 25 bp, Homo sapien
cagggaaacttctctgttttattct

SEQ ID NO: 1887209 - DNA, 25 bp, Homo sapien
tcagggaaacttctctgttttattc

SEQ ID NO: 1887210 - DNA, 25 bp, Homo sapien
tgtcagggaaacttctctgttttat

SEQ ID NO: 1887211 - DNA, 25 bp, Homo sapien
ctgtcagggaaacttctctgtttta

SEQ ID NO: 1887212 - DNA, 25 bp, Homo sapien
cctgtgtcagggatgcgatccagaa

SEQ ID NO: 1887213 - DNA, 25 bp, Homo sapien
gttttttccaatgtcaaagaggcag

SEQ ID NO: 1887214 - DNA, 25 bp, Homo sapien
gctggcagatgctgacccagtcctg

SEQ ID NO: 1887215 - DNA, 25 bp, Homo sapien
ccagaaagatccgatatgcttccca

SEQ ID NO: 1887216 - DNA, 25 bp, Homo sapien
ggaaataacagggtgtcaacacgtg

SEQ ID NO: 1887217 - DNA, 25 bp, Homo sapien
gtgtcaacacgtgggaagcaatgga

SEQ ID NO: 1887218 - DNA, 25 bp, Homo sapien
tgaccacctcaaatgtgccatctgg

SEQ ID NO: 1887219 - DNA, 25 bp, Homo sapien
ggaatacctcaccttgcagaattca

SEQ ID NO: 1887220 - DNA, 25 bp, Homo sapien
ttgccaaatcgaatattcgtctcat

SEQ ID NO: 1887221 - DNA, 25 bp, Homo sapien
tgttcgatgctttgccaaatcgaat

SEQ ID NO: 1887222 - DNA, 25 bp, Homo sapien
gattcctgtggacagactttaaccc

SEQ ID NO: 1887223 - DNA, 25 bp, Homo sapien
aaatgcggatctttttgttcgatgc

SEQ ID NO: 1887224 - DNA, 25 bp, Homo sapien
gtttcagaatggtatatgttaatgg

SEQ ID NO: 1887225 - DNA, 25 bp, Homo sapien
tttcttgggggattgtctatgtctt

SEQ ID NO: 1887226 - DNA, 25 bp, Homo sapien
tgtctatgtctttagtttcagaatg

SEQ ID NO: 1887227 - DNA, 25 bp, Homo sapien
cagaatggtatatgttaatggagat

SEQ ID NO: 1887228 - DNA, 25 bp, Homo sapien
gcatatgccagtgctatcggcttga

SEQ ID NO: 1887229 - DNA, 25 bp, Homo sapien
tcctcgggcaggcttccatcaaatt

SEQ ID NO: 1887230 - DNA, 25 bp, Homo sapien
gctgacttaagccatgtgcctggag

SEQ ID NO: 1887231 - DNA, 25 bp, Homo sapien
caagaccagttgcaaggcatatgcc

SEQ ID NO: 1887232 - DNA, 25 bp, Homo sapien
cacaagttccttccccacgactgca

SEQ ID NO: 1887233 - DNA, 25 bp, Homo sapien
tctaaggcttggtaccacaagttcc

SEQ ID NO: 1887234 - DNA, 25 bp, Homo sapien
cacgactgcagaggtcttttctacc

SEQ ID NO: 1887235 - DNA, 25 bp, Homo sapien
ttctaaggcttggtaccacaagttc

SEQ ID NO: 1887236 - DNA, 25 bp, Homo sapien
caaaaatagctcttctagtttccaa

SEQ ID NO: 1887237 - DNA, 25 bp, Homo sapien
tagctcttctagtttccaaatacat

SEQ ID NO: 1887238 - DNA, 25 bp, Homo sapien
aaatagctcttctagtttccaaata

SEQ ID NO: 1887239 - DNA, 25 bp, Homo sapien
ttccttgaacttggagaaaaatcca

SEQ ID NO: 1887240 - DNA, 25 bp, Homo sapien
gataacaatcacagaacaacctcaa

SEQ ID NO: 1887241 - DNA, 25 bp, Homo sapien
tgataccagatgattgaggataacc

SEQ ID NO: 1887242 - DNA, 25 bp, Homo sapien
cctttatgagggtgttaatttatga

SEQ ID NO: 1887243 - DNA, 25 bp, Homo sapien
ggcttttgtgcattggtaattctga

SEQ ID NO: 1887244 - DNA, 25 bp, Homo sapien
taaggtaggcttccatcccttgagt

SEQ ID NO: 1887245 - DNA, 25 bp, Homo sapien
attagggatatactacacagaaaca

SEQ ID NO: 1887246 - DNA, 25 bp, Homo sapien
tctgtagctcagagagttttccctt

SEQ ID NO: 1887247 - DNA, 25 bp, Homo sapien
cattaattgggatgtcatctaaggt

SEQ ID NO: 1887248 - DNA, 25 bp, Homo sapien
tgcagatccatgcagaattgccatg

SEQ ID NO: 1887249 - DNA, 25 bp, Homo sapien
tgcagaattgccatgcagagtggct

SEQ ID NO: 1887250 - DNA, 25 bp, Homo sapien
taaaggcaagatggcctcctgatgc

SEQ ID NO: 1887251 - DNA, 25 bp, Homo sapien
ttgtaccaggactaccaagggagac

SEQ ID NO: 1887252 - DNA, 25 bp, Homo sapien
tcctgtatgtctcccggtttcgata

SEQ ID NO: 1887253 - DNA, 25 bp, Homo sapien
caagggtttgcactaagtcctcaac

SEQ ID NO: 1887254 - DNA, 25 bp, Homo sapien
tggattccccattgatcaccaaaaa

SEQ ID NO: 1887255 - DNA, 25 bp, Homo sapien
gctgaatataaaccctgtccaaggg

SEQ ID NO: 1887256 - DNA, 25 bp, Homo sapien
cctttaattccagtgcttactggca

SEQ ID NO: 1887257 - DNA, 25 bp, Homo sapien
ctttaattccagtgcttactggcat

SEQ ID NO: 1887258 - DNA, 25 bp, Homo sapien
cataatccagacttgtccaatggca

SEQ ID NO: 1887259 - DNA, 25 bp, Homo sapien
gataataagaagataccctgacgca

SEQ ID NO: 1887260 - DNA, 25 bp, Homo sapien
ggctagtagccgtcagttaagaaga

SEQ ID NO: 1887261 - DNA, 25 bp, Homo sapien
tagaaggcagaggtcgattgcagct

SEQ ID NO: 1887262 - DNA, 25 bp, Homo sapien
caccaatagcttttacagtgacagc

SEQ ID NO: 1887263 - DNA, 25 bp, Homo sapien
ctgcatgggtgttaaggacactgac

SEQ ID NO: 1887264 - DNA, 25 bp, Homo sapien
ggacactgacaggagtgagcagagc

SEQ ID NO: 1887265 - DNA, 25 bp, Homo sapien
tgcatgggtgttaaggacactgaca

SEQ ID NO: 1887266 - DNA, 25 bp, Homo sapien
tgagcagagcaccagaggtgcctgc

SEQ ID NO: 1887267 - DNA, 25 bp, Homo sapien
gcagcaagaggaaatagagaatgcc

SEQ ID NO: 1887268 - DNA, 25 bp, Homo sapien
cctctgccatgaaatgcccgattga

SEQ ID NO: 1887269 - DNA, 25 bp, Homo sapien
aggaacagctgagacgatgcccatc

SEQ ID NO: 1887270 - DNA, 25 bp, Homo sapien
gacgccactgggatgttcagaaatg

SEQ ID NO: 1887271 - DNA, 25 bp, Homo sapien
ttttttcaatatcttatgtttcttc

SEQ ID NO: 1887272 - DNA, 25 bp, Homo sapien
ttcaatatcttatgtttcttctcca

SEQ ID NO: 1887273 - DNA, 25 bp, Homo sapien
ttttcaatatcttatgtttcttctc

SEQ ID NO: 1887274 - DNA, 25 bp, Homo sapien
tcaatatcttatgtttcttctccat

SEQ ID NO: 1887275 - DNA, 25 bp, Homo sapien
aatgcacaggaagtgtgtttttgca

SEQ ID NO: 1887276 - DNA, 25 bp, Homo sapien
catttttgcttcacgtagatacaca

SEQ ID NO: 1887277 - DNA, 25 bp, Homo sapien
gcaggtcaagagctgtagagaaaat

SEQ ID NO: 1887278 - DNA, 25 bp, Homo sapien
caatgcacaggaagtgtgtttttgc

SEQ ID NO: 1887279 - DNA, 25 bp, Homo sapien
tccagtatagacattaagatcctgc

SEQ ID NO: 1887280 - DNA, 25 bp, Homo sapien
cagtggtggcttctcatatccagta

SEQ ID NO: 1887281 - DNA, 25 bp, Homo sapien
gctcacaacaaccatgtgatttctc

SEQ ID NO: 1887282 - DNA, 25 bp, Homo sapien
gatttctcccagtccacagtggtgg

SEQ ID NO: 1887283 - DNA, 25 bp, Homo sapien
ataagttaacggtaagaatgtactg

SEQ ID NO: 1887284 - DNA, 25 bp, Homo sapien
atatgcgtagcttcctctgtgttgc

SEQ ID NO: 1887285 - DNA, 25 bp, Homo sapien
gccttgctgccctccactgaggatc

SEQ ID NO: 1887286 - DNA, 25 bp, Homo sapien
tgctcctgcaatgttaatgctgtca

SEQ ID NO: 1887287 - DNA, 25 bp, Homo sapien
tcttgcttggcatatgcgtagcttc

SEQ ID NO: 1887288 - DNA, 25 bp, Homo sapien
taacgttgtcgccttgtgtactttg

SEQ ID NO: 1887289 - DNA, 25 bp, Homo sapien
tcaccttcctttagatgtcttttgc

SEQ ID NO: 1887290 - DNA, 25 bp, Homo sapien
tgtgcttgaagcttgcctttggtgg

SEQ ID NO: 1887291 - DNA, 25 bp, Homo sapien
gcttgcctttggtggactgcctgca

SEQ ID NO: 1887292 - DNA, 25 bp, Homo sapien
ctaaacagtagcaaggatcaacatt

SEQ ID NO: 1887293 - DNA, 25 bp, Homo sapien
ggatcaacatttttggtattgggtg

SEQ ID NO: 1887294 - DNA, 25 bp, Homo sapien
catttttggtattgggtggtcctgt

SEQ ID NO: 1887295 - DNA, 25 bp, Homo sapien
aggatggttggagcacattgttggc

SEQ ID NO: 1887296 - DNA, 25 bp, Homo sapien
gctgtccaaagttacagagccagtc

SEQ ID NO: 1887297 - DNA, 25 bp, Homo sapien
acctgctctcgtctttccactgtgg

SEQ ID NO: 1887298 - DNA, 25 bp, Homo sapien
gaggatttcatgacctgctctcgtc

SEQ ID NO: 1887299 - DNA, 25 bp, Homo sapien
tgctgctggaggatttcatgacctg

SEQ ID NO: 1887300 - DNA, 25 bp, Homo sapien
cctcatagacattgatattttcatc

SEQ ID NO: 1887301 - DNA, 25 bp, Homo sapien
cttttacatccctgattctgtccat

SEQ ID NO: 1887302 - DNA, 25 bp, Homo sapien
ttcacattattttcggcaaagccta

SEQ ID NO: 1887303 - DNA, 25 bp, Homo sapien
cacattattttcggcaaagcctagg

SEQ ID NO: 1887304 - DNA, 25 bp, Homo sapien
tcacattattttcggcaaagcctag

SEQ ID NO: 1887305 - DNA, 25 bp, Homo sapien
acattattttcggcaaagcctaggg

SEQ ID NO: 1887306 - DNA, 25 bp, Homo sapien
ttccatcagaataatcatacatttg

SEQ ID NO: 1887307 - DNA, 25 bp, Homo sapien
catcagaataatcatacatttgtac

SEQ ID NO: 1887308 - DNA, 25 bp, Homo sapien
cagcttccatcagaataatcataca

SEQ ID NO: 1887309 - DNA, 25 bp, Homo sapien
tcagaataatcatacatttgtacat

SEQ ID NO: 1887310 - DNA, 25 bp, Homo sapien
cactccactgtggtgagagacttat

SEQ ID NO: 1887311 - DNA, 25 bp, Homo sapien
gatgaggctgcctttgaactaggct

SEQ ID NO: 1887312 - DNA, 25 bp, Homo sapien
taagatcaacttaagtgcttggcct

SEQ ID NO: 1887313 - DNA, 25 bp, Homo sapien
ttcttatcggtaagcagaaccttca

SEQ ID NO: 1887314 - DNA, 25 bp, Homo sapien
gcagggaccatgttaatattctatc

SEQ ID NO: 1887315 - DNA, 25 bp, Homo sapien
tatggaaagattcacaaattttcat

SEQ ID NO: 1887316 - DNA, 25 bp, Homo sapien
agggaccatgttaatattctatcat

SEQ ID NO: 1887317 - DNA, 25 bp, Homo sapien
gtgcagggaccatgttaatattcta

SEQ ID NO: 1887318 - DNA, 25 bp, Homo sapien
agtgtctcaattccaggcaacaggg

SEQ ID NO: 1887319 - DNA, 25 bp, Homo sapien
tccgatagtacatatcttcagccac

SEQ ID NO: 1887320 - DNA, 25 bp, Homo sapien
tgcattcatattcaatcagctctgt

SEQ ID NO: 1887321 - DNA, 25 bp, Homo sapien
gatttgattggtctagttgggttta

SEQ ID NO: 1887322 - DNA, 25 bp, Homo sapien
tgatgatggattgccgttcccagag

SEQ ID NO: 1887323 - DNA, 25 bp, Homo sapien
aatttgatgatggattgccgttccc

SEQ ID NO: 1887324 - DNA, 25 bp, Homo sapien
tgatggattgccgttcccagagatt

SEQ ID NO: 1887325 - DNA, 25 bp, Homo sapien
ctgaatttgatgatggattgccgtt

SEQ ID NO: 1887326 - DNA, 25 bp, Homo sapien
tatatttatgttgatatttggtcac

SEQ ID NO: 1887327 - DNA, 25 bp, Homo sapien
catcctgttccttaatttcttatat

SEQ ID NO: 1887328 - DNA, 25 bp, Homo sapien
tatttatgttgatatttggtcacca

SEQ ID NO: 1887329 - DNA, 25 bp, Homo sapien
cttatatttatgttgatatttggtc

SEQ ID NO: 1887330 - DNA, 25 bp, Homo sapien
tctacagctcattatgtgaacaata

SEQ ID NO: 1887331 - DNA, 25 bp, Homo sapien
ggcatttctacagctcattatgtga

SEQ ID NO: 1887332 - DNA, 25 bp, Homo sapien
tacagctcattatgtgaacaataat

SEQ ID NO: 1887333 - DNA, 25 bp, Homo sapien
catttctacagctcattatgtgaac

SEQ ID NO: 1887334 - DNA, 25 bp, Homo sapien
tttggttttgcctcaataatgtcag

SEQ ID NO: 1887335 - DNA, 25 bp, Homo sapien
tggttttgcctcaataatgtcagaa

SEQ ID NO: 1887336 - DNA, 25 bp, Homo sapien
gccatttggttttgcctcaataatg

SEQ ID NO: 1887337 - DNA, 25 bp, Homo sapien
ttgcctcaataatgtcagaatcttc

SEQ ID NO: 1887338 - DNA, 25 bp, Homo sapien
taacaaacttgcacacatatcctct

SEQ ID NO: 1887339 - DNA, 25 bp, Homo sapien
cttggaaactgttgggtatgggttg

SEQ ID NO: 1887340 - DNA, 25 bp, Homo sapien
ttccatctgttcatgtcatctgtga

SEQ ID NO: 1887341 - DNA, 25 bp, Homo sapien
gacaatcagtgaatgacacagtcat

SEQ ID NO: 1887342 - DNA, 25 bp, Homo sapien
ggatggattctcatactgtatatca

SEQ ID NO: 1887343 - DNA, 25 bp, Homo sapien
ttctttgactcataaaagccatggt

SEQ ID NO: 1887344 - DNA, 25 bp, Homo sapien
ccagggtctagccagtcatattaat

SEQ ID NO: 1887345 - DNA, 25 bp, Homo sapien
tcacaccggtgatttatagtattaa

SEQ ID NO: 1887346 - DNA, 25 bp, Homo sapien
gttagctttggcgtagacccactaa

SEQ ID NO: 1887347 - DNA, 25 bp, Homo sapien
tttgttgtacttgactgaagttcct

SEQ ID NO: 1887348 - DNA, 25 bp, Homo sapien
ccactaacttttgttgtacttgact

SEQ ID NO: 1887349 - DNA, 25 bp, Homo sapien
tagctttggcgtagacccactaact

SEQ ID NO: 1887350 - DNA, 25 bp, Homo sapien
attggcgtgtcacccctctgcagag

SEQ ID NO: 1887351 - DNA, 25 bp, Homo sapien
caattttaatatgcgccgccgaagc

SEQ ID NO: 1887352 - DNA, 25 bp, Homo sapien
tcatgaattggcgtgtcacccctct

SEQ ID NO: 1887353 - DNA, 25 bp, Homo sapien
tccaattttaatatgcgccgccgaa

SEQ ID NO: 1887354 - DNA, 25 bp, Homo sapien
cacagctcaagcttccagttattct

SEQ ID NO: 1887355 - DNA, 25 bp, Homo sapien
ccaagtcacatttacacagctcaag

SEQ ID NO: 1887356 - DNA, 25 bp, Homo sapien
cttcttcctagagtggactcatttc

SEQ ID NO: 1887357 - DNA, 25 bp, Homo sapien
cctagagtggactcatttccatttg

SEQ ID NO: 1887358 - DNA, 25 bp, Homo sapien
ctatataaaatataggggtagaggc

SEQ ID NO: 1887359 - DNA, 25 bp, Homo sapien
tctttgttccaggaatccattcctg

SEQ ID NO: 1887360 - DNA, 25 bp, Homo sapien
gcatcaagagccctgtggacattct

SEQ ID NO: 1887361 - DNA, 25 bp, Homo sapien
catcaagagccctgtggacattctt

SEQ ID NO: 1887362 - DNA, 25 bp, Homo sapien
cagatgattagagctgcactcctac

SEQ ID NO: 1887363 - DNA, 25 bp, Homo sapien
tcagatgattagagctgcactccta

SEQ ID NO: 1887364 - DNA, 25 bp, Homo sapien
gctgcactgctgcattcatttccat

SEQ ID NO: 1887365 - DNA, 25 bp, Homo sapien
cagcaagcagctttataaacacagg

SEQ ID NO: 1887366 - DNA, 25 bp, Homo sapien
agctcttttactctctgctgcactg

SEQ ID NO: 1887367 - DNA, 25 bp, Homo sapien
cacaggtgaaattgtcagctctttt

SEQ ID NO: 1887368 - DNA, 25 bp, Homo sapien
gggctttctacggcacaaatatatt

SEQ ID NO: 1887369 - DNA, 25 bp, Homo sapien
cagggctttctacggcacaaatata

SEQ ID NO: 1887370 - DNA, 25 bp, Homo sapien
cacaaatatattttagcaagctcat

SEQ ID NO: 1887371 - DNA, 25 bp, Homo sapien
gctttctacggcacaaatatatttt

SEQ ID NO: 1887372 - DNA, 25 bp, Homo sapien
ctttggttcatggaccgtgggctgc

SEQ ID NO: 1887373 - DNA, 25 bp, Homo sapien
tttaaagaagcccaagcactcaagg

SEQ ID NO: 1887374 - DNA, 25 bp, Homo sapien
cagaggaaccttggtccatggccca

SEQ ID NO: 1887375 - DNA, 25 bp, Homo sapien
taaaggtatctagccaaacttgcag

SEQ ID NO: 1887376 - DNA, 25 bp, Homo sapien
gctgtgccacagactaccagtataa

SEQ ID NO: 1887377 - DNA, 25 bp, Homo sapien
tcaccacagtgaccatatgctgcag

SEQ ID NO: 1887378 - DNA, 25 bp, Homo sapien
gactaccagtataacctcaatgtga

SEQ ID NO: 1887379 - DNA, 25 bp, Homo sapien
caaccatgatacgaggctgtgccac

SEQ ID NO: 1887380 - DNA, 25 bp, Homo sapien
ctctccagccagacaggcctgtagg

SEQ ID NO: 1887381 - DNA, 25 bp, Homo sapien
tctctccagccagacaggcctgtag

SEQ ID NO: 1887382 - DNA, 25 bp, Homo sapien
aggcttctctctccagccagacagg

SEQ ID NO: 1887383 - DNA, 25 bp, Homo sapien
ttctctctccagccagacaggcctg

SEQ ID NO: 1887384 - DNA, 25 bp, Homo sapien
tgacaaggctgaacttcagcactgc

SEQ ID NO: 1887385 - DNA, 25 bp, Homo sapien
gcaggcagtgacaaggctgaacttc

SEQ ID NO: 1887386 - DNA, 25 bp, Homo sapien
actctgaggatgtgggatgagggtc

SEQ ID NO: 1887387 - DNA, 25 bp, Homo sapien
agtgacaaggctgaacttcagcact

SEQ ID NO: 1887388 - DNA, 25 bp, Homo sapien
gttattcttagctttgtacttccca

SEQ ID NO: 1887389 - DNA, 25 bp, Homo sapien
ctttgtacttcccattagctgtttt

SEQ ID NO: 1887390 - DNA, 25 bp, Homo sapien
gaggataatacaggcaagattcttc

SEQ ID NO: 1887391 - DNA, 25 bp, Homo sapien
ttgaatcatacaaagaggataatac

SEQ ID NO: 1887392 - DNA, 25 bp, Homo sapien
gataatacaggcaagattcttcctc

SEQ ID NO: 1887393 - DNA, 25 bp, Homo sapien
tacaaagaggataatacaggcaaga

SEQ ID NO: 1887394 - DNA, 25 bp, Homo sapien
tacctgcaagggttaatctgtgaga

SEQ ID NO: 1887395 - DNA, 25 bp, Homo sapien
gcactgtcctattctcagggtgtga

SEQ ID NO: 1887396 - DNA, 25 bp, Homo sapien
tttcctttgataccagggggcactg

SEQ ID NO: 1887397 - DNA, 25 bp, Homo sapien
ccctgaaggtggcactgatgatact

SEQ ID NO: 1887398 - DNA, 25 bp, Homo sapien
ttataatttagcttctgggggcagt

SEQ ID NO: 1887399 - DNA, 25 bp, Homo sapien
tataatttagcttctgggggcagta

SEQ ID NO: 1887400 - DNA, 25 bp, Homo sapien
aatttagcttctgggggcagtaggt

SEQ ID NO: 1887401 - DNA, 25 bp, Homo sapien
tagcttctgggggcagtaggtatac

SEQ ID NO: 1887402 - DNA, 25 bp, Homo sapien
aatttctggaatgcgatgtcattat

SEQ ID NO: 1887403 - DNA, 25 bp, Homo sapien
ttctggaatgcgatgtcattattcc

SEQ ID NO: 1887404 - DNA, 25 bp, Homo sapien
aaatttctggaatgcgatgtcatta

SEQ ID NO: 1887405 - DNA, 25 bp, Homo sapien
tttctggaatgcgatgtcattattc

SEQ ID NO: 1887406 - DNA, 25 bp, Homo sapien
cttgagctctaattcttgaaggtct

SEQ ID NO: 1887407 - DNA, 25 bp, Homo sapien
atgttcccctcttgagctctaattc

SEQ ID NO: 1887408 - DNA, 25 bp, Homo sapien
ccctcttgagctctaattcttgaag

SEQ ID NO: 1887409 - DNA, 25 bp, Homo sapien
tctctgagatgttcccctcttgagc

SEQ ID NO: 1887410 - DNA, 25 bp, Homo sapien
aggaaaaccacaccaatgactccaa

SEQ ID NO: 1887411 - DNA, 25 bp, Homo sapien
ccaactctgtcaagcctctcttttt

SEQ ID NO: 1887412 - DNA, 25 bp, Homo sapien
tttaacttgctctatcctatctcct

SEQ ID NO: 1887413 - DNA, 25 bp, Homo sapien
agtaaaaacagtgagctttgtatca

SEQ ID NO: 1887414 - DNA, 25 bp, Homo sapien
tgtacagctccgcagtagctttgaa

SEQ ID NO: 1887415 - DNA, 25 bp, Homo sapien
gacttgcagcaacccaggaagtgtt

SEQ ID NO: 1887416 - DNA, 25 bp, Homo sapien
ttttgctacacaggcatacacgtga

SEQ ID NO: 1887417 - DNA, 25 bp, Homo sapien
cagttttgctacacaggcatacacg

SEQ ID NO: 1887418 - DNA, 25 bp, Homo sapien
tactgttatccctcccgtagcccta

SEQ ID NO: 1887419 - DNA, 25 bp, Homo sapien
ctactgttatccctcccgtagccct

SEQ ID NO: 1887420 - DNA, 25 bp, Homo sapien
ctgctaggtttggtatcgggatgat

SEQ ID NO: 1887421 - DNA, 25 bp, Homo sapien
tctctgctaggtttggtatcgggat

SEQ ID NO: 1887422 - DNA, 25 bp, Homo sapien
ctaggtttggtatcgggatgatgtt

SEQ ID NO: 1887423 - DNA, 25 bp, Homo sapien
gtctctgctaggtttggtatcggga

SEQ ID NO: 1887424 - DNA, 25 bp, Homo sapien
tgtatttatgacagttagctctttt

SEQ ID NO: 1887425 - DNA, 25 bp, Homo sapien
tacagcatgctactgagtttttact

SEQ ID NO: 1887426 - DNA, 25 bp, Homo sapien
atgtatttatgacagttagctcttt

SEQ ID NO: 1887427 - DNA, 25 bp, Homo sapien
cattatttagctgcgtcatgaggct

SEQ ID NO: 1887428 - DNA, 25 bp, Homo sapien
ggctcagagggctcaattaaaagca

SEQ ID NO: 1887429 - DNA, 25 bp, Homo sapien
tggaattgaccttgagcactgcccc

SEQ ID NO: 1887430 - DNA, 25 bp, Homo sapien
tggtagaagctcatgtctctttcac

SEQ ID NO: 1887431 - DNA, 25 bp, Homo sapien
caataaagggattgttggatagaat

SEQ ID NO: 1887432 - DNA, 25 bp, Homo sapien
gacacttaggttgacaccacgtctt

SEQ ID NO: 1887433 - DNA, 25 bp, Homo sapien
ctttatctcatctgtcatcgatgga

SEQ ID NO: 1887434 - DNA, 25 bp, Homo sapien
ttgttggatagaatggtagttccgt

SEQ ID NO: 1887435 - DNA, 25 bp, Homo sapien
tcttattttgtatagtgtctactca

SEQ ID NO: 1887436 - DNA, 25 bp, Homo sapien
gccatttgggatctattctattaac

SEQ ID NO: 1887437 - DNA, 25 bp, Homo sapien
tctttgagtagacttataattgatg

SEQ ID NO: 1887438 - DNA, 25 bp, Homo sapien
tcagtagtatctctctaaagaatta

SEQ ID NO: 1887439 - DNA, 25 bp, Homo sapien
cagacacatattactgatgaatatt

SEQ ID NO: 1887440 - DNA, 25 bp, Homo sapien
aagccagataaagaactacaagaaa

SEQ ID NO: 1887441 - DNA, 25 bp, Homo sapien
tctgaaagtcttcccaaaaaactga

SEQ ID NO: 1887442 - DNA, 25 bp, Homo sapien
cagcattatgctgatacaaaagcca

SEQ ID NO: 1887443 - DNA, 25 bp, Homo sapien
tggtataagtatgaaagctgttcct

SEQ ID NO: 1887444 - DNA, 25 bp, Homo sapien
aaaatcagctaatatgtttctatac

SEQ ID NO: 1887445 - DNA, 25 bp, Homo sapien
taatattatacatagaaccccctaa

SEQ ID NO: 1887446 - DNA, 25 bp, Homo sapien
ttaaattgcgaatggaataaaatta

SEQ ID NO: 1887447 - DNA, 25 bp, Homo sapien
aagtttcatgacactggatctggca

SEQ ID NO: 1887448 - DNA, 25 bp, Homo sapien
taagggccaaatttataacaactca

SEQ ID NO: 1887449 - DNA, 25 bp, Homo sapien
tgggatatctggacatcaacatgca

SEQ ID NO: 1887450 - DNA, 25 bp, Homo sapien
aatgtttcgatatataacacctaaa

SEQ ID NO: 1887451 - DNA, 25 bp, Homo sapien
caatgactctgaactccactagaat

SEQ ID NO: 1887452 - DNA, 25 bp, Homo sapien
tgtcaactccttgatccaaactagg

SEQ ID NO: 1887453 - DNA, 25 bp, Homo sapien
taggagactccttttaggtgaaaca

SEQ ID NO: 1887454 - DNA, 25 bp, Homo sapien
gatatccatttctagaccatcttga

SEQ ID NO: 1887455 - DNA, 25 bp, Homo sapien
tatcacatatggttcacctatttta

SEQ ID NO: 1887456 - DNA, 25 bp, Homo sapien
caaataagaatttatcgtgcttatc

SEQ ID NO: 1887457 - DNA, 25 bp, Homo sapien
ctgaaacctgtcaaatgagataggg

SEQ ID NO: 1887458 - DNA, 25 bp, Homo sapien
aatgagatagggtgtggaattttcc

SEQ ID NO: 1887459 - DNA, 25 bp, Homo sapien
cagatgcttgtttggcactgggaca

SEQ ID NO: 1887460 - DNA, 25 bp, Homo sapien
acagatgcttgtttggcactgggac

SEQ ID NO: 1887461 - DNA, 25 bp, Homo sapien
tttcacctagagatacagatgcttg

SEQ ID NO: 1887462 - DNA, 25 bp, Homo sapien
ttcctgcttttcacctagagataca

SEQ ID NO: 1887463 - DNA, 25 bp, Homo sapien
ccagcttgtactcctctggagtgta

SEQ ID NO: 1887464 - DNA, 25 bp, Homo sapien
gggtctgctttgactctcagaatct

SEQ ID NO: 1887465 - DNA, 25 bp, Homo sapien
tcagaatgggcaaccagctcacttc

SEQ ID NO: 1887466 - DNA, 25 bp, Homo sapien
gtatcctgaaacattgggtctgctt

SEQ ID NO: 1887467 - DNA, 25 bp, Homo sapien
cacataaagcgtatggtctatcaca

SEQ ID NO: 1887468 - DNA, 25 bp, Homo sapien
taaagcgtatggtctatcacactga

SEQ ID NO: 1887469 - DNA, 25 bp, Homo sapien
gagacaacacataaagcgtatggtc

SEQ ID NO: 1887470 - DNA, 25 bp, Homo sapien
tatggtctatcacactgacacattc

SEQ ID NO: 1887471 - DNA, 25 bp, Homo sapien
atagcacagcagaatagatattatt

SEQ ID NO: 1887472 - DNA, 25 bp, Homo sapien
gccagtttattagacagtattgata

SEQ ID NO: 1887473 - DNA, 25 bp, Homo sapien
ttatttatttaatgacaggccagtt

SEQ ID NO: 1887474 - DNA, 25 bp, Homo sapien
tatttaatgacaggccagtttatta

SEQ ID NO: 1887475 - DNA, 25 bp, Homo sapien
aacattacaattagagaggatacgc

SEQ ID NO: 1887476 - DNA, 25 bp, Homo sapien
gaggtataatctcatgcgcagtaga

SEQ ID NO: 1887477 - DNA, 25 bp, Homo sapien
taaaactagggattgcagccatggg

SEQ ID NO: 1887478 - DNA, 25 bp, Homo sapien
ttcattagtaatccacagcatgtgg

SEQ ID NO: 1887479 - DNA, 25 bp, Homo sapien
caaggcttgatcctgattgacacca

SEQ ID NO: 1887480 - DNA, 25 bp, Homo sapien
tgacaccatgtagcatgccactggg

SEQ ID NO: 1887481 - DNA, 25 bp, Homo sapien
aggaagggctgtggcacagtcctgc

SEQ ID NO: 1887482 - DNA, 25 bp, Homo sapien
ggagtcagcataagagaggaagggc

SEQ ID NO: 1887483 - DNA, 25 bp, Homo sapien
gagacacgttccatcgataccaagt

SEQ ID NO: 1887484 - DNA, 25 bp, Homo sapien
tagaataatacctgaaatccagatg

SEQ ID NO: 1887485 - DNA, 25 bp, Homo sapien
gatgattgtccagtttttcagaaca

SEQ ID NO: 1887486 - DNA, 25 bp, Homo sapien
aaattgcctatttcataagtagctc

SEQ ID NO: 1887487 - DNA, 25 bp, Homo sapien
gttctcttctattccaactttgtca

SEQ ID NO: 1887488 - DNA, 25 bp, Homo sapien
cctttatgtcaaggaagttctcttc

SEQ ID NO: 1887489 - DNA, 25 bp, Homo sapien
ccagtacaaagtttaataggaatgc

SEQ ID NO: 1887490 - DNA, 25 bp, Homo sapien
ttgtaagagccctttatgtcaagga

SEQ ID NO: 1887491 - DNA, 25 bp, Homo sapien
tgagaatttacaatggtccaggcct

SEQ ID NO: 1887492 - DNA, 25 bp, Homo sapien
tacagggtttcagcagtgtggtgac

SEQ ID NO: 1887493 - DNA, 25 bp, Homo sapien
gaaaaaggaccataggagagccagg

SEQ ID NO: 1887494 - DNA, 25 bp, Homo sapien
tccaggccttatgctacatggcagg

SEQ ID NO: 1887495 - DNA, 25 bp, Homo sapien
tttttgagctgtcattaacctcccc

SEQ ID NO: 1887496 - DNA, 25 bp, Homo sapien
tgcaaccggagcctggttcaattgt

SEQ ID NO: 1887497 - DNA, 25 bp, Homo sapien
ccggagcctggttcaattgttcctt

SEQ ID NO: 1887498 - DNA, 25 bp, Homo sapien
ttctggccatcaatctccaaatggt

SEQ ID NO: 1887499 - DNA, 25 bp, Homo sapien
tctgctgttgcggacatatcttctc

SEQ ID NO: 1887500 - DNA, 25 bp, Homo sapien
tgttactactctgtgcccttctgct

SEQ ID NO: 1887501 - DNA, 25 bp, Homo sapien
gcggacatatcttctctagcaacat

SEQ ID NO: 1887502 - DNA, 25 bp, Homo sapien
ccattctgctgttgcggacatatct

SEQ ID NO: 1887503 - DNA, 25 bp, Homo sapien
gaaataaataggaagtcacacataa

SEQ ID NO: 1887504 - DNA, 25 bp, Homo sapien
aataaataggaagtcacacataaaa

SEQ ID NO: 1887505 - DNA, 25 bp, Homo sapien
aaataaataggaagtcacacataaa

SEQ ID NO: 1887506 - DNA, 25 bp, Homo sapien
ctttcaatacgaagtttattcaggg

SEQ ID NO: 1887507 - DNA, 25 bp, Homo sapien
gagagggcgtacttctcttatactg

SEQ ID NO: 1887508 - DNA, 25 bp, Homo sapien
tcatggtggcttaataggagtagca

SEQ ID NO: 1887509 - DNA, 25 bp, Homo sapien
tacattgactgtaggaatgctagta

SEQ ID NO: 1887510 - DNA, 25 bp, Homo sapien
tagatatatagcctatacatctatg

SEQ ID NO: 1887511 - DNA, 25 bp, Homo sapien
ctacttatggatatatagtgagata

SEQ ID NO: 1887512 - DNA, 25 bp, Homo sapien
tagtgagatatataggtctatatac

SEQ ID NO: 1887513 - DNA, 25 bp, Homo sapien
tcatatgtactatatagtgtataga

SEQ ID NO: 1887514 - DNA, 25 bp, Homo sapien
cagtgtacacttgtgcataggtgct

SEQ ID NO: 1887515 - DNA, 25 bp, Homo sapien
gcacctcatgggtttgcaggccaag

SEQ ID NO: 1887516 - DNA, 25 bp, Homo sapien
gagactaccttgacacatacagtgt

SEQ ID NO: 1887517 - DNA, 25 bp, Homo sapien
ctttaattgagaggcaaatgcacct

SEQ ID NO: 1887518 - DNA, 25 bp, Homo sapien
cagaagcctaaattgtcaaagcagc

SEQ ID NO: 1887519 - DNA, 25 bp, Homo sapien
gatattgccagattttacaagtgag

SEQ ID NO: 1887520 - DNA, 25 bp, Homo sapien
ttagagctcatgaggttaagccact

SEQ ID NO: 1887521 - DNA, 25 bp, Homo sapien
tccttcagaaagagggacatcaatg

SEQ ID NO: 1887522 - DNA, 25 bp, Homo sapien
tcaaatggctgctagaaagacgggc

SEQ ID NO: 1887523 - DNA, 25 bp, Homo sapien
cctagagtcctgacgagagagtttc

SEQ ID NO: 1887524 - DNA, 25 bp, Homo sapien
tagcagtagttaattgccaagctcc

SEQ ID NO: 1887525 - DNA, 25 bp, Homo sapien
aaagacgggcagttggcttcttgcc

SEQ ID NO: 1887526 - DNA, 25 bp, Homo sapien
cattccaggcatagaacttaatgag

SEQ ID NO: 1887527 - DNA, 25 bp, Homo sapien
caggcatagaacttaatgaggaaaa

SEQ ID NO: 1887528 - DNA, 25 bp, Homo sapien
tctggagtggaggtaaggtagggtg

SEQ ID NO: 1887529 - DNA, 25 bp, Homo sapien
gggcattccaggcatagaacttaat

SEQ ID NO: 1887530 - DNA, 25 bp, Homo sapien
gctgatataaatattaggatgatgc

SEQ ID NO: 1887531 - DNA, 25 bp, Homo sapien
ggcttcaatctggtataagctgata

SEQ ID NO: 1887532 - DNA, 25 bp, Homo sapien
tgatgcttctgatgctgcaccagag

SEQ ID NO: 1887533 - DNA, 25 bp, Homo sapien
tctgtaaggcttcaatctggtataa

SEQ ID NO: 1887534 - DNA, 25 bp, Homo sapien
cactatccttcccagtctcgtaacc

SEQ ID NO: 1887535 - DNA, 25 bp, Homo sapien
ctagtaagtgagaacaacatgtgaa

SEQ ID NO: 1887536 - DNA, 25 bp, Homo sapien
gtctcgtaaccatctttcgactctc

SEQ ID NO: 1887537 - DNA, 25 bp, Homo sapien
gattttaggtcccactagtaagtga

SEQ ID NO: 1887538 - DNA, 25 bp, Homo sapien
tcaataggttactaattcagctttt

SEQ ID NO: 1887539 - DNA, 25 bp, Homo sapien
aataggttactaattcagcttttct

SEQ ID NO: 1887540 - DNA, 25 bp, Homo sapien
ataaactttcctcatagtatccctt

SEQ ID NO: 1887541 - DNA, 25 bp, Homo sapien
ctataaactttcctcatagtatccc

SEQ ID NO: 1887542 - DNA, 25 bp, Homo sapien
agagatatagttttgtcactgttgg

SEQ ID NO: 1887543 - DNA, 25 bp, Homo sapien
aatagtagagatatagttttgtcac

SEQ ID NO: 1887544 - DNA, 25 bp, Homo sapien
tagtagagatatagttttgtcactg

SEQ ID NO: 1887545 - DNA, 25 bp, Homo sapien
taaatagtagagatatagttttgtc

SEQ ID NO: 1887546 - DNA, 25 bp, Homo sapien
catttctaagagcagggtactatat

SEQ ID NO: 1887547 - DNA, 25 bp, Homo sapien
agtttgaactagatttacctatcaa

SEQ ID NO: 1887548 - DNA, 25 bp, Homo sapien
tcagtgcaactacaccaaaactata

SEQ ID NO: 1887549 - DNA, 25 bp, Homo sapien
cttatgaattgcctttcacaatctc

SEQ ID NO: 1887550 - DNA, 25 bp, Homo sapien
gtggctatgctttgacctatgcagc

SEQ ID NO: 1887551 - DNA, 25 bp, Homo sapien
ccagggaagatgttgcatcttgtgt

SEQ ID NO: 1887552 - DNA, 25 bp, Homo sapien
tgagccctgtgggtcctccagagca

SEQ ID NO: 1887553 - DNA, 25 bp, Homo sapien
ggacatacgaagtgctgcgcatgca

SEQ ID NO: 1887554 - DNA, 25 bp, Homo sapien
cctgcactcaggtctctccttgaag

SEQ ID NO: 1887555 - DNA, 25 bp, Homo sapien
ggtagacgacctgttactatgtgca

SEQ ID NO: 1887556 - DNA, 25 bp, Homo sapien
cgacctgttactatgtgcacccttg

SEQ ID NO: 1887557 - DNA, 25 bp, Homo sapien
ctgcactcaggtctctccttgaagt

SEQ ID NO: 1887558 - DNA, 25 bp, Homo sapien
gatttcttcgctgtgctcttttgcc

SEQ ID NO: 1887559 - DNA, 25 bp, Homo sapien
ttgccggcgctcgtcaaaaagtcct

SEQ ID NO: 1887560 - DNA, 25 bp, Homo sapien
tttccgtatcctgggatttcttcgc

SEQ ID NO: 1887561 - DNA, 25 bp, Homo sapien
tgttgcaagtacagagggctttccg

SEQ ID NO: 1887562 - DNA, 25 bp, Homo sapien
ggttggtggcaaacattggatgcca

SEQ ID NO: 1887563 - DNA, 25 bp, Homo sapien
tctgccatttgggtggacgggagca

SEQ ID NO: 1887564 - DNA, 25 bp, Homo sapien
tcacttctgtaaatgaggaattctg

SEQ ID NO: 1887565 - DNA, 25 bp, Homo sapien
tttccttccgctggacaacagctag

SEQ ID NO: 1887566 - DNA, 25 bp, Homo sapien
tcctacttttagactgtccagcttt

SEQ ID NO: 1887567 - DNA, 25 bp, Homo sapien
cctgataacaggtctcagagtggct

SEQ ID NO: 1887568 - DNA, 25 bp, Homo sapien
ggcctgataacaggtctcagagtgg

SEQ ID NO: 1887569 - DNA, 25 bp, Homo sapien
tctcagagtggctggataatggcaa

SEQ ID NO: 1887570 - DNA, 25 bp, Homo sapien
tcagagtggctggataatggcaaac

SEQ ID NO: 1887571 - DNA, 25 bp, Homo sapien
ctctgagaactttgtcgaagcccat

SEQ ID NO: 1887572 - DNA, 25 bp, Homo sapien
ccgttgccagggaatggccagcgtc

SEQ ID NO: 1887573 - DNA, 25 bp, Homo sapien
tctctgagaactttgtcgaagccca

SEQ ID NO: 1887574 - DNA, 25 bp, Homo sapien
agcgtcgtctgggagtctgtttctc

SEQ ID NO: 1887575 - DNA, 25 bp, Homo sapien
ctggaaggagaaactgagaagctga

SEQ ID NO: 1887576 - DNA, 25 bp, Homo sapien
ggctggaaggagaaactgagaagct

SEQ ID NO: 1887577 - DNA, 25 bp, Homo sapien
ttcttcttccatatgaagttaccat

SEQ ID NO: 1887578 - DNA, 25 bp, Homo sapien
gagaagctgaagaattcttcttcca

SEQ ID NO: 1887579 - DNA, 25 bp, Homo sapien
tgaccactgataaacaccagtcttg

SEQ ID NO: 1887580 - DNA, 25 bp, Homo sapien
cttgtggatttagagaaaactgacc

SEQ ID NO: 1887581 - DNA, 25 bp, Homo sapien
gactgcattagctcacaccaatttt

SEQ ID NO: 1887582 - DNA, 25 bp, Homo sapien
caccaattttacctaggtgccaaga

SEQ ID NO: 1887583 - DNA, 25 bp, Homo sapien
gtcttaactacatacccctgggatg

SEQ ID NO: 1887584 - DNA, 25 bp, Homo sapien
tttacaaaggtcaaaagcttgccag

SEQ ID NO: 1887585 - DNA, 25 bp, Homo sapien
caaaaggtatcaactgcagaatgcc

SEQ ID NO: 1887586 - DNA, 25 bp, Homo sapien
tatcctgtattagggagctctcaga

SEQ ID NO: 1887587 - DNA, 25 bp, Homo sapien
cagtctgcagacttcggcactagca

SEQ ID NO: 1887588 - DNA, 25 bp, Homo sapien
tatgttagcacacaaggaatcacag

SEQ ID NO: 1887589 - DNA, 25 bp, Homo sapien
tcctcaattgtgtaagaactatccc

SEQ ID NO: 1887590 - DNA, 25 bp, Homo sapien
tggcttgacaatcgctaaacaggaa

SEQ ID NO: 1887591 - DNA, 25 bp, Homo sapien
aggcgaccccactgcaaacggcaag

SEQ ID NO: 1887592 - DNA, 25 bp, Homo sapien
taggcgaccccactgcaaacggcaa

SEQ ID NO: 1887593 - DNA, 25 bp, Homo sapien
ggttcacatacacaggagatccgga

SEQ ID NO: 1887594 - DNA, 25 bp, Homo sapien
tgggcgtctgtttcaaaatccggga

SEQ ID NO: 1887595 - DNA, 25 bp, Homo sapien
caaagatggctaggtggaaccagca

SEQ ID NO: 1887596 - DNA, 25 bp, Homo sapien
cacccaccgtggagtagaccgtgta

SEQ ID NO: 1887597 - DNA, 25 bp, Homo sapien
gggcggcagcgagatagagatggag

SEQ ID NO: 1887598 - DNA, 25 bp, Homo sapien
agaagggcggcagcgagatagagat

SEQ ID NO: 1887599 - DNA, 25 bp, Homo sapien
aagggcggcagcgagatagagatgg

SEQ ID NO: 1887600 - DNA, 25 bp, Homo sapien
aagaagggcggcagcgagatagaga

SEQ ID NO: 1887601 - DNA, 25 bp, Homo sapien
tgagcgccaatagcataaccagcag

SEQ ID NO: 1887602 - DNA, 25 bp, Homo sapien
tccgggtccggtacactgtggcaat

SEQ ID NO: 1887603 - DNA, 25 bp, Homo sapien
ggtaaatgtagtccttggcgctgca

SEQ ID NO: 1887604 - DNA, 25 bp, Homo sapien
tgcaacaagtgatgtccgacgacag

SEQ ID NO: 1887605 - DNA, 25 bp, Homo sapien
tctcctcgccccagctccggagcgc

SEQ ID NO: 1887606 - DNA, 25 bp, Homo sapien
ggctctcctcgccccagctccggag

SEQ ID NO: 1887607 - DNA, 25 bp, Homo sapien
ctcgccccagctccggagcgcagct

SEQ ID NO: 1887608 - DNA, 25 bp, Homo sapien
tcctcgccccagctccggagcgcag

SEQ ID NO: 1887609 - DNA, 25 bp, Homo sapien
gaggtcccgagatcttgcattccca

SEQ ID NO: 1887610 - DNA, 25 bp, Homo sapien
gatctgcagactttgcccacaggag

SEQ ID NO: 1887611 - DNA, 25 bp, Homo sapien
caggagtttcctaggtgtagagacc

SEQ ID NO: 1887612 - DNA, 25 bp, Homo sapien
tgtagagaccaaagcttgcaggcca

SEQ ID NO: 1887613 - DNA, 25 bp, Homo sapien
gacgcggcgtgcaccagcccgggag

SEQ ID NO: 1887614 - DNA, 25 bp, Homo sapien
gcaccagcccgggagaagcgtgcga

SEQ ID NO: 1887615 - DNA, 25 bp, Homo sapien
caccagcccgggagaagcgtgcgag

SEQ ID NO: 1887616 - DNA, 25 bp, Homo sapien
ctggagggacgcggcgtgcaccagc

SEQ ID NO: 1887617 - DNA, 25 bp, Homo sapien
taatatcgctgtagagggcccaatg

SEQ ID NO: 1887618 - DNA, 25 bp, Homo sapien
gttaggaggcaccagtaatatcgct

SEQ ID NO: 1887619 - DNA, 25 bp, Homo sapien
ctctccgctctaaaatcatatccag

SEQ ID NO: 1887620 - DNA, 25 bp, Homo sapien
tttgccgtccttaactcttgataca

SEQ ID NO: 1887621 - DNA, 25 bp, Homo sapien
cagttgccagtaagcgtgttccttc

SEQ ID NO: 1887622 - DNA, 25 bp, Homo sapien
ttgccagtaagcgtgttccttccaa

SEQ ID NO: 1887623 - DNA, 25 bp, Homo sapien
cagtaagcgtgttccttccaacagc

SEQ ID NO: 1887624 - DNA, 25 bp, Homo sapien
gccagtaagcgtgttccttccaaca

SEQ ID NO: 1887625 - DNA, 25 bp, Homo sapien
aatctggtgtggaggcctgtcttgc

SEQ ID NO: 1887626 - DNA, 25 bp, Homo sapien
gaaatctggtgtggaggcctgtctt

SEQ ID NO: 1887627 - DNA, 25 bp, Homo sapien
atctggtgtggaggcctgtcttgct

SEQ ID NO: 1887628 - DNA, 25 bp, Homo sapien
tgagaaatctggtgtggaggcctgt

SEQ ID NO: 1887629 - DNA, 25 bp, Homo sapien
ttttgcggacaaattctgaggattt

SEQ ID NO: 1887630 - DNA, 25 bp, Homo sapien
cagatccctttccatattcattggc

SEQ ID NO: 1887631 - DNA, 25 bp, Homo sapien
tcacattaggcctttgacctgatat

SEQ ID NO: 1887632 - DNA, 25 bp, Homo sapien
gaggatttccaaaccatatgaggcc

SEQ ID NO: 1887633 - DNA, 25 bp, Homo sapien
tagttggaggataagttgtttcctg

SEQ ID NO: 1887634 - DNA, 25 bp, Homo sapien
tctctagtacttccccccatatcct

SEQ ID NO: 1887635 - DNA, 25 bp, Homo sapien
gcccatttgataaagaccatatgat

SEQ ID NO: 1887636 - DNA, 25 bp, Homo sapien
ccatatcctgcccatttgataaaga

SEQ ID NO: 1887637 - DNA, 25 bp, Homo sapien
ttcaatgacagataacaatagcagt

SEQ ID NO: 1887638 - DNA, 25 bp, Homo sapien
taattttggagttacaagttgtcat

SEQ ID NO: 1887639 - DNA, 25 bp, Homo sapien
atgacagataacaatagcagtttaa

SEQ ID NO: 1887640 - DNA, 25 bp, Homo sapien
gacagataacaatagcagtttaatt

SEQ ID NO: 1887641 - DNA, 25 bp, Homo sapien
ccattggtggtaggaaagtgtcttt

SEQ ID NO: 1887642 - DNA, 25 bp, Homo sapien
tattttatagcagatccattggtgg

SEQ ID NO: 1887643 - DNA, 25 bp, Homo sapien
tgacttggccacctaatcagctagc

SEQ ID NO: 1887644 - DNA, 25 bp, Homo sapien
agccttccccgattagaggtgcttc

SEQ ID NO: 1887645 - DNA, 25 bp, Homo sapien
cagacagattgtcaaaggcaaacag

SEQ ID NO: 1887646 - DNA, 25 bp, Homo sapien
ctcttacagcgtttgaggaggccct

SEQ ID NO: 1887647 - DNA, 25 bp, Homo sapien
tccattccccgttggttttgcactg

SEQ ID NO: 1887648 - DNA, 25 bp, Homo sapien
cagatagattgggtttatgaactca

SEQ ID NO: 1887649 - DNA, 25 bp, Homo sapien
caaaacagtgtgacatcaggtcaat

SEQ ID NO: 1887650 - DNA, 25 bp, Homo sapien
aagcaaagagtataccagatggttc

SEQ ID NO: 1887651 - DNA, 25 bp, Homo sapien
tttgatagacagcaaccagttgtgt

SEQ ID NO: 1887652 - DNA, 25 bp, Homo sapien
tgctggcacaaattgttctccatgt

SEQ ID NO: 1887653 - DNA, 25 bp, Homo sapien
catacattgacctttttagttgcac

SEQ ID NO: 1887654 - DNA, 25 bp, Homo sapien
gatacataagcaccaaaaatgacat

SEQ ID NO: 1887655 - DNA, 25 bp, Homo sapien
tagttgcactatgtttttgcccaac

SEQ ID NO: 1887656 - DNA, 25 bp, Homo sapien
caagttttacccatacttcgaagat

SEQ ID NO: 1887657 - DNA, 25 bp, Homo sapien
ctgagaaattgtattgccctcaact

SEQ ID NO: 1887658 - DNA, 25 bp, Homo sapien
gtataatcttcacctcttgggaact

SEQ ID NO: 1887659 - DNA, 25 bp, Homo sapien
ttgtataatcttcacctcttgggaa

SEQ ID NO: 1887660 - DNA, 25 bp, Homo sapien
tattgccctcaactggatttttctc

SEQ ID NO: 1887661 - DNA, 25 bp, Homo sapien
tctccggaggaaagagacttggcct

SEQ ID NO: 1887662 - DNA, 25 bp, Homo sapien
aaagaatgccgggtccgtagagccg

SEQ ID NO: 1887663 - DNA, 25 bp, Homo sapien
gagtacccgcgttgactaggctcct

SEQ ID NO: 1887664 - DNA, 25 bp, Homo sapien
gactggttgtggagcactcgtctcc

SEQ ID NO: 1887665 - DNA, 25 bp, Homo sapien
tcccacacagatgggacgcggctta

SEQ ID NO: 1887666 - DNA, 25 bp, Homo sapien
ccacacagatgggacgcggcttaag

SEQ ID NO: 1887667 - DNA, 25 bp, Homo sapien
acacagatgggacgcggcttaagag

SEQ ID NO: 1887668 - DNA, 25 bp, Homo sapien
ggtcccacacagatgggacgcggct

SEQ ID NO: 1887669 - DNA, 25 bp, Homo sapien
tctcatctctgttgatgccttttcc

SEQ ID NO: 1887670 - DNA, 25 bp, Homo sapien
catgccccatactccagctaggctc

SEQ ID NO: 1887671 - DNA, 25 bp, Homo sapien
ggcttttctcatctctgttgatgcc

SEQ ID NO: 1887672 - DNA, 25 bp, Homo sapien
ctccagctaggctcatggcttttct

SEQ ID NO: 1887673 - DNA, 25 bp, Homo sapien
tagtggggtaagtcgcatggatctt

SEQ ID NO: 1887674 - DNA, 25 bp, Homo sapien
gggtaagtcgcatggatcttatgaa

SEQ ID NO: 1887675 - DNA, 25 bp, Homo sapien
aagtcgcatggatcttatgaattga

SEQ ID NO: 1887676 - DNA, 25 bp, Homo sapien
cgcatggatcttatgaattgatggg

SEQ ID NO: 1887677 - DNA, 25 bp, Homo sapien
tctcttgcttttccccacatttccc

SEQ ID NO: 1887678 - DNA, 25 bp, Homo sapien
ctctcttgcttttccccacatttcc

SEQ ID NO: 1887679 - DNA, 25 bp, Homo sapien
tgatctctcttgcttttccccacat

SEQ ID NO: 1887680 - DNA, 25 bp, Homo sapien
atctctcttgcttttccccacattt

SEQ ID NO: 1887681 - DNA, 25 bp, Homo sapien
ggctgcaagcagcatactctctggg

SEQ ID NO: 1887682 - DNA, 25 bp, Homo sapien
cattgatacaatcatcaaggctgca

SEQ ID NO: 1887683 - DNA, 25 bp, Homo sapien
tagttgtgcccaagtcggcggctct

SEQ ID NO: 1887684 - DNA, 25 bp, Homo sapien
tattttgtagctaactgcgtcagct

SEQ ID NO: 1887685 - DNA, 25 bp, Homo sapien
tcaatcctccaattctacctcatca

SEQ ID NO: 1887686 - DNA, 25 bp, Homo sapien
ctccaattctacctcatcagcttcc

SEQ ID NO: 1887687 - DNA, 25 bp, Homo sapien
aatcctccaattctacctcatcagc

SEQ ID NO: 1887688 - DNA, 25 bp, Homo sapien
attctacctcatcagcttccttttt

SEQ ID NO: 1887689 - DNA, 25 bp, Homo sapien
ctattggattcactaccagactgtg

SEQ ID NO: 1887690 - DNA, 25 bp, Homo sapien
ttcactaccagactgtgacctcctt

SEQ ID NO: 1887691 - DNA, 25 bp, Homo sapien
tattggattcactaccagactgtga

SEQ ID NO: 1887692 - DNA, 25 bp, Homo sapien
tggattcactaccagactgtgacct

SEQ ID NO: 1887693 - DNA, 25 bp, Homo sapien
taactagctaggtcatggcaaggag

SEQ ID NO: 1887694 - DNA, 25 bp, Homo sapien
tcaaagtaaatccaagccagagcca

SEQ ID NO: 1887695 - DNA, 25 bp, Homo sapien
ccatctgaaaggataagcagccaca

SEQ ID NO: 1887696 - DNA, 25 bp, Homo sapien
gagccatgttaagtcaaccctgaag

SEQ ID NO: 1887697 - DNA, 25 bp, Homo sapien
tcttgagttgcgaggagcatccttg

SEQ ID NO: 1887698 - DNA, 25 bp, Homo sapien
cattgatgattagttgggtcgtctc

SEQ ID NO: 1887699 - DNA, 25 bp, Homo sapien
aatatccagggtgacctttgttgcc

SEQ ID NO: 1887700 - DNA, 25 bp, Homo sapien
caagcatgcatggtactgtgaggat

SEQ ID NO: 1887701 - DNA, 25 bp, Homo sapien
tcattgtgtgacgatggcactgagc

SEQ ID NO: 1887702 - DNA, 25 bp, Homo sapien
cacatgtcgaggaaagcagttaaag

SEQ ID NO: 1887703 - DNA, 25 bp, Homo sapien
aaggaaaagagtccaatatcttcac

SEQ ID NO: 1887704 - DNA, 25 bp, Homo sapien
cagtagagatggctataggaactag

SEQ ID NO: 1887705 - DNA, 25 bp, Homo sapien
atcctctaatccttgtcacatgtcg

SEQ ID NO: 1887706 - DNA, 25 bp, Homo sapien
aatccaacagttggtgaatacattt

SEQ ID NO: 1887707 - DNA, 25 bp, Homo sapien
aactttgaaatccaacagttggtga

SEQ ID NO: 1887708 - DNA, 25 bp, Homo sapien
ccaacagttggtgaatacatttgtt

SEQ ID NO: 1887709 - DNA, 25 bp, Homo sapien
ttgaaatccaacagttggtgaatac

SEQ ID NO: 1887710 - DNA, 25 bp, Homo sapien
catctgcggtatatacttctgtagc

SEQ ID NO: 1887711 - DNA, 25 bp, Homo sapien
tgagagcagtgacctttgtggccat

SEQ ID NO: 1887712 - DNA, 25 bp, Homo sapien
agataaaagtgtccctgagagcagt

SEQ ID NO: 1887713 - DNA, 25 bp, Homo sapien
ccaagcctattggagttgaagagat

SEQ ID NO: 1887714 - DNA, 25 bp, Homo sapien
tcagagattaacgacacctctccct

SEQ ID NO: 1887715 - DNA, 25 bp, Homo sapien
agagattaacgacacctctccctgc

SEQ ID NO: 1887716 - DNA, 25 bp, Homo sapien
tgtctcaatgcatcatcactaagca

SEQ ID NO: 1887717 - DNA, 25 bp, Homo sapien
ttgtctcaatgcatcatcactaagc

SEQ ID NO: 1887718 - DNA, 25 bp, Homo sapien
gccatactctctagaaggaattgag

SEQ ID NO: 1887719 - DNA, 25 bp, Homo sapien
tactctctagaaggaattgagtctg

SEQ ID NO: 1887720 - DNA, 25 bp, Homo sapien
gctgccatactctctagaaggaatt

SEQ ID NO: 1887721 - DNA, 25 bp, Homo sapien
tgctgccatactctctagaaggaat

SEQ ID NO: 1887722 - DNA, 25 bp, Homo sapien
tgttcaccagtgacaggatgacaga

SEQ ID NO: 1887723 - DNA, 25 bp, Homo sapien
tatttcccccttgttcaccagtgac

SEQ ID NO: 1887724 - DNA, 25 bp, Homo sapien
ccccttgttcaccagtgacaggatg

SEQ ID NO: 1887725 - DNA, 25 bp, Homo sapien
ccttgttcaccagtgacaggatgac

SEQ ID NO: 1887726 - DNA, 25 bp, Homo sapien
ttgtaggagcaagccagttatgatg

SEQ ID NO: 1887727 - DNA, 25 bp, Homo sapien
gatgtgtcacgctatgaaaacattt

SEQ ID NO: 1887728 - DNA, 25 bp, Homo sapien
cacttcaagtataggtcatgatgac

SEQ ID NO: 1887729 - DNA, 25 bp, Homo sapien
tcttcagaagcatgatgaaactatt

SEQ ID NO: 1887730 - DNA, 25 bp, Homo sapien
tggaatacaccctgggatctcgtgg

SEQ ID NO: 1887731 - DNA, 25 bp, Homo sapien
tctatccggcattgaggacatggaa

SEQ ID NO: 1887732 - DNA, 25 bp, Homo sapien
ttaggatagttccagagccagtcca

SEQ ID NO: 1887733 - DNA, 25 bp, Homo sapien
gcagtaacacgaccgttggtgcctt

SEQ ID NO: 1887734 - DNA, 25 bp, Homo sapien
ttttttgtcattaagctctccagtg

SEQ ID NO: 1887735 - DNA, 25 bp, Homo sapien
gcagctggaagcaaccagccttcct

SEQ ID NO: 1887736 - DNA, 25 bp, Homo sapien
gctctccagtgcagctggaagcaac

SEQ ID NO: 1887737 - DNA, 25 bp, Homo sapien
cctcctctttgtaatccttagtact

SEQ ID NO: 1887738 - DNA, 25 bp, Homo sapien
tttgccacgcaggtattttttccta

SEQ ID NO: 1887739 - DNA, 25 bp, Homo sapien
tgttttcactcgatccatccccatg

SEQ ID NO: 1887740 - DNA, 25 bp, Homo sapien
catgtgacaactgcatggttttgcc

SEQ ID NO: 1887741 - DNA, 25 bp, Homo sapien
tctctccgggtaaatgttagataag

SEQ ID NO: 1887742 - DNA, 25 bp, Homo sapien
gaaaccagaggaaattcatgtaacc

SEQ ID NO: 1887743 - DNA, 25 bp, Homo sapien
ccagaggaaattcatgtaaccactg

SEQ ID NO: 1887744 - DNA, 25 bp, Homo sapien
gaggaaattcatgtaaccactgtcc

SEQ ID NO: 1887745 - DNA, 25 bp, Homo sapien
ggaaattcatgtaaccactgtcctt

SEQ ID NO: 1887746 - DNA, 25 bp, Homo sapien
gaactgaacgatcttccctgttgta

SEQ ID NO: 1887747 - DNA, 25 bp, Homo sapien
tgatggtcatgtctaaacctaaccg

SEQ ID NO: 1887748 - DNA, 25 bp, Homo sapien
aagccatgccattcgatttatcctg

SEQ ID NO: 1887749 - DNA, 25 bp, Homo sapien
aacctaaccgtgtcaatatctctgg

SEQ ID NO: 1887750 - DNA, 25 bp, Homo sapien
tgagcactggagtggtccccttcct

SEQ ID NO: 1887751 - DNA, 25 bp, Homo sapien
gaagctgttaatatctttgttcagc

SEQ ID NO: 1887752 - DNA, 25 bp, Homo sapien
agaagctgttaatatctttgttcag

SEQ ID NO: 1887753 - DNA, 25 bp, Homo sapien
actttgtcttcctttcgctagaaag

SEQ ID NO: 1887754 - DNA, 25 bp, Homo sapien
cttcctttcgctagaaagaagctgt

SEQ ID NO: 1887755 - DNA, 25 bp, Homo sapien
tgctagagtgaatcgatagcttccc

SEQ ID NO: 1887756 - DNA, 25 bp, Homo sapien
tgttcactcgtctgccttgctagag

SEQ ID NO: 1887757 - DNA, 25 bp, Homo sapien
ggttcccgaatgtccacgctttcta

SEQ ID NO: 1887758 - DNA, 25 bp, Homo sapien
tggcaagacccagtcaagggcgaca

SEQ ID NO: 1887759 - DNA, 25 bp, Homo sapien
tgggaagaatttcccagtgccaatc

SEQ ID NO: 1887760 - DNA, 25 bp, Homo sapien
ctgggaagaatttcccagtgccaat

SEQ ID NO: 1887761 - DNA, 25 bp, Homo sapien
taaataagatattaccactgacccc

SEQ ID NO: 1887762 - DNA, 25 bp, Homo sapien
caaaagttgcttaaagttgcgtaca

SEQ ID NO: 1887763 - DNA, 25 bp, Homo sapien
tattagcaagttagaaagttacacc

SEQ ID NO: 1887764 - DNA, 25 bp, Homo sapien
ctgtagatattcaaatgcctggcct

SEQ ID NO: 1887765 - DNA, 25 bp, Homo sapien
cacatggttacatagtttacaactt

SEQ ID NO: 1887766 - DNA, 25 bp, Homo sapien
aaaaatcaacttgtagattcctaat

SEQ ID NO: 1887767 - DNA, 25 bp, Homo sapien
cctcaaagcattatggatggttgtt

SEQ ID NO: 1887768 - DNA, 25 bp, Homo sapien
taaaagggataacatatagcaacag

SEQ ID NO: 1887769 - DNA, 25 bp, Homo sapien
ttagcaaaaacatcgtcttggttca

SEQ ID NO: 1887770 - DNA, 25 bp, Homo sapien
acatcgtcttggttcagaagtagaa

SEQ ID NO: 1887771 - DNA, 25 bp, Homo sapien
gaagtggaatagtatgaggcaaaga

SEQ ID NO: 1887772 - DNA, 25 bp, Homo sapien
aagtagaagtggaatagtatgaggc

SEQ ID NO: 1887773 - DNA, 25 bp, Homo sapien
aaacagacagaaaggagcaaacagg

SEQ ID NO: 1887774 - DNA, 25 bp, Homo sapien
cagacagaaaggagcaaacaggtcc

SEQ ID NO: 1887775 - DNA, 25 bp, Homo sapien
tccccagaggcagcatgctcagcat

SEQ ID NO: 1887776 - DNA, 25 bp, Homo sapien
agacagaaaggagcaaacaggtccc

SEQ ID NO: 1887777 - DNA, 25 bp, Homo sapien
gaatgcaaggttggactcagtttta

SEQ ID NO: 1887778 - DNA, 25 bp, Homo sapien
gactgtagtgccttattacggctga

SEQ ID NO: 1887779 - DNA, 25 bp, Homo sapien
catttattgttatgtgatgtaccaa

SEQ ID NO: 1887780 - DNA, 25 bp, Homo sapien
cttttggtagtctattttcaacaga

SEQ ID NO: 1887781 - DNA, 25 bp, Homo sapien
tttaggcttgggtcacacactgcca

SEQ ID NO: 1887782 - DNA, 25 bp, Homo sapien
ttaggcttgggtcacacactgccat

SEQ ID NO: 1887783 - DNA, 25 bp, Homo sapien
acaggcagaggaaaaatacagcaga

SEQ ID NO: 1887784 - DNA, 25 bp, Homo sapien
gcagaggaaaaatacagcagagcat

SEQ ID NO: 1887785 - DNA, 25 bp, Homo sapien
caggcagaggaaaaatacagcagag

SEQ ID NO: 1887786 - DNA, 25 bp, Homo sapien
gtctgccacaggcagaggaaaaata

SEQ ID NO: 1887787 - DNA, 25 bp, Homo sapien
aaatctaggaggaggctactaagcc

SEQ ID NO: 1887788 - DNA, 25 bp, Homo sapien
catccagggcacattaataccaggg

SEQ ID NO: 1887789 - DNA, 25 bp, Homo sapien
ccaaggctgatatcagggctgatgt

SEQ ID NO: 1887790 - DNA, 25 bp, Homo sapien
tcctgtgactgcagatttaagccac

SEQ ID NO: 1887791 - DNA, 25 bp, Homo sapien
tggaactcttatgcccttgtgtcaa

SEQ ID NO: 1887792 - DNA, 25 bp, Homo sapien
tacagccattaaagttggcttatag

SEQ ID NO: 1887793 - DNA, 25 bp, Homo sapien
catagactgaaccttggctccaatg

SEQ ID NO: 1887794 - DNA, 25 bp, Homo sapien
tagaagtagtactcctgaagtgaag

SEQ ID NO: 1887795 - DNA, 25 bp, Homo sapien
caaatgagtctgcaaacacaaatcc

SEQ ID NO: 1887796 - DNA, 25 bp, Homo sapien
atgagtctgcaaacacaaatcctga

SEQ ID NO: 1887797 - DNA, 25 bp, Homo sapien
aatgagtctgcaaacacaaatcctg

SEQ ID NO: 1887798 - DNA, 25 bp, Homo sapien
atcaaatgagtctgcaaacacaaat

SEQ ID NO: 1887799 - DNA, 25 bp, Homo sapien
tggattttcacagtgatctcttgct

SEQ ID NO: 1887800 - DNA, 25 bp, Homo sapien
ggattttcacagtgatctcttgctc

SEQ ID NO: 1887801 - DNA, 25 bp, Homo sapien
cagggaagttagaatctctagatgc

SEQ ID NO: 1887802 - DNA, 25 bp, Homo sapien
gatgcatgcattctgagtgtacaag

SEQ ID NO: 1887803 - DNA, 25 bp, Homo sapien
gggtccaaaagtgaatgcaaagtca

SEQ ID NO: 1887804 - DNA, 25 bp, Homo sapien
cttgtagtaagtcccatctgatgat

SEQ ID NO: 1887805 - DNA, 25 bp, Homo sapien
ggaacatggaagaacggaatcaggt

SEQ ID NO: 1887806 - DNA, 25 bp, Homo sapien
agggaacatggaagaacggaatcag

SEQ ID NO: 1887807 - DNA, 25 bp, Homo sapien
gggaacatggaagaacggaatcagg

SEQ ID NO: 1887808 - DNA, 25 bp, Homo sapien
gaacatggaagaacggaatcaggtc

SEQ ID NO: 1887809 - DNA, 25 bp, Homo sapien
tgactcaagaagatactcaatttct

SEQ ID NO: 1887810 - DNA, 25 bp, Homo sapien
actcaagaagatactcaatttctgc

SEQ ID NO: 1887811 - DNA, 25 bp, Homo sapien
ttcttgactcaagaagatactcaat

SEQ ID NO: 1887812 - DNA, 25 bp, Homo sapien
tcaagaagatactcaatttctgcat

SEQ ID NO: 1887813 - DNA, 25 bp, Homo sapien
tctttgccagcctctttcattatga

SEQ ID NO: 1887814 - DNA, 25 bp, Homo sapien
aggttttgtccacaccctgagagag

SEQ ID NO: 1887815 - DNA, 25 bp, Homo sapien
tgccagcctctttcattatgacatc

SEQ ID NO: 1887816 - DNA, 25 bp, Homo sapien
ggatgccttgttctacaccgattag

SEQ ID NO: 1887817 - DNA, 25 bp, Homo sapien
ttctggctctcttttgcttctctca

SEQ ID NO: 1887818 - DNA, 25 bp, Homo sapien
gttctggctctcttttgcttctctc

SEQ ID NO: 1887819 - DNA, 25 bp, Homo sapien
tctggctctcttttgcttctctcat

SEQ ID NO: 1887820 - DNA, 25 bp, Homo sapien
cgttctggctctcttttgcttctct

SEQ ID NO: 1887821 - DNA, 25 bp, Homo sapien
agggttgttgtgaagctttttggct

SEQ ID NO: 1887822 - DNA, 25 bp, Homo sapien
taagtcgttgtccagcaacacttgg

SEQ ID NO: 1887823 - DNA, 25 bp, Homo sapien
tgagaatgagggtgccaacagagct

SEQ ID NO: 1887824 - DNA, 25 bp, Homo sapien
tagaaacaggtaaagagatagggaa

SEQ ID NO: 1887825 - DNA, 25 bp, Homo sapien
tagctttcaattcaggaataaggtc

SEQ ID NO: 1887826 - DNA, 25 bp, Homo sapien
tcaattcaggaataaggtcaactgc

SEQ ID NO: 1887827 - DNA, 25 bp, Homo sapien
gaataaggtcaactgcaacattcat

SEQ ID NO: 1887828 - DNA, 25 bp, Homo sapien
aaatttagctttcaattcaggaata

SEQ ID NO: 1887829 - DNA, 25 bp, Homo sapien
catccatgttacatcttacaggtga

SEQ ID NO: 1887830 - DNA, 25 bp, Homo sapien
tctatgcatagtgtcttgtgatggt

SEQ ID NO: 1887831 - DNA, 25 bp, Homo sapien
tcccttaaggtaatggcttgcagct

SEQ ID NO: 1887832 - DNA, 25 bp, Homo sapien
ctgttgttcccatctcgtgttcata

SEQ ID NO: 1887833 - DNA, 25 bp, Homo sapien
caatccactcatgatcctagctaaa

SEQ ID NO: 1887834 - DNA, 25 bp, Homo sapien
atacagccaggccaatccactcatg

SEQ ID NO: 1887835 - DNA, 25 bp, Homo sapien
gaagaaaatacagccaggccaatcc

SEQ ID NO: 1887836 - DNA, 25 bp, Homo sapien
tgatcctagctaaattttccccagt

SEQ ID NO: 1887837 - DNA, 25 bp, Homo sapien
ctgcataggaagcaagggtcagttt

SEQ ID NO: 1887838 - DNA, 25 bp, Homo sapien
gaaaagggagctgaaagaagttagc

SEQ ID NO: 1887839 - DNA, 25 bp, Homo sapien
aaagaagttagcaatcctgcacaag

SEQ ID NO: 1887840 - DNA, 25 bp, Homo sapien
tgcacaagaatcctgcataggaagc

SEQ ID NO: 1887841 - DNA, 25 bp, Homo sapien
tgtactggcaggtttgtggcacctt

SEQ ID NO: 1887842 - DNA, 25 bp, Homo sapien
tttccaaaccagaccagaacttgtc

SEQ ID NO: 1887843 - DNA, 25 bp, Homo sapien
gaactcggagacaggacggtttgta

SEQ ID NO: 1887844 - DNA, 25 bp, Homo sapien
agaacttgtcgttacttcttcctgc

SEQ ID NO: 1887845 - DNA, 25 bp, Homo sapien
gatgagagagctactacaaaagcca

SEQ ID NO: 1887846 - DNA, 25 bp, Homo sapien
gagagctactacaaaagccactttt

SEQ ID NO: 1887847 - DNA, 25 bp, Homo sapien
tgagagagctactacaaaagccact

SEQ ID NO: 1887848 - DNA, 25 bp, Homo sapien
gagctactacaaaagccacttttgc

SEQ ID NO: 1887849 - DNA, 25 bp, Homo sapien
ctgcagaatattcgcattgccagaa

SEQ ID NO: 1887850 - DNA, 25 bp, Homo sapien
tcagctctgcagaatattcgcattg

SEQ ID NO: 1887851 - DNA, 25 bp, Homo sapien
gctctgcagaatattcgcattgcca

SEQ ID NO: 1887852 - DNA, 25 bp, Homo sapien
cagctctgcagaatattcgcattgc

SEQ ID NO: 1887853 - DNA, 25 bp, Homo sapien
taactccgcttgactggcagataca

SEQ ID NO: 1887854 - DNA, 25 bp, Homo sapien
gagcaatgaagattctcctatatca

SEQ ID NO: 1887855 - DNA, 25 bp, Homo sapien
tacaaagaggcttccctgtgacatc

SEQ ID NO: 1887856 - DNA, 25 bp, Homo sapien
ctttcatagtaactccgcttgactg

SEQ ID NO: 1887857 - DNA, 25 bp, Homo sapien
tcagaaatgtacagaggaaagacca

SEQ ID NO: 1887858 - DNA, 25 bp, Homo sapien
tggagtcagaaatgtacagaggaaa

SEQ ID NO: 1887859 - DNA, 25 bp, Homo sapien
gaaagaccatgagcacctgagtcat

SEQ ID NO: 1887860 - DNA, 25 bp, Homo sapien
agaggaaagaccatgagcacctgag

SEQ ID NO: 1887861 - DNA, 25 bp, Homo sapien
taacctagcaacaggagtgagtctg

SEQ ID NO: 1887862 - DNA, 25 bp, Homo sapien
ggtataaactgtcctagaagaagac

SEQ ID NO: 1887863 - DNA, 25 bp, Homo sapien
gatctttaaggtcataacagtaacc

SEQ ID NO: 1887864 - DNA, 25 bp, Homo sapien
aagtaagcatccagactgagggtaa

SEQ ID NO: 1887865 - DNA, 25 bp, Homo sapien
ggaaggcaaagacaaagttagaata

SEQ ID NO: 1887866 - DNA, 25 bp, Homo sapien
cttataagaatcatgtggaataaaa

SEQ ID NO: 1887867 - DNA, 25 bp, Homo sapien
gaaaccaaatagactaatcttataa

SEQ ID NO: 1887868 - DNA, 25 bp, Homo sapien
ttagaataatattaaccattttgta

SEQ ID NO: 1887869 - DNA, 25 bp, Homo sapien
agcctccagttaacctggactgtaa

SEQ ID NO: 1887870 - DNA, 25 bp, Homo sapien
caagcctccagttaacctggactgt

SEQ ID NO: 1887871 - DNA, 25 bp, Homo sapien
attctccaagcctccagttaacctg

SEQ ID NO: 1887872 - DNA, 25 bp, Homo sapien
tctccaagcctccagttaacctgga

SEQ ID NO: 1887873 - DNA, 25 bp, Homo sapien
ttgcatcacattcagctgccctcca

SEQ ID NO: 1887874 - DNA, 25 bp, Homo sapien
gcatcacattcagctgccctccagc

SEQ ID NO: 1887875 - DNA, 25 bp, Homo sapien
tgcatcacattcagctgccctccag

SEQ ID NO: 1887876 - DNA, 25 bp, Homo sapien
cctcttgtctgccctcactcttatc

SEQ ID NO: 1887877 - DNA, 25 bp, Homo sapien
tctgccctcactcttatcacacaca

SEQ ID NO: 1887878 - DNA, 25 bp, Homo sapien
cttgtctgccctcactcttatcaca

SEQ ID NO: 1887879 - DNA, 25 bp, Homo sapien
ctgccctcactcttatcacacacat

SEQ ID NO: 1887880 - DNA, 25 bp, Homo sapien
tatttagaagacaggagaagggcag

SEQ ID NO: 1887881 - DNA, 25 bp, Homo sapien
ttagaagacaggagaagggcagaag

SEQ ID NO: 1887882 - DNA, 25 bp, Homo sapien
tttagaagacaggagaagggcagaa

SEQ ID NO: 1887883 - DNA, 25 bp, Homo sapien
ttatttagaagacaggagaagggca

SEQ ID NO: 1887884 - DNA, 25 bp, Homo sapien
atcactgtgccaacattaaccataa

SEQ ID NO: 1887885 - DNA, 25 bp, Homo sapien
cattaaccataaactgatctatatt

SEQ ID NO: 1887886 - DNA, 25 bp, Homo sapien
tcactgtgccaacattaaccataaa

SEQ ID NO: 1887887 - DNA, 25 bp, Homo sapien
actgctgcaacagcactttcagaaa

SEQ ID NO: 1887888 - DNA, 25 bp, Homo sapien
tcaatgacacaactgctgcaacagc

SEQ ID NO: 1887889 - DNA, 25 bp, Homo sapien
tgacacaactgctgcaacagcactt

SEQ ID NO: 1887890 - DNA, 25 bp, Homo sapien
ttaactcaatgacacaactgctgca

SEQ ID NO: 1887891 - DNA, 25 bp, Homo sapien
ggagactaggggctctgaaacaaag

SEQ ID NO: 1887892 - DNA, 25 bp, Homo sapien
cttgcattattgagctggagactag

SEQ ID NO: 1887893 - DNA, 25 bp, Homo sapien
tccaggccatagaccaaagagaatc

SEQ ID NO: 1887894 - DNA, 25 bp, Homo sapien
gagaatctgatgcatcacagcttat

SEQ ID NO: 1887895 - DNA, 25 bp, Homo sapien
caaccataaccacaggaaaacgtag

SEQ ID NO: 1887896 - DNA, 25 bp, Homo sapien
cataaccacaggaaaacgtagcaca

SEQ ID NO: 1887897 - DNA, 25 bp, Homo sapien
cttcaaccataaccacaggaaaacg

SEQ ID NO: 1887898 - DNA, 25 bp, Homo sapien
accacaggaaaacgtagcacatcat

SEQ ID NO: 1887899 - DNA, 25 bp, Homo sapien
ttcccgtgccttcccttcaagtcta

SEQ ID NO: 1887900 - DNA, 25 bp, Homo sapien
catggacttgcagccatattcagtc

SEQ ID NO: 1887901 - DNA, 25 bp, Homo sapien
ccttcaagtctagcccttgagctgc

SEQ ID NO: 1887902 - DNA, 25 bp, Homo sapien
catattcagtcttcccgtgccttcc

SEQ ID NO: 1887903 - DNA, 25 bp, Homo sapien
ggttttggagataaatgttcttgct

SEQ ID NO: 1887904 - DNA, 25 bp, Homo sapien
tggttctcagtactagtgtaaaggg

SEQ ID NO: 1887905 - DNA, 25 bp, Homo sapien
tgtagactgtctatatttgagagat

SEQ ID NO: 1887906 - DNA, 25 bp, Homo sapien
tgtcaaggctaagatacagttggtt

SEQ ID NO: 1887907 - DNA, 25 bp, Homo sapien
gtgttacctgtaaaatcttcacgat

SEQ ID NO: 1887908 - DNA, 25 bp, Homo sapien
tgttacctgtaaaatcttcacgatt

SEQ ID NO: 1887909 - DNA, 25 bp, Homo sapien
ttacctgtaaaatcttcacgatttc

SEQ ID NO: 1887910 - DNA, 25 bp, Homo sapien
tctgcaaagttcatgctcccattat

SEQ ID NO: 1887911 - DNA, 25 bp, Homo sapien
catcattagaatagttactatgttc

SEQ ID NO: 1887912 - DNA, 25 bp, Homo sapien
gaagactgaggatcccaacatcatt

SEQ ID NO: 1887913 - DNA, 25 bp, Homo sapien
tcagaagttatccactgtttctcag

SEQ ID NO: 1887914 - DNA, 25 bp, Homo sapien
gagtctggtctacgacccacttctc

SEQ ID NO: 1887915 - DNA, 25 bp, Homo sapien
ccacaaacaccttagagtctggtct

SEQ ID NO: 1887916 - DNA, 25 bp, Homo sapien
caccttagagtctggtctacgaccc

SEQ ID NO: 1887917 - DNA, 25 bp, Homo sapien
acttctccccataggcagatcccaa

SEQ ID NO: 1887918 - DNA, 25 bp, Homo sapien
tcagaagcagttgacaatattaaat

SEQ ID NO: 1887919 - DNA, 25 bp, Homo sapien
agaagcagttgacaatattaaatgg

SEQ ID NO: 1887920 - DNA, 25 bp, Homo sapien
aaatggagcctccttcatgagattt

SEQ ID NO: 1887921 - DNA, 25 bp, Homo sapien
atggagcctccttcatgagatttac

SEQ ID NO: 1887922 - DNA, 25 bp, Homo sapien
caagtacatcatgtgtttctcaaag

SEQ ID NO: 1887923 - DNA, 25 bp, Homo sapien
cctctgtctccagcgactttgaaac

SEQ ID NO: 1887924 - DNA, 25 bp, Homo sapien
ccttctctcaccaagtacatcatgt

SEQ ID NO: 1887925 - DNA, 25 bp, Homo sapien
cacactgggctatcatagaaacacc

SEQ ID NO: 1887926 - DNA, 25 bp, Homo sapien
ctcgtgctgtggttttcagctattt

SEQ ID NO: 1887927 - DNA, 25 bp, Homo sapien
cactttccagtacaccaatcataga

SEQ ID NO: 1887928 - DNA, 25 bp, Homo sapien
cagtcactgatatcttttcttccac

SEQ ID NO: 1887929 - DNA, 25 bp, Homo sapien
catgcatcacgaagttctcgtgctg

SEQ ID NO: 1887930 - DNA, 25 bp, Homo sapien
gcctcagctgcgtaggcctgcctca

SEQ ID NO: 1887931 - DNA, 25 bp, Homo sapien
cctccagaatactcagagccaatga

SEQ ID NO: 1887932 - DNA, 25 bp, Homo sapien
aatactcagagccaatgattggccc

SEQ ID NO: 1887933 - DNA, 25 bp, Homo sapien
gctagtagtaaacagtcttctctgg

SEQ ID NO: 1887934 - DNA, 25 bp, Homo sapien
cttgccagtccaggtggcctgacca

SEQ ID NO: 1887935 - DNA, 25 bp, Homo sapien
ttgccagtccaggtggcctgaccat

SEQ ID NO: 1887936 - DNA, 25 bp, Homo sapien
gtcctatggctagaacactctctgg

SEQ ID NO: 1887937 - DNA, 25 bp, Homo sapien
ccaagagttaagtacagctgaagat

SEQ ID NO: 1887938 - DNA, 25 bp, Homo sapien
gcttgggtggcaaggtaacatcctt

SEQ ID NO: 1887939 - DNA, 25 bp, Homo sapien
catctttgcaggtacaccagttccc

SEQ ID NO: 1887940 - DNA, 25 bp, Homo sapien
ttatatttgattcctttaccaacta

SEQ ID NO: 1887941 - DNA, 25 bp, Homo sapien
tatatttgattcctttaccaactaa

SEQ ID NO: 1887942 - DNA, 25 bp, Homo sapien
gactagatcaaccaacagcctgctg

SEQ ID NO: 1887943 - DNA, 25 bp, Homo sapien
tcagcacatgcatagagacgtccaa

SEQ ID NO: 1887944 - DNA, 25 bp, Homo sapien
tgccagtaaaacagcccctaggtga

SEQ ID NO: 1887945 - DNA, 25 bp, Homo sapien
tttcatttgtattcggccccacgga

SEQ ID NO: 1887946 - DNA, 25 bp, Homo sapien
tagagcttctgtaagatatgcagaa

SEQ ID NO: 1887947 - DNA, 25 bp, Homo sapien
aatcttcctactgatatagcccatg

SEQ ID NO: 1887948 - DNA, 25 bp, Homo sapien
tatacactaagcaggaaggaaccca

SEQ ID NO: 1887949 - DNA, 25 bp, Homo sapien
tcttgctacaaattgagtgatcaca

SEQ ID NO: 1887950 - DNA, 25 bp, Homo sapien
caaaatgtaggagtggattggaccc

SEQ ID NO: 1887951 - DNA, 25 bp, Homo sapien
cattgcaggagtggcaacaaaacac

SEQ ID NO: 1887952 - DNA, 25 bp, Homo sapien
tctgcatatcagcttcctcggctca

SEQ ID NO: 1887953 - DNA, 25 bp, Homo sapien
agctgtctcaatttggccctgtcca

SEQ ID NO: 1887954 - DNA, 25 bp, Homo sapien
cagctaaagaagagggcacatggaa

SEQ ID NO: 1887955 - DNA, 25 bp, Homo sapien
tcctagctcttgaatagtgacacaa

SEQ ID NO: 1887956 - DNA, 25 bp, Homo sapien
tggagtcctctccagtcagccagct

SEQ ID NO: 1887957 - DNA, 25 bp, Homo sapien
tattaatcagggttggctaactgct

SEQ ID NO: 1887958 - DNA, 25 bp, Homo sapien
tattagactgcctctgccggtaacc

SEQ ID NO: 1887959 - DNA, 25 bp, Homo sapien
tctgggttctagtgtgttcatctgt

SEQ ID NO: 1887960 - DNA, 25 bp, Homo sapien
gctttgccagcagcaataggctctg

SEQ ID NO: 1887961 - DNA, 25 bp, Homo sapien
taatcagtgattactgggaggcagc

SEQ ID NO: 1887962 - DNA, 25 bp, Homo sapien
tatgatcatgagaacaattgctagc

SEQ ID NO: 1887963 - DNA, 25 bp, Homo sapien
ttgctagcacataacggtcactctg

SEQ ID NO: 1887964 - DNA, 25 bp, Homo sapien
catattccagtatatagtgtccagc

SEQ ID NO: 1887965 - DNA, 25 bp, Homo sapien
tatctacaggcaatcataagccatg

SEQ ID NO: 1887966 - DNA, 25 bp, Homo sapien
aatcagacactgctcttcaagagag

SEQ ID NO: 1887967 - DNA, 25 bp, Homo sapien
tacaagactgtagttcacagtgggt

SEQ ID NO: 1887968 - DNA, 25 bp, Homo sapien
cacagtgggtaattcaaatcagaca

SEQ ID NO: 1887969 - DNA, 25 bp, Homo sapien
taaaatgcccagtatcttacaagac

SEQ ID NO: 1887970 - DNA, 25 bp, Homo sapien
gagggaatgcctgctcggggagggg

SEQ ID NO: 1887971 - DNA, 25 bp, Homo sapien
tggacggagggcacggcaggatggc

SEQ ID NO: 1887972 - DNA, 25 bp, Homo sapien
ggactggacggagggcacggcagga

SEQ ID NO: 1887973 - DNA, 25 bp, Homo sapien
aggggactggacggagggcacggca

SEQ ID NO: 1887974 - DNA, 25 bp, Homo sapien
ggcaccgggtcctggacgaaatcta

SEQ ID NO: 1887975 - DNA, 25 bp, Homo sapien
gctttatcttgtgcggtgacgccca

SEQ ID NO: 1887976 - DNA, 25 bp, Homo sapien
gtctgaaccgctccttggcctactg

SEQ ID NO: 1887977 - DNA, 25 bp, Homo sapien
tctaccgcggtccaactgagcttta

SEQ ID NO: 1887978 - DNA, 25 bp, Homo sapien
catggtagggtagatttaatataat

SEQ ID NO: 1887979 - DNA, 25 bp, Homo sapien
agcatggtagggtagatttaatata

SEQ ID NO: 1887980 - DNA, 25 bp, Homo sapien
gcatggtagggtagatttaatataa

SEQ ID NO: 1887981 - DNA, 25 bp, Homo sapien
aaagtccttctgctaagggttcaga

SEQ ID NO: 1887982 - DNA, 25 bp, Homo sapien
aacaatcaggtcatggccgcaagac

SEQ ID NO: 1887983 - DNA, 25 bp, Homo sapien
gaagctctgagatacgactttgctg

SEQ ID NO: 1887984 - DNA, 25 bp, Homo sapien
caaagttgagccatgaatacagagg

SEQ ID NO: 1887985 - DNA, 25 bp, Homo sapien
ggtatctgccatatgaccactttgg

SEQ ID NO: 1887986 - DNA, 25 bp, Homo sapien
taatgaaccagcatttacataatgg

SEQ ID NO: 1887987 - DNA, 25 bp, Homo sapien
taaattacatttcggcacccaaata

SEQ ID NO: 1887988 - DNA, 25 bp, Homo sapien
cagggcactggaaactctaatgaac

SEQ ID NO: 1887989 - DNA, 25 bp, Homo sapien
aagctatgtatctattgcccagggc

SEQ ID NO: 1887990 - DNA, 25 bp, Homo sapien
tagttactacattgcagggacaggt

SEQ ID NO: 1887991 - DNA, 25 bp, Homo sapien
tacaaggtttatctctggagcgcca

SEQ ID NO: 1887992 - DNA, 25 bp, Homo sapien
catagtgttactgcctcaaagagga

SEQ ID NO: 1887993 - DNA, 25 bp, Homo sapien
tatgctgtcctgacgtcaaaaacag

SEQ ID NO: 1887994 - DNA, 25 bp, Homo sapien
gaaaatgcataacctatctaagggc

SEQ ID NO: 1887995 - DNA, 25 bp, Homo sapien
cataccagcatgataaggataccgt

SEQ ID NO: 1887996 - DNA, 25 bp, Homo sapien
tagaacatctctgtcaaaggaccca

SEQ ID NO: 1887997 - DNA, 25 bp, Homo sapien
gacacttgcagggactaggagatct

SEQ ID NO: 1887998 - DNA, 25 bp, Homo sapien
tcggactcgtcctctactagaagtt

SEQ ID NO: 1887999 - DNA, 25 bp, Homo sapien
cacaagttttgatggctgtcctcca

SEQ ID NO: 1888000 - DNA, 25 bp, Homo sapien
taaagaggtgtcttcgaacaacagc

SEQ ID NO: 1888001 - DNA, 25 bp, Homo sapien
gtgacttttaagtgggcaacctgaa

SEQ ID NO: 1888002 - DNA, 25 bp, Homo sapien
taaggatctactgtatcttgaaaga

SEQ ID NO: 1888003 - DNA, 25 bp, Homo sapien
taagtgggcaacctgaaaagtggat

SEQ ID NO: 1888004 - DNA, 25 bp, Homo sapien
cacaataatagctcattgcagtaaa

SEQ ID NO: 1888005 - DNA, 25 bp, Homo sapien
aagagtggacgcctttgggagtaca

SEQ ID NO: 1888006 - DNA, 25 bp, Homo sapien
taaaactggattgaccaggactgga

SEQ ID NO: 1888007 - DNA, 25 bp, Homo sapien
cagaattattcctagtgccatgact

SEQ ID NO: 1888008 - DNA, 25 bp, Homo sapien
caaagctttggaatgtttcacagaa

SEQ ID NO: 1888009 - DNA, 25 bp, Homo sapien
attaagagttattgaacctaaagat

SEQ ID NO: 1888010 - DNA, 25 bp, Homo sapien
taagagttattgaacctaaagataa

SEQ ID NO: 1888011 - DNA, 25 bp, Homo sapien
ttaagagttattgaacctaaagata

SEQ ID NO: 1888012 - DNA, 25 bp, Homo sapien
gacaactggatctacaaccactcgg

SEQ ID NO: 1888013 - DNA, 25 bp, Homo sapien
tgtcttggcggtattgatcgtgtag

SEQ ID NO: 1888014 - DNA, 25 bp, Homo sapien
tatctgagcagcattgtgtcttggc

SEQ ID NO: 1888015 - DNA, 25 bp, Homo sapien
ccactcggttgcttctggttcgaac

SEQ ID NO: 1888016 - DNA, 25 bp, Homo sapien
aagaaagcagacaggcgcaaactca

SEQ ID NO: 1888017 - DNA, 25 bp, Homo sapien
gaaagcagacaggcgcaaactcatg

SEQ ID NO: 1888018 - DNA, 25 bp, Homo sapien
agaaagcagacaggcgcaaactcat

SEQ ID NO: 1888019 - DNA, 25 bp, Homo sapien
aaagaaagcagacaggcgcaaactc

SEQ ID NO: 1888020 - DNA, 25 bp, Homo sapien
cttttgcttggtgtatatgctttgg

SEQ ID NO: 1888021 - DNA, 25 bp, Homo sapien
ccattggagtgtcaatgatgtctct

SEQ ID NO: 1888022 - DNA, 25 bp, Homo sapien
taacggtagcaaaatccattggagt

SEQ ID NO: 1888023 - DNA, 25 bp, Homo sapien
tttacataactccattggtgactca

SEQ ID NO: 1888024 - DNA, 25 bp, Homo sapien
tgtgaccgcactgactttaccataa

SEQ ID NO: 1888025 - DNA, 25 bp, Homo sapien
tatgatggattacactgactggttt

SEQ ID NO: 1888026 - DNA, 25 bp, Homo sapien
ggcctgggactcgagtataataaac

SEQ ID NO: 1888027 - DNA, 25 bp, Homo sapien
cacagaacaaatgggtgtgaaattt

SEQ ID NO: 1888028 - DNA, 25 bp, Homo sapien
gctctttcgttaacaagtccttgga

SEQ ID NO: 1888029 - DNA, 25 bp, Homo sapien
cccatgagatttgtttgatccatag

SEQ ID NO: 1888030 - DNA, 25 bp, Homo sapien
ccatagattatttagaggtgggctc

SEQ ID NO: 1888031 - DNA, 25 bp, Homo sapien
gggcttacaccatgtagtatagtac

SEQ ID NO: 1888032 - DNA, 25 bp, Homo sapien
taacacgtttagctggtgggacagg

SEQ ID NO: 1888033 - DNA, 25 bp, Homo sapien
cactggacataagggatacgggttc

SEQ ID NO: 1888034 - DNA, 25 bp, Homo sapien
tactgcaagaggcaagagattacat

SEQ ID NO: 1888035 - DNA, 25 bp, Homo sapien
cacatataactggtgcactggacat

SEQ ID NO: 1888036 - DNA, 25 bp, Homo sapien
taagggacttgctcaaagctgcaca

SEQ ID NO: 1888037 - DNA, 25 bp, Homo sapien
tggattctctatgtagccaaatgga

SEQ ID NO: 1888038 - DNA, 25 bp, Homo sapien
tccataatcctgtaaggacgtaggc

SEQ ID NO: 1888039 - DNA, 25 bp, Homo sapien
tacagtgtcttcattcagggctcct

SEQ ID NO: 1888040 - DNA, 25 bp, Homo sapien
tggatattcaaggagatctaccggc

SEQ ID NO: 1888041 - DNA, 25 bp, Homo sapien
taccggctgacggaaaggctctgaa

SEQ ID NO: 1888042 - DNA, 25 bp, Homo sapien
gcttgaatatcgtaagactgggctc

SEQ ID NO: 1888043 - DNA, 25 bp, Homo sapien
gactgggctctattacgtaatcttc

SEQ ID NO: 1888044 - DNA, 25 bp, Homo sapien
tttttcgagtagaagttcctggcac

SEQ ID NO: 1888045 - DNA, 25 bp, Homo sapien
ctttttcgagtagaagttcctggca

SEQ ID NO: 1888046 - DNA, 25 bp, Homo sapien
ttttcgagtagaagttcctggcaca

SEQ ID NO: 1888047 - DNA, 25 bp, Homo sapien
tactttatagttgattaactagcaa

SEQ ID NO: 1888048 - DNA, 25 bp, Homo sapien
gaatatcaatatggtaataataatg

SEQ ID NO: 1888049 - DNA, 25 bp, Homo sapien
tatgctggggcactttattgactca

SEQ ID NO: 1888050 - DNA, 25 bp, Homo sapien
caacagcttttacctgaaaactaca

SEQ ID NO: 1888051 - DNA, 25 bp, Homo sapien
cttcttcattgaattataaagtgga

SEQ ID NO: 1888052 - DNA, 25 bp, Homo sapien
aattatgttataacaagtctgatcc

SEQ ID NO: 1888053 - DNA, 25 bp, Homo sapien
gtggaattatgttataacaagtctg

SEQ ID NO: 1888054 - DNA, 25 bp, Homo sapien
gaattataaagtggaattatgttat

SEQ ID NO: 1888055 - DNA, 25 bp, Homo sapien
gatggcagacactcatttaccgtgc

SEQ ID NO: 1888056 - DNA, 25 bp, Homo sapien
tagtgactccccagatatccttgtt

SEQ ID NO: 1888057 - DNA, 25 bp, Homo sapien
catattcaaagccacccacgatgtg

SEQ ID NO: 1888058 - DNA, 25 bp, Homo sapien
ctctatcctcaagtatgtctgggca

SEQ ID NO: 1888059 - DNA, 25 bp, Homo sapien
ctgaaacccaggatcaaaccagaga

SEQ ID NO: 1888060 - DNA, 25 bp, Homo sapien
tgaaacccaggatcaaaccagagac

SEQ ID NO: 1888061 - DNA, 25 bp, Homo sapien
ttctattttaagaggaactgtagtg

SEQ ID NO: 1888062 - DNA, 25 bp, Homo sapien
taagaggaactgtagtgccattaat

SEQ ID NO: 1888063 - DNA, 25 bp, Homo sapien
tttaagaggaactgtagtgccatta

SEQ ID NO: 1888064 - DNA, 25 bp, Homo sapien
tattttaagaggaactgtagtgcca

SEQ ID NO: 1888065 - DNA, 25 bp, Homo sapien
cattaaatgttcgtgtattatgctc

SEQ ID NO: 1888066 - DNA, 25 bp, Homo sapien
tatgctctatatatcgaacttccca

SEQ ID NO: 1888067 - DNA, 25 bp, Homo sapien
gaagatcagtcacgaatttagcaga

SEQ ID NO: 1888068 - DNA, 25 bp, Homo sapien
gatttcacaatagggcttccaggct

SEQ ID NO: 1888069 - DNA, 25 bp, Homo sapien
tcagccaagcctacctcaaatgtgc

SEQ ID NO: 1888070 - DNA, 25 bp, Homo sapien
ttagattaataccagcagggcaaac

SEQ ID NO: 1888071 - DNA, 25 bp, Homo sapien
taacctcatgatcacgtggctgact

SEQ ID NO: 1888072 - DNA, 25 bp, Homo sapien
gatgttcctcaactaacgatggtgt

SEQ ID NO: 1888073 - DNA, 25 bp, Homo sapien
tgggtacaggcacaggatagcccct

SEQ ID NO: 1888074 - DNA, 25 bp, Homo sapien
aaccacatagcagggaggacttctc

SEQ ID NO: 1888075 - DNA, 25 bp, Homo sapien
tatgctccccagaagacatgtgaca

SEQ ID NO: 1888076 - DNA, 25 bp, Homo sapien
tcaaggaagcaacagcaagtacacc

SEQ ID NO: 1888077 - DNA, 25 bp, Homo sapien
gcagcatcgacattactgggacttg

SEQ ID NO: 1888078 - DNA, 25 bp, Homo sapien
taagtgtctaaagaccagcagcatc

SEQ ID NO: 1888079 - DNA, 25 bp, Homo sapien
tatcaaatcatgtcagcctctagga

SEQ ID NO: 1888080 - DNA, 25 bp, Homo sapien
gaaaatgaaataccttgccttgctt

SEQ ID NO: 1888081 - DNA, 25 bp, Homo sapien
gctttcctttgatagtagctacatc

SEQ ID NO: 1888082 - DNA, 25 bp, Homo sapien
tgatagtagctacatcaaatggttc

SEQ ID NO: 1888083 - DNA, 25 bp, Homo sapien
cagctttcctttgatagtagctaca

SEQ ID NO: 1888084 - DNA, 25 bp, Homo sapien
agtagctacatcaaatggttctaac

SEQ ID NO: 1888085 - DNA, 25 bp, Homo sapien
tactgtgcaatacatgggataggct

SEQ ID NO: 1888086 - DNA, 25 bp, Homo sapien
tgtttaattgtacttagatccgttg

SEQ ID NO: 1888087 - DNA, 25 bp, Homo sapien
cgttggatatgccactactgtgcaa

SEQ ID NO: 1888088 - DNA, 25 bp, Homo sapien
catgggataggcttgcagatccacg

SEQ ID NO: 1888089 - DNA, 25 bp, Homo sapien
tagattagtgatctgcactcaccat

SEQ ID NO: 1888090 - DNA, 25 bp, Homo sapien
aggaacactggtacctagttcttca

SEQ ID NO: 1888091 - DNA, 25 bp, Homo sapien
ctccatcaagaggtttatagattag

SEQ ID NO: 1888092 - DNA, 25 bp, Homo sapien
ggtacctagttcttcaggaaataca

SEQ ID NO: 1888093 - DNA, 25 bp, Homo sapien
tattaggtataagctccatatccca

SEQ ID NO: 1888094 - DNA, 25 bp, Homo sapien
cattattaggtataagctccatatc

SEQ ID NO: 1888095 - DNA, 25 bp, Homo sapien
taggtataagctccatatcccaagg

SEQ ID NO: 1888096 - DNA, 25 bp, Homo sapien
agctccatatcccaaggactcatct

SEQ ID NO: 1888097 - DNA, 25 bp, Homo sapien
tttcgattgttccaaaccaccaggc

SEQ ID NO: 1888098 - DNA, 25 bp, Homo sapien
caaacattgtagcattgaaacagac

SEQ ID NO: 1888099 - DNA, 25 bp, Homo sapien
gaaacagactatcagggtactcaag

SEQ ID NO: 1888100 - DNA, 25 bp, Homo sapien
catcatctatgacagacctgaagcg

SEQ ID NO: 1888101 - DNA, 25 bp, Homo sapien
aacaaaaactaactcatcattctga

SEQ ID NO: 1888102 - DNA, 25 bp, Homo sapien
gaacaaaaactaactcatcattctg

SEQ ID NO: 1888103 - DNA, 25 bp, Homo sapien
gccaagaacaaaaactaactcatca

SEQ ID NO: 1888104 - DNA, 25 bp, Homo sapien
aagaacaaaaactaactcatcattc

SEQ ID NO: 1888105 - DNA, 25 bp, Homo sapien
catgggttttaactgaccaggtcta

SEQ ID NO: 1888106 - DNA, 25 bp, Homo sapien
gaggtcctggaagtaattccctgtg

SEQ ID NO: 1888107 - DNA, 25 bp, Homo sapien
taccaaaggctgatagccaaaacca

SEQ ID NO: 1888108 - DNA, 25 bp, Homo sapien
caattctggaacctatgtatgcaaa

SEQ ID NO: 1888109 - DNA, 25 bp, Homo sapien
gagaactactctcataagtggcaca

SEQ ID NO: 1888110 - DNA, 25 bp, Homo sapien
tcaatgcgttctagtggcactgaag

SEQ ID NO: 1888111 - DNA, 25 bp, Homo sapien
cctcttgaaggagatttggacctgc

SEQ ID NO: 1888112 - DNA, 25 bp, Homo sapien
tggacctgctaggtagctgctatcc

SEQ ID NO: 1888113 - DNA, 25 bp, Homo sapien
tctataacgtcaggcatatcatggt

SEQ ID NO: 1888114 - DNA, 25 bp, Homo sapien
tctcaagactaggaaatctataacg

SEQ ID NO: 1888115 - DNA, 25 bp, Homo sapien
aattgttgtctcaagactaggaaat

SEQ ID NO: 1888116 - DNA, 25 bp, Homo sapien
ctaggaaatctataacgtcaggcat

SEQ ID NO: 1888117 - DNA, 25 bp, Homo sapien
ttcatggtaaatgatccgccagtca

SEQ ID NO: 1888118 - DNA, 25 bp, Homo sapien
atggtaaatgatccgccagtcagtt

SEQ ID NO: 1888119 - DNA, 25 bp, Homo sapien
gtaaatgatccgccagtcagtttac

SEQ ID NO: 1888120 - DNA, 25 bp, Homo sapien
tcatggtaaatgatccgccagtcag

SEQ ID NO: 1888121 - DNA, 25 bp, Homo sapien
taatcccacttcatactttatgcca

SEQ ID NO: 1888122 - DNA, 25 bp, Homo sapien
tcccacttcatactttatgccaact

SEQ ID NO: 1888123 - DNA, 25 bp, Homo sapien
ggtaatcccacttcatactttatgc

SEQ ID NO: 1888124 - DNA, 25 bp, Homo sapien
gtaggtaatcccacttcatacttta

SEQ ID NO: 1888125 - DNA, 25 bp, Homo sapien
cataattgtatttttggggctatta

SEQ ID NO: 1888126 - DNA, 25 bp, Homo sapien
tagtaacctttgatacaattttctc

SEQ ID NO: 1888127 - DNA, 25 bp, Homo sapien
atagtaacctttgatacaattttct

SEQ ID NO: 1888128 - DNA, 25 bp, Homo sapien
atttttccgggccatttcgacatag

SEQ ID NO: 1888129 - DNA, 25 bp, Homo sapien
ccgtagctccattttatgccatggt

SEQ ID NO: 1888130 - DNA, 25 bp, Homo sapien
ggccatttcgacataggcttcatgt

SEQ ID NO: 1888131 - DNA, 25 bp, Homo sapien
catggttgttttttgggattgatac

SEQ ID NO: 1888132 - DNA, 25 bp, Homo sapien
aatttgtgtacaaaacaaggagaca

SEQ ID NO: 1888133 - DNA, 25 bp, Homo sapien
taaagatctaatgaactgtgaacac

SEQ ID NO: 1888134 - DNA, 25 bp, Homo sapien
gtgctttgctaaagaagcctctatt

SEQ ID NO: 1888135 - DNA, 25 bp, Homo sapien
tgttggacaccagataacactgcct

SEQ ID NO: 1888136 - DNA, 25 bp, Homo sapien
taatccatgttgatggcaaccattc

SEQ ID NO: 1888137 - DNA, 25 bp, Homo sapien
tcttcggggaatggtatctgtaatc

SEQ ID NO: 1888138 - DNA, 25 bp, Homo sapien
tgtcaaaccattttcagttagttct

SEQ ID NO: 1888139 - DNA, 25 bp, Homo sapien
ttcagttagttctcccacagccaat

SEQ ID NO: 1888140 - DNA, 25 bp, Homo sapien
gaacttagaatgtttggttgaggaa

SEQ ID NO: 1888141 - DNA, 25 bp, Homo sapien
cattatgaggacatatcttattccc

SEQ ID NO: 1888142 - DNA, 25 bp, Homo sapien
cttttacatcaagacaggtaagttg

SEQ ID NO: 1888143 - DNA, 25 bp, Homo sapien
ggcatcaccaaaaatcattatgagg

SEQ ID NO: 1888144 - DNA, 25 bp, Homo sapien
ttggtgatattggtccatctttttc

SEQ ID NO: 1888145 - DNA, 25 bp, Homo sapien
tggtgatattggtccatctttttct

SEQ ID NO: 1888146 - DNA, 25 bp, Homo sapien
gtcagagtaatcactggagtagtca

SEQ ID NO: 1888147 - DNA, 25 bp, Homo sapien
tccagtcagagtaatcactggagta

SEQ ID NO: 1888148 - DNA, 25 bp, Homo sapien
tggctgcagattaattcctgcatct

SEQ ID NO: 1888149 - DNA, 25 bp, Homo sapien
tctttggtggctgcagattaattcc

SEQ ID NO: 1888150 - DNA, 25 bp, Homo sapien
aataagagggggtcacttttctcag

SEQ ID NO: 1888151 - DNA, 25 bp, Homo sapien
tgacttctgagtgttgcatatgtta

SEQ ID NO: 1888152 - DNA, 25 bp, Homo sapien
catatgttacaaattctgtgagcat

SEQ ID NO: 1888153 - DNA, 25 bp, Homo sapien
aaaatactgacttctgagtgttgca

SEQ ID NO: 1888154 - DNA, 25 bp, Homo sapien
tcttcttcttcggatgttccaccac

SEQ ID NO: 1888155 - DNA, 25 bp, Homo sapien
cactgacagcaactacttcgccttc

SEQ ID NO: 1888156 - DNA, 25 bp, Homo sapien
cttcttcggatgttccaccactgac

SEQ ID NO: 1888157 - DNA, 25 bp, Homo sapien
ctctcttcttcttcggatgttccac

SEQ ID NO: 1888158 - DNA, 25 bp, Homo sapien
ttctatctcttctgagggtctagga

SEQ ID NO: 1888159 - DNA, 25 bp, Homo sapien
tacgataattgtgttgatttgtctg

SEQ ID NO: 1888160 - DNA, 25 bp, Homo sapien
cttccaatgcagatcttgtacgata

SEQ ID NO: 1888161 - DNA, 25 bp, Homo sapien
ttctgagggtctaggagtctcttcc

SEQ ID NO: 1888162 - DNA, 25 bp, Homo sapien
taagtttatctcagcaaaggatgca

SEQ ID NO: 1888163 - DNA, 25 bp, Homo sapien
tccatccataaaggtagtagcaagc

SEQ ID NO: 1888164 - DNA, 25 bp, Homo sapien
ttgtgaggtcctactgatcccaggg

SEQ ID NO: 1888165 - DNA, 25 bp, Homo sapien
gatcccagggtatgatacactcagt

SEQ ID NO: 1888166 - DNA, 25 bp, Homo sapien
tcttctgacctgtaagtctttattt

SEQ ID NO: 1888167 - DNA, 25 bp, Homo sapien
tttgagacagtgggtattttattct

SEQ ID NO: 1888168 - DNA, 25 bp, Homo sapien
ggctcaggacatccggcattaaatg

SEQ ID NO: 1888169 - DNA, 25 bp, Homo sapien
gacagggaggtcaggtttcaccgac

SEQ ID NO: 1888170 - DNA, 25 bp, Homo sapien
cctgaggttacacggaaagccctga

SEQ ID NO: 1888171 - DNA, 25 bp, Homo sapien
ggtatcaggaaaggaacgctactcc

SEQ ID NO: 1888172 - DNA, 25 bp, Homo sapien
tagaagcggcaactaaagatgtgac

SEQ ID NO: 1888173 - DNA, 25 bp, Homo sapien
tcatagatgattccgaaggctgaag

SEQ ID NO: 1888174 - DNA, 25 bp, Homo sapien
tctgcagcctatgggtcaaggaata

SEQ ID NO: 1888175 - DNA, 25 bp, Homo sapien
tgagacctactactcggaaaacatg

SEQ ID NO: 1888176 - DNA, 25 bp, Homo sapien
tagtcaactgatatgctctggaaga

SEQ ID NO: 1888177 - DNA, 25 bp, Homo sapien
cagcccagccttatgccattgtgtg

SEQ ID NO: 1888178 - DNA, 25 bp, Homo sapien
ttaaagaagcaaaccacatgtcctg

SEQ ID NO: 1888179 - DNA, 25 bp, Homo sapien
taatttatgacggataactgggcat

SEQ ID NO: 1888180 - DNA, 25 bp, Homo sapien
tcacttcttggtgcgttgctgtgca

SEQ ID NO: 1888181 - DNA, 25 bp, Homo sapien
tacaccagctgatagctcgggtact

SEQ ID NO: 1888182 - DNA, 25 bp, Homo sapien
caagctaccagatcccgctctgtgg

SEQ ID NO: 1888183 - DNA, 25 bp, Homo sapien
tgtgcatttgccgtacaccttcaat

SEQ ID NO: 1888184 - DNA, 25 bp, Homo sapien
gaatgaacctctgaggtagaactta

SEQ ID NO: 1888185 - DNA, 25 bp, Homo sapien
ggtgaatgaacctctgaggtagaac

SEQ ID NO: 1888186 - DNA, 25 bp, Homo sapien
tgaatgaacctctgaggtagaactt

SEQ ID NO: 1888187 - DNA, 25 bp, Homo sapien
gtggtgaatgaacctctgaggtaga

SEQ ID NO: 1888188 - DNA, 25 bp, Homo sapien
gtattactgataactgcttcaccag

SEQ ID NO: 1888189 - DNA, 25 bp, Homo sapien
tgctcctgttgtagtctttgaatca

SEQ ID NO: 1888190 - DNA, 25 bp, Homo sapien
gcttcaccagaacgtctcaggtctt

SEQ ID NO: 1888191 - DNA, 25 bp, Homo sapien
cagtgggctgatctcctggtttgct

SEQ ID NO: 1888192 - DNA, 25 bp, Homo sapien
catagaggaccacttgacttctgcc

SEQ ID NO: 1888193 - DNA, 25 bp, Homo sapien
gaaacttttgaacacaatattccca

SEQ ID NO: 1888194 - DNA, 25 bp, Homo sapien
cattaattcttacttgtcatagagg

SEQ ID NO: 1888195 - DNA, 25 bp, Homo sapien
tagaacgcaagaggtacaaacgctg

SEQ ID NO: 1888196 - DNA, 25 bp, Homo sapien
gatatcttgatggatgagggttacc

SEQ ID NO: 1888197 - DNA, 25 bp, Homo sapien
ttcacggccaggaactaatctttga

SEQ ID NO: 1888198 - DNA, 25 bp, Homo sapien
gaggaagttactcccatctgaggga

SEQ ID NO: 1888199 - DNA, 25 bp, Homo sapien
tcacgaataagtggccgataatcac

SEQ ID NO: 1888200 - DNA, 25 bp, Homo sapien
atcaggagagcatttgcagtcaaat

SEQ ID NO: 1888201 - DNA, 25 bp, Homo sapien
aaaagatgtccatgagagtctgtgc

SEQ ID NO: 1888202 - DNA, 25 bp, Homo sapien
tatttgctactggacccaaagccaa

SEQ ID NO: 1888203 - DNA, 25 bp, Homo sapien
caaatactgcgccatgtccttggcc

SEQ ID NO: 1888204 - DNA, 25 bp, Homo sapien
gaagctgaaacatagactggaagca

SEQ ID NO: 1888205 - DNA, 25 bp, Homo sapien
tcaaatacccttgtgatagcaagtc

SEQ ID NO: 1888206 - DNA, 25 bp, Homo sapien
cccaacttaactgtaggctgactaa

SEQ ID NO: 1888207 - DNA, 25 bp, Homo sapien
ggagagacaaactcacattcatggc

SEQ ID NO: 1888208 - DNA, 25 bp, Homo sapien
taaaagtactgaaggcctagaatgt

SEQ ID NO: 1888209 - DNA, 25 bp, Homo sapien
ccaaacaaatgtgggcttactaagt

SEQ ID NO: 1888210 - DNA, 25 bp, Homo sapien
aacctggcgacctctttcacagaag

SEQ ID NO: 1888211 - DNA, 25 bp, Homo sapien
tataattaacttctaaacctggcga

SEQ ID NO: 1888212 - DNA, 25 bp, Homo sapien
tatcagttatcacaatgtacaggca

SEQ ID NO: 1888213 - DNA, 25 bp, Homo sapien
ctatattgtatcttcatacttgtga

SEQ ID NO: 1888214 - DNA, 25 bp, Homo sapien
tcagcatgtcaataaaagtgtggaa

SEQ ID NO: 1888215 - DNA, 25 bp, Homo sapien
gtacaggcactgtaatatgcacaat

SEQ ID NO: 1888216 - DNA, 25 bp, Homo sapien
cagcagaaaagagaactctaggatc

SEQ ID NO: 1888217 - DNA, 25 bp, Homo sapien
tctaggatcgaacgggtgtggttca

SEQ ID NO: 1888218 - DNA, 25 bp, Homo sapien
tatcacgtttccatcatgaccagca

SEQ ID NO: 1888219 - DNA, 25 bp, Homo sapien
gtgtggttcaagaacaaatacctca

SEQ ID NO: 1888220 - DNA, 25 bp, Homo sapien
catgaattagttgaccagtgtaaga

SEQ ID NO: 1888221 - DNA, 25 bp, Homo sapien
caggacatgaattagttgaccagtg

SEQ ID NO: 1888222 - DNA, 25 bp, Homo sapien
catcaggacatgaattagttgacca

SEQ ID NO: 1888223 - DNA, 25 bp, Homo sapien
gacatgaattagttgaccagtgtaa

SEQ ID NO: 1888224 - DNA, 25 bp, Homo sapien
tgtcgatcccaagctaccatagtaa

SEQ ID NO: 1888225 - DNA, 25 bp, Homo sapien
gctaccatagtaaccttcatttttg

SEQ ID NO: 1888226 - DNA, 25 bp, Homo sapien
taactgcagttataactgtattgtc

SEQ ID NO: 1888227 - DNA, 25 bp, Homo sapien
taactgtattgtcatgtcgatccca

SEQ ID NO: 1888228 - DNA, 25 bp, Homo sapien
gaaagtgaggaagtgttttacactg

SEQ ID NO: 1888229 - DNA, 25 bp, Homo sapien
ctgaaagtgaggaagtgttttacac

SEQ ID NO: 1888230 - DNA, 25 bp, Homo sapien
cctgctggacgagtagccatatcca

SEQ ID NO: 1888231 - DNA, 25 bp, Homo sapien
aatacgtgctgtcccatcacgactg

SEQ ID NO: 1888232 - DNA, 25 bp, Homo sapien
ccactctcttcgtttaaattgccaa

SEQ ID NO: 1888233 - DNA, 25 bp, Homo sapien
tacgtgctgtcccatcacgactgcc

SEQ ID NO: 1888234 - DNA, 25 bp, Homo sapien
actctcttcgtttaaattgccaaat

SEQ ID NO: 1888235 - DNA, 25 bp, Homo sapien
ggaaaactggatactgtcaactttg

SEQ ID NO: 1888236 - DNA, 25 bp, Homo sapien
aaaactggatactgtcaactttgtc

SEQ ID NO: 1888237 - DNA, 25 bp, Homo sapien
actagtgttggaaaactggatactg

SEQ ID NO: 1888238 - DNA, 25 bp, Homo sapien
tgttggaaaactggatactgtcaac

SEQ ID NO: 1888239 - DNA, 25 bp, Homo sapien
tgatctgtgcttcccgtcgccagaa

SEQ ID NO: 1888240 - DNA, 25 bp, Homo sapien
aataaacccgaataatatgatctgt

SEQ ID NO: 1888241 - DNA, 25 bp, Homo sapien
aaaataaacccgaataatatgatct

SEQ ID NO: 1888242 - DNA, 25 bp, Homo sapien
taaacccgaataatatgatctgtgc

SEQ ID NO: 1888243 - DNA, 25 bp, Homo sapien
ggcgctctgtaaattttgcaggtct

SEQ ID NO: 1888244 - DNA, 25 bp, Homo sapien
ctctgtaaattttgcaggtcttggg

SEQ ID NO: 1888245 - DNA, 25 bp, Homo sapien
ccaggccgagggcgctctgtaaatt

SEQ ID NO: 1888246 - DNA, 25 bp, Homo sapien
ccgagggcgctctgtaaattttgca

SEQ ID NO: 1888247 - DNA, 25 bp, Homo sapien
atggcccccaagctgccataagaac

SEQ ID NO: 1888248 - DNA, 25 bp, Homo sapien
ttgctttgtccaaagaaccatgttt

SEQ ID NO: 1888249 - DNA, 25 bp, Homo sapien
tttgttactcgagctaccatggccc

SEQ ID NO: 1888250 - DNA, 25 bp, Homo sapien
atgaagtagttttgttactcgagct

SEQ ID NO: 1888251 - DNA, 25 bp, Homo sapien
ttttaagggttccagcatcccagag

SEQ ID NO: 1888252 - DNA, 25 bp, Homo sapien
gaagatagatatctctttgagccac

SEQ ID NO: 1888253 - DNA, 25 bp, Homo sapien
tctgccccagtagaagatagatatc

SEQ ID NO: 1888254 - DNA, 25 bp, Homo sapien
ttattttaagggttccagcatccca

SEQ ID NO: 1888255 - DNA, 25 bp, Homo sapien
tagatgcactatggccctgaagaac

SEQ ID NO: 1888256 - DNA, 25 bp, Homo sapien
ggttcgaagacaccagactcggatc

SEQ ID NO: 1888257 - DNA, 25 bp, Homo sapien
caacttccagctgctatcatggtat

SEQ ID NO: 1888258 - DNA, 25 bp, Homo sapien
ccaaaggtgcacaggttcgaagaca

SEQ ID NO: 1888259 - DNA, 25 bp, Homo sapien
ttaaggtagctaacaacctcccatc

SEQ ID NO: 1888260 - DNA, 25 bp, Homo sapien
ggtagctaacaacctcccatcatct

SEQ ID NO: 1888261 - DNA, 25 bp, Homo sapien
taaggtagctaacaacctcccatca

SEQ ID NO: 1888262 - DNA, 25 bp, Homo sapien
tcttaaggtagctaacaacctccca

SEQ ID NO: 1888263 - DNA, 25 bp, Homo sapien
tactatcaaagtaccctcaatgtgg

SEQ ID NO: 1888264 - DNA, 25 bp, Homo sapien
caaatgcaagctacaatggtgacta

SEQ ID NO: 1888265 - DNA, 25 bp, Homo sapien
cagcaaataagacaagtgggataag

SEQ ID NO: 1888266 - DNA, 25 bp, Homo sapien
ttctctcaggaagctgtgagtttcc

SEQ ID NO: 1888267 - DNA, 25 bp, Homo sapien
gaaagaactcagaggacctatggag

SEQ ID NO: 1888268 - DNA, 25 bp, Homo sapien
gaaagaatagtatcgttaatcccca

SEQ ID NO: 1888269 - DNA, 25 bp, Homo sapien
cctatggaggcatataattcagaca

SEQ ID NO: 1888270 - DNA, 25 bp, Homo sapien
tgttagaatgcttaacgaccttcca

SEQ ID NO: 1888271 - DNA, 25 bp, Homo sapien
aatttgcggcaactacttcattagc

SEQ ID NO: 1888272 - DNA, 25 bp, Homo sapien
tttacagagcacaagcaaagtagtt

SEQ ID NO: 1888273 - DNA, 25 bp, Homo sapien
taaaccacgctataaaaagatatgc

SEQ ID NO: 1888274 - DNA, 25 bp, Homo sapien
cagactttgtagttccctttacaga

SEQ ID NO: 1888275 - DNA, 25 bp, Homo sapien
caaggccaaagtgccagtagatgtg

SEQ ID NO: 1888276 - DNA, 25 bp, Homo sapien
gcggcagtactccacattcagaata

SEQ ID NO: 1888277 - DNA, 25 bp, Homo sapien
gaagcacaaagttaagcggcagtac

SEQ ID NO: 1888278 - DNA, 25 bp, Homo sapien
caagggctccattcttgaggcctca

SEQ ID NO: 1888279 - DNA, 25 bp, Homo sapien
caaatcagtctctcgagtcttacaa

SEQ ID NO: 1888280 - DNA, 25 bp, Homo sapien
gatcactgccagaaactttttgcca

SEQ ID NO: 1888281 - DNA, 25 bp, Homo sapien
gaagtttcagccttcttacattaga

SEQ ID NO: 1888282 - DNA, 25 bp, Homo sapien
gatatctcaaagtcaatacgtttca

SEQ ID NO: 1888283 - DNA, 25 bp, Homo sapien
gagtaagtgaaaccacctgaatttc

SEQ ID NO: 1888284 - DNA, 25 bp, Homo sapien
taaactcttctgttagagtaagtga

SEQ ID NO: 1888285 - DNA, 25 bp, Homo sapien
tgttagagtaagtgaaaccacctga

SEQ ID NO: 1888286 - DNA, 25 bp, Homo sapien
ttctgttagagtaagtgaaaccacc

SEQ ID NO: 1888287 - DNA, 25 bp, Homo sapien
agtaaatatccgtctgccagttcga

SEQ ID NO: 1888288 - DNA, 25 bp, Homo sapien
tgacaagtgtccaagaattcgttta

SEQ ID NO: 1888289 - DNA, 25 bp, Homo sapien
tctgccagttcgatcaaaagttaca

SEQ ID NO: 1888290 - DNA, 25 bp, Homo sapien
caagtgtccaagaattcgtttatgc

SEQ ID NO: 1888291 - DNA, 25 bp, Homo sapien
tgcagttggaacaagtcgctcaagt

SEQ ID NO: 1888292 - DNA, 25 bp, Homo sapien
cactgcagttggaacaagtcgctca

SEQ ID NO: 1888293 - DNA, 25 bp, Homo sapien
ctgatacactgcagttggaacaagt

SEQ ID NO: 1888294 - DNA, 25 bp, Homo sapien
ggaacaagtcgctcaagtctgtatt

SEQ ID NO: 1888295 - DNA, 25 bp, Homo sapien
taattttcttacatgatcacctttt

SEQ ID NO: 1888296 - DNA, 25 bp, Homo sapien
tcttacatgatcaccttttaagaat

SEQ ID NO: 1888297 - DNA, 25 bp, Homo sapien
ttttcttacatgatcaccttttaag

SEQ ID NO: 1888298 - DNA, 25 bp, Homo sapien
aattaattttcttacatgatcacct

SEQ ID NO: 1888299 - DNA, 25 bp, Homo sapien
gtttcaatcatagcttagaccccag

SEQ ID NO: 1888300 - DNA, 25 bp, Homo sapien
gagcccagtaattatgccctaaagt

SEQ ID NO: 1888301 - DNA, 25 bp, Homo sapien
taattagcactagggtttctcggtc

SEQ ID NO: 1888302 - DNA, 25 bp, Homo sapien
tacttagccaaggtacagagcccag

SEQ ID NO: 1888303 - DNA, 25 bp, Homo sapien
gggtactcagacaagacgcatcagt

SEQ ID NO: 1888304 - DNA, 25 bp, Homo sapien
tcttaatcagaaatggaggaccaca

SEQ ID NO: 1888305 - DNA, 25 bp, Homo sapien
tactccagtgtaggaaagctgttcc

SEQ ID NO: 1888306 - DNA, 25 bp, Homo sapien
tgctggcagcctaatgaaatgcaag

SEQ ID NO: 1888307 - DNA, 25 bp, Homo sapien
ctctgtcgtacaggctggagtatac

SEQ ID NO: 1888308 - DNA, 25 bp, Homo sapien
ggagtatactggcacaatctctgca

SEQ ID NO: 1888309 - DNA, 25 bp, Homo sapien
ctgtcgtacaggctggagtatactg

SEQ ID NO: 1888310 - DNA, 25 bp, Homo sapien
agtatactggcacaatctctgcagc

SEQ ID NO: 1888311 - DNA, 25 bp, Homo sapien
ggtttactcctacagtaccatctgg

SEQ ID NO: 1888312 - DNA, 25 bp, Homo sapien
tgtaccagcaagtagcaaccaacca

SEQ ID NO: 1888313 - DNA, 25 bp, Homo sapien
aaatactcataattcgagggccaga

SEQ ID NO: 1888314 - DNA, 25 bp, Homo sapien
tgagcaacatagcacccatgatagc

SEQ ID NO: 1888315 - DNA, 25 bp, Homo sapien
tgatgtgagcgcagcatattccagg

SEQ ID NO: 1888316 - DNA, 25 bp, Homo sapien
ccctcatggagattgcagtctagca

SEQ ID NO: 1888317 - DNA, 25 bp, Homo sapien
caagattgacttgcacacagagtag

SEQ ID NO: 1888318 - DNA, 25 bp, Homo sapien
gagcacctatatgagccaaatatgg

SEQ ID NO: 1888319 - DNA, 25 bp, Homo sapien
gtaataacaacagatcagtgggatc

SEQ ID NO: 1888320 - DNA, 25 bp, Homo sapien
gaacttaatagcaaacctccacaga

SEQ ID NO: 1888321 - DNA, 25 bp, Homo sapien
taaaggaggttctagagcactggaa

SEQ ID NO: 1888322 - DNA, 25 bp, Homo sapien
aaatgctgctatgccaagtacacac

SEQ ID NO: 1888323 - DNA, 25 bp, Homo sapien
cagtgataattttgcccaggagata

SEQ ID NO: 1888324 - DNA, 25 bp, Homo sapien
gaaaaggtcagtcttgtgtgacaca

SEQ ID NO: 1888325 - DNA, 25 bp, Homo sapien
tgtactaagctagagcacaaagtgc

SEQ ID NO: 1888326 - DNA, 25 bp, Homo sapien
gaactgccaaagagttgtactaagc

SEQ ID NO: 1888327 - DNA, 25 bp, Homo sapien
tgggtgggctaccatagttaactgg

SEQ ID NO: 1888328 - DNA, 25 bp, Homo sapien
cagatcctttccacacaacatgctt

SEQ ID NO: 1888329 - DNA, 25 bp, Homo sapien
agccagagcagatcctttccacaca

SEQ ID NO: 1888330 - DNA, 25 bp, Homo sapien
tggtcttccacagtgcaacgcagcc

SEQ ID NO: 1888331 - DNA, 25 bp, Homo sapien
gtcgatgacatatttgcagcaagtg

SEQ ID NO: 1888332 - DNA, 25 bp, Homo sapien
caagaagaggtcctagtcgatgaca

SEQ ID NO: 1888333 - DNA, 25 bp, Homo sapien
tatttgtgcgtagtaaagactgtct

SEQ ID NO: 1888334 - DNA, 25 bp, Homo sapien
caagtgatcaggtgctaagtgtctg

SEQ ID NO: 1888335 - DNA, 25 bp, Homo sapien
tctttgagaggtttattatcccgca

SEQ ID NO: 1888336 - DNA, 25 bp, Homo sapien
tacagtcactaagaactctactcag

SEQ ID NO: 1888337 - DNA, 25 bp, Homo sapien
ggttctagcaacgtttccatcagca

SEQ ID NO: 1888338 - DNA, 25 bp, Homo sapien
tttaaaatgcgaaatctcactgggc

SEQ ID NO: 1888339 - DNA, 25 bp, Homo sapien
aacgaacctgtatcagtttaggaga

SEQ ID NO: 1888340 - DNA, 25 bp, Homo sapien
acacatattcacacaacgaacctgt

SEQ ID NO: 1888341 - DNA, 25 bp, Homo sapien
tgggtccggtgcgactgctttaact

SEQ ID NO: 1888342 - DNA, 25 bp, Homo sapien
cacaatactgaagtgataaatccac

SEQ ID NO: 1888343 - DNA, 25 bp, Homo sapien
aaatatgtcccaatataaacacaac

SEQ ID NO: 1888344 - DNA, 25 bp, Homo sapien
ataggccaagttccatcccacagta

SEQ ID NO: 1888345 - DNA, 25 bp, Homo sapien
tcataggccaagttccatcccacag

SEQ ID NO: 1888346 - DNA, 25 bp, Homo sapien
tgtcccaatataaacacaactttca

SEQ ID NO: 1888347 - DNA, 25 bp, Homo sapien
gccacttcggagcagttagtcacca

SEQ ID NO: 1888348 - DNA, 25 bp, Homo sapien
taaatgcaagacgaagcactgacca

SEQ ID NO: 1888349 - DNA, 25 bp, Homo sapien
aaaataatgtcttgccacggtaccg

SEQ ID NO: 1888350 - DNA, 25 bp, Homo sapien
tagtcaccagctattgtgtagggca

SEQ ID NO: 1888351 - DNA, 25 bp, Homo sapien
tagggccaagtttttgtctctgtaa

SEQ ID NO: 1888352 - DNA, 25 bp, Homo sapien
attcaatttttattcgactcaggga

SEQ ID NO: 1888353 - DNA, 25 bp, Homo sapien
ggagctttcacgttctagggccaag

SEQ ID NO: 1888354 - DNA, 25 bp, Homo sapien
acaaataaattgtccgcagcccctg

SEQ ID NO: 1888355 - DNA, 25 bp, Homo sapien
ccggtccagtcggtgcgccggggca

SEQ ID NO: 1888356 - DNA, 25 bp, Homo sapien
gtccagtcggtgcgccggggcagca

SEQ ID NO: 1888357 - DNA, 25 bp, Homo sapien
cttcccggtccagtcggtgcgccgg

SEQ ID NO: 1888358 - DNA, 25 bp, Homo sapien
ccttcccggtccagtcggtgcgccg

SEQ ID NO: 1888359 - DNA, 25 bp, Homo sapien
ctccttctcggccacctcgcggatc

SEQ ID NO: 1888360 - DNA, 25 bp, Homo sapien
tccttctcggccacctcgcggatca

SEQ ID NO: 1888361 - DNA, 25 bp, Homo sapien
tctcggccacctcgcggatcagcac

SEQ ID NO: 1888362 - DNA, 25 bp, Homo sapien
cttctcggccacctcgcggatcagc

SEQ ID NO: 1888363 - DNA, 25 bp, Homo sapien
atcttccaggaaccgggcgatgagg

SEQ ID NO: 1888364 - DNA, 25 bp, Homo sapien
ccatcttccaggaaccgggcgatga

SEQ ID NO: 1888365 - DNA, 25 bp, Homo sapien
tcttccaggaaccgggcgatgagga

SEQ ID NO: 1888366 - DNA, 25 bp, Homo sapien
catcttccaggaaccgggcgatgag

SEQ ID NO: 1888367 - DNA, 25 bp, Homo sapien
atcgcagctccgagaggcctttcct

SEQ ID NO: 1888368 - DNA, 25 bp, Homo sapien
ccgatcgcagctccgagaggccttt

SEQ ID NO: 1888369 - DNA, 25 bp, Homo sapien
tccgagaggcctttcctctcacaag

SEQ ID NO: 1888370 - DNA, 25 bp, Homo sapien
ccgagaggcctttcctctcacaaga

SEQ ID NO: 1888371 - DNA, 25 bp, Homo sapien
tgtgtgttcacgagccgagcttcgg

SEQ ID NO: 1888372 - DNA, 25 bp, Homo sapien
caccattcaagcaacggcggcggag

SEQ ID NO: 1888373 - DNA, 25 bp, Homo sapien
gaggaggaaacaacaactctcaggc

SEQ ID NO: 1888374 - DNA, 25 bp, Homo sapien
cctgccctatagctgtcagtgtgtg

SEQ ID NO: 1888375 - DNA, 25 bp, Homo sapien
catctgtgttttgctgatgaggata

SEQ ID NO: 1888376 - DNA, 25 bp, Homo sapien
cgaatatgggtgaaattaatggaaa

SEQ ID NO: 1888377 - DNA, 25 bp, Homo sapien
tatatgctaaatcatacatctgtgt

SEQ ID NO: 1888378 - DNA, 25 bp, Homo sapien
aaacgaatatgggtgaaattaatgg

SEQ ID NO: 1888379 - DNA, 25 bp, Homo sapien
tatacttgacaatggccgagagaaa

SEQ ID NO: 1888380 - DNA, 25 bp, Homo sapien
acatctcattggctccaactggctg

SEQ ID NO: 1888381 - DNA, 25 bp, Homo sapien
gtttttctggaagtgacgtctatac

SEQ ID NO: 1888382 - DNA, 25 bp, Homo sapien
tcctcctgaagcctgtatcaagaag

SEQ ID NO: 1888383 - DNA, 25 bp, Homo sapien
agcaggaagtgtaagatgagaagcc

SEQ ID NO: 1888384 - DNA, 25 bp, Homo sapien
ccctcccagactagataaagattcc

SEQ ID NO: 1888385 - DNA, 25 bp, Homo sapien
aactgtaggcctcagcaagacaaaa

SEQ ID NO: 1888386 - DNA, 25 bp, Homo sapien
tgaaacggccgagtgcagagaacaa

SEQ ID NO: 1888387 - DNA, 25 bp, Homo sapien
ttctgcttcaggtccccaaacagca

SEQ ID NO: 1888388 - DNA, 25 bp, Homo sapien
tttgtcccttgccctgataatgata

SEQ ID NO: 1888389 - DNA, 25 bp, Homo sapien
gataatggcattggctaacatcccc

SEQ ID NO: 1888390 - DNA, 25 bp, Homo sapien
gataatgataatggcattggctaac

SEQ ID NO: 1888391 - DNA, 25 bp, Homo sapien
tgttgggcttctcaccccacttgtc

SEQ ID NO: 1888392 - DNA, 25 bp, Homo sapien
caggttccccagtatatctaatgca

SEQ ID NO: 1888393 - DNA, 25 bp, Homo sapien
cacagagggagcaatgcaaagactc

SEQ ID NO: 1888394 - DNA, 25 bp, Homo sapien
gagagcagactctttggtctacaca

SEQ ID NO: 1888395 - DNA, 25 bp, Homo sapien
ttccagggtggaactgtctaaggca

SEQ ID NO: 1888396 - DNA, 25 bp, Homo sapien
tctccaacagtgtccaggttcattg

SEQ ID NO: 1888397 - DNA, 25 bp, Homo sapien
tacacatccagcaattacaggtagg

SEQ ID NO: 1888398 - DNA, 25 bp, Homo sapien
cagcaattacaggtagggtcccttt

SEQ ID NO: 1888399 - DNA, 25 bp, Homo sapien
tctttggaagggactcattgtcaca

SEQ ID NO: 1888400 - DNA, 25 bp, Homo sapien
aatgggcttggtaaacactaggcag

SEQ ID NO: 1888401 - DNA, 25 bp, Homo sapien
tgtgcacaggacacactggactttc

SEQ ID NO: 1888402 - DNA, 25 bp, Homo sapien
cagtagtgtactagagctttggctc

SEQ ID NO: 1888403 - DNA, 25 bp, Homo sapien
tttctgctggaacgctagatcttgg

SEQ ID NO: 1888404 - DNA, 25 bp, Homo sapien
ctggaacgctagatcttggaggtgt

SEQ ID NO: 1888405 - DNA, 25 bp, Homo sapien
tctgctggaacgctagatcttggag

SEQ ID NO: 1888406 - DNA, 25 bp, Homo sapien
ccatttttctgctggaacgctagat

SEQ ID NO: 1888407 - DNA, 25 bp, Homo sapien
agcagcttctcaaatctagattcct

SEQ ID NO: 1888408 - DNA, 25 bp, Homo sapien
gcagcttctcaaatctagattcctg

SEQ ID NO: 1888409 - DNA, 25 bp, Homo sapien
cagcagcttctcaaatctagattcc

SEQ ID NO: 1888410 - DNA, 25 bp, Homo sapien
cagcttctcaaatctagattcctgc

SEQ ID NO: 1888411 - DNA, 25 bp, Homo sapien
tgttgttctgtaaccagactcctca

SEQ ID NO: 1888412 - DNA, 25 bp, Homo sapien
tgttctgtaaccagactcctcagtg

SEQ ID NO: 1888413 - DNA, 25 bp, Homo sapien
ttctgtaaccagactcctcagtgct

SEQ ID NO: 1888414 - DNA, 25 bp, Homo sapien
acctgttgttctgtaaccagactcc

SEQ ID NO: 1888415 - DNA, 25 bp, Homo sapien
tcagtactgaggtttatgacagtgg

SEQ ID NO: 1888416 - DNA, 25 bp, Homo sapien
ggtatatctgactgctactctgaat

SEQ ID NO: 1888417 - DNA, 25 bp, Homo sapien
gtatttgaccccagatattacaaca

SEQ ID NO: 1888418 - DNA, 25 bp, Homo sapien
tactctgaatgacctggaattacca

SEQ ID NO: 1888419 - DNA, 25 bp, Homo sapien
tttctgcggaatttgtcaatagcac

SEQ ID NO: 1888420 - DNA, 25 bp, Homo sapien
tcttcataaactcccttcgacttca

SEQ ID NO: 1888421 - DNA, 25 bp, Homo sapien
taaactcccttcgacttcatatcca

SEQ ID NO: 1888422 - DNA, 25 bp, Homo sapien
tcaatagcacttgatttgacatctt

SEQ ID NO: 1888423 - DNA, 25 bp, Homo sapien
tgagaaatagctgaaggtgccaacc

SEQ ID NO: 1888424 - DNA, 25 bp, Homo sapien
gaacagaatctcaaaggcttggcat

SEQ ID NO: 1888425 - DNA, 25 bp, Homo sapien
cagcttttggaacgggaacagaatc

SEQ ID NO: 1888426 - DNA, 25 bp, Homo sapien
aatctgttggagtttagtctcattc

SEQ ID NO: 1888427 - DNA, 25 bp, Homo sapien
gcaccactgattattgctctagaaa

SEQ ID NO: 1888428 - DNA, 25 bp, Homo sapien
gcaggtggccacaactatccatgtt

SEQ ID NO: 1888429 - DNA, 25 bp, Homo sapien
ttttaaaccacaaatagtcagcagg

SEQ ID NO: 1888430 - DNA, 25 bp, Homo sapien
aaacaccacagtatgcacaggacta

SEQ ID NO: 1888431 - DNA, 25 bp, Homo sapien
catggaatgctgaatcaatcttaca

SEQ ID NO: 1888432 - DNA, 25 bp, Homo sapien
atggaatgctgaatcaatcttacac

SEQ ID NO: 1888433 - DNA, 25 bp, Homo sapien
ctatgagacgataaaatgtccatcc

SEQ ID NO: 1888434 - DNA, 25 bp, Homo sapien
tgactatgagacgataaaatgtcca

SEQ ID NO: 1888435 - DNA, 25 bp, Homo sapien
gcatgactatgagacgataaaatgt

SEQ ID NO: 1888436 - DNA, 25 bp, Homo sapien
aaaaagcatgactatgagacgataa

SEQ ID NO: 1888437 - DNA, 25 bp, Homo sapien
tcattctccctcgttatctacagat

SEQ ID NO: 1888438 - DNA, 25 bp, Homo sapien
gcaaaacctatttcaactctgagtg

SEQ ID NO: 1888439 - DNA, 25 bp, Homo sapien
ttttcaaaccaccacagaagcctta

SEQ ID NO: 1888440 - DNA, 25 bp, Homo sapien
tgcaagctcccactcttcataatga

SEQ ID NO: 1888441 - DNA, 25 bp, Homo sapien
ctactgaaactactataagcaaagg

SEQ ID NO: 1888442 - DNA, 25 bp, Homo sapien
aaacatgcagaattttctactgtac

SEQ ID NO: 1888443 - DNA, 25 bp, Homo sapien
cactgcaaacatgcagaattttcta

SEQ ID NO: 1888444 - DNA, 25 bp, Homo sapien
tgcaaacatgcagaattttctactg

SEQ ID NO: 1888445 - DNA, 25 bp, Homo sapien
tcactgcaaacatgcagaattttct

SEQ ID NO: 1888446 - DNA, 25 bp, Homo sapien
ctctggaggttgagacattaacagt

SEQ ID NO: 1888447 - DNA, 25 bp, Homo sapien
ggaggttgagacattaacagttgag

SEQ ID NO: 1888448 - DNA, 25 bp, Homo sapien
taacagttgagcgagagatgtggat

SEQ ID NO: 1888449 - DNA, 25 bp, Homo sapien
cattaacagttgagcgagagatgtg

SEQ ID NO: 1888450 - DNA, 25 bp, Homo sapien
caatcagtgggaggtatttatggaa

SEQ ID NO: 1888451 - DNA, 25 bp, Homo sapien
taaagacactgattcaatcagtggg

SEQ ID NO: 1888452 - DNA, 25 bp, Homo sapien
gagacattaagaacgtgctatcacc

SEQ ID NO: 1888453 - DNA, 25 bp, Homo sapien
caccggctgaaggattgagaaattt

SEQ ID NO: 1888454 - DNA, 25 bp, Homo sapien
cttcagctttagtttcaccattttc

SEQ ID NO: 1888455 - DNA, 25 bp, Homo sapien
tcaccattttcagatggtgcagtac

SEQ ID NO: 1888456 - DNA, 25 bp, Homo sapien
tttcaccattttcagatggtgcagt

SEQ ID NO: 1888457 - DNA, 25 bp, Homo sapien
ctcttcagctttagtttcaccattt

SEQ ID NO: 1888458 - DNA, 25 bp, Homo sapien
tccttcttccctttagcacctctgc

SEQ ID NO: 1888459 - DNA, 25 bp, Homo sapien
cctttagcacctctgctaatctttg

SEQ ID NO: 1888460 - DNA, 25 bp, Homo sapien
tagcacctctgctaatctttgctcc

SEQ ID NO: 1888461 - DNA, 25 bp, Homo sapien
cctctgctaatctttgctccaggtt

SEQ ID NO: 1888462 - DNA, 25 bp, Homo sapien
agtacaaccgttaccatcatggtgg

SEQ ID NO: 1888463 - DNA, 25 bp, Homo sapien
gaacccctcacgtggagacatgtgg

SEQ ID NO: 1888464 - DNA, 25 bp, Homo sapien
tggagacacgggagcctaattttgc

SEQ ID NO: 1888465 - DNA, 25 bp, Homo sapien
catgactagaaagctgggaaggtgc

SEQ ID NO: 1888466 - DNA, 25 bp, Homo sapien
gaaccgcatgttcacgaggctgctg

SEQ ID NO: 1888467 - DNA, 25 bp, Homo sapien
ttcacatgggacaataccaaagggc

SEQ ID NO: 1888468 - DNA, 25 bp, Homo sapien
taagcaagcccgtaacagtggtaat

SEQ ID NO: 1888469 - DNA, 25 bp, Homo sapien
tccagttagatgaagtcagaagccc

SEQ ID NO: 1888470 - DNA, 25 bp, Homo sapien
tgggttcaggttttggtggagcagg

SEQ ID NO: 1888471 - DNA, 25 bp, Homo sapien
agcagatgtttttcttggtttgggt

SEQ ID NO: 1888472 - DNA, 25 bp, Homo sapien
ttagcagatgtttttcttggtttgg

SEQ ID NO: 1888473 - DNA, 25 bp, Homo sapien
tttgggttcaggttttggtggagca

SEQ ID NO: 1888474 - DNA, 25 bp, Homo sapien
gacaactatccattttgacatggct

SEQ ID NO: 1888475 - DNA, 25 bp, Homo sapien
taacaaagacaactatccattttga

SEQ ID NO: 1888476 - DNA, 25 bp, Homo sapien
tatccattttgacatggctttggtc

SEQ ID NO: 1888477 - DNA, 25 bp, Homo sapien
tgacatggctttggtcattaaaaag

SEQ ID NO: 1888478 - DNA, 25 bp, Homo sapien
aactgcaggtgagattgaaaagccg

SEQ ID NO: 1888479 - DNA, 25 bp, Homo sapien
gactcaatgaattcagttgcactgg

SEQ ID NO: 1888480 - DNA, 25 bp, Homo sapien
tagctctccgggaacaggtctaagc

SEQ ID NO: 1888481 - DNA, 25 bp, Homo sapien
ggtctaagcttctatctccaatgtg

SEQ ID NO: 1888482 - DNA, 25 bp, Homo sapien
gagacttgctgaatgactgtgacct

SEQ ID NO: 1888483 - DNA, 25 bp, Homo sapien
gaggaggctctgtttcggtagcaca

SEQ ID NO: 1888484 - DNA, 25 bp, Homo sapien
gaaaaaagtgtacatctctcctggc

SEQ ID NO: 1888485 - DNA, 25 bp, Homo sapien
tgtagtctgtaatcctgctggcctc

SEQ ID NO: 1888486 - DNA, 25 bp, Homo sapien
ggcttgcctgatccaaacagctgta

SEQ ID NO: 1888487 - DNA, 25 bp, Homo sapien
gagtggtcctaatacccatttttgc

SEQ ID NO: 1888488 - DNA, 25 bp, Homo sapien
tatttctgaacttgtgagtggtcct

SEQ ID NO: 1888489 - DNA, 25 bp, Homo sapien
tattgtatcaggcacagatttgggt

SEQ ID NO: 1888490 - DNA, 25 bp, Homo sapien
ctgaagaccaaagtagcatgaagct

SEQ ID NO: 1888491 - DNA, 25 bp, Homo sapien
tgaagaccaaagtagcatgaagctt

SEQ ID NO: 1888492 - DNA, 25 bp, Homo sapien
gaccaaagtagcatgaagcttctgt

SEQ ID NO: 1888493 - DNA, 25 bp, Homo sapien
aagaccaaagtagcatgaagcttct

SEQ ID NO: 1888494 - DNA, 25 bp, Homo sapien
cgctgacaatctggcagaccgtctt

SEQ ID NO: 1888495 - DNA, 25 bp, Homo sapien
gacaatctggcagaccgtcttgtgg

SEQ ID NO: 1888496 - DNA, 25 bp, Homo sapien
acaatctggcagaccgtcttgtggg

SEQ ID NO: 1888497 - DNA, 25 bp, Homo sapien
ctgacaatctggcagaccgtcttgt

SEQ ID NO: 1888498 - DNA, 25 bp, Homo sapien
tgattatataaaacgaagttgattt

SEQ ID NO: 1888499 - DNA, 25 bp, Homo sapien
gtgattatataaaacgaagttgatt

SEQ ID NO: 1888500 - DNA, 25 bp, Homo sapien
ggtgattatataaaacgaagttgat

SEQ ID NO: 1888501 - DNA, 25 bp, Homo sapien
tttgctggatactgcttgaaacaca

SEQ ID NO: 1888502 - DNA, 25 bp, Homo sapien
tacacagggatagctagattcaata

SEQ ID NO: 1888503 - DNA, 25 bp, Homo sapien
tacgacaaatgtgagggtttgccac

SEQ ID NO: 1888504 - DNA, 25 bp, Homo sapien
gctggtcacagtggaattatcccat

SEQ ID NO: 1888505 - DNA, 25 bp, Homo sapien
tagaaaagtttgtacctcagagcct

SEQ ID NO: 1888506 - DNA, 25 bp, Homo sapien
cagtgcttggcgcattataggtgct

SEQ ID NO: 1888507 - DNA, 25 bp, Homo sapien
tagagttactatatggaccagacaa

SEQ ID NO: 1888508 - DNA, 25 bp, Homo sapien
taaaagggccatagggatagcggat

SEQ ID NO: 1888509 - DNA, 25 bp, Homo sapien
ggccttggcttaaatgacaggtaga

SEQ ID NO: 1888510 - DNA, 25 bp, Homo sapien
cagtttttacccgaaaccatcagca

SEQ ID NO: 1888511 - DNA, 25 bp, Homo sapien
gacaggtagagccttatctagaaac

SEQ ID NO: 1888512 - DNA, 25 bp, Homo sapien
taaagtcaaggtggtgcatactcaa

SEQ ID NO: 1888513 - DNA, 25 bp, Homo sapien
tctttgccctctgtattctctggag

SEQ ID NO: 1888514 - DNA, 25 bp, Homo sapien
ctttgccctctgtattctctggaga

SEQ ID NO: 1888515 - DNA, 25 bp, Homo sapien
atctttgccctctgtattctctgga

SEQ ID NO: 1888516 - DNA, 25 bp, Homo sapien
taagctgtcttatcacataaccctc

SEQ ID NO: 1888517 - DNA, 25 bp, Homo sapien
catcaattaacactaagccacaggc

SEQ ID NO: 1888518 - DNA, 25 bp, Homo sapien
ttaacactaagccacaggccggaga

SEQ ID NO: 1888519 - DNA, 25 bp, Homo sapien
cattataagctgtcttatcacataa

SEQ ID NO: 1888520 - DNA, 25 bp, Homo sapien
gaattccagtctggctcacacctga

SEQ ID NO: 1888521 - DNA, 25 bp, Homo sapien
cacacctgacttctctagacttgag

SEQ ID NO: 1888522 - DNA, 25 bp, Homo sapien
tcttcaccgcaatcttatgaggttg

SEQ ID NO: 1888523 - DNA, 25 bp, Homo sapien
gaaagcacgtggctcaatcagaagc

SEQ ID NO: 1888524 - DNA, 25 bp, Homo sapien
tcctcaggaatgacacacaggtgcc

SEQ ID NO: 1888525 - DNA, 25 bp, Homo sapien
gttcctgcccaggtaccaactgagg

SEQ ID NO: 1888526 - DNA, 25 bp, Homo sapien
ggagaggttttccatcaccggagaa

SEQ ID NO: 1888527 - DNA, 25 bp, Homo sapien
acagttttgcccctagtctcaggac

SEQ ID NO: 1888528 - DNA, 25 bp, Homo sapien
gaagggttccatcgtcagggtccat

SEQ ID NO: 1888529 - DNA, 25 bp, Homo sapien
gactttggcatctatagcatctgat

SEQ ID NO: 1888530 - DNA, 25 bp, Homo sapien
taaagtgtgcacacctaacctactg

SEQ ID NO: 1888531 - DNA, 25 bp, Homo sapien
cttgacccaccctttcgtaagtgag

SEQ ID NO: 1888532 - DNA, 25 bp, Homo sapien
caccccgagggagatttgtgtccct

SEQ ID NO: 1888533 - DNA, 25 bp, Homo sapien
gatttgtgtccctgaatgtagtagt

SEQ ID NO: 1888534 - DNA, 25 bp, Homo sapien
tccagttcgctagacgcgcagaggg

SEQ ID NO: 1888535 - DNA, 25 bp, Homo sapien
aaatgactccagttcgctagacgcg

SEQ ID NO: 1888536 - DNA, 25 bp, Homo sapien
cttggacgagccatattggacgccc

SEQ ID NO: 1888537 - DNA, 25 bp, Homo sapien
cgctcccgccccgaactgcgggtag

SEQ ID NO: 1888538 - DNA, 25 bp, Homo sapien
aactgcgggtaggtccaggccgcca

SEQ ID NO: 1888539 - DNA, 25 bp, Homo sapien
gtcccgtcttccacgctgccaactc

SEQ ID NO: 1888540 - DNA, 25 bp, Homo sapien
agggtgagcgctattttaaacatgg

SEQ ID NO: 1888541 - DNA, 25 bp, Homo sapien
caggagggtgagcgctattttaaac

SEQ ID NO: 1888542 - DNA, 25 bp, Homo sapien
aaacatggctttctctttcccttag

SEQ ID NO: 1888543 - DNA, 25 bp, Homo sapien
ggagggtgagcgctattttaaacat

SEQ ID NO: 1888544 - DNA, 25 bp, Homo sapien
cgagtacagccgcatgggaataatc

SEQ ID NO: 1888545 - DNA, 25 bp, Homo sapien
ccgcgagtacagccgcatgggaata

SEQ ID NO: 1888546 - DNA, 25 bp, Homo sapien
agtacagccgcatgggaataatccc

SEQ ID NO: 1888547 - DNA, 25 bp, Homo sapien
gtacagccgcatgggaataatccca

SEQ ID NO: 1888548 - DNA, 25 bp, Homo sapien
tttcggaatggaaagccgcttttgc

SEQ ID NO: 1888549 - DNA, 25 bp, Homo sapien
tggaaaacattccagcgagaatgag

SEQ ID NO: 1888550 - DNA, 25 bp, Homo sapien
cattccagcgagaatgagttcaaaa

SEQ ID NO: 1888551 - DNA, 25 bp, Homo sapien
ttcacactaattcgcaacctggcag

SEQ ID NO: 1888552 - DNA, 25 bp, Homo sapien
cattaagagatcgatgaggacggag

SEQ ID NO: 1888553 - DNA, 25 bp, Homo sapien
aggcatctaaaaacaagcgtggagg

SEQ ID NO: 1888554 - DNA, 25 bp, Homo sapien
gagagaggaacgtctgcaacaggca

SEQ ID NO: 1888555 - DNA, 25 bp, Homo sapien
cgcgttctgcgcgagccattgcaat

SEQ ID NO: 1888556 - DNA, 25 bp, Homo sapien
tatgtcggtgaagcaaaaagtaaag

SEQ ID NO: 1888557 - DNA, 25 bp, Homo sapien
taaagcaacggactggaactgctgg

SEQ ID NO: 1888558 - DNA, 25 bp, Homo sapien
aaagtaaagcaacggactggaactg

SEQ ID NO: 1888559 - DNA, 25 bp, Homo sapien
aatgactatgtcggtgaagcaaaaa

SEQ ID NO: 1888560 - DNA, 25 bp, Homo sapien
agcccggcctcttcgacctgcacct

SEQ ID NO: 1888561 - DNA, 25 bp, Homo sapien
tgctcacgcgcagggcacgacgtag

SEQ ID NO: 1888562 - DNA, 25 bp, Homo sapien
ctgctcacgcgcagggcacgacgta

SEQ ID NO: 1888563 - DNA, 25 bp, Homo sapien
gggcacgacgtagcccggcctcttc

SEQ ID NO: 1888564 - DNA, 25 bp, Homo sapien
tcagcagatgcaggaaaagcgctag

SEQ ID NO: 1888565 - DNA, 25 bp, Homo sapien
tctgtactggaagagcgtggcaact

SEQ ID NO: 1888566 - DNA, 25 bp, Homo sapien
ggctgaggcaacgttctaaattcca

SEQ ID NO: 1888567 - DNA, 25 bp, Homo sapien
gcaggcaaagctcacatcataggaa

SEQ ID NO: 1888568 - DNA, 25 bp, Homo sapien
gacaggtatctataaaagcctgtgg

SEQ ID NO: 1888569 - DNA, 25 bp, Homo sapien
aaagcctgtggagttctcaacatac

SEQ ID NO: 1888570 - DNA, 25 bp, Homo sapien
aggtatctataaaagcctgtggagt

SEQ ID NO: 1888571 - DNA, 25 bp, Homo sapien
tgatgacaggtatctataaaagcct

SEQ ID NO: 1888572 - DNA, 25 bp, Homo sapien
caggagcgtaattctgtgggtgaaa

SEQ ID NO: 1888573 - DNA, 25 bp, Homo sapien
acagtcctcacctcatgcttttgct

SEQ ID NO: 1888574 - DNA, 25 bp, Homo sapien
gtgggtgaaactcgccccacagtcc

SEQ ID NO: 1888575 - DNA, 25 bp, Homo sapien
ttccagagcaggagcgtaattctgt

SEQ ID NO: 1888576 - DNA, 25 bp, Homo sapien
caaggctaaatgtcaatgattgcat

SEQ ID NO: 1888577 - DNA, 25 bp, Homo sapien
gccacaccctttcaaggctaaatgt

SEQ ID NO: 1888578 - DNA, 25 bp, Homo sapien
ataagccacaccctttcaaggctaa

SEQ ID NO: 1888579 - DNA, 25 bp, Homo sapien
ccctttcaaggctaaatgtcaatga

SEQ ID NO: 1888580 - DNA, 25 bp, Homo sapien
cagataattccctagaagcctgagg

SEQ ID NO: 1888581 - DNA, 25 bp, Homo sapien
tgattattgaccctcctcaatgagg

SEQ ID NO: 1888582 - DNA, 25 bp, Homo sapien
tgcaagtgagaagccataaagggaa

SEQ ID NO: 1888583 - DNA, 25 bp, Homo sapien
aagcctgaggacaagattctagatc

SEQ ID NO: 1888584 - DNA, 25 bp, Homo sapien
actgtacttatactctgtactgtac

SEQ ID NO: 1888585 - DNA, 25 bp, Homo sapien
taaagtatgtatgttaataagctga

SEQ ID NO: 1888586 - DNA, 25 bp, Homo sapien
taatagttactgtacttatactctg

SEQ ID NO: 1888587 - DNA, 25 bp, Homo sapien
tactctgtactgtactaagcccttt

SEQ ID NO: 1888588 - DNA, 25 bp, Homo sapien
gatggtcagaaagcccttcctgcat

SEQ ID NO: 1888589 - DNA, 25 bp, Homo sapien
cagtgactagaaaatatacggagga

SEQ ID NO: 1888590 - DNA, 25 bp, Homo sapien
tcaagggcgttcagctaaactagtc

SEQ ID NO: 1888591 - DNA, 25 bp, Homo sapien
gtataggtccatttcaactctccca

SEQ ID NO: 1888592 - DNA, 25 bp, Homo sapien
tcaagttcagtaggggaaagagtag

SEQ ID NO: 1888593 - DNA, 25 bp, Homo sapien
gtcaagttcagtaggggaaagagta

SEQ ID NO: 1888594 - DNA, 25 bp, Homo sapien
agtcaagttcagtaggggaaagagt

SEQ ID NO: 1888595 - DNA, 25 bp, Homo sapien
tagtcaagttcagtaggggaaagag

SEQ ID NO: 1888596 - DNA, 25 bp, Homo sapien
tgtatttactaacagatttactttg

SEQ ID NO: 1888597 - DNA, 25 bp, Homo sapien
gaaatcaaggaaaccctcatgtatt

SEQ ID NO: 1888598 - DNA, 25 bp, Homo sapien
cacaatcttctaaactatggctatt

SEQ ID NO: 1888599 - DNA, 25 bp, Homo sapien
tatattcttttaatgcaaagtaggg

SEQ ID NO: 1888600 - DNA, 25 bp, Homo sapien
tttggctggccatagagaagacctg

SEQ ID NO: 1888601 - DNA, 25 bp, Homo sapien
ctagggaactggagcaagtctgagt

SEQ ID NO: 1888602 - DNA, 25 bp, Homo sapien
cctgtggagatacatgggcattggt

SEQ ID NO: 1888603 - DNA, 25 bp, Homo sapien
tctggatgacagttctcgagggtgc

SEQ ID NO: 1888604 - DNA, 25 bp, Homo sapien
tactaagacaatgattgggccagca

SEQ ID NO: 1888605 - DNA, 25 bp, Homo sapien
aaacagagggtcaagatctgtttct

SEQ ID NO: 1888606 - DNA, 25 bp, Homo sapien
tttcccaacgacattaaccaatcaa

SEQ ID NO: 1888607 - DNA, 25 bp, Homo sapien
ttttgttctattccacataatatcg

SEQ ID NO: 1888608 - DNA, 25 bp, Homo sapien
tgtacgccagaacctagggatgctc

SEQ ID NO: 1888609 - DNA, 25 bp, Homo sapien
tatccatgccaaagtcacagcgtag

SEQ ID NO: 1888610 - DNA, 25 bp, Homo sapien
ttgttgtataacaccgggcagctgc

SEQ ID NO: 1888611 - DNA, 25 bp, Homo sapien
tcaaatgggtctgtggctcactagc

SEQ ID NO: 1888612 - DNA, 25 bp, Homo sapien
caggtggtcattacacatagacgca

SEQ ID NO: 1888613 - DNA, 25 bp, Homo sapien
tcatgctctcatgagcccgaaggcc

SEQ ID NO: 1888614 - DNA, 25 bp, Homo sapien
aaggagttgccccattttgccaaag

SEQ ID NO: 1888615 - DNA, 25 bp, Homo sapien
caaagtggacatctgtgctatccca

SEQ ID NO: 1888616 - DNA, 25 bp, Homo sapien
ccagtcccaggcaagagaggcatta

SEQ ID NO: 1888617 - DNA, 25 bp, Homo sapien
tccagctcaaacaggtgcccctggt

SEQ ID NO: 1888618 - DNA, 25 bp, Homo sapien
gtgcattgccacaagcctcaaccaa

SEQ ID NO: 1888619 - DNA, 25 bp, Homo sapien
tggctgctgaatagcgcacctggct

SEQ ID NO: 1888620 - DNA, 25 bp, Homo sapien
gcatacccgtctcccgaatgacttg

SEQ ID NO: 1888621 - DNA, 25 bp, Homo sapien
tgtggtagctgaagcattcatctcc

SEQ ID NO: 1888622 - DNA, 25 bp, Homo sapien
aacacaagattctcccatgtggtag

SEQ ID NO: 1888623 - DNA, 25 bp, Homo sapien
ggtccctgggtattcaggtcaaaca

SEQ ID NO: 1888624 - DNA, 25 bp, Homo sapien
cagtctgtatggctgtccatagcca

SEQ ID NO: 1888625 - DNA, 25 bp, Homo sapien
cacagtctgtatggctgtccatagc

SEQ ID NO: 1888626 - DNA, 25 bp, Homo sapien
tttgggtatttcaccagcgttgttc

SEQ ID NO: 1888627 - DNA, 25 bp, Homo sapien
tttcaccagcgttgttccacacagt

SEQ ID NO: 1888628 - DNA, 25 bp, Homo sapien
cccaattgtcatgttctaactgaga

SEQ ID NO: 1888629 - DNA, 25 bp, Homo sapien
tatgtacagcatcagcaaggtagtt

SEQ ID NO: 1888630 - DNA, 25 bp, Homo sapien
atatgtacagcatcagcaaggtagt

SEQ ID NO: 1888631 - DNA, 25 bp, Homo sapien
ttcatgagcccaattgtcatgttct

SEQ ID NO: 1888632 - DNA, 25 bp, Homo sapien
caaagcccaattccaaaagatggga

SEQ ID NO: 1888633 - DNA, 25 bp, Homo sapien
tatctgggtggcaattcagtgccag

SEQ ID NO: 1888634 - DNA, 25 bp, Homo sapien
ttttctagcatctggtaacacctca

SEQ ID NO: 1888635 - DNA, 25 bp, Homo sapien
tccctgaagacggaatgttaagcca

SEQ ID NO: 1888636 - DNA, 25 bp, Homo sapien
cagcatcagctttcccctttttccc

SEQ ID NO: 1888637 - DNA, 25 bp, Homo sapien
tcccctggcatctccagcaccttca

SEQ ID NO: 1888638 - DNA, 25 bp, Homo sapien
agctttctgtgcctggtctgttggc

SEQ ID NO: 1888639 - DNA, 25 bp, Homo sapien
tctgttggcatctccattttctgta

SEQ ID NO: 1888640 - DNA, 25 bp, Homo sapien
tttgcagggacctttttagtcttgc

SEQ ID NO: 1888641 - DNA, 25 bp, Homo sapien
acctttttagtcttgcgctctggct

SEQ ID NO: 1888642 - DNA, 25 bp, Homo sapien
gggacctttttagtcttgcgctctg

SEQ ID NO: 1888643 - DNA, 25 bp, Homo sapien
cagggacctttttagtcttgcgctc

SEQ ID NO: 1888644 - DNA, 25 bp, Homo sapien
ggcctcttgaaagggctcgtatttg

SEQ ID NO: 1888645 - DNA, 25 bp, Homo sapien
gtagaaccaataagatgtagaaaag

SEQ ID NO: 1888646 - DNA, 25 bp, Homo sapien
gaaagggctcgtatttgcatctgaa

SEQ ID NO: 1888647 - DNA, 25 bp, Homo sapien
tttgcatctgaaggcatagtagaac

SEQ ID NO: 1888648 - DNA, 25 bp, Homo sapien
cttggtaagtttctcctctggtgga

SEQ ID NO: 1888649 - DNA, 25 bp, Homo sapien
gaaatagttctcacgtctacttgga

SEQ ID NO: 1888650 - DNA, 25 bp, Homo sapien
cattggtgatatctgccatggtggc

SEQ ID NO: 1888651 - DNA, 25 bp, Homo sapien
tgcaatttctgtgtcagagtggacc

SEQ ID NO: 1888652 - DNA, 25 bp, Homo sapien
cattaggttccgtatactgacccgg

SEQ ID NO: 1888653 - DNA, 25 bp, Homo sapien
ggtgatctgcactgcttagagctgg

SEQ ID NO: 1888654 - DNA, 25 bp, Homo sapien
gacacatggaaggactcactaactg

SEQ ID NO: 1888655 - DNA, 25 bp, Homo sapien
ttaagatcctaagggaggctggcat

SEQ ID NO: 1888656 - DNA, 25 bp, Homo sapien
gaatttagttcagcttcaagagaat

SEQ ID NO: 1888657 - DNA, 25 bp, Homo sapien
cagaactgtcataccaaagaatgaa

SEQ ID NO: 1888658 - DNA, 25 bp, Homo sapien
aatcagaactgtcataccaaagaat

SEQ ID NO: 1888659 - DNA, 25 bp, Homo sapien
gatgaatttagttcagcttcaagag

SEQ ID NO: 1888660 - DNA, 25 bp, Homo sapien
tcgtaactgagaatgtaaatgtcct

SEQ ID NO: 1888661 - DNA, 25 bp, Homo sapien
ctactcgtaactgagaatgtaaatg

SEQ ID NO: 1888662 - DNA, 25 bp, Homo sapien
taactgagaatgtaaatgtccttgg

SEQ ID NO: 1888663 - DNA, 25 bp, Homo sapien
tgagaatgtaaatgtccttggatag

SEQ ID NO: 1888664 - DNA, 25 bp, Homo sapien
tcagagcgctagtcgaggatcaatg

SEQ ID NO: 1888665 - DNA, 25 bp, Homo sapien
tcgaggatcaatgcggcagcagcag

SEQ ID NO: 1888666 - DNA, 25 bp, Homo sapien
cacctggttcccacgactgatggag

SEQ ID NO: 1888667 - DNA, 25 bp, Homo sapien
tcccacgactgatggagcaggacca

SEQ ID NO: 1888668 - DNA, 25 bp, Homo sapien
cccacacagcttacagacaggaaaa

SEQ ID NO: 1888669 - DNA, 25 bp, Homo sapien
tctccagagaaatgatgccgttccc

SEQ ID NO: 1888670 - DNA, 25 bp, Homo sapien
tgccgttccccttcataaacactaa

SEQ ID NO: 1888671 - DNA, 25 bp, Homo sapien
ccccacacagcttacagacaggaaa

SEQ ID NO: 1888672 - DNA, 25 bp, Homo sapien
agtttaggataaacacatggctggc

SEQ ID NO: 1888673 - DNA, 25 bp, Homo sapien
ttaggaaaaacaaggcactgtctca

SEQ ID NO: 1888674 - DNA, 25 bp, Homo sapien
gcactgtctcagtttaggataaaca

SEQ ID NO: 1888675 - DNA, 25 bp, Homo sapien
catggctggcaaccaaatccagtct

SEQ ID NO: 1888676 - DNA, 25 bp, Homo sapien
ccttagctcttctacattgttgacg

SEQ ID NO: 1888677 - DNA, 25 bp, Homo sapien
cttagctcttctacattgttgacgt

SEQ ID NO: 1888678 - DNA, 25 bp, Homo sapien
tccttagctcttctacattgttgac

SEQ ID NO: 1888679 - DNA, 25 bp, Homo sapien
tgaaagaagtagtttcccatgctct

SEQ ID NO: 1888680 - DNA, 25 bp, Homo sapien
aacagcacaagaaaggcccgccctc

SEQ ID NO: 1888681 - DNA, 25 bp, Homo sapien
aaggcccgccctcataactcaatta

SEQ ID NO: 1888682 - DNA, 25 bp, Homo sapien
agtagtttcccatgctcttgggcag

SEQ ID NO: 1888683 - DNA, 25 bp, Homo sapien
tataattccttgtgtaaggaaggga

SEQ ID NO: 1888684 - DNA, 25 bp, Homo sapien
tggcagagccacttcggtcctagtt

SEQ ID NO: 1888685 - DNA, 25 bp, Homo sapien
gtgaactgttgttaccatccttatg

SEQ ID NO: 1888686 - DNA, 25 bp, Homo sapien
tacaccaatgctggactggctggca

SEQ ID NO: 1888687 - DNA, 25 bp, Homo sapien
gtcctagttgcttttgccccttgtg

SEQ ID NO: 1888688 - DNA, 25 bp, Homo sapien
gactccggtgtccagcgactgtggt

SEQ ID NO: 1888689 - DNA, 25 bp, Homo sapien
ttctgctggcaaccaagactgtggg

SEQ ID NO: 1888690 - DNA, 25 bp, Homo sapien
tctgagttgtagctggatgatgcat

SEQ ID NO: 1888691 - DNA, 25 bp, Homo sapien
aatacagtttgcagctgcttcaggg

SEQ ID NO: 1888692 - DNA, 25 bp, Homo sapien
tgtagtagaaaagtgattcccctgt

SEQ ID NO: 1888693 - DNA, 25 bp, Homo sapien
ttgtagtagaaaagtgattcccctg

SEQ ID NO: 1888694 - DNA, 25 bp, Homo sapien
gtagtagaaaagtgattcccctgta

SEQ ID NO: 1888695 - DNA, 25 bp, Homo sapien
aagtcaagtacggtcctgaaaagcg

SEQ ID NO: 1888696 - DNA, 25 bp, Homo sapien
cataagtaagtcaagtacggtcctg

SEQ ID NO: 1888697 - DNA, 25 bp, Homo sapien
cctggaacataagtaagtcaagtac

SEQ ID NO: 1888698 - DNA, 25 bp, Homo sapien
agtacggtcctgaaaagcgaaccat

SEQ ID NO: 1888699 - DNA, 25 bp, Homo sapien
ggactgccacgtaagatagggaccc

SEQ ID NO: 1888700 - DNA, 25 bp, Homo sapien
caaggagaggaattacactgtagcc

SEQ ID NO: 1888701 - DNA, 25 bp, Homo sapien
tctagtcaacaaggcagaagtccta

SEQ ID NO: 1888702 - DNA, 25 bp, Homo sapien
cactcaagagtagcttaggactgcc

SEQ ID NO: 1888703 - DNA, 25 bp, Homo sapien
tctgcatgttttaatcggtgcctat

SEQ ID NO: 1888704 - DNA, 25 bp, Homo sapien
tgcctatttggattaaaacttcttc

SEQ ID NO: 1888705 - DNA, 25 bp, Homo sapien
tcatcttctacagaatcagctgctt

SEQ ID NO: 1888706 - DNA, 25 bp, Homo sapien
gcttttactgctggtttatcgtctg

SEQ ID NO: 1888707 - DNA, 25 bp, Homo sapien
taactgttccatcaaattagctttt

SEQ ID NO: 1888708 - DNA, 25 bp, Homo sapien
tgtaattaaatctacaccatcttta

SEQ ID NO: 1888709 - DNA, 25 bp, Homo sapien
gccacagaatttgggtcactgcttt

SEQ ID NO: 1888710 - DNA, 25 bp, Homo sapien
gactaaatggatttgacctctctga

SEQ ID NO: 1888711 - DNA, 25 bp, Homo sapien
caaaatcaggtaacaatggcaaaac

SEQ ID NO: 1888712 - DNA, 25 bp, Homo sapien
gggaggctggacttctaacatttcc

SEQ ID NO: 1888713 - DNA, 25 bp, Homo sapien
gaaggcacgtagctaccaaatgcga

SEQ ID NO: 1888714 - DNA, 25 bp, Homo sapien
cattcagtttagcaagtagcatttc

SEQ ID NO: 1888715 - DNA, 25 bp, Homo sapien
cattcctagttggtaccttccagtt

SEQ ID NO: 1888716 - DNA, 25 bp, Homo sapien
gatacattcctagttggtaccttcc

SEQ ID NO: 1888717 - DNA, 25 bp, Homo sapien
ctgaattggatacattcctagttgg

SEQ ID NO: 1888718 - DNA, 25 bp, Homo sapien
aattggatacattcctagttggtac

SEQ ID NO: 1888719 - DNA, 25 bp, Homo sapien
aacctcctgttttacgacatggagt

SEQ ID NO: 1888720 - DNA, 25 bp, Homo sapien
tcaacctcctgttttacgacatgga

SEQ ID NO: 1888721 - DNA, 25 bp, Homo sapien
cctcctgttttacgacatggagttc

SEQ ID NO: 1888722 - DNA, 25 bp, Homo sapien
tcctgttttacgacatggagttctt

SEQ ID NO: 1888723 - DNA, 25 bp, Homo sapien
gttccaaccatacacaagagggcta

SEQ ID NO: 1888724 - DNA, 25 bp, Homo sapien
tctaagctaccatttggtgaggccc

SEQ ID NO: 1888725 - DNA, 25 bp, Homo sapien
tacagtggcaggctcagtctaaaga

SEQ ID NO: 1888726 - DNA, 25 bp, Homo sapien
tctaccaactgtgaactaccaactg

SEQ ID NO: 1888727 - DNA, 25 bp, Homo sapien
catttgttttcgtaacacataattg

SEQ ID NO: 1888728 - DNA, 25 bp, Homo sapien
ttcccatttgttttcgtaacacata

SEQ ID NO: 1888729 - DNA, 25 bp, Homo sapien
cccatttgttttcgtaacacataat

SEQ ID NO: 1888730 - DNA, 25 bp, Homo sapien
ttctggagttaaaggatattcttct

SEQ ID NO: 1888731 - DNA, 25 bp, Homo sapien
tacacaggtctgcaaaatcactctg

SEQ ID NO: 1888732 - DNA, 25 bp, Homo sapien
gtacacaggtctgcaaaatcactct

SEQ ID NO: 1888733 - DNA, 25 bp, Homo sapien
ctttggcagacgattagaatatata

SEQ ID NO: 1888734 - DNA, 25 bp, Homo sapien
gaggactttggcagacgattagaat

SEQ ID NO: 1888735 - DNA, 25 bp, Homo sapien
ttttcttaatgcaagttctttctct

SEQ ID NO: 1888736 - DNA, 25 bp, Homo sapien
tatttggagaggactttggcagacg

SEQ ID NO: 1888737 - DNA, 25 bp, Homo sapien
agtcgctgtacctccttttgaagaa

SEQ ID NO: 1888738 - DNA, 25 bp, Homo sapien
ctttcagcaagcaactgtcgttgga

SEQ ID NO: 1888739 - DNA, 25 bp, Homo sapien
tcagttcaaggtttttcgatagctc

SEQ ID NO: 1888740 - DNA, 25 bp, Homo sapien
tcatgagcctcatatgcccttttcc

SEQ ID NO: 1888741 - DNA, 25 bp, Homo sapien
ctatgtatcacgaccaatttcctgg

SEQ ID NO: 1888742 - DNA, 25 bp, Homo sapien
taccatggaatactcagggagaaag

SEQ ID NO: 1888743 - DNA, 25 bp, Homo sapien
tttattagtcaagagcccaaaactg

SEQ ID NO: 1888744 - DNA, 25 bp, Homo sapien
aactcagaatccacaggcttcgtcc

SEQ ID NO: 1888745 - DNA, 25 bp, Homo sapien
catctcgttcaggtaggtgtctagc

SEQ ID NO: 1888746 - DNA, 25 bp, Homo sapien
tattgaggctctgggagcgaaatcc

SEQ ID NO: 1888747 - DNA, 25 bp, Homo sapien
gatcagtatctttccgaagtggctc

SEQ ID NO: 1888748 - DNA, 25 bp, Homo sapien
gcagctcagctaacttgacctggag

SEQ ID NO: 1888749 - DNA, 25 bp, Homo sapien
gaccagcgatgatcggccagaagac

SEQ ID NO: 1888750 - DNA, 25 bp, Homo sapien
aagactgtggcgtttcaaaatcaga

SEQ ID NO: 1888751 - DNA, 25 bp, Homo sapien
aggtgaagaactgaccagcgatgat

SEQ ID NO: 1888752 - DNA, 25 bp, Homo sapien
tcttgatcagtacctggacttcctg

SEQ ID NO: 1888753 - DNA, 25 bp, Homo sapien
gaggagactatgacaatactgaaaa

SEQ ID NO: 1888754 - DNA, 25 bp, Homo sapien
cacattggcatccagaagataaact

SEQ ID NO: 1888755 - DNA, 25 bp, Homo sapien
tttgtagaccacaattcacattggc

SEQ ID NO: 1888756 - DNA, 25 bp, Homo sapien
ggtctctattcacataatttcacag

SEQ ID NO: 1888757 - DNA, 25 bp, Homo sapien
tcctttgaagataatttctggttga

SEQ ID NO: 1888758 - DNA, 25 bp, Homo sapien
tatcttgggctttttatttacatac

SEQ ID NO: 1888759 - DNA, 25 bp, Homo sapien
tctgcttcatgtagtgtcagctttt

SEQ ID NO: 1888760 - DNA, 25 bp, Homo sapien
gataatttctggttgatcatttata

SEQ ID NO: 1888761 - DNA, 25 bp, Homo sapien
cctctcgatgctaatcaaagaatta

SEQ ID NO: 1888762 - DNA, 25 bp, Homo sapien
taacagttgttcgttgcaggaggag

SEQ ID NO: 1888763 - DNA, 25 bp, Homo sapien
tacttgtatgtatcccattagttcc

SEQ ID NO: 1888764 - DNA, 25 bp, Homo sapien
ttccctctcgatgctaatcaaagaa

SEQ ID NO: 1888765 - DNA, 25 bp, Homo sapien
ccgccgtctccacgcccacttcaaa

SEQ ID NO: 1888766 - DNA, 25 bp, Homo sapien
ccccgccgtctccacgcccacttca

SEQ ID NO: 1888767 - DNA, 25 bp, Homo sapien
ctcccccgccgtctccacgcccact

SEQ ID NO: 1888768 - DNA, 25 bp, Homo sapien
cgccgtctccacgcccacttcaaag

SEQ ID NO: 1888769 - DNA, 25 bp, Homo sapien
gccaaagagcgggtgcctggttcct

SEQ ID NO: 1888770 - DNA, 25 bp, Homo sapien
ccgagatgcgggaggtttgaacaca

SEQ ID NO: 1888771 - DNA, 25 bp, Homo sapien
tcttaggaccaaactcccagctggg

SEQ ID NO: 1888772 - DNA, 25 bp, Homo sapien
ctcttcagcagagccgatgcggcgt

SEQ ID NO: 1888773 - DNA, 25 bp, Homo sapien
aaggtctccattggccgaccgctct

SEQ ID NO: 1888774 - DNA, 25 bp, Homo sapien
ttctgtctccagacggcccttttta

SEQ ID NO: 1888775 - DNA, 25 bp, Homo sapien
tctgtctccagacggccctttttat

SEQ ID NO: 1888776 - DNA, 25 bp, Homo sapien
ggcttctgtctccagacggcccttt

SEQ ID NO: 1888777 - DNA, 25 bp, Homo sapien
gatgagtaatccctaaattgcacgg

SEQ ID NO: 1888778 - DNA, 25 bp, Homo sapien
gctccgagccatctgattatcaagg

SEQ ID NO: 1888779 - DNA, 25 bp, Homo sapien
tgagggctttaaactgctccgagcc

SEQ ID NO: 1888780 - DNA, 25 bp, Homo sapien
gcctattgagcgctgatgtgtgaca

SEQ ID NO: 1888781 - DNA, 25 bp, Homo sapien
tatagtatcttggaaagcacataag

SEQ ID NO: 1888782 - DNA, 25 bp, Homo sapien
gtatcttggaaagcacataagtata

SEQ ID NO: 1888783 - DNA, 25 bp, Homo sapien
tatatatagtatcttggaaagcaca

SEQ ID NO: 1888784 - DNA, 25 bp, Homo sapien
tggaaagcacataagtataattatc

SEQ ID NO: 1888785 - DNA, 25 bp, Homo sapien
gaaacagtatctaatatgctgcatg

SEQ ID NO: 1888786 - DNA, 25 bp, Homo sapien
tcttgatctcatgttgcttggaaat

SEQ ID NO: 1888787 - DNA, 25 bp, Homo sapien
aaagaagaaaagcagtgtcacaatt

SEQ ID NO: 1888788 - DNA, 25 bp, Homo sapien
taagagaaatcgaatggattggttg

SEQ ID NO: 1888789 - DNA, 25 bp, Homo sapien
tcagatgcccgtacttcagctgtcc

SEQ ID NO: 1888790 - DNA, 25 bp, Homo sapien
tgcaggcctgtttgggcatgcttgt

SEQ ID NO: 1888791 - DNA, 25 bp, Homo sapien
cttctctggccgcttttcttttcgt

SEQ ID NO: 1888792 - DNA, 25 bp, Homo sapien
ttcgtcctttgtggcgctgatgcag

SEQ ID NO: 1888793 - DNA, 25 bp, Homo sapien
gtctatattaagtccctaccatcca

SEQ ID NO: 1888794 - DNA, 25 bp, Homo sapien
tgactcttggcttagtaaagtgact

SEQ ID NO: 1888795 - DNA, 25 bp, Homo sapien
aagtgacttgtttgaccaatgaaaa

SEQ ID NO: 1888796 - DNA, 25 bp, Homo sapien
agcgccccgcctagcttggtctata

SEQ ID NO: 1888797 - DNA, 25 bp, Homo sapien
taacaagttctagcatgtattaata

SEQ ID NO: 1888798 - DNA, 25 bp, Homo sapien
tgctctaaagacattagtatcagaa

SEQ ID NO: 1888799 - DNA, 25 bp, Homo sapien
ggctttctgagattgtaaaacagac

SEQ ID NO: 1888800 - DNA, 25 bp, Homo sapien
tgaagtaacatcatgagaagaggaa

SEQ ID NO: 1888801 - DNA, 25 bp, Homo sapien
gcccagggctgattagctgctcaca

SEQ ID NO: 1888802 - DNA, 25 bp, Homo sapien
tgagcacttcccaggagtatatctg

SEQ ID NO: 1888803 - DNA, 25 bp, Homo sapien
tatctgggatagaaccaggatcaga

SEQ ID NO: 1888804 - DNA, 25 bp, Homo sapien
ggatcagaatttggcagctgaagca

SEQ ID NO: 1888805 - DNA, 25 bp, Homo sapien
tcaagcatcaaaacctgcatcaaaa

SEQ ID NO: 1888806 - DNA, 25 bp, Homo sapien
caactgttcaagtgcctgaagcagg

SEQ ID NO: 1888807 - DNA, 25 bp, Homo sapien
caagcatcaaaacctgcatcaaaat

SEQ ID NO: 1888808 - DNA, 25 bp, Homo sapien
acctgccagtccctgtagtgagaga

SEQ ID NO: 1888809 - DNA, 25 bp, Homo sapien
gggcattaagtggtgtgcagcaggg

SEQ ID NO: 1888810 - DNA, 25 bp, Homo sapien
agcacctgccagtccctgtagtgag

SEQ ID NO: 1888811 - DNA, 25 bp, Homo sapien
gggcggctttgacctgagtttctgg

SEQ ID NO: 1888812 - DNA, 25 bp, Homo sapien
agggcatgatgggtagcagaagagt

SEQ ID NO: 1888813 - DNA, 25 bp, Homo sapien
caaacccatggaagtggacacagtt

SEQ ID NO: 1888814 - DNA, 25 bp, Homo sapien
agattctcctgggtttggttgtcca

SEQ ID NO: 1888815 - DNA, 25 bp, Homo sapien
tggttgtccaagaaccaaacccatg

SEQ ID NO: 1888816 - DNA, 25 bp, Homo sapien
tttgtttataccctcctggtcctca

SEQ ID NO: 1888817 - DNA, 25 bp, Homo sapien
cagctgactcctagagaattcatca

SEQ ID NO: 1888818 - DNA, 25 bp, Homo sapien
tgttgcctttgtttataccctcctg

SEQ ID NO: 1888819 - DNA, 25 bp, Homo sapien
agaatgccaggtacagctgactcct

SEQ ID NO: 1888820 - DNA, 25 bp, Homo sapien
tgtggatgctccaaaccaataaacc

SEQ ID NO: 1888821 - DNA, 25 bp, Homo sapien
ccagcggccctgagacgatgtgtgc

SEQ ID NO: 1888822 - DNA, 25 bp, Homo sapien
tgtgtgcccgcagcacgatcgtgtc

SEQ ID NO: 1888823 - DNA, 25 bp, Homo sapien
caagcttggactttgaaccgagccc

SEQ ID NO: 1888824 - DNA, 25 bp, Homo sapien
ggtcatccgcgtgttcatcgcctct

SEQ ID NO: 1888825 - DNA, 25 bp, Homo sapien
ctgtcccgggcgcagcgagaggatg

SEQ ID NO: 1888826 - DNA, 25 bp, Homo sapien
tgccggcggctcgtagctgggttca

SEQ ID NO: 1888827 - DNA, 25 bp, Homo sapien
tcttcctcgggcttcgtggcggtga

SEQ ID NO: 1888828 - DNA, 25 bp, Homo sapien
ctggttatgttttgcacgggagcct

SEQ ID NO: 1888829 - DNA, 25 bp, Homo sapien
agacaacgcggcctgaaaatggagt

SEQ ID NO: 1888830 - DNA, 25 bp, Homo sapien
ttgttcaagagcttcggggatcccc

SEQ ID NO: 1888831 - DNA, 25 bp, Homo sapien
gctcctgttgtgtggcatggaaatt

SEQ ID NO: 1888832 - DNA, 25 bp, Homo sapien
tggcagatgggcaggtagatgatgg

SEQ ID NO: 1888833 - DNA, 25 bp, Homo sapien
ctgtgaaacataagttgggctggca

SEQ ID NO: 1888834 - DNA, 25 bp, Homo sapien
taaaagcagtaaggggctttgtgga

SEQ ID NO: 1888835 - DNA, 25 bp, Homo sapien
gctttgtggaaaaatgtgggagaca

SEQ ID NO: 1888836 - DNA, 25 bp, Homo sapien
tttcagagcttacagcttcaaggcc

SEQ ID NO: 1888837 - DNA, 25 bp, Homo sapien
tcagagcttacagcttcaaggcctt

SEQ ID NO: 1888838 - DNA, 25 bp, Homo sapien
ctttcagagcttacagcttcaaggc

SEQ ID NO: 1888839 - DNA, 25 bp, Homo sapien
cagagcttacagcttcaaggccttt

SEQ ID NO: 1888840 - DNA, 25 bp, Homo sapien
tagatgccggaattgcgtaaaccca

SEQ ID NO: 1888841 - DNA, 25 bp, Homo sapien
gagaaaatgttggatctgccctagg

SEQ ID NO: 1888842 - DNA, 25 bp, Homo sapien
cagtaactttgcttgccacggaaaa

SEQ ID NO: 1888843 - DNA, 25 bp, Homo sapien
taagtgggtagcaccgtcagagaga

SEQ ID NO: 1888844 - DNA, 25 bp, Homo sapien
gaatgctaaggctgaaatcccaacc

SEQ ID NO: 1888845 - DNA, 25 bp, Homo sapien
taacccggaattgtacttgtcaagc

SEQ ID NO: 1888846 - DNA, 25 bp, Homo sapien
taggataaattttcagagggctgcc

SEQ ID NO: 1888847 - DNA, 25 bp, Homo sapien
cctattggagtggatgctgatgaac

SEQ ID NO: 1888848 - DNA, 25 bp, Homo sapien
ggcatttacatggtacccaggctcc

SEQ ID NO: 1888849 - DNA, 25 bp, Homo sapien
gagtaccaagatgttgccctctggg

SEQ ID NO: 1888850 - DNA, 25 bp, Homo sapien
cctgctaggtgagtacagaccagaa

SEQ ID NO: 1888851 - DNA, 25 bp, Homo sapien
tcagcaaagaaatacaggagaccag

SEQ ID NO: 1888852 - DNA, 25 bp, Homo sapien
gtgtcaggctgcactttgctccata

SEQ ID NO: 1888853 - DNA, 25 bp, Homo sapien
gatcgtgtgatcattcaaggagcca

SEQ ID NO: 1888854 - DNA, 25 bp, Homo sapien
tgtgaacctcatgcatgaaagcagc

SEQ ID NO: 1888855 - DNA, 25 bp, Homo sapien
gagccagacatgaggtcctgcacga

SEQ ID NO: 1888856 - DNA, 25 bp, Homo sapien
taccgtgtgcggtttcctgaaccta

SEQ ID NO: 1888857 - DNA, 25 bp, Homo sapien
tgaacctatctctatccctgtctga

SEQ ID NO: 1888858 - DNA, 25 bp, Homo sapien
ccctgtactgaactttgtgttgacc

SEQ ID NO: 1888859 - DNA, 25 bp, Homo sapien
tctgatagagggaacccctgtactg

SEQ ID NO: 1888860 - DNA, 25 bp, Homo sapien
tgactgaggccctcgagttgggcca

SEQ ID NO: 1888861 - DNA, 25 bp, Homo sapien
aagttccaagtgtgtacctgtgact

SEQ ID NO: 1888862 - DNA, 25 bp, Homo sapien
ccatgtgggagaaagttggtatagc

SEQ ID NO: 1888863 - DNA, 25 bp, Homo sapien
catatcctggtggaaaggacagcac

SEQ ID NO: 1888864 - DNA, 25 bp, Homo sapien
cagtagtttaattgaagaagatttt

SEQ ID NO: 1888865 - DNA, 25 bp, Homo sapien
tcagtagtttaattgaagaagattt

SEQ ID NO: 1888866 - DNA, 25 bp, Homo sapien
tttcagtagtttaattgaagaagat

SEQ ID NO: 1888867 - DNA, 25 bp, Homo sapien
ttcagtagtttaattgaagaagatt

SEQ ID NO: 1888868 - DNA, 25 bp, Homo sapien
aagtaacctatgatctgtgtctccc

SEQ ID NO: 1888869 - DNA, 25 bp, Homo sapien
tatataggcctttgtagctaccatc

SEQ ID NO: 1888870 - DNA, 25 bp, Homo sapien
tagaaatacgttcacatcactgcca

SEQ ID NO: 1888871 - DNA, 25 bp, Homo sapien
ccccagatatgctagggaaaaactt

SEQ ID NO: 1888872 - DNA, 25 bp, Homo sapien
ctttcagaatctccacggctgggtc

SEQ ID NO: 1888873 - DNA, 25 bp, Homo sapien
taccagaaaatggacctagcaccct

SEQ ID NO: 1888874 - DNA, 25 bp, Homo sapien
tctaaccccagagtgtggaaaatcc

SEQ ID NO: 1888875 - DNA, 25 bp, Homo sapien
tgctctagagctgctggcgccatag

SEQ ID NO: 1888876 - DNA, 25 bp, Homo sapien
cacgagatgtgtacagctttcacgc

SEQ ID NO: 1888877 - DNA, 25 bp, Homo sapien
gacactgccaccaaggcaatccatg

SEQ ID NO: 1888878 - DNA, 25 bp, Homo sapien
aatccatggcttgggttctagctta

SEQ ID NO: 1888879 - DNA, 25 bp, Homo sapien
cctgcctgctctgtataagtccgga

SEQ ID NO: 1888880 - DNA, 25 bp, Homo sapien
ggaagctggagacaacaccacagct

SEQ ID NO: 1888881 - DNA, 25 bp, Homo sapien
ccatcgggactatactaggcctgca

SEQ ID NO: 1888882 - DNA, 25 bp, Homo sapien
tgaaaagcaccagtaagcacctcgc

SEQ ID NO: 1888883 - DNA, 25 bp, Homo sapien
cgctaacaagcgtgaaaggtggaag

SEQ ID NO: 1888884 - DNA, 25 bp, Homo sapien
tggttcctggttcattggttcctgg

SEQ ID NO: 1888885 - DNA, 25 bp, Homo sapien
agaatttctctgaccttgctaatag

SEQ ID NO: 1888886 - DNA, 25 bp, Homo sapien
caatcatatcatctctctggcctag

SEQ ID NO: 1888887 - DNA, 25 bp, Homo sapien
gtgggtgacccacgcccattaactg

SEQ ID NO: 1888888 - DNA, 25 bp, Homo sapien
ccaggaacctgagtgagttttgagc

SEQ ID NO: 1888889 - DNA, 25 bp, Homo sapien
tgcatagcagacactcaccaattaa

SEQ ID NO: 1888890 - DNA, 25 bp, Homo sapien
gctttttgacagagcaatcttgccc

SEQ ID NO: 1888891 - DNA, 25 bp, Homo sapien
gctcaagtattatagcccaggaacc

SEQ ID NO: 1888892 - DNA, 25 bp, Homo sapien
aaacagatacaataatgaccacaca

SEQ ID NO: 1888893 - DNA, 25 bp, Homo sapien
ggaaagattggatcagggaatcttc

SEQ ID NO: 1888894 - DNA, 25 bp, Homo sapien
tgcagtgtattaggtataacacaca

SEQ ID NO: 1888895 - DNA, 25 bp, Homo sapien
tattaggtataacacacatcaagat

SEQ ID NO: 1888896 - DNA, 25 bp, Homo sapien
ccttgactgcatccatcctgagctg

SEQ ID NO: 1888897 - DNA, 25 bp, Homo sapien
gacatgcgctgtcgtccttgactgc

SEQ ID NO: 1888898 - DNA, 25 bp, Homo sapien
gttcagcagacagcttttttggaca

SEQ ID NO: 1888899 - DNA, 25 bp, Homo sapien
agggcagcactgtcactgtatgtca

SEQ ID NO: 1888900 - DNA, 25 bp, Homo sapien
cagagggcggaagcctggtgatgca

SEQ ID NO: 1888901 - DNA, 25 bp, Homo sapien
cattggccaaatccatctggaagcc

SEQ ID NO: 1888902 - DNA, 25 bp, Homo sapien
gctgcccattggccaaatccatctg

SEQ ID NO: 1888903 - DNA, 25 bp, Homo sapien
tgcccattggccaaatccatctgga

SEQ ID NO: 1888904 - DNA, 25 bp, Homo sapien
ttcaggacatacaggtacttgaaag

SEQ ID NO: 1888905 - DNA, 25 bp, Homo sapien
cattcaggacatacaggtacttgaa

SEQ ID NO: 1888906 - DNA, 25 bp, Homo sapien
aggaactattcttcatgctgggcac

SEQ ID NO: 1888907 - DNA, 25 bp, Homo sapien
tcaggacatacaggtacttgaaagg

SEQ ID NO: 1888908 - DNA, 25 bp, Homo sapien
catgagatacacgactggcctccag

SEQ ID NO: 1888909 - DNA, 25 bp, Homo sapien
tgtgacatgagatacacgactggcc

SEQ ID NO: 1888910 - DNA, 25 bp, Homo sapien
gacatgagatacacgactggcctcc

SEQ ID NO: 1888911 - DNA, 25 bp, Homo sapien
tgacatgagatacacgactggcctc

SEQ ID NO: 1888912 - DNA, 25 bp, Homo sapien
tgaatcttcattccgaggctctaac

SEQ ID NO: 1888913 - DNA, 25 bp, Homo sapien
ccagaaaatgagcaagtctctcagt

SEQ ID NO: 1888914 - DNA, 25 bp, Homo sapien
aattgggaggattatttggtgccca

SEQ ID NO: 1888915 - DNA, 25 bp, Homo sapien
aggctctaactgaggcggctggctc

SEQ ID NO: 1888916 - DNA, 25 bp, Homo sapien
ctgagtagcagcttgactgggggca

SEQ ID NO: 1888917 - DNA, 25 bp, Homo sapien
gtgtccctgtccctggaggttacca

SEQ ID NO: 1888918 - DNA, 25 bp, Homo sapien
ctgtccctggaggttaccagcaaag

SEQ ID NO: 1888919 - DNA, 25 bp, Homo sapien
acacaccagtaaaggagacagcagt

SEQ ID NO: 1888920 - DNA, 25 bp, Homo sapien
gttaccagcaaagaaccagcaggcc

SEQ ID NO: 1888921 - DNA, 25 bp, Homo sapien
actggggcattgcaaacacaatttc

SEQ ID NO: 1888922 - DNA, 25 bp, Homo sapien
taactggggcattgcaaacacaatt

SEQ ID NO: 1888923 - DNA, 25 bp, Homo sapien
ggggcattgcaaacacaatttccag

SEQ ID NO: 1888924 - DNA, 25 bp, Homo sapien
agtgaataactggggcattgcaaac

SEQ ID NO: 1888925 - DNA, 25 bp, Homo sapien
cctctccttgcaaataggaagtttt

SEQ ID NO: 1888926 - DNA, 25 bp, Homo sapien
tttctggagatatttgttctaagaa

SEQ ID NO: 1888927 - DNA, 25 bp, Homo sapien
tcctctcgaggctaaggcagcctct

SEQ ID NO: 1888928 - DNA, 25 bp, Homo sapien
tcagtattccccgtacctttggtga

SEQ ID NO: 1888929 - DNA, 25 bp, Homo sapien
ctccctctagcggccgccaaggaca

SEQ ID NO: 1888930 - DNA, 25 bp, Homo sapien
tccctctagcggccgccaaggacat

SEQ ID NO: 1888931 - DNA, 25 bp, Homo sapien
tatagactcatgaagcgaagtagag

SEQ ID NO: 1888932 - DNA, 25 bp, Homo sapien
aaaatgactaaacccacaacaatgg

SEQ ID NO: 1888933 - DNA, 25 bp, Homo sapien
ggaaactgccaccaagttatatgca

SEQ ID NO: 1888934 - DNA, 25 bp, Homo sapien
gcagctgtagtgaaggcggtaacca

SEQ ID NO: 1888935 - DNA, 25 bp, Homo sapien
cagggaatgaatagctcttgggaac

SEQ ID NO: 1888936 - DNA, 25 bp, Homo sapien
attctcatgactgcatgcctttggg

SEQ ID NO: 1888937 - DNA, 25 bp, Homo sapien
caatctttagcaccaaggagtcaag

SEQ ID NO: 1888938 - DNA, 25 bp, Homo sapien
gctgaaatcaggtagcagggaatga

SEQ ID NO: 1888939 - DNA, 25 bp, Homo sapien
tgggtcaccagacaagactttactg

SEQ ID NO: 1888940 - DNA, 25 bp, Homo sapien
taagagttactaggacatagagcac

SEQ ID NO: 1888941 - DNA, 25 bp, Homo sapien
caagtcatggtgatctctgggtcac

SEQ ID NO: 1888942 - DNA, 25 bp, Homo sapien
gagagatttgaccattccggtcagc

SEQ ID NO: 1888943 - DNA, 25 bp, Homo sapien
gacagtgccgtgtgcccaatggtca

SEQ ID NO: 1888944 - DNA, 25 bp, Homo sapien
cataggcaattagagcccagtgcat

SEQ ID NO: 1888945 - DNA, 25 bp, Homo sapien
gaaatatgaagctgattgcataggc

SEQ ID NO: 1888946 - DNA, 25 bp, Homo sapien
cagtcagtgtaaagagacagtgccg

SEQ ID NO: 1888947 - DNA, 25 bp, Homo sapien
tcaatggcctaggagagtaaagtaa

SEQ ID NO: 1888948 - DNA, 25 bp, Homo sapien
catcggtgattcttgagtcctcagc

SEQ ID NO: 1888949 - DNA, 25 bp, Homo sapien
tatttcttacagatagtaggcaggt

SEQ ID NO: 1888950 - DNA, 25 bp, Homo sapien
tctgatgaaagggaatcaatggcct

SEQ ID NO: 1888951 - DNA, 25 bp, Homo sapien
ggccaaatgcagttaacccatagta

SEQ ID NO: 1888952 - DNA, 25 bp, Homo sapien
cgtttccaccaaagatatttctgaa

SEQ ID NO: 1888953 - DNA, 25 bp, Homo sapien
cagttgcaacatagtcaggtatcgt

SEQ ID NO: 1888954 - DNA, 25 bp, Homo sapien
gagtacataatcacatggataaagg

SEQ ID NO: 1888955 - DNA, 25 bp, Homo sapien
tttagatacaaagtaccaccacaga

SEQ ID NO: 1888956 - DNA, 25 bp, Homo sapien
tgcaacccacttaattccaatccac

SEQ ID NO: 1888957 - DNA, 25 bp, Homo sapien
accacaaggtaaacatcgtacagtg

SEQ ID NO: 1888958 - DNA, 25 bp, Homo sapien
caaatactcaactcctttagataca

SEQ ID NO: 1888959 - DNA, 25 bp, Homo sapien
cactctggcaaatatagctatatcc

SEQ ID NO: 1888960 - DNA, 25 bp, Homo sapien
cacactctggcaaatatagctatat

SEQ ID NO: 1888961 - DNA, 25 bp, Homo sapien
agctatatcccgcattatatgatcc

SEQ ID NO: 1888962 - DNA, 25 bp, Homo sapien
ctatatcccgcattatatgatccca

SEQ ID NO: 1888963 - DNA, 25 bp, Homo sapien
tctgaaaaggttctcggtccttcat

SEQ ID NO: 1888964 - DNA, 25 bp, Homo sapien
tgaagataaagaggttaagcaaaac

SEQ ID NO: 1888965 - DNA, 25 bp, Homo sapien
ctctgaagataaagaggttaagcaa

SEQ ID NO: 1888966 - DNA, 25 bp, Homo sapien
ttatagataatgagcactagacgca

SEQ ID NO: 1888967 - DNA, 25 bp, Homo sapien
gacccagccacacaaacaggagata

SEQ ID NO: 1888968 - DNA, 25 bp, Homo sapien
gccaaggagactgcatcagaggcca

SEQ ID NO: 1888969 - DNA, 25 bp, Homo sapien
taaagagtgcttatacttagtgtag

SEQ ID NO: 1888970 - DNA, 25 bp, Homo sapien
cagaggccaattttccacacgctta

SEQ ID NO: 1888971 - DNA, 25 bp, Homo sapien
accctgtcgccaaatagtacaaaga

SEQ ID NO: 1888972 - DNA, 25 bp, Homo sapien
gtcaaaccctgtcgccaaatagtac

SEQ ID NO: 1888973 - DNA, 25 bp, Homo sapien
aactgaagtcaaaccctgtcgccaa

SEQ ID NO: 1888974 - DNA, 25 bp, Homo sapien
gaagtcaaaccctgtcgccaaatag

SEQ ID NO: 1888975 - DNA, 25 bp, Homo sapien
cacattacaccttaacccttgcgga

SEQ ID NO: 1888976 - DNA, 25 bp, Homo sapien
tcccttttgtacacagaaggagttg

SEQ ID NO: 1888977 - DNA, 25 bp, Homo sapien
tcaggaaatttctaaccagtgggtc

SEQ ID NO: 1888978 - DNA, 25 bp, Homo sapien
taaagcttatgccaagagggactga

SEQ ID NO: 1888979 - DNA, 25 bp, Homo sapien
ctcgggagatgtgggagcacagggt

SEQ ID NO: 1888980 - DNA, 25 bp, Homo sapien
gaagagggaggcgagctcgggagat

SEQ ID NO: 1888981 - DNA, 25 bp, Homo sapien
ggctgcacaggctccatctgatatg

SEQ ID NO: 1888982 - DNA, 25 bp, Homo sapien
taaaaggaatcctgtgcacggggaa

SEQ ID NO: 1888983 - DNA, 25 bp, Homo sapien
tggacactacgtttaggacactacc

SEQ ID NO: 1888984 - DNA, 25 bp, Homo sapien
ggtagaactctaccgtgtcgttgag

SEQ ID NO: 1888985 - DNA, 25 bp, Homo sapien
taccgtgtcgttgagtgccgtggac

SEQ ID NO: 1888986 - DNA, 25 bp, Homo sapien
tggaccaggtccagcggtagaactc

SEQ ID NO: 1888987 - DNA, 25 bp, Homo sapien
tgcaccagtctgcagcctcgcgcag

SEQ ID NO: 1888988 - DNA, 25 bp, Homo sapien
caagcggaaggcgtcgtcaaggttc

SEQ ID NO: 1888989 - DNA, 25 bp, Homo sapien
tgcgctgcaccagtctgcagcctcg

SEQ ID NO: 1888990 - DNA, 25 bp, Homo sapien
gggccaagcggaaggcgtcgtcaag

SEQ ID NO: 1888991 - DNA, 25 bp, Homo sapien
gagggaaacccgcatgtctgccacc

SEQ ID NO: 1888992 - DNA, 25 bp, Homo sapien
aaagggagggaaacccgcatgtctg

SEQ ID NO: 1888993 - DNA, 25 bp, Homo sapien
gtctgccacctagaataacagccat

SEQ ID NO: 1888994 - DNA, 25 bp, Homo sapien
cttgtttagttgtgcaaagggaggg

SEQ ID NO: 1888995 - DNA, 25 bp, Homo sapien
gctacatggatgctacttagagaaa

SEQ ID NO: 1888996 - DNA, 25 bp, Homo sapien
taacacaggtgcttgactaacttgg

SEQ ID NO: 1888997 - DNA, 25 bp, Homo sapien
caatgttttccacgagatatgtttc

SEQ ID NO: 1888998 - DNA, 25 bp, Homo sapien
tatcctgataatacattagcacaga

SEQ ID NO: 1888999 - DNA, 25 bp, Homo sapien
cctcttcaaggggtgtgcatggaat

SEQ ID NO: 1889000 - DNA, 25 bp, Homo sapien
gatggtaggtgaggtccaccactga

SEQ ID NO: 1889001 - DNA, 25 bp, Homo sapien
ttccagatggtaggtgaggtccacc

SEQ ID NO: 1889002 - DNA, 25 bp, Homo sapien
atggtaggtgaggtccaccactgac

SEQ ID NO: 1889003 - DNA, 25 bp, Homo sapien
ccagatggtaggtgaggtccaccac

SEQ ID NO: 1889004 - DNA, 25 bp, Homo sapien
cttggcagcccagtagtggcaggga

SEQ ID NO: 1889005 - DNA, 25 bp, Homo sapien
agtgatggcgtggactgtggtcatg

SEQ ID NO: 1889006 - DNA, 25 bp, Homo sapien
gggtggcagtgatggcgtggactgt

SEQ ID NO: 1889007 - DNA, 25 bp, Homo sapien
gatggcgtggactgtggtcatgagt

SEQ ID NO: 1889008 - DNA, 25 bp, Homo sapien
tggcagtgatggcgtggactgtggt

SEQ ID NO: 1889009 - DNA, 25 bp, Homo sapien
agttgtcagtgatgactttggccag

SEQ ID NO: 1889010 - DNA, 25 bp, Homo sapien
ataccaaagttgtcagtgatgactt

SEQ ID NO: 1889011 - DNA, 25 bp, Homo sapien
aaagttgtcagtgatgactttggcc

SEQ ID NO: 1889012 - DNA, 25 bp, Homo sapien
accaaagttgtcagtgatgactttg

SEQ ID NO: 1889013 - DNA, 25 bp, Homo sapien
aggcagttggtggttcaggtggcat

SEQ ID NO: 1889014 - DNA, 25 bp, Homo sapien
gtggcattgctgatgatcttgaggc

SEQ ID NO: 1889015 - DNA, 25 bp, Homo sapien
ctgatgatcttgaggctgttgtcat

SEQ ID NO: 1889016 - DNA, 25 bp, Homo sapien
ctaggcagttggtggttcaggtggc

SEQ ID NO: 1889017 - DNA, 25 bp, Homo sapien
ggatcagcagagggggcagagatga

SEQ ID NO: 1889018 - DNA, 25 bp, Homo sapien
cagcagagggggcagagatgatgac

SEQ ID NO: 1889019 - DNA, 25 bp, Homo sapien
atggggggatcagcagagggggcag

SEQ ID NO: 1889020 - DNA, 25 bp, Homo sapien
tcagcagagggggcagagatgatga

SEQ ID NO: 1889021 - DNA, 25 bp, Homo sapien
tggactccatgacatactcagtgcc

SEQ ID NO: 1889022 - DNA, 25 bp, Homo sapien
ctccatgacatactcagtgccagca

SEQ ID NO: 1889023 - DNA, 25 bp, Homo sapien
gactccatgacatactcagtgccag

SEQ ID NO: 1889024 - DNA, 25 bp, Homo sapien
agtggactccatgacatactcagtg

SEQ ID NO: 1889025 - DNA, 25 bp, Homo sapien
taccagaattacaagcagccctgat

SEQ ID NO: 1889026 - DNA, 25 bp, Homo sapien
cccaaaggatccttgatctgcacca

SEQ ID NO: 1889027 - DNA, 25 bp, Homo sapien
acaacagcccccaaaggatccttga

SEQ ID NO: 1889028 - DNA, 25 bp, Homo sapien
caggtgttcacgtttttgaggaaat

SEQ ID NO: 1889029 - DNA, 25 bp, Homo sapien
aagcccaagaggttctgcacagcaa

SEQ ID NO: 1889030 - DNA, 25 bp, Homo sapien
tgctcaaagcaaatgaaactcttac

SEQ ID NO: 1889031 - DNA, 25 bp, Homo sapien
caaagcaaatgaaactcttacatac

SEQ ID NO: 1889032 - DNA, 25 bp, Homo sapien
gctcaaagcaaatgaaactcttaca

SEQ ID NO: 1889033 - DNA, 25 bp, Homo sapien
tgcatctgtgtgctcaaagcaaatg

SEQ ID NO: 1889034 - DNA, 25 bp, Homo sapien
gagccttctgatgattcccgtcact

SEQ ID NO: 1889035 - DNA, 25 bp, Homo sapien
agagcccctgaaaatgtcctggcat

SEQ ID NO: 1889036 - DNA, 25 bp, Homo sapien
tgaacgtggaccaaagcagcagagc

SEQ ID NO: 1889037 - DNA, 25 bp, Homo sapien
cttcagcacaggtactatgagcctt

SEQ ID NO: 1889038 - DNA, 25 bp, Homo sapien
tagctcagtgaaagatcctttcttg

SEQ ID NO: 1889039 - DNA, 25 bp, Homo sapien
gcagggctgaacgtagctcagtgaa

SEQ ID NO: 1889040 - DNA, 25 bp, Homo sapien
ggcggcagggctgaacgtagctcag

SEQ ID NO: 1889041 - DNA, 25 bp, Homo sapien
tgaacgtagctcagtgaaagatcct

SEQ ID NO: 1889042 - DNA, 25 bp, Homo sapien
gcacaagaaccaatcacgactgtcg

SEQ ID NO: 1889043 - DNA, 25 bp, Homo sapien
aataggagaccgtagtgatagcgac

SEQ ID NO: 1889044 - DNA, 25 bp, Homo sapien
attcaaacgtgtttgcggaaaggag

SEQ ID NO: 1889045 - DNA, 25 bp, Homo sapien
tacgtggctagcattgaccaatagg

SEQ ID NO: 1889046 - DNA, 25 bp, Homo sapien
gcaccggcgcactgaggaacagccg

SEQ ID NO: 1889047 - DNA, 25 bp, Homo sapien
ccggcgcactgaggaacagccgcag

SEQ ID NO: 1889048 - DNA, 25 bp, Homo sapien
cactgaggaacagccgcagccggtg

SEQ ID NO: 1889049 - DNA, 25 bp, Homo sapien
cggtgcaccggcgcactgaggaaca

SEQ ID NO: 1889050 - DNA, 25 bp, Homo sapien
ttagcctcactacttacagtctgtg

SEQ ID NO: 1889051 - DNA, 25 bp, Homo sapien
cagaatagcaatatgaggtactgct

SEQ ID NO: 1889052 - DNA, 25 bp, Homo sapien
taaagctaactacctcctaggatgg

SEQ ID NO: 1889053 - DNA, 25 bp, Homo sapien
ccttggagacactgggcatgaatct

SEQ ID NO: 1889054 - DNA, 25 bp, Homo sapien
caggatggcctcactcacgagtgga

SEQ ID NO: 1889055 - DNA, 25 bp, Homo sapien
gctggtctgctgatccaggatggcc

SEQ ID NO: 1889056 - DNA, 25 bp, Homo sapien
gatggaatttgaggtgcaagatgtt

SEQ ID NO: 1889057 - DNA, 25 bp, Homo sapien
taactgagatgactgggatcatcag

SEQ ID NO: 1889058 - DNA, 25 bp, Homo sapien
aagtaacatctcctacagccagtaa

SEQ ID NO: 1889059 - DNA, 25 bp, Homo sapien
tagatatcaaatgcttgtccaaagt

SEQ ID NO: 1889060 - DNA, 25 bp, Homo sapien
tgcagtttgcatcgttgtacataga

SEQ ID NO: 1889061 - DNA, 25 bp, Homo sapien
aacatgattgtcatcctggcaggta

SEQ ID NO: 1889062 - DNA, 25 bp, Homo sapien
tccatccaggatccactatctacac

SEQ ID NO: 1889063 - DNA, 25 bp, Homo sapien
cacctgtgttaaaactggtaaatgt

SEQ ID NO: 1889064 - DNA, 25 bp, Homo sapien
tatctacacacctatgttacaacat

SEQ ID NO: 1889065 - DNA, 25 bp, Homo sapien
gaagttctgtatccacctgtgttaa

SEQ ID NO: 1889066 - DNA, 25 bp, Homo sapien
atatggcaccctaaaaaccaactgt

SEQ ID NO: 1889067 - DNA, 25 bp, Homo sapien
agttactggaacgtgtaacagtagt

SEQ ID NO: 1889068 - DNA, 25 bp, Homo sapien
aacgcattcgtttattcaatgtaag

SEQ ID NO: 1889069 - DNA, 25 bp, Homo sapien
taacaatatggcaccctaaaaacca

SEQ ID NO: 1889070 - DNA, 25 bp, Homo sapien
cattcgctgcagaactagcattttt

SEQ ID NO: 1889071 - DNA, 25 bp, Homo sapien
tgaggttgggcattcgctgcagaac

SEQ ID NO: 1889072 - DNA, 25 bp, Homo sapien
tgggcattcgctgcagaactagcat

SEQ ID NO: 1889073 - DNA, 25 bp, Homo sapien
gttgggcattcgctgcagaactagc

SEQ ID NO: 1889074 - DNA, 25 bp, Homo sapien
tactggtgcgtaggcgttccctggc

SEQ ID NO: 1889075 - DNA, 25 bp, Homo sapien
ggtcagaggtactggtgcgtaggcg

SEQ ID NO: 1889076 - DNA, 25 bp, Homo sapien
agaggtactggtgcgtaggcgttcc

SEQ ID NO: 1889077 - DNA, 25 bp, Homo sapien
tgtctggggatctccgatttctcct

SEQ ID NO: 1889078 - DNA, 25 bp, Homo sapien
tcctggaaagagtatcacattcgat

SEQ ID NO: 1889079 - DNA, 25 bp, Homo sapien
cgctctgctcatgcactttccaaaa

SEQ ID NO: 1889080 - DNA, 25 bp, Homo sapien
tggaaagagtatcacattcgatgag

SEQ ID NO: 1889081 - DNA, 25 bp, Homo sapien
agagtatcacattcgatgagtttat

SEQ ID NO: 1889082 - DNA, 25 bp, Homo sapien
cgctgtcggtttccacaggccgccc

SEQ ID NO: 1889083 - DNA, 25 bp, Homo sapien
gctgtcggtttccacaggccgccct

SEQ ID NO: 1889084 - DNA, 25 bp, Homo sapien
ctgtcggtttccacaggccgccctt

SEQ ID NO: 1889085 - DNA, 25 bp, Homo sapien
ctggagtccaggctagtcaagtatg

SEQ ID NO: 1889086 - DNA, 25 bp, Homo sapien
cttcatggaaaaccttgccagggag

SEQ ID NO: 1889087 - DNA, 25 bp, Homo sapien
ggaagacgtgctgagcaaagtgcca

SEQ ID NO: 1889088 - DNA, 25 bp, Homo sapien
cgtgctgagcaaagtgccagagtca

SEQ ID NO: 1889089 - DNA, 25 bp, Homo sapien
gctgagcaaagtgccagagtcagag

SEQ ID NO: 1889090 - DNA, 25 bp, Homo sapien
aaagcgacagctgagagttggtgac

SEQ ID NO: 1889091 - DNA, 25 bp, Homo sapien
tcttcctcttgcgactagcagctgc

SEQ ID NO: 1889092 - DNA, 25 bp, Homo sapien
tagtatcattgtgacactgttccac

SEQ ID NO: 1889093 - DNA, 25 bp, Homo sapien
catcttctgagctgctaggctgtgc

SEQ ID NO: 1889094 - DNA, 25 bp, Homo sapien
actcctgtccttccaatgttggtga

SEQ ID NO: 1889095 - DNA, 25 bp, Homo sapien
gctgggagtctactgtgctttcctc

SEQ ID NO: 1889096 - DNA, 25 bp, Homo sapien
ccaatgttggtgagtaaatgatcta

SEQ ID NO: 1889097 - DNA, 25 bp, Homo sapien
cactggctgggagtctactgtgctt

SEQ ID NO: 1889098 - DNA, 25 bp, Homo sapien
catggtgctggatgagcgtttctac

SEQ ID NO: 1889099 - DNA, 25 bp, Homo sapien
gtcatggtgctggatgagcgtttct

SEQ ID NO: 1889100 - DNA, 25 bp, Homo sapien
ccagtcatggtgctggatgagcgtt

SEQ ID NO: 1889101 - DNA, 25 bp, Homo sapien
ctgtgaaaaaccagtcatggtgctg

SEQ ID NO: 1889102 - DNA, 25 bp, Homo sapien
aagggtgggaccaaacactattgct

SEQ ID NO: 1889103 - DNA, 25 bp, Homo sapien
gatgttcgaacaagggtgggaccaa

SEQ ID NO: 1889104 - DNA, 25 bp, Homo sapien
gttgtcttctgatgttcgaacaagg

SEQ ID NO: 1889105 - DNA, 25 bp, Homo sapien
ggaccaaacactattgctaggtttc

SEQ ID NO: 1889106 - DNA, 25 bp, Homo sapien
tcaggcaaatcgtgaattagtcttt

SEQ ID NO: 1889107 - DNA, 25 bp, Homo sapien
tctagaggctcctctttacgattgg

SEQ ID NO: 1889108 - DNA, 25 bp, Homo sapien
agtgtttcataatgatgttcaggca

SEQ ID NO: 1889109 - DNA, 25 bp, Homo sapien
taatgttttcagacgatctagaggc

SEQ ID NO: 1889110 - DNA, 25 bp, Homo sapien
atatttatcatttgtgaagagagac

SEQ ID NO: 1889111 - DNA, 25 bp, Homo sapien
ttatcatttgtgaagagagactcag

SEQ ID NO: 1889112 - DNA, 25 bp, Homo sapien
atttatcatttgtgaagagagactc

SEQ ID NO: 1889113 - DNA, 25 bp, Homo sapien
agcatatttatcatttgtgaagaga

SEQ ID NO: 1889114 - DNA, 25 bp, Homo sapien
aaactgcttatcacattcaaatctc

SEQ ID NO: 1889115 - DNA, 25 bp, Homo sapien
atcatcttgtatatcaatatcagcc

SEQ ID NO: 1889116 - DNA, 25 bp, Homo sapien
tcatcttgtatatcaatatcagcca

SEQ ID NO: 1889117 - DNA, 25 bp, Homo sapien
cagccattcccttgttgagttcttc

SEQ ID NO: 1889118 - DNA, 25 bp, Homo sapien
tattcaagacctctttcttcaacta

SEQ ID NO: 1889119 - DNA, 25 bp, Homo sapien
ttcttcaactaatttgcaacatatg

SEQ ID NO: 1889120 - DNA, 25 bp, Homo sapien
tgtatattcaagacctctttcttca

SEQ ID NO: 1889121 - DNA, 25 bp, Homo sapien
gcaacatatgtcaactattaatgga

SEQ ID NO: 1889122 - DNA, 25 bp, Homo sapien
tgagctggtgggcagtcatctagtc

SEQ ID NO: 1889123 - DNA, 25 bp, Homo sapien
tagtatgagctggtgggcagtcatc

SEQ ID NO: 1889124 - DNA, 25 bp, Homo sapien
ctggtgggcagtcatctagtcggac

SEQ ID NO: 1889125 - DNA, 25 bp, Homo sapien
cgattagtatgagctggtgggcagt

SEQ ID NO: 1889126 - DNA, 25 bp, Homo sapien
ttccttcggagagtgtgggctttga

SEQ ID NO: 1889127 - DNA, 25 bp, Homo sapien
cgaaagttcctgtagcagttggctt

SEQ ID NO: 1889128 - DNA, 25 bp, Homo sapien
actcttccttcggagagtgtgggct

SEQ ID NO: 1889129 - DNA, 25 bp, Homo sapien
gcaaagtttgcctgatgctgagact

SEQ ID NO: 1889130 - DNA, 25 bp, Homo sapien
tgctttgctcatcagattgttgtat

SEQ ID NO: 1889131 - DNA, 25 bp, Homo sapien
ctttgctcatcagattgttgtattc

SEQ ID NO: 1889132 - DNA, 25 bp, Homo sapien
ctgctttgctcatcagattgttgta

SEQ ID NO: 1889133 - DNA, 25 bp, Homo sapien
tgctcatcagattgttgtattcttt

SEQ ID NO: 1889134 - DNA, 25 bp, Homo sapien
caggcattcacagtcggacgtggtg

SEQ ID NO: 1889135 - DNA, 25 bp, Homo sapien
ttagatccctgttagtgactccagt

SEQ ID NO: 1889136 - DNA, 25 bp, Homo sapien
taattagatccctgttagtgactcc

SEQ ID NO: 1889137 - DNA, 25 bp, Homo sapien
gtggtgagtcgaaacacatttttcc

SEQ ID NO: 1889138 - DNA, 25 bp, Homo sapien
caagcaagcattaacactgatgggc

SEQ ID NO: 1889139 - DNA, 25 bp, Homo sapien
tgctcttcctcagacggagtcgtct

SEQ ID NO: 1889140 - DNA, 25 bp, Homo sapien
tgtaagagatgtctatcaagcaagc

SEQ ID NO: 1889141 - DNA, 25 bp, Homo sapien
gtaaagtgaatgaccccgaaggaca

SEQ ID NO: 1889142 - DNA, 25 bp, Homo sapien
tccatggccaaatacttccaccaac

SEQ ID NO: 1889143 - DNA, 25 bp, Homo sapien
tttccatggccaaatacttccacca

SEQ ID NO: 1889144 - DNA, 25 bp, Homo sapien
ctgtttccatggccaaatacttcca

SEQ ID NO: 1889145 - DNA, 25 bp, Homo sapien
tgtttccatggccaaatacttccac

SEQ ID NO: 1889146 - DNA, 25 bp, Homo sapien
gaggaagaatcttttctggacccag

SEQ ID NO: 1889147 - DNA, 25 bp, Homo sapien
taatcatccagaccctcatcatatg

SEQ ID NO: 1889148 - DNA, 25 bp, Homo sapien
gccacccttccttggcagcatcact

SEQ ID NO: 1889149 - DNA, 25 bp, Homo sapien
tgtaatcatccagaccctcatcata

SEQ ID NO: 1889150 - DNA, 25 bp, Homo sapien
ggccaacagattcgtggtcatgtga

SEQ ID NO: 1889151 - DNA, 25 bp, Homo sapien
gccaacagattcgtggtcatgtgag

SEQ ID NO: 1889152 - DNA, 25 bp, Homo sapien
ccaacagattcgtggtcatgtgaga

SEQ ID NO: 1889153 - DNA, 25 bp, Homo sapien
agggccaacagattcgtggtcatgt

SEQ ID NO: 1889154 - DNA, 25 bp, Homo sapien
cagggatatgtgcaatatcatgatc

SEQ ID NO: 1889155 - DNA, 25 bp, Homo sapien
gcagggatatgtgcaatatcatgat

SEQ ID NO: 1889156 - DNA, 25 bp, Homo sapien
aggtagaggctgatataacagcaga

SEQ ID NO: 1889157 - DNA, 25 bp, Homo sapien
caaagaatcgccaggcggactggta

SEQ ID NO: 1889158 - DNA, 25 bp, Homo sapien
aaagaatcgccaggcggactggtac

SEQ ID NO: 1889159 - DNA, 25 bp, Homo sapien
ccaaagaatcgccaggcggactggt

SEQ ID NO: 1889160 - DNA, 25 bp, Homo sapien
ttttatgtggacctctcgacgtgca

SEQ ID NO: 1889161 - DNA, 25 bp, Homo sapien
ttatgtggacctctcgacgtgcatc

SEQ ID NO: 1889162 - DNA, 25 bp, Homo sapien
ctttttatgtggacctctcgacgtg

SEQ ID NO: 1889163 - DNA, 25 bp, Homo sapien
tatgtggacctctcgacgtgcatca

SEQ ID NO: 1889164 - DNA, 25 bp, Homo sapien
tgatgccttaaaggctgcggtgtct

SEQ ID NO: 1889165 - DNA, 25 bp, Homo sapien
actgatgccttaaaggctgcggtgt

SEQ ID NO: 1889166 - DNA, 25 bp, Homo sapien
tttactgccaagatgtaagactgat

SEQ ID NO: 1889167 - DNA, 25 bp, Homo sapien
atttactgccaagatgtaagactga

SEQ ID NO: 1889168 - DNA, 25 bp, Homo sapien
tctaaatctgaagtaccagcgtttt

SEQ ID NO: 1889169 - DNA, 25 bp, Homo sapien
tgattcctttgactgacaggtagtt

SEQ ID NO: 1889170 - DNA, 25 bp, Homo sapien
cctttgactgacaggtagttctaaa

SEQ ID NO: 1889171 - DNA, 25 bp, Homo sapien
aaatctgaagtaccagcgttttcac

SEQ ID NO: 1889172 - DNA, 25 bp, Homo sapien
aggcttggcagaggctccagataga

SEQ ID NO: 1889173 - DNA, 25 bp, Homo sapien
atagagggggatttcccagtctcca

SEQ ID NO: 1889174 - DNA, 25 bp, Homo sapien
gtctccacttgctgatcggaggcac

SEQ ID NO: 1889175 - DNA, 25 bp, Homo sapien
gatcggaggcactgtcagtccttac

SEQ ID NO: 1889176 - DNA, 25 bp, Homo sapien
tctgctgattcaacagactgttctg

SEQ ID NO: 1889177 - DNA, 25 bp, Homo sapien
tactggtctttggtctttgatagaa

SEQ ID NO: 1889178 - DNA, 25 bp, Homo sapien
tgatggttttgtgacatgcgtggaa

SEQ ID NO: 1889179 - DNA, 25 bp, Homo sapien
catgcgtggaaggagctttcagaga

SEQ ID NO: 1889180 - DNA, 25 bp, Homo sapien
tataggccctaccaggttgtgtcag

SEQ ID NO: 1889181 - DNA, 25 bp, Homo sapien
tgtcttgtgaaataccccgaggcag

SEQ ID NO: 1889182 - DNA, 25 bp, Homo sapien
tcatgagaggtgcttcgacgtcgtc

SEQ ID NO: 1889183 - DNA, 25 bp, Homo sapien
gacacactgcgttgccgtatctgga

SEQ ID NO: 1889184 - DNA, 25 bp, Homo sapien
ttgacttttataatttggtcacctg

SEQ ID NO: 1889185 - DNA, 25 bp, Homo sapien
tttcttcatccttatatgaaaattg

SEQ ID NO: 1889186 - DNA, 25 bp, Homo sapien
ttcttcatccttatatgaaaattga

SEQ ID NO: 1889187 - DNA, 25 bp, Homo sapien
aacaaaggcgacaggtcttcttggc

SEQ ID NO: 1889188 - DNA, 25 bp, Homo sapien
aaatgcctcgctgatttctcgtgac

SEQ ID NO: 1889189 - DNA, 25 bp, Homo sapien
tcaggaagcgccttcaaatgcctcg

SEQ ID NO: 1889190 - DNA, 25 bp, Homo sapien
ttcttggcagccagtgtcgaggcca

SEQ ID NO: 1889191 - DNA, 25 bp, Homo sapien
tcgagtgtcagctcctagagagatc

SEQ ID NO: 1889192 - DNA, 25 bp, Homo sapien
gtcgtgaaggttcgagtgtcagctc

SEQ ID NO: 1889193 - DNA, 25 bp, Homo sapien
aatccgaatgggtcgtgaaggttcg

SEQ ID NO: 1889194 - DNA, 25 bp, Homo sapien
ctggaaaaatccgaatgggtcgtga

SEQ ID NO: 1889195 - DNA, 25 bp, Homo sapien
aaagcatgtaaacacagggcttgat

SEQ ID NO: 1889196 - DNA, 25 bp, Homo sapien
tctatcccagaaaattcgtcgatca

SEQ ID NO: 1889197 - DNA, 25 bp, Homo sapien
ctatcccagaaaattcgtcgatcac

SEQ ID NO: 1889198 - DNA, 25 bp, Homo sapien
gtaaacacagggcttgattttgtta

SEQ ID NO: 1889199 - DNA, 25 bp, Homo sapien
tatacgaggtggattaaattccagg

SEQ ID NO: 1889200 - DNA, 25 bp, Homo sapien
ctgggctaatggttcaccagcgatg

SEQ ID NO: 1889201 - DNA, 25 bp, Homo sapien
cagcgatgtcatcaattccacatat

SEQ ID NO: 1889202 - DNA, 25 bp, Homo sapien
caattccacatatacgaggtggatt

SEQ ID NO: 1889203 - DNA, 25 bp, Homo sapien
taacgtgatcactagattcacttca

SEQ ID NO: 1889204 - DNA, 25 bp, Homo sapien
agattttgtccaggacatcagcttg

SEQ ID NO: 1889205 - DNA, 25 bp, Homo sapien
caaatggaatgtttaacgtgatcac

SEQ ID NO: 1889206 - DNA, 25 bp, Homo sapien
gtccaggacatcagcttgccctgat

SEQ ID NO: 1889207 - DNA, 25 bp, Homo sapien
cacatctattctccaactccaacat

SEQ ID NO: 1889208 - DNA, 25 bp, Homo sapien
gaaagccatctaggaggcagtgctg

SEQ ID NO: 1889209 - DNA, 25 bp, Homo sapien
ctaggaaagccatctaggaggcagt

SEQ ID NO: 1889210 - DNA, 25 bp, Homo sapien
taggaaagccatctaggaggcagtg

SEQ ID NO: 1889211 - DNA, 25 bp, Homo sapien
tatgtactgcttggccatgtcacca

SEQ ID NO: 1889212 - DNA, 25 bp, Homo sapien
taagttctgggcaatcctctcgcac

SEQ ID NO: 1889213 - DNA, 25 bp, Homo sapien
atgttctcccgcaagcagtggctac

SEQ ID NO: 1889214 - DNA, 25 bp, Homo sapien
aatgttggaggcctaagttctgggc

SEQ ID NO: 1889215 - DNA, 25 bp, Homo sapien
ctaggcaagcagcaagaggatgact

SEQ ID NO: 1889216 - DNA, 25 bp, Homo sapien
gcaagaggatgactgcacaggagtc

SEQ ID NO: 1889217 - DNA, 25 bp, Homo sapien
gatgactgcacaggagtctggaagc

SEQ ID NO: 1889218 - DNA, 25 bp, Homo sapien
gactgcacaggagtctggaagccat

SEQ ID NO: 1889219 - DNA, 25 bp, Homo sapien
tttcatgttacaagagcttgtgaaa

SEQ ID NO: 1889220 - DNA, 25 bp, Homo sapien
gtctttcatgttacaagagcttgtg

SEQ ID NO: 1889221 - DNA, 25 bp, Homo sapien
ctttcatgttacaagagcttgtgaa

SEQ ID NO: 1889222 - DNA, 25 bp, Homo sapien
tctttcatgttacaagagcttgtga

SEQ ID NO: 1889223 - DNA, 25 bp, Homo sapien
ttcagttatgtctgctaaattcaat

SEQ ID NO: 1889224 - DNA, 25 bp, Homo sapien
tactgtaaatccacatccaagttta

SEQ ID NO: 1889225 - DNA, 25 bp, Homo sapien
aattcagttatgtctgctaaattca

SEQ ID NO: 1889226 - DNA, 25 bp, Homo sapien
attcaatactgtaaatccacatcca

SEQ ID NO: 1889227 - DNA, 25 bp, Homo sapien
gaccaatgtggaagcctcctcgggt

SEQ ID NO: 1889228 - DNA, 25 bp, Homo sapien
taaatttccagttccgattggtctg

SEQ ID NO: 1889229 - DNA, 25 bp, Homo sapien
ggtctgtttcatgggaccgcccctc

SEQ ID NO: 1889230 - DNA, 25 bp, Homo sapien
tagcctgagaatcccggtggtgagc

SEQ ID NO: 1889231 - DNA, 25 bp, Homo sapien
tgcagcccggactcccaggctcgca

SEQ ID NO: 1889232 - DNA, 25 bp, Homo sapien
cggactcccaggctcgcaggcgccc

SEQ ID NO: 1889233 - DNA, 25 bp, Homo sapien
tcgcaggcgcccgcgaggggcaggg

SEQ ID NO: 1889234 - DNA, 25 bp, Homo sapien
agcccggactcccaggctcgcaggc

SEQ ID NO: 1889235 - DNA, 25 bp, Homo sapien
gaagctttcctataccattcagaag

SEQ ID NO: 1889236 - DNA, 25 bp, Homo sapien
taaagagtgggcctttcgatcggga

SEQ ID NO: 1889237 - DNA, 25 bp, Homo sapien
cagcacctgagcttgaatcgaagct

SEQ ID NO: 1889238 - DNA, 25 bp, Homo sapien
cgatcgggagatttaggctgaagcc

SEQ ID NO: 1889239 - DNA, 25 bp, Homo sapien
tcttcccagaccactcactttgacg

SEQ ID NO: 1889240 - DNA, 25 bp, Homo sapien
ttctgactttccataggtcttattg

SEQ ID NO: 1889241 - DNA, 25 bp, Homo sapien
tcactttgacgggtctccctttctg

SEQ ID NO: 1889242 - DNA, 25 bp, Homo sapien
gactttccataggtcttattgtcta

SEQ ID NO: 1889243 - DNA, 25 bp, Homo sapien
gcagatctttaagctgttccacaga

SEQ ID NO: 1889244 - DNA, 25 bp, Homo sapien
gttgtactgtaatccataactccca

SEQ ID NO: 1889245 - DNA, 25 bp, Homo sapien
actcccaccagaaagttgtcaaagg

SEQ ID NO: 1889246 - DNA, 25 bp, Homo sapien
gaccctccaagcagactcaggcagt

SEQ ID NO: 1889247 - DNA, 25 bp, Homo sapien
cattgctactacaaaagccctccag

SEQ ID NO: 1889248 - DNA, 25 bp, Homo sapien
catggttactccttgctgtttcatt

SEQ ID NO: 1889249 - DNA, 25 bp, Homo sapien
caattggggcatcttgtggttgaag

SEQ ID NO: 1889250 - DNA, 25 bp, Homo sapien
cctgcattgctatacaacaattggg

SEQ ID NO: 1889251 - DNA, 25 bp, Homo sapien
caccccatcttctgtccagccccat

SEQ ID NO: 1889252 - DNA, 25 bp, Homo sapien
tccaattcgggcaatagcaggcctc

SEQ ID NO: 1889253 - DNA, 25 bp, Homo sapien
cgggcaatagcaggcctcaagtgga

SEQ ID NO: 1889254 - DNA, 25 bp, Homo sapien
tttccaattcgggcaatagcaggcc

SEQ ID NO: 1889255 - DNA, 25 bp, Homo sapien
aattcgggcaatagcaggcctcaag

SEQ ID NO: 1889256 - DNA, 25 bp, Homo sapien
ttgtacaggctcatttgcccataac

SEQ ID NO: 1889257 - DNA, 25 bp, Homo sapien
tagggcagtatcagtttgtacaggc

SEQ ID NO: 1889258 - DNA, 25 bp, Homo sapien
taatctttgaatagggcagtatcag

SEQ ID NO: 1889259 - DNA, 25 bp, Homo sapien
tttgaatagggcagtatcagtttgt

SEQ ID NO: 1889260 - DNA, 25 bp, Homo sapien
cactgagctagggtcacacactgaa

SEQ ID NO: 1889261 - DNA, 25 bp, Homo sapien
ttgatctctggtgtagaagctctgc

SEQ ID NO: 1889262 - DNA, 25 bp, Homo sapien
tgtacaggtaaggtcttctcctgtg

SEQ ID NO: 1889263 - DNA, 25 bp, Homo sapien
cccaaagggtagagcgtgcagttcc

SEQ ID NO: 1889264 - DNA, 25 bp, Homo sapien
tctttcctggctttgataggttcag

SEQ ID NO: 1889265 - DNA, 25 bp, Homo sapien
tcctggctttgataggttcagcttt

SEQ ID NO: 1889266 - DNA, 25 bp, Homo sapien
tttcctggctttgataggttcagct

SEQ ID NO: 1889267 - DNA, 25 bp, Homo sapien
cctggctttgataggttcagctttc

SEQ ID NO: 1889268 - DNA, 25 bp, Homo sapien
ttagtattctgtaaacagcttctgt

SEQ ID NO: 1889269 - DNA, 25 bp, Homo sapien
catgttatactctgttggttcttct

SEQ ID NO: 1889270 - DNA, 25 bp, Homo sapien
tgaccacagataggaaccaaagtct

SEQ ID NO: 1889271 - DNA, 25 bp, Homo sapien
tactgtttgtagttaaatccatgtt

SEQ ID NO: 1889272 - DNA, 25 bp, Homo sapien
tgtaatcatgacataatcaacatga

SEQ ID NO: 1889273 - DNA, 25 bp, Homo sapien
ttagttctgtaatcatgacataatc

SEQ ID NO: 1889274 - DNA, 25 bp, Homo sapien
tgtttagttctgtaatcatgacata

SEQ ID NO: 1889275 - DNA, 25 bp, Homo sapien
gttctgtaatcatgacataatcaac

SEQ ID NO: 1889276 - DNA, 25 bp, Homo sapien
gttgtcaagtaggtgataaaagtgt

SEQ ID NO: 1889277 - DNA, 25 bp, Homo sapien
cctatgttgtcaagtaggtgataaa

SEQ ID NO: 1889278 - DNA, 25 bp, Homo sapien
tcctggcaaaacctatgttgtcaag

SEQ ID NO: 1889279 - DNA, 25 bp, Homo sapien
ggcaaaacctatgttgtcaagtagg

SEQ ID NO: 1889280 - DNA, 25 bp, Homo sapien
cagatactgttctgccacatgcaaa

SEQ ID NO: 1889281 - DNA, 25 bp, Homo sapien
gatgaaggttcagccctctcatagg

SEQ ID NO: 1889282 - DNA, 25 bp, Homo sapien
caaagtgcataactggactagtcac

SEQ ID NO: 1889283 - DNA, 25 bp, Homo sapien
gagctcatgctatggaattggacag

SEQ ID NO: 1889284 - DNA, 25 bp, Homo sapien
tgccctcataactcactttcatatt

SEQ ID NO: 1889285 - DNA, 25 bp, Homo sapien
cactgattgtgctgctccttttcaa

SEQ ID NO: 1889286 - DNA, 25 bp, Homo sapien
cagtatttcttttagaattctcaca

SEQ ID NO: 1889287 - DNA, 25 bp, Homo sapien
cttttagaattctcacacttttgcc

SEQ ID NO: 1889288 - DNA, 25 bp, Homo sapien
acagttatcagtttggcacacagca

SEQ ID NO: 1889289 - DNA, 25 bp, Homo sapien
tatttacaggaccaaaactgcacat

SEQ ID NO: 1889290 - DNA, 25 bp, Homo sapien
cagttatcagtttggcacacagcat

SEQ ID NO: 1889291 - DNA, 25 bp, Homo sapien
caggaccaaaactgcacatttgctc

SEQ ID NO: 1889292 - DNA, 25 bp, Homo sapien
aatagtttgaactcatcatgctagc

SEQ ID NO: 1889293 - DNA, 25 bp, Homo sapien
tacttaggtcagatattcctgccag

SEQ ID NO: 1889294 - DNA, 25 bp, Homo sapien
acaattgctagatgtgttttaatga

SEQ ID NO: 1889295 - DNA, 25 bp, Homo sapien
taatgaatagtttgaactcatcatg

SEQ ID NO: 1889296 - DNA, 25 bp, Homo sapien
gcttatgtttatcattatgcttcca

SEQ ID NO: 1889297 - DNA, 25 bp, Homo sapien
cttacagagagcgatttgttcatga

SEQ ID NO: 1889298 - DNA, 25 bp, Homo sapien
gttcatgagatgacccagtgctgca

SEQ ID NO: 1889299 - DNA, 25 bp, Homo sapien
cagtgctgcaagtcgcttatgttta

SEQ ID NO: 1889300 - DNA, 25 bp, Homo sapien
gtgtcactatgttggctcagctgat

SEQ ID NO: 1889301 - DNA, 25 bp, Homo sapien
tgtcactatgttggctcagctgatt

SEQ ID NO: 1889302 - DNA, 25 bp, Homo sapien
taaactgttcatgaataggcgtact

SEQ ID NO: 1889303 - DNA, 25 bp, Homo sapien
gcttatcagccccttcagtggtgtt

SEQ ID NO: 1889304 - DNA, 25 bp, Homo sapien
tatgggtagtaaatctagctcactg

SEQ ID NO: 1889305 - DNA, 25 bp, Homo sapien
gaagttactagcactgacacactga

SEQ ID NO: 1889306 - DNA, 25 bp, Homo sapien
ataaagagccaaggtagtgatggtg

SEQ ID NO: 1889307 - DNA, 25 bp, Homo sapien
ttttaaagtaatattcagatgtggt

SEQ ID NO: 1889308 - DNA, 25 bp, Homo sapien
tcccttccgtggaccagccgtaata

SEQ ID NO: 1889309 - DNA, 25 bp, Homo sapien
gccacgtgcctcgttgctattttta

SEQ ID NO: 1889310 - DNA, 25 bp, Homo sapien
taagcctgtccattacaaaactgcc

SEQ ID NO: 1889311 - DNA, 25 bp, Homo sapien
tccgtgagatggacagcctaagcct

SEQ ID NO: 1889312 - DNA, 25 bp, Homo sapien
aactgccaagttttagctgtagctg

SEQ ID NO: 1889313 - DNA, 25 bp, Homo sapien
gctgtagctgtagtgtttgtcgtga

SEQ ID NO: 1889314 - DNA, 25 bp, Homo sapien
ggtctggcagcacatcttagatgct

SEQ ID NO: 1889315 - DNA, 25 bp, Homo sapien
ctctgtaggtctggcagcacatctt

SEQ ID NO: 1889316 - DNA, 25 bp, Homo sapien
ttcttcttctggtttaggagcaatc

SEQ ID NO: 1889317 - DNA, 25 bp, Homo sapien
tggcagcacatcttagatgctttat

SEQ ID NO: 1889318 - DNA, 25 bp, Homo sapien
ccattgtaacgtcggaatggtacgc

SEQ ID NO: 1889319 - DNA, 25 bp, Homo sapien
ctgggcacacctgccaactccacca

SEQ ID NO: 1889320 - DNA, 25 bp, Homo sapien
tgtaacgtcggaatggtacgcaccg

SEQ ID NO: 1889321 - DNA, 25 bp, Homo sapien
tccaccattgtaacgtcggaatggt

SEQ ID NO: 1889322 - DNA, 25 bp, Homo sapien
gacatctttcagatattttgtggct

SEQ ID NO: 1889323 - DNA, 25 bp, Homo sapien
tctttcagatattttgtggcttttc

SEQ ID NO: 1889324 - DNA, 25 bp, Homo sapien
cagatattttgtggcttttcatata

SEQ ID NO: 1889325 - DNA, 25 bp, Homo sapien
ttcagatattttgtggcttttcata

SEQ ID NO: 1889326 - DNA, 25 bp, Homo sapien
tcccggtcaagtgtatagggcacca

SEQ ID NO: 1889327 - DNA, 25 bp, Homo sapien
gttctcccggtcaagtgtatagggc

SEQ ID NO: 1889328 - DNA, 25 bp, Homo sapien
tctcccggtcaagtgtatagggcac

SEQ ID NO: 1889329 - DNA, 25 bp, Homo sapien
cccggtcaagtgtatagggcaccat

SEQ ID NO: 1889330 - DNA, 25 bp, Homo sapien
cccttcctctggctgattcaatttt

SEQ ID NO: 1889331 - DNA, 25 bp, Homo sapien
gttataccactgtgttctgcttgcc

SEQ ID NO: 1889332 - DNA, 25 bp, Homo sapien
ctttgtacataatgtgttttcccct

SEQ ID NO: 1889333 - DNA, 25 bp, Homo sapien
cctacttcttgacaaaaagtctgca

SEQ ID NO: 1889334 - DNA, 25 bp, Homo sapien
tctggcttccattatatgttggata

SEQ ID NO: 1889335 - DNA, 25 bp, Homo sapien
catctggcttccattatatgttgga

SEQ ID NO: 1889336 - DNA, 25 bp, Homo sapien
atctggcttccattatatgttggat

SEQ ID NO: 1889337 - DNA, 25 bp, Homo sapien
ttctaatactgcctagaataagtgg

SEQ ID NO: 1889338 - DNA, 25 bp, Homo sapien
aaccctgagaaaggctctgcttata

SEQ ID NO: 1889339 - DNA, 25 bp, Homo sapien
agaaaggctctgcttatatttcttc

SEQ ID NO: 1889340 - DNA, 25 bp, Homo sapien
cctagaataagtggttcttcactct

SEQ ID NO: 1889341 - DNA, 25 bp, Homo sapien
gctcccagatttctgtctattgttg

SEQ ID NO: 1889342 - DNA, 25 bp, Homo sapien
gctggttgccacttaatccccggta

SEQ ID NO: 1889343 - DNA, 25 bp, Homo sapien
tatcttacaaaggtgtaaagcatgt

SEQ ID NO: 1889344 - DNA, 25 bp, Homo sapien
catgtgtagcactcctttccgcttc

SEQ ID NO: 1889345 - DNA, 25 bp, Homo sapien
gaccctgctgagtgtgtgagctctg

SEQ ID NO: 1889346 - DNA, 25 bp, Homo sapien
tctgcaaatcctgaccctgctgagt

SEQ ID NO: 1889347 - DNA, 25 bp, Homo sapien
tcctgtctgtttgggtgagtcactg

SEQ ID NO: 1889348 - DNA, 25 bp, Homo sapien
gcagtgtgtccaggctaaattggca

SEQ ID NO: 1889349 - DNA, 25 bp, Homo sapien
tcaagtagaatccagaatgttggac

SEQ ID NO: 1889350 - DNA, 25 bp, Homo sapien
tgtctatagttctgccggaggcctc

SEQ ID NO: 1889351 - DNA, 25 bp, Homo sapien
tgtgggaatcaaatcaaggttgtca

SEQ ID NO: 1889352 - DNA, 25 bp, Homo sapien
tctgccatcgcatgaaaaatggagc

SEQ ID NO: 1889353 - DNA, 25 bp, Homo sapien
tcagagtgcttggaatgacacccac

SEQ ID NO: 1889354 - DNA, 25 bp, Homo sapien
ccctcaggggaactgtggttgacat

SEQ ID NO: 1889355 - DNA, 25 bp, Homo sapien
gaactgtggttgacatgagcattac

SEQ ID NO: 1889356 - DNA, 25 bp, Homo sapien
gggaactgtggttgacatgagcatt

SEQ ID NO: 1889357 - DNA, 25 bp, Homo sapien
gtgttaggcttctgatccctcaggg

SEQ ID NO: 1889358 - DNA, 25 bp, Homo sapien
gttcccagtgaacctgtcatcgagt

SEQ ID NO: 1889359 - DNA, 25 bp, Homo sapien
tcgagtggacttgatgccttcattt

SEQ ID NO: 1889360 - DNA, 25 bp, Homo sapien
tcatcgagtggacttgatgccttca

SEQ ID NO: 1889361 - DNA, 25 bp, Homo sapien
gaacctgtcatcgagtggacttgat

SEQ ID NO: 1889362 - DNA, 25 bp, Homo sapien
tgcagacatttcagggtaagcgaag

SEQ ID NO: 1889363 - DNA, 25 bp, Homo sapien
gaaattatgagtgttagaactgagc

SEQ ID NO: 1889364 - DNA, 25 bp, Homo sapien
cttttgtagcaagatgcctaactgg

SEQ ID NO: 1889365 - DNA, 25 bp, Homo sapien
agatgcctaactggttacttatgca

SEQ ID NO: 1889366 - DNA, 25 bp, Homo sapien
cacaaaactaccaccatattgttga

SEQ ID NO: 1889367 - DNA, 25 bp, Homo sapien
actaccaccatattgttgaattttg

SEQ ID NO: 1889368 - DNA, 25 bp, Homo sapien
caaaactaccaccatattgttgaat

SEQ ID NO: 1889369 - DNA, 25 bp, Homo sapien
ccaccatattgttgaattttggaag

SEQ ID NO: 1889370 - DNA, 25 bp, Homo sapien
gaagacgtatctccaggaaagctgc

SEQ ID NO: 1889371 - DNA, 25 bp, Homo sapien
agaagacgtatctccaggaaagctg

SEQ ID NO: 1889372 - DNA, 25 bp, Homo sapien
ggtcctcttcagagttataatttaa

SEQ ID NO: 1889373 - DNA, 25 bp, Homo sapien
caaggctgataccacctaagtaagt

SEQ ID NO: 1889374 - DNA, 25 bp, Homo sapien
tacagagcatcaagcgcttcacaca

SEQ ID NO: 1889375 - DNA, 25 bp, Homo sapien
ccacctaagtaagttcctgatgtaa

SEQ ID NO: 1889376 - DNA, 25 bp, Homo sapien
tgtttctgcactgtttctacactgt

SEQ ID NO: 1889377 - DNA, 25 bp, Homo sapien
ctgtttctgcactgtttctacactg

SEQ ID NO: 1889378 - DNA, 25 bp, Homo sapien
gcactgtttctacactgtaacctat

SEQ ID NO: 1889379 - DNA, 25 bp, Homo sapien
ctgtttctacactgtaacctatcat

SEQ ID NO: 1889380 - DNA, 25 bp, Homo sapien
catcagttaagacagggcagggcct

SEQ ID NO: 1889381 - DNA, 25 bp, Homo sapien
tgggaaagtaatggaaaattagtca

SEQ ID NO: 1889382 - DNA, 25 bp, Homo sapien
gttgttctctgctgggcaggggcag

SEQ ID NO: 1889383 - DNA, 25 bp, Homo sapien
ggaaattcatgggttaatcactcag

SEQ ID NO: 1889384 - DNA, 25 bp, Homo sapien
attttccttagtgttcagcagctcc

SEQ ID NO: 1889385 - DNA, 25 bp, Homo sapien
acttttgttgggtagctgcctatct

SEQ ID NO: 1889386 - DNA, 25 bp, Homo sapien
ttgctacattcatcttgtgtggcct

SEQ ID NO: 1889387 - DNA, 25 bp, Homo sapien
tcattttccttagtgttcagcagct

SEQ ID NO: 1889388 - DNA, 25 bp, Homo sapien
tatctgtgtcatagtaaacaggtgc

SEQ ID NO: 1889389 - DNA, 25 bp, Homo sapien
aatgcttgaaagagactacagtgga

SEQ ID NO: 1889390 - DNA, 25 bp, Homo sapien
cagtggattggactctcatggtgga

SEQ ID NO: 1889391 - DNA, 25 bp, Homo sapien
gatcataagaggcattccattcaaa

SEQ ID NO: 1889392 - DNA, 25 bp, Homo sapien
aacaagtttatattccgtggcccat

SEQ ID NO: 1889393 - DNA, 25 bp, Homo sapien
tttatattccgtggcccatttacca

SEQ ID NO: 1889394 - DNA, 25 bp, Homo sapien
agcaaaacaagtttatattccgtgg

SEQ ID NO: 1889395 - DNA, 25 bp, Homo sapien
caagtttatattccgtggcccattt

SEQ ID NO: 1889396 - DNA, 25 bp, Homo sapien
aagataatgtcatcaattaaggcag

SEQ ID NO: 1889397 - DNA, 25 bp, Homo sapien
tgtttatttcatgtgggtgcaggtg

SEQ ID NO: 1889398 - DNA, 25 bp, Homo sapien
gggttattctctggcgggcaggtgt

SEQ ID NO: 1889399 - DNA, 25 bp, Homo sapien
gataatgtcatcaattaaggcagga

SEQ ID NO: 1889400 - DNA, 25 bp, Homo sapien
gcatcaatatcaacatcacctgttt

SEQ ID NO: 1889401 - DNA, 25 bp, Homo sapien
catcaatatcaacatcacctgtttc

SEQ ID NO: 1889402 - DNA, 25 bp, Homo sapien
atcaatatcaacatcacctgtttct

SEQ ID NO: 1889403 - DNA, 25 bp, Homo sapien
tcaatatcaacatcacctgtttctc

SEQ ID NO: 1889404 - DNA, 25 bp, Homo sapien
caataatgcctctcttagtattcca

SEQ ID NO: 1889405 - DNA, 25 bp, Homo sapien
tctgttcagaactaagtcatttggt

SEQ ID NO: 1889406 - DNA, 25 bp, Homo sapien
tacccaattcttgccatggtgctcc

SEQ ID NO: 1889407 - DNA, 25 bp, Homo sapien
catttggtgctaagtacccaattct

SEQ ID NO: 1889408 - DNA, 25 bp, Homo sapien
gttgagagccagagaattgggagac

SEQ ID NO: 1889409 - DNA, 25 bp, Homo sapien
ttgagagccagagaattgggagaca

SEQ ID NO: 1889410 - DNA, 25 bp, Homo sapien
ctgtgcaaggcactgcccactagtg

SEQ ID NO: 1889411 - DNA, 25 bp, Homo sapien
cttgccttggttgttggcgttctgc

SEQ ID NO: 1889412 - DNA, 25 bp, Homo sapien
tggggttcttgaacatactgaatcc

SEQ ID NO: 1889413 - DNA, 25 bp, Homo sapien
tcttgccttggttgttggcgttctg

SEQ ID NO: 1889414 - DNA, 25 bp, Homo sapien
ccaaactctctcttcgctctgtaag

SEQ ID NO: 1889415 - DNA, 25 bp, Homo sapien
tttagtctggctcatgcttactggg

SEQ ID NO: 1889416 - DNA, 25 bp, Homo sapien
tttttgttgcagttatgcataactg

SEQ ID NO: 1889417 - DNA, 25 bp, Homo sapien
ctcttcgctctgtaagtgtgtctga

SEQ ID NO: 1889418 - DNA, 25 bp, Homo sapien
taagaaagtctcatagtaacagtgt

SEQ ID NO: 1889419 - DNA, 25 bp, Homo sapien
tgagccatagatgcttcataagaaa

SEQ ID NO: 1889420 - DNA, 25 bp, Homo sapien
agagcccacggacataccgaggatg

SEQ ID NO: 1889421 - DNA, 25 bp, Homo sapien
ccgaggatgactcatatgggttgag

SEQ ID NO: 1889422 - DNA, 25 bp, Homo sapien
gctcagcacctttccacagatctct

SEQ ID NO: 1889423 - DNA, 25 bp, Homo sapien
tcagcacctttccacagatctctct

SEQ ID NO: 1889424 - DNA, 25 bp, Homo sapien
cagcacctttccacagatctctctc

SEQ ID NO: 1889425 - DNA, 25 bp, Homo sapien
aggctcagcacctttccacagatct

SEQ ID NO: 1889426 - DNA, 25 bp, Homo sapien
tgttctggttgagaaatatattgtc

SEQ ID NO: 1889427 - DNA, 25 bp, Homo sapien
ctggttgagaaatatattgtctaac

SEQ ID NO: 1889428 - DNA, 25 bp, Homo sapien
gctgttctggttgagaaatatattg

SEQ ID NO: 1889429 - DNA, 25 bp, Homo sapien
gggctgttctggttgagaaatatat

SEQ ID NO: 1889430 - DNA, 25 bp, Homo sapien
ggagagagacttaatatcctcttct

SEQ ID NO: 1889431 - DNA, 25 bp, Homo sapien
ccacggattcaggacagatttcaaa

SEQ ID NO: 1889432 - DNA, 25 bp, Homo sapien
gcttgggccacggattcaggacaga

SEQ ID NO: 1889433 - DNA, 25 bp, Homo sapien
atctgcttgggccacggattcagga

SEQ ID NO: 1889434 - DNA, 25 bp, Homo sapien
gcccggcccattgaagctcagcagg

SEQ ID NO: 1889435 - DNA, 25 bp, Homo sapien
tgagttcaaaattctcatactcttt

SEQ ID NO: 1889436 - DNA, 25 bp, Homo sapien
acacatatggtgtctgaactggctg

SEQ ID NO: 1889437 - DNA, 25 bp, Homo sapien
caaagaaccagatggataagcagga

SEQ ID NO: 1889438 - DNA, 25 bp, Homo sapien
tactggagcagtaccccagggtgtg

SEQ ID NO: 1889439 - DNA, 25 bp, Homo sapien
caatgcctgagacactctgaacaga

SEQ ID NO: 1889440 - DNA, 25 bp, Homo sapien
gagggaatcctagtgcatgacttca

SEQ ID NO: 1889441 - DNA, 25 bp, Homo sapien
ccagggtgtgtctacattgggccaa

SEQ ID NO: 1889442 - DNA, 25 bp, Homo sapien
caatcttgtgtagttgagcaaccaa

SEQ ID NO: 1889443 - DNA, 25 bp, Homo sapien
ctaagaggatattaagcacaatctt

SEQ ID NO: 1889444 - DNA, 25 bp, Homo sapien
agttgagcaaccaagttaacatggg

SEQ ID NO: 1889445 - DNA, 25 bp, Homo sapien
gaggatattaagcacaatcttgtgt

SEQ ID NO: 1889446 - DNA, 25 bp, Homo sapien
ttcatcttgggttgagtgtgttcca

SEQ ID NO: 1889447 - DNA, 25 bp, Homo sapien
cactacatggccatagtctggaata

SEQ ID NO: 1889448 - DNA, 25 bp, Homo sapien
tagtctggaataacttcatcttggg

SEQ ID NO: 1889449 - DNA, 25 bp, Homo sapien
caatcttctttagcactacatggcc

SEQ ID NO: 1889450 - DNA, 25 bp, Homo sapien
gctagtacatgtagagggcctgtca

SEQ ID NO: 1889451 - DNA, 25 bp, Homo sapien
caatccattcatggctgttgcaaag

SEQ ID NO: 1889452 - DNA, 25 bp, Homo sapien
cacaggtagctttgtgatcagatcc

SEQ ID NO: 1889453 - DNA, 25 bp, Homo sapien
gcagcttggagtcaatgtccccaac

SEQ ID NO: 1889454 - DNA, 25 bp, Homo sapien
cagcatcatgaccacgtgggagggt

SEQ ID NO: 1889455 - DNA, 25 bp, Homo sapien
cagcagctgaaataaaccctccagc

SEQ ID NO: 1889456 - DNA, 25 bp, Homo sapien
tcctctgttgggatctgttcagcca

SEQ ID NO: 1889457 - DNA, 25 bp, Homo sapien
tacccttaggcttgggtggcagctt

SEQ ID NO: 1889458 - DNA, 25 bp, Homo sapien
aatggatgctttcattaggatcaag

SEQ ID NO: 1889459 - DNA, 25 bp, Homo sapien
gaaatggatgctttcattaggatca

SEQ ID NO: 1889460 - DNA, 25 bp, Homo sapien
tcagaaatggatgctttcattagga

SEQ ID NO: 1889461 - DNA, 25 bp, Homo sapien
tggatgctttcattaggatcaagaa

SEQ ID NO: 1889462 - DNA, 25 bp, Homo sapien
tgtttcatataccaatcccttcttg

SEQ ID NO: 1889463 - DNA, 25 bp, Homo sapien
ctgatgtttcatataccaatccctt

SEQ ID NO: 1889464 - DNA, 25 bp, Homo sapien
cttcttgcctctcaggccaccatac

SEQ ID NO: 1889465 - DNA, 25 bp, Homo sapien
tttcatataccaatcccttcttgcc

SEQ ID NO: 1889466 - DNA, 25 bp, Homo sapien
tcatgcccacagtgttttggcccac

SEQ ID NO: 1889467 - DNA, 25 bp, Homo sapien
atcatgcccacagtgttttggccca

SEQ ID NO: 1889468 - DNA, 25 bp, Homo sapien
gccacattgctgtctggagatctta

SEQ ID NO: 1889469 - DNA, 25 bp, Homo sapien
gttcccaagaactgggtgacagtag

SEQ ID NO: 1889470 - DNA, 25 bp, Homo sapien
caagatacgtcctttgttcccaaga

SEQ ID NO: 1889471 - DNA, 25 bp, Homo sapien
gaggtaagctgatatgtcttccaaa

SEQ ID NO: 1889472 - DNA, 25 bp, Homo sapien
gaaatagcagctgttagcaggaccc

SEQ ID NO: 1889473 - DNA, 25 bp, Homo sapien
gggataaaagctcttttgggtagca

SEQ ID NO: 1889474 - DNA, 25 bp, Homo sapien
tcttttgggtagcagctttcagcat

SEQ ID NO: 1889475 - DNA, 25 bp, Homo sapien
ggacccagcacaggttccaagcagg

SEQ ID NO: 1889476 - DNA, 25 bp, Homo sapien
aatagccaagtcctctcagtggcca

SEQ ID NO: 1889477 - DNA, 25 bp, Homo sapien
gctaatagccaagtcctctcagtgg

SEQ ID NO: 1889478 - DNA, 25 bp, Homo sapien
taatagccaagtcctctcagtggcc

SEQ ID NO: 1889479 - DNA, 25 bp, Homo sapien
tcagctaatagccaagtcctctcag

SEQ ID NO: 1889480 - DNA, 25 bp, Homo sapien
ggaggccaccctaagcatgtatttt

SEQ ID NO: 1889481 - DNA, 25 bp, Homo sapien
gtcaaccagggtttttgatatggca

SEQ ID NO: 1889482 - DNA, 25 bp, Homo sapien
tgcgctagttttgttgagtcaacca

SEQ ID NO: 1889483 - DNA, 25 bp, Homo sapien
aattgtttgcattaggttctcatca

SEQ ID NO: 1889484 - DNA, 25 bp, Homo sapien
cttttgatctcactaggaaagtctc

SEQ ID NO: 1889485 - DNA, 25 bp, Homo sapien
ggccagctgcctatacatcacactt

SEQ ID NO: 1889486 - DNA, 25 bp, Homo sapien
cttccttttgatctcactaggaaag

SEQ ID NO: 1889487 - DNA, 25 bp, Homo sapien
gtctctggagaataatcctaatggg

SEQ ID NO: 1889488 - DNA, 25 bp, Homo sapien
actgaagcttaaactaaaccgtgca

SEQ ID NO: 1889489 - DNA, 25 bp, Homo sapien
ggtgggtgaatgatataactgaagc

SEQ ID NO: 1889490 - DNA, 25 bp, Homo sapien
aaaggtgggtgaatgatataactga

SEQ ID NO: 1889491 - DNA, 25 bp, Homo sapien
taaaccgtgcaaactctagcaccat

SEQ ID NO: 1889492 - DNA, 25 bp, Homo sapien
ctgccctggtagtatcagaggactg

SEQ ID NO: 1889493 - DNA, 25 bp, Homo sapien
cctcagctgccctggtagtatcaga

SEQ ID NO: 1889494 - DNA, 25 bp, Homo sapien
gttatgaagttggtcactgagtcag

SEQ ID NO: 1889495 - DNA, 25 bp, Homo sapien
gtttgttatgaagttggtcactgag

SEQ ID NO: 1889496 - DNA, 25 bp, Homo sapien
gtctgctggtgtataacccatagga

SEQ ID NO: 1889497 - DNA, 25 bp, Homo sapien
gctggtgtataacccataggattgg

SEQ ID NO: 1889498 - DNA, 25 bp, Homo sapien
tgtataacccataggattggcgagc

SEQ ID NO: 1889499 - DNA, 25 bp, Homo sapien
tataacccataggattggcgagcat

SEQ ID NO: 1889500 - DNA, 25 bp, Homo sapien
tttctactctcttcacacttttgcc

SEQ ID NO: 1889501 - DNA, 25 bp, Homo sapien
tggttcatcactggccccactattt

SEQ ID NO: 1889502 - DNA, 25 bp, Homo sapien
tctactctcttcacacttttgccca

SEQ ID NO: 1889503 - DNA, 25 bp, Homo sapien
actgcctctttggttcatcactggc

SEQ ID NO: 1889504 - DNA, 25 bp, Homo sapien
caatatgggactcctgacaggtcca

SEQ ID NO: 1889505 - DNA, 25 bp, Homo sapien
tgggactcctgacaggtccagcttt

SEQ ID NO: 1889506 - DNA, 25 bp, Homo sapien
tcaatatgggactcctgacaggtcc

SEQ ID NO: 1889507 - DNA, 25 bp, Homo sapien
gggactcctgacaggtccagctttt

SEQ ID NO: 1889508 - DNA, 25 bp, Homo sapien
gcaagagattttgggatggtcctta

SEQ ID NO: 1889509 - DNA, 25 bp, Homo sapien
aatttgctatttcggcccgcaagag

SEQ ID NO: 1889510 - DNA, 25 bp, Homo sapien
cccgcaagagattttgggatggtcc

SEQ ID NO: 1889511 - DNA, 25 bp, Homo sapien
gggaaatttgctatttcggcccgca

SEQ ID NO: 1889512 - DNA, 25 bp, Homo sapien
cacaaggcagggacttgatgtagtg

SEQ ID NO: 1889513 - DNA, 25 bp, Homo sapien
tatctcatggagtgacacaaggcag

SEQ ID NO: 1889514 - DNA, 25 bp, Homo sapien
gctatgagttgctgtgtcccttcgg

SEQ ID NO: 1889515 - DNA, 25 bp, Homo sapien
gtgatgattgtagtctggcagatgc

SEQ ID NO: 1889516 - DNA, 25 bp, Homo sapien
gaaacgagcttctcacaacacgtga

SEQ ID NO: 1889517 - DNA, 25 bp, Homo sapien
tctcctttctctggcggcatgtgaa

SEQ ID NO: 1889518 - DNA, 25 bp, Homo sapien
tctggaggagaagacttgacacatg

SEQ ID NO: 1889519 - DNA, 25 bp, Homo sapien
tataggctgcttttcttgcactgag

SEQ ID NO: 1889520 - DNA, 25 bp, Homo sapien
gactggctggcttattgtttcatta

SEQ ID NO: 1889521 - DNA, 25 bp, Homo sapien
tcaaatgccactttactgccataga

SEQ ID NO: 1889522 - DNA, 25 bp, Homo sapien
tagaacggattctgaagatgtgaag

SEQ ID NO: 1889523 - DNA, 25 bp, Homo sapien
ttattgggggctaaataaatgccaa

SEQ ID NO: 1889524 - DNA, 25 bp, Homo sapien
tgtgaggattcaacttgtcattaaa

SEQ ID NO: 1889525 - DNA, 25 bp, Homo sapien
agtgtgaggattcaacttgtcatta

SEQ ID NO: 1889526 - DNA, 25 bp, Homo sapien
cagtgtgaggattcaacttgtcatt

SEQ ID NO: 1889527 - DNA, 25 bp, Homo sapien
acttgtcattaaactggggcctgga

SEQ ID NO: 1889528 - DNA, 25 bp, Homo sapien
attccttttctgaaacaatcataga

SEQ ID NO: 1889529 - DNA, 25 bp, Homo sapien
ccttttctgaaacaatcatagaaat

SEQ ID NO: 1889530 - DNA, 25 bp, Homo sapien
ccattccttttctgaaacaatcata

SEQ ID NO: 1889531 - DNA, 25 bp, Homo sapien
ctccattccttttctgaaacaatca

SEQ ID NO: 1889532 - DNA, 25 bp, Homo sapien
gttttgaagacagctgcagctagca

SEQ ID NO: 1889533 - DNA, 25 bp, Homo sapien
ttttgaagacagctgcagctagcat

SEQ ID NO: 1889534 - DNA, 25 bp, Homo sapien
aaaccaaaattatgtctctcaattg

SEQ ID NO: 1889535 - DNA, 25 bp, Homo sapien
tatgtctctcaattgttttgaagac

SEQ ID NO: 1889536 - DNA, 25 bp, Homo sapien
tattccttcaatgctcgctctgcag

SEQ ID NO: 1889537 - DNA, 25 bp, Homo sapien
tccttcaatgctcgctctgcagatg

SEQ ID NO: 1889538 - DNA, 25 bp, Homo sapien
gtttattccttcaatgctcgctctg

SEQ ID NO: 1889539 - DNA, 25 bp, Homo sapien
ttcaatgctcgctctgcagatgaag

SEQ ID NO: 1889540 - DNA, 25 bp, Homo sapien
tctaaatctatgcttgctgctattt

SEQ ID NO: 1889541 - DNA, 25 bp, Homo sapien
ggtcctctaaatctatgcttgctgc

SEQ ID NO: 1889542 - DNA, 25 bp, Homo sapien
tggtatcaggtctaggttttagaat

SEQ ID NO: 1889543 - DNA, 25 bp, Homo sapien
gtatcaggtctaggttttagaataa

SEQ ID NO: 1889544 - DNA, 25 bp, Homo sapien
cttggtatcaggtctaggttttaga

SEQ ID NO: 1889545 - DNA, 25 bp, Homo sapien
ggtatcaggtctaggttttagaata

SEQ ID NO: 1889546 - DNA, 25 bp, Homo sapien
tctgatcattgattctaagcatttt

SEQ ID NO: 1889547 - DNA, 25 bp, Homo sapien
gaggtacaagtctgatcattgattc

SEQ ID NO: 1889548 - DNA, 25 bp, Homo sapien
ctaagaggtacaagtctgatcattg

SEQ ID NO: 1889549 - DNA, 25 bp, Homo sapien
caagtctgatcattgattctaagca

SEQ ID NO: 1889550 - DNA, 25 bp, Homo sapien
gcctccatacaccttacctctaccc

SEQ ID NO: 1889551 - DNA, 25 bp, Homo sapien
ttacctctaccccacctcttgtgct

SEQ ID NO: 1889552 - DNA, 25 bp, Homo sapien
cccaagccactctttcttaatgtgt

SEQ ID NO: 1889553 - DNA, 25 bp, Homo sapien
tgtcagttcccatcacgtgtatgtg

SEQ ID NO: 1889554 - DNA, 25 bp, Homo sapien
caatggctacatggacaaacacttt

SEQ ID NO: 1889555 - DNA, 25 bp, Homo sapien
tacctttgggataacaggccttgcc

SEQ ID NO: 1889556 - DNA, 25 bp, Homo sapien
tagggttcagatgtaattgcttttc

SEQ ID NO: 1889557 - DNA, 25 bp, Homo sapien
cactgggactattagtttaagaata

SEQ ID NO: 1889558 - DNA, 25 bp, Homo sapien
gcgatgatttaaggcatctctagag

SEQ ID NO: 1889559 - DNA, 25 bp, Homo sapien
atgatttaaggcatctctagagttc

SEQ ID NO: 1889560 - DNA, 25 bp, Homo sapien
cttgaatggcgatgatttaaggcat

SEQ ID NO: 1889561 - DNA, 25 bp, Homo sapien
gaatggcgatgatttaaggcatctc

SEQ ID NO: 1889562 - DNA, 25 bp, Homo sapien
cagaggcaaggttccaatgtctaaa

SEQ ID NO: 1889563 - DNA, 25 bp, Homo sapien
ttgcgctatggaatcctgccagcac

SEQ ID NO: 1889564 - DNA, 25 bp, Homo sapien
gggttgcttgcagggaatttttcca

SEQ ID NO: 1889565 - DNA, 25 bp, Homo sapien
tgtccatgaactgttggcttcaaca

SEQ ID NO: 1889566 - DNA, 25 bp, Homo sapien
ttttagaatccatttcagattctgt

SEQ ID NO: 1889567 - DNA, 25 bp, Homo sapien
tctttttagaatccatttcagattc

SEQ ID NO: 1889568 - DNA, 25 bp, Homo sapien
ttagaatccatttcagattctgttg

SEQ ID NO: 1889569 - DNA, 25 bp, Homo sapien
tagaatccatttcagattctgttgt

SEQ ID NO: 1889570 - DNA, 25 bp, Homo sapien
ctggtattctttaacacttcgaaag

SEQ ID NO: 1889571 - DNA, 25 bp, Homo sapien
taaatgagagaccatccctcgctgc

SEQ ID NO: 1889572 - DNA, 25 bp, Homo sapien
tatggatgggtgattgctgtgtatc

SEQ ID NO: 1889573 - DNA, 25 bp, Homo sapien
tgactgccagtgaggataccatgat

SEQ ID NO: 1889574 - DNA, 25 bp, Homo sapien
gctgagccagagtagtcaggatcat

SEQ ID NO: 1889575 - DNA, 25 bp, Homo sapien
tgatgaaagaaagctgagccagagt

SEQ ID NO: 1889576 - DNA, 25 bp, Homo sapien
gcatcatgagcctgatgaaagaaag

SEQ ID NO: 1889577 - DNA, 25 bp, Homo sapien
accagcatcatgagcctgatgaaag

SEQ ID NO: 1889578 - DNA, 25 bp, Homo sapien
aaatcagggagtccacttcaatagc

SEQ ID NO: 1889579 - DNA, 25 bp, Homo sapien
tcaaatcagggagtccacttcaata

SEQ ID NO: 1889580 - DNA, 25 bp, Homo sapien
atcagggagtccacttcaatagcag

SEQ ID NO: 1889581 - DNA, 25 bp, Homo sapien
agggagtccacttcaatagcagcat

SEQ ID NO: 1889582 - DNA, 25 bp, Homo sapien
gatattatggatggtatctcttttg

SEQ ID NO: 1889583 - DNA, 25 bp, Homo sapien
catgaagatattatggatggtatct

SEQ ID NO: 1889584 - DNA, 25 bp, Homo sapien
aagatattatggatggtatctcttt

SEQ ID NO: 1889585 - DNA, 25 bp, Homo sapien
tgaagatattatggatggtatctct

SEQ ID NO: 1889586 - DNA, 25 bp, Homo sapien
ggtgctcatggattcgtcttatcat

SEQ ID NO: 1889587 - DNA, 25 bp, Homo sapien
tgggtgctcatggattcgtcttatc

SEQ ID NO: 1889588 - DNA, 25 bp, Homo sapien
ctgggtgctcatggattcgtcttat

SEQ ID NO: 1889589 - DNA, 25 bp, Homo sapien
gctcatggattcgtcttatcatttt

SEQ ID NO: 1889590 - DNA, 25 bp, Homo sapien
ttgtcaggctttaatctaaaaaaga

SEQ ID NO: 1889591 - DNA, 25 bp, Homo sapien
tatttgtcaggctttaatctaaaaa

SEQ ID NO: 1889592 - DNA, 25 bp, Homo sapien
ctgtagtggtacaatagtgccacag

SEQ ID NO: 1889593 - DNA, 25 bp, Homo sapien
tagtggtacaatagtgccacagatc

SEQ ID NO: 1889594 - DNA, 25 bp, Homo sapien
tcttggctatacacttgagtctcaa

SEQ ID NO: 1889595 - DNA, 25 bp, Homo sapien
tggctatacacttgagtctcaatca

SEQ ID NO: 1889596 - DNA, 25 bp, Homo sapien
ttcctcttggctatacacttgagtc

SEQ ID NO: 1889597 - DNA, 25 bp, Homo sapien
cctcttggctatacacttgagtctc

SEQ ID NO: 1889598 - DNA, 25 bp, Homo sapien
aatgcaaggaaagcattaggctctg

SEQ ID NO: 1889599 - DNA, 25 bp, Homo sapien
aaggaaagcattaggctctgtcctt

SEQ ID NO: 1889600 - DNA, 25 bp, Homo sapien
atgcaaggaaagcattaggctctgt

SEQ ID NO: 1889601 - DNA, 25 bp, Homo sapien
tgtacttactttcgctgttaatatt

SEQ ID NO: 1889602 - DNA, 25 bp, Homo sapien
gaattgtacttactttcgctgttaa

SEQ ID NO: 1889603 - DNA, 25 bp, Homo sapien
tcttgaattgtacttactttcgctg

SEQ ID NO: 1889604 - DNA, 25 bp, Homo sapien
tcagtgtcttgaattgtacttactt

SEQ ID NO: 1889605 - DNA, 25 bp, Homo sapien
gaccaaccatagacctatagaagaa

SEQ ID NO: 1889606 - DNA, 25 bp, Homo sapien
tgggaatacgaccaaccatagacct

SEQ ID NO: 1889607 - DNA, 25 bp, Homo sapien
gcctcttaagtgagttaggctcaca

SEQ ID NO: 1889608 - DNA, 25 bp, Homo sapien
cagtcaggtttatgaatgcttcctt

SEQ ID NO: 1889609 - DNA, 25 bp, Homo sapien
gcatttcatctgatgcattggttct

SEQ ID NO: 1889610 - DNA, 25 bp, Homo sapien
tcaaggcttttaatccagatggtct

SEQ ID NO: 1889611 - DNA, 25 bp, Homo sapien
gatgcattggttcttttcccctcat

SEQ ID NO: 1889612 - DNA, 25 bp, Homo sapien
taatccagatggtctgcatttcatc

SEQ ID NO: 1889613 - DNA, 25 bp, Homo sapien
tgtcccttaggatgataaacactgc

SEQ ID NO: 1889614 - DNA, 25 bp, Homo sapien
tgcaaggagtccatctgagtggcca

SEQ ID NO: 1889615 - DNA, 25 bp, Homo sapien
tgattgggtcctttgcctgttgcaa

SEQ ID NO: 1889616 - DNA, 25 bp, Homo sapien
gacaaagaagcccatctatgcacgg

SEQ ID NO: 1889617 - DNA, 25 bp, Homo sapien
tattctgaatagctacgtgcaaagc

SEQ ID NO: 1889618 - DNA, 25 bp, Homo sapien
ctgtattctgaatagctacgtgcaa

SEQ ID NO: 1889619 - DNA, 25 bp, Homo sapien
cctttgtcttaaggccgccacattt

SEQ ID NO: 1889620 - DNA, 25 bp, Homo sapien
tgaatagctacgtgcaaagcaatct

SEQ ID NO: 1889621 - DNA, 25 bp, Homo sapien
cacacaaccattcttgttcttctat

SEQ ID NO: 1889622 - DNA, 25 bp, Homo sapien
agtgattgaaagcttcggaagtgga

SEQ ID NO: 1889623 - DNA, 25 bp, Homo sapien
gctgtagtggtttgcaagagtgatt

SEQ ID NO: 1889624 - DNA, 25 bp, Homo sapien
tggtttgcaagagtgattgaaagct

SEQ ID NO: 1889625 - DNA, 25 bp, Homo sapien
tgcccagtaaagtacttcagtagga

SEQ ID NO: 1889626 - DNA, 25 bp, Homo sapien
gatgctaccaccaagtccttctttt

SEQ ID NO: 1889627 - DNA, 25 bp, Homo sapien
cctgcccagtaaagtacttcagtag

SEQ ID NO: 1889628 - DNA, 25 bp, Homo sapien
caccctgcccagtaaagtacttcag

SEQ ID NO: 1889629 - DNA, 25 bp, Homo sapien
cactgtccaacatgggctggctggc

SEQ ID NO: 1889630 - DNA, 25 bp, Homo sapien
gagtgtgttgagttaaaagctccat

SEQ ID NO: 1889631 - DNA, 25 bp, Homo sapien
gtctttccacagtcgcttacaagag

SEQ ID NO: 1889632 - DNA, 25 bp, Homo sapien
cactattcgttagagcaataaggag

SEQ ID NO: 1889633 - DNA, 25 bp, Homo sapien
ccacatagcattttggccatctgag

SEQ ID NO: 1889634 - DNA, 25 bp, Homo sapien
gcattttggccatctgagcatttcc

SEQ ID NO: 1889635 - DNA, 25 bp, Homo sapien
gggaaatatgtggtgctctgaatgg

SEQ ID NO: 1889636 - DNA, 25 bp, Homo sapien
ctctgaatggaactccacatagcat

SEQ ID NO: 1889637 - DNA, 25 bp, Homo sapien
tttcttcatagacagtattcttggg

SEQ ID NO: 1889638 - DNA, 25 bp, Homo sapien
agaggaaagacccttgactaataat

SEQ ID NO: 1889639 - DNA, 25 bp, Homo sapien
tcatgtgatagaattatgaggtaag

SEQ ID NO: 1889640 - DNA, 25 bp, Homo sapien
actgcttaatgttgtgggtttcaca

SEQ ID NO: 1889641 - DNA, 25 bp, Homo sapien
tataaggctggcaacttctaagaat

SEQ ID NO: 1889642 - DNA, 25 bp, Homo sapien
ctgatgggtctttataaggctggca

SEQ ID NO: 1889643 - DNA, 25 bp, Homo sapien
ttctaagaataacgctctgggtcat

SEQ ID NO: 1889644 - DNA, 25 bp, Homo sapien
ggctggcaacttctaagaataacgc

SEQ ID NO: 1889645 - DNA, 25 bp, Homo sapien
ttaataaactgttcctccattgatg

SEQ ID NO: 1889646 - DNA, 25 bp, Homo sapien
aataaactgttcctccattgatgtt

SEQ ID NO: 1889647 - DNA, 25 bp, Homo sapien
taataaactgttcctccattgatgt

SEQ ID NO: 1889648 - DNA, 25 bp, Homo sapien
tattaatcacttatctgatttgcgc

SEQ ID NO: 1889649 - DNA, 25 bp, Homo sapien
ctgatttgcgcatttaatcattttc

SEQ ID NO: 1889650 - DNA, 25 bp, Homo sapien
tcacttatctgatttgcgcatttaa

SEQ ID NO: 1889651 - DNA, 25 bp, Homo sapien
tatttgggtattaatcacttatctg

SEQ ID NO: 1889652 - DNA, 25 bp, Homo sapien
gtatagccatacagtgttcttccac

SEQ ID NO: 1889653 - DNA, 25 bp, Homo sapien
gagcatcacccttctcgtccccact

SEQ ID NO: 1889654 - DNA, 25 bp, Homo sapien
tccttgtatagccatacagtgttct

SEQ ID NO: 1889655 - DNA, 25 bp, Homo sapien
ttcttccactcttcactacgagcat

SEQ ID NO: 1889656 - DNA, 25 bp, Homo sapien
ctttctagaactgacatcaacactc

SEQ ID NO: 1889657 - DNA, 25 bp, Homo sapien
taaaatccaaatcattgtaaacata

SEQ ID NO: 1889658 - DNA, 25 bp, Homo sapien
tgtaaacatattccgaacatctgtt

SEQ ID NO: 1889659 - DNA, 25 bp, Homo sapien
ttctagaactgacatcaacactctt

SEQ ID NO: 1889660 - DNA, 25 bp, Homo sapien
tgtcccagacctggcactgagtgtg

SEQ ID NO: 1889661 - DNA, 25 bp, Homo sapien
ggccgctcagctttcatcatttgtt

SEQ ID NO: 1889662 - DNA, 25 bp, Homo sapien
tacgggtacagccattcaccagctt

SEQ ID NO: 1889663 - DNA, 25 bp, Homo sapien
ttgttctggccagcggaatgttccc

SEQ ID NO: 1889664 - DNA, 25 bp, Homo sapien
ctgtgttggagtccgcgacccaagc

SEQ ID NO: 1889665 - DNA, 25 bp, Homo sapien
gttggagtccgcgacccaagcaact

SEQ ID NO: 1889666 - DNA, 25 bp, Homo sapien
aggctgtgttggagtccgcgaccca

SEQ ID NO: 1889667 - DNA, 25 bp, Homo sapien
agtccgcgacccaagcaactgactg

SEQ ID NO: 1889668 - DNA, 25 bp, Homo sapien
gaaacaccacgtgatgctcatttat

SEQ ID NO: 1889669 - DNA, 25 bp, Homo sapien
ccttctatacccttgggctctagaa

SEQ ID NO: 1889670 - DNA, 25 bp, Homo sapien
gctcatttatctgatcgtgctgcat

SEQ ID NO: 1889671 - DNA, 25 bp, Homo sapien
ttctatacccttgggctctagaaac

SEQ ID NO: 1889672 - DNA, 25 bp, Homo sapien
ccttgtgctaactggagcaggctga

SEQ ID NO: 1889673 - DNA, 25 bp, Homo sapien
cacacttgggtccttgtgctaactg

SEQ ID NO: 1889674 - DNA, 25 bp, Homo sapien
agaaggggctgcacacttgggtcct

SEQ ID NO: 1889675 - DNA, 25 bp, Homo sapien
cttgggtccttgtgctaactggagc

SEQ ID NO: 1889676 - DNA, 25 bp, Homo sapien
tgattgagagccacatataagggtg

SEQ ID NO: 1889677 - DNA, 25 bp, Homo sapien
tttggctccaggtggatttgaagaa

SEQ ID NO: 1889678 - DNA, 25 bp, Homo sapien
gagacttctgtgagcccttcagagc

SEQ ID NO: 1889679 - DNA, 25 bp, Homo sapien
aagcttccattgcttggtccctaca

SEQ ID NO: 1889680 - DNA, 25 bp, Homo sapien
caactctggatatctcttttcaccc

SEQ ID NO: 1889681 - DNA, 25 bp, Homo sapien
gctgccaactttttgattcactgta

SEQ ID NO: 1889682 - DNA, 25 bp, Homo sapien
tctgtgccagaaatgatatcgctct

SEQ ID NO: 1889683 - DNA, 25 bp, Homo sapien
ccagaaatgatatcgctctgtttta

SEQ ID NO: 1889684 - DNA, 25 bp, Homo sapien
catccttgaagtataagatgacctg

SEQ ID NO: 1889685 - DNA, 25 bp, Homo sapien
gaagtataagatgacctgtccaact

SEQ ID NO: 1889686 - DNA, 25 bp, Homo sapien
tcatcatcatccttgaagtataaga

SEQ ID NO: 1889687 - DNA, 25 bp, Homo sapien
ccttgaagtataagatgacctgtcc

SEQ ID NO: 1889688 - DNA, 25 bp, Homo sapien
cccaagtttgtaatggctaagagag

SEQ ID NO: 1889689 - DNA, 25 bp, Homo sapien
taggtatatagctcttgaatgggca

SEQ ID NO: 1889690 - DNA, 25 bp, Homo sapien
taggcacctaggctataacccaggg

SEQ ID NO: 1889691 - DNA, 25 bp, Homo sapien
gaagctctatgatgtgtccttaggc

SEQ ID NO: 1889692 - DNA, 25 bp, Homo sapien
catgttgctagctaatgaaggtgca

SEQ ID NO: 1889693 - DNA, 25 bp, Homo sapien
gggccattgtgagtggaagcttttc

SEQ ID NO: 1889694 - DNA, 25 bp, Homo sapien
taaccaccgtcatctttcatgttgc

SEQ ID NO: 1889695 - DNA, 25 bp, Homo sapien
gctaatgaaggtgcacttttatctg

SEQ ID NO: 1889696 - DNA, 25 bp, Homo sapien
cccctcagatttagaacagagtgaa

SEQ ID NO: 1889697 - DNA, 25 bp, Homo sapien
cctcagatttagaacagagtgaatg

SEQ ID NO: 1889698 - DNA, 25 bp, Homo sapien
tgcccctcagatttagaacagagtg

SEQ ID NO: 1889699 - DNA, 25 bp, Homo sapien
ttgcccctcagatttagaacagagt

SEQ ID NO: 1889700 - DNA, 25 bp, Homo sapien
cttcttcatcgctctctctaatcat

SEQ ID NO: 1889701 - DNA, 25 bp, Homo sapien
tcttcttcatcgctctctctaatca

SEQ ID NO: 1889702 - DNA, 25 bp, Homo sapien
tgcatgtcttcttcatcgctctctc

SEQ ID NO: 1889703 - DNA, 25 bp, Homo sapien
ctttctgcatgtcttcttcatcgct

SEQ ID NO: 1889704 - DNA, 25 bp, Homo sapien
agactgctcagtctgaacacagcgg

SEQ ID NO: 1889705 - DNA, 25 bp, Homo sapien
ctgctcagtctgaacacagcggtgc

SEQ ID NO: 1889706 - DNA, 25 bp, Homo sapien
gactgctcagtctgaacacagcggt

SEQ ID NO: 1889707 - DNA, 25 bp, Homo sapien
actgctcagtctgaacacagcggtg

SEQ ID NO: 1889708 - DNA, 25 bp, Homo sapien
ggcatcactgttatcagctgtggtc

SEQ ID NO: 1889709 - DNA, 25 bp, Homo sapien
gcatcactgttatcagctgtggtcc

SEQ ID NO: 1889710 - DNA, 25 bp, Homo sapien
ttcagttttttctcgcaaatacgga

SEQ ID NO: 1889711 - DNA, 25 bp, Homo sapien
gcttaagggatagttggcaaaatca

SEQ ID NO: 1889712 - DNA, 25 bp, Homo sapien
gatagttggcaaaatcaggtgacaa

SEQ ID NO: 1889713 - DNA, 25 bp, Homo sapien
tcagttttttctcgcaaatacggaa

SEQ ID NO: 1889714 - DNA, 25 bp, Homo sapien
gcaggtcaatggtcagaaacagcct

SEQ ID NO: 1889715 - DNA, 25 bp, Homo sapien
ttgggcaggtcaatggtcagaaaca

SEQ ID NO: 1889716 - DNA, 25 bp, Homo sapien
gggcaggtcaatggtcagaaacagc

SEQ ID NO: 1889717 - DNA, 25 bp, Homo sapien
aggtcaatggtcagaaacagcctct

SEQ ID NO: 1889718 - DNA, 25 bp, Homo sapien
tctggtgatctttagcacagctagg

SEQ ID NO: 1889719 - DNA, 25 bp, Homo sapien
gaaatactattcgtctttacaatga

SEQ ID NO: 1889720 - DNA, 25 bp, Homo sapien
taatgctgcgtgaaatgaaccaggc

SEQ ID NO: 1889721 - DNA, 25 bp, Homo sapien
acatagatgagtctagaggacataa

SEQ ID NO: 1889722 - DNA, 25 bp, Homo sapien
gcttacttcatataaatcagatggg

SEQ ID NO: 1889723 - DNA, 25 bp, Homo sapien
ttctctgtagaggtcacaacttaaa

SEQ ID NO: 1889724 - DNA, 25 bp, Homo sapien
cagtcccctcagactttggactctt

SEQ ID NO: 1889725 - DNA, 25 bp, Homo sapien
tagtccaaaatctctcatgtggaga

SEQ ID NO: 1889726 - DNA, 25 bp, Homo sapien
tgaggtgaagtaactcactccatgg

SEQ ID NO: 1889727 - DNA, 25 bp, Homo sapien
caatgaggtgaagtaactcactcca

SEQ ID NO: 1889728 - DNA, 25 bp, Homo sapien
aggtgaagtaactcactccatggaa

SEQ ID NO: 1889729 - DNA, 25 bp, Homo sapien
aatgaggtgaagtaactcactccat

SEQ ID NO: 1889730 - DNA, 25 bp, Homo sapien
aaatatgtggttgtgtgactttctt

SEQ ID NO: 1889731 - DNA, 25 bp, Homo sapien
aaaatatgtggttgtgtgactttct

SEQ ID NO: 1889732 - DNA, 25 bp, Homo sapien
gaaaatatgtggttgtgtgactttc

SEQ ID NO: 1889733 - DNA, 25 bp, Homo sapien
cactccacaagttgtgtttcatggg

SEQ ID NO: 1889734 - DNA, 25 bp, Homo sapien
cacaagttgtgtttcatgggtctct

SEQ ID NO: 1889735 - DNA, 25 bp, Homo sapien
caagttgtgtttcatgggtctcttc

SEQ ID NO: 1889736 - DNA, 25 bp, Homo sapien
ctccacaagttgtgtttcatgggtc

SEQ ID NO: 1889737 - DNA, 25 bp, Homo sapien
tattatcccactggtttccattctg

SEQ ID NO: 1889738 - DNA, 25 bp, Homo sapien
atcccactggtttccattctgtcca

SEQ ID NO: 1889739 - DNA, 25 bp, Homo sapien
tgctattatcccactggtttccatt

SEQ ID NO: 1889740 - DNA, 25 bp, Homo sapien
cgctccttatcttctaagctttcct

SEQ ID NO: 1889741 - DNA, 25 bp, Homo sapien
aatcttatgcctagaaattgcatgc

SEQ ID NO: 1889742 - DNA, 25 bp, Homo sapien
gcttgaatattaaaacttggacaga

SEQ ID NO: 1889743 - DNA, 25 bp, Homo sapien
tattcaactgccaccaattagggac

SEQ ID NO: 1889744 - DNA, 25 bp, Homo sapien
tactgttggatttacacgtttcaaa

SEQ ID NO: 1889745 - DNA, 25 bp, Homo sapien
gagattactagcatggctgtgggtt

SEQ ID NO: 1889746 - DNA, 25 bp, Homo sapien
caatgttctggcacatattttgaga

SEQ ID NO: 1889747 - DNA, 25 bp, Homo sapien
aatatatttacggtctttgcagtca

SEQ ID NO: 1889748 - DNA, 25 bp, Homo sapien
cagaatggacaagcttaaagtaacc

SEQ ID NO: 1889749 - DNA, 25 bp, Homo sapien
tctttgacttggacttaaaatgtag

SEQ ID NO: 1889750 - DNA, 25 bp, Homo sapien
tagttcactaaaacctaagacttga

SEQ ID NO: 1889751 - DNA, 25 bp, Homo sapien
taaagcaacgaacatcatttaatat

SEQ ID NO: 1889752 - DNA, 25 bp, Homo sapien
acgggtttatctctttgtccactca

SEQ ID NO: 1889753 - DNA, 25 bp, Homo sapien
tatatgccctatgtgggaagccaca

SEQ ID NO: 1889754 - DNA, 25 bp, Homo sapien
gaatcatttatgacaaccttgcaag

SEQ ID NO: 1889755 - DNA, 25 bp, Homo sapien
aatacctgacgcttcagcctatgag

SEQ ID NO: 1889756 - DNA, 25 bp, Homo sapien
gaagccacactatctgtcttacgca

SEQ ID NO: 1889757 - DNA, 25 bp, Homo sapien
ggatgaattaaggtagctgtcatac

SEQ ID NO: 1889758 - DNA, 25 bp, Homo sapien
ttccaaaacgtccttccatgaaatg

SEQ ID NO: 1889759 - DNA, 25 bp, Homo sapien
tagtgtgcactcaaatctttctgag

SEQ ID NO: 1889760 - DNA, 25 bp, Homo sapien
tacctttctatgtaggtctggatct

SEQ ID NO: 1889761 - DNA, 25 bp, Homo sapien
gcctctcttgataaggatcacagca

SEQ ID NO: 1889762 - DNA, 25 bp, Homo sapien
tgagtccttcgaactttaaaacagc

SEQ ID NO: 1889763 - DNA, 25 bp, Homo sapien
aatgaatgtgtactcatttgagtcc

SEQ ID NO: 1889764 - DNA, 25 bp, Homo sapien
tccacgaaatagacaagttttatcc

SEQ ID NO: 1889765 - DNA, 25 bp, Homo sapien
ggtaatgctattacactgtccttac

SEQ ID NO: 1889766 - DNA, 25 bp, Homo sapien
tatccataaacaatctctggtaatg

SEQ ID NO: 1889767 - DNA, 25 bp, Homo sapien
ccttacatcccatggttttgtcttc

SEQ ID NO: 1889768 - DNA, 25 bp, Homo sapien
ccataaacaatctctggtaatgcta

SEQ ID NO: 1889769 - DNA, 25 bp, Homo sapien
ccacagccaacttctcccagaggta

SEQ ID NO: 1889770 - DNA, 25 bp, Homo sapien
gaccagacggatccacagccaactt

SEQ ID NO: 1889771 - DNA, 25 bp, Homo sapien
agacggatccacagccaacttctcc

SEQ ID NO: 1889772 - DNA, 25 bp, Homo sapien
aggaccagacggatccacagccaac

SEQ ID NO: 1889773 - DNA, 25 bp, Homo sapien
ttatgttgtctgcaacctgggacag

SEQ ID NO: 1889774 - DNA, 25 bp, Homo sapien
ccagtactatggtgagtatgaccca

SEQ ID NO: 1889775 - DNA, 25 bp, Homo sapien
aagtcaggtggtaggttgcctccaa

SEQ ID NO: 1889776 - DNA, 25 bp, Homo sapien
gtgggtgtatagacatgctactgac

SEQ ID NO: 1889777 - DNA, 25 bp, Homo sapien
gagaattcatcttttggcagcgcaa

SEQ ID NO: 1889778 - DNA, 25 bp, Homo sapien
gagactgagaattcatcttttggca

SEQ ID NO: 1889779 - DNA, 25 bp, Homo sapien
ctgctaatcccattctctggagact

SEQ ID NO: 1889780 - DNA, 25 bp, Homo sapien
ttcttcatactgctaatcccattct

SEQ ID NO: 1889781 - DNA, 25 bp, Homo sapien
gttgtagttctccaatacccttgag

SEQ ID NO: 1889782 - DNA, 25 bp, Homo sapien
gtgtgagctcaaggctctgcagatg

SEQ ID NO: 1889783 - DNA, 25 bp, Homo sapien
catgtgagcaggttttttatcatcc

SEQ ID NO: 1889784 - DNA, 25 bp, Homo sapien
tctctaggagccaagcaaggcagag

SEQ ID NO: 1889785 - DNA, 25 bp, Homo sapien
tccagaaagcttatgccacctgtgc

SEQ ID NO: 1889786 - DNA, 25 bp, Homo sapien
aagcttatgccacctgtgcaatgca

SEQ ID NO: 1889787 - DNA, 25 bp, Homo sapien
tggctgagcactatgcgtgtctatg

SEQ ID NO: 1889788 - DNA, 25 bp, Homo sapien
ttcttagtaacgtctgctggctgag

SEQ ID NO: 1889789 - DNA, 25 bp, Homo sapien
ttcatttgacctttttccacaggca

SEQ ID NO: 1889790 - DNA, 25 bp, Homo sapien
tcatttgacctttttccacaggcat

SEQ ID NO: 1889791 - DNA, 25 bp, Homo sapien
cttcatttgacctttttccacaggc

SEQ ID NO: 1889792 - DNA, 25 bp, Homo sapien
tagaccgtgacattcctaaggacat

SEQ ID NO: 1889793 - DNA, 25 bp, Homo sapien
agtcctcagcgcctacatatggttg

SEQ ID NO: 1889794 - DNA, 25 bp, Homo sapien
ggtatttttgacctttgagtcctca

SEQ ID NO: 1889795 - DNA, 25 bp, Homo sapien
taattgaatggccagctgtcagacg

SEQ ID NO: 1889796 - DNA, 25 bp, Homo sapien
catctgctctatcagccttaaagta

SEQ ID NO: 1889797 - DNA, 25 bp, Homo sapien
tatttttgtccttaggtatgctagc

SEQ ID NO: 1889798 - DNA, 25 bp, Homo sapien
caagcttttctaatgaggcttttat

SEQ ID NO: 1889799 - DNA, 25 bp, Homo sapien
cagaatatttggctagatgttagac

SEQ ID NO: 1889800 - DNA, 25 bp, Homo sapien
gaattatgccatagagatgactgag

SEQ ID NO: 1889801 - DNA, 25 bp, Homo sapien
gccaatcagaagcaaagtgggctag

SEQ ID NO: 1889802 - DNA, 25 bp, Homo sapien
tggcccagcttgatcaggaattatg

SEQ ID NO: 1889803 - DNA, 25 bp, Homo sapien
cattcccgggtgctattattctctg

SEQ ID NO: 1889804 - DNA, 25 bp, Homo sapien
taggatggttggtcacacagctgtg

SEQ ID NO: 1889805 - DNA, 25 bp, Homo sapien
tcaatactgagaagccaaacaactg

SEQ ID NO: 1889806 - DNA, 25 bp, Homo sapien
tagaatagcatgtgcatagaaccca

SEQ ID NO: 1889807 - DNA, 25 bp, Homo sapien
cccggagctaaggtgctatgtttca

SEQ ID NO: 1889808 - DNA, 25 bp, Homo sapien
ggtgaaactacttcaactctgggtc

SEQ ID NO: 1889809 - DNA, 25 bp, Homo sapien
gaacatgctcttgtactgggcataa

SEQ ID NO: 1889810 - DNA, 25 bp, Homo sapien
aacaagagttaactgctagagcagc

SEQ ID NO: 1889811 - DNA, 25 bp, Homo sapien
tatatgacgtcagtaagctccctcc

SEQ ID NO: 1889812 - DNA, 25 bp, Homo sapien
aagaagtctcccctgctcgtaaaca

SEQ ID NO: 1889813 - DNA, 25 bp, Homo sapien
tgtcaagtcaaaagagagccactgt

SEQ ID NO: 1889814 - DNA, 25 bp, Homo sapien
gacccacggaaatgagatgccagaa

SEQ ID NO: 1889815 - DNA, 25 bp, Homo sapien
caatacaaggaggagcagctaaggt

SEQ ID NO: 1889816 - DNA, 25 bp, Homo sapien
ccaagtagatacttagaagaaacct

SEQ ID NO: 1889817 - DNA, 25 bp, Homo sapien
cctgtattacttgttaagggaatca

SEQ ID NO: 1889818 - DNA, 25 bp, Homo sapien
gatgaggggatcattaacatggtga

SEQ ID NO: 1889819 - DNA, 25 bp, Homo sapien
cataatggggatgagccaagtagat

SEQ ID NO: 1889820 - DNA, 25 bp, Homo sapien
tatgtcagaaaaccttactatatgg

SEQ ID NO: 1889821 - DNA, 25 bp, Homo sapien
tgatatttcataccatgaagagttg

SEQ ID NO: 1889822 - DNA, 25 bp, Homo sapien
gaagagttgcctaacagcagcataa

SEQ ID NO: 1889823 - DNA, 25 bp, Homo sapien
tatgttggtcaacaaaagagtagta

SEQ ID NO: 1889824 - DNA, 25 bp, Homo sapien
tcacatcatcaagaaaggcctccag

SEQ ID NO: 1889825 - DNA, 25 bp, Homo sapien
taattcacatcatcaagaaaggcct

SEQ ID NO: 1889826 - DNA, 25 bp, Homo sapien
catcatcaagaaaggcctccagcag

SEQ ID NO: 1889827 - DNA, 25 bp, Homo sapien
ctaattcacatcatcaagaaaggcc

SEQ ID NO: 1889828 - DNA, 25 bp, Homo sapien
gaaagaatgatagacggtaatggta

SEQ ID NO: 1889829 - DNA, 25 bp, Homo sapien
gacggtaatggtagcatgagtagta

SEQ ID NO: 1889830 - DNA, 25 bp, Homo sapien
taatggtagcatgagtagtatagag

SEQ ID NO: 1889831 - DNA, 25 bp, Homo sapien
tgatagacggtaatggtagcatgag

SEQ ID NO: 1889832 - DNA, 25 bp, Homo sapien
atctgcagcatgaagagccagctct

SEQ ID NO: 1889833 - DNA, 25 bp, Homo sapien
tttctaagtccaaatcctgcttcag

SEQ ID NO: 1889834 - DNA, 25 bp, Homo sapien
gcagcatgaagagccagctctgagc

SEQ ID NO: 1889835 - DNA, 25 bp, Homo sapien
gagctctgagccagcttttctaagt

SEQ ID NO: 1889836 - DNA, 25 bp, Homo sapien
tccctgggttactggaagccactcc

SEQ ID NO: 1889837 - DNA, 25 bp, Homo sapien
cacccaggaaggatattcagcaccc

SEQ ID NO: 1889838 - DNA, 25 bp, Homo sapien
aatgcccttgcagtgtagtttagac

SEQ ID NO: 1889839 - DNA, 25 bp, Homo sapien
caagtgttggcagctaagagttcac

SEQ ID NO: 1889840 - DNA, 25 bp, Homo sapien
caattaatttagttaccatgatggt

SEQ ID NO: 1889841 - DNA, 25 bp, Homo sapien
aacaattaatttagttaccatgatg

SEQ ID NO: 1889842 - DNA, 25 bp, Homo sapien
taaacaattaatttagttaccatga

SEQ ID NO: 1889843 - DNA, 25 bp, Homo sapien
attaatttagttaccatgatggttc

SEQ ID NO: 1889844 - DNA, 25 bp, Homo sapien
cagaaaagtgttcatcataattgta

SEQ ID NO: 1889845 - DNA, 25 bp, Homo sapien
tgttcatcataattgtacacagagt

SEQ ID NO: 1889846 - DNA, 25 bp, Homo sapien
aagtgttcatcataattgtacacag

SEQ ID NO: 1889847 - DNA, 25 bp, Homo sapien
tcatcataattgtacacagagttaa

SEQ ID NO: 1889848 - DNA, 25 bp, Homo sapien
aatcccttgagtcaattatttctgt

SEQ ID NO: 1889849 - DNA, 25 bp, Homo sapien
ctgatccagacccaagaaagggttc

SEQ ID NO: 1889850 - DNA, 25 bp, Homo sapien
gcatgtattcttcggcttctgctca

SEQ ID NO: 1889851 - DNA, 25 bp, Homo sapien
cataggagatactgttcccggaaag

SEQ ID NO: 1889852 - DNA, 25 bp, Homo sapien
agattcatccatgatgctgtgagaa

SEQ ID NO: 1889853 - DNA, 25 bp, Homo sapien
aatgggatagaacggatggtaccga

SEQ ID NO: 1889854 - DNA, 25 bp, Homo sapien
gaacggatggtaccgagggaatcaa

SEQ ID NO: 1889855 - DNA, 25 bp, Homo sapien
aaaggattcaaggagcatgatcttc

SEQ ID NO: 1889856 - DNA, 25 bp, Homo sapien
gggaatcaaaggtcttgcacaagaa

SEQ ID NO: 1889857 - DNA, 25 bp, Homo sapien
tgatgagcaatcacatggaccagaa

SEQ ID NO: 1889858 - DNA, 25 bp, Homo sapien
ccagtgagtcggtccattggtccca

SEQ ID NO: 1889859 - DNA, 25 bp, Homo sapien
cagagctcagccaagattagcaggc

SEQ ID NO: 1889860 - DNA, 25 bp, Homo sapien
cagaatggttgtctaagcagctcca

SEQ ID NO: 1889861 - DNA, 25 bp, Homo sapien
tctactgcccaaataacaatgtact

SEQ ID NO: 1889862 - DNA, 25 bp, Homo sapien
tcacactggagtttgctctcctaaa

SEQ ID NO: 1889863 - DNA, 25 bp, Homo sapien
gctctcctaaaatctgacatactac

SEQ ID NO: 1889864 - DNA, 25 bp, Homo sapien
ctacaggtcatcacacaaataaagt

SEQ ID NO: 1889865 - DNA, 25 bp, Homo sapien
cagagccaatggcatcctggtacat

SEQ ID NO: 1889866 - DNA, 25 bp, Homo sapien
ttggtgcttgcatctcaccatcaga

SEQ ID NO: 1889867 - DNA, 25 bp, Homo sapien
tggcatcctggtacattgtaggcac

SEQ ID NO: 1889868 - DNA, 25 bp, Homo sapien
accatcagaacgccagctccatgag

SEQ ID NO: 1889869 - DNA, 25 bp, Homo sapien
cccactttggcaggggaccacctga

SEQ ID NO: 1889870 - DNA, 25 bp, Homo sapien
tttggcaggggaccacctgaggaaa

SEQ ID NO: 1889871 - DNA, 25 bp, Homo sapien
ccagctgacttccccactttggcag

SEQ ID NO: 1889872 - DNA, 25 bp, Homo sapien
actttggcaggggaccacctgagga

SEQ ID NO: 1889873 - DNA, 25 bp, Homo sapien
cattgcttcaggctcggctttccag

SEQ ID NO: 1889874 - DNA, 25 bp, Homo sapien
ctcaacatcctgtgatgtgattgta

SEQ ID NO: 1889875 - DNA, 25 bp, Homo sapien
aaactattagaatcataatcattgc

SEQ ID NO: 1889876 - DNA, 25 bp, Homo sapien
tccagaggattcaggctaagtgaca

SEQ ID NO: 1889877 - DNA, 25 bp, Homo sapien
tacagcctactagagccatgagtct

SEQ ID NO: 1889878 - DNA, 25 bp, Homo sapien
gagtctctactgatatcggaaaaca

SEQ ID NO: 1889879 - DNA, 25 bp, Homo sapien
gacttctggtcacttaacactgcta

SEQ ID NO: 1889880 - DNA, 25 bp, Homo sapien
ctaactgagccagtcagagatgggc

SEQ ID NO: 1889881 - DNA, 25 bp, Homo sapien
tcacaatctgttccctctagcactg

SEQ ID NO: 1889882 - DNA, 25 bp, Homo sapien
caaatattggatgctgtaaacaaaa

SEQ ID NO: 1889883 - DNA, 25 bp, Homo sapien
gcctgtgacgcagcctatagtcaaa

SEQ ID NO: 1889884 - DNA, 25 bp, Homo sapien
ggctttgcagcaagtctcgttaact

SEQ ID NO: 1889885 - DNA, 25 bp, Homo sapien
actttgaaacaactaagcaggcgga

SEQ ID NO: 1889886 - DNA, 25 bp, Homo sapien
tactactgttcatttggagcaagcc

SEQ ID NO: 1889887 - DNA, 25 bp, Homo sapien
tttaggccgcacatccacaaagaga

SEQ ID NO: 1889888 - DNA, 25 bp, Homo sapien
gatgcacaaaaggtagtccagacgg

SEQ ID NO: 1889889 - DNA, 25 bp, Homo sapien
tgctggcacgtgaatactggctgaa

SEQ ID NO: 1889890 - DNA, 25 bp, Homo sapien
taaagttggcatctgctacataggg

SEQ ID NO: 1889891 - DNA, 25 bp, Homo sapien
gacattttggtcagctaacacccgg

SEQ ID NO: 1889892 - DNA, 25 bp, Homo sapien
taattgcagggtagccaagtggagt

SEQ ID NO: 1889893 - DNA, 25 bp, Homo sapien
caaataggactccagttttctctgc

SEQ ID NO: 1889894 - DNA, 25 bp, Homo sapien
tcatacttgcggtcttccaatccca

SEQ ID NO: 1889895 - DNA, 25 bp, Homo sapien
cacaaagtggttctgcaaataggac

SEQ ID NO: 1889896 - DNA, 25 bp, Homo sapien
ggttctgcaaataggactccagttt

SEQ ID NO: 1889897 - DNA, 25 bp, Homo sapien
caccaagaggttgcagtacttaagc

SEQ ID NO: 1889898 - DNA, 25 bp, Homo sapien
tgaattcaaactgcctccggaggga

SEQ ID NO: 1889899 - DNA, 25 bp, Homo sapien
ggatataagactccatcggtcagag

SEQ ID NO: 1889900 - DNA, 25 bp, Homo sapien
cttgatttcatcagaggcgggccta

SEQ ID NO: 1889901 - DNA, 25 bp, Homo sapien
tacaggcttaaacggtcttctgaaa

SEQ ID NO: 1889902 - DNA, 25 bp, Homo sapien
cacagtagtaagaggttttgttgtc

SEQ ID NO: 1889903 - DNA, 25 bp, Homo sapien
tcagccaaacactacctacaggctt

SEQ ID NO: 1889904 - DNA, 25 bp, Homo sapien
aatagtttgaggcttttggcagacg

SEQ ID NO: 1889905 - DNA, 25 bp, Homo sapien
aggcagtccagcacgacgtccttca

SEQ ID NO: 1889906 - DNA, 25 bp, Homo sapien
cctcgggtaagaagtccaacaggca

SEQ ID NO: 1889907 - DNA, 25 bp, Homo sapien
ttccccgcgcaggtcggcgcagaag

SEQ ID NO: 1889908 - DNA, 25 bp, Homo sapien
tcggcgcagaagatgaggtccaggt

SEQ ID NO: 1889909 - DNA, 25 bp, Homo sapien
gctgccgagccgttgaggcgcacgt

SEQ ID NO: 1889910 - DNA, 25 bp, Homo sapien
ttgaggcgcacgtcgcggacgccaa

SEQ ID NO: 1889911 - DNA, 25 bp, Homo sapien
gcaggacatggctggctgccgagcc

SEQ ID NO: 1889912 - DNA, 25 bp, Homo sapien
gcacgtcgcggacgccaatgcgctt

SEQ ID NO: 1889913 - DNA, 25 bp, Homo sapien
tcggaatggtctcgctcaggatgcc

SEQ ID NO: 1889914 - DNA, 25 bp, Homo sapien
tcagcacattgcagtgcgccgtagg

SEQ ID NO: 1889915 - DNA, 25 bp, Homo sapien
gccgcgcccgtgaatcggaatggtc

SEQ ID NO: 1889916 - DNA, 25 bp, Homo sapien
aggatgccgtccagccgctgcactt

SEQ ID NO: 1889917 - DNA, 25 bp, Homo sapien
gcaatagtccaagcaatgcccaccg

SEQ ID NO: 1889918 - DNA, 25 bp, Homo sapien
ctttcgcaatagtccaagcaatgcc

SEQ ID NO: 1889919 - DNA, 25 bp, Homo sapien
atgcccaccgaagctgccgccaccg

SEQ ID NO: 1889920 - DNA, 25 bp, Homo sapien
tcgcaatagtccaagcaatgcccac

SEQ ID NO: 1889921 - DNA, 25 bp, Homo sapien
ccagctcgtcctcagacatggcgaa

SEQ ID NO: 1889922 - DNA, 25 bp, Homo sapien
cagctcgtcctcagacatggcgaag

SEQ ID NO: 1889923 - DNA, 25 bp, Homo sapien
cgaagtcgccgcctagggggatgta

SEQ ID NO: 1889924 - DNA, 25 bp, Homo sapien
ctcgtcctcagacatggcgaagtac

SEQ ID NO: 1889925 - DNA, 25 bp, Homo sapien
tagtgcccgccgagcgccacttggc

SEQ ID NO: 1889926 - DNA, 25 bp, Homo sapien
gcccgccgagcgccacttggccctg

SEQ ID NO: 1889927 - DNA, 25 bp, Homo sapien
gtagtgcccgccgagcgccacttgg

SEQ ID NO: 1889928 - DNA, 25 bp, Homo sapien
cgccgagcgccacttggccctggtc

SEQ ID NO: 1889929 - DNA, 25 bp, Homo sapien
cgcgccccgcagagcagccccgcac

SEQ ID NO: 1889930 - DNA, 25 bp, Homo sapien
gcaagcgagagtcccgtctgtgtca

SEQ ID NO: 1889931 - DNA, 25 bp, Homo sapien
gaaagcgcaagcgagagtcccgtct

SEQ ID NO: 1889932 - DNA, 25 bp, Homo sapien
gcgcaagcgagagtcccgtctgtgt

SEQ ID NO: 1889933 - DNA, 25 bp, Homo sapien
ctggaaagcgcaagcgagagtcccg

SEQ ID NO: 1889934 - DNA, 25 bp, Homo sapien
ctcagacagcaaatagcgacttcgt

SEQ ID NO: 1889935 - DNA, 25 bp, Homo sapien
taggagcgcagcgagcgagagcgaa

SEQ ID NO: 1889936 - DNA, 25 bp, Homo sapien
agagcgaaaccgagaggcggcaaca

SEQ ID NO: 1889937 - DNA, 25 bp, Homo sapien
tccaggagctgcgagcgcgctcaga

SEQ ID NO: 1889938 - DNA, 25 bp, Homo sapien
ctccccgcgacccctcctgcgccgc

SEQ ID NO: 1889939 - DNA, 25 bp, Homo sapien
cctccccgcgacccctcctgcgccg

SEQ ID NO: 1889940 - DNA, 25 bp, Homo sapien
cgctcgtgtctctggagctttagca

SEQ ID NO: 1889941 - DNA, 25 bp, Homo sapien
tttataccgggcttctctgcgcttc

SEQ ID NO: 1889942 - DNA, 25 bp, Homo sapien
cccagctgcggtggtcccgaactgg

SEQ ID NO: 1889943 - DNA, 25 bp, Homo sapien
aactggcggctcttgctgccacaca

SEQ ID NO: 1889944 - DNA, 25 bp, Homo sapien
ccaccactctttgctagaaagctgt

SEQ ID NO: 1889945 - DNA, 25 bp, Homo sapien
tccatcaactaacccggagcagctt

SEQ ID NO: 1889946 - DNA, 25 bp, Homo sapien
tggccgtctcttcggcagctcgctg

SEQ ID NO: 1889947 - DNA, 25 bp, Homo sapien
gcagctttcccagcgcctagacgct

SEQ ID NO: 1889948 - DNA, 25 bp, Homo sapien
tgaggggtagggtgcgggggtgtca

SEQ ID NO: 1889949 - DNA, 25 bp, Homo sapien
tgccgagctgcgtcccaaaatggag

SEQ ID NO: 1889950 - DNA, 25 bp, Homo sapien
ggacaactaccctgtccgcataggg

SEQ ID NO: 1889951 - DNA, 25 bp, Homo sapien
tagggccatcgcttccttcagagca

SEQ ID NO: 1889952 - DNA, 25 bp, Homo sapien
tggagcatccagctgcgtgacaacg

SEQ ID NO: 1889953 - DNA, 25 bp, Homo sapien
gatcaaattacccagaggctttaca

SEQ ID NO: 1889954 - DNA, 25 bp, Homo sapien
taaaataactctagaccaagtgcag

SEQ ID NO: 1889955 - DNA, 25 bp, Homo sapien
gatcggtcattattttcagtcacgc

SEQ ID NO: 1889956 - DNA, 25 bp, Homo sapien
aattaccctttgcatattggatcgg

SEQ ID NO: 1889957 - DNA, 25 bp, Homo sapien
tctagaaagccccagggtaccatgg

SEQ ID NO: 1889958 - DNA, 25 bp, Homo sapien
tgaccttgcactgttcccattgtag

SEQ ID NO: 1889959 - DNA, 25 bp, Homo sapien
gacaggtgtgcagggtatctctaga

SEQ ID NO: 1889960 - DNA, 25 bp, Homo sapien
tcatggctccgcaacaagtgtcagg

SEQ ID NO: 1889961 - DNA, 25 bp, Homo sapien
gctgctgactctactgtaaagccat

SEQ ID NO: 1889962 - DNA, 25 bp, Homo sapien
ctgagtagttgtgctgctgactcta

SEQ ID NO: 1889963 - DNA, 25 bp, Homo sapien
ctaaagacaggggagcgttgtaatc

SEQ ID NO: 1889964 - DNA, 25 bp, Homo sapien
caggggagcgttgtaatcttcaatc

SEQ ID NO: 1889965 - DNA, 25 bp, Homo sapien
tgcaatccaggtgtcgttcggtgtt

SEQ ID NO: 1889966 - DNA, 25 bp, Homo sapien
atccaggtgtcgttcggtgttttat

SEQ ID NO: 1889967 - DNA, 25 bp, Homo sapien
caatccaggtgtcgttcggtgtttt

SEQ ID NO: 1889968 - DNA, 25 bp, Homo sapien
tccaggtgtcgttcggtgttttatc

SEQ ID NO: 1889969 - DNA, 25 bp, Homo sapien
tcccagagcccaatggcaacacaat

SEQ ID NO: 1889970 - DNA, 25 bp, Homo sapien
ccaatggcaacacaatgaaagtggc

SEQ ID NO: 1889971 - DNA, 25 bp, Homo sapien
cacaatgaaagtggccgtggcaaca

SEQ ID NO: 1889972 - DNA, 25 bp, Homo sapien
aagtggccgtggcaacatgacagcc

SEQ ID NO: 1889973 - DNA, 25 bp, Homo sapien
gaggaaaatggtgcagacattcatc

SEQ ID NO: 1889974 - DNA, 25 bp, Homo sapien
tgtacataggcatagttgtaagagg

SEQ ID NO: 1889975 - DNA, 25 bp, Homo sapien
tgacaagccaccctctgagacctta

SEQ ID NO: 1889976 - DNA, 25 bp, Homo sapien
gcagacattcatcttgacaagccac

SEQ ID NO: 1889977 - DNA, 25 bp, Homo sapien
caaggtggacatgatctatgattag

SEQ ID NO: 1889978 - DNA, 25 bp, Homo sapien
ggtggacatgatctatgattagaag

SEQ ID NO: 1889979 - DNA, 25 bp, Homo sapien
gccaaggtggacatgatctatgatt

SEQ ID NO: 1889980 - DNA, 25 bp, Homo sapien
gccctgaacttgccaaggtggacat

SEQ ID NO: 1889981 - DNA, 25 bp, Homo sapien
taatcctggttcgaagaagcactgt

SEQ ID NO: 1889982 - DNA, 25 bp, Homo sapien
taaatcaataatcctggttcgaaga

SEQ ID NO: 1889983 - DNA, 25 bp, Homo sapien
tcaataatcctggttcgaagaagca

SEQ ID NO: 1889984 - DNA, 25 bp, Homo sapien
gcatctaaatcaataatcctggttc

SEQ ID NO: 1889985 - DNA, 25 bp, Homo sapien
gatgaacctcacaatggggcccaca

SEQ ID NO: 1889986 - DNA, 25 bp, Homo sapien
cagtaacctggtgactccaaggcca

SEQ ID NO: 1889987 - DNA, 25 bp, Homo sapien
gggactttttcacagcagtaacctg

SEQ ID NO: 1889988 - DNA, 25 bp, Homo sapien
ttgtggccaggatgaaaagtcaacc

SEQ ID NO: 1889989 - DNA, 25 bp, Homo sapien
actctggggctagttgggttagatt

SEQ ID NO: 1889990 - DNA, 25 bp, Homo sapien
gtggactctggggctagttgggtta

SEQ ID NO: 1889991 - DNA, 25 bp, Homo sapien
ggactctggggctagttgggttaga

SEQ ID NO: 1889992 - DNA, 25 bp, Homo sapien
ccagtggactctggggctagttggg

SEQ ID NO: 1889993 - DNA, 25 bp, Homo sapien
ttggcctgcctgtagatcagagaga

SEQ ID NO: 1889994 - DNA, 25 bp, Homo sapien
cctgtagatcagagagaatagcttt

SEQ ID NO: 1889995 - DNA, 25 bp, Homo sapien
gatcagagagaatagctttgggaac

SEQ ID NO: 1889996 - DNA, 25 bp, Homo sapien
gcctgcctgtagatcagagagaata

SEQ ID NO: 1889997 - DNA, 25 bp, Homo sapien
gaagcttttcctacgacttggccca

SEQ ID NO: 1889998 - DNA, 25 bp, Homo sapien
aagcttttcctacgacttggcccat

SEQ ID NO: 1889999 - DNA, 25 bp, Homo sapien
tgaagcttttcctacgacttggccc

SEQ ID NO: 1890000 - DNA, 25 bp, Homo sapien
gagtaagggtctcatatacatcctc

SEQ ID NO: 1890001 - DNA, 25 bp, Homo sapien
gacttaaaagtccagtgtgatcagc

SEQ ID NO: 1890002 - DNA, 25 bp, Homo sapien
ggaccttcctgtggtgaacttctca

SEQ ID NO: 1890003 - DNA, 25 bp, Homo sapien
tcctctggagtgcttgcaatggtgt

SEQ ID NO: 1890004 - DNA, 25 bp, Homo sapien
tggagactcaaaaaccaactacaac

SEQ ID NO: 1890005 - DNA, 25 bp, Homo sapien
caactacaacacagaaattggtgca

SEQ ID NO: 1890006 - DNA, 25 bp, Homo sapien
tgggcactgagggtgttccataaag

SEQ ID NO: 1890007 - DNA, 25 bp, Homo sapien
accaaggacaagagacccctgggca

SEQ ID NO: 1890008 - DNA, 25 bp, Homo sapien
tgaccccacaaagcacactggagct

SEQ ID NO: 1890009 - DNA, 25 bp, Homo sapien
gagctgaccaagttgcacccaagga

SEQ ID NO: 1890010 - DNA, 25 bp, Homo sapien
gcctctaggagttccatgaaccaca

SEQ ID NO: 1890011 - DNA, 25 bp, Homo sapien
tgacttcagctcagaaacatgaccc

SEQ ID NO: 1890012 - DNA, 25 bp, Homo sapien
tcaaggccctggaaagtctgaacca

SEQ ID NO: 1890013 - DNA, 25 bp, Homo sapien
ggcttacgaaagttgtgcatcacag

SEQ ID NO: 1890014 - DNA, 25 bp, Homo sapien
catctattacaaacactggagcaga

SEQ ID NO: 1890015 - DNA, 25 bp, Homo sapien
gagtatttgagtcctctgagtcctc

SEQ ID NO: 1890016 - DNA, 25 bp, Homo sapien
ggattggtagcaccctaggccagaa

SEQ ID NO: 1890017 - DNA, 25 bp, Homo sapien
tcagcacagtgctcctccatcagtg

SEQ ID NO: 1890018 - DNA, 25 bp, Homo sapien
ggtcagactcatggagaaacagcag

SEQ ID NO: 1890019 - DNA, 25 bp, Homo sapien
tggagttttccctgacatgtctgga

SEQ ID NO: 1890020 - DNA, 25 bp, Homo sapien
tgtagtgatcagagcttgtctgaac

SEQ ID NO: 1890021 - DNA, 25 bp, Homo sapien
ctttgcgctacccacaggaagttga

SEQ ID NO: 1890022 - DNA, 25 bp, Homo sapien
tggtttatttctagctggtatgcaa

SEQ ID NO: 1890023 - DNA, 25 bp, Homo sapien
cagcttccccataggttatcttgac

SEQ ID NO: 1890024 - DNA, 25 bp, Homo sapien
caaggagggagacttcgtatcacca

SEQ ID NO: 1890025 - DNA, 25 bp, Homo sapien
ttgtccaagggtcgtgaaccagcaa

SEQ ID NO: 1890026 - DNA, 25 bp, Homo sapien
ttcgtatcaccacagatggtaaggg

SEQ ID NO: 1890027 - DNA, 25 bp, Homo sapien
aagtgtccactgagcggccaggaaa

SEQ ID NO: 1890028 - DNA, 25 bp, Homo sapien
tcagtgcttccaatgatagatgcca

SEQ ID NO: 1890029 - DNA, 25 bp, Homo sapien
ctttctcattggcttgcacctttgc

SEQ ID NO: 1890030 - DNA, 25 bp, Homo sapien
tacacccacaacagacactgtattc

SEQ ID NO: 1890031 - DNA, 25 bp, Homo sapien
tttcttcaacccagtactcaaagtc

SEQ ID NO: 1890032 - DNA, 25 bp, Homo sapien
caaagtcaccaccaatagtcagttg

SEQ ID NO: 1890033 - DNA, 25 bp, Homo sapien
ttttctctgtgctctcattctgcat

SEQ ID NO: 1890034 - DNA, 25 bp, Homo sapien
agttttctctgtgctctcattctgc

SEQ ID NO: 1890035 - DNA, 25 bp, Homo sapien
ctagttttctctgtgctctcattct

SEQ ID NO: 1890036 - DNA, 25 bp, Homo sapien
ctgagagctttgctagttttctctg

SEQ ID NO: 1890037 - DNA, 25 bp, Homo sapien
tttcagcagcttcaaatcatatggc

SEQ ID NO: 1890038 - DNA, 25 bp, Homo sapien
gcaggaaggtgcagaattgttccat

SEQ ID NO: 1890039 - DNA, 25 bp, Homo sapien
gaattgttccatccacttcctggta

SEQ ID NO: 1890040 - DNA, 25 bp, Homo sapien
ttcaaatcatatggccagtgctcac

SEQ ID NO: 1890041 - DNA, 25 bp, Homo sapien
ataagatcattcacttgtatgtctt

SEQ ID NO: 1890042 - DNA, 25 bp, Homo sapien
tataaggccactataaagtcttcta

SEQ ID NO: 1890043 - DNA, 25 bp, Homo sapien
tcaaaacctattaatcctacttcta

SEQ ID NO: 1890044 - DNA, 25 bp, Homo sapien
cactttttggttgagtactataagg

SEQ ID NO: 1890045 - DNA, 25 bp, Homo sapien
tagagagctggaaattccagtagtc

SEQ ID NO: 1890046 - DNA, 25 bp, Homo sapien
ctagagagctggaaattccagtagt

SEQ ID NO: 1890047 - DNA, 25 bp, Homo sapien
cattctaactagtactgaggcagac

SEQ ID NO: 1890048 - DNA, 25 bp, Homo sapien
tgagttacccactgggagacatggg

SEQ ID NO: 1890049 - DNA, 25 bp, Homo sapien
gacggcaggccttatattcataaac

SEQ ID NO: 1890050 - DNA, 25 bp, Homo sapien
tgcaaaggctgctggttcatcagag

SEQ ID NO: 1890051 - DNA, 25 bp, Homo sapien
tggggcactccatgctagaaggaaa

SEQ ID NO: 1890052 - DNA, 25 bp, Homo sapien
ttgaaaggcaagaagctcattagtg

SEQ ID NO: 1890053 - DNA, 25 bp, Homo sapien
gctcattagtggcttctgtggagaa

SEQ ID NO: 1890054 - DNA, 25 bp, Homo sapien
aaagctgccagttaacagcaggaac

SEQ ID NO: 1890055 - DNA, 25 bp, Homo sapien
tttaattgctggtgttgtgtagtta

SEQ ID NO: 1890056 - DNA, 25 bp, Homo sapien
gtgtagttatttttgaggaacagcc

SEQ ID NO: 1890057 - DNA, 25 bp, Homo sapien
ccattatttatctcctttgatttgc

SEQ ID NO: 1890058 - DNA, 25 bp, Homo sapien
tatttatctcctttgatttgccaaa

SEQ ID NO: 1890059 - DNA, 25 bp, Homo sapien
tcttcatttccagaacctctggaca

SEQ ID NO: 1890060 - DNA, 25 bp, Homo sapien
cttcatttccagaacctctggacat

SEQ ID NO: 1890061 - DNA, 25 bp, Homo sapien
tttcttcatttccagaacctctgga

SEQ ID NO: 1890062 - DNA, 25 bp, Homo sapien
cttttcttcatttccagaacctctg

SEQ ID NO: 1890063 - DNA, 25 bp, Homo sapien
gtgcttaaacacacaatggacctca

SEQ ID NO: 1890064 - DNA, 25 bp, Homo sapien
catgagccaagagggcattcagggt

SEQ ID NO: 1890065 - DNA, 25 bp, Homo sapien
ggcattcagggtgcttaaacacaca

SEQ ID NO: 1890066 - DNA, 25 bp, Homo sapien
tcagttcccatgagccaagagggca

SEQ ID NO: 1890067 - DNA, 25 bp, Homo sapien
gatgggttggactgaacattctcca

SEQ ID NO: 1890068 - DNA, 25 bp, Homo sapien
tgaacattctccatatggtaaccac

SEQ ID NO: 1890069 - DNA, 25 bp, Homo sapien
tatggtaaccacagggatgaatgag

SEQ ID NO: 1890070 - DNA, 25 bp, Homo sapien
ttaagtagatgggttggactgaaca

SEQ ID NO: 1890071 - DNA, 25 bp, Homo sapien
gaagaattagcatcacaggaagatc

SEQ ID NO: 1890072 - DNA, 25 bp, Homo sapien
gaattattatatggtgccccacaca

SEQ ID NO: 1890073 - DNA, 25 bp, Homo sapien
tcctgaggcctattatgtagactta

SEQ ID NO: 1890074 - DNA, 25 bp, Homo sapien
taatctgcccactgaataatacaag

SEQ ID NO: 1890075 - DNA, 25 bp, Homo sapien
gtctgaggacagttgagcaaaggta

SEQ ID NO: 1890076 - DNA, 25 bp, Homo sapien
aggacagttgagcaaaggtacatgg

SEQ ID NO: 1890077 - DNA, 25 bp, Homo sapien
tgaggacagttgagcaaaggtacat

SEQ ID NO: 1890078 - DNA, 25 bp, Homo sapien
ctggtctgaggacagttgagcaaag

SEQ ID NO: 1890079 - DNA, 25 bp, Homo sapien
ctctgcatcgttctgaagctgagca

SEQ ID NO: 1890080 - DNA, 25 bp, Homo sapien
gctgagcaatcttggcagctttcac

SEQ ID NO: 1890081 - DNA, 25 bp, Homo sapien
tcacagaagctgtcatcatgtgcat

SEQ ID NO: 1890082 - DNA, 25 bp, Homo sapien
ctgagcaatcttggcagctttcaca

SEQ ID NO: 1890083 - DNA, 25 bp, Homo sapien
caactctgtctttcatggttgacat

SEQ ID NO: 1890084 - DNA, 25 bp, Homo sapien
tagctcaggctgagatcaactctgt

SEQ ID NO: 1890085 - DNA, 25 bp, Homo sapien
gtctttcatggttgacatggatgaa

SEQ ID NO: 1890086 - DNA, 25 bp, Homo sapien
ctctagctcaggctgagatcaactc

SEQ ID NO: 1890087 - DNA, 25 bp, Homo sapien
cataggtttagtgccaccattttga

SEQ ID NO: 1890088 - DNA, 25 bp, Homo sapien
ctgtactcagccagatgtccaggca

SEQ ID NO: 1890089 - DNA, 25 bp, Homo sapien
ggtggcttcatcaaaataccatagg

SEQ ID NO: 1890090 - DNA, 25 bp, Homo sapien
tacaagcatgaactactgtactcag

SEQ ID NO: 1890091 - DNA, 25 bp, Homo sapien
tacttatgttctagcctcactgtcc

SEQ ID NO: 1890092 - DNA, 25 bp, Homo sapien
gatgaaaacgacaaccataaaacaa

SEQ ID NO: 1890093 - DNA, 25 bp, Homo sapien
cagttaaaccatggaacttacttca

SEQ ID NO: 1890094 - DNA, 25 bp, Homo sapien
gaatgaatcatccaacaggcgaaca

SEQ ID NO: 1890095 - DNA, 25 bp, Homo sapien
agcagtttcgtttcatcactgtcca

SEQ ID NO: 1890096 - DNA, 25 bp, Homo sapien
aaagcagtttcgtttcatcactgtc

SEQ ID NO: 1890097 - DNA, 25 bp, Homo sapien
ggcaaggtcaaagtcctctaaaagc

SEQ ID NO: 1890098 - DNA, 25 bp, Homo sapien
tggcaaggtcaaagtcctctaaaag

SEQ ID NO: 1890099 - DNA, 25 bp, Homo sapien
tggagagaaggtagttgcttaacac

SEQ ID NO: 1890100 - DNA, 25 bp, Homo sapien
gacagatgttattacagcaataaac

SEQ ID NO: 1890101 - DNA, 25 bp, Homo sapien
gaaggtagttgcttaacacctgaca

SEQ ID NO: 1890102 - DNA, 25 bp, Homo sapien
cctgacagatgttattacagcaata

SEQ ID NO: 1890103 - DNA, 25 bp, Homo sapien
gagtttttgtgtgtcgaatgcctga

SEQ ID NO: 1890104 - DNA, 25 bp, Homo sapien
caatatgaatgccagatctctacaa

SEQ ID NO: 1890105 - DNA, 25 bp, Homo sapien
tacaggtgggcaatatgaatgccag

SEQ ID NO: 1890106 - DNA, 25 bp, Homo sapien
cgaatgcctgagttacaggtgggca

SEQ ID NO: 1890107 - DNA, 25 bp, Homo sapien
tgaaacagctgtcaaccatcgtgaa

SEQ ID NO: 1890108 - DNA, 25 bp, Homo sapien
catggaacccctgataaatatcttc

SEQ ID NO: 1890109 - DNA, 25 bp, Homo sapien
tcccagcatagagcagggcacttca

SEQ ID NO: 1890110 - DNA, 25 bp, Homo sapien
gccagaatatgtttcacagggtgaa

SEQ ID NO: 1890111 - DNA, 25 bp, Homo sapien
tggcctcttcggactgcccagtctt

SEQ ID NO: 1890112 - DNA, 25 bp, Homo sapien
gccctcactgtccctagaggggcag

SEQ ID NO: 1890113 - DNA, 25 bp, Homo sapien
aagggcagtgcttccagcacgacca

SEQ ID NO: 1890114 - DNA, 25 bp, Homo sapien
attctacaagccctacagccctcac

SEQ ID NO: 1890115 - DNA, 25 bp, Homo sapien
caagtcaccaacctggcatggctgt

SEQ ID NO: 1890116 - DNA, 25 bp, Homo sapien
catatgacttctgtccaagcatgga

SEQ ID NO: 1890117 - DNA, 25 bp, Homo sapien
gagggccctcaagctgcccatatga

SEQ ID NO: 1890118 - DNA, 25 bp, Homo sapien
tgcagtcatatctgaacaagtcacc

SEQ ID NO: 1890119 - DNA, 25 bp, Homo sapien
tgcccagagggtgtcagccttctca

SEQ ID NO: 1890120 - DNA, 25 bp, Homo sapien
ttatagtgcccagagggtgtcagcc

SEQ ID NO: 1890121 - DNA, 25 bp, Homo sapien
gcccagagggtgtcagccttctcag

SEQ ID NO: 1890122 - DNA, 25 bp, Homo sapien
gctctctacgtttgcagcttctgct

SEQ ID NO: 1890123 - DNA, 25 bp, Homo sapien
caccgtgtgagctttcttgctgagc

SEQ ID NO: 1890124 - DNA, 25 bp, Homo sapien
cctggtgatcggtggcagcttgctc

SEQ ID NO: 1890125 - DNA, 25 bp, Homo sapien
tgagcaccactaggagccactgaga

SEQ ID NO: 1890126 - DNA, 25 bp, Homo sapien
ttcccttggattcactttgcggagg

SEQ ID NO: 1890127 - DNA, 25 bp, Homo sapien
ttggattcactttgcggagggcaga

SEQ ID NO: 1890128 - DNA, 25 bp, Homo sapien
ccttggattcactttgcggagggca

SEQ ID NO: 1890129 - DNA, 25 bp, Homo sapien
gaggtgtgcttgatatggtgttttc

SEQ ID NO: 1890130 - DNA, 25 bp, Homo sapien
aaaactcttaagggatccacatttg

SEQ ID NO: 1890131 - DNA, 25 bp, Homo sapien
aaactcttaagggatccacatttgc

SEQ ID NO: 1890132 - DNA, 25 bp, Homo sapien
caagagagacatatactttatgaaa

SEQ ID NO: 1890133 - DNA, 25 bp, Homo sapien
cccaagagagacatatactttatga

SEQ ID NO: 1890134 - DNA, 25 bp, Homo sapien
cttctttggaccccaagagagacat

SEQ ID NO: 1890135 - DNA, 25 bp, Homo sapien
ctcttctttggaccccaagagagac

SEQ ID NO: 1890136 - DNA, 25 bp, Homo sapien
ccagtgtgaagatcatgataacaag

SEQ ID NO: 1890137 - DNA, 25 bp, Homo sapien
agatcatgataacaagagattttac

SEQ ID NO: 1890138 - DNA, 25 bp, Homo sapien
caagcagaactaggtcgaccagtgt

SEQ ID NO: 1890139 - DNA, 25 bp, Homo sapien
aactaggtcgaccagtgtgaagatc

SEQ ID NO: 1890140 - DNA, 25 bp, Homo sapien
ctccctttgggaatctctagaattt

SEQ ID NO: 1890141 - DNA, 25 bp, Homo sapien
tctccctttgggaatctctagaatt

SEQ ID NO: 1890142 - DNA, 25 bp, Homo sapien
tgttctggtaaacagagcctgcaag

SEQ ID NO: 1890143 - DNA, 25 bp, Homo sapien
tagaactggtgtttcatcgtgcgcc

SEQ ID NO: 1890144 - DNA, 25 bp, Homo sapien
tcccttgaaggtgtcaggccacgtg

SEQ ID NO: 1890145 - DNA, 25 bp, Homo sapien
tagttcccttcattgctacatggca

SEQ ID NO: 1890146 - DNA, 25 bp, Homo sapien
tcctgggccacatgttttaaacaac

SEQ ID NO: 1890147 - DNA, 25 bp, Homo sapien
cttcaaggtagctttaactggtgcc

SEQ ID NO: 1890148 - DNA, 25 bp, Homo sapien
catgaaccatgggtttgacctaggt

SEQ ID NO: 1890149 - DNA, 25 bp, Homo sapien
gatatgctggctcttcagaaatgca

SEQ ID NO: 1890150 - DNA, 25 bp, Homo sapien
taaatacagcatcaacttaaccata

SEQ ID NO: 1890151 - DNA, 25 bp, Homo sapien
ctttactgcaacatcaatagaacat

SEQ ID NO: 1890152 - DNA, 25 bp, Homo sapien
cactagtgtagcacatcagaaaaaa

SEQ ID NO: 1890153 - DNA, 25 bp, Homo sapien
aacttaaccatatactggccactag

SEQ ID NO: 1890154 - DNA, 25 bp, Homo sapien
aatatggcatttgtgcaggtcaagc

SEQ ID NO: 1890155 - DNA, 25 bp, Homo sapien
caatttatctaggtactgaagcaca

SEQ ID NO: 1890156 - DNA, 25 bp, Homo sapien
taaaatgcatctcaactccacagtg

SEQ ID NO: 1890157 - DNA, 25 bp, Homo sapien
gaattgcttatgtgtctcccaggct

SEQ ID NO: 1890158 - DNA, 25 bp, Homo sapien
aaatcttgtatggcatgctcctcaa

SEQ ID NO: 1890159 - DNA, 25 bp, Homo sapien
taaatcttgtatggcatgctcctca

SEQ ID NO: 1890160 - DNA, 25 bp, Homo sapien
aatcttgtatggcatgctcctcaat

SEQ ID NO: 1890161 - DNA, 25 bp, Homo sapien
gatgcaaaagtgactggggctacca

SEQ ID NO: 1890162 - DNA, 25 bp, Homo sapien
tgaatcagagccaacggtttttctc

SEQ ID NO: 1890163 - DNA, 25 bp, Homo sapien
tttctcgacttctaataagagctgc

SEQ ID NO: 1890164 - DNA, 25 bp, Homo sapien
gacttctaataagagctgcttcttg

SEQ ID NO: 1890165 - DNA, 25 bp, Homo sapien
tttttccagtgacctacgatgagcg

SEQ ID NO: 1890166 - DNA, 25 bp, Homo sapien
ttagcaatgctacaattctttccag

SEQ ID NO: 1890167 - DNA, 25 bp, Homo sapien
caatgaacgaacctggaagctttca

SEQ ID NO: 1890168 - DNA, 25 bp, Homo sapien
gatgagcgaacctggaagctttcgc

SEQ ID NO: 1890169 - DNA, 25 bp, Homo sapien
actcagccttaatgttttcaatgct

SEQ ID NO: 1890170 - DNA, 25 bp, Homo sapien
gtacggagaggatacaagtaataca

SEQ ID NO: 1890171 - DNA, 25 bp, Homo sapien
gcagcaacttagctttggaggccca

SEQ ID NO: 1890172 - DNA, 25 bp, Homo sapien
taactcaaactacagtacggagagg

SEQ ID NO: 1890173 - DNA, 25 bp, Homo sapien
gactgtctagaagtggtaaatctga

SEQ ID NO: 1890174 - DNA, 25 bp, Homo sapien
aaatctgaaatatggttgccttctg

SEQ ID NO: 1890175 - DNA, 25 bp, Homo sapien
tgaaatatggttgccttctggtcct

SEQ ID NO: 1890176 - DNA, 25 bp, Homo sapien
gggactgtctagaagtggtaaatct

SEQ ID NO: 1890177 - DNA, 25 bp, Homo sapien
taaatgagtgcagtcaagcttacct

SEQ ID NO: 1890178 - DNA, 25 bp, Homo sapien
taagaattcacaagctagttgagga

SEQ ID NO: 1890179 - DNA, 25 bp, Homo sapien
tgagcaaaggattacagataggaca

SEQ ID NO: 1890180 - DNA, 25 bp, Homo sapien
tataacaaattgagtcacactggct

SEQ ID NO: 1890181 - DNA, 25 bp, Homo sapien
caaatgtcttctcactcttttacag

SEQ ID NO: 1890182 - DNA, 25 bp, Homo sapien
tcttttacagttggctcaaatgtca

SEQ ID NO: 1890183 - DNA, 25 bp, Homo sapien
tgtcttctcactcttttacagttgg

SEQ ID NO: 1890184 - DNA, 25 bp, Homo sapien
ttctcactcttttacagttggctca

SEQ ID NO: 1890185 - DNA, 25 bp, Homo sapien
taacaccctcaaacaacattgtcat

SEQ ID NO: 1890186 - DNA, 25 bp, Homo sapien
gtggaatttcctgagatgagtcccc

SEQ ID NO: 1890187 - DNA, 25 bp, Homo sapien
taactccccaaaggaccataagcat

SEQ ID NO: 1890188 - DNA, 25 bp, Homo sapien
gtcattcttgccctaaccttggaaa

SEQ ID NO: 1890189 - DNA, 25 bp, Homo sapien
cctgacaacaccagcccatgctcag

SEQ ID NO: 1890190 - DNA, 25 bp, Homo sapien
cttccatattgtatcgtaatttctt

SEQ ID NO: 1890191 - DNA, 25 bp, Homo sapien
agtgcttatgaactgacccagctca

SEQ ID NO: 1890192 - DNA, 25 bp, Homo sapien
tcagaaccactcatttggtacttca

SEQ ID NO: 1890193 - DNA, 25 bp, Homo sapien
tggaatgctctaacagtagactgaa

SEQ ID NO: 1890194 - DNA, 25 bp, Homo sapien
tcaggagggtaactctggtggccca

SEQ ID NO: 1890195 - DNA, 25 bp, Homo sapien
cagactgactcagaggtgatagcac

SEQ ID NO: 1890196 - DNA, 25 bp, Homo sapien
tggcccaggtgaagtatcacaccag

SEQ ID NO: 1890197 - DNA, 25 bp, Homo sapien
gggctaatttgttcaccactgcaac

SEQ ID NO: 1890198 - DNA, 25 bp, Homo sapien
gagataactcttctatgacaaaaca

SEQ ID NO: 1890199 - DNA, 25 bp, Homo sapien
aaagcacaggtattggcctaagata

SEQ ID NO: 1890200 - DNA, 25 bp, Homo sapien
tagcataatgtttgacacaaagctc

SEQ ID NO: 1890201 - DNA, 25 bp, Homo sapien
acttttttgacatgatcgcctgaac

SEQ ID NO: 1890202 - DNA, 25 bp, Homo sapien
atgaaactgaatgcagagaagatgc

SEQ ID NO: 1890203 - DNA, 25 bp, Homo sapien
gaactatggctagtaacagactttt

SEQ ID NO: 1890204 - DNA, 25 bp, Homo sapien
tcttctagtaagaaatcccggaatg

SEQ ID NO: 1890205 - DNA, 25 bp, Homo sapien
gatagatagtcccttcaatgtggca

SEQ ID NO: 1890206 - DNA, 25 bp, Homo sapien
aatcctgaagtcgacatgagcatga

SEQ ID NO: 1890207 - DNA, 25 bp, Homo sapien
taaaaactgatgtcgccgagtggac

SEQ ID NO: 1890208 - DNA, 25 bp, Homo sapien
aatactagcagtcatcaggtgggtg

SEQ ID NO: 1890209 - DNA, 25 bp, Homo sapien
gcttttgaaggagtgaataaaactg

SEQ ID NO: 1890210 - DNA, 25 bp, Homo sapien
aattgttttccttggtagtcaatgc

SEQ ID NO: 1890211 - DNA, 25 bp, Homo sapien
catgcattcactggtttgggggctt

SEQ ID NO: 1890212 - DNA, 25 bp, Homo sapien
actgtttccatgctattcattcctg

SEQ ID NO: 1890213 - DNA, 25 bp, Homo sapien
tcatttttcgttgcttctgagaaag

SEQ ID NO: 1890214 - DNA, 25 bp, Homo sapien
atcatttttcgttgcttctgagaaa

SEQ ID NO: 1890215 - DNA, 25 bp, Homo sapien
gtttcagtggtttcttctgacaaag

SEQ ID NO: 1890216 - DNA, 25 bp, Homo sapien
tagtttcagtggtttcttctgacaa

SEQ ID NO: 1890217 - DNA, 25 bp, Homo sapien
ccaattagtttcagtggtttcttct

SEQ ID NO: 1890218 - DNA, 25 bp, Homo sapien
attagtttcagtggtttcttctgac

SEQ ID NO: 1890219 - DNA, 25 bp, Homo sapien
caagagctggattatcaactcaact

SEQ ID NO: 1890220 - DNA, 25 bp, Homo sapien
gagtcaagtttctgggatgtaatac

SEQ ID NO: 1890221 - DNA, 25 bp, Homo sapien
ggcttttgtagccaatagtccacaa

SEQ ID NO: 1890222 - DNA, 25 bp, Homo sapien
tcaagtaatagctacatatgagccc

SEQ ID NO: 1890223 - DNA, 25 bp, Homo sapien
gtgactttggtgtagctccacattt

SEQ ID NO: 1890224 - DNA, 25 bp, Homo sapien
ttggtgtagctccacatttttgtct

SEQ ID NO: 1890225 - DNA, 25 bp, Homo sapien
actttggtgtagctccacatttttg

SEQ ID NO: 1890226 - DNA, 25 bp, Homo sapien
tgactttggtgtagctccacatttt

SEQ ID NO: 1890227 - DNA, 25 bp, Homo sapien
atagttctgagatccacaacaggag

SEQ ID NO: 1890228 - DNA, 25 bp, Homo sapien
gatagttctgagatccacaacagga

SEQ ID NO: 1890229 - DNA, 25 bp, Homo sapien
ctggcagagctggtagtatcaattc

SEQ ID NO: 1890230 - DNA, 25 bp, Homo sapien
tctgttactgggaataggctgtgga

SEQ ID NO: 1890231 - DNA, 25 bp, Homo sapien
gagctggtagtatcaattctgttac

SEQ ID NO: 1890232 - DNA, 25 bp, Homo sapien
caattctgttactgggaataggctg

SEQ ID NO: 1890233 - DNA, 25 bp, Homo sapien
aggagatgtaccattaacatacggt

SEQ ID NO: 1890234 - DNA, 25 bp, Homo sapien
gatgtaccattaacatacggtttga

SEQ ID NO: 1890235 - DNA, 25 bp, Homo sapien
ctagaatacacaggagatgtaccat

SEQ ID NO: 1890236 - DNA, 25 bp, Homo sapien
tgtaccattaacatacggtttgact

SEQ ID NO: 1890237 - DNA, 25 bp, Homo sapien
aaatcaggggactgtaaatctctag

SEQ ID NO: 1890238 - DNA, 25 bp, Homo sapien
gaattggtcttaccagactttaata

SEQ ID NO: 1890239 - DNA, 25 bp, Homo sapien
gtaaatctctaggactacccactcc

SEQ ID NO: 1890240 - DNA, 25 bp, Homo sapien
acagaattggtcttaccagacttta

SEQ ID NO: 1890241 - DNA, 25 bp, Homo sapien
gaactatctgaacgtttacgtggct

SEQ ID NO: 1890242 - DNA, 25 bp, Homo sapien
tataacctccagaactatctgaacg

SEQ ID NO: 1890243 - DNA, 25 bp, Homo sapien
tatctgaaaggttataacctccaga

SEQ ID NO: 1890244 - DNA, 25 bp, Homo sapien
atgatggactctgaataatatctga

SEQ ID NO: 1890245 - DNA, 25 bp, Homo sapien
atctggtccatcttgatatggtgta

SEQ ID NO: 1890246 - DNA, 25 bp, Homo sapien
aaatagctaatatctggtccatctt

SEQ ID NO: 1890247 - DNA, 25 bp, Homo sapien
ttgatatggtgtaatgactcttcta

SEQ ID NO: 1890248 - DNA, 25 bp, Homo sapien
cttcaaaacaccatcgcttaaaaca

SEQ ID NO: 1890249 - DNA, 25 bp, Homo sapien
acaccatcgcttaaaacatcaagag

SEQ ID NO: 1890250 - DNA, 25 bp, Homo sapien
aaaacaccatcgcttaaaacatcaa

SEQ ID NO: 1890251 - DNA, 25 bp, Homo sapien
tcaaaacaccatcgcttaaaacatc

SEQ ID NO: 1890252 - DNA, 25 bp, Homo sapien
gttaatagtcattactactgaagta

SEQ ID NO: 1890253 - DNA, 25 bp, Homo sapien
ccggcctcaagcaactattataaat

SEQ ID NO: 1890254 - DNA, 25 bp, Homo sapien
gcttttagaacaccgtctagcacat

SEQ ID NO: 1890255 - DNA, 25 bp, Homo sapien
taactaaatgaatctatgtaatgct

SEQ ID NO: 1890256 - DNA, 25 bp, Homo sapien
gcaaattccagtagcatagcagcat

SEQ ID NO: 1890257 - DNA, 25 bp, Homo sapien
gccatattcaatcctataaactgta

SEQ ID NO: 1890258 - DNA, 25 bp, Homo sapien
actgttttgcactatacattgctgc

SEQ ID NO: 1890259 - DNA, 25 bp, Homo sapien
cttgcttcaagtaaagctgccatat

SEQ ID NO: 1890260 - DNA, 25 bp, Homo sapien
gataaaaggcacattaccacagcaa

SEQ ID NO: 1890261 - DNA, 25 bp, Homo sapien
gcaactgcagtcaataatggtctct

SEQ ID NO: 1890262 - DNA, 25 bp, Homo sapien
cagagccatgaaagaacactgagga

SEQ ID NO: 1890263 - DNA, 25 bp, Homo sapien
tgttcacatgggaacaagtatccac

SEQ ID NO: 1890264 - DNA, 25 bp, Homo sapien
aggagtagacagtctacagtgctca

SEQ ID NO: 1890265 - DNA, 25 bp, Homo sapien
gtagacagtctacagtgctcaagaa

SEQ ID NO: 1890266 - DNA, 25 bp, Homo sapien
atcagggctgttgttctctatttaa

SEQ ID NO: 1890267 - DNA, 25 bp, Homo sapien
agacagtctacagtgctcaagaaaa

SEQ ID NO: 1890268 - DNA, 25 bp, Homo sapien
aagtagcagtaaagcagaacagata

SEQ ID NO: 1890269 - DNA, 25 bp, Homo sapien
aagcagaacagatataagattagaa

SEQ ID NO: 1890270 - DNA, 25 bp, Homo sapien
tattctagagtaagcaattataaat

SEQ ID NO: 1890271 - DNA, 25 bp, Homo sapien
tacagtgttcaggaggatagccatg

SEQ ID NO: 1890272 - DNA, 25 bp, Homo sapien
ggaacagataacagtgacctcaact

SEQ ID NO: 1890273 - DNA, 25 bp, Homo sapien
tactgtgacactacccagaaggaac

SEQ ID NO: 1890274 - DNA, 25 bp, Homo sapien
gagtgtcagggccaaaataataaag

SEQ ID NO: 1890275 - DNA, 25 bp, Homo sapien
taaagtcaataaagtacagtaatcc

SEQ ID NO: 1890276 - DNA, 25 bp, Homo sapien
tcacttttaaactctcacccttgaa

SEQ ID NO: 1890277 - DNA, 25 bp, Homo sapien
aatggtctattttaccataagtgga

SEQ ID NO: 1890278 - DNA, 25 bp, Homo sapien
tacatattttggcaggttttcgtgg

SEQ ID NO: 1890279 - DNA, 25 bp, Homo sapien
tgagaagttgatcagccaccacaag

SEQ ID NO: 1890280 - DNA, 25 bp, Homo sapien
caaccgggttatgagaagttgatca

SEQ ID NO: 1890281 - DNA, 25 bp, Homo sapien
gagaagttgatcagccaccacaaga

SEQ ID NO: 1890282 - DNA, 25 bp, Homo sapien
acaaatctctttcaaccgggttatg

SEQ ID NO: 1890283 - DNA, 25 bp, Homo sapien
acaaataaaatctacattttgagat

SEQ ID NO: 1890284 - DNA, 25 bp, Homo sapien
tacaaataaaatctacattttgaga

SEQ ID NO: 1890285 - DNA, 25 bp, Homo sapien
caaataaaatctacattttgagatt

SEQ ID NO: 1890286 - DNA, 25 bp, Homo sapien
ctacaaataaaatctacattttgag

SEQ ID NO: 1890287 - DNA, 25 bp, Homo sapien
agaaaacaagcatcactttttcttt

SEQ ID NO: 1890288 - DNA, 25 bp, Homo sapien
aaagaaaacaagcatcactttttct

SEQ ID NO: 1890289 - DNA, 25 bp, Homo sapien
aaaacaagcatcactttttctttgt

SEQ ID NO: 1890290 - DNA, 25 bp, Homo sapien
cactttttctttgtatacattatac

SEQ ID NO: 1890291 - DNA, 25 bp, Homo sapien
aggcagaccgaccacttaagaccag

SEQ ID NO: 1890292 - DNA, 25 bp, Homo sapien
cttctcaagctaatacaaagaggga

SEQ ID NO: 1890293 - DNA, 25 bp, Homo sapien
aaaatgtcttgatctcacactagga

SEQ ID NO: 1890294 - DNA, 25 bp, Homo sapien
agggaaaagtcaaatctcagcatca

SEQ ID NO: 1890295 - DNA, 25 bp, Homo sapien
gaataaacttggacccatagctcac

SEQ ID NO: 1890296 - DNA, 25 bp, Homo sapien
cttgaaatagcagaacacagtagga

SEQ ID NO: 1890297 - DNA, 25 bp, Homo sapien
tcacaacttacaacaaagcaatggt

SEQ ID NO: 1890298 - DNA, 25 bp, Homo sapien
caatggtaatcaagacactgctgta

SEQ ID NO: 1890299 - DNA, 25 bp, Homo sapien
tccagttttagtatacttgctgccg

SEQ ID NO: 1890300 - DNA, 25 bp, Homo sapien
cattcttgtacaggggccatgtaat

SEQ ID NO: 1890301 - DNA, 25 bp, Homo sapien
tcttgtacaggggccatgtaatctc

SEQ ID NO: 1890302 - DNA, 25 bp, Homo sapien
agttttagtatacttgctgccgaag

SEQ ID NO: 1890303 - DNA, 25 bp, Homo sapien
tctgctcctttactattagcaatca

SEQ ID NO: 1890304 - DNA, 25 bp, Homo sapien
tcctattgcttattctaaattaagc

SEQ ID NO: 1890305 - DNA, 25 bp, Homo sapien
ataaattaagcctttattgatggtt

SEQ ID NO: 1890306 - DNA, 25 bp, Homo sapien
gccgaggtggaataatcccttgagc

SEQ ID NO: 1890307 - DNA, 25 bp, Homo sapien
ccacagcttcatcagtatagaggta

SEQ ID NO: 1890308 - DNA, 25 bp, Homo sapien
caccacagcttcatcagtatagagg

SEQ ID NO: 1890309 - DNA, 25 bp, Homo sapien
cagcttcatcagtatagaggtagtc

SEQ ID NO: 1890310 - DNA, 25 bp, Homo sapien
agcttcatcagtatagaggtagtcc

SEQ ID NO: 1890311 - DNA, 25 bp, Homo sapien
ctactcagcatactatgaaaatatt

SEQ ID NO: 1890312 - DNA, 25 bp, Homo sapien
ccatgagctactcagcatactatga

SEQ ID NO: 1890313 - DNA, 25 bp, Homo sapien
ctcaatccatgagctactcagcata

SEQ ID NO: 1890314 - DNA, 25 bp, Homo sapien
gctactcagcatactatgaaaatat

SEQ ID NO: 1890315 - DNA, 25 bp, Homo sapien
tgatttcatggtcacgtcacacaga

SEQ ID NO: 1890316 - DNA, 25 bp, Homo sapien
catggtcacgtcacacagaaatgaa

SEQ ID NO: 1890317 - DNA, 25 bp, Homo sapien
gatttcatggtcacgtcacacagaa

SEQ ID NO: 1890318 - DNA, 25 bp, Homo sapien
ttcatggtcacgtcacacagaaatg

SEQ ID NO: 1890319 - DNA, 25 bp, Homo sapien
tcatatgtgggtaagcagagatcta

SEQ ID NO: 1890320 - DNA, 25 bp, Homo sapien
aaaagttccactctctattagaaag

SEQ ID NO: 1890321 - DNA, 25 bp, Homo sapien
cacttaagtgccaaaatccagacat

SEQ ID NO: 1890322 - DNA, 25 bp, Homo sapien
tttatcaatttacttcaacagctcc

SEQ ID NO: 1890323 - DNA, 25 bp, Homo sapien
tttattaccagtgttcttggcaata

SEQ ID NO: 1890324 - DNA, 25 bp, Homo sapien
ttattaccagtgttcttggcaataa

SEQ ID NO: 1890325 - DNA, 25 bp, Homo sapien
ctgacttagcttcagtttattacca

SEQ ID NO: 1890326 - DNA, 25 bp, Homo sapien
gtttattaccagtgttcttggcaat

SEQ ID NO: 1890327 - DNA, 25 bp, Homo sapien
aggactgaatgaggtacaggaacag

SEQ ID NO: 1890328 - DNA, 25 bp, Homo sapien
gaggtacaggaacagatataaaaga

SEQ ID NO: 1890329 - DNA, 25 bp, Homo sapien
tttaaaggaggactgaatgaggtac

SEQ ID NO: 1890330 - DNA, 25 bp, Homo sapien
gaatgaggtacaggaacagatataa

SEQ ID NO: 1890331 - DNA, 25 bp, Homo sapien
gggaagagtctattgccaacttgaa

SEQ ID NO: 1890332 - DNA, 25 bp, Homo sapien
aaagagatggcaccctgcagaatct

SEQ ID NO: 1890333 - DNA, 25 bp, Homo sapien
gacttctggttatcatcttcatgga

SEQ ID NO: 1890334 - DNA, 25 bp, Homo sapien
caaacatgtcaggatgaaccttctc

SEQ ID NO: 1890335 - DNA, 25 bp, Homo sapien
taaatttgcaccagcagctactgaa

SEQ ID NO: 1890336 - DNA, 25 bp, Homo sapien
caataaactttgtgagtgcatgtat

SEQ ID NO: 1890337 - DNA, 25 bp, Homo sapien
taaacatgattatgtctaaggtctc

SEQ ID NO: 1890338 - DNA, 25 bp, Homo sapien
agtgattgttccttctaaaaaatga

SEQ ID NO: 1890339 - DNA, 25 bp, Homo sapien
gcaaaggtaagtttctcaagtcgaa

SEQ ID NO: 1890340 - DNA, 25 bp, Homo sapien
cttgttttaggatctgactgcagga

SEQ ID NO: 1890341 - DNA, 25 bp, Homo sapien
tgcaggattgcaaagttgcatccac

SEQ ID NO: 1890342 - DNA, 25 bp, Homo sapien
actatttatatcagagacataagac

SEQ ID NO: 1890343 - DNA, 25 bp, Homo sapien
agacctgacgtggataggcccatcg

SEQ ID NO: 1890344 - DNA, 25 bp, Homo sapien
taggcccatcgacactgcttcagag

SEQ ID NO: 1890345 - DNA, 25 bp, Homo sapien
tctccatcttgcgtaacaaatagaa

SEQ ID NO: 1890346 - DNA, 25 bp, Homo sapien
gaactgttgactgatctccagcaaa

SEQ ID NO: 1890347 - DNA, 25 bp, Homo sapien
aatgttcaggatcaaccttgtattc

SEQ ID NO: 1890348 - DNA, 25 bp, Homo sapien
ccatccattgcaagaatgcaaattt

SEQ ID NO: 1890349 - DNA, 25 bp, Homo sapien
tcaaccttgtattccatatgacccc

SEQ ID NO: 1890350 - DNA, 25 bp, Homo sapien
tatgacccccagacacaagaacttt

SEQ ID NO: 1890351 - DNA, 25 bp, Homo sapien
taaatatctccccttgtggtaacac

SEQ ID NO: 1890352 - DNA, 25 bp, Homo sapien
tgacgaggagcagttacacactttt

SEQ ID NO: 1890353 - DNA, 25 bp, Homo sapien
gacagagcaatgtctttatggtgaa

SEQ ID NO: 1890354 - DNA, 25 bp, Homo sapien
gcactgatagtctgcaagtaagtaa

SEQ ID NO: 1890355 - DNA, 25 bp, Homo sapien
tcccatagtgtaaacagcttctcta

SEQ ID NO: 1890356 - DNA, 25 bp, Homo sapien
tgctgcaacgccaatgattgtcctt

SEQ ID NO: 1890357 - DNA, 25 bp, Homo sapien
tccataggactgtatgaaacctgcc

SEQ ID NO: 1890358 - DNA, 25 bp, Homo sapien
cagttgtccaccatttagtcccata

SEQ ID NO: 1890359 - DNA, 25 bp, Homo sapien
ctgtctgggtacattacaactggaa

SEQ ID NO: 1890360 - DNA, 25 bp, Homo sapien
ttcagttaatacaacagtatgatcc

SEQ ID NO: 1890361 - DNA, 25 bp, Homo sapien
gcggtggaataattcctaattgatg

SEQ ID NO: 1890362 - DNA, 25 bp, Homo sapien
tgaaaaatgtttagaccaaatgtat

SEQ ID NO: 1890363 - DNA, 25 bp, Homo sapien
cgcccggcctagtctgccttcttct

SEQ ID NO: 1890364 - DNA, 25 bp, Homo sapien
agtctgccttcttctatttcaactc

SEQ ID NO: 1890365 - DNA, 25 bp, Homo sapien
cctagtctgccttcttctatttcaa

SEQ ID NO: 1890366 - DNA, 25 bp, Homo sapien
ccggcctagtctgccttcttctatt

SEQ ID NO: 1890367 - DNA, 25 bp, Homo sapien
aaatagtgtaatgacatttcaatta

SEQ ID NO: 1890368 - DNA, 25 bp, Homo sapien
ctaaatagtgtaatgacatttcaat

SEQ ID NO: 1890369 - DNA, 25 bp, Homo sapien
aatagtgtaatgacatttcaattac

SEQ ID NO: 1890370 - DNA, 25 bp, Homo sapien
taaatagtgtaatgacatttcaatt

SEQ ID NO: 1890371 - DNA, 25 bp, Homo sapien
atctccatgtcctaatcgccctcca

SEQ ID NO: 1890372 - DNA, 25 bp, Homo sapien
tccatgtcctaatcgccctccagga

SEQ ID NO: 1890373 - DNA, 25 bp, Homo sapien
tcatctccatgtcctaatcgccctc

SEQ ID NO: 1890374 - DNA, 25 bp, Homo sapien
caggaccatgaccacaggtataaac

SEQ ID NO: 1890375 - DNA, 25 bp, Homo sapien
gacagaaacacggagtgaaatttac

SEQ ID NO: 1890376 - DNA, 25 bp, Homo sapien
gagacagaaacacggagtgaaattt

SEQ ID NO: 1890377 - DNA, 25 bp, Homo sapien
cagaaacacggagtgaaatttacaa

SEQ ID NO: 1890378 - DNA, 25 bp, Homo sapien
ctgagacagaaacacggagtgaaat

SEQ ID NO: 1890379 - DNA, 25 bp, Homo sapien
tcggaattttgtaagcacaatatag

SEQ ID NO: 1890380 - DNA, 25 bp, Homo sapien
cgctcggaattttgtaagcacaata

SEQ ID NO: 1890381 - DNA, 25 bp, Homo sapien
ctagaccgctcggaattttgtaagc

SEQ ID NO: 1890382 - DNA, 25 bp, Homo sapien
gaccgctcggaattttgtaagcaca

SEQ ID NO: 1890383 - DNA, 25 bp, Homo sapien
gggctctctatataactggtactca

SEQ ID NO: 1890384 - DNA, 25 bp, Homo sapien
taagaactgagcatggattttcgct

SEQ ID NO: 1890385 - DNA, 25 bp, Homo sapien
caaccctggcaaatggaatatgctc

SEQ ID NO: 1890386 - DNA, 25 bp, Homo sapien
tacactagttcactcacaaccctgg

SEQ ID NO: 1890387 - DNA, 25 bp, Homo sapien
aaatttgtattatcgccccaagtat

SEQ ID NO: 1890388 - DNA, 25 bp, Homo sapien
tgcttgatataaatcccactcctgg

SEQ ID NO: 1890389 - DNA, 25 bp, Homo sapien
tgctattctggcttccatgacccag

SEQ ID NO: 1890390 - DNA, 25 bp, Homo sapien
gaacagatccaccaactctggatga

SEQ ID NO: 1890391 - DNA, 25 bp, Homo sapien
cacactagtgattagggtaaagccc

SEQ ID NO: 1890392 - DNA, 25 bp, Homo sapien
tgagtaaaacaccaccggccatatc

SEQ ID NO: 1890393 - DNA, 25 bp, Homo sapien
cagactggtcttcacctcacgggct

SEQ ID NO: 1890394 - DNA, 25 bp, Homo sapien
ctgcaatgcagtatccagggtagaa

SEQ ID NO: 1890395 - DNA, 25 bp, Homo sapien
tatccttcattacaagatccaaagc

SEQ ID NO: 1890396 - DNA, 25 bp, Homo sapien
cttgaatatacagactaacaccatg

SEQ ID NO: 1890397 - DNA, 25 bp, Homo sapien
gccttctttatcttgaatatacaga

SEQ ID NO: 1890398 - DNA, 25 bp, Homo sapien
tattcttgaatactacatgagttgg

SEQ ID NO: 1890399 - DNA, 25 bp, Homo sapien
ttacagtagtaagagatagcaaaca

SEQ ID NO: 1890400 - DNA, 25 bp, Homo sapien
taacacaaaattggccaacagttca

SEQ ID NO: 1890401 - DNA, 25 bp, Homo sapien
catattccagactaaatacgtttaa

SEQ ID NO: 1890402 - DNA, 25 bp, Homo sapien
ccaaaaagcatgtaggatgtatgaa

SEQ ID NO: 1890403 - DNA, 25 bp, Homo sapien
atgcttctgtgcaatgctgtccatc

SEQ ID NO: 1890404 - DNA, 25 bp, Homo sapien
cttcaatagagaccaaacacaatca

SEQ ID NO: 1890405 - DNA, 25 bp, Homo sapien
aaacaaggtggagggcattcctgcc

SEQ ID NO: 1890406 - DNA, 25 bp, Homo sapien
cagaaaggacatccaaagcatgctt

SEQ ID NO: 1890407 - DNA, 25 bp, Homo sapien
ccacttacttcagaatcgtgaaaac

SEQ ID NO: 1890408 - DNA, 25 bp, Homo sapien
tattcctggagtcaagcaccaaggg

SEQ ID NO: 1890409 - DNA, 25 bp, Homo sapien
caaaggtgctattgaggaagttaca

SEQ ID NO: 1890410 - DNA, 25 bp, Homo sapien
tgtctgacccttttaaatatccata

SEQ ID NO: 1890411 - DNA, 25 bp, Homo sapien
tacataactatcacaactaggaatg

SEQ ID NO: 1890412 - DNA, 25 bp, Homo sapien
catcgccgggacaggccattcatta

SEQ ID NO: 1890413 - DNA, 25 bp, Homo sapien
caactaggaatgcaatgtcgctgga

SEQ ID NO: 1890414 - DNA, 25 bp, Homo sapien
agcaggacgggagcgtagcgcatcg

SEQ ID NO: 1890415 - DNA, 25 bp, Homo sapien
cgcacggtcgggcagcgccaagccc

SEQ ID NO: 1890416 - DNA, 25 bp, Homo sapien
cacggtcgggcagcgccaagccctc

SEQ ID NO: 1890417 - DNA, 25 bp, Homo sapien
gtcgggcagcgccaagccctccctc

SEQ ID NO: 1890418 - DNA, 25 bp, Homo sapien
cggtcgggcagcgccaagccctccc

SEQ ID NO: 1890419 - DNA, 25 bp, Homo sapien
atgaaactgcgccggtggattccgc

SEQ ID NO: 1890420 - DNA, 25 bp, Homo sapien
aaactgcgccggtggattccgcagg

SEQ ID NO: 1890421 - DNA, 25 bp, Homo sapien
ctagatgaaactgcgccggtggatt

SEQ ID NO: 1890422 - DNA, 25 bp, Homo sapien
cgccggtggattccgcagggtccac

SEQ ID NO: 1890423 - DNA, 25 bp, Homo sapien
aagagaaaccgaacggcgccagagg

SEQ ID NO: 1890424 - DNA, 25 bp, Homo sapien
cccagacccgggtcagttcggcagg

SEQ ID NO: 1890425 - DNA, 25 bp, Homo sapien
catcctcagtgaaggcaataagaga

SEQ ID NO: 1890426 - DNA, 25 bp, Homo sapien
ttcggcaggcggctgcaatacagcc

SEQ ID NO: 1890427 - DNA, 25 bp, Homo sapien
gggctcctgtatgtctcttgatgat

SEQ ID NO: 1890428 - DNA, 25 bp, Homo sapien
tgtctcttgatgattggctggtgcc

SEQ ID NO: 1890429 - DNA, 25 bp, Homo sapien
tcccagtaataaggcgggcgctggt

SEQ ID NO: 1890430 - DNA, 25 bp, Homo sapien
tgcctgcccagaaggtttcgcgtgg

SEQ ID NO: 1890431 - DNA, 25 bp, Homo sapien
gataacatgattgacatcctctatt

SEQ ID NO: 1890432 - DNA, 25 bp, Homo sapien
tcggcttggattaggtgaggaatca

SEQ ID NO: 1890433 - DNA, 25 bp, Homo sapien
taggtgaggaatcaaggataacatg

SEQ ID NO: 1890434 - DNA, 25 bp, Homo sapien
ctgacggactcatgtcggcttggat

SEQ ID NO: 1890435 - DNA, 25 bp, Homo sapien
gcattcattcatatctccagggttg

SEQ ID NO: 1890436 - DNA, 25 bp, Homo sapien
acatgacgggtgttcctgtggacct

SEQ ID NO: 1890437 - DNA, 25 bp, Homo sapien
cacctaaagcattcactgggcatct

SEQ ID NO: 1890438 - DNA, 25 bp, Homo sapien
ctgttatgcgagaggagtaactccc

SEQ ID NO: 1890439 - DNA, 25 bp, Homo sapien
gaaaaggtcaccctgcttttcagac

SEQ ID NO: 1890440 - DNA, 25 bp, Homo sapien
ctctcggcagctgggaatactttgg

SEQ ID NO: 1890441 - DNA, 25 bp, Homo sapien
tcagacagaatttgtgactctcggc

SEQ ID NO: 1890442 - DNA, 25 bp, Homo sapien
tccaaacattggctcctctctgaaa

SEQ ID NO: 1890443 - DNA, 25 bp, Homo sapien
tgtaaatagcctgaagggatttcat

SEQ ID NO: 1890444 - DNA, 25 bp, Homo sapien
cacaaatgtaaatagcctgaaggga

SEQ ID NO: 1890445 - DNA, 25 bp, Homo sapien
gcctgaagggatttcataatcaacc

SEQ ID NO: 1890446 - DNA, 25 bp, Homo sapien
ttctctcccacaaatgtaaatagcc

SEQ ID NO: 1890447 - DNA, 25 bp, Homo sapien
ccctttttctcatttctgtggccat

SEQ ID NO: 1890448 - DNA, 25 bp, Homo sapien
tgaaagtattctgtactttccagcc

SEQ ID NO: 1890449 - DNA, 25 bp, Homo sapien
ttccctttttctcatttctgtggcc

SEQ ID NO: 1890450 - DNA, 25 bp, Homo sapien
aagtattctgtactttccagccatt

SEQ ID NO: 1890451 - DNA, 25 bp, Homo sapien
cacaatccggatacagaacatgact

SEQ ID NO: 1890452 - DNA, 25 bp, Homo sapien
tctataaaagtaatcaggcgtccgt

SEQ ID NO: 1890453 - DNA, 25 bp, Homo sapien
tcacactaaaggcacatgtcccagg

SEQ ID NO: 1890454 - DNA, 25 bp, Homo sapien
gaaccatgttttccctaattgccat

SEQ ID NO: 1890455 - DNA, 25 bp, Homo sapien
gatatgaaatcaatgcggaccccag

SEQ ID NO: 1890456 - DNA, 25 bp, Homo sapien
tgcaaacctcttatgtcttcctggg

SEQ ID NO: 1890457 - DNA, 25 bp, Homo sapien
gctgagttgcaaggtctaccccaca

SEQ ID NO: 1890458 - DNA, 25 bp, Homo sapien
ggctcacctgtgcatatccggaaaa

SEQ ID NO: 1890459 - DNA, 25 bp, Homo sapien
taaactgcatcgagatccaaccgac

SEQ ID NO: 1890460 - DNA, 25 bp, Homo sapien
tggaactcctcaacacgtatggagg

SEQ ID NO: 1890461 - DNA, 25 bp, Homo sapien
taaactgcctgcagacgttagcagg

SEQ ID NO: 1890462 - DNA, 25 bp, Homo sapien
gtctctctctcagtacagttcaagg

SEQ ID NO: 1890463 - DNA, 25 bp, Homo sapien
tgactcaagtggactttcttactgg

SEQ ID NO: 1890464 - DNA, 25 bp, Homo sapien
tagttttggccaatccatgagttga

SEQ ID NO: 1890465 - DNA, 25 bp, Homo sapien
catgagttgagcagcgttccaagcc

SEQ ID NO: 1890466 - DNA, 25 bp, Homo sapien
gcagtgccgtagtctccacgggaga

SEQ ID NO: 1890467 - DNA, 25 bp, Homo sapien
ggattaagtacaaccgtgagtggca

SEQ ID NO: 1890468 - DNA, 25 bp, Homo sapien
tttggattaagtacaaccgtgagtg

SEQ ID NO: 1890469 - DNA, 25 bp, Homo sapien
tgcatgaatttggattaagtacaac

SEQ ID NO: 1890470 - DNA, 25 bp, Homo sapien
gaatttggattaagtacaaccgtga

SEQ ID NO: 1890471 - DNA, 25 bp, Homo sapien
gggctccttcgggtgagtgtgaaca

SEQ ID NO: 1890472 - DNA, 25 bp, Homo sapien
tccttcgggtgagtgtgaacagggc

SEQ ID NO: 1890473 - DNA, 25 bp, Homo sapien
cttcgggtgagtgtgaacagggccc

SEQ ID NO: 1890474 - DNA, 25 bp, Homo sapien
gctccttcgggtgagtgtgaacagg

SEQ ID NO: 1890475 - DNA, 25 bp, Homo sapien
gagagccagatgcaaattagttttt

SEQ ID NO: 1890476 - DNA, 25 bp, Homo sapien
agggtgagagccagatgcaaattag

SEQ ID NO: 1890477 - DNA, 25 bp, Homo sapien
ggtgagagccagatgcaaattagtt

SEQ ID NO: 1890478 - DNA, 25 bp, Homo sapien
ctgagggtgagagccagatgcaaat

SEQ ID NO: 1890479 - DNA, 25 bp, Homo sapien
gctgatttagccacattttgatgtg

SEQ ID NO: 1890480 - DNA, 25 bp, Homo sapien
ttgaacacagctgatttagccacat

SEQ ID NO: 1890481 - DNA, 25 bp, Homo sapien
tgtagctgcaatgggcttccaacac

SEQ ID NO: 1890482 - DNA, 25 bp, Homo sapien
cacagctgatttagccacattttga

SEQ ID NO: 1890483 - DNA, 25 bp, Homo sapien
tcataacaaggtaagagccagaacc

SEQ ID NO: 1890484 - DNA, 25 bp, Homo sapien
ggtaagagccagaacctggaaataa

SEQ ID NO: 1890485 - DNA, 25 bp, Homo sapien
caaggtaagagccagaacctggaaa

SEQ ID NO: 1890486 - DNA, 25 bp, Homo sapien
taacaaggtaagagccagaacctgg

SEQ ID NO: 1890487 - DNA, 25 bp, Homo sapien
tgttggaatgagatccaaggctgcc

SEQ ID NO: 1890488 - DNA, 25 bp, Homo sapien
ccaccacagctgttgttggaatgag

SEQ ID NO: 1890489 - DNA, 25 bp, Homo sapien
caccacagctgttgttggaatgaga

SEQ ID NO: 1890490 - DNA, 25 bp, Homo sapien
gctgaggattctttcatctacgttc

SEQ ID NO: 1890491 - DNA, 25 bp, Homo sapien
tctgcaaaaactgacatagatggct

SEQ ID NO: 1890492 - DNA, 25 bp, Homo sapien
tgccaggaatgaacactacttgatc

SEQ ID NO: 1890493 - DNA, 25 bp, Homo sapien
tgtgtccattttcgtaccaatataa

SEQ ID NO: 1890494 - DNA, 25 bp, Homo sapien
cactggtccaaaagatgccacttgt

SEQ ID NO: 1890495 - DNA, 25 bp, Homo sapien
gcaagtgccagagaatgtcccagac

SEQ ID NO: 1890496 - DNA, 25 bp, Homo sapien
ctatagataactcccaagcagtctg

SEQ ID NO: 1890497 - DNA, 25 bp, Homo sapien
tcactggctgatgttggaggaaatg

SEQ ID NO: 1890498 - DNA, 25 bp, Homo sapien
tctgggatacatgagatctgccaaa

SEQ ID NO: 1890499 - DNA, 25 bp, Homo sapien
aggtgaaagttctaatcacccaggg

SEQ ID NO: 1890500 - DNA, 25 bp, Homo sapien
tgcccctttggcaattcccttcacc

SEQ ID NO: 1890501 - DNA, 25 bp, Homo sapien
gaagtcgagttactctatccagagc

SEQ ID NO: 1890502 - DNA, 25 bp, Homo sapien
gccgaaaataccctggtctgttgcc

SEQ ID NO: 1890503 - DNA, 25 bp, Homo sapien
tgctgatgtgccctcagctggtgcc

SEQ ID NO: 1890504 - DNA, 25 bp, Homo sapien
cagtactgaaaccactgtgactggg

SEQ ID NO: 1890505 - DNA, 25 bp, Homo sapien
gccaggactggactacttgcaagga

SEQ ID NO: 1890506 - DNA, 25 bp, Homo sapien
ttgaaagacaacacgatgttctagg

SEQ ID NO: 1890507 - DNA, 25 bp, Homo sapien
gaaagacaacacgatgttctaggaa

SEQ ID NO: 1890508 - DNA, 25 bp, Homo sapien
gacaacacgatgttctaggaagaac

SEQ ID NO: 1890509 - DNA, 25 bp, Homo sapien
caacacgatgttctaggaagaacac

SEQ ID NO: 1890510 - DNA, 25 bp, Homo sapien
cagcagagcccatgtgtctatttca

SEQ ID NO: 1890511 - DNA, 25 bp, Homo sapien
ctgctgattggcagtccagggcaat

SEQ ID NO: 1890512 - DNA, 25 bp, Homo sapien
gctgattggcagtccagggcaatat

SEQ ID NO: 1890513 - DNA, 25 bp, Homo sapien
gcccatgtgtctatttcaaagactt

SEQ ID NO: 1890514 - DNA, 25 bp, Homo sapien
catttgatcggtctgtttcttattc

SEQ ID NO: 1890515 - DNA, 25 bp, Homo sapien
catgtgcatttgatcggtctgtttc

SEQ ID NO: 1890516 - DNA, 25 bp, Homo sapien
tgccatgtgcatttgatcggtctgt

SEQ ID NO: 1890517 - DNA, 25 bp, Homo sapien
gcatttgatcggtctgtttcttatt

SEQ ID NO: 1890518 - DNA, 25 bp, Homo sapien
gtgaaggtccaggtcactcttcccc

SEQ ID NO: 1890519 - DNA, 25 bp, Homo sapien
agatttagtcgcagtctccagggtt

SEQ ID NO: 1890520 - DNA, 25 bp, Homo sapien
ttttcatctaggcaagcagatttag

SEQ ID NO: 1890521 - DNA, 25 bp, Homo sapien
tctaggcaagcagatttagtcgcag

SEQ ID NO: 1890522 - DNA, 25 bp, Homo sapien
tgcatatctcttcaatgggttcagg

SEQ ID NO: 1890523 - DNA, 25 bp, Homo sapien
tctcttcaatgggttcaggcttttc

SEQ ID NO: 1890524 - DNA, 25 bp, Homo sapien
aatctgaaaggtatgtgtctgacag

SEQ ID NO: 1890525 - DNA, 25 bp, Homo sapien
ctgaaaggtatgtgtctgacaggaa

SEQ ID NO: 1890526 - DNA, 25 bp, Homo sapien
aagtgacaaaagagcattgaacgct

SEQ ID NO: 1890527 - DNA, 25 bp, Homo sapien
ttctggctgccttgatacatcttac

SEQ ID NO: 1890528 - DNA, 25 bp, Homo sapien
caaaagagcattgaacgcttggttc

SEQ ID NO: 1890529 - DNA, 25 bp, Homo sapien
tttctggctgccttgatacatctta

SEQ ID NO: 1890530 - DNA, 25 bp, Homo sapien
gcagcatcttaaagagccaaaccat

SEQ ID NO: 1890531 - DNA, 25 bp, Homo sapien
agcagcatcttaaagagccaaacca

SEQ ID NO: 1890532 - DNA, 25 bp, Homo sapien
caaagaactagcacaccataaaaca

SEQ ID NO: 1890533 - DNA, 25 bp, Homo sapien
tctgtgatttataaccagggtcttc

SEQ ID NO: 1890534 - DNA, 25 bp, Homo sapien
gctgagacctgtgtattagattcat

SEQ ID NO: 1890535 - DNA, 25 bp, Homo sapien
tatctcctatttgtaagctgagacc

SEQ ID NO: 1890536 - DNA, 25 bp, Homo sapien
tcagcaggttcacggctacattcag

SEQ ID NO: 1890537 - DNA, 25 bp, Homo sapien
gtcagtgatagggtaaagggcattc

SEQ ID NO: 1890538 - DNA, 25 bp, Homo sapien
cacggctacattcaggggagattta

SEQ ID NO: 1890539 - DNA, 25 bp, Homo sapien
gatttagaataatcagcagtgccag

SEQ ID NO: 1890540 - DNA, 25 bp, Homo sapien
ggctccttgtctatactctgtagca

SEQ ID NO: 1890541 - DNA, 25 bp, Homo sapien
aaggctcatgtctttcaagcctgcc

SEQ ID NO: 1890542 - DNA, 25 bp, Homo sapien
tcatcacactgtactaactgaacag

SEQ ID NO: 1890543 - DNA, 25 bp, Homo sapien
ttccatgtaagggtcagctcaaggc

SEQ ID NO: 1890544 - DNA, 25 bp, Homo sapien
tcacactgtccacacagaatcttgg

SEQ ID NO: 1890545 - DNA, 25 bp, Homo sapien
gagtccctaacaagcccacatgctg

SEQ ID NO: 1890546 - DNA, 25 bp, Homo sapien
tgccagtcacactgtccacacagaa

SEQ ID NO: 1890547 - DNA, 25 bp, Homo sapien
agagtccctaacaagcccacatgct

SEQ ID NO: 1890548 - DNA, 25 bp, Homo sapien
ccttccctctccgaaatctctgttt

SEQ ID NO: 1890549 - DNA, 25 bp, Homo sapien
tccgaaatctctgtttccgcacaat

SEQ ID NO: 1890550 - DNA, 25 bp, Homo sapien
aaatctctgtttccgcacaatctcc

SEQ ID NO: 1890551 - DNA, 25 bp, Homo sapien
tctccgaaatctctgtttccgcaca

SEQ ID NO: 1890552 - DNA, 25 bp, Homo sapien
cagcagcctgtgctgagcatgccca

SEQ ID NO: 1890553 - DNA, 25 bp, Homo sapien
tcaccgctgtggcattaaaagcagc

SEQ ID NO: 1890554 - DNA, 25 bp, Homo sapien
ctccaccctcgcatcctctcctctg

SEQ ID NO: 1890555 - DNA, 25 bp, Homo sapien
cctcgcagcagcctgtgctgagcat

SEQ ID NO: 1890556 - DNA, 25 bp, Homo sapien
cccgaatagggtgtgccctgcatct

SEQ ID NO: 1890557 - DNA, 25 bp, Homo sapien
tgcccgaatagggtgtgccctgcat

SEQ ID NO: 1890558 - DNA, 25 bp, Homo sapien
cgaatagggtgtgccctgcatctcc

SEQ ID NO: 1890559 - DNA, 25 bp, Homo sapien
ctgcccgaatagggtgtgccctgca

SEQ ID NO: 1890560 - DNA, 25 bp, Homo sapien
gcctatgcctatgcctctccaaaga

SEQ ID NO: 1890561 - DNA, 25 bp, Homo sapien
tgcctatgcctatgcctctccaaag

SEQ ID NO: 1890562 - DNA, 25 bp, Homo sapien
ggaactgcctatgcctatgcctctc

SEQ ID NO: 1890563 - DNA, 25 bp, Homo sapien
gaggaactgcctatgcctatgcctc

SEQ ID NO: 1890564 - DNA, 25 bp, Homo sapien
ctctctgctgtcttccggtgatcat

SEQ ID NO: 1890565 - DNA, 25 bp, Homo sapien
tctctctgctgtcttccggtgatca

SEQ ID NO: 1890566 - DNA, 25 bp, Homo sapien
ttctctctgctgtcttccggtgatc

SEQ ID NO: 1890567 - DNA, 25 bp, Homo sapien
ctttctctctgctgtcttccggtga

SEQ ID NO: 1890568 - DNA, 25 bp, Homo sapien
tctgatttgagtggttttatatttt

SEQ ID NO: 1890569 - DNA, 25 bp, Homo sapien
gttcatctgatttgagtggttttat

SEQ ID NO: 1890570 - DNA, 25 bp, Homo sapien
tcatctgatttgagtggttttatat

SEQ ID NO: 1890571 - DNA, 25 bp, Homo sapien
catctgatttgagtggttttatatt

SEQ ID NO: 1890572 - DNA, 25 bp, Homo sapien
ccccagcctctcattagggcatatg

SEQ ID NO: 1890573 - DNA, 25 bp, Homo sapien
agcctctcattagggcatatgtgga

SEQ ID NO: 1890574 - DNA, 25 bp, Homo sapien
tcctcagctaaactctccataagaa

SEQ ID NO: 1890575 - DNA, 25 bp, Homo sapien
cagaatcctcagctaaactctccat

SEQ ID NO: 1890576 - DNA, 25 bp, Homo sapien
ataggaccacttaattgggtgtgac

SEQ ID NO: 1890577 - DNA, 25 bp, Homo sapien
cagattataggaccacttaattggg

SEQ ID NO: 1890578 - DNA, 25 bp, Homo sapien
tgtttcagattataggaccacttaa

SEQ ID NO: 1890579 - DNA, 25 bp, Homo sapien
gattataggaccacttaattgggtg

SEQ ID NO: 1890580 - DNA, 25 bp, Homo sapien
tttgtgtttgctcttggagagatgc

SEQ ID NO: 1890581 - DNA, 25 bp, Homo sapien
tgtgtttgctcttggagagatgcaa

SEQ ID NO: 1890582 - DNA, 25 bp, Homo sapien
gaatcatgttttccttgtcgtggaa

SEQ ID NO: 1890583 - DNA, 25 bp, Homo sapien
aaaaatttcttgaaagaatcatgtt

SEQ ID NO: 1890584 - DNA, 25 bp, Homo sapien
gtatatcctccaatagttcataagg

SEQ ID NO: 1890585 - DNA, 25 bp, Homo sapien
tcataaggtatccatgcaatggagt

SEQ ID NO: 1890586 - DNA, 25 bp, Homo sapien
ctaacagagaattagtagtatatcc

SEQ ID NO: 1890587 - DNA, 25 bp, Homo sapien
gttcataaggtatccatgcaatgga

SEQ ID NO: 1890588 - DNA, 25 bp, Homo sapien
gctacttagactttccttaactaca

SEQ ID NO: 1890589 - DNA, 25 bp, Homo sapien
gagtcactgtctgctcgttgctact

SEQ ID NO: 1890590 - DNA, 25 bp, Homo sapien
tgtgtcccgctatcctcatcagagt

SEQ ID NO: 1890591 - DNA, 25 bp, Homo sapien
agtgtgtcccgctatcctcatcaga

SEQ ID NO: 1890592 - DNA, 25 bp, Homo sapien
aatgggagcctttagctggagaact

SEQ ID NO: 1890593 - DNA, 25 bp, Homo sapien
aaagaactctggcactatgaaacct

SEQ ID NO: 1890594 - DNA, 25 bp, Homo sapien
gacaattaatgaccgaacagctgct

SEQ ID NO: 1890595 - DNA, 25 bp, Homo sapien
gattggtagctagaccctcgtattg

SEQ ID NO: 1890596 - DNA, 25 bp, Homo sapien
gaaggctatacccttgggatgctcc

SEQ ID NO: 1890597 - DNA, 25 bp, Homo sapien
ggatgctccacttcccgtattacct

SEQ ID NO: 1890598 - DNA, 25 bp, Homo sapien
tggccgagtgacaggagagctgaca

SEQ ID NO: 1890599 - DNA, 25 bp, Homo sapien
caaggtctttattatattctagggc

SEQ ID NO: 1890600 - DNA, 25 bp, Homo sapien
ttgccccacagccaacacagggaga

SEQ ID NO: 1890601 - DNA, 25 bp, Homo sapien
tataggcaaaggacgctatctcttc

SEQ ID NO: 1890602 - DNA, 25 bp, Homo sapien
tgtgctataggcaaaggacgctatc

SEQ ID NO: 1890603 - DNA, 25 bp, Homo sapien
tgccccacagccaacacagggagat

SEQ ID NO: 1890604 - DNA, 25 bp, Homo sapien
tgaccaggtgtcataggatgagcac

SEQ ID NO: 1890605 - DNA, 25 bp, Homo sapien
gaccaggtgtcataggatgagcaca

SEQ ID NO: 1890606 - DNA, 25 bp, Homo sapien
atagcagtgccattgaccaggtgtc

SEQ ID NO: 1890607 - DNA, 25 bp, Homo sapien
agcagtgccattgaccaggtgtcat

SEQ ID NO: 1890608 - DNA, 25 bp, Homo sapien
tgatgactgttgaattccaacagcc

SEQ ID NO: 1890609 - DNA, 25 bp, Homo sapien
tgaatctgtcttgtatccagtccag

SEQ ID NO: 1890610 - DNA, 25 bp, Homo sapien
ctgtcttgtatccagtccagtgaac

SEQ ID NO: 1890611 - DNA, 25 bp, Homo sapien
acaggaaacagctgatgactgttga

SEQ ID NO: 1890612 - DNA, 25 bp, Homo sapien
aatgctgctctagcgtgcaggtgga

SEQ ID NO: 1890613 - DNA, 25 bp, Homo sapien
catggcaatgctgctctagcgtgca

SEQ ID NO: 1890614 - DNA, 25 bp, Homo sapien
ctgctctagcgtgcaggtggaatga

SEQ ID NO: 1890615 - DNA, 25 bp, Homo sapien
tctcatcatggcaatgctgctctag

SEQ ID NO: 1890616 - DNA, 25 bp, Homo sapien
tggattttgcctcgggggctgttct

SEQ ID NO: 1890617 - DNA, 25 bp, Homo sapien
tgttcttgagttgttaaggagctgt

SEQ ID NO: 1890618 - DNA, 25 bp, Homo sapien
aactttcattttggccggaccatca

SEQ ID NO: 1890619 - DNA, 25 bp, Homo sapien
taagttctgtatagtgttcttgagt

SEQ ID NO: 1890620 - DNA, 25 bp, Homo sapien
cttaaatggcatatgataaaactct

SEQ ID NO: 1890621 - DNA, 25 bp, Homo sapien
ggcatatgataaaactctcgtaggt

SEQ ID NO: 1890622 - DNA, 25 bp, Homo sapien
tcagaccatcactgaatgaatgtct

SEQ ID NO: 1890623 - DNA, 25 bp, Homo sapien
tccttgggctccacacttaaatggc

SEQ ID NO: 1890624 - DNA, 25 bp, Homo sapien
caatgttgccaggtaggaatatgag

SEQ ID NO: 1890625 - DNA, 25 bp, Homo sapien
caactgcaggatgcattggggctag

SEQ ID NO: 1890626 - DNA, 25 bp, Homo sapien
tagttgtgacaatgttgccaggtag

SEQ ID NO: 1890627 - DNA, 25 bp, Homo sapien
ctttggtaagttggtagttgtgaca

SEQ ID NO: 1890628 - DNA, 25 bp, Homo sapien
gggttctagcctgggtgcctgagca

SEQ ID NO: 1890629 - DNA, 25 bp, Homo sapien
gcatctggtgatgacgccataacct

SEQ ID NO: 1890630 - DNA, 25 bp, Homo sapien
gatgacgccataacctggataccac

SEQ ID NO: 1890631 - DNA, 25 bp, Homo sapien
cctgggtgcctgagcatctggtgat

SEQ ID NO: 1890632 - DNA, 25 bp, Homo sapien
ttcaggtggaacactgagattttac

SEQ ID NO: 1890633 - DNA, 25 bp, Homo sapien
gtggaacactgagattttacactgg

SEQ ID NO: 1890634 - DNA, 25 bp, Homo sapien
atagtcaacaacttctttcccatca

SEQ ID NO: 1890635 - DNA, 25 bp, Homo sapien
gtatttcaggtggaacactgagatt

SEQ ID NO: 1890636 - DNA, 25 bp, Homo sapien
gctcaggaaagggagcacaggagtg

SEQ ID NO: 1890637 - DNA, 25 bp, Homo sapien
agggagcacaggagtgatcaaagct

SEQ ID NO: 1890638 - DNA, 25 bp, Homo sapien
tctggctcttcttcctagaaatgct

SEQ ID NO: 1890639 - DNA, 25 bp, Homo sapien
caggagtgatcaaagctggcatttc

SEQ ID NO: 1890640 - DNA, 25 bp, Homo sapien
aactgtggaagatccaatggagacc

SEQ ID NO: 1890641 - DNA, 25 bp, Homo sapien
gatccaatggagacctgttgagctt

SEQ ID NO: 1890642 - DNA, 25 bp, Homo sapien
ttcccaactgtggaagatccaatgg

SEQ ID NO: 1890643 - DNA, 25 bp, Homo sapien
ggagacctgttgagcttgggaactt

SEQ ID NO: 1890644 - DNA, 25 bp, Homo sapien
ttaatttgcaataatgtatggtaaa

SEQ ID NO: 1890645 - DNA, 25 bp, Homo sapien
ttgcaataatgtatggtaaaggaaa

SEQ ID NO: 1890646 - DNA, 25 bp, Homo sapien
aatttgcaataatgtatggtaaagg

SEQ ID NO: 1890647 - DNA, 25 bp, Homo sapien
tttgcaataatgtatggtaaaggaa

SEQ ID NO: 1890648 - DNA, 25 bp, Homo sapien
tacagcagttaacattcagttccac

SEQ ID NO: 1890649 - DNA, 25 bp, Homo sapien
tcctgcttgagagctgtctgccggg

SEQ ID NO: 1890650 - DNA, 25 bp, Homo sapien
tgtaattgatgcctcctgagctgac

SEQ ID NO: 1890651 - DNA, 25 bp, Homo sapien
cattaggtaataaccttccaggtgg

SEQ ID NO: 1890652 - DNA, 25 bp, Homo sapien
aaggcacctgctgagtttccatatc

SEQ ID NO: 1890653 - DNA, 25 bp, Homo sapien
gcacctgctgagtttccatatcaac

SEQ ID NO: 1890654 - DNA, 25 bp, Homo sapien
ccttcatacggtgctggtgagaaag

SEQ ID NO: 1890655 - DNA, 25 bp, Homo sapien
cttcatacggtgctggtgagaaagg

SEQ ID NO: 1890656 - DNA, 25 bp, Homo sapien
gcaatgaagcccattagctaaattc

SEQ ID NO: 1890657 - DNA, 25 bp, Homo sapien
ctatgagcaatgaagcccattagct

SEQ ID NO: 1890658 - DNA, 25 bp, Homo sapien
acatcgcactgtgcagttgttcctg

SEQ ID NO: 1890659 - DNA, 25 bp, Homo sapien
ttttggaaacctgacaacatcgcac

SEQ ID NO: 1890660 - DNA, 25 bp, Homo sapien
caaaatgatctcatacatggtattc

SEQ ID NO: 1890661 - DNA, 25 bp, Homo sapien
ggttattctctactctaggcatgcc

SEQ ID NO: 1890662 - DNA, 25 bp, Homo sapien
catacatggtattcacctgcaaaag

SEQ ID NO: 1890663 - DNA, 25 bp, Homo sapien
gatgaggagccacagtaacaataaa

SEQ ID NO: 1890664 - DNA, 25 bp, Homo sapien
ggagaatcccacaaacctggaatgg

SEQ ID NO: 1890665 - DNA, 25 bp, Homo sapien
ggtagctagctacatgccgataggg

SEQ ID NO: 1890666 - DNA, 25 bp, Homo sapien
tgcaggaaggaacactctcggacat

SEQ ID NO: 1890667 - DNA, 25 bp, Homo sapien
cagaggttcacactgaaggctggca

SEQ ID NO: 1890668 - DNA, 25 bp, Homo sapien
cgtaagatttacaactccgacttct

SEQ ID NO: 1890669 - DNA, 25 bp, Homo sapien
cacgtaagatttacaactccgactt

SEQ ID NO: 1890670 - DNA, 25 bp, Homo sapien
aagatttacaactccgacttctctt

SEQ ID NO: 1890671 - DNA, 25 bp, Homo sapien
gtaagatttacaactccgacttctc

SEQ ID NO: 1890672 - DNA, 25 bp, Homo sapien
attgcaatgctagcctcaaatagtt

SEQ ID NO: 1890673 - DNA, 25 bp, Homo sapien
acaatctgcaacctgtcttgcataa

SEQ ID NO: 1890674 - DNA, 25 bp, Homo sapien
gccatggtcccccattgcaatgcta

SEQ ID NO: 1890675 - DNA, 25 bp, Homo sapien
ccccattgcaatgctagcctcaaat

SEQ ID NO: 1890676 - DNA, 25 bp, Homo sapien
gacgctgatgtcactttcccacaag

SEQ ID NO: 1890677 - DNA, 25 bp, Homo sapien
agcagctccaagcaggttgcagagg

SEQ ID NO: 1890678 - DNA, 25 bp, Homo sapien
gatgaaggcagattggcattactct

SEQ ID NO: 1890679 - DNA, 25 bp, Homo sapien
tgaaaggaattcacacggcgaaggg

SEQ ID NO: 1890680 - DNA, 25 bp, Homo sapien
ggtcagcccgaatgcaaagtctgtg

SEQ ID NO: 1890681 - DNA, 25 bp, Homo sapien
tggaccatggcctaccacggtagaa

SEQ ID NO: 1890682 - DNA, 25 bp, Homo sapien
gtctctaatcctaaagcagccctga

SEQ ID NO: 1890683 - DNA, 25 bp, Homo sapien
catgatgctttggaccttctcgaaa

SEQ ID NO: 1890684 - DNA, 25 bp, Homo sapien
gaggtgtcatttgcaactctgccca

SEQ ID NO: 1890685 - DNA, 25 bp, Homo sapien
caagcattttaagaaccatagggca

SEQ ID NO: 1890686 - DNA, 25 bp, Homo sapien
gctttcctaggagaccagaactgtc

SEQ ID NO: 1890687 - DNA, 25 bp, Homo sapien
cctagagaagcaactacggcctatc

SEQ ID NO: 1890688 - DNA, 25 bp, Homo sapien
tcttgagagaatttaagtacacaat

SEQ ID NO: 1890689 - DNA, 25 bp, Homo sapien
caaactttgcccatatgactgtaag

SEQ ID NO: 1890690 - DNA, 25 bp, Homo sapien
caattcctgaatgctatgcctttca

SEQ ID NO: 1890691 - DNA, 25 bp, Homo sapien
gactgtaagtttgtcaaggtaaatc

SEQ ID NO: 1890692 - DNA, 25 bp, Homo sapien
taagctatatgttggaaataccctg

SEQ ID NO: 1890693 - DNA, 25 bp, Homo sapien
tgtaccatttatgttgcagactgct

SEQ ID NO: 1890694 - DNA, 25 bp, Homo sapien
ggaatccccaaagttgtacgactga

SEQ ID NO: 1890695 - DNA, 25 bp, Homo sapien
gtacgactgaataaaagacaacacc

SEQ ID NO: 1890696 - DNA, 25 bp, Homo sapien
tgtacttccccgcttagaaacatca

SEQ ID NO: 1890697 - DNA, 25 bp, Homo sapien
tctgtgtgctttacacttactcctc

SEQ ID NO: 1890698 - DNA, 25 bp, Homo sapien
taaactataattgccagctggtggt

SEQ ID NO: 1890699 - DNA, 25 bp, Homo sapien
tctattgtcttggaagcatttccac

SEQ ID NO: 1890700 - DNA, 25 bp, Homo sapien
ttaacattttatctcctcccttata

SEQ ID NO: 1890701 - DNA, 25 bp, Homo sapien
aacattttatctcctcccttataag

SEQ ID NO: 1890702 - DNA, 25 bp, Homo sapien
cattttatctcctcccttataagac

SEQ ID NO: 1890703 - DNA, 25 bp, Homo sapien
tgttaacattttatctcctccctta

SEQ ID NO: 1890704 - DNA, 25 bp, Homo sapien
tgaagcctattcaagttgtctcctg

SEQ ID NO: 1890705 - DNA, 25 bp, Homo sapien
cactgccactgggttagtcaatact

SEQ ID NO: 1890706 - DNA, 25 bp, Homo sapien
tgagatctacccacttctggttgga

SEQ ID NO: 1890707 - DNA, 25 bp, Homo sapien
caggataggatattacaagctcttg

SEQ ID NO: 1890708 - DNA, 25 bp, Homo sapien
cagtccaatgactgtgttttaaagt

SEQ ID NO: 1890709 - DNA, 25 bp, Homo sapien
gtttatgacaccaattctacatgca

SEQ ID NO: 1890710 - DNA, 25 bp, Homo sapien
aagagagatatacagtccaatgact

SEQ ID NO: 1890711 - DNA, 25 bp, Homo sapien
taaagtctcttggagcacttctttg

SEQ ID NO: 1890712 - DNA, 25 bp, Homo sapien
tccaaggtaatggagaattcatcca

SEQ ID NO: 1890713 - DNA, 25 bp, Homo sapien
tggcctcgtagttattccttatctt

SEQ ID NO: 1890714 - DNA, 25 bp, Homo sapien
cacatgcctggcctcgtagttattc

SEQ ID NO: 1890715 - DNA, 25 bp, Homo sapien
cactccaaggtaatggagaattcat

SEQ ID NO: 1890716 - DNA, 25 bp, Homo sapien
tgtactctaaggtccaatcattcca

SEQ ID NO: 1890717 - DNA, 25 bp, Homo sapien
caatgggaatgcttatgatgctagt

SEQ ID NO: 1890718 - DNA, 25 bp, Homo sapien
taggaagtgctgaccatgatgtgaa

SEQ ID NO: 1890719 - DNA, 25 bp, Homo sapien
aattcatatagcgactttggaaagc

SEQ ID NO: 1890720 - DNA, 25 bp, Homo sapien
ggttactgagcgctagatgaataca

SEQ ID NO: 1890721 - DNA, 25 bp, Homo sapien
gatagctactcttatgttcacccta

SEQ ID NO: 1890722 - DNA, 25 bp, Homo sapien
tactcttatgttcaccctatcttat

SEQ ID NO: 1890723 - DNA, 25 bp, Homo sapien
acagatagctactcttatgttcacc

SEQ ID NO: 1890724 - DNA, 25 bp, Homo sapien
cctttgtacctttaaagacatctgc

SEQ ID NO: 1890725 - DNA, 25 bp, Homo sapien
gatgtcttggaataataagcactcc

SEQ ID NO: 1890726 - DNA, 25 bp, Homo sapien
aagtagatttgtagttagtctgtac

SEQ ID NO: 1890727 - DNA, 25 bp, Homo sapien
taagcactccaacatttataggtca

SEQ ID NO: 1890728 - DNA, 25 bp, Homo sapien
taaatgtgagcatctctacagtagg

SEQ ID NO: 1890729 - DNA, 25 bp, Homo sapien
tgaaaacctgttccgtagatgctgt

SEQ ID NO: 1890730 - DNA, 25 bp, Homo sapien
cctcatggatgagattagcaccttt

SEQ ID NO: 1890731 - DNA, 25 bp, Homo sapien
tgcaacagtatttagaggtagggct

SEQ ID NO: 1890732 - DNA, 25 bp, Homo sapien
ggactatgaaatatatatgggtgtg

SEQ ID NO: 1890733 - DNA, 25 bp, Homo sapien
agataaggaaatactagtttacaag

SEQ ID NO: 1890734 - DNA, 25 bp, Homo sapien
caaatgtagaattgttcttctcagc

SEQ ID NO: 1890735 - DNA, 25 bp, Homo sapien
gacaactactaatactattctagga

SEQ ID NO: 1890736 - DNA, 25 bp, Homo sapien
tcctattgataatatattcaattca

SEQ ID NO: 1890737 - DNA, 25 bp, Homo sapien
aaatctcctattgataatatattca

SEQ ID NO: 1890738 - DNA, 25 bp, Homo sapien
tctcctattgataatatattcaatt

SEQ ID NO: 1890739 - DNA, 25 bp, Homo sapien
caaaatctcctattgataatatatt

SEQ ID NO: 1890740 - DNA, 25 bp, Homo sapien
tactagttgactatgcataagggca

SEQ ID NO: 1890741 - DNA, 25 bp, Homo sapien
cgagttcttagatgagtgcctgaca

SEQ ID NO: 1890742 - DNA, 25 bp, Homo sapien
tggaaagaatctctaagacatgggc

SEQ ID NO: 1890743 - DNA, 25 bp, Homo sapien
tgaagtctgatttagcactgcagcc

SEQ ID NO: 1890744 - DNA, 25 bp, Homo sapien
actccaggcagaactagaatcggct

SEQ ID NO: 1890745 - DNA, 25 bp, Homo sapien
tcctgcttttgatgcatggctggta

SEQ ID NO: 1890746 - DNA, 25 bp, Homo sapien
gtagaggaccttgacagcactccag

SEQ ID NO: 1890747 - DNA, 25 bp, Homo sapien
tctcaaagattcaatcaccaaactg

SEQ ID NO: 1890748 - DNA, 25 bp, Homo sapien
tgaccttgaatcgtgaatctaaaag

SEQ ID NO: 1890749 - DNA, 25 bp, Homo sapien
aagatatacactttgtcatcctgac

SEQ ID NO: 1890750 - DNA, 25 bp, Homo sapien
gcaccagacactgggcgatcacgct

SEQ ID NO: 1890751 - DNA, 25 bp, Homo sapien
cgtgaatctaaaagtgcttctagca

SEQ ID NO: 1890752 - DNA, 25 bp, Homo sapien
ggtatgataggaaaactcctctcag

SEQ ID NO: 1890753 - DNA, 25 bp, Homo sapien
cttggtatgataggaaaactcctct

SEQ ID NO: 1890754 - DNA, 25 bp, Homo sapien
ctctgtcatataaaacttggtggtt

SEQ ID NO: 1890755 - DNA, 25 bp, Homo sapien
tctctgtcatataaaacttggtggt

SEQ ID NO: 1890756 - DNA, 25 bp, Homo sapien
tgggcgacagaacgtgactccatct

SEQ ID NO: 1890757 - DNA, 25 bp, Homo sapien
gggcgacagaacgtgactccatctt

SEQ ID NO: 1890758 - DNA, 25 bp, Homo sapien
ctcttttgagtctgcttttctggta

SEQ ID NO: 1890759 - DNA, 25 bp, Homo sapien
tgcttttctggtaatttacccacat

SEQ ID NO: 1890760 - DNA, 25 bp, Homo sapien
gtctgcttttctggtaatttaccca

SEQ ID NO: 1890761 - DNA, 25 bp, Homo sapien
ttttgagtctgcttttctggtaatt

SEQ ID NO: 1890762 - DNA, 25 bp, Homo sapien
tggtatctttcgtgtcagcctgaag

SEQ ID NO: 1890763 - DNA, 25 bp, Homo sapien
gatattgtcccacaaactggaagtt

SEQ ID NO: 1890764 - DNA, 25 bp, Homo sapien
tacagcaggtacgataggaatccat

SEQ ID NO: 1890765 - DNA, 25 bp, Homo sapien
gattgacgacaacatgcctgagtga

SEQ ID NO: 1890766 - DNA, 25 bp, Homo sapien
tatctgtgcttactaagtacctgct

SEQ ID NO: 1890767 - DNA, 25 bp, Homo sapien
cattgtgtgcaatatgttgtagcaa

SEQ ID NO: 1890768 - DNA, 25 bp, Homo sapien
tcgaactgtgaaatgtatctcccca

SEQ ID NO: 1890769 - DNA, 25 bp, Homo sapien
agtcaattgactggcctggactcga

SEQ ID NO: 1890770 - DNA, 25 bp, Homo sapien
atgctttaggaaagagactggcagt

SEQ ID NO: 1890771 - DNA, 25 bp, Homo sapien
tatggaaaataaagtccagggtgag

SEQ ID NO: 1890772 - DNA, 25 bp, Homo sapien
ggagcaaggatgactcttgttatgc

SEQ ID NO: 1890773 - DNA, 25 bp, Homo sapien
gtattttgtccctgccctagatatc

SEQ ID NO: 1890774 - DNA, 25 bp, Homo sapien
aaaaccacaggaacagagctgttca

SEQ ID NO: 1890775 - DNA, 25 bp, Homo sapien
cacaggaacagagctgttcaaggcc

SEQ ID NO: 1890776 - DNA, 25 bp, Homo sapien
aaccacaggaacagagctgttcaag

SEQ ID NO: 1890777 - DNA, 25 bp, Homo sapien
ggaacagagctgttcaaggccatgg

SEQ ID NO: 1890778 - DNA, 25 bp, Homo sapien
gctctacagagattattggcccact

SEQ ID NO: 1890779 - DNA, 25 bp, Homo sapien
tctgggcaccaattcttctaactga

SEQ ID NO: 1890780 - DNA, 25 bp, Homo sapien
aaagctctgtttcgtgagttaccag

SEQ ID NO: 1890781 - DNA, 25 bp, Homo sapien
gttgaatgtccccaaagaatcagtg

SEQ ID NO: 1890782 - DNA, 25 bp, Homo sapien
cttgcaacgcttacaaattactttg

SEQ ID NO: 1890783 - DNA, 25 bp, Homo sapien
tcccaacattaccttgcaacgctta

SEQ ID NO: 1890784 - DNA, 25 bp, Homo sapien
tgatgacacggtctctcccaacatt

SEQ ID NO: 1890785 - DNA, 25 bp, Homo sapien
ctgatgacacggtctctcccaacat

SEQ ID NO: 1890786 - DNA, 25 bp, Homo sapien
taaagcttctgaacactatgctaag

SEQ ID NO: 1890787 - DNA, 25 bp, Homo sapien
cattagtgggaaccaattcatggaa

SEQ ID NO: 1890788 - DNA, 25 bp, Homo sapien
gctagattcagacagagctgatgtc

SEQ ID NO: 1890789 - DNA, 25 bp, Homo sapien
taaactgagttccatggaagtgctg

SEQ ID NO: 1890790 - DNA, 25 bp, Homo sapien
cattgcactgacatccttatcaggc

SEQ ID NO: 1890791 - DNA, 25 bp, Homo sapien
atctctggccattgcactgacatcc

SEQ ID NO: 1890792 - DNA, 25 bp, Homo sapien
tctggccattgcactgacatcctta

SEQ ID NO: 1890793 - DNA, 25 bp, Homo sapien
gacatccttatcaggcacatcacaa

SEQ ID NO: 1890794 - DNA, 25 bp, Homo sapien
cacatctccactggggatagttcag

SEQ ID NO: 1890795 - DNA, 25 bp, Homo sapien
ccactggggatagttcaggtctttg

SEQ ID NO: 1890796 - DNA, 25 bp, Homo sapien
tctccactggggatagttcaggtct

SEQ ID NO: 1890797 - DNA, 25 bp, Homo sapien
gcacatctccactggggatagttca

SEQ ID NO: 1890798 - DNA, 25 bp, Homo sapien
gccacaaactggttcttaaattcac

SEQ ID NO: 1890799 - DNA, 25 bp, Homo sapien
ctgccacaaactggttcttaaattc

SEQ ID NO: 1890800 - DNA, 25 bp, Homo sapien
tgccacaaactggttcttaaattca

SEQ ID NO: 1890801 - DNA, 25 bp, Homo sapien
cattctcttgcggatgaagtgattt

SEQ ID NO: 1890802 - DNA, 25 bp, Homo sapien
gttctcactcggcagtgggagcacc

SEQ ID NO: 1890803 - DNA, 25 bp, Homo sapien
gaaagagtctccaataaaacagtca

SEQ ID NO: 1890804 - DNA, 25 bp, Homo sapien
gggtcaggatgacaacaccattctc

SEQ ID NO: 1890805 - DNA, 25 bp, Homo sapien
gtcatttgtgcaaacatgcagagcc

SEQ ID NO: 1890806 - DNA, 25 bp, Homo sapien
gcccctgctgagaggaattcttgat

SEQ ID NO: 1890807 - DNA, 25 bp, Homo sapien
tgtacctggaactacgtcgtgtggg

SEQ ID NO: 1890808 - DNA, 25 bp, Homo sapien
cagtccccagaaaggtatgtgagct

SEQ ID NO: 1890809 - DNA, 25 bp, Homo sapien
atccagagacctccggagagccact

SEQ ID NO: 1890810 - DNA, 25 bp, Homo sapien
cctccggagagccactctgtttcaa

SEQ ID NO: 1890811 - DNA, 25 bp, Homo sapien
ggagaacagggcgaaccatccagag

SEQ ID NO: 1890812 - DNA, 25 bp, Homo sapien
aacagggcgaaccatccagagacct

SEQ ID NO: 1890813 - DNA, 25 bp, Homo sapien
ctgaagttcaggtaggagccaacga

SEQ ID NO: 1890814 - DNA, 25 bp, Homo sapien
tgaagttcaggtaggagccaacgag

SEQ ID NO: 1890815 - DNA, 25 bp, Homo sapien
tggggctgcacattgatcaccagag

SEQ ID NO: 1890816 - DNA, 25 bp, Homo sapien
ctgtggggctgcacattgatcacca

SEQ ID NO: 1890817 - DNA, 25 bp, Homo sapien
tattatgacttcaccgcaggattgg

SEQ ID NO: 1890818 - DNA, 25 bp, Homo sapien
cattcttgggtttgcgagctttgat

SEQ ID NO: 1890819 - DNA, 25 bp, Homo sapien
caataaaacgtgcaacattcttggg

SEQ ID NO: 1890820 - DNA, 25 bp, Homo sapien
caggattggcaataaaacgtgcaac

SEQ ID NO: 1890821 - DNA, 25 bp, Homo sapien
caaactgtagcccacggcaagagga

SEQ ID NO: 1890822 - DNA, 25 bp, Homo sapien
gaggaaggtacaagcctgacctctg

SEQ ID NO: 1890823 - DNA, 25 bp, Homo sapien
tgcctaattttgcttgcgtctgcag

SEQ ID NO: 1890824 - DNA, 25 bp, Homo sapien
gtctgcagtcgcaggtgcagtccat

SEQ ID NO: 1890825 - DNA, 25 bp, Homo sapien
tggaaatattcatgggcatacctcc

SEQ ID NO: 1890826 - DNA, 25 bp, Homo sapien
gggagtccaaagtgggtggatcgct

SEQ ID NO: 1890827 - DNA, 25 bp, Homo sapien
ttgggagtccaaagtgggtggatcg

SEQ ID NO: 1890828 - DNA, 25 bp, Homo sapien
atgggcaatatggtgaaaccctatc

SEQ ID NO: 1890829 - DNA, 25 bp, Homo sapien
tgagtccaggagttcaagaccagca

SEQ ID NO: 1890830 - DNA, 25 bp, Homo sapien
tgtgtagcgaataacaagtttgacg

SEQ ID NO: 1890831 - DNA, 25 bp, Homo sapien
tatttgtgtagcgaataacaagttt

SEQ ID NO: 1890832 - DNA, 25 bp, Homo sapien
gcgaataacaagtttgacgttctca

SEQ ID NO: 1890833 - DNA, 25 bp, Homo sapien
ctaaaagttatttgtgtagcgaata

SEQ ID NO: 1890834 - DNA, 25 bp, Homo sapien
aaagatacccacactgtcagtaggg

SEQ ID NO: 1890835 - DNA, 25 bp, Homo sapien
gaaactcaaaatccctcgtacagag

SEQ ID NO: 1890836 - DNA, 25 bp, Homo sapien
cgagaggctctacgcaactggaaag

SEQ ID NO: 1890837 - DNA, 25 bp, Homo sapien
cataagtctggtgtggagctgagac

SEQ ID NO: 1890838 - DNA, 25 bp, Homo sapien
agctgggcactgcgcctagaatccc

SEQ ID NO: 1890839 - DNA, 25 bp, Homo sapien
gcagcagtaaagcgagctgggcact

SEQ ID NO: 1890840 - DNA, 25 bp, Homo sapien
gggcactgcgcctagaatcccagtt

SEQ ID NO: 1890841 - DNA, 25 bp, Homo sapien
acccccgggcagcagtaaagcgagc

SEQ ID NO: 1890842 - DNA, 25 bp, Homo sapien
ccaggatcagaagcgcgctctgcag

SEQ ID NO: 1890843 - DNA, 25 bp, Homo sapien
cccaggatcagaagcgcgctctgca

SEQ ID NO: 1890844 - DNA, 25 bp, Homo sapien
caggatcagaagcgcgctctgcagc

SEQ ID NO: 1890845 - DNA, 25 bp, Homo sapien
aaacacgcgcgtctccgccgcagaa

SEQ ID NO: 1890846 - DNA, 25 bp, Homo sapien
tccagaaacacgcgcgtctccgccg

SEQ ID NO: 1890847 - DNA, 25 bp, Homo sapien
ctccagaaacacgcgcgtctccgcc

SEQ ID NO: 1890848 - DNA, 25 bp, Homo sapien
agaaacacgcgcgtctccgccgcag

SEQ ID NO: 1890849 - DNA, 25 bp, Homo sapien
gttccacgtgcggaccaaccagcgg

SEQ ID NO: 1890850 - DNA, 25 bp, Homo sapien
agtcccagaccggaccaagctggag

SEQ ID NO: 1890851 - DNA, 25 bp, Homo sapien
gaccggaccaagctggaggttccga

SEQ ID NO: 1890852 - DNA, 25 bp, Homo sapien
accaggagaggttccacgtgcggac

SEQ ID NO: 1890853 - DNA, 25 bp, Homo sapien
cgcctgtgccagatcgcagggctgg

SEQ ID NO: 1890854 - DNA, 25 bp, Homo sapien
agggctggcgccgcctaccagctca

SEQ ID NO: 1890855 - DNA, 25 bp, Homo sapien
aggcgcctgtgccagatcgcagggc

SEQ ID NO: 1890856 - DNA, 25 bp, Homo sapien
tgtgccagatcgcagggctggcgcc

SEQ ID NO: 1890857 - DNA, 25 bp, Homo sapien
acctgccggccggagagtgcaccac

SEQ ID NO: 1890858 - DNA, 25 bp, Homo sapien
cggccggagagtgcaccaccgagaa

SEQ ID NO: 1890859 - DNA, 25 bp, Homo sapien
agaaggcgcgtgaccccggaggccg

SEQ ID NO: 1890860 - DNA, 25 bp, Homo sapien
caccgagaaggcgcgtgaccccgga

SEQ ID NO: 1890861 - DNA, 25 bp, Homo sapien
cttcttatgagcgtgacttggcgcg

SEQ ID NO: 1890862 - DNA, 25 bp, Homo sapien
gtgggcggcgagaggctagctatcg

SEQ ID NO: 1890863 - DNA, 25 bp, Homo sapien
cccactctgcttcttatgagcgtga

SEQ ID NO: 1890864 - DNA, 25 bp, Homo sapien
tgagcgtgacttggcgcgttagcat

SEQ ID NO: 1890865 - DNA, 25 bp, Homo sapien
cttttagcattgaggagacacgtag

SEQ ID NO: 1890866 - DNA, 25 bp, Homo sapien
aatcgaggcgttgtgccttctcggc

SEQ ID NO: 1890867 - DNA, 25 bp, Homo sapien
gtgcggagtaccctctttgttgaag

SEQ ID NO: 1890868 - DNA, 25 bp, Homo sapien
gacacgtaggcccgcgatggttcat

SEQ ID NO: 1890869 - DNA, 25 bp, Homo sapien
aagttgcaacataacaatagtcact

SEQ ID NO: 1890870 - DNA, 25 bp, Homo sapien
aatagtcacttgttcgggcctcctc

SEQ ID NO: 1890871 - DNA, 25 bp, Homo sapien
taaagttgcaacataacaatagtca

SEQ ID NO: 1890872 - DNA, 25 bp, Homo sapien
taacaatagtcacttgttcgggcct

SEQ ID NO: 1890873 - DNA, 25 bp, Homo sapien
caagtgggaacctgttatatgacaa

SEQ ID NO: 1890874 - DNA, 25 bp, Homo sapien
ttatctggcaaagctcctgtatgag

SEQ ID NO: 1890875 - DNA, 25 bp, Homo sapien
ctgatgttacatcctactagggtac

SEQ ID NO: 1890876 - DNA, 25 bp, Homo sapien
gggtacattagccttaagataaaca

SEQ ID NO: 1890877 - DNA, 25 bp, Homo sapien
aggagttagagacgtcagtgagcca

SEQ ID NO: 1890878 - DNA, 25 bp, Homo sapien
gctaggcatgttggcacccacctgt

SEQ ID NO: 1890879 - DNA, 25 bp, Homo sapien
gttagagacgtcagtgagccatgat

SEQ ID NO: 1890880 - DNA, 25 bp, Homo sapien
gagttagagacgtcagtgagccatg

SEQ ID NO: 1890881 - DNA, 25 bp, Homo sapien
gcaagcacgtagagtcatataacca

SEQ ID NO: 1890882 - DNA, 25 bp, Homo sapien
gttacctgaattttggcaagcacgt

SEQ ID NO: 1890883 - DNA, 25 bp, Homo sapien
tatgagcaaggaataaaaaaccctc

SEQ ID NO: 1890884 - DNA, 25 bp, Homo sapien
gagggcaagctttatatctctaggg

SEQ ID NO: 1890885 - DNA, 25 bp, Homo sapien
aagacgaggtcttgccttaattgaa

SEQ ID NO: 1890886 - DNA, 25 bp, Homo sapien
ccactagaggtagtgaaaaagtgta

SEQ ID NO: 1890887 - DNA, 25 bp, Homo sapien
ggtggagacaagacttacaaacttc

SEQ ID NO: 1890888 - DNA, 25 bp, Homo sapien
tattctttggttacttactgaccac

SEQ ID NO: 1890889 - DNA, 25 bp, Homo sapien
cttatctgaactcacagattctctc

SEQ ID NO: 1890890 - DNA, 25 bp, Homo sapien
gaaatccagacagaacacttgcccc

SEQ ID NO: 1890891 - DNA, 25 bp, Homo sapien
gatccttagcaaggttcagcctcca

SEQ ID NO: 1890892 - DNA, 25 bp, Homo sapien
agacagaacacttgccccagttgct

SEQ ID NO: 1890893 - DNA, 25 bp, Homo sapien
tatcctattgtagggagtaaaaggc

SEQ ID NO: 1890894 - DNA, 25 bp, Homo sapien
tctactacctaatacagtgtctggc

SEQ ID NO: 1890895 - DNA, 25 bp, Homo sapien
cagttctactccaggaatggttcat

SEQ ID NO: 1890896 - DNA, 25 bp, Homo sapien
ggcacatgataggagttcagtaact

SEQ ID NO: 1890897 - DNA, 25 bp, Homo sapien
tgctgaggggaaccatacatcagag

SEQ ID NO: 1890898 - DNA, 25 bp, Homo sapien
cattgctgaggggaaccatacatca

SEQ ID NO: 1890899 - DNA, 25 bp, Homo sapien
gaggggaaccatacatcagagttac

SEQ ID NO: 1890900 - DNA, 25 bp, Homo sapien
gggaaccatacatcagagttacgtt

SEQ ID NO: 1890901 - DNA, 25 bp, Homo sapien
taagtggcctcgaagtggaatctgc

SEQ ID NO: 1890902 - DNA, 25 bp, Homo sapien
taaggagtcaggtaaacaaccagga

SEQ ID NO: 1890903 - DNA, 25 bp, Homo sapien
gatcctgaaaccgtgaatgcccaag

SEQ ID NO: 1890904 - DNA, 25 bp, Homo sapien
taccagcagtgagacaattccaatg

SEQ ID NO: 1890905 - DNA, 25 bp, Homo sapien
tgatctgtccttactatgttgctag

SEQ ID NO: 1890906 - DNA, 25 bp, Homo sapien
taatgagtgtcttaacgacccagcc

SEQ ID NO: 1890907 - DNA, 25 bp, Homo sapien
gacccagccatgtatatcctacaaa

SEQ ID NO: 1890908 - DNA, 25 bp, Homo sapien
tactctcgaaactatgcatattgcc

SEQ ID NO: 1890909 - DNA, 25 bp, Homo sapien
cataccactatatcattacaaaccc

SEQ ID NO: 1890910 - DNA, 25 bp, Homo sapien
caaataattagtacacaactctaca

SEQ ID NO: 1890911 - DNA, 25 bp, Homo sapien
aagtcaacataccactatatcatta

SEQ ID NO: 1890912 - DNA, 25 bp, Homo sapien
ccttgtttttgaactataagtatat

SEQ ID NO: 1890913 - DNA, 25 bp, Homo sapien
gacagtgttggaatttgaacagccc

SEQ ID NO: 1890914 - DNA, 25 bp, Homo sapien
ctctttgcagatgtggatagtgacc

SEQ ID NO: 1890915 - DNA, 25 bp, Homo sapien
aactacattttagctgagtcaggga

SEQ ID NO: 1890916 - DNA, 25 bp, Homo sapien
gatcagaacaataggactaaggcca

SEQ ID NO: 1890917 - DNA, 25 bp, Homo sapien
caaaatcagtttatcctctttgtca

SEQ ID NO: 1890918 - DNA, 25 bp, Homo sapien
aatcagtttatcctctttgtcaaga

SEQ ID NO: 1890919 - DNA, 25 bp, Homo sapien
ttatcctctttgtcaagatgttagt

SEQ ID NO: 1890920 - DNA, 25 bp, Homo sapien
cagtttatcctctttgtcaagatgt

SEQ ID NO: 1890921 - DNA, 25 bp, Homo sapien
aactggtatgctcaccattgggcct

SEQ ID NO: 1890922 - DNA, 25 bp, Homo sapien
gcccaagaacctaccagcaatgaaa

SEQ ID NO: 1890923 - DNA, 25 bp, Homo sapien
taaaacagtgctcagagttaaactg

SEQ ID NO: 1890924 - DNA, 25 bp, Homo sapien
atctttcagtatgcatcatgctaat

SEQ ID NO: 1890925 - DNA, 25 bp, Homo sapien
tctggtgagatctagtatgcagtgt

SEQ ID NO: 1890926 - DNA, 25 bp, Homo sapien
agtgatctaggttgtctggtgagat

SEQ ID NO: 1890927 - DNA, 25 bp, Homo sapien
tctaggttgtctggtgagatctagt

SEQ ID NO: 1890928 - DNA, 25 bp, Homo sapien
gatctagtatgcagtgtgtgctttg

SEQ ID NO: 1890929 - DNA, 25 bp, Homo sapien
ttttgctggaaggaatttacatgag

SEQ ID NO: 1890930 - DNA, 25 bp, Homo sapien
taaattcctagttgcttctgtaggg

SEQ ID NO: 1890931 - DNA, 25 bp, Homo sapien
gatatctcagagtttgggcaagtaa

SEQ ID NO: 1890932 - DNA, 25 bp, Homo sapien
gatgtatgctgggtcctgagttcag

SEQ ID NO: 1890933 - DNA, 25 bp, Homo sapien
ataataaatatgacagtcttttgcc

SEQ ID NO: 1890934 - DNA, 25 bp, Homo sapien
ctaaataataaatatgacagtcttt

SEQ ID NO: 1890935 - DNA, 25 bp, Homo sapien
ataaatatgacagtcttttgcccaa

SEQ ID NO: 1890936 - DNA, 25 bp, Homo sapien
tatctaaataataaatatgacagtc

SEQ ID NO: 1890937 - DNA, 25 bp, Homo sapien
ccatccaaatcaccttaaacaaggt

SEQ ID NO: 1890938 - DNA, 25 bp, Homo sapien
gtttcatgcttatgatatggcagca

SEQ ID NO: 1890939 - DNA, 25 bp, Homo sapien
tgtttcatgcttatgatatggcagc

SEQ ID NO: 1890940 - DNA, 25 bp, Homo sapien
aaggtcttcatggccaagcatactt

SEQ ID NO: 1890941 - DNA, 25 bp, Homo sapien
tttttcaagtgtggactggtgaagt

SEQ ID NO: 1890942 - DNA, 25 bp, Homo sapien
tatcctgtaatctagactggaagct

SEQ ID NO: 1890943 - DNA, 25 bp, Homo sapien
aagtaattgctgtttgggaccatga

SEQ ID NO: 1890944 - DNA, 25 bp, Homo sapien
gtcacaggactctcattggtgccag

SEQ ID NO: 1890945 - DNA, 25 bp, Homo sapien
gacaaagtcatctctgtacgccctt

SEQ ID NO: 1890946 - DNA, 25 bp, Homo sapien
tgcaaaacttcttgagccatcacgg

SEQ ID NO: 1890947 - DNA, 25 bp, Homo sapien
gcggcccagtgttgtcgtgaaaaga

SEQ ID NO: 1890948 - DNA, 25 bp, Homo sapien
tggcacacatcacaatccgatagag

SEQ ID NO: 1890949 - DNA, 25 bp, Homo sapien
caaaacgttgctgagatgcctaaag

SEQ ID NO: 1890950 - DNA, 25 bp, Homo sapien
gcttatctgcgcattctagttggga

SEQ ID NO: 1890951 - DNA, 25 bp, Homo sapien
caccaagggttttgatcaggtcagg

SEQ ID NO: 1890952 - DNA, 25 bp, Homo sapien
tatatcctgcccaagggtgccgtaa

SEQ ID NO: 1890953 - DNA, 25 bp, Homo sapien
tgcatctgcttgacccactaggaaa

SEQ ID NO: 1890954 - DNA, 25 bp, Homo sapien
tgcaccgtgcgcagtatggagcagc

SEQ ID NO: 1890955 - DNA, 25 bp, Homo sapien
ggctggaccatgcatccttaaaagt

SEQ ID NO: 1890956 - DNA, 25 bp, Homo sapien
cacaagccgatgtggaggacactca

SEQ ID NO: 1890957 - DNA, 25 bp, Homo sapien
ccatcagaggctgggaaacgtatta

SEQ ID NO: 1890958 - DNA, 25 bp, Homo sapien
taaaactgtacagttagtgactgaa

SEQ ID NO: 1890959 - DNA, 25 bp, Homo sapien
tacattagtgagactgaaattagag

SEQ ID NO: 1890960 - DNA, 25 bp, Homo sapien
agtagcctgcatgaattgttcccca

SEQ ID NO: 1890961 - DNA, 25 bp, Homo sapien
ttgttccccacataaaactgtacag

SEQ ID NO: 1890962 - DNA, 25 bp, Homo sapien
tagtactgccattattattgacagt

SEQ ID NO: 1890963 - DNA, 25 bp, Homo sapien
ccagtaggctgcattgtaaacatta

SEQ ID NO: 1890964 - DNA, 25 bp, Homo sapien
gtccagtttctcaggaatatgaaaa

SEQ ID NO: 1890965 - DNA, 25 bp, Homo sapien
taagaaaaacagatctagagacaat

SEQ ID NO: 1890966 - DNA, 25 bp, Homo sapien
gctcacttcatgtgcaaggtgatct

SEQ ID NO: 1890967 - DNA, 25 bp, Homo sapien
gaaatactgccaagctcacttcatg

SEQ ID NO: 1890968 - DNA, 25 bp, Homo sapien
tactgccaagctcacttcatgtgca

SEQ ID NO: 1890969 - DNA, 25 bp, Homo sapien
tgccaagctcacttcatgtgcaagg

SEQ ID NO: 1890970 - DNA, 25 bp, Homo sapien
aattacattaaaagagattagatga

SEQ ID NO: 1890971 - DNA, 25 bp, Homo sapien
tgcaaattacattaaaagagattag

SEQ ID NO: 1890972 - DNA, 25 bp, Homo sapien
caaattacattaaaagagattagat

SEQ ID NO: 1890973 - DNA, 25 bp, Homo sapien
ctgcaaattacattaaaagagatta

SEQ ID NO: 1890974 - DNA, 25 bp, Homo sapien
gtaagtactaatgcctctgttgcca

SEQ ID NO: 1890975 - DNA, 25 bp, Homo sapien
cacaattggcctaacagtaagtaag

SEQ ID NO: 1890976 - DNA, 25 bp, Homo sapien
actctgagatggcttaagcttctgc

SEQ ID NO: 1890977 - DNA, 25 bp, Homo sapien
ctttaaggagtatgtgaagaggcca

SEQ ID NO: 1890978 - DNA, 25 bp, Homo sapien
aaaatagtttgcctgcccatcacct

SEQ ID NO: 1890979 - DNA, 25 bp, Homo sapien
caaagctggttgttttcatgtcaca

SEQ ID NO: 1890980 - DNA, 25 bp, Homo sapien
taaagccttaatcatcatagtgaga

SEQ ID NO: 1890981 - DNA, 25 bp, Homo sapien
caaatcaagagtccagaatgctatc

SEQ ID NO: 1890982 - DNA, 25 bp, Homo sapien
tcagcatcggtagtgctaataactc

SEQ ID NO: 1890983 - DNA, 25 bp, Homo sapien
tcttcaccaggtcattgattgcctc

SEQ ID NO: 1890984 - DNA, 25 bp, Homo sapien
tgcttctgcatatactcggacgaca

SEQ ID NO: 1890985 - DNA, 25 bp, Homo sapien
ttctgtaccagagggccggacaaaa

SEQ ID NO: 1890986 - DNA, 25 bp, Homo sapien
gtaaatacgatatgactaagtccca

SEQ ID NO: 1890987 - DNA, 25 bp, Homo sapien
gttactctattacacttcctttcag

SEQ ID NO: 1890988 - DNA, 25 bp, Homo sapien
gagttaccactaagataatggccag

SEQ ID NO: 1890989 - DNA, 25 bp, Homo sapien
tacattctacgaaaagtgccagact

SEQ ID NO: 1890990 - DNA, 25 bp, Homo sapien
gtttggaagatctgtatagagagca

SEQ ID NO: 1890991 - DNA, 25 bp, Homo sapien
gccaagattgcttcaatcaccagca

SEQ ID NO: 1890992 - DNA, 25 bp, Homo sapien
tgtcagaaatagcatcaccagctgc

SEQ ID NO: 1890993 - DNA, 25 bp, Homo sapien
actgttgtacagtcaagcccttcag

SEQ ID NO: 1890994 - DNA, 25 bp, Homo sapien
gagatgggatgattacttgaagcta

SEQ ID NO: 1890995 - DNA, 25 bp, Homo sapien
agagtccactgccccatcagttctg

SEQ ID NO: 1890996 - DNA, 25 bp, Homo sapien
ggtaaccaagagtccactgccccat

SEQ ID NO: 1890997 - DNA, 25 bp, Homo sapien
tccatcttctgaataatgtaaaggt

SEQ ID NO: 1890998 - DNA, 25 bp, Homo sapien
tgtatgcacccacactctgttctgt

SEQ ID NO: 1890999 - DNA, 25 bp, Homo sapien
tttcaacagctgtactaaacagtgc

SEQ ID NO: 1891000 - DNA, 25 bp, Homo sapien
catttcaacagctgtactaaacagt

SEQ ID NO: 1891001 - DNA, 25 bp, Homo sapien
agttgttctgctgattgttttatct

SEQ ID NO: 1891002 - DNA, 25 bp, Homo sapien
ttgttctgctgattgttttatcttc

SEQ ID NO: 1891003 - DNA, 25 bp, Homo sapien
tctgtgcaaccaggttacttagagc

SEQ ID NO: 1891004 - DNA, 25 bp, Homo sapien
gaaggatataattcattgcagctag

SEQ ID NO: 1891005 - DNA, 25 bp, Homo sapien
cattaaaacccagaggatagtacta

SEQ ID NO: 1891006 - DNA, 25 bp, Homo sapien
aacaccaccttgacaagaggcaagc

SEQ ID NO: 1891007 - DNA, 25 bp, Homo sapien
tcttgagccttgtggtgcaaatgtt

SEQ ID NO: 1891008 - DNA, 25 bp, Homo sapien
gcaaatgttttacaccagtcttagt

SEQ ID NO: 1891009 - DNA, 25 bp, Homo sapien
aaactcttgagccttgtggtgcaaa

SEQ ID NO: 1891010 - DNA, 25 bp, Homo sapien
cagtcttagtgcaatagacaggtac

SEQ ID NO: 1891011 - DNA, 25 bp, Homo sapien
ctataacacatgcatttaaagaaat

SEQ ID NO: 1891012 - DNA, 25 bp, Homo sapien
gaaatacagcaattactcagatgtc

SEQ ID NO: 1891013 - DNA, 25 bp, Homo sapien
aaaatcaggtcataaactagcagcc

SEQ ID NO: 1891014 - DNA, 25 bp, Homo sapien
gggccccagatggaatcccttgaat

SEQ ID NO: 1891015 - DNA, 25 bp, Homo sapien
gaagagtgtgactacagttgacatc

SEQ ID NO: 1891016 - DNA, 25 bp, Homo sapien
ttaaacaaataggaacatcacatga

SEQ ID NO: 1891017 - DNA, 25 bp, Homo sapien
tcctgcaggaatctgactttgtaat

SEQ ID NO: 1891018 - DNA, 25 bp, Homo sapien
cctgcaggaatctgactttgtaatt

SEQ ID NO: 1891019 - DNA, 25 bp, Homo sapien
gcaggaatctgactttgtaattcct

SEQ ID NO: 1891020 - DNA, 25 bp, Homo sapien
ctgcaggaatctgactttgtaattc

SEQ ID NO: 1891021 - DNA, 25 bp, Homo sapien
agttggaaaacttctcgataatgag

SEQ ID NO: 1891022 - DNA, 25 bp, Homo sapien
gccagaacgaggtacaaaatgaggt

SEQ ID NO: 1891023 - DNA, 25 bp, Homo sapien
gaaagtataggcaaacagacttcca

SEQ ID NO: 1891024 - DNA, 25 bp, Homo sapien
aaaactagtataaatgccagaacga

SEQ ID NO: 1891025 - DNA, 25 bp, Homo sapien
tgtccttaggcatgtcttccaatag

SEQ ID NO: 1891026 - DNA, 25 bp, Homo sapien
tcctgatacatgaccactcttgaca

SEQ ID NO: 1891027 - DNA, 25 bp, Homo sapien
taagtgagcttagcgagaatccctc

SEQ ID NO: 1891028 - DNA, 25 bp, Homo sapien
caggtaatatgtgaccgccctggcc

SEQ ID NO: 1891029 - DNA, 25 bp, Homo sapien
tgtacaacaccaatattcaaacttt

SEQ ID NO: 1891030 - DNA, 25 bp, Homo sapien
caacaccaatattcaaactttctcc

SEQ ID NO: 1891031 - DNA, 25 bp, Homo sapien
caagataccgtgttgaacttccatt

SEQ ID NO: 1891032 - DNA, 25 bp, Homo sapien
ttcttcaagataccgtgttgaactt

SEQ ID NO: 1891033 - DNA, 25 bp, Homo sapien
aattaacgttgctatcttgtctcca

SEQ ID NO: 1891034 - DNA, 25 bp, Homo sapien
ccatctatgagatgaaagtggccat

SEQ ID NO: 1891035 - DNA, 25 bp, Homo sapien
tggccatctgcatcatggtagtaat

SEQ ID NO: 1891036 - DNA, 25 bp, Homo sapien
ccaccaggagctctttaaggaaact

SEQ ID NO: 1891037 - DNA, 25 bp, Homo sapien
agtcagctccacataaatgattgag

SEQ ID NO: 1891038 - DNA, 25 bp, Homo sapien
aatgattgagtttgcccttggaccc

SEQ ID NO: 1891039 - DNA, 25 bp, Homo sapien
caggccctgtgagaagtagtgttcc

SEQ ID NO: 1891040 - DNA, 25 bp, Homo sapien
tcccttagcttcagggcccctatgc

SEQ ID NO: 1891041 - DNA, 25 bp, Homo sapien
cttaagtgatctgtattcatctcca

SEQ ID NO: 1891042 - DNA, 25 bp, Homo sapien
tgtattcatctccactgcaagaagc

SEQ ID NO: 1891043 - DNA, 25 bp, Homo sapien
tctgtattcatctccactgcaagaa

SEQ ID NO: 1891044 - DNA, 25 bp, Homo sapien
gatctgtattcatctccactgcaag

SEQ ID NO: 1891045 - DNA, 25 bp, Homo sapien
ttccatatcggccacccgtgtttcg

SEQ ID NO: 1891046 - DNA, 25 bp, Homo sapien
cgacaatacaccatgtagtgcagct

SEQ ID NO: 1891047 - DNA, 25 bp, Homo sapien
tccacaaaagccttagagagtttct

SEQ ID NO: 1891048 - DNA, 25 bp, Homo sapien
cttagagagtttctggtagtaacct

SEQ ID NO: 1891049 - DNA, 25 bp, Homo sapien
cacaccatctattacagattgtgaa

SEQ ID NO: 1891050 - DNA, 25 bp, Homo sapien
catggaattgacctcctagaacagt

SEQ ID NO: 1891051 - DNA, 25 bp, Homo sapien
tggaattgacctcctagaacagtca

SEQ ID NO: 1891052 - DNA, 25 bp, Homo sapien
ggaattgacctcctagaacagtcac

SEQ ID NO: 1891053 - DNA, 25 bp, Homo sapien
cagcatttgctaaacaggtggcatg

SEQ ID NO: 1891054 - DNA, 25 bp, Homo sapien
ctgatgtcaataagcactctctgca

SEQ ID NO: 1891055 - DNA, 25 bp, Homo sapien
tctttctcgctgatgtcaataagca

SEQ ID NO: 1891056 - DNA, 25 bp, Homo sapien
catttcacccaaaggatcaaccaat

SEQ ID NO: 1891057 - DNA, 25 bp, Homo sapien
ccctggattaggtattttatgtata

SEQ ID NO: 1891058 - DNA, 25 bp, Homo sapien
tcatgaggctgagttgagaacagaa

SEQ ID NO: 1891059 - DNA, 25 bp, Homo sapien
aatattaatactggaccctggatta

SEQ ID NO: 1891060 - DNA, 25 bp, Homo sapien
ctcatgaggctgagttgagaacaga

SEQ ID NO: 1891061 - DNA, 25 bp, Homo sapien
gaagtgcctctggaactagcaataa

SEQ ID NO: 1891062 - DNA, 25 bp, Homo sapien
gctgctgatttagctacaaaggcaa

SEQ ID NO: 1891063 - DNA, 25 bp, Homo sapien
cacagccccagcaatcaaatagaag

SEQ ID NO: 1891064 - DNA, 25 bp, Homo sapien
aactacattgtgtcaagaggttggc

SEQ ID NO: 1891065 - DNA, 25 bp, Homo sapien
gattgtgggacgctgttaccatgac

SEQ ID NO: 1891066 - DNA, 25 bp, Homo sapien
tcaggacagctaataatcccatgcg

SEQ ID NO: 1891067 - DNA, 25 bp, Homo sapien
ttcgttcgaaatccagcagtcccgt

SEQ ID NO: 1891068 - DNA, 25 bp, Homo sapien
cagtcccgtattgaaggatcagtcc

SEQ ID NO: 1891069 - DNA, 25 bp, Homo sapien
aattaagaaatattgtttcgggcat

SEQ ID NO: 1891070 - DNA, 25 bp, Homo sapien
gatgttgtccaacttggtatgtcca

SEQ ID NO: 1891071 - DNA, 25 bp, Homo sapien
ctacaagatgttgtccaacttggta

SEQ ID NO: 1891072 - DNA, 25 bp, Homo sapien
cagactcagggcagatagcagattg

SEQ ID NO: 1891073 - DNA, 25 bp, Homo sapien
gggcagatagcagattgtccccact

SEQ ID NO: 1891074 - DNA, 25 bp, Homo sapien
caccgagcccttgccgaccggtagt

SEQ ID NO: 1891075 - DNA, 25 bp, Homo sapien
ctccgtcgggccgagaatctgacct

SEQ ID NO: 1891076 - DNA, 25 bp, Homo sapien
tcccttctcaactccgagcctcggg

SEQ ID NO: 1891077 - DNA, 25 bp, Homo sapien
cttgccgaccggtagtctcccttct

SEQ ID NO: 1891078 - DNA, 25 bp, Homo sapien
ggctgttaccattgagtgaccagaa

SEQ ID NO: 1891079 - DNA, 25 bp, Homo sapien
ttcacctacacgcagcggagaagcg

SEQ ID NO: 1891080 - DNA, 25 bp, Homo sapien
aagcgcccaagcaacaacgtctgca

SEQ ID NO: 1891081 - DNA, 25 bp, Homo sapien
cctggccaatcacggcagaggacta

SEQ ID NO: 1891082 - DNA, 25 bp, Homo sapien
acagggcgacctcgcccacagtgag

SEQ ID NO: 1891083 - DNA, 25 bp, Homo sapien
gtcgctgggcctcggacagggcgac

SEQ ID NO: 1891084 - DNA, 25 bp, Homo sapien
caaacctttgaatctgggaagcctt

SEQ ID NO: 1891085 - DNA, 25 bp, Homo sapien
cccctctccgacgtcgaggtcatct

SEQ ID NO: 1891086 - DNA, 25 bp, Homo sapien
ttttatttaatgacctctgagacac

SEQ ID NO: 1891087 - DNA, 25 bp, Homo sapien
cttttatttaatgacctctgagaca

SEQ ID NO: 1891088 - DNA, 25 bp, Homo sapien
aatgcggcccaagcgaaaaggccac

SEQ ID NO: 1891089 - DNA, 25 bp, Homo sapien
tgaatcgtaaacgtccggagccctg

SEQ ID NO: 1891090 - DNA, 25 bp, Homo sapien
tccggagccctggaatgcggcccaa

SEQ ID NO: 1891091 - DNA, 25 bp, Homo sapien
ggcagaggccagtgaatcgtaaacg

SEQ ID NO: 1891092 - DNA, 25 bp, Homo sapien
gaccgaggggtggcgactggcgctg

SEQ ID NO: 1891093 - DNA, 25 bp, Homo sapien
cggtccgcgagtccaggaccgaggg

SEQ ID NO: 1891094 - DNA, 25 bp, Homo sapien
gggcggtccgcgagtccaggaccga

SEQ ID NO: 1891095 - DNA, 25 bp, Homo sapien
tccgcgagtccaggaccgaggggtg

SEQ ID NO: 1891096 - DNA, 25 bp, Homo sapien
caggtgggatttctgactcaggatc

SEQ ID NO: 1891097 - DNA, 25 bp, Homo sapien
taaggctgcacaaggcgctgtaaac

SEQ ID NO: 1891098 - DNA, 25 bp, Homo sapien
tagcaaaagttcacctacgcctaga

SEQ ID NO: 1891099 - DNA, 25 bp, Homo sapien
cattacctgagttaattaagaggcc

SEQ ID NO: 1891100 - DNA, 25 bp, Homo sapien
ttggtcttcccattagtgtcctgta

SEQ ID NO: 1891101 - DNA, 25 bp, Homo sapien
gacagaaaccataaataaccagaag

SEQ ID NO: 1891102 - DNA, 25 bp, Homo sapien
gagtttctccgtagtacgtacaaca

SEQ ID NO: 1891103 - DNA, 25 bp, Homo sapien
ttttaaagagaacgtaggcagaata

SEQ ID NO: 1891104 - DNA, 25 bp, Homo sapien
ctggtcaactttggtctgtattttc

SEQ ID NO: 1891105 - DNA, 25 bp, Homo sapien
ctactggtcaactttggtctgtatt

SEQ ID NO: 1891106 - DNA, 25 bp, Homo sapien
caactttggtctgtattttctgcac

SEQ ID NO: 1891107 - DNA, 25 bp, Homo sapien
tcaactttggtctgtattttctgca

SEQ ID NO: 1891108 - DNA, 25 bp, Homo sapien
catctgggagcggacaaatgcttct

SEQ ID NO: 1891109 - DNA, 25 bp, Homo sapien
tttgcggttcaggataaactgtggc

SEQ ID NO: 1891110 - DNA, 25 bp, Homo sapien
gccaagaataacaatcaggtagaat

SEQ ID NO: 1891111 - DNA, 25 bp, Homo sapien
caggtagaatctggtcataatcagt

SEQ ID NO: 1891112 - DNA, 25 bp, Homo sapien
aggataaagccgaccctcttccaag

SEQ ID NO: 1891113 - DNA, 25 bp, Homo sapien
aagtgtttatctgacacttgctgag

SEQ ID NO: 1891114 - DNA, 25 bp, Homo sapien
ctctaatggtattcaaaggaggata

SEQ ID NO: 1891115 - DNA, 25 bp, Homo sapien
ctcttccaagtgtttatctgacact

SEQ ID NO: 1891116 - DNA, 25 bp, Homo sapien
gatatagggtctgtccatttggaag

SEQ ID NO: 1891117 - DNA, 25 bp, Homo sapien
ccagggaacacataggaattgttgc

SEQ ID NO: 1891118 - DNA, 25 bp, Homo sapien
gagtgactggatcaaaaggactgcc

SEQ ID NO: 1891119 - DNA, 25 bp, Homo sapien
caacaccaagagcaactccagggaa

SEQ ID NO: 1891120 - DNA, 25 bp, Homo sapien
tattttgtagcactgctctgcagaa

SEQ ID NO: 1891121 - DNA, 25 bp, Homo sapien
tctgctttgctagttggattactca

SEQ ID NO: 1891122 - DNA, 25 bp, Homo sapien
aataggccgttcattgaaggcagcc

SEQ ID NO: 1891123 - DNA, 25 bp, Homo sapien
tgagaatgcaccaccaattgcagca

SEQ ID NO: 1891124 - DNA, 25 bp, Homo sapien
ttctcttgtgttaaggaagcacgtc

SEQ ID NO: 1891125 - DNA, 25 bp, Homo sapien
tctcttgtgttaaggaagcacgtcc

SEQ ID NO: 1891126 - DNA, 25 bp, Homo sapien
ctttctcttgtgttaaggaagcacg

SEQ ID NO: 1891127 - DNA, 25 bp, Homo sapien
tgatggctttctcttttggtaaacc

SEQ ID NO: 1891128 - DNA, 25 bp, Homo sapien
cagccatatctttttgatggctttc

SEQ ID NO: 1891129 - DNA, 25 bp, Homo sapien
ttaatccttttgaatcaaccagcca

SEQ ID NO: 1891130 - DNA, 25 bp, Homo sapien
cttttgaatcaaccagccatatctt

SEQ ID NO: 1891131 - DNA, 25 bp, Homo sapien
taccctttttactacaacagagcca

SEQ ID NO: 1891132 - DNA, 25 bp, Homo sapien
tttttgtcacatttaggttaagcca

SEQ ID NO: 1891133 - DNA, 25 bp, Homo sapien
tgtctttgttagtgggaacaaaata

SEQ ID NO: 1891134 - DNA, 25 bp, Homo sapien
acagagccactattatgtggcttgc

SEQ ID NO: 1891135 - DNA, 25 bp, Homo sapien
gtttgatcagacagtttgttcttgg

SEQ ID NO: 1891136 - DNA, 25 bp, Homo sapien
ccttggaatagtattgtttgatcag

SEQ ID NO: 1891137 - DNA, 25 bp, Homo sapien
tggttattcgaagagctgcaaggag

SEQ ID NO: 1891138 - DNA, 25 bp, Homo sapien
aggagacctgcaactgcaacagatg

SEQ ID NO: 1891139 - DNA, 25 bp, Homo sapien
tgagtaatcctcaaacagatcctgc

SEQ ID NO: 1891140 - DNA, 25 bp, Homo sapien
tatccttgagtaatcctcaaacaga

SEQ ID NO: 1891141 - DNA, 25 bp, Homo sapien
gtaataaatatccttgagtaatcct

SEQ ID NO: 1891142 - DNA, 25 bp, Homo sapien
taataaatatccttgagtaatcctc

SEQ ID NO: 1891143 - DNA, 25 bp, Homo sapien
ttaatgatccccttcacacaaagaa

SEQ ID NO: 1891144 - DNA, 25 bp, Homo sapien
taaatgagtattaactcagaaaaat

SEQ ID NO: 1891145 - DNA, 25 bp, Homo sapien
ttaaatgagtattaactcagaaaaa

SEQ ID NO: 1891146 - DNA, 25 bp, Homo sapien
tttcagtttatagggtatttctaca

SEQ ID NO: 1891147 - DNA, 25 bp, Homo sapien
ttcagtttatagggtatttctacaa

SEQ ID NO: 1891148 - DNA, 25 bp, Homo sapien
tcagtttatagggtatttctacaaa

SEQ ID NO: 1891149 - DNA, 25 bp, Homo sapien
cagtttatagggtatttctacaaat

SEQ ID NO: 1891150 - DNA, 25 bp, Homo sapien
taagattctcatagtaagacatgtg

SEQ ID NO: 1891151 - DNA, 25 bp, Homo sapien
agaacctgtaagattctcatagtaa

SEQ ID NO: 1891152 - DNA, 25 bp, Homo sapien
ctcatagtaagacatgtgtattggg

SEQ ID NO: 1891153 - DNA, 25 bp, Homo sapien
cctgtaagattctcatagtaagaca

SEQ ID NO: 1891154 - DNA, 25 bp, Homo sapien
tcaggagacgaaatgcattcacatt

SEQ ID NO: 1891155 - DNA, 25 bp, Homo sapien
aatactggtttcgatacttgttcag

SEQ ID NO: 1891156 - DNA, 25 bp, Homo sapien
ctgaataaggcaattcatgccatac

SEQ ID NO: 1891157 - DNA, 25 bp, Homo sapien
gatacttgttcaggagacgaaatgc

SEQ ID NO: 1891158 - DNA, 25 bp, Homo sapien
tgctgactacagaaaaggcattgtg

SEQ ID NO: 1891159 - DNA, 25 bp, Homo sapien
cattcctcccgtctagcttcatggg

SEQ ID NO: 1891160 - DNA, 25 bp, Homo sapien
tgtagtgaaagatacggccagatct

SEQ ID NO: 1891161 - DNA, 25 bp, Homo sapien
taaacaaggaatgataggtgttccg

SEQ ID NO: 1891162 - DNA, 25 bp, Homo sapien
catgttccagtaaatacctcatctc

SEQ ID NO: 1891163 - DNA, 25 bp, Homo sapien
tcaaagcatgttccagtaaatacct

SEQ ID NO: 1891164 - DNA, 25 bp, Homo sapien
ctcctcaaagcatgttccagtaaat

SEQ ID NO: 1891165 - DNA, 25 bp, Homo sapien
tagagaattaaaggtctcctcaaag

SEQ ID NO: 1891166 - DNA, 25 bp, Homo sapien
gaaacgaagcaccgacttttttgca

SEQ ID NO: 1891167 - DNA, 25 bp, Homo sapien
cgaagcaccgacttttttgcattga

SEQ ID NO: 1891168 - DNA, 25 bp, Homo sapien
tgaaacgaagcaccgacttttttgc

SEQ ID NO: 1891169 - DNA, 25 bp, Homo sapien
aagcaccgacttttttgcattgaag

SEQ ID NO: 1891170 - DNA, 25 bp, Homo sapien
taacaattgatgaatgtataagatg

SEQ ID NO: 1891171 - DNA, 25 bp, Homo sapien
caattgatgaatgtataagatggca

SEQ ID NO: 1891172 - DNA, 25 bp, Homo sapien
tttaacaattgatgaatgtataaga

SEQ ID NO: 1891173 - DNA, 25 bp, Homo sapien
acaattgatgaatgtataagatggc

SEQ ID NO: 1891174 - DNA, 25 bp, Homo sapien
aagttcttgtagtgtgctttccagc

SEQ ID NO: 1891175 - DNA, 25 bp, Homo sapien
tcgcgaagttcttgtagtgtgcttt

SEQ ID NO: 1891176 - DNA, 25 bp, Homo sapien
cgaagttcttgtagtgtgctttcca

SEQ ID NO: 1891177 - DNA, 25 bp, Homo sapien
cgcgaagttcttgtagtgtgctttc

SEQ ID NO: 1891178 - DNA, 25 bp, Homo sapien
ggtacagtgactcacagcttccctt

SEQ ID NO: 1891179 - DNA, 25 bp, Homo sapien
gtgagcatagaaccgcctactcaag

SEQ ID NO: 1891180 - DNA, 25 bp, Homo sapien
gagcttccctgccgctttgcttaca

SEQ ID NO: 1891181 - DNA, 25 bp, Homo sapien
tatttgggcaggagcataccactcc

SEQ ID NO: 1891182 - DNA, 25 bp, Homo sapien
tgtgtatagtttgaagtagggtagt

SEQ ID NO: 1891183 - DNA, 25 bp, Homo sapien
ccttgtgtatagtttgaagtagggt

SEQ ID NO: 1891184 - DNA, 25 bp, Homo sapien
tataaatctacaaattactttgggc

SEQ ID NO: 1891185 - DNA, 25 bp, Homo sapien
ttagtattttcttggctattcgggc

SEQ ID NO: 1891186 - DNA, 25 bp, Homo sapien
tgtcaatccctgtttccttacaaag

SEQ ID NO: 1891187 - DNA, 25 bp, Homo sapien
cagagtctgatgtctaggtaacctg

SEQ ID NO: 1891188 - DNA, 25 bp, Homo sapien
gaagtacaaaccctgattcataggt

SEQ ID NO: 1891189 - DNA, 25 bp, Homo sapien
tgcctggcccaagggtactccttaa

SEQ ID NO: 1891190 - DNA, 25 bp, Homo sapien
gatttaatcagagatgcatggatca

SEQ ID NO: 1891191 - DNA, 25 bp, Homo sapien
ctggtggttgaccataagagagtca

SEQ ID NO: 1891192 - DNA, 25 bp, Homo sapien
tggatcatgatggaatgccctgtcc

SEQ ID NO: 1891193 - DNA, 25 bp, Homo sapien
tggactgtaccaactcatgctcaat

SEQ ID NO: 1891194 - DNA, 25 bp, Homo sapien
tctgccgtagtccaatgtagagtgg

SEQ ID NO: 1891195 - DNA, 25 bp, Homo sapien
tgtagagtggatctttaagtaactc

SEQ ID NO: 1891196 - DNA, 25 bp, Homo sapien
tccaaaaaatcatcatattcagaac

SEQ ID NO: 1891197 - DNA, 25 bp, Homo sapien
aaactgcctccatgaattcgtccaa

SEQ ID NO: 1891198 - DNA, 25 bp, Homo sapien
tagggcatctgcgtcatacagtatc

SEQ ID NO: 1891199 - DNA, 25 bp, Homo sapien
cataactgagagtcaccgggtgaac

SEQ ID NO: 1891200 - DNA, 25 bp, Homo sapien
tagtagcttagcgaccataactgag

SEQ ID NO: 1891201 - DNA, 25 bp, Homo sapien
tacagtatcggtcaacctggagact

SEQ ID NO: 1891202 - DNA, 25 bp, Homo sapien
ggtctcccaagccaagaatacgctc

SEQ ID NO: 1891203 - DNA, 25 bp, Homo sapien
tcggttcccacatccagaatgacag

SEQ ID NO: 1891204 - DNA, 25 bp, Homo sapien
tagagccaatttacccacagggatg

SEQ ID NO: 1891205 - DNA, 25 bp, Homo sapien
gatgcccattccattacagccaagg

SEQ ID NO: 1891206 - DNA, 25 bp, Homo sapien
aagcaatatgccctcgatcgtggat

SEQ ID NO: 1891207 - DNA, 25 bp, Homo sapien
tatgccctcgatcgtggatagtaat

SEQ ID NO: 1891208 - DNA, 25 bp, Homo sapien
gatcgtggatagtaataaagagacc

SEQ ID NO: 1891209 - DNA, 25 bp, Homo sapien
ccctcgatcgtggatagtaataaag

SEQ ID NO: 1891210 - DNA, 25 bp, Homo sapien
gctgacactacattatatcctttca

SEQ ID NO: 1891211 - DNA, 25 bp, Homo sapien
ctgacactacattatatcctttcat

SEQ ID NO: 1891212 - DNA, 25 bp, Homo sapien
ttttataacatgcaactttctactg

SEQ ID NO: 1891213 - DNA, 25 bp, Homo sapien
agtttatgaccctgatcctggatca

SEQ ID NO: 1891214 - DNA, 25 bp, Homo sapien
caggtagtagccattctgaaatttt

SEQ ID NO: 1891215 - DNA, 25 bp, Homo sapien
tcctggatcagtacaggtagtagcc

SEQ ID NO: 1891216 - DNA, 25 bp, Homo sapien
tcaatatattctttggcattgctca

SEQ ID NO: 1891217 - DNA, 25 bp, Homo sapien
caatatattctttggcattgctcat

SEQ ID NO: 1891218 - DNA, 25 bp, Homo sapien
agttcaatatattctttggcattgc

SEQ ID NO: 1891219 - DNA, 25 bp, Homo sapien
ttcaatatattctttggcattgctc

SEQ ID NO: 1891220 - DNA, 25 bp, Homo sapien
agcttttcttgatttccttgctcca

SEQ ID NO: 1891221 - DNA, 25 bp, Homo sapien
gcttttcttgatttccttgctccat

SEQ ID NO: 1891222 - DNA, 25 bp, Homo sapien
ctcaatgcttggtaaagtgcctggc

SEQ ID NO: 1891223 - DNA, 25 bp, Homo sapien
gcatgcagtggacgctcaataaatt

SEQ ID NO: 1891224 - DNA, 25 bp, Homo sapien
ctattctcaatgcttggtaaagtgc

SEQ ID NO: 1891225 - DNA, 25 bp, Homo sapien
ttctcaatgcttggtaaagtgcctg

SEQ ID NO: 1891226 - DNA, 25 bp, Homo sapien
ttaattgactattagacccttctac

SEQ ID NO: 1891227 - DNA, 25 bp, Homo sapien
cattcgtgcagcacatataatatta

SEQ ID NO: 1891228 - DNA, 25 bp, Homo sapien
tctacttggaagtccgaaacacatt

SEQ ID NO: 1891229 - DNA, 25 bp, Homo sapien
aaatcaaaacagataccattcgtgc

SEQ ID NO: 1891230 - DNA, 25 bp, Homo sapien
caacaacactgtctacatgttccag

SEQ ID NO: 1891231 - DNA, 25 bp, Homo sapien
cctcaacaacactgtctacatgttc

SEQ ID NO: 1891232 - DNA, 25 bp, Homo sapien
aaactctggttaagtcgatattgtc

SEQ ID NO: 1891233 - DNA, 25 bp, Homo sapien
agtataattctgcccatggcaaatt

SEQ ID NO: 1891234 - DNA, 25 bp, Homo sapien
acaccaaactatattgttggcaagc

SEQ ID NO: 1891235 - DNA, 25 bp, Homo sapien
ttggagatccattaagagaagatac

SEQ ID NO: 1891236 - DNA, 25 bp, Homo sapien
ggcatgaatttctcaatgtcagatg

SEQ ID NO: 1891237 - DNA, 25 bp, Homo sapien
tgggagtataaacaataggcatgaa

SEQ ID NO: 1891238 - DNA, 25 bp, Homo sapien
gaaggtggcaacaatccatgaatgt

SEQ ID NO: 1891239 - DNA, 25 bp, Homo sapien
ctcctgactgttgaaggaaggtggc

SEQ ID NO: 1891240 - DNA, 25 bp, Homo sapien
aaagtcagagttcagatgctcgaaa

SEQ ID NO: 1891241 - DNA, 25 bp, Homo sapien
catgaatgttcaattgctgtctctc

SEQ ID NO: 1891242 - DNA, 25 bp, Homo sapien
cagttgggcgtcctctgaagttcaa

SEQ ID NO: 1891243 - DNA, 25 bp, Homo sapien
gaggataatccagtatgttcaattg

SEQ ID NO: 1891244 - DNA, 25 bp, Homo sapien
tggtctctttccaagaggataatcc

SEQ ID NO: 1891245 - DNA, 25 bp, Homo sapien
tcaattgtgtctggaccaatcatcc

SEQ ID NO: 1891246 - DNA, 25 bp, Homo sapien
gtctggaagacaggcactatactat

SEQ ID NO: 1891247 - DNA, 25 bp, Homo sapien
gccattttacccaggtctggaagac

SEQ ID NO: 1891248 - DNA, 25 bp, Homo sapien
tgccattttacccaggtctggaaga

SEQ ID NO: 1891249 - DNA, 25 bp, Homo sapien
ggaagacaggcactatactattcat

SEQ ID NO: 1891250 - DNA, 25 bp, Homo sapien
gaagtatgtagatatcaaaaaggca

SEQ ID NO: 1891251 - DNA, 25 bp, Homo sapien
acatttgggaaccaattgcctggta

SEQ ID NO: 1891252 - DNA, 25 bp, Homo sapien
gaaattctgaacgtcgaacttgctc

SEQ ID NO: 1891253 - DNA, 25 bp, Homo sapien
aaagaagcttccctgtatgcagaca

SEQ ID NO: 1891254 - DNA, 25 bp, Homo sapien
tgagccatgttaccactgccctcct

SEQ ID NO: 1891255 - DNA, 25 bp, Homo sapien
aataaaagttacaggccacacctat

SEQ ID NO: 1891256 - DNA, 25 bp, Homo sapien
agccatgttaccactgccctcctgc

SEQ ID NO: 1891257 - DNA, 25 bp, Homo sapien
cccagatgctcaggaagctaaggtg

SEQ ID NO: 1891258 - DNA, 25 bp, Homo sapien
tttgttctactgaaaataggtggca

SEQ ID NO: 1891259 - DNA, 25 bp, Homo sapien
cacatacaagtcacaaatagttttg

SEQ ID NO: 1891260 - DNA, 25 bp, Homo sapien
tagttttgtcacatcaaattttact

SEQ ID NO: 1891261 - DNA, 25 bp, Homo sapien
cccacaacttggtcataaattacag

SEQ ID NO: 1891262 - DNA, 25 bp, Homo sapien
tcactccagaaaccgagaggacttg

SEQ ID NO: 1891263 - DNA, 25 bp, Homo sapien
cagattgctaacgtgatctgaaggc

SEQ ID NO: 1891264 - DNA, 25 bp, Homo sapien
tctgggcaggaccagttgagccact

SEQ ID NO: 1891265 - DNA, 25 bp, Homo sapien
tgaaggcactcagtacacgtttctg

SEQ ID NO: 1891266 - DNA, 25 bp, Homo sapien
ccgattaggcgtccttcttccttct

SEQ ID NO: 1891267 - DNA, 25 bp, Homo sapien
ctaacatgggatgccgaggtgcaga

SEQ ID NO: 1891268 - DNA, 25 bp, Homo sapien
actgccctgccatcactctagtgga

SEQ ID NO: 1891269 - DNA, 25 bp, Homo sapien
tagtggatacggacccgattaggcg

SEQ ID NO: 1891270 - DNA, 25 bp, Homo sapien
gcggaggggcgaggccatggtgcgg

SEQ ID NO: 1891271 - DNA, 25 bp, Homo sapien
ggggcgaggccatggtgcggggacc

SEQ ID NO: 1891272 - DNA, 25 bp, Homo sapien
cgaggccatggtgcggggacctgca

SEQ ID NO: 1891273 - DNA, 25 bp, Homo sapien
cggcggaggggcgaggccatggtgc

SEQ ID NO: 1891274 - DNA, 25 bp, Homo sapien
aggtagccgcgctgatgggtgtggc

SEQ ID NO: 1891275 - DNA, 25 bp, Homo sapien
gatgggtgtggcggcgacggggggc

SEQ ID NO: 1891276 - DNA, 25 bp, Homo sapien
tccgtgtcagcaggtagccgcgctg

SEQ ID NO: 1891277 - DNA, 25 bp, Homo sapien
cgtgtcagcaggtagccgcgctgat

SEQ ID NO: 1891278 - DNA, 25 bp, Homo sapien
gggcgggccgcacgcgcggtgcagg

SEQ ID NO: 1891279 - DNA, 25 bp, Homo sapien
gctgctggggtgacggtgctgactg

SEQ ID NO: 1891280 - DNA, 25 bp, Homo sapien
gtgcaggcggcggatgctgctgggg

SEQ ID NO: 1891281 - DNA, 25 bp, Homo sapien
gctgactgcagctgtggcggcggcg

SEQ ID NO: 1891282 - DNA, 25 bp, Homo sapien
cttggctccatagggcctctgccca

SEQ ID NO: 1891283 - DNA, 25 bp, Homo sapien
aggaagagcgagtcctggcagcgct

SEQ ID NO: 1891284 - DNA, 25 bp, Homo sapien
gagtcatggcaggagatcatccgag

SEQ ID NO: 1891285 - DNA, 25 bp, Homo sapien
ggcccgagcgaagccggtgtcccca

SEQ ID NO: 1891286 - DNA, 25 bp, Homo sapien
gatgccagaaggtgcgaacctgagc

SEQ ID NO: 1891287 - DNA, 25 bp, Homo sapien
gaacctgagcggttcaggcagagcc

SEQ ID NO: 1891288 - DNA, 25 bp, Homo sapien
catgggcttatgatcaccgctgtgg

SEQ ID NO: 1891289 - DNA, 25 bp, Homo sapien
catgcctaaacgcagtgcactgggt

SEQ ID NO: 1891290 - DNA, 25 bp, Homo sapien
ctgttcctgtttctgagatttaata

SEQ ID NO: 1891291 - DNA, 25 bp, Homo sapien
tgttcctgtttctgagatttaatat

SEQ ID NO: 1891292 - DNA, 25 bp, Homo sapien
cttgccagtaggcactgaagccagc

SEQ ID NO: 1891293 - DNA, 25 bp, Homo sapien
cagtgtggataccttaaaatctctg

SEQ ID NO: 1891294 - DNA, 25 bp, Homo sapien
ctgcagtgtggataccttaaaatct

SEQ ID NO: 1891295 - DNA, 25 bp, Homo sapien
ttgccagtaggcactgaagccagcc

SEQ ID NO: 1891296 - DNA, 25 bp, Homo sapien
ctttttcccaaacataatcaaagag

SEQ ID NO: 1891297 - DNA, 25 bp, Homo sapien
tattgcatctcagagggcgtacatg

SEQ ID NO: 1891298 - DNA, 25 bp, Homo sapien
agggcgtacatgcactgggttttta

SEQ ID NO: 1891299 - DNA, 25 bp, Homo sapien
aaggtgtttattgcatctcagaggg

SEQ ID NO: 1891300 - DNA, 25 bp, Homo sapien
atctcagagggcgtacatgcactgg

SEQ ID NO: 1891301 - DNA, 25 bp, Homo sapien
tgtcctcaggtgaagtccaaaaaag

SEQ ID NO: 1891302 - DNA, 25 bp, Homo sapien
gcactaacggcatcagtaacatcca

SEQ ID NO: 1891303 - DNA, 25 bp, Homo sapien
gacgtctttccaaatagctcgccac

SEQ ID NO: 1891304 - DNA, 25 bp, Homo sapien
tatgcttttatgaagagctgccaag

SEQ ID NO: 1891305 - DNA, 25 bp, Homo sapien
taagatccgctaatgggtcctttgc

SEQ ID NO: 1891306 - DNA, 25 bp, Homo sapien
aatccttgatgttaagatccgctaa

SEQ ID NO: 1891307 - DNA, 25 bp, Homo sapien
tgatgttaagatccgctaatgggtc

SEQ ID NO: 1891308 - DNA, 25 bp, Homo sapien
cgctaatgggtcctttgctggaggt

SEQ ID NO: 1891309 - DNA, 25 bp, Homo sapien
atttctgtctttcaacatccaccat

SEQ ID NO: 1891310 - DNA, 25 bp, Homo sapien
tcttggtccctgttgcttttgaggg

SEQ ID NO: 1891311 - DNA, 25 bp, Homo sapien
acatccaccattctttctcttggtc

SEQ ID NO: 1891312 - DNA, 25 bp, Homo sapien
gtctttcaacatccaccattctttc

SEQ ID NO: 1891313 - DNA, 25 bp, Homo sapien
agttaatgtcactgatttgtggaca

SEQ ID NO: 1891314 - DNA, 25 bp, Homo sapien
ttacacttattagttaatgtcactg

SEQ ID NO: 1891315 - DNA, 25 bp, Homo sapien
tgatttgtggacattgaagaaactg

SEQ ID NO: 1891316 - DNA, 25 bp, Homo sapien
caccaatgttttacacttattagtt

SEQ ID NO: 1891317 - DNA, 25 bp, Homo sapien
accggctgctgaggcatcatgggca

SEQ ID NO: 1891318 - DNA, 25 bp, Homo sapien
gtgcaaacatgaccggctgctgagg

SEQ ID NO: 1891319 - DNA, 25 bp, Homo sapien
ccaaaggggggcctcatcatgggct

SEQ ID NO: 1891320 - DNA, 25 bp, Homo sapien
tgcgtgccaggtacagcggcagctc

SEQ ID NO: 1891321 - DNA, 25 bp, Homo sapien
ttgtccaaccgatggggccccggca

SEQ ID NO: 1891322 - DNA, 25 bp, Homo sapien
tgtccaaccgatggggccccggcaa

SEQ ID NO: 1891323 - DNA, 25 bp, Homo sapien
ctgctccaggttgtccaaccgatgg

SEQ ID NO: 1891324 - DNA, 25 bp, Homo sapien
tccaggttgtccaaccgatggggcc

SEQ ID NO: 1891325 - DNA, 25 bp, Homo sapien
gacatcttagacatgaggcttccca

SEQ ID NO: 1891326 - DNA, 25 bp, Homo sapien
caacacaagttagacaagagccaca

SEQ ID NO: 1891327 - DNA, 25 bp, Homo sapien
tgcttaggtgatatcctggacccca

SEQ ID NO: 1891328 - DNA, 25 bp, Homo sapien
taaacaagcttcctgtgaacgagac

SEQ ID NO: 1891329 - DNA, 25 bp, Homo sapien
gaagtatgagacttgaacactgcaa

SEQ ID NO: 1891330 - DNA, 25 bp, Homo sapien
gggaactagcaatgaataatcgaaa

SEQ ID NO: 1891331 - DNA, 25 bp, Homo sapien
tggaaagacaccctttgttcatggg

SEQ ID NO: 1891332 - DNA, 25 bp, Homo sapien
acatgttcttcaaagttgcaggata

SEQ ID NO: 1891333 - DNA, 25 bp, Homo sapien
caaagttagcaaaatgcacgctact

SEQ ID NO: 1891334 - DNA, 25 bp, Homo sapien
tgcacgctactttacacacttggaa

SEQ ID NO: 1891335 - DNA, 25 bp, Homo sapien
ggaaactggcaaactgcctgcgctg

SEQ ID NO: 1891336 - DNA, 25 bp, Homo sapien
gaggaataagtacaccgtcggcagc

SEQ ID NO: 1891337 - DNA, 25 bp, Homo sapien
ggttgctggagctactttaggctgc

SEQ ID NO: 1891338 - DNA, 25 bp, Homo sapien
aacgcctgctgaccaggttgctgga

SEQ ID NO: 1891339 - DNA, 25 bp, Homo sapien
caaaggtgcacttggtggaacgcct

SEQ ID NO: 1891340 - DNA, 25 bp, Homo sapien
tttaggctgccagttggctccacca

SEQ ID NO: 1891341 - DNA, 25 bp, Homo sapien
ttgttgtggtaccagaaattccaag

SEQ ID NO: 1891342 - DNA, 25 bp, Homo sapien
tgttgtggtaccagaaattccaaga

SEQ ID NO: 1891343 - DNA, 25 bp, Homo sapien
tatagcagctaaaccatgttacatt

SEQ ID NO: 1891344 - DNA, 25 bp, Homo sapien
ggaaatgctgagtcatacgataatc

SEQ ID NO: 1891345 - DNA, 25 bp, Homo sapien
tttgagtaactatcagacttctttc

SEQ ID NO: 1891346 - DNA, 25 bp, Homo sapien
tcctcatcaatactggttatatgtc

SEQ ID NO: 1891347 - DNA, 25 bp, Homo sapien
ttaatggtattgtctactgcacaaa

SEQ ID NO: 1891348 - DNA, 25 bp, Homo sapien
taacctaatctcaggtcataaagat

SEQ ID NO: 1891349 - DNA, 25 bp, Homo sapien
accaaacataacctaatctcaggtc

SEQ ID NO: 1891350 - DNA, 25 bp, Homo sapien
aatggtattgtctactgcacaaaag

SEQ ID NO: 1891351 - DNA, 25 bp, Homo sapien
agagatgaatcaagatcacttccaa

SEQ ID NO: 1891352 - DNA, 25 bp, Homo sapien
aaaagatcacctagaccatcaaaca

SEQ ID NO: 1891353 - DNA, 25 bp, Homo sapien
gatgaatcaagatcacttccaaggg

SEQ ID NO: 1891354 - DNA, 25 bp, Homo sapien
gccatggttggcatcaaaagatcac

SEQ ID NO: 1891355 - DNA, 25 bp, Homo sapien
ggctgtagcaggttattctgagctg

SEQ ID NO: 1891356 - DNA, 25 bp, Homo sapien
caaaagctgcctcaaaattgggctg

SEQ ID NO: 1891357 - DNA, 25 bp, Homo sapien
ctgctggaagttgaaggcgttgtcc

SEQ ID NO: 1891358 - DNA, 25 bp, Homo sapien
ttgaaggcgttgtcccaaaagctgc

SEQ ID NO: 1891359 - DNA, 25 bp, Homo sapien
gctgatgaactagaagcagcctgag

SEQ ID NO: 1891360 - DNA, 25 bp, Homo sapien
gtaggtctgccgatgctgatgaact

SEQ ID NO: 1891361 - DNA, 25 bp, Homo sapien
cagctagtaggtctgccgatgctga

SEQ ID NO: 1891362 - DNA, 25 bp, Homo sapien
tctgccgatgctgatgaactagaag

SEQ ID NO: 1891363 - DNA, 25 bp, Homo sapien
taagtgttgatggaggagaaatacg

SEQ ID NO: 1891364 - DNA, 25 bp, Homo sapien
ttaagtgttgatggaggagaaatac

SEQ ID NO: 1891365 - DNA, 25 bp, Homo sapien
aagtgttgatggaggagaaatacgc

SEQ ID NO: 1891366 - DNA, 25 bp, Homo sapien
gaatccacctttgctggcgaggcag

SEQ ID NO: 1891367 - DNA, 25 bp, Homo sapien
cacctgaagaatccacctttgctgg

SEQ ID NO: 1891368 - DNA, 25 bp, Homo sapien
gtctatgacacctgaagaatccacc

SEQ ID NO: 1891369 - DNA, 25 bp, Homo sapien
ccccaaaaaggtctatgacacctga

SEQ ID NO: 1891370 - DNA, 25 bp, Homo sapien
gaggtcagcagtgagagaactctca

SEQ ID NO: 1891371 - DNA, 25 bp, Homo sapien
agaggccccttgtggtggagaggag

SEQ ID NO: 1891372 - DNA, 25 bp, Homo sapien
gagaggccccttgtggtggagagga

SEQ ID NO: 1891373 - DNA, 25 bp, Homo sapien
ctgtactaaacaggtctatgctagg

SEQ ID NO: 1891374 - DNA, 25 bp, Homo sapien
taaacaggtctatgctaggagcagc

SEQ ID NO: 1891375 - DNA, 25 bp, Homo sapien
agcagcatctggcttaggcgctgca

SEQ ID NO: 1891376 - DNA, 25 bp, Homo sapien
cagcaacttcaggagtggactcaaa

SEQ ID NO: 1891377 - DNA, 25 bp, Homo sapien
ctggaggggctgtgctagctgtagg

SEQ ID NO: 1891378 - DNA, 25 bp, Homo sapien
aaagaggtccagctcaggtgcagcc

SEQ ID NO: 1891379 - DNA, 25 bp, Homo sapien
agcagttgcgggaactggaggggct

SEQ ID NO: 1891380 - DNA, 25 bp, Homo sapien
tgtaggggtaactacaggaacactg

SEQ ID NO: 1891381 - DNA, 25 bp, Homo sapien
ttggggtagctggtgcggcggcccc

SEQ ID NO: 1891382 - DNA, 25 bp, Homo sapien
tcctgaacatgcatcaagtgctgct

SEQ ID NO: 1891383 - DNA, 25 bp, Homo sapien
ggtagctggtgcggcggccccttcg

SEQ ID NO: 1891384 - DNA, 25 bp, Homo sapien
tggggtagctggtgcggcggcccct

SEQ ID NO: 1891385 - DNA, 25 bp, Homo sapien
tgggtgcggtttttaaaacagcaga

SEQ ID NO: 1891386 - DNA, 25 bp, Homo sapien
cccaaatactgtcttccgcaatatc

SEQ ID NO: 1891387 - DNA, 25 bp, Homo sapien
atccccaaatactgtcttccgcaat

SEQ ID NO: 1891388 - DNA, 25 bp, Homo sapien
tactgtcttccgcaatatctactca

SEQ ID NO: 1891389 - DNA, 25 bp, Homo sapien
aaatactgtcttccgcaatatctac

SEQ ID NO: 1891390 - DNA, 25 bp, Homo sapien
gatgttggccaaccttagagactgg

SEQ ID NO: 1891391 - DNA, 25 bp, Homo sapien
caaagctgtgtctagtggagtgctc

SEQ ID NO: 1891392 - DNA, 25 bp, Homo sapien
tagagactggagcatggcatgtagc

SEQ ID NO: 1891393 - DNA, 25 bp, Homo sapien
catattgattacaccaaagcctgcc

SEQ ID NO: 1891394 - DNA, 25 bp, Homo sapien
taggttctggtgcaaatggatctga

SEQ ID NO: 1891395 - DNA, 25 bp, Homo sapien
ggtaggttctggtgcaaatggatct

SEQ ID NO: 1891396 - DNA, 25 bp, Homo sapien
cagcagtaacagttgtagtagtgga

SEQ ID NO: 1891397 - DNA, 25 bp, Homo sapien
aacagttgtagtagtggaggcagaa

SEQ ID NO: 1891398 - DNA, 25 bp, Homo sapien
gagggaacagaggaaagtgcagcca

SEQ ID NO: 1891399 - DNA, 25 bp, Homo sapien
ggaacagaggaaagtgcagccaaag

SEQ ID NO: 1891400 - DNA, 25 bp, Homo sapien
gaacagaggaaagtgcagccaaaga

SEQ ID NO: 1891401 - DNA, 25 bp, Homo sapien
ttcagagggaacagaggaaagtgca

SEQ ID NO: 1891402 - DNA, 25 bp, Homo sapien
caggagatcactagatggtttagaa

SEQ ID NO: 1891403 - DNA, 25 bp, Homo sapien
aggtccaggagatcactagatggtt

SEQ ID NO: 1891404 - DNA, 25 bp, Homo sapien
tccaggagatcactagatggtttag

SEQ ID NO: 1891405 - DNA, 25 bp, Homo sapien
gagatcactagatggtttagaagtg

SEQ ID NO: 1891406 - DNA, 25 bp, Homo sapien
taaatcaaccggtggggatgtgtca

SEQ ID NO: 1891407 - DNA, 25 bp, Homo sapien
aattaggagacgtaacagttgtggc

SEQ ID NO: 1891408 - DNA, 25 bp, Homo sapien
gacagccgcagatgcagttgcaaat

SEQ ID NO: 1891409 - DNA, 25 bp, Homo sapien
ttttagctggtgtagaattaggaga

SEQ ID NO: 1891410 - DNA, 25 bp, Homo sapien
cttacttaatggagagggagcacca

SEQ ID NO: 1891411 - DNA, 25 bp, Homo sapien
tacagcatacggtgggaaatgtcct

SEQ ID NO: 1891412 - DNA, 25 bp, Homo sapien
tatctatactgtccgtgtcaaaggg

SEQ ID NO: 1891413 - DNA, 25 bp, Homo sapien
tataaacaacaggtagcaagggcac

SEQ ID NO: 1891414 - DNA, 25 bp, Homo sapien
gaaatgtcctagtgagttttggcta

SEQ ID NO: 1891415 - DNA, 25 bp, Homo sapien
taaactctgaaggttcccaggctcg

SEQ ID NO: 1891416 - DNA, 25 bp, Homo sapien
tgagaaccagaggtgctccaatggg

SEQ ID NO: 1891417 - DNA, 25 bp, Homo sapien
catgctttaacggtggattccagac

SEQ ID NO: 1891418 - DNA, 25 bp, Homo sapien
caaaactgtcaggatgcgtgacctc

SEQ ID NO: 1891419 - DNA, 25 bp, Homo sapien
aatgtatttagatgctgttcaagcg

SEQ ID NO: 1891420 - DNA, 25 bp, Homo sapien
gttcaagcgtctccataagactgct

SEQ ID NO: 1891421 - DNA, 25 bp, Homo sapien
ccttctaatgtatttagatgctgtt

SEQ ID NO: 1891422 - DNA, 25 bp, Homo sapien
gatgctgttcaagcgtctccataag

SEQ ID NO: 1891423 - DNA, 25 bp, Homo sapien
tgtgaggtcaggaatgtcaccttta

SEQ ID NO: 1891424 - DNA, 25 bp, Homo sapien
gtgtgaggtcaggaatgtcaccttt

SEQ ID NO: 1891425 - DNA, 25 bp, Homo sapien
tgtgtgaggtcaggaatgtcacctt

SEQ ID NO: 1891426 - DNA, 25 bp, Homo sapien
tgaggtcaggaatgtcacctttatc

SEQ ID NO: 1891427 - DNA, 25 bp, Homo sapien
tgcgtttgcttttaggttcctggtc

SEQ ID NO: 1891428 - DNA, 25 bp, Homo sapien
tgctgactattcctttttgccttgc

SEQ ID NO: 1891429 - DNA, 25 bp, Homo sapien
tattgcgtttgcttttaggttcctg

SEQ ID NO: 1891430 - DNA, 25 bp, Homo sapien
cgtttgcttttaggttcctggtcat

SEQ ID NO: 1891431 - DNA, 25 bp, Homo sapien
agaaatctgctgctaatgtataatt

SEQ ID NO: 1891432 - DNA, 25 bp, Homo sapien
aatctgctgctaatgtataatttaa

SEQ ID NO: 1891433 - DNA, 25 bp, Homo sapien
gagaaatctgctgctaatgtataat

SEQ ID NO: 1891434 - DNA, 25 bp, Homo sapien
gaaatctgctgctaatgtataattt

SEQ ID NO: 1891435 - DNA, 25 bp, Homo sapien
ttcaggttgcagtctcgtagacagc

SEQ ID NO: 1891436 - DNA, 25 bp, Homo sapien
tcagggccagcagatatactcttac

SEQ ID NO: 1891437 - DNA, 25 bp, Homo sapien
gcatttcagaggtgttgcacggtga

SEQ ID NO: 1891438 - DNA, 25 bp, Homo sapien
ccactgtgcttgtgagagtcagagc

SEQ ID NO: 1891439 - DNA, 25 bp, Homo sapien
cacaatgcatggactagagtacttc

SEQ ID NO: 1891440 - DNA, 25 bp, Homo sapien
tgttctccgtactcaggcataattt

SEQ ID NO: 1891441 - DNA, 25 bp, Homo sapien
cactgataaacccatgaggaaagaa

SEQ ID NO: 1891442 - DNA, 25 bp, Homo sapien
gataattacggttaaaccatggcaa

SEQ ID NO: 1891443 - DNA, 25 bp, Homo sapien
taatttccaatatcagcatgaatca

SEQ ID NO: 1891444 - DNA, 25 bp, Homo sapien
tcctagtaatcagttaattgacatg

SEQ ID NO: 1891445 - DNA, 25 bp, Homo sapien
caacattccaatcagttcctagtaa

SEQ ID NO: 1891446 - DNA, 25 bp, Homo sapien
cattgtatggtttgctgctgagcct

SEQ ID NO: 1891447 - DNA, 25 bp, Homo sapien
tctagagcatctttacattgtcctt

SEQ ID NO: 1891448 - DNA, 25 bp, Homo sapien
cattctagttagaaatcgtttgtaa

SEQ ID NO: 1891449 - DNA, 25 bp, Homo sapien
gcatctttacattgtcctttcttca

SEQ ID NO: 1891450 - DNA, 25 bp, Homo sapien
gaaattcagacactcgtgtcattct

SEQ ID NO: 1891451 - DNA, 25 bp, Homo sapien
gaacagatggttcatattcccagtg

SEQ ID NO: 1891452 - DNA, 25 bp, Homo sapien
ggtacactccaatacaggcctccag

SEQ ID NO: 1891453 - DNA, 25 bp, Homo sapien
aagtgatcatcagacctaaagtggg

SEQ ID NO: 1891454 - DNA, 25 bp, Homo sapien
caagcaggttgtgaataagcaggta

SEQ ID NO: 1891455 - DNA, 25 bp, Homo sapien
ttgaaaagaagcataaatgctgcat

SEQ ID NO: 1891456 - DNA, 25 bp, Homo sapien
catttgttagttcatttggatgcac

SEQ ID NO: 1891457 - DNA, 25 bp, Homo sapien
gctgcatttatgacaccatttgtta

SEQ ID NO: 1891458 - DNA, 25 bp, Homo sapien
taataacaccatcattgtagcaagc

SEQ ID NO: 1891459 - DNA, 25 bp, Homo sapien
gccattgtcctcattacaccatcgg

SEQ ID NO: 1891460 - DNA, 25 bp, Homo sapien
ttcaagcagtgcatcaatttgtccc

SEQ ID NO: 1891461 - DNA, 25 bp, Homo sapien
tttagcagcttttcgggagccattg

SEQ ID NO: 1891462 - DNA, 25 bp, Homo sapien
aatttgtccctgtagtattggcata

SEQ ID NO: 1891463 - DNA, 25 bp, Homo sapien
gaagcccttgtatccagtgatggtg

SEQ ID NO: 1891464 - DNA, 25 bp, Homo sapien
tcccagaccaacagtggagaaagca

SEQ ID NO: 1891465 - DNA, 25 bp, Homo sapien
gctgatcatggcaactttcagggtc

SEQ ID NO: 1891466 - DNA, 25 bp, Homo sapien
ccagatgatgtggacatgctgatca

SEQ ID NO: 1891467 - DNA, 25 bp, Homo sapien
gcgccttatgaaggtagacatatca

SEQ ID NO: 1891468 - DNA, 25 bp, Homo sapien
actatagcgccttatgaaggtagac

SEQ ID NO: 1891469 - DNA, 25 bp, Homo sapien
ttcaaatatctactatagcgcctta

SEQ ID NO: 1891470 - DNA, 25 bp, Homo sapien
atatctactatagcgccttatgaag

SEQ ID NO: 1891471 - DNA, 25 bp, Homo sapien
aaattgctgagattgaatagtgtat

SEQ ID NO: 1891472 - DNA, 25 bp, Homo sapien
aaaattgctgagattgaatagtgta

SEQ ID NO: 1891473 - DNA, 25 bp, Homo sapien
aattgctgagattgaatagtgtatt

SEQ ID NO: 1891474 - DNA, 25 bp, Homo sapien
tgttgcccgctcaaagagagtgtcg

SEQ ID NO: 1891475 - DNA, 25 bp, Homo sapien
ttaacattggtctcgttggtagcct

SEQ ID NO: 1891476 - DNA, 25 bp, Homo sapien
aaccacccagctactgtttgttgcc

SEQ ID NO: 1891477 - DNA, 25 bp, Homo sapien
ccatgagatgatgtgttgtcactaa

SEQ ID NO: 1891478 - DNA, 25 bp, Homo sapien
tacggcctctcatcagaagactcag

SEQ ID NO: 1891479 - DNA, 25 bp, Homo sapien
catagctgtcacttgctcaaaaccc

SEQ ID NO: 1891480 - DNA, 25 bp, Homo sapien
tgcctagaacgtctctgccttcact

SEQ ID NO: 1891481 - DNA, 25 bp, Homo sapien
tacgtgctattctcattgcctagaa

SEQ ID NO: 1891482 - DNA, 25 bp, Homo sapien
tagtatcttataagagagtccccag

SEQ ID NO: 1891483 - DNA, 25 bp, Homo sapien
gctcagaatatttgccacatggaca

SEQ ID NO: 1891484 - DNA, 25 bp, Homo sapien
taaatgaaagatggctgtaactggc

SEQ ID NO: 1891485 - DNA, 25 bp, Homo sapien
tccaaggtcacactaaaatgcagtt

SEQ ID NO: 1891486 - DNA, 25 bp, Homo sapien
caaagaatgataagcttgcagcccc

SEQ ID NO: 1891487 - DNA, 25 bp, Homo sapien
tgcagcccctgaacaactggacaaa

SEQ ID NO: 1891488 - DNA, 25 bp, Homo sapien
gctatatggagcaaagactgggtga

SEQ ID NO: 1891489 - DNA, 25 bp, Homo sapien
aaacactgtaggtgagccgtgcttg

SEQ ID NO: 1891490 - DNA, 25 bp, Homo sapien
gttttggttgtggccaaatgaccat

SEQ ID NO: 1891491 - DNA, 25 bp, Homo sapien
agttttggttgtggccaaatgacca

SEQ ID NO: 1891492 - DNA, 25 bp, Homo sapien
ctagttttggttgtggccaaatgac

SEQ ID NO: 1891493 - DNA, 25 bp, Homo sapien
tagttttggttgtggccaaatgacc

SEQ ID NO: 1891494 - DNA, 25 bp, Homo sapien
tcataatttgggaggaacggaatca

SEQ ID NO: 1891495 - DNA, 25 bp, Homo sapien
caatactgggtaggtactgggtgcc

SEQ ID NO: 1891496 - DNA, 25 bp, Homo sapien
tgttcaagcttgacacaatactggg

SEQ ID NO: 1891497 - DNA, 25 bp, Homo sapien
tgcagatgttactttggaccaactc

SEQ ID NO: 1891498 - DNA, 25 bp, Homo sapien
caggtgctttttcttggggcccatt

SEQ ID NO: 1891499 - DNA, 25 bp, Homo sapien
ccaggtgctttttcttggggcccat

SEQ ID NO: 1891500 - DNA, 25 bp, Homo sapien
tccaggtgctttttcttggggccca

SEQ ID NO: 1891501 - DNA, 25 bp, Homo sapien
gctcttgctacagcagagcctgtaa

SEQ ID NO: 1891502 - DNA, 25 bp, Homo sapien
gcggcgatccgatccgtgagcgttt

SEQ ID NO: 1891503 - DNA, 25 bp, Homo sapien
taacgctgtactgagcggcggcgat

SEQ ID NO: 1891504 - DNA, 25 bp, Homo sapien
gatccgtgagcgtttggcccgacat

SEQ ID NO: 1891505 - DNA, 25 bp, Homo sapien
cctgcgatgcggtccagggagtctt

SEQ ID NO: 1891506 - DNA, 25 bp, Homo sapien
tcttggccgtgagtagggccgtcac

SEQ ID NO: 1891507 - DNA, 25 bp, Homo sapien
agggccgtcacggaaccccagcgtg

SEQ ID NO: 1891508 - DNA, 25 bp, Homo sapien
gagacggtccggctttaatccgcag

SEQ ID NO: 1891509 - DNA, 25 bp, Homo sapien
cccgggcgcaaagtctccagccctg

SEQ ID NO: 1891510 - DNA, 25 bp, Homo sapien
gccgccgagggaagccgcgccggtg

SEQ ID NO: 1891511 - DNA, 25 bp, Homo sapien
tggatgtgtgcgaccgcgcgtagcc

SEQ ID NO: 1891512 - DNA, 25 bp, Homo sapien
gccgcaggatgagcggagcccgggc

SEQ ID NO: 1891513 - DNA, 25 bp, Homo sapien
tcctccgacgagtcaggtgacggcg

SEQ ID NO: 1891514 - DNA, 25 bp, Homo sapien
agctgtggctcctccgacgagtcag

SEQ ID NO: 1891515 - DNA, 25 bp, Homo sapien
gcctcgcgcaagcatccccggcaag

SEQ ID NO: 1891516 - DNA, 25 bp, Homo sapien
tggctcctccgacgagtcaggtgac

SEQ ID NO: 1891517 - DNA, 25 bp, Homo sapien
cgggccgcccctccgctgctggcgc

SEQ ID NO: 1891518 - DNA, 25 bp, Homo sapien
ccagccagcggctctccgctgggcg

SEQ ID NO: 1891519 - DNA, 25 bp, Homo sapien
gctgctggcgccgcacccggcacgc

SEQ ID NO: 1891520 - DNA, 25 bp, Homo sapien
ggcgccgggccgcccctccgctgct

SEQ ID NO: 1891521 - DNA, 25 bp, Homo sapien
gtagcagttgtctgagcttcacctg

SEQ ID NO: 1891522 - DNA, 25 bp, Homo sapien
aagttcttaaaatatctcttgtgtt

SEQ ID NO: 1891523 - DNA, 25 bp, Homo sapien
catatccttattctcatttgcttca

SEQ ID NO: 1891524 - DNA, 25 bp, Homo sapien
tttttctagtagcagttgtctgagc

SEQ ID NO: 1891525 - DNA, 25 bp, Homo sapien
ggtgcagtcatgcagtattaaagat

SEQ ID NO: 1891526 - DNA, 25 bp, Homo sapien
gtcatgcagtattaaagattttcca

SEQ ID NO: 1891527 - DNA, 25 bp, Homo sapien
tcaggtgcagtcatgcagtattaaa

SEQ ID NO: 1891528 - DNA, 25 bp, Homo sapien
caggccatggggactaactgccaca

SEQ ID NO: 1891529 - DNA, 25 bp, Homo sapien
cctctgcctgtccattttcgccact

SEQ ID NO: 1891530 - DNA, 25 bp, Homo sapien
ccctctgcctgtccattttcgccac

SEQ ID NO: 1891531 - DNA, 25 bp, Homo sapien
gccctctgcctgtccattttcgcca

SEQ ID NO: 1891532 - DNA, 25 bp, Homo sapien
ccttaagggactggactggatattc

SEQ ID NO: 1891533 - DNA, 25 bp, Homo sapien
tactcaacgtggcttctgattcccg

SEQ ID NO: 1891534 - DNA, 25 bp, Homo sapien
caatttggagcccagctttcagcct

SEQ ID NO: 1891535 - DNA, 25 bp, Homo sapien
ctgatatagtactgccaagaggccc

SEQ ID NO: 1891536 - DNA, 25 bp, Homo sapien
aactctccaagtcacctttggccat

SEQ ID NO: 1891537 - DNA, 25 bp, Homo sapien
ctggtggccactctgccctacagaa

SEQ ID NO: 1891538 - DNA, 25 bp, Homo sapien
gccactctgccctacagaactctcc

SEQ ID NO: 1891539 - DNA, 25 bp, Homo sapien
agaactctccaagtcacctttggcc

SEQ ID NO: 1891540 - DNA, 25 bp, Homo sapien
caggtcaacaaaacaattgaagaga

SEQ ID NO: 1891541 - DNA, 25 bp, Homo sapien
atcccctggagtaaagtggaaagag

SEQ ID NO: 1891542 - DNA, 25 bp, Homo sapien
caaaacaattgaagagaagtgtctg

SEQ ID NO: 1891543 - DNA, 25 bp, Homo sapien
acttcatacgaagacagaaatcccc

SEQ ID NO: 1891544 - DNA, 25 bp, Homo sapien
gttcttggcagatggccatctgttt

SEQ ID NO: 1891545 - DNA, 25 bp, Homo sapien
gccatctgtttctggccttgggcct

SEQ ID NO: 1891546 - DNA, 25 bp, Homo sapien
ttatagactaattctgttcttggca

SEQ ID NO: 1891547 - DNA, 25 bp, Homo sapien
cttatagactaattctgttcttggc

SEQ ID NO: 1891548 - DNA, 25 bp, Homo sapien
ttctttgtgtagaaaatcagtcata

SEQ ID NO: 1891549 - DNA, 25 bp, Homo sapien
ggctaccggggaacatatgccctct

SEQ ID NO: 1891550 - DNA, 25 bp, Homo sapien
tatgccctctaaagagccagacacc

SEQ ID NO: 1891551 - DNA, 25 bp, Homo sapien
gacacctgagaactcgtcctctcaa

SEQ ID NO: 1891552 - DNA, 25 bp, Homo sapien
actggtgctgcccgttggtgaccca

SEQ ID NO: 1891553 - DNA, 25 bp, Homo sapien
ctggtgctgcccgttggtgacccag

SEQ ID NO: 1891554 - DNA, 25 bp, Homo sapien
acactggtgctgcccgttggtgacc

SEQ ID NO: 1891555 - DNA, 25 bp, Homo sapien
gtgctgcccgttggtgacccagcag

SEQ ID NO: 1891556 - DNA, 25 bp, Homo sapien
ggtgaggtcttttctgctatgatga

SEQ ID NO: 1891557 - DNA, 25 bp, Homo sapien
tgaggtcttttctgctatgatgaaa

SEQ ID NO: 1891558 - DNA, 25 bp, Homo sapien
tcttttctgctatgatgaaagctag

SEQ ID NO: 1891559 - DNA, 25 bp, Homo sapien
gtcttttctgctatgatgaaagcta

SEQ ID NO: 1891560 - DNA, 25 bp, Homo sapien
ctgacaagccagtacattcaagtgt

SEQ ID NO: 1891561 - DNA, 25 bp, Homo sapien
cagtacattcaagtgtatctttaca

SEQ ID NO: 1891562 - DNA, 25 bp, Homo sapien
gccagtacattcaagtgtatcttta

SEQ ID NO: 1891563 - DNA, 25 bp, Homo sapien
ctactgacaagccagtacattcaag

SEQ ID NO: 1891564 - DNA, 25 bp, Homo sapien
acccagttgccatgtcactgccaag

SEQ ID NO: 1891565 - DNA, 25 bp, Homo sapien
ttacccagttgccatgtcactgcca

SEQ ID NO: 1891566 - DNA, 25 bp, Homo sapien
tacccagttgccatgtcactgccaa

SEQ ID NO: 1891567 - DNA, 25 bp, Homo sapien
cagacagaagcatctgatccatggt

SEQ ID NO: 1891568 - DNA, 25 bp, Homo sapien
aagcatctgatccatggttgttcat

SEQ ID NO: 1891569 - DNA, 25 bp, Homo sapien
acagaagcatctgatccatggttgt

SEQ ID NO: 1891570 - DNA, 25 bp, Homo sapien
gcatctgatccatggttgttcatat

SEQ ID NO: 1891571 - DNA, 25 bp, Homo sapien
gcgtaacattctttttctgagcatc

SEQ ID NO: 1891572 - DNA, 25 bp, Homo sapien
aaataagcgtaacattctttttctg

SEQ ID NO: 1891573 - DNA, 25 bp, Homo sapien
agcgtaacattctttttctgagcat

SEQ ID NO: 1891574 - DNA, 25 bp, Homo sapien
taagcgtaacattctttttctgagc

SEQ ID NO: 1891575 - DNA, 25 bp, Homo sapien
gctccaggcattatatcttgatata

SEQ ID NO: 1891576 - DNA, 25 bp, Homo sapien
tgatataattgtcccaaggtgtaaa

SEQ ID NO: 1891577 - DNA, 25 bp, Homo sapien
tcttgatataattgtcccaaggtgt

SEQ ID NO: 1891578 - DNA, 25 bp, Homo sapien
catcacaagatagcggctgtagctc

SEQ ID NO: 1891579 - DNA, 25 bp, Homo sapien
ctagagaggccagaaaaaggaatgc

SEQ ID NO: 1891580 - DNA, 25 bp, Homo sapien
agaggcaaatctccagcaacactaa

SEQ ID NO: 1891581 - DNA, 25 bp, Homo sapien
tgtggggtgttttcattagcacgca

SEQ ID NO: 1891582 - DNA, 25 bp, Homo sapien
gttttcattagcacgcagaggcaaa

SEQ ID NO: 1891583 - DNA, 25 bp, Homo sapien
ggcaaatctccagcaacactaaagc

SEQ ID NO: 1891584 - DNA, 25 bp, Homo sapien
aactggtggcctaatgccttagcta

SEQ ID NO: 1891585 - DNA, 25 bp, Homo sapien
ccttagctattgagcaggttgccac

SEQ ID NO: 1891586 - DNA, 25 bp, Homo sapien
tgctgcacatcgctgctgaactggt

SEQ ID NO: 1891587 - DNA, 25 bp, Homo sapien
tggccctatttctagtgtaaaaagc

SEQ ID NO: 1891588 - DNA, 25 bp, Homo sapien
cctcaggtgagcatgatggatggat

SEQ ID NO: 1891589 - DNA, 25 bp, Homo sapien
agtagaactgcttcaaccacctgcc

SEQ ID NO: 1891590 - DNA, 25 bp, Homo sapien
tggatggatgccctgtcatgcagat

SEQ ID NO: 1891591 - DNA, 25 bp, Homo sapien
gagcattctcagactggacttccag

SEQ ID NO: 1891592 - DNA, 25 bp, Homo sapien
agagacattcataagagccctgagc

SEQ ID NO: 1891593 - DNA, 25 bp, Homo sapien
gagacaagagtgttcacacctgcca

SEQ ID NO: 1891594 - DNA, 25 bp, Homo sapien
aggaacctccaattgcagcagtcag

SEQ ID NO: 1891595 - DNA, 25 bp, Homo sapien
tgagcccctggatcttccagtgtga

SEQ ID NO: 1891596 - DNA, 25 bp, Homo sapien
gttacattcccagcgggcacgagga

SEQ ID NO: 1891597 - DNA, 25 bp, Homo sapien
gaacactgggtcgtgcacgtttcca

SEQ ID NO: 1891598 - DNA, 25 bp, Homo sapien
ggtgcagaagatcgaccagggctct

SEQ ID NO: 1891599 - DNA, 25 bp, Homo sapien
tgccggtggccataaaggtgccgac

SEQ ID NO: 1891600 - DNA, 25 bp, Homo sapien
gctctttgcattacagcctagtgcc

SEQ ID NO: 1891601 - DNA, 25 bp, Homo sapien
gagctgcatcagtacacaattccca

SEQ ID NO: 1891602 - DNA, 25 bp, Homo sapien
gacagctcagtcattaagtgcaggg

SEQ ID NO: 1891603 - DNA, 25 bp, Homo sapien
tttcgcgcattcattagccctcagc

SEQ ID NO: 1891604 - DNA, 25 bp, Homo sapien
ggtccacttgcactggtaatatcaa

SEQ ID NO: 1891605 - DNA, 25 bp, Homo sapien
gcactggtaatatcaatggaacaca

SEQ ID NO: 1891606 - DNA, 25 bp, Homo sapien
tggtaatatcaatggaacacagagg

SEQ ID NO: 1891607 - DNA, 25 bp, Homo sapien
agggaggtccacttgcactggtaat

SEQ ID NO: 1891608 - DNA, 25 bp, Homo sapien
ctaggtggcccattccactggtctg

SEQ ID NO: 1891609 - DNA, 25 bp, Homo sapien
gactgtccttcgctaggtggcccat

SEQ ID NO: 1891610 - DNA, 25 bp, Homo sapien
tgactgtccttcgctaggtggccca

SEQ ID NO: 1891611 - DNA, 25 bp, Homo sapien
actgtccttcgctaggtggcccatt

SEQ ID NO: 1891612 - DNA, 25 bp, Homo sapien
ctggggcttgcgtgcttcaggtgct

SEQ ID NO: 1891613 - DNA, 25 bp, Homo sapien
acactggggcttgcgtgcttcaggt

SEQ ID NO: 1891614 - DNA, 25 bp, Homo sapien
gggcttgcgtgcttcaggtgctgcc

SEQ ID NO: 1891615 - DNA, 25 bp, Homo sapien
aggtgctgcctctccgtagcctgct

SEQ ID NO: 1891616 - DNA, 25 bp, Homo sapien
actagcgtgggttacccatttatgg

SEQ ID NO: 1891617 - DNA, 25 bp, Homo sapien
tggactagcgtgggttacccattta

SEQ ID NO: 1891618 - DNA, 25 bp, Homo sapien
cttggactagcgtgggttacccatt

SEQ ID NO: 1891619 - DNA, 25 bp, Homo sapien
gcttggactagcgtgggttacccat

SEQ ID NO: 1891620 - DNA, 25 bp, Homo sapien
aatgtttcctcttttccgtatatca

SEQ ID NO: 1891621 - DNA, 25 bp, Homo sapien
atgtttcctcttttccgtatatcat

SEQ ID NO: 1891622 - DNA, 25 bp, Homo sapien
cttacactggtccaatgtttcctct

SEQ ID NO: 1891623 - DNA, 25 bp, Homo sapien
acactggtccaatgtttcctctttt

SEQ ID NO: 1891624 - DNA, 25 bp, Homo sapien
aacaaaatgaccatgcctgtgtata

SEQ ID NO: 1891625 - DNA, 25 bp, Homo sapien
ttattgtgtcccatacaaaaaagga

SEQ ID NO: 1891626 - DNA, 25 bp, Homo sapien
taaaggcttattgattgcatttgct

SEQ ID NO: 1891627 - DNA, 25 bp, Homo sapien
tgcatttgctagtactattcagcca

SEQ ID NO: 1891628 - DNA, 25 bp, Homo sapien
ggcacgggtttccaggctctaggta

SEQ ID NO: 1891629 - DNA, 25 bp, Homo sapien
cacgggtttccaggctctaggtaag

SEQ ID NO: 1891630 - DNA, 25 bp, Homo sapien
actcttagttaacctcttcaggatt

SEQ ID NO: 1891631 - DNA, 25 bp, Homo sapien
gattggactggcctggaagaagaag

SEQ ID NO: 1891632 - DNA, 25 bp, Homo sapien
aggtgttgctgcaaagataccggga

SEQ ID NO: 1891633 - DNA, 25 bp, Homo sapien
ggtgttgctgcaaagataccgggaa

SEQ ID NO: 1891634 - DNA, 25 bp, Homo sapien
gtgttgctgcaaagataccgggaaa

SEQ ID NO: 1891635 - DNA, 25 bp, Homo sapien
gaacactgctgtctaccatctatga

SEQ ID NO: 1891636 - DNA, 25 bp, Homo sapien
ttggagttctccttcgaatttgacc

SEQ ID NO: 1891637 - DNA, 25 bp, Homo sapien
ttacctaggaatgaggctcacgctg

SEQ ID NO: 1891638 - DNA, 25 bp, Homo sapien
gaagttaagaccagttacttgtcaa

SEQ ID NO: 1891639 - DNA, 25 bp, Homo sapien
tagctggctcattctgatcaggaag

SEQ ID NO: 1891640 - DNA, 25 bp, Homo sapien
aagaaggtgtgagcatctcttcagg

SEQ ID NO: 1891641 - DNA, 25 bp, Homo sapien
cttgctgctgaatgaaggtaagtgc

SEQ ID NO: 1891642 - DNA, 25 bp, Homo sapien
gaggcaataacagagcttacagtca

SEQ ID NO: 1891643 - DNA, 25 bp, Homo sapien
tccagcctcatgtcaactctgcttt

SEQ ID NO: 1891644 - DNA, 25 bp, Homo sapien
cagcaaagccattctctgaatgcat

SEQ ID NO: 1891645 - DNA, 25 bp, Homo sapien
cagccctcttgaatcagcaaagcca

SEQ ID NO: 1891646 - DNA, 25 bp, Homo sapien
aactctgctttcaccatgctgcagc

SEQ ID NO: 1891647 - DNA, 25 bp, Homo sapien
ccctaggcacgagtaagctgggtgc

SEQ ID NO: 1891648 - DNA, 25 bp, Homo sapien
ttctgtgtggccctaccctaggcac

SEQ ID NO: 1891649 - DNA, 25 bp, Homo sapien
cagagtgtgattcataaccttgaag

SEQ ID NO: 1891650 - DNA, 25 bp, Homo sapien
aagttgcgattctgaagttcccacc

SEQ ID NO: 1891651 - DNA, 25 bp, Homo sapien
gcttcctgctgttgtgttcaagaga

SEQ ID NO: 1891652 - DNA, 25 bp, Homo sapien
aagaaaatctcggtgcggagagggt

SEQ ID NO: 1891653 - DNA, 25 bp, Homo sapien
tgccgcttcctgctgttgtgttcaa

SEQ ID NO: 1891654 - DNA, 25 bp, Homo sapien
ctcggtgcggagagggtggttctca

SEQ ID NO: 1891655 - DNA, 25 bp, Homo sapien
cttgtggaacctggtagccacaaat

SEQ ID NO: 1891656 - DNA, 25 bp, Homo sapien
tggaacctggtagccacaaatgggg

SEQ ID NO: 1891657 - DNA, 25 bp, Homo sapien
atgagggtggtgttactgctgcttt

SEQ ID NO: 1891658 - DNA, 25 bp, Homo sapien
tgtggaacctggtagccacaaatgg

SEQ ID NO: 1891659 - DNA, 25 bp, Homo sapien
cgtgtgctgacattgagaactgcgt

SEQ ID NO: 1891660 - DNA, 25 bp, Homo sapien
tgacattgagaactgcgtggccgtg

SEQ ID NO: 1891661 - DNA, 25 bp, Homo sapien
tgctgacattgagaactgcgtggcc

SEQ ID NO: 1891662 - DNA, 25 bp, Homo sapien
ctgcgtggccgtgggagaacagctc

SEQ ID NO: 1891663 - DNA, 25 bp, Homo sapien
gctcagtgtctagacaggacagagt

SEQ ID NO: 1891664 - DNA, 25 bp, Homo sapien
gggttactttattctgacgcattcc

SEQ ID NO: 1891665 - DNA, 25 bp, Homo sapien
caatagtagtctctaagtagctcag

SEQ ID NO: 1891666 - DNA, 25 bp, Homo sapien
gcattccatttgcaattcccctggg

SEQ ID NO: 1891667 - DNA, 25 bp, Homo sapien
tggagtatcaggttctcagcttacc

SEQ ID NO: 1891668 - DNA, 25 bp, Homo sapien
tcacgcacttgtgggactcattgag

SEQ ID NO: 1891669 - DNA, 25 bp, Homo sapien
actaagtgggcaatttgactgctcc

SEQ ID NO: 1891670 - DNA, 25 bp, Homo sapien
taaggagtcactacctgtgcatggg

SEQ ID NO: 1891671 - DNA, 25 bp, Homo sapien
ggagactcatcttacacagtcatgg

SEQ ID NO: 1891672 - DNA, 25 bp, Homo sapien
caatgtttctggtgggttgtgctga

SEQ ID NO: 1891673 - DNA, 25 bp, Homo sapien
ggtactgcctcgtatctcttgtagg

SEQ ID NO: 1891674 - DNA, 25 bp, Homo sapien
gacaggtctagagtgatccatccca

SEQ ID NO: 1891675 - DNA, 25 bp, Homo sapien
gagcccttctctgctataaaggaaa

SEQ ID NO: 1891676 - DNA, 25 bp, Homo sapien
tgtgagcggcagtaagcgttgaaaa

SEQ ID NO: 1891677 - DNA, 25 bp, Homo sapien
taatatttggatgatgggtacacta

SEQ ID NO: 1891678 - DNA, 25 bp, Homo sapien
taagtatctaccaacaattgactgg

SEQ ID NO: 1891679 - DNA, 25 bp, Homo sapien
tctggaaacatattggaacacttgt

SEQ ID NO: 1891680 - DNA, 25 bp, Homo sapien
ttctggaaacatattggaacacttg

SEQ ID NO: 1891681 - DNA, 25 bp, Homo sapien
ctggaaacatattggaacacttgtt

SEQ ID NO: 1891682 - DNA, 25 bp, Homo sapien
atcttcaggccttttaataaggtca

SEQ ID NO: 1891683 - DNA, 25 bp, Homo sapien
ccagctcacgattctttaactgtgc

SEQ ID NO: 1891684 - DNA, 25 bp, Homo sapien
tagttctgtgcggaacttctccagc

SEQ ID NO: 1891685 - DNA, 25 bp, Homo sapien
gctctcggagaacatctaatattga

SEQ ID NO: 1891686 - DNA, 25 bp, Homo sapien
tctactacttggtgtgtttgctgta

SEQ ID NO: 1891687 - DNA, 25 bp, Homo sapien
ttctaagcccacgaaatgtttcatc

SEQ ID NO: 1891688 - DNA, 25 bp, Homo sapien
tctaagcccacgaaatgtttcatct

SEQ ID NO: 1891689 - DNA, 25 bp, Homo sapien
taagcccacgaaatgtttcatctct

SEQ ID NO: 1891690 - DNA, 25 bp, Homo sapien
ttttctaagcccacgaaatgtttca

SEQ ID NO: 1891691 - DNA, 25 bp, Homo sapien
agagtaattaatagctttcattctc

SEQ ID NO: 1891692 - DNA, 25 bp, Homo sapien
tagagtaattaatagctttcattct

SEQ ID NO: 1891693 - DNA, 25 bp, Homo sapien
agctttcattctctatatccagaaa

SEQ ID NO: 1891694 - DNA, 25 bp, Homo sapien
ggcatagtcatacacagaatggtca

SEQ ID NO: 1891695 - DNA, 25 bp, Homo sapien
aattgggatggtttgcagagagctc

SEQ ID NO: 1891696 - DNA, 25 bp, Homo sapien
tatcttgtgatacacctgttcctgg

SEQ ID NO: 1891697 - DNA, 25 bp, Homo sapien
tgttcctggtacaccagttaggaag

SEQ ID NO: 1891698 - DNA, 25 bp, Homo sapien
tcagactagacttaagaccaacgtt

SEQ ID NO: 1891699 - DNA, 25 bp, Homo sapien
tgtaaatactgccaaccaggagata

SEQ ID NO: 1891700 - DNA, 25 bp, Homo sapien
aaatgcccagctgcctactaacttg

SEQ ID NO: 1891701 - DNA, 25 bp, Homo sapien
ggctggctttgctgtacctacactc

SEQ ID NO: 1891702 - DNA, 25 bp, Homo sapien
gcagctcattaacttgactttggaa

SEQ ID NO: 1891703 - DNA, 25 bp, Homo sapien
tgtagaatttcttctcgaacttcag

SEQ ID NO: 1891704 - DNA, 25 bp, Homo sapien
tcagaaactacgagagactcttgtt

SEQ ID NO: 1891705 - DNA, 25 bp, Homo sapien
gactcttgtttactctgcagctcat

SEQ ID NO: 1891706 - DNA, 25 bp, Homo sapien
cgatttagttcagctactttggaag

SEQ ID NO: 1891707 - DNA, 25 bp, Homo sapien
gttgctattttacgatttagttcag

SEQ ID NO: 1891708 - DNA, 25 bp, Homo sapien
ctgatgagatgctttgagggatgca

SEQ ID NO: 1891709 - DNA, 25 bp, Homo sapien
atgctttgagggatgcaatgtgtgc

SEQ ID NO: 1891710 - DNA, 25 bp, Homo sapien
attaatccttctagctcatttttta

SEQ ID NO: 1891711 - DNA, 25 bp, Homo sapien
ttaatccttctagctcattttttaa

SEQ ID NO: 1891712 - DNA, 25 bp, Homo sapien
aatccttctagctcattttttaatc

SEQ ID NO: 1891713 - DNA, 25 bp, Homo sapien
gggctttaattctgggagagtcatg

SEQ ID NO: 1891714 - DNA, 25 bp, Homo sapien
caatttgcaggcaagtagctgctcc

SEQ ID NO: 1891715 - DNA, 25 bp, Homo sapien
tcttacagtgatctgatgggcttcc

SEQ ID NO: 1891716 - DNA, 25 bp, Homo sapien
aagaacgtctatttcggcttcaagg

SEQ ID NO: 1891717 - DNA, 25 bp, Homo sapien
gaaggaaagaatccatgtaatgcca

SEQ ID NO: 1891718 - DNA, 25 bp, Homo sapien
ggaaagaatccatgtaatgccaaac

SEQ ID NO: 1891719 - DNA, 25 bp, Homo sapien
aggaaagaatccatgtaatgccaaa

SEQ ID NO: 1891720 - DNA, 25 bp, Homo sapien
ctgaaggaaagaatccatgtaatgc

SEQ ID NO: 1891721 - DNA, 25 bp, Homo sapien
aactgttgttccatggtacgaaggc

SEQ ID NO: 1891722 - DNA, 25 bp, Homo sapien
tgccctccagatcagcttctagctt

SEQ ID NO: 1891723 - DNA, 25 bp, Homo sapien
gctgctgatgcagccaatattaaag

SEQ ID NO: 1891724 - DNA, 25 bp, Homo sapien
tttctccataaattccactgtattt

SEQ ID NO: 1891725 - DNA, 25 bp, Homo sapien
cctttcttggccctgacccaatcta

SEQ ID NO: 1891726 - DNA, 25 bp, Homo sapien
ttggccctgacccaatctactcagt

SEQ ID NO: 1891727 - DNA, 25 bp, Homo sapien
tcttggccctgacccaatctactca

SEQ ID NO: 1891728 - DNA, 25 bp, Homo sapien
tttcttggccctgacccaatctact

SEQ ID NO: 1891729 - DNA, 25 bp, Homo sapien
tcatgaaaatttaccctgaacacat

SEQ ID NO: 1891730 - DNA, 25 bp, Homo sapien
ctgccgaatagatggattcccagat

SEQ ID NO: 1891731 - DNA, 25 bp, Homo sapien
tcttctgccgaatagatggattccc

SEQ ID NO: 1891732 - DNA, 25 bp, Homo sapien
ttaagcgtatcttctgccgaataga

SEQ ID NO: 1891733 - DNA, 25 bp, Homo sapien
gctgctttatcttttaagcgtatct

SEQ ID NO: 1891734 - DNA, 25 bp, Homo sapien
ttgcagacgactgatttcttgttta

SEQ ID NO: 1891735 - DNA, 25 bp, Homo sapien
tctaagccgaagtgcatctttatcc

SEQ ID NO: 1891736 - DNA, 25 bp, Homo sapien
ccactgtaatcttttttgcagacga

SEQ ID NO: 1891737 - DNA, 25 bp, Homo sapien
ctgattttcagcataccactgtaat

SEQ ID NO: 1891738 - DNA, 25 bp, Homo sapien
tataagatacagtaactcaataacc

SEQ ID NO: 1891739 - DNA, 25 bp, Homo sapien
gatacagtaactcaataacctgctt

SEQ ID NO: 1891740 - DNA, 25 bp, Homo sapien
cagtaactcaataacctgcttgttg

SEQ ID NO: 1891741 - DNA, 25 bp, Homo sapien
caataacctgcttgttgttctccaa

SEQ ID NO: 1891742 - DNA, 25 bp, Homo sapien
gaagaacgcccataattatactaaa

SEQ ID NO: 1891743 - DNA, 25 bp, Homo sapien
taacaacgacaaacattcaggagtg

SEQ ID NO: 1891744 - DNA, 25 bp, Homo sapien
gatgtatacaacatagtgtctagct

SEQ ID NO: 1891745 - DNA, 25 bp, Homo sapien
tcaaccttatatagcaaagttggct

SEQ ID NO: 1891746 - DNA, 25 bp, Homo sapien
agtcttttgatgtcttccaataaac

SEQ ID NO: 1891747 - DNA, 25 bp, Homo sapien
tcattttttcgaagtctacttcaag

SEQ ID NO: 1891748 - DNA, 25 bp, Homo sapien
ttttgatgtcttccaataaactgtc

SEQ ID NO: 1891749 - DNA, 25 bp, Homo sapien
ttttcgaagtctacttcaagagctt

SEQ ID NO: 1891750 - DNA, 25 bp, Homo sapien
ccaatgcttggatgagtgcctggta

SEQ ID NO: 1891751 - DNA, 25 bp, Homo sapien
attaaatgagttgtagtcagcccca

SEQ ID NO: 1891752 - DNA, 25 bp, Homo sapien
tgggatactaaaaggaaagggctca

SEQ ID NO: 1891753 - DNA, 25 bp, Homo sapien
tgctagcttcaacatgatgggacta

SEQ ID NO: 1891754 - DNA, 25 bp, Homo sapien
ttcggaagacaggtagaaagctact

SEQ ID NO: 1891755 - DNA, 25 bp, Homo sapien
tagtactatcattctcaaagggagg

SEQ ID NO: 1891756 - DNA, 25 bp, Homo sapien
taggctgcacgctttcaaataagga

SEQ ID NO: 1891757 - DNA, 25 bp, Homo sapien
gaagtaactgtactccacaggccgt

SEQ ID NO: 1891758 - DNA, 25 bp, Homo sapien
tacttgagacagaaaacgacttttg

SEQ ID NO: 1891759 - DNA, 25 bp, Homo sapien
cagaaaacgacttttgtgcatctgt

SEQ ID NO: 1891760 - DNA, 25 bp, Homo sapien
tgccatccgtagttctgctaacaga

SEQ ID NO: 1891761 - DNA, 25 bp, Homo sapien
ctgaatcttcaactacttgagacag

SEQ ID NO: 1891762 - DNA, 25 bp, Homo sapien
ggagatcttttacttgattatataa

SEQ ID NO: 1891763 - DNA, 25 bp, Homo sapien
ttaaacattcgctcctcatttttct

SEQ ID NO: 1891764 - DNA, 25 bp, Homo sapien
gatcttttacttgattatataatcg

SEQ ID NO: 1891765 - DNA, 25 bp, Homo sapien
gttttccttaaacattcgctcctca

SEQ ID NO: 1891766 - DNA, 25 bp, Homo sapien
ctgttgatatccttgaagaagtgtc

SEQ ID NO: 1891767 - DNA, 25 bp, Homo sapien
gctgcttctccaaaatgtaaccacc

SEQ ID NO: 1891768 - DNA, 25 bp, Homo sapien
tttctccagtgacaggatcagctgc

SEQ ID NO: 1891769 - DNA, 25 bp, Homo sapien
gaagaagtgtctcttgttcttgtat

SEQ ID NO: 1891770 - DNA, 25 bp, Homo sapien
taattatcttgattcaatttgaaga

SEQ ID NO: 1891771 - DNA, 25 bp, Homo sapien
gaagaatataattatcttgattcaa

SEQ ID NO: 1891772 - DNA, 25 bp, Homo sapien
caatttgaagagttctttttcctgt

SEQ ID NO: 1891773 - DNA, 25 bp, Homo sapien
tcttgattcaatttgaagagttctt

SEQ ID NO: 1891774 - DNA, 25 bp, Homo sapien
ttaatttgctcaattagggcttgcg

SEQ ID NO: 1891775 - DNA, 25 bp, Homo sapien
agggcttgcgcacccctccatttat

SEQ ID NO: 1891776 - DNA, 25 bp, Homo sapien
gctcaattagggcttgcgcacccct

SEQ ID NO: 1891777 - DNA, 25 bp, Homo sapien
ttagggcttgcgcacccctccattt

SEQ ID NO: 1891778 - DNA, 25 bp, Homo sapien
cataagtaatttcttctccttgttc

SEQ ID NO: 1891779 - DNA, 25 bp, Homo sapien
aaacataagtaatttcttctccttg

SEQ ID NO: 1891780 - DNA, 25 bp, Homo sapien
ctgaactcttttaaacataagtaat

SEQ ID NO: 1891781 - DNA, 25 bp, Homo sapien
aacataagtaatttcttctccttgt

SEQ ID NO: 1891782 - DNA, 25 bp, Homo sapien
cagacttcttacgagtagacaggca

SEQ ID NO: 1891783 - DNA, 25 bp, Homo sapien
gacttcttacgagtagacaggcaac

SEQ ID NO: 1891784 - DNA, 25 bp, Homo sapien
tttcagacttcttacgagtagacag

SEQ ID NO: 1891785 - DNA, 25 bp, Homo sapien
tcagacttcttacgagtagacaggc

SEQ ID NO: 1891786 - DNA, 25 bp, Homo sapien
tgaaggattcctaagtgacaatcac

SEQ ID NO: 1891787 - DNA, 25 bp, Homo sapien
caaatgctaaatggccatgtgtggc

SEQ ID NO: 1891788 - DNA, 25 bp, Homo sapien
tcatccccttccctagttgataggc

SEQ ID NO: 1891789 - DNA, 25 bp, Homo sapien
tggacaagacagttctcacctccgc

SEQ ID NO: 1891790 - DNA, 25 bp, Homo sapien
gacacaccgttatttagtggccaag

SEQ ID NO: 1891791 - DNA, 25 bp, Homo sapien
tatgaaaactgtgacttggacaagt

SEQ ID NO: 1891792 - DNA, 25 bp, Homo sapien
gcctggcctgaataatcaatattag

SEQ ID NO: 1891793 - DNA, 25 bp, Homo sapien
gacaagttgagtgaatagcccaagg

SEQ ID NO: 1891794 - DNA, 25 bp, Homo sapien
cctaggttgattggaggtagaaatc

SEQ ID NO: 1891795 - DNA, 25 bp, Homo sapien
tgagctcctaactgacgcatataat

SEQ ID NO: 1891796 - DNA, 25 bp, Homo sapien
gggtttgccatagcctgagctccta

SEQ ID NO: 1891797 - DNA, 25 bp, Homo sapien
gcacttctggccttcttgtatggta

SEQ ID NO: 1891798 - DNA, 25 bp, Homo sapien
ccccttcttcttcagaactaagttg

SEQ ID NO: 1891799 - DNA, 25 bp, Homo sapien
tcttcttcagaactaagttgagatc

SEQ ID NO: 1891800 - DNA, 25 bp, Homo sapien
cagaactaagttgagatctgtaagt

SEQ ID NO: 1891801 - DNA, 25 bp, Homo sapien
ctgtttacccattacagccccttct

SEQ ID NO: 1891802 - DNA, 25 bp, Homo sapien
cacatgttgtgagtcttgagacaaa

SEQ ID NO: 1891803 - DNA, 25 bp, Homo sapien
ggcagttacttcagttacttgtgga

SEQ ID NO: 1891804 - DNA, 25 bp, Homo sapien
tattaattttgtcatcctgagataa

SEQ ID NO: 1891805 - DNA, 25 bp, Homo sapien
gttttccatactctcatttgtggtc

SEQ ID NO: 1891806 - DNA, 25 bp, Homo sapien
catcatgaggatacagtataggaag

SEQ ID NO: 1891807 - DNA, 25 bp, Homo sapien
tggaaggttcactgcatcatttttt

SEQ ID NO: 1891808 - DNA, 25 bp, Homo sapien
catgaggatacagtataggaaggag

SEQ ID NO: 1891809 - DNA, 25 bp, Homo sapien
tacatcatgaggatacagtatagga

SEQ ID NO: 1891810 - DNA, 25 bp, Homo sapien
actgatcccaaaggaatctattctg

SEQ ID NO: 1891811 - DNA, 25 bp, Homo sapien
gtttcatcagctcctctactgtggg

SEQ ID NO: 1891812 - DNA, 25 bp, Homo sapien
catcagctcctctactgtgggcaga

SEQ ID NO: 1891813 - DNA, 25 bp, Homo sapien
cccaaaggaatctattctgataggt

SEQ ID NO: 1891814 - DNA, 25 bp, Homo sapien
cttgatgtagggcttcaacgtcact

SEQ ID NO: 1891815 - DNA, 25 bp, Homo sapien
tcatctcccaatgaatgggctatat

SEQ ID NO: 1891816 - DNA, 25 bp, Homo sapien
tcttccactgtgttactctcaattt

SEQ ID NO: 1891817 - DNA, 25 bp, Homo sapien
gtcactactgctttgtccataagaa

SEQ ID NO: 1891818 - DNA, 25 bp, Homo sapien
caacagagtctaatgaatcaagcag

SEQ ID NO: 1891819 - DNA, 25 bp, Homo sapien
taggcaccttggcttaggtgttatt

SEQ ID NO: 1891820 - DNA, 25 bp, Homo sapien
gtcatttctggtaggcaccttggct

SEQ ID NO: 1891821 - DNA, 25 bp, Homo sapien
cttgttcatcaagattgacctctgc

SEQ ID NO: 1891822 - DNA, 25 bp, Homo sapien
tagcaagcatgccagttttttcttc

SEQ ID NO: 1891823 - DNA, 25 bp, Homo sapien
attagcaagcatgccagttttttct

SEQ ID NO: 1891824 - DNA, 25 bp, Homo sapien
gcaagcatgccagttttttcttctt

SEQ ID NO: 1891825 - DNA, 25 bp, Homo sapien
cattagcaagcatgccagttttttc

SEQ ID NO: 1891826 - DNA, 25 bp, Homo sapien
cactattatgccttgtactgaccta

SEQ ID NO: 1891827 - DNA, 25 bp, Homo sapien
atatcacctatacctcctacttggg

SEQ ID NO: 1891828 - DNA, 25 bp, Homo sapien
ttcagaaagacaggccaccaaacag

SEQ ID NO: 1891829 - DNA, 25 bp, Homo sapien
cagtttgtgggaccttccaataaca

SEQ ID NO: 1891830 - DNA, 25 bp, Homo sapien
gagactgtgcccagatagagaccaa

SEQ ID NO: 1891831 - DNA, 25 bp, Homo sapien
ggccaggctggtgacctattcattt

SEQ ID NO: 1891832 - DNA, 25 bp, Homo sapien
aaaaacatctagtcctaacacacag

SEQ ID NO: 1891833 - DNA, 25 bp, Homo sapien
ctgagtgacatgtagacaccccagg

SEQ ID NO: 1891834 - DNA, 25 bp, Homo sapien
aaggtaggcaatatgaagtagtagc

SEQ ID NO: 1891835 - DNA, 25 bp, Homo sapien
tgagaattagagtatgaagcaccac

SEQ ID NO: 1891836 - DNA, 25 bp, Homo sapien
taaaggcaagtcataccaaagaaaa

SEQ ID NO: 1891837 - DNA, 25 bp, Homo sapien
cagacgttaatgttgtgactagcat

SEQ ID NO: 1891838 - DNA, 25 bp, Homo sapien
tcattaattgtcgtaatttttttca

SEQ ID NO: 1891839 - DNA, 25 bp, Homo sapien
cataaaatcattaattgtcgtaatt

SEQ ID NO: 1891840 - DNA, 25 bp, Homo sapien
cattaattgtcgtaatttttttcat

SEQ ID NO: 1891841 - DNA, 25 bp, Homo sapien
ctcataaaatcattaattgtcgtaa

SEQ ID NO: 1891842 - DNA, 25 bp, Homo sapien
gagacctgtaagtttacaacaataa

SEQ ID NO: 1891843 - DNA, 25 bp, Homo sapien
ttgagctcttcatatagcaataggc

SEQ ID NO: 1891844 - DNA, 25 bp, Homo sapien
tcatatagcaataggcagccaggtt

SEQ ID NO: 1891845 - DNA, 25 bp, Homo sapien
gcaagattatgaagaactccatttt

SEQ ID NO: 1891846 - DNA, 25 bp, Homo sapien
tagtcaacggtgcaccaacatactc

SEQ ID NO: 1891847 - DNA, 25 bp, Homo sapien
catctttagtagtcaacggtgcacc

SEQ ID NO: 1891848 - DNA, 25 bp, Homo sapien
atctcttcatctttagtagtcaacg

SEQ ID NO: 1891849 - DNA, 25 bp, Homo sapien
ggtgcaccaacatactcatcttcaa

SEQ ID NO: 1891850 - DNA, 25 bp, Homo sapien
acaggaattatttggccaggatctc

SEQ ID NO: 1891851 - DNA, 25 bp, Homo sapien
tactggccttatacaacctttgctg

SEQ ID NO: 1891852 - DNA, 25 bp, Homo sapien
aaagtgtctccatgttaactgaggc

SEQ ID NO: 1891853 - DNA, 25 bp, Homo sapien
ggaacaccttttcagagtggaactg

SEQ ID NO: 1891854 - DNA, 25 bp, Homo sapien
tcatgtttcgattcattctcatgtt

SEQ ID NO: 1891855 - DNA, 25 bp, Homo sapien
tcagttagttctgcgttggcttgat

SEQ ID NO: 1891856 - DNA, 25 bp, Homo sapien
tgccagttcttcatgtttcgattca

SEQ ID NO: 1891857 - DNA, 25 bp, Homo sapien
ttcgtcatcagttagttctgcgttg

SEQ ID NO: 1891858 - DNA, 25 bp, Homo sapien
taatgtgtccaatcccactccgaga

SEQ ID NO: 1891859 - DNA, 25 bp, Homo sapien
cactccgagactactatggttgagc

SEQ ID NO: 1891860 - DNA, 25 bp, Homo sapien
caatggaagatgtcaagcctttctc

SEQ ID NO: 1891861 - DNA, 25 bp, Homo sapien
aaatgtgtagagtcattagaatcca

SEQ ID NO: 1891862 - DNA, 25 bp, Homo sapien
tctaagctatcagtacttaagagag

SEQ ID NO: 1891863 - DNA, 25 bp, Homo sapien
agctatcagtacttaagagagaggt

SEQ ID NO: 1891864 - DNA, 25 bp, Homo sapien
catttgtttctaagctatcagtact

SEQ ID NO: 1891865 - DNA, 25 bp, Homo sapien
aggttccactgctcttaagaaattg

SEQ ID NO: 1891866 - DNA, 25 bp, Homo sapien
tcaaatagctcacatttgttccaag

SEQ ID NO: 1891867 - DNA, 25 bp, Homo sapien
caaatagctcacatttgttccaaga

SEQ ID NO: 1891868 - DNA, 25 bp, Homo sapien
aaatagctcacatttgttccaagaa

SEQ ID NO: 1891869 - DNA, 25 bp, Homo sapien
ttgttttcaaatagctcacatttgt

SEQ ID NO: 1891870 - DNA, 25 bp, Homo sapien
gaataacccggagttcagtagataa

SEQ ID NO: 1891871 - DNA, 25 bp, Homo sapien
tgaggaggaataacccggagttcag

SEQ ID NO: 1891872 - DNA, 25 bp, Homo sapien
gaggaataacccggagttcagtaga

SEQ ID NO: 1891873 - DNA, 25 bp, Homo sapien
atgaggaggaataacccggagttca

SEQ ID NO: 1891874 - DNA, 25 bp, Homo sapien
gaagtcttgactgaccccttgtggt

SEQ ID NO: 1891875 - DNA, 25 bp, Homo sapien
atccagaagtcttgactgacccctt

SEQ ID NO: 1891876 - DNA, 25 bp, Homo sapien
ccagaagtcttgactgaccccttgt

SEQ ID NO: 1891877 - DNA, 25 bp, Homo sapien
ccttgtggtcaaataatttgaaact

SEQ ID NO: 1891878 - DNA, 25 bp, Homo sapien
tcatcttcagttatccaccaaggca

SEQ ID NO: 1891879 - DNA, 25 bp, Homo sapien
catcttcagttatccaccaaggcac

SEQ ID NO: 1891880 - DNA, 25 bp, Homo sapien
aatcatcttcagttatccaccaagg

SEQ ID NO: 1891881 - DNA, 25 bp, Homo sapien
tcttcagttatccaccaaggcactg

SEQ ID NO: 1891882 - DNA, 25 bp, Homo sapien
cttttttagattgtctagctgtttt

SEQ ID NO: 1891883 - DNA, 25 bp, Homo sapien
ttagattgtctagctgttttgtctg

SEQ ID NO: 1891884 - DNA, 25 bp, Homo sapien
agattgtctagctgttttgtctgaa

SEQ ID NO: 1891885 - DNA, 25 bp, Homo sapien
ttttttagattgtctagctgttttg

SEQ ID NO: 1891886 - DNA, 25 bp, Homo sapien
tcataaactgttcaaactcttcatc

SEQ ID NO: 1891887 - DNA, 25 bp, Homo sapien
taaacattctaaagtacctcaaaca

SEQ ID NO: 1891888 - DNA, 25 bp, Homo sapien
ccaccagttgtcagggtaacagact

SEQ ID NO: 1891889 - DNA, 25 bp, Homo sapien
attccgcgctttcccggaaggtctg

SEQ ID NO: 1891890 - DNA, 25 bp, Homo sapien
gtctgtgcgggtccaccagttgtca

SEQ ID NO: 1891891 - DNA, 25 bp, Homo sapien
ctgaattccgcgctttcccggaagg

SEQ ID NO: 1891892 - DNA, 25 bp, Homo sapien
ggagtcacatgacccgggctggtca

SEQ ID NO: 1891893 - DNA, 25 bp, Homo sapien
tggagtcacatgacccgggctggtc

SEQ ID NO: 1891894 - DNA, 25 bp, Homo sapien
gagtcacatgacccgggctggtcac

SEQ ID NO: 1891895 - DNA, 25 bp, Homo sapien
gaaggtcggaataaccacggctgag

SEQ ID NO: 1891896 - DNA, 25 bp, Homo sapien
gagaaagacactctagtggctaaac

SEQ ID NO: 1891897 - DNA, 25 bp, Homo sapien
tacaagcgaaggtcggaataaccac

SEQ ID NO: 1891898 - DNA, 25 bp, Homo sapien
gaataaccacggctgagaaagacac

SEQ ID NO: 1891899 - DNA, 25 bp, Homo sapien
caaaccggttactggagaagcgaga

SEQ ID NO: 1891900 - DNA, 25 bp, Homo sapien
agaagcgagacggaggcttccagca

SEQ ID NO: 1891901 - DNA, 25 bp, Homo sapien
aggccagcccgtggctttctgggaa

SEQ ID NO: 1891902 - DNA, 25 bp, Homo sapien
ggtccttgtgtttccgcactccgca

SEQ ID NO: 1891903 - DNA, 25 bp, Homo sapien
cacttgtcattcgagcgctctgttt

SEQ ID NO: 1891904 - DNA, 25 bp, Homo sapien
tcattcgagcgctctgtttttccaa

SEQ ID NO: 1891905 - DNA, 25 bp, Homo sapien
ccacacttgtcattcgagcgctctg

SEQ ID NO: 1891906 - DNA, 25 bp, Homo sapien
ttgaagagattgaatttcttggatt

SEQ ID NO: 1891907 - DNA, 25 bp, Homo sapien
ctgtgtaggcattgtgagagaaaca

SEQ ID NO: 1891908 - DNA, 25 bp, Homo sapien
ttatattgccttttctcgtagcaaa

SEQ ID NO: 1891909 - DNA, 25 bp, Homo sapien
tacagtgtgagaactcggtcaacac

SEQ ID NO: 1891910 - DNA, 25 bp, Homo sapien
ctgacagtatagttgtagccaagac

SEQ ID NO: 1891911 - DNA, 25 bp, Homo sapien
gccttttctcgtagcaaacagtaca

SEQ ID NO: 1891912 - DNA, 25 bp, Homo sapien
caaccaattcttgtagactttgacc

SEQ ID NO: 1891913 - DNA, 25 bp, Homo sapien
tgcaagtggttatgtggtagtcaaa

SEQ ID NO: 1891914 - DNA, 25 bp, Homo sapien
tgcctcacttttagccaaggtctga

SEQ ID NO: 1891915 - DNA, 25 bp, Homo sapien
cacacatacacaagttgcaagtggt

SEQ ID NO: 1891916 - DNA, 25 bp, Homo sapien
tgttctctgtggcgtaagtgggttt

SEQ ID NO: 1891917 - DNA, 25 bp, Homo sapien
gctgttctctgtggcgtaagtgggt

SEQ ID NO: 1891918 - DNA, 25 bp, Homo sapien
ctgtggcgtaagtgggttttttatg

SEQ ID NO: 1891919 - DNA, 25 bp, Homo sapien
tcagccagccctctttcagctgttc

SEQ ID NO: 1891920 - DNA, 25 bp, Homo sapien
gtgagacatccagccgtaaatgaac

SEQ ID NO: 1891921 - DNA, 25 bp, Homo sapien
acatccagccgtaaatgaacaattg

SEQ ID NO: 1891922 - DNA, 25 bp, Homo sapien
agacatccagccgtaaatgaacaat

SEQ ID NO: 1891923 - DNA, 25 bp, Homo sapien
ctgtgagacatccagccgtaaatga

SEQ ID NO: 1891924 - DNA, 25 bp, Homo sapien
gggaaggtggagatgtacgcagcca

SEQ ID NO: 1891925 - DNA, 25 bp, Homo sapien
ctccatctccttgccaaagggaagg

SEQ ID NO: 1891926 - DNA, 25 bp, Homo sapien
aaggtggagatgtacgcagccacat

SEQ ID NO: 1891927 - DNA, 25 bp, Homo sapien
ccatctccttgccaaagggaaggtg

SEQ ID NO: 1891928 - DNA, 25 bp, Homo sapien
tgccagctgcaaacctcatcacagt

SEQ ID NO: 1891929 - DNA, 25 bp, Homo sapien
ctgccagctgcaaacctcatcacag

SEQ ID NO: 1891930 - DNA, 25 bp, Homo sapien
tttcatactctcctgccagctgcaa

SEQ ID NO: 1891931 - DNA, 25 bp, Homo sapien
ctcctgccagctgcaaacctcatca

SEQ ID NO: 1891932 - DNA, 25 bp, Homo sapien
ccttctcgtaatttgttgttgtctt

SEQ ID NO: 1891933 - DNA, 25 bp, Homo sapien
cttctcgtaatttgttgttgtcttt

SEQ ID NO: 1891934 - DNA, 25 bp, Homo sapien
tccttctcgtaatttgttgttgtct

SEQ ID NO: 1891935 - DNA, 25 bp, Homo sapien
ttccttctcgtaatttgttgttgtc

SEQ ID NO: 1891936 - DNA, 25 bp, Homo sapien
tctttgcatagaagttggatggcag

SEQ ID NO: 1891937 - DNA, 25 bp, Homo sapien
tctcctctctggataggattatagt

SEQ ID NO: 1891938 - DNA, 25 bp, Homo sapien
taagtagaagctagccaagacattt

SEQ ID NO: 1891939 - DNA, 25 bp, Homo sapien
ggattatagtagatcctgtaagtct

SEQ ID NO: 1891940 - DNA, 25 bp, Homo sapien
tcactgtagggcagctcatgtgcaa

SEQ ID NO: 1891941 - DNA, 25 bp, Homo sapien
ttcactgtagggcagctcatgtgca

SEQ ID NO: 1891942 - DNA, 25 bp, Homo sapien
cttcactgtagggcagctcatgtgc

SEQ ID NO: 1891943 - DNA, 25 bp, Homo sapien
cactgtagggcagctcatgtgcaag

SEQ ID NO: 1891944 - DNA, 25 bp, Homo sapien
ttctctcttaagcctactctgtgga

SEQ ID NO: 1891945 - DNA, 25 bp, Homo sapien
ctcttaagcctactctgtggatctc

SEQ ID NO: 1891946 - DNA, 25 bp, Homo sapien
ctctcttaagcctactctgtggatc

SEQ ID NO: 1891947 - DNA, 25 bp, Homo sapien
cttaagcctactctgtggatctcag

SEQ ID NO: 1891948 - DNA, 25 bp, Homo sapien
cagctgactcaggaataatggactc

SEQ ID NO: 1891949 - DNA, 25 bp, Homo sapien
tacgggaagtatctgcgtctttttc

SEQ ID NO: 1891950 - DNA, 25 bp, Homo sapien
taaggggatgggtttgactgactcc

SEQ ID NO: 1891951 - DNA, 25 bp, Homo sapien
taatggactccagtatctacgggaa

SEQ ID NO: 1891952 - DNA, 25 bp, Homo sapien
ttcctgctgggaagtggcaacagtg

SEQ ID NO: 1891953 - DNA, 25 bp, Homo sapien
ctggagggaaaccaaacacactctt

SEQ ID NO: 1891954 - DNA, 25 bp, Homo sapien
gaaaccaaacacactcttcttcctg

SEQ ID NO: 1891955 - DNA, 25 bp, Homo sapien
aagtggcaacagtggcctctggcat

SEQ ID NO: 1891956 - DNA, 25 bp, Homo sapien
gttcgaatcctcaaattcagagggc

SEQ ID NO: 1891957 - DNA, 25 bp, Homo sapien
ttgcagacactgtatgttgagaatg

SEQ ID NO: 1891958 - DNA, 25 bp, Homo sapien
gactctgacatttgcagacactgta

SEQ ID NO: 1891959 - DNA, 25 bp, Homo sapien
tatgttgagaatgttcgaatcctca

SEQ ID NO: 1891960 - DNA, 25 bp, Homo sapien
tcaaagctgtactgcaatgggctgg

SEQ ID NO: 1891961 - DNA, 25 bp, Homo sapien
acaattgcctcaaagctgtactgca

SEQ ID NO: 1891962 - DNA, 25 bp, Homo sapien
tgtggtataaacttctccacaattg

SEQ ID NO: 1891963 - DNA, 25 bp, Homo sapien
ttctccacaattgcctcaaagctgt

SEQ ID NO: 1891964 - DNA, 25 bp, Homo sapien
actcctccagtcgaattcttctaaa

SEQ ID NO: 1891965 - DNA, 25 bp, Homo sapien
caactctatatactcctccagtcga

SEQ ID NO: 1891966 - DNA, 25 bp, Homo sapien
ttcttctaaacctcagacctggcca

SEQ ID NO: 1891967 - DNA, 25 bp, Homo sapien
gcaggtttctcccagacgattttca

SEQ ID NO: 1891968 - DNA, 25 bp, Homo sapien
gatcaaaatggcattttatttgccc

SEQ ID NO: 1891969 - DNA, 25 bp, Homo sapien
tcaaaatggcattttatttgcccat

SEQ ID NO: 1891970 - DNA, 25 bp, Homo sapien
aataagatcaaaatggcattttatt

SEQ ID NO: 1891971 - DNA, 25 bp, Homo sapien
taagatcaaaatggcattttatttg

SEQ ID NO: 1891972 - DNA, 25 bp, Homo sapien
gagcagcatggttgagagaggtgca

SEQ ID NO: 1891973 - DNA, 25 bp, Homo sapien
catgaggttatctgcagggagatgt

SEQ ID NO: 1891974 - DNA, 25 bp, Homo sapien
gtgcctgaggcaactccagataact

SEQ ID NO: 1891975 - DNA, 25 bp, Homo sapien
acttttgagcacttccatgagtggg

SEQ ID NO: 1891976 - DNA, 25 bp, Homo sapien
tggcttcttttaaaccgaagcttga

SEQ ID NO: 1891977 - DNA, 25 bp, Homo sapien
ctggcttcttttaaaccgaagcttg

SEQ ID NO: 1891978 - DNA, 25 bp, Homo sapien
tagctgggatccaataaaaacttcc

SEQ ID NO: 1891979 - DNA, 25 bp, Homo sapien
aaagcttctgcataggattcctctg

SEQ ID NO: 1891980 - DNA, 25 bp, Homo sapien
agaatcttgagctatccccagggat

SEQ ID NO: 1891981 - DNA, 25 bp, Homo sapien
tcttcttgacaatagagctggtggg

SEQ ID NO: 1891982 - DNA, 25 bp, Homo sapien
tcacttcaccctgagtatctgtctg

SEQ ID NO: 1891983 - DNA, 25 bp, Homo sapien
gcacagtgataggtctgtttgccca

SEQ ID NO: 1891984 - DNA, 25 bp, Homo sapien
taacttcaacctctaatgaatctcc

SEQ ID NO: 1891985 - DNA, 25 bp, Homo sapien
tcttttccaaggtttgattcacatt

SEQ ID NO: 1891986 - DNA, 25 bp, Homo sapien
gagagccaacattcagtgggctgag

SEQ ID NO: 1891987 - DNA, 25 bp, Homo sapien
tctttgtggccacatacttggcaac

SEQ ID NO: 1891988 - DNA, 25 bp, Homo sapien
tcctgtgcgtaagggtttgagagcc

SEQ ID NO: 1891989 - DNA, 25 bp, Homo sapien
tacttctgtcaaaggtctggactct

SEQ ID NO: 1891990 - DNA, 25 bp, Homo sapien
cctgatttccgtcagaccatactgt

SEQ ID NO: 1891991 - DNA, 25 bp, Homo sapien
gggctgctcagatgttgcaattctt

SEQ ID NO: 1891992 - DNA, 25 bp, Homo sapien
tgttgcaattcttattaaatcggtt

SEQ ID NO: 1891993 - DNA, 25 bp, Homo sapien
cttgccatcttaaaggcttgcaggg

SEQ ID NO: 1891994 - DNA, 25 bp, Homo sapien
tgacagcagctttgttaatgaatta

SEQ ID NO: 1891995 - DNA, 25 bp, Homo sapien
actgacagcagctttgttaatgaat

SEQ ID NO: 1891996 - DNA, 25 bp, Homo sapien
ctgacagcagctttgttaatgaatt

SEQ ID NO: 1891997 - DNA, 25 bp, Homo sapien
cactgacagcagctttgttaatgaa

SEQ ID NO: 1891998 - DNA, 25 bp, Homo sapien
caaatgttgaacataatgaaaaatc

SEQ ID NO: 1891999 - DNA, 25 bp, Homo sapien
ttccaaatgttgaacataatgaaaa

SEQ ID NO: 1892000 - DNA, 25 bp, Homo sapien
ctgcaattatctttagttgaaattt

SEQ ID NO: 1892001 - DNA, 25 bp, Homo sapien
caattatctttagttgaaatttcca

SEQ ID NO: 1892002 - DNA, 25 bp, Homo sapien
taagatttacgcttcattttcagtc

SEQ ID NO: 1892003 - DNA, 25 bp, Homo sapien
gtaactgccgtgcttattagcccgt

SEQ ID NO: 1892004 - DNA, 25 bp, Homo sapien
catgtgcagcctattgacttttaag

SEQ ID NO: 1892005 - DNA, 25 bp, Homo sapien
tggtctgttaacagctctaatgtct

SEQ ID NO: 1892006 - DNA, 25 bp, Homo sapien
gatgtttgttgggttagtctgtcca

SEQ ID NO: 1892007 - DNA, 25 bp, Homo sapien
tgcaggaggctttagtgtgtttact

SEQ ID NO: 1892008 - DNA, 25 bp, Homo sapien
ggttagtctgtccaaggtgttggca

SEQ ID NO: 1892009 - DNA, 25 bp, Homo sapien
tgttccagtcgctgaccttctgcat

SEQ ID NO: 1892010 - DNA, 25 bp, Homo sapien
catatcttttatttcgacaatgtgc

SEQ ID NO: 1892011 - DNA, 25 bp, Homo sapien
gcttgattggtacacttataaaaca

SEQ ID NO: 1892012 - DNA, 25 bp, Homo sapien
gttaaacgacagttccattaacatg

SEQ ID NO: 1892013 - DNA, 25 bp, Homo sapien
aacatttgttaaacgacagttccat

SEQ ID NO: 1892014 - DNA, 25 bp, Homo sapien
ggacgggcagaaaactgccatgtaa

SEQ ID NO: 1892015 - DNA, 25 bp, Homo sapien
tgtaactactcttcctatccacttt

SEQ ID NO: 1892016 - DNA, 25 bp, Homo sapien
agttctgttgacataaaagaagtcg

SEQ ID NO: 1892017 - DNA, 25 bp, Homo sapien
cctgagataagtaaagtggcagttc

SEQ ID NO: 1892018 - DNA, 25 bp, Homo sapien
taattagaaattggttggacatttg

SEQ ID NO: 1892019 - DNA, 25 bp, Homo sapien
agctctctcaagtatgtttatacag

SEQ ID NO: 1892020 - DNA, 25 bp, Homo sapien
taagtaattagaaattggttggaca

SEQ ID NO: 1892021 - DNA, 25 bp, Homo sapien
tatacttagctctctcaagtatgtt

SEQ ID NO: 1892022 - DNA, 25 bp, Homo sapien
gtgtgacatccccttctctatcgaa

SEQ ID NO: 1892023 - DNA, 25 bp, Homo sapien
ggtctaatgcgttcagctgttatca

SEQ ID NO: 1892024 - DNA, 25 bp, Homo sapien
cttaacccaatatggacagagtatg

SEQ ID NO: 1892025 - DNA, 25 bp, Homo sapien
tgagaagcaccgtggaagtcagatt

SEQ ID NO: 1892026 - DNA, 25 bp, Homo sapien
ttctctctgagccaatgttactgtc

SEQ ID NO: 1892027 - DNA, 25 bp, Homo sapien
gtcctcagtagatttgccttcttca

SEQ ID NO: 1892028 - DNA, 25 bp, Homo sapien
tctctctgagccaatgttactgtca

SEQ ID NO: 1892029 - DNA, 25 bp, Homo sapien
tctcactgcactaaacttgctctgc

SEQ ID NO: 1892030 - DNA, 25 bp, Homo sapien
ctcactgcactaaacttgctctgct

SEQ ID NO: 1892031 - DNA, 25 bp, Homo sapien
tctcctggtgtcgatcctcttttgg

SEQ ID NO: 1892032 - DNA, 25 bp, Homo sapien
tcctggtgtcgatcctcttttggaa

SEQ ID NO: 1892033 - DNA, 25 bp, Homo sapien
ttctcctggtgtcgatcctcttttg

SEQ ID NO: 1892034 - DNA, 25 bp, Homo sapien
ctggtgtcgatcctcttttggaaga

SEQ ID NO: 1892035 - DNA, 25 bp, Homo sapien
ccatcatcataatcaactgatcttc

SEQ ID NO: 1892036 - DNA, 25 bp, Homo sapien
cagcagagaaggctcgtgtaaggtt

SEQ ID NO: 1892037 - DNA, 25 bp, Homo sapien
gagaaggctcgtgtaaggttctcct

SEQ ID NO: 1892038 - DNA, 25 bp, Homo sapien
gcagagaaggctcgtgtaaggttct

SEQ ID NO: 1892039 - DNA, 25 bp, Homo sapien
catgccagcaataatcttgccaatt

SEQ ID NO: 1892040 - DNA, 25 bp, Homo sapien
tttctcttcatcagcaagatcttgc

SEQ ID NO: 1892041 - DNA, 25 bp, Homo sapien
ttcgtttaaatattgtttctcttca

SEQ ID NO: 1892042 - DNA, 25 bp, Homo sapien
tacacgggggaattatgatgggcgt

SEQ ID NO: 1892043 - DNA, 25 bp, Homo sapien
tggaagcctttacttggtcccagac

SEQ ID NO: 1892044 - DNA, 25 bp, Homo sapien
cgtcagggttggaagcctttacttg

SEQ ID NO: 1892045 - DNA, 25 bp, Homo sapien
ttggaagcctttacttggtcccaga

SEQ ID NO: 1892046 - DNA, 25 bp, Homo sapien
tggattgtatcctgcaaacgctggt

SEQ ID NO: 1892047 - DNA, 25 bp, Homo sapien
tgctgtaggcaagatgacagtatgg

SEQ ID NO: 1892048 - DNA, 25 bp, Homo sapien
tcctgcaaacgctggtgtgctgggc

SEQ ID NO: 1892049 - DNA, 25 bp, Homo sapien
tggaatcgtaatactggaggacccc

SEQ ID NO: 1892050 - DNA, 25 bp, Homo sapien
gggtgggagatggggcataagatgg

SEQ ID NO: 1892051 - DNA, 25 bp, Homo sapien
gtgggagatggggcataagatggtc

SEQ ID NO: 1892052 - DNA, 25 bp, Homo sapien
tgggagatggggcataagatggtct

SEQ ID NO: 1892053 - DNA, 25 bp, Homo sapien
ggagatggggcataagatggtcttt

SEQ ID NO: 1892054 - DNA, 25 bp, Homo sapien
gaagattaaattctcagttccttaa

SEQ ID NO: 1892055 - DNA, 25 bp, Homo sapien
ggaagattaaattctcagttcctta

SEQ ID NO: 1892056 - DNA, 25 bp, Homo sapien
tttggaagattaaattctcagttcc

SEQ ID NO: 1892057 - DNA, 25 bp, Homo sapien
tggaagattaaattctcagttcctt

SEQ ID NO: 1892058 - DNA, 25 bp, Homo sapien
tattaaacggagatttcgtattgtc

SEQ ID NO: 1892059 - DNA, 25 bp, Homo sapien
ctgtgtttattaaacggagatttcg

SEQ ID NO: 1892060 - DNA, 25 bp, Homo sapien
cggagatttcgtattgtctggcctt

SEQ ID NO: 1892061 - DNA, 25 bp, Homo sapien
gatttcgtattgtctggccttttgt

SEQ ID NO: 1892062 - DNA, 25 bp, Homo sapien
agcaagggagggcccattctacatg

SEQ ID NO: 1892063 - DNA, 25 bp, Homo sapien
caagggagggcccattctacatgtc

SEQ ID NO: 1892064 - DNA, 25 bp, Homo sapien
aagcaagggagggcccattctacat

SEQ ID NO: 1892065 - DNA, 25 bp, Homo sapien
gcaagggagggcccattctacatgt

SEQ ID NO: 1892066 - DNA, 25 bp, Homo sapien
tggtccggtggcatatcctggtgtc

SEQ ID NO: 1892067 - DNA, 25 bp, Homo sapien
tcatcccttcaggagtaattttgag

SEQ ID NO: 1892068 - DNA, 25 bp, Homo sapien
ttcagtggtccggtggcatatcctg

SEQ ID NO: 1892069 - DNA, 25 bp, Homo sapien
ggtggcatatcctggtgtcctcatc

SEQ ID NO: 1892070 - DNA, 25 bp, Homo sapien
tctgtgaactgggaataatgacagc

SEQ ID NO: 1892071 - DNA, 25 bp, Homo sapien
ctctgggtttttacctccccatctg

SEQ ID NO: 1892072 - DNA, 25 bp, Homo sapien
ctgtgaactgggaataatgacagca

SEQ ID NO: 1892073 - DNA, 25 bp, Homo sapien
cttggacatgctattaagctctggg

SEQ ID NO: 1892074 - DNA, 25 bp, Homo sapien
tgtccactctttattgcataagata

SEQ ID NO: 1892075 - DNA, 25 bp, Homo sapien
acaatgtccactctttattgcataa

SEQ ID NO: 1892076 - DNA, 25 bp, Homo sapien
aatgtccactctttattgcataaga

SEQ ID NO: 1892077 - DNA, 25 bp, Homo sapien
caatgtccactctttattgcataag

SEQ ID NO: 1892078 - DNA, 25 bp, Homo sapien
tggttgtcagaacagtggctcagga

SEQ ID NO: 1892079 - DNA, 25 bp, Homo sapien
cttctataaattggttggttgtcag

SEQ ID NO: 1892080 - DNA, 25 bp, Homo sapien
acactgtggataggccatgttcagc

SEQ ID NO: 1892081 - DNA, 25 bp, Homo sapien
gaacagtggctcaggatccaaggct

SEQ ID NO: 1892082 - DNA, 25 bp, Homo sapien
tttgtgaagtgttttagatggtgtc

SEQ ID NO: 1892083 - DNA, 25 bp, Homo sapien
atcatccttagctatatatcgacgg

SEQ ID NO: 1892084 - DNA, 25 bp, Homo sapien
tccttgttgtgcttgttatcatcct

SEQ ID NO: 1892085 - DNA, 25 bp, Homo sapien
atggtgtctggtgcaaagcaaatgc

SEQ ID NO: 1892086 - DNA, 25 bp, Homo sapien
ggctggtcccttctgtctcaaagtg

SEQ ID NO: 1892087 - DNA, 25 bp, Homo sapien
agagcttctgtacactattcacaat

SEQ ID NO: 1892088 - DNA, 25 bp, Homo sapien
caagttttactcacactgtgtcatc

SEQ ID NO: 1892089 - DNA, 25 bp, Homo sapien
aaagtgaacagtgactggtcaagtt

SEQ ID NO: 1892090 - DNA, 25 bp, Homo sapien
tccgagagcgtcacccatggtgtgt

SEQ ID NO: 1892091 - DNA, 25 bp, Homo sapien
tgttgccagtaattcagaaacggag

SEQ ID NO: 1892092 - DNA, 25 bp, Homo sapien
gtagggcccgaacaacacagcatgt

SEQ ID NO: 1892093 - DNA, 25 bp, Homo sapien
caccgaaatggtctctccgagagcg

SEQ ID NO: 1892094 - DNA, 25 bp, Homo sapien
gacctgacctggtgttgtttatatg

SEQ ID NO: 1892095 - DNA, 25 bp, Homo sapien
tgtgtgttgataaaacctgatggag

SEQ ID NO: 1892096 - DNA, 25 bp, Homo sapien
aaactgcaattgataaaagcttctc

SEQ ID NO: 1892097 - DNA, 25 bp, Homo sapien
aaatttaggccacacatactctaca

SEQ ID NO: 1892098 - DNA, 25 bp, Homo sapien
tgcaggagccacactgtgttctaag

SEQ ID NO: 1892099 - DNA, 25 bp, Homo sapien
caggtccttgggcaacagtattaaa

SEQ ID NO: 1892100 - DNA, 25 bp, Homo sapien
tttagcacttctccccctgcaggag

SEQ ID NO: 1892101 - DNA, 25 bp, Homo sapien
ctaaggcagaagatgtgatggtgac

SEQ ID NO: 1892102 - DNA, 25 bp, Homo sapien
gcttatcctgagagctagcattcca

SEQ ID NO: 1892103 - DNA, 25 bp, Homo sapien
tgaaggaaacaagggttcgagttgc

SEQ ID NO: 1892104 - DNA, 25 bp, Homo sapien
cctgattggagtacaagaaaggcac

SEQ ID NO: 1892105 - DNA, 25 bp, Homo sapien
agttgcctgcaacccctgattggag

SEQ ID NO: 1892106 - DNA, 25 bp, Homo sapien
atgctcttcctttgagatgctgaag

SEQ ID NO: 1892107 - DNA, 25 bp, Homo sapien
cttcctttgagatgctgaagcattc

SEQ ID NO: 1892108 - DNA, 25 bp, Homo sapien
tctcccacatgctcttcctttgaga

SEQ ID NO: 1892109 - DNA, 25 bp, Homo sapien
cctttgagatgctgaagcattccat

SEQ ID NO: 1892110 - DNA, 25 bp, Homo sapien
ggcagcaccatgacgctaccgcagt

SEQ ID NO: 1892111 - DNA, 25 bp, Homo sapien
ggcgatgggcagcaccatgacgcta

SEQ ID NO: 1892112 - DNA, 25 bp, Homo sapien
accatgacgctaccgcagtcctgtt

SEQ ID NO: 1892113 - DNA, 25 bp, Homo sapien
atgggcagcaccatgacgctaccgc

SEQ ID NO: 1892114 - DNA, 25 bp, Homo sapien
tgcttctttggctgtacaatgccaa

SEQ ID NO: 1892115 - DNA, 25 bp, Homo sapien
tttggctgtacaatgccaaggaaga

SEQ ID NO: 1892116 - DNA, 25 bp, Homo sapien
tctttggctgtacaatgccaaggaa

SEQ ID NO: 1892117 - DNA, 25 bp, Homo sapien
ttggaggggaccccatttctgcttc

SEQ ID NO: 1892118 - DNA, 25 bp, Homo sapien
caggttgacctctccattgaaaggg

SEQ ID NO: 1892119 - DNA, 25 bp, Homo sapien
taaatattacccctaggtcctgaga

SEQ ID NO: 1892120 - DNA, 25 bp, Homo sapien
gagagctatgactaagaggtccagc

SEQ ID NO: 1892121 - DNA, 25 bp, Homo sapien
gcagaatggccagacgtttctggaa

SEQ ID NO: 1892122 - DNA, 25 bp, Homo sapien
tgaaatctggttgcttgaaccaggg

SEQ ID NO: 1892123 - DNA, 25 bp, Homo sapien
catttatcctaatagggatttgatt

SEQ ID NO: 1892124 - DNA, 25 bp, Homo sapien
caattctttacaggaacactcaatc

SEQ ID NO: 1892125 - DNA, 25 bp, Homo sapien
catttttgatcatctgggaatgaaa

SEQ ID NO: 1892126 - DNA, 25 bp, Homo sapien
tggaatcacatgaagcatcacatct

SEQ ID NO: 1892127 - DNA, 25 bp, Homo sapien
ctctgtcccgctgagagacacgttt

SEQ ID NO: 1892128 - DNA, 25 bp, Homo sapien
tgagagacacgtttggaatcacatg

SEQ ID NO: 1892129 - DNA, 25 bp, Homo sapien
tgagaactctgtcccgctgagagac

SEQ ID NO: 1892130 - DNA, 25 bp, Homo sapien
acagctcttctggttgttgtaaaag

SEQ ID NO: 1892131 - DNA, 25 bp, Homo sapien
ccctcttcatttgattagtactgtt

SEQ ID NO: 1892132 - DNA, 25 bp, Homo sapien
gattagtactgttgatcagctgtag

SEQ ID NO: 1892133 - DNA, 25 bp, Homo sapien
tccaagtgacgtcccctctatgctt

SEQ ID NO: 1892134 - DNA, 25 bp, Homo sapien
ttatacatagaggatgtcagacata

SEQ ID NO: 1892135 - DNA, 25 bp, Homo sapien
tatacatagaggatgtcagacatac

SEQ ID NO: 1892136 - DNA, 25 bp, Homo sapien
tagtggtctattctgccttccccat

SEQ ID NO: 1892137 - DNA, 25 bp, Homo sapien
caacgagatcttgaagacttagtgg

SEQ ID NO: 1892138 - DNA, 25 bp, Homo sapien
tctggcctgagtgggtccaataata

SEQ ID NO: 1892139 - DNA, 25 bp, Homo sapien
tgggtccaataataactgggttgag

SEQ ID NO: 1892140 - DNA, 25 bp, Homo sapien
taatctaaaggaatattgaagccag

SEQ ID NO: 1892141 - DNA, 25 bp, Homo sapien
catgtgtgtgcaactctaggactaa

SEQ ID NO: 1892142 - DNA, 25 bp, Homo sapien
gactttcacttgttcaacctaatca

SEQ ID NO: 1892143 - DNA, 25 bp, Homo sapien
cctaatcaaatttgtaatgaaaggc

SEQ ID NO: 1892144 - DNA, 25 bp, Homo sapien
cagtcagggacccagccgaggaagg

SEQ ID NO: 1892145 - DNA, 25 bp, Homo sapien
ggacccagccgaggaaggagacaga

SEQ ID NO: 1892146 - DNA, 25 bp, Homo sapien
agggacccagccgaggaaggagaca

SEQ ID NO: 1892147 - DNA, 25 bp, Homo sapien
gtcagggacccagccgaggaaggag

SEQ ID NO: 1892148 - DNA, 25 bp, Homo sapien
taatctctggtttctcagatgaaag

SEQ ID NO: 1892149 - DNA, 25 bp, Homo sapien
gatgaaagataatccctctgtcctt

SEQ ID NO: 1892150 - DNA, 25 bp, Homo sapien
catgaattaatctctggtttctcag

SEQ ID NO: 1892151 - DNA, 25 bp, Homo sapien
tttctcagatgaaagataatccctc

SEQ ID NO: 1892152 - DNA, 25 bp, Homo sapien
taaaagggatgatcaacttgccaaa

SEQ ID NO: 1892153 - DNA, 25 bp, Homo sapien
tctttctacggcttgctgggcagtg

SEQ ID NO: 1892154 - DNA, 25 bp, Homo sapien
cggcagtcacgcgaagatatattga

SEQ ID NO: 1892155 - DNA, 25 bp, Homo sapien
cttctgaaatgaggaccgccagagc

SEQ ID NO: 1892156 - DNA, 25 bp, Homo sapien
tagtctcccctggaagccaattaaa

SEQ ID NO: 1892157 - DNA, 25 bp, Homo sapien
caagagcttgacatatagtaggcac

SEQ ID NO: 1892158 - DNA, 25 bp, Homo sapien
aaatgttacagacttcaggttaagc

SEQ ID NO: 1892159 - DNA, 25 bp, Homo sapien
aaatgaggctagagcatgataagca

SEQ ID NO: 1892160 - DNA, 25 bp, Homo sapien
ggtaaacttctctgaaccagtagtg

SEQ ID NO: 1892161 - DNA, 25 bp, Homo sapien
gacgaggttaaaatatagagtctct

SEQ ID NO: 1892162 - DNA, 25 bp, Homo sapien
tgaagggtttgtacagtaaaagcaa

SEQ ID NO: 1892163 - DNA, 25 bp, Homo sapien
caactagtgaaggatgacgaggtta

SEQ ID NO: 1892164 - DNA, 25 bp, Homo sapien
tgaacttatgaacgcagccttcaga

SEQ ID NO: 1892165 - DNA, 25 bp, Homo sapien
ggtctagcggcctaaagcataaact

SEQ ID NO: 1892166 - DNA, 25 bp, Homo sapien
gccgccctgtgaggctcgctttcta

SEQ ID NO: 1892167 - DNA, 25 bp, Homo sapien
tattgagcatattccaggtaccaga

SEQ ID NO: 1892168 - DNA, 25 bp, Homo sapien
gagaccaaattgtctcgctcaggaa

SEQ ID NO: 1892169 - DNA, 25 bp, Homo sapien
caaattgtctcgctcaggaaaaatg

SEQ ID NO: 1892170 - DNA, 25 bp, Homo sapien
cgctcaggaaaaatgtagtctgtct

SEQ ID NO: 1892171 - DNA, 25 bp, Homo sapien
gtctcgctcaggaaaaatgtagtct

SEQ ID NO: 1892172 - DNA, 25 bp, Homo sapien
ctggagcaaggaatcagatgaggaa

SEQ ID NO: 1892173 - DNA, 25 bp, Homo sapien
cagatgaggaatcacttagcattca

SEQ ID NO: 1892174 - DNA, 25 bp, Homo sapien
gatgaggaatcacttagcattcagc

SEQ ID NO: 1892175 - DNA, 25 bp, Homo sapien
atgaggaatcacttagcattcagca

SEQ ID NO: 1892176 - DNA, 25 bp, Homo sapien
ccctttaagtgcattgtgaggtcac

SEQ ID NO: 1892177 - DNA, 25 bp, Homo sapien
tataggatgctgtcagttgtcctgc

SEQ ID NO: 1892178 - DNA, 25 bp, Homo sapien
gctccacagtccattgtataggatg

SEQ ID NO: 1892179 - DNA, 25 bp, Homo sapien
aaacccagccaaggtggtacaagct

SEQ ID NO: 1892180 - DNA, 25 bp, Homo sapien
tatgtctacatgatctgaggtccat

SEQ ID NO: 1892181 - DNA, 25 bp, Homo sapien
tgtttttggatagcacaatttggca

SEQ ID NO: 1892182 - DNA, 25 bp, Homo sapien
ggcattaaatgtcccgtatgtggat

SEQ ID NO: 1892183 - DNA, 25 bp, Homo sapien
taaatggtatactaaacacacagct

SEQ ID NO: 1892184 - DNA, 25 bp, Homo sapien
tggaacccagcaactagcgtttagc

SEQ ID NO: 1892185 - DNA, 25 bp, Homo sapien
gaaaacagagctccacacaatcgga

SEQ ID NO: 1892186 - DNA, 25 bp, Homo sapien
aatggtgagactctagcccgaacgg

SEQ ID NO: 1892187 - DNA, 25 bp, Homo sapien
cagtgggtgcctcgctggatcagaa

SEQ ID NO: 1892188 - DNA, 25 bp, Homo sapien
tctccatatattataatagactgct

SEQ ID NO: 1892189 - DNA, 25 bp, Homo sapien
tattttgaatggacttggaatgatc

SEQ ID NO: 1892190 - DNA, 25 bp, Homo sapien
gaatggacttggaatgatctccata

SEQ ID NO: 1892191 - DNA, 25 bp, Homo sapien
gacttggaatgatctccatatatta

SEQ ID NO: 1892192 - DNA, 25 bp, Homo sapien
ctcatgaggaaataacactgtgtta

SEQ ID NO: 1892193 - DNA, 25 bp, Homo sapien
gaaaaaacttcatgtagatgagcca

SEQ ID NO: 1892194 - DNA, 25 bp, Homo sapien
taagttctctaattcccgaggacat

SEQ ID NO: 1892195 - DNA, 25 bp, Homo sapien
tatcagcatgtagagggatactaag

SEQ ID NO: 1892196 - DNA, 25 bp, Homo sapien
cacactaaggtgtgagttactggta

SEQ ID NO: 1892197 - DNA, 25 bp, Homo sapien
gtcaaacctccagctatctccaaag

SEQ ID NO: 1892198 - DNA, 25 bp, Homo sapien
cccagaattgtcctgctacaaaaat

SEQ ID NO: 1892199 - DNA, 25 bp, Homo sapien
tagggatctctcttcttgcaccttc

SEQ ID NO: 1892200 - DNA, 25 bp, Homo sapien
ccttccttatataggttacactgtg

SEQ ID NO: 1892201 - DNA, 25 bp, Homo sapien
taggttacactgtgccccaaccttc

SEQ ID NO: 1892202 - DNA, 25 bp, Homo sapien
tatataggttacactgtgccccaac

SEQ ID NO: 1892203 - DNA, 25 bp, Homo sapien
tgatgtaaagagtgagtatgatcct

SEQ ID NO: 1892204 - DNA, 25 bp, Homo sapien
taagaacctcttatgtgcccaatgg

SEQ ID NO: 1892205 - DNA, 25 bp, Homo sapien
gacagattgctggagataacctact

SEQ ID NO: 1892206 - DNA, 25 bp, Homo sapien
tatactatcggtcaggaagctcaga

SEQ ID NO: 1892207 - DNA, 25 bp, Homo sapien
gactcaggcagacggacaaggttaa

SEQ ID NO: 1892208 - DNA, 25 bp, Homo sapien
cagagttaagcttcctagggtccta

SEQ ID NO: 1892209 - DNA, 25 bp, Homo sapien
gggacattcccgaaatctgcatgga

SEQ ID NO: 1892210 - DNA, 25 bp, Homo sapien
cccatggacatgttcacggaggtgc

SEQ ID NO: 1892211 - DNA, 25 bp, Homo sapien
tgctcacgcccacataggagggagt

SEQ ID NO: 1892212 - DNA, 25 bp, Homo sapien
taaagaatgactccacagtcatcct

SEQ ID NO: 1892213 - DNA, 25 bp, Homo sapien
aaagaatgactccacagtcatcctt

SEQ ID NO: 1892214 - DNA, 25 bp, Homo sapien
tgcatatgattccaccaaggcttcc

SEQ ID NO: 1892215 - DNA, 25 bp, Homo sapien
ccgtagtgatggtcgccagaatgca

SEQ ID NO: 1892216 - DNA, 25 bp, Homo sapien
agggatatcttcaaaggtcagagtc

SEQ ID NO: 1892217 - DNA, 25 bp, Homo sapien
ccagaatgcatatgattccaccaag

SEQ ID NO: 1892218 - DNA, 25 bp, Homo sapien
caaggtgctaccacctctggagtcc

SEQ ID NO: 1892219 - DNA, 25 bp, Homo sapien
tgcgccccaagtcataacctgcaaa

SEQ ID NO: 1892220 - DNA, 25 bp, Homo sapien
tttaatgaaacctgtagctccactg

SEQ ID NO: 1892221 - DNA, 25 bp, Homo sapien
gcaaactaagactagaggaatccac

SEQ ID NO: 1892222 - DNA, 25 bp, Homo sapien
tcctatctatcttcaggcgagtaat

SEQ ID NO: 1892223 - DNA, 25 bp, Homo sapien
ctgttgcgcccggagtctcggaagc

SEQ ID NO: 1892224 - DNA, 25 bp, Homo sapien
tagcaaatggattcctatctatctt

SEQ ID NO: 1892225 - DNA, 25 bp, Homo sapien
gcgcccggagtctcggaagccttta

SEQ ID NO: 1892226 - DNA, 25 bp, Homo sapien
cagtgacggttgtgaagacagtttc

SEQ ID NO: 1892227 - DNA, 25 bp, Homo sapien
tctttacggatgacgtgcactcgcg

SEQ ID NO: 1892228 - DNA, 25 bp, Homo sapien
cctccccggatggaacaggcttgat

SEQ ID NO: 1892229 - DNA, 25 bp, Homo sapien
cactcgcggttggtatttgtgcata

SEQ ID NO: 1892230 - DNA, 25 bp, Homo sapien
ggtggcacaggcgagtcagcattac

SEQ ID NO: 1892231 - DNA, 25 bp, Homo sapien
tgaatgtacacacggggtggcacag

SEQ ID NO: 1892232 - DNA, 25 bp, Homo sapien
gcaggcgagtctggatgaatgtaca

SEQ ID NO: 1892233 - DNA, 25 bp, Homo sapien
gaagctgataacttgtctcatccaa

SEQ ID NO: 1892234 - DNA, 25 bp, Homo sapien
catggcaatgtaatattgctggtga

SEQ ID NO: 1892235 - DNA, 25 bp, Homo sapien
cactctcattgctggaaacatgcgc

SEQ ID NO: 1892236 - DNA, 25 bp, Homo sapien
cactggtacaatatccatggcaatg

SEQ ID NO: 1892237 - DNA, 25 bp, Homo sapien
gaggatctaatccagagatcttcac

SEQ ID NO: 1892238 - DNA, 25 bp, Homo sapien
ggcccttcttcctgattgagctaga

SEQ ID NO: 1892239 - DNA, 25 bp, Homo sapien
catcagcggcgacagtaattttctc

SEQ ID NO: 1892240 - DNA, 25 bp, Homo sapien
actgcactagtggtgggtagccaaa

SEQ ID NO: 1892241 - DNA, 25 bp, Homo sapien
tagccaaagctagcctccaaagtga

SEQ ID NO: 1892242 - DNA, 25 bp, Homo sapien
ggtgatgatcatctcagtgcctatc

SEQ ID NO: 1892243 - DNA, 25 bp, Homo sapien
ccagaggggaagctccctgctggaa

SEQ ID NO: 1892244 - DNA, 25 bp, Homo sapien
tctcagtgcctatctcatgaaagcg

SEQ ID NO: 1892245 - DNA, 25 bp, Homo sapien
tatctcatgaaagcgcttccagagc

SEQ ID NO: 1892246 - DNA, 25 bp, Homo sapien
tggacagcaaaggacagagaaaggg

SEQ ID NO: 1892247 - DNA, 25 bp, Homo sapien
ctggacagcaaaggacagagaaagg

SEQ ID NO: 1892248 - DNA, 25 bp, Homo sapien
gacagcaaaggacagagaaagggaa

SEQ ID NO: 1892249 - DNA, 25 bp, Homo sapien
ggacagcaaaggacagagaaaggga

SEQ ID NO: 1892250 - DNA, 25 bp, Homo sapien
tcgaagcgcaagcagcaaaagcgcc

SEQ ID NO: 1892251 - DNA, 25 bp, Homo sapien
tctgcggcgcctcgctttgggcctt

SEQ ID NO: 1892252 - DNA, 25 bp, Homo sapien
cttaagccataagcgtctgcggcgc

SEQ ID NO: 1892253 - DNA, 25 bp, Homo sapien
agcgcccggactctggtcccaagag

SEQ ID NO: 1892254 - DNA, 25 bp, Homo sapien
agcgccttcgtctccctcagaagaa

SEQ ID NO: 1892255 - DNA, 25 bp, Homo sapien
aggtctgcgccactccgagccggcc

SEQ ID NO: 1892256 - DNA, 25 bp, Homo sapien
gcgcagcgccttcgtctccctcaga

SEQ ID NO: 1892257 - DNA, 25 bp, Homo sapien
gagccggcccagacgtcgccccagc

SEQ ID NO: 1892258 - DNA, 25 bp, Homo sapien
tgaggcttagcatgctgcacggcga

SEQ ID NO: 1892259 - DNA, 25 bp, Homo sapien
gttgctgcttctcggcgccgatcag

SEQ ID NO: 1892260 - DNA, 25 bp, Homo sapien
agttttcgccgcttcttctgaagct

SEQ ID NO: 1892261 - DNA, 25 bp, Homo sapien
atcagcgcctccaccgagaaagcgt

SEQ ID NO: 1892262 - DNA, 25 bp, Homo sapien
gcgcgctctcgctcttcccccacca

SEQ ID NO: 1892263 - DNA, 25 bp, Homo sapien
gggcctcccgagatctgcccccttc

SEQ ID NO: 1892264 - DNA, 25 bp, Homo sapien
tcatatacactcacgcgggcacacg

SEQ ID NO: 1892265 - DNA, 25 bp, Homo sapien
ctctcggggcctcccgagatctgcc

SEQ ID NO: 1892266 - DNA, 25 bp, Homo sapien
tcactgatgcactcctttgctccca

SEQ ID NO: 1892267 - DNA, 25 bp, Homo sapien
cctgctgctccgaggtctgcctcaa

SEQ ID NO: 1892268 - DNA, 25 bp, Homo sapien
aacagatttggcgtttccgctttct

SEQ ID NO: 1892269 - DNA, 25 bp, Homo sapien
ccgctttctcgcttgtgttgggatc

SEQ ID NO: 1892270 - DNA, 25 bp, Homo sapien
gagcggtgggaagaacttgctcatt

SEQ ID NO: 1892271 - DNA, 25 bp, Homo sapien
tcattagtgtcaataaagcggcggg

SEQ ID NO: 1892272 - DNA, 25 bp, Homo sapien
caaattagggattgtaattgaaatt

SEQ ID NO: 1892273 - DNA, 25 bp, Homo sapien
gggattgtaattgaaatttgttgcc

SEQ ID NO: 1892274 - DNA, 25 bp, Homo sapien
gccgctgtctggcttggatgtgcca

SEQ ID NO: 1892275 - DNA, 25 bp, Homo sapien
actctgtctctctgacgtccgtagc

SEQ ID NO: 1892276 - DNA, 25 bp, Homo sapien
tagctgagtccagccccgtagtctc

SEQ ID NO: 1892277 - DNA, 25 bp, Homo sapien
gccacacggacgctgaactctgtct

SEQ ID NO: 1892278 - DNA, 25 bp, Homo sapien
cgagcggtccttacagctttggaga

SEQ ID NO: 1892279 - DNA, 25 bp, Homo sapien
ggtccttacagctttggagactctg

SEQ ID NO: 1892280 - DNA, 25 bp, Homo sapien
gcccaggggtgtagtcgtcggagcc

SEQ ID NO: 1892281 - DNA, 25 bp, Homo sapien
cttctccgagcggtccttacagctt

SEQ ID NO: 1892282 - DNA, 25 bp, Homo sapien
agggacaaacactgtttgctgacgc

SEQ ID NO: 1892283 - DNA, 25 bp, Homo sapien
ccctgtatatgtcctgcagctcaaa

SEQ ID NO: 1892284 - DNA, 25 bp, Homo sapien
aaggagttctccctgtatatgtcct

SEQ ID NO: 1892285 - DNA, 25 bp, Homo sapien
cactgtttgctgacgcaaagcctgt

SEQ ID NO: 1892286 - DNA, 25 bp, Homo sapien
tccacgatgtttctagaacgtggcc

SEQ ID NO: 1892287 - DNA, 25 bp, Homo sapien
gactggtgtccgcattgccgaaagg

SEQ ID NO: 1892288 - DNA, 25 bp, Homo sapien
ctttatgtctttcgccttcaccctg

SEQ ID NO: 1892289 - DNA, 25 bp, Homo sapien
gaaagcagagcctcgtctacatcca

SEQ ID NO: 1892290 - DNA, 25 bp, Homo sapien
cgtgaacaaagcgatccggagctgc

SEQ ID NO: 1892291 - DNA, 25 bp, Homo sapien
gtagtaaattcaggcgtcccagggc

SEQ ID NO: 1892292 - DNA, 25 bp, Homo sapien
cccagggctcaaggactgcactctt

SEQ ID NO: 1892293 - DNA, 25 bp, Homo sapien
tttctctgccgggtctggtgctgca

SEQ ID NO: 1892294 - DNA, 25 bp, Homo sapien
tgaagccctctacaaaggacctgtg

SEQ ID NO: 1892295 - DNA, 25 bp, Homo sapien
ggaacaactccgcagttctcaggta

SEQ ID NO: 1892296 - DNA, 25 bp, Homo sapien
gagcccgcggagtatctctttaagc

SEQ ID NO: 1892297 - DNA, 25 bp, Homo sapien
ccacttgttggcgactgttttccat

SEQ ID NO: 1892298 - DNA, 25 bp, Homo sapien
cttgagtctgctggttttacaaaat

SEQ ID NO: 1892299 - DNA, 25 bp, Homo sapien
tcatttaacacgtttgaaaccacat

SEQ ID NO: 1892300 - DNA, 25 bp, Homo sapien
tactatcaactaccaaaacatcttc

SEQ ID NO: 1892301 - DNA, 25 bp, Homo sapien
gagtcagagctctcttgtttcagtt

SEQ ID NO: 1892302 - DNA, 25 bp, Homo sapien
tatcaatggatatcaagtactatca

SEQ ID NO: 1892303 - DNA, 25 bp, Homo sapien
tgtaataccatttaggatagttggt

SEQ ID NO: 1892304 - DNA, 25 bp, Homo sapien
caccgaacagtatattgtaatacca

SEQ ID NO: 1892305 - DNA, 25 bp, Homo sapien
cttctcaccgaacagtatattgtaa

SEQ ID NO: 1892306 - DNA, 25 bp, Homo sapien
ggttcaacaccagtaccatcaaatt

SEQ ID NO: 1892307 - DNA, 25 bp, Homo sapien
cttggtactggaggtgattggccat

SEQ ID NO: 1892308 - DNA, 25 bp, Homo sapien
tgaacataataacagtggaggatcc

SEQ ID NO: 1892309 - DNA, 25 bp, Homo sapien
gaggaatttatccaaggtctttcca

SEQ ID NO: 1892310 - DNA, 25 bp, Homo sapien
taatttagcatcagaaaccattgca

SEQ ID NO: 1892311 - DNA, 25 bp, Homo sapien
ctgtattgcttccaaacagaatggt

SEQ ID NO: 1892312 - DNA, 25 bp, Homo sapien
taccgctcctgtgtagctgatggga

SEQ ID NO: 1892313 - DNA, 25 bp, Homo sapien
gggcagctggtaccgctcctgtgta

SEQ ID NO: 1892314 - DNA, 25 bp, Homo sapien
attttcagaaatggcgtggtcactc

SEQ ID NO: 1892315 - DNA, 25 bp, Homo sapien
gatgggaactcactttgcagcttgc

SEQ ID NO: 1892316 - DNA, 25 bp, Homo sapien
ggtcatgtattagggcagcagtcat

SEQ ID NO: 1892317 - DNA, 25 bp, Homo sapien
cagacatgtctggtcatgtattagg

SEQ ID NO: 1892318 - DNA, 25 bp, Homo sapien
tgtctggtcatgtattagggcagca

SEQ ID NO: 1892319 - DNA, 25 bp, Homo sapien
acatgtctggtcatgtattagggca

SEQ ID NO: 1892320 - DNA, 25 bp, Homo sapien
aacagaggctctgagtcaggattgc

SEQ ID NO: 1892321 - DNA, 25 bp, Homo sapien
tctgagtcaggattgcccaaaggct

SEQ ID NO: 1892322 - DNA, 25 bp, Homo sapien
tgcctgaagctgaaacctgccaact

SEQ ID NO: 1892323 - DNA, 25 bp, Homo sapien
attgcccaaaggctccttcctgtta

SEQ ID NO: 1892324 - DNA, 25 bp, Homo sapien
aatgggatggtaaagtctcccacta

SEQ ID NO: 1892325 - DNA, 25 bp, Homo sapien
tcattatgtgatgcccttgtctctt

SEQ ID NO: 1892326 - DNA, 25 bp, Homo sapien
tatcattatgtgatgcccttgtctc

SEQ ID NO: 1892327 - DNA, 25 bp, Homo sapien
aatattgacaatgggatggtaaagt

SEQ ID NO: 1892328 - DNA, 25 bp, Homo sapien
tccctgttacagccaactccaaaac

SEQ ID NO: 1892329 - DNA, 25 bp, Homo sapien
ccctgttacagccaactccaaaact

SEQ ID NO: 1892330 - DNA, 25 bp, Homo sapien
taggagggcttatctctagagactg

SEQ ID NO: 1892331 - DNA, 25 bp, Homo sapien
ggcttatctctagagactgtccctg

SEQ ID NO: 1892332 - DNA, 25 bp, Homo sapien
tcctgatttgagcaaggggggcctt

SEQ ID NO: 1892333 - DNA, 25 bp, Homo sapien
gccttaggagggcttatctctagag

SEQ ID NO: 1892334 - DNA, 25 bp, Homo sapien
ggcttgcaatattcttgcaaatata

SEQ ID NO: 1892335 - DNA, 25 bp, Homo sapien
gacaggcttgcaatattcttgcaaa

SEQ ID NO: 1892336 - DNA, 25 bp, Homo sapien
cctgacaggcttgcaatattcttgc

SEQ ID NO: 1892337 - DNA, 25 bp, Homo sapien
caggcttgcaatattcttgcaaata

SEQ ID NO: 1892338 - DNA, 25 bp, Homo sapien
ataatctgtactctcatcaagaacc

SEQ ID NO: 1892339 - DNA, 25 bp, Homo sapien
tactctcatcaagaaccttatttca

SEQ ID NO: 1892340 - DNA, 25 bp, Homo sapien
tctgtactctcatcaagaaccttat

SEQ ID NO: 1892341 - DNA, 25 bp, Homo sapien
taatctgtactctcatcaagaacct

SEQ ID NO: 1892342 - DNA, 25 bp, Homo sapien
cacctttaacactggactgaccaca

SEQ ID NO: 1892343 - DNA, 25 bp, Homo sapien
tttaacactggactgaccacaataa

SEQ ID NO: 1892344 - DNA, 25 bp, Homo sapien
tagtagatataccagctgaaagata

SEQ ID NO: 1892345 - DNA, 25 bp, Homo sapien
gtagatataccagctgaaagatagt

SEQ ID NO: 1892346 - DNA, 25 bp, Homo sapien
tgacaacatgttgcggcggatcctt

SEQ ID NO: 1892347 - DNA, 25 bp, Homo sapien
gcactatgggccgtacaactctgac

SEQ ID NO: 1892348 - DNA, 25 bp, Homo sapien
gtcctgtagagccaccgtcaatatg

SEQ ID NO: 1892349 - DNA, 25 bp, Homo sapien
cacctggcaacttaggagcttggag

SEQ ID NO: 1892350 - DNA, 25 bp, Homo sapien
agatgattctgtccttaatggggcg

SEQ ID NO: 1892351 - DNA, 25 bp, Homo sapien
ttcaagatgattctgtccttaatgg

SEQ ID NO: 1892352 - DNA, 25 bp, Homo sapien
tgattctgtccttaatggggcgcat

SEQ ID NO: 1892353 - DNA, 25 bp, Homo sapien
tcaagatgattctgtccttaatggg

SEQ ID NO: 1892354 - DNA, 25 bp, Homo sapien
caaaagtactgctttcatactaaga

SEQ ID NO: 1892355 - DNA, 25 bp, Homo sapien
acaaaagtactgctttcatactaag

SEQ ID NO: 1892356 - DNA, 25 bp, Homo sapien
aaagtactgctttcatactaagaaa

SEQ ID NO: 1892357 - DNA, 25 bp, Homo sapien
aaaagtactgctttcatactaagaa

SEQ ID NO: 1892358 - DNA, 25 bp, Homo sapien
gttcacattcatctcgaaaaaattc

SEQ ID NO: 1892359 - DNA, 25 bp, Homo sapien
taaccacagagttggcataagtacc

SEQ ID NO: 1892360 - DNA, 25 bp, Homo sapien
taaataagcacatcttcaggatcat

SEQ ID NO: 1892361 - DNA, 25 bp, Homo sapien
taattatggtagcaactaaatattt

SEQ ID NO: 1892362 - DNA, 25 bp, Homo sapien
cttcagagtaacccgtgtggaaagg

SEQ ID NO: 1892363 - DNA, 25 bp, Homo sapien
tcttcagagtaacccgtgtggaaag

SEQ ID NO: 1892364 - DNA, 25 bp, Homo sapien
ttgtggtattggttttagaatcaaa

SEQ ID NO: 1892365 - DNA, 25 bp, Homo sapien
agctggtcttttggtgtgggcattg

SEQ ID NO: 1892366 - DNA, 25 bp, Homo sapien
aatcaaactgatagagtttaggagg

SEQ ID NO: 1892367 - DNA, 25 bp, Homo sapien
tgatagagtttaggaggaaaaggat

SEQ ID NO: 1892368 - DNA, 25 bp, Homo sapien
tcttaatcgtcttttgtcgaagaaa

SEQ ID NO: 1892369 - DNA, 25 bp, Homo sapien
aaagcacgtcctcttaatcgtcttt

SEQ ID NO: 1892370 - DNA, 25 bp, Homo sapien
gccagcccactactgaaacaatctg

SEQ ID NO: 1892371 - DNA, 25 bp, Homo sapien
ggaagccagcccactactgaaacaa

SEQ ID NO: 1892372 - DNA, 25 bp, Homo sapien
ctgaaagtcgctgttgcgtttcctc

SEQ ID NO: 1892373 - DNA, 25 bp, Homo sapien
gacagagttggtaattctgactgct

SEQ ID NO: 1892374 - DNA, 25 bp, Homo sapien
gctgtccgtgcttccgcctggtgga

SEQ ID NO: 1892375 - DNA, 25 bp, Homo sapien
cagcttgctgaagagcccggcggct

SEQ ID NO: 1892376 - DNA, 25 bp, Homo sapien
taatgcagccgcgaccagcttcctg

SEQ ID NO: 1892377 - DNA, 25 bp, Homo sapien
atgcagccgcgaccagcttcctgac

SEQ ID NO: 1892378 - DNA, 25 bp, Homo sapien
tgtaatgcagccgcgaccagcttcc

SEQ ID NO: 1892379 - DNA, 25 bp, Homo sapien
ctgtaatgcagccgcgaccagcttc

SEQ ID NO: 1892380 - DNA, 25 bp, Homo sapien
ttcacgtgaaggtggagtctctctc

SEQ ID NO: 1892381 - DNA, 25 bp, Homo sapien
ctctggagaagtatctcaaagtcat

SEQ ID NO: 1892382 - DNA, 25 bp, Homo sapien
cttctctggagaagtatctcaaagt

SEQ ID NO: 1892383 - DNA, 25 bp, Homo sapien
ggagtctctctcctatgcttcactt

SEQ ID NO: 1892384 - DNA, 25 bp, Homo sapien
tccacaactgatacccagaccaagg

SEQ ID NO: 1892385 - DNA, 25 bp, Homo sapien
gcatcattatgttcccagatccaca

SEQ ID NO: 1892386 - DNA, 25 bp, Homo sapien
cagaccaaggaacatgtaaagtcgt

SEQ ID NO: 1892387 - DNA, 25 bp, Homo sapien
tctgagaaatgtcctccgatgcatc

SEQ ID NO: 1892388 - DNA, 25 bp, Homo sapien
gctgttctgacaaatcaggtgagtt

SEQ ID NO: 1892389 - DNA, 25 bp, Homo sapien
aaggaacgccacatgactgtgagtt

SEQ ID NO: 1892390 - DNA, 25 bp, Homo sapien
ccttgcaataaaacccaccagttag

SEQ ID NO: 1892391 - DNA, 25 bp, Homo sapien
ctcatcagtaagcaggttgtaattc

SEQ ID NO: 1892392 - DNA, 25 bp, Homo sapien
cacaaatgccagatagcctcctaac

SEQ ID NO: 1892393 - DNA, 25 bp, Homo sapien
tgctatcagccctaaacctgctgaa

SEQ ID NO: 1892394 - DNA, 25 bp, Homo sapien
gattaaagcccctcttgctatcagc

SEQ ID NO: 1892395 - DNA, 25 bp, Homo sapien
tttatatggattaaagcccctcttg

SEQ ID NO: 1892396 - DNA, 25 bp, Homo sapien
atgtgctcattcgctgacctcctgc

SEQ ID NO: 1892397 - DNA, 25 bp, Homo sapien
aagaatgtgctcattcgctgacctc

SEQ ID NO: 1892398 - DNA, 25 bp, Homo sapien
ctgcagatgccaaggtcacactcca

SEQ ID NO: 1892399 - DNA, 25 bp, Homo sapien
gaatgtgctcattcgctgacctcct

SEQ ID NO: 1892400 - DNA, 25 bp, Homo sapien
cttcaaaatggcatatcgtttccat

SEQ ID NO: 1892401 - DNA, 25 bp, Homo sapien
aatggctttgtgtgtcgcattatag

SEQ ID NO: 1892402 - DNA, 25 bp, Homo sapien
caaaatggctttgtgtgtcgcatta

SEQ ID NO: 1892403 - DNA, 25 bp, Homo sapien
ggctttgtgtgtcgcattatagtta

SEQ ID NO: 1892404 - DNA, 25 bp, Homo sapien
ccaaaatggctttgtgtgtcgcatt

SEQ ID NO: 1892405 - DNA, 25 bp, Homo sapien
gcctaaggaagctctagtgtcttct

SEQ ID NO: 1892406 - DNA, 25 bp, Homo sapien
ggagcctaaggaagctctagtgtct

SEQ ID NO: 1892407 - DNA, 25 bp, Homo sapien
agcctaaggaagctctagtgtcttc

SEQ ID NO: 1892408 - DNA, 25 bp, Homo sapien
gagcctaaggaagctctagtgtctt

SEQ ID NO: 1892409 - DNA, 25 bp, Homo sapien
caactggtgtctgttgcaggacagg

SEQ ID NO: 1892410 - DNA, 25 bp, Homo sapien
tgctttctctgcagctcaatgcttt

SEQ ID NO: 1892411 - DNA, 25 bp, Homo sapien
gctttctctgcagctcaatgctttg

SEQ ID NO: 1892412 - DNA, 25 bp, Homo sapien
ctgccaactggtgtctgttgcagga

SEQ ID NO: 1892413 - DNA, 25 bp, Homo sapien
tggtccatgttagttgtggctcccc

SEQ ID NO: 1892414 - DNA, 25 bp, Homo sapien
tttctgttcctttagccacttgcat

SEQ ID NO: 1892415 - DNA, 25 bp, Homo sapien
taactgggcctggtccatgttagtt

SEQ ID NO: 1892416 - DNA, 25 bp, Homo sapien
ggcctggtccatgttagttgtggct

SEQ ID NO: 1892417 - DNA, 25 bp, Homo sapien
gttgacctctttgtgaatggaccat

SEQ ID NO: 1892418 - DNA, 25 bp, Homo sapien
tgttgacctctttgtgaatggacca

SEQ ID NO: 1892419 - DNA, 25 bp, Homo sapien
ttgttgacctctttgtgaatggacc

SEQ ID NO: 1892420 - DNA, 25 bp, Homo sapien
gagcatcatgggacactgaagatca

SEQ ID NO: 1892421 - DNA, 25 bp, Homo sapien
tgttcagatggtatgcagagcatca

SEQ ID NO: 1892422 - DNA, 25 bp, Homo sapien
taaaagtacaaattctgagcaacag

SEQ ID NO: 1892423 - DNA, 25 bp, Homo sapien
gcagtgacagtgagaattgccacaa

SEQ ID NO: 1892424 - DNA, 25 bp, Homo sapien
taatcccttaactggataatcacct

SEQ ID NO: 1892425 - DNA, 25 bp, Homo sapien
tctctagtgagaggacgaatgagtc

SEQ ID NO: 1892426 - DNA, 25 bp, Homo sapien
tcaccggagtcaggcaatagggaaa

SEQ ID NO: 1892427 - DNA, 25 bp, Homo sapien
caggcaatagggaaaggagatccag

SEQ ID NO: 1892428 - DNA, 25 bp, Homo sapien
cacgcggatcaggaaacaactgttt

SEQ ID NO: 1892429 - DNA, 25 bp, Homo sapien
ttccaacagatttctttcacattcc

SEQ ID NO: 1892430 - DNA, 25 bp, Homo sapien
ccaatttggataggaggacttgact

SEQ ID NO: 1892431 - DNA, 25 bp, Homo sapien
tctctccataagttctccattaaca

SEQ ID NO: 1892432 - DNA, 25 bp, Homo sapien
aaagtcatgaaagaccaacaggctg

SEQ ID NO: 1892433 - DNA, 25 bp, Homo sapien
gcttctactggagggacactggact

SEQ ID NO: 1892434 - DNA, 25 bp, Homo sapien
taactcagttttagaggcaaccacc

SEQ ID NO: 1892435 - DNA, 25 bp, Homo sapien
tccattgcaggcaagaggtgccctc

SEQ ID NO: 1892436 - DNA, 25 bp, Homo sapien
ctgagacttagaacaggttccttgc

SEQ ID NO: 1892437 - DNA, 25 bp, Homo sapien
acttagaacaggttccttgctgcca

SEQ ID NO: 1892438 - DNA, 25 bp, Homo sapien
cgggtggttcttcttcgagagtgtt

SEQ ID NO: 1892439 - DNA, 25 bp, Homo sapien
gagtgtttcaccctttcagccctgg

SEQ ID NO: 1892440 - DNA, 25 bp, Homo sapien
tgagggcttttagtttggacagcat

SEQ ID NO: 1892441 - DNA, 25 bp, Homo sapien
agttggtgaagttggtgagggcttt

SEQ ID NO: 1892442 - DNA, 25 bp, Homo sapien
tggagttggtgaagttggtgagggc

SEQ ID NO: 1892443 - DNA, 25 bp, Homo sapien
ttggtgagggcttttagtttggaca

SEQ ID NO: 1892444 - DNA, 25 bp, Homo sapien
atggttcatctctgtggaaggtacc

SEQ ID NO: 1892445 - DNA, 25 bp, Homo sapien
ccgtttggggttggatggttcatct

SEQ ID NO: 1892446 - DNA, 25 bp, Homo sapien
cgtttggggttggatggttcatctc

SEQ ID NO: 1892447 - DNA, 25 bp, Homo sapien
tcatctctgtggaaggtacctttac

SEQ ID NO: 1892448 - DNA, 25 bp, Homo sapien
cctctgcaggatccagaagagcaga

SEQ ID NO: 1892449 - DNA, 25 bp, Homo sapien
actggtccccagtggagtctgctgg

SEQ ID NO: 1892450 - DNA, 25 bp, Homo sapien
ctagggtttctcagatgctgcctct

SEQ ID NO: 1892451 - DNA, 25 bp, Homo sapien
agaggctgcagactggtccccagtg

SEQ ID NO: 1892452 - DNA, 25 bp, Homo sapien
aaggatgaagaaatcttctatctcc

SEQ ID NO: 1892453 - DNA, 25 bp, Homo sapien
gaagaaatcttctatctccttcact

SEQ ID NO: 1892454 - DNA, 25 bp, Homo sapien
gatgaagaaatcttctatctccttc

SEQ ID NO: 1892455 - DNA, 25 bp, Homo sapien
caaaggatgaagaaatcttctatct

SEQ ID NO: 1892456 - DNA, 25 bp, Homo sapien
tccagtagtgtctactctcagtgtg

SEQ ID NO: 1892457 - DNA, 25 bp, Homo sapien
ctcctttccagtagtgtctactctc

SEQ ID NO: 1892458 - DNA, 25 bp, Homo sapien
gtgtctactctcagtgtgaagtgta

SEQ ID NO: 1892459 - DNA, 25 bp, Homo sapien
cagtagtgtctactctcagtgtgaa

SEQ ID NO: 1892460 - DNA, 25 bp, Homo sapien
aaagcaactcattagtgcatggccc

SEQ ID NO: 1892461 - DNA, 25 bp, Homo sapien
taaagatgtgcccagtcaagatggt

SEQ ID NO: 1892462 - DNA, 25 bp, Homo sapien
tgcttcccatagagtaacttcagtc

SEQ ID NO: 1892463 - DNA, 25 bp, Homo sapien
tccacaacttgtcagctgccacaaa

SEQ ID NO: 1892464 - DNA, 25 bp, Homo sapien
gtcccataagatctattaccccaag

SEQ ID NO: 1892465 - DNA, 25 bp, Homo sapien
aattggtcccataagatctattacc

SEQ ID NO: 1892466 - DNA, 25 bp, Homo sapien
attaccccaagagctaaaggtcctg

SEQ ID NO: 1892467 - DNA, 25 bp, Homo sapien
ctaaattggtcccataagatctatt

SEQ ID NO: 1892468 - DNA, 25 bp, Homo sapien
gtggtgagaagaagggctgttctgc

SEQ ID NO: 1892469 - DNA, 25 bp, Homo sapien
ttcacaagcgcatcagtgaagtggg

SEQ ID NO: 1892470 - DNA, 25 bp, Homo sapien
ggaatatctgataccatatctgtgt

SEQ ID NO: 1892471 - DNA, 25 bp, Homo sapien
caaaagatggtgacccaagactaca

SEQ ID NO: 1892472 - DNA, 25 bp, Homo sapien
agacgagcgcttgttgtgaatgaaa

SEQ ID NO: 1892473 - DNA, 25 bp, Homo sapien
catgctcgatctttgacctgtacag

SEQ ID NO: 1892474 - DNA, 25 bp, Homo sapien
ggacttcgtgctgcatacatgctcg

SEQ ID NO: 1892475 - DNA, 25 bp, Homo sapien
tggtgattacatcagctgcactaac

SEQ ID NO: 1892476 - DNA, 25 bp, Homo sapien
attgttgaactttctgatcttagag

SEQ ID NO: 1892477 - DNA, 25 bp, Homo sapien
ttctgatcttagagttgggatggta

SEQ ID NO: 1892478 - DNA, 25 bp, Homo sapien
gatcttagagttgggatggtataag

SEQ ID NO: 1892479 - DNA, 25 bp, Homo sapien
tttgactccgtggattgttgaactt

SEQ ID NO: 1892480 - DNA, 25 bp, Homo sapien
gtttattcataaagtcagttcttct

SEQ ID NO: 1892481 - DNA, 25 bp, Homo sapien
tgggtcccccaaggattcaacacta

SEQ ID NO: 1892482 - DNA, 25 bp, Homo sapien
caacactaagtttattcataaagtc

SEQ ID NO: 1892483 - DNA, 25 bp, Homo sapien
ctaagtttattcataaagtcagttc

SEQ ID NO: 1892484 - DNA, 25 bp, Homo sapien
gagcttttctgatgatgtgcccaga

SEQ ID NO: 1892485 - DNA, 25 bp, Homo sapien
tgtgaccagcttcagacatgattga

SEQ ID NO: 1892486 - DNA, 25 bp, Homo sapien
tttttaagatagcaactcaacaccc

SEQ ID NO: 1892487 - DNA, 25 bp, Homo sapien
gggatgaaactgaccacacttctac

SEQ ID NO: 1892488 - DNA, 25 bp, Homo sapien
tgggtgacatccctagaaggcaaca

SEQ ID NO: 1892489 - DNA, 25 bp, Homo sapien
cacaagcttgagctgacactggaac

SEQ ID NO: 1892490 - DNA, 25 bp, Homo sapien
ggcacagtaaacgaacacaggacag

SEQ ID NO: 1892491 - DNA, 25 bp, Homo sapien
gctttgacaccagggaggcttaact

SEQ ID NO: 1892492 - DNA, 25 bp, Homo sapien
agcatgagcttcaacacttgctcca

SEQ ID NO: 1892493 - DNA, 25 bp, Homo sapien
gcatgagcttcaacacttgctccac

SEQ ID NO: 1892494 - DNA, 25 bp, Homo sapien
ccaccttctccacctgctccacctt

SEQ ID NO: 1892495 - DNA, 25 bp, Homo sapien
ttctccacctgctccaccttctcca

SEQ ID NO: 1892496 - DNA, 25 bp, Homo sapien
gtacaaatcaagtaatggtttgaac

SEQ ID NO: 1892497 - DNA, 25 bp, Homo sapien
gtttgagtagatgtacaaatcaagt

SEQ ID NO: 1892498 - DNA, 25 bp, Homo sapien
atggtttgaacacctttaataatat

SEQ ID NO: 1892499 - DNA, 25 bp, Homo sapien
tgtacaaatcaagtaatggtttgaa

SEQ ID NO: 1892500 - DNA, 25 bp, Homo sapien
gatcataactctttgttgaactaga

SEQ ID NO: 1892501 - DNA, 25 bp, Homo sapien
attttgtgatcataactctttgttg

SEQ ID NO: 1892502 - DNA, 25 bp, Homo sapien
aatcaactggtaattctgaaacact

SEQ ID NO: 1892503 - DNA, 25 bp, Homo sapien
cattagcatctatatctactttgtg

SEQ ID NO: 1892504 - DNA, 25 bp, Homo sapien
tgcagtcagaggcaaaaccctgaga

SEQ ID NO: 1892505 - DNA, 25 bp, Homo sapien
ggagctgaggccctgttgatcagct

SEQ ID NO: 1892506 - DNA, 25 bp, Homo sapien
gaagggccatcaccccactgtaagg

SEQ ID NO: 1892507 - DNA, 25 bp, Homo sapien
gagcctgcagttactggtgtgacca

SEQ ID NO: 1892508 - DNA, 25 bp, Homo sapien
cttgtagttaagaagggaaatgagg

SEQ ID NO: 1892509 - DNA, 25 bp, Homo sapien
gaggttttgaatgcgacgttcttca

SEQ ID NO: 1892510 - DNA, 25 bp, Homo sapien
caaggtggaagtctgagtatgaatc

SEQ ID NO: 1892511 - DNA, 25 bp, Homo sapien
ccctttgatgctgaaatcccttgta

SEQ ID NO: 1892512 - DNA, 25 bp, Homo sapien
ctgagctcagttaataccaccttgc

SEQ ID NO: 1892513 - DNA, 25 bp, Homo sapien
aggtctaccctgacacctgcatttc

SEQ ID NO: 1892514 - DNA, 25 bp, Homo sapien
cctctctcacaaggtctttcttttc

SEQ ID NO: 1892515 - DNA, 25 bp, Homo sapien
ttaataccaccttgccaggtctacc

SEQ ID NO: 1892516 - DNA, 25 bp, Homo sapien
tgtgggccacagtagtgaacagctt

SEQ ID NO: 1892517 - DNA, 25 bp, Homo sapien
aggcagtagtaaagctggcagctgc

SEQ ID NO: 1892518 - DNA, 25 bp, Homo sapien
cagctttaacagtgaaggcagtagt

SEQ ID NO: 1892519 - DNA, 25 bp, Homo sapien
aaatactgtgtccagcagcgcaagc

SEQ ID NO: 1892520 - DNA, 25 bp, Homo sapien
gcagcatcactgacacagccacacc

SEQ ID NO: 1892521 - DNA, 25 bp, Homo sapien
ttttggacagatcacacagcagcat

SEQ ID NO: 1892522 - DNA, 25 bp, Homo sapien
ccttttggacagatcacacagcagc

SEQ ID NO: 1892523 - DNA, 25 bp, Homo sapien
tttggacagatcacacagcagcatc

SEQ ID NO: 1892524 - DNA, 25 bp, Homo sapien
tagcagagatttcggtaaggaccac

SEQ ID NO: 1892525 - DNA, 25 bp, Homo sapien
aggaccacattagggacccagttca

SEQ ID NO: 1892526 - DNA, 25 bp, Homo sapien
gagatttcggtaaggaccacattag

SEQ ID NO: 1892527 - DNA, 25 bp, Homo sapien
ctatagcagagatttcggtaaggac

SEQ ID NO: 1892528 - DNA, 25 bp, Homo sapien
tgctgataagtagaatctcgagatc

SEQ ID NO: 1892529 - DNA, 25 bp, Homo sapien
agatctgtacaaattaaggtgctga

SEQ ID NO: 1892530 - DNA, 25 bp, Homo sapien
gatccccattgtagaaaagaatgaa

SEQ ID NO: 1892531 - DNA, 25 bp, Homo sapien
gaatctcgagatccccattgtagaa

SEQ ID NO: 1892532 - DNA, 25 bp, Homo sapien
gtccaataggccaatttcttggtca

SEQ ID NO: 1892533 - DNA, 25 bp, Homo sapien
tttctttcaagatatcaggtacctc

SEQ ID NO: 1892534 - DNA, 25 bp, Homo sapien
gtgatctgtccaataggccaatttc

SEQ ID NO: 1892535 - DNA, 25 bp, Homo sapien
tcaagcccccatactggtgtgtggc

SEQ ID NO: 1892536 - DNA, 25 bp, Homo sapien
cactaccacccctgacttttgcttc

SEQ ID NO: 1892537 - DNA, 25 bp, Homo sapien
tcctgtccacatacaaatgggaatg

SEQ ID NO: 1892538 - DNA, 25 bp, Homo sapien
catacaaatgggaatggtcctctca

SEQ ID NO: 1892539 - DNA, 25 bp, Homo sapien
ccacatacaaatgggaatggtcctc

SEQ ID NO: 1892540 - DNA, 25 bp, Homo sapien
agtcgtctaaaagttcacctgggca

SEQ ID NO: 1892541 - DNA, 25 bp, Homo sapien
tagagtcactcacaaattgcagtcg

SEQ ID NO: 1892542 - DNA, 25 bp, Homo sapien
tcagatatgaagcacctaggttcca

SEQ ID NO: 1892543 - DNA, 25 bp, Homo sapien
caaacatctttgtgagcaatcggcc

SEQ ID NO: 1892544 - DNA, 25 bp, Homo sapien
cacgaagaagttgcccagtaaacac

SEQ ID NO: 1892545 - DNA, 25 bp, Homo sapien
aagttgcccagtaaacacttgtctg

SEQ ID NO: 1892546 - DNA, 25 bp, Homo sapien
cacttgtctgaaggatacatgtcct

SEQ ID NO: 1892547 - DNA, 25 bp, Homo sapien
tgtccttagttgcaaaggcttcggg

SEQ ID NO: 1892548 - DNA, 25 bp, Homo sapien
tgtgggcaagacttaagcagcaact

SEQ ID NO: 1892549 - DNA, 25 bp, Homo sapien
tcttctgagcaaaatgactctgtcc

SEQ ID NO: 1892550 - DNA, 25 bp, Homo sapien
tgttgcatcctcaagaattataacc

SEQ ID NO: 1892551 - DNA, 25 bp, Homo sapien
agcattggctgcttcagctactcca

SEQ ID NO: 1892552 - DNA, 25 bp, Homo sapien
ctcaggccttttggttgtgtacatt

SEQ ID NO: 1892553 - DNA, 25 bp, Homo sapien
tgtgctgcttacaggaggaaacttt

SEQ ID NO: 1892554 - DNA, 25 bp, Homo sapien
gtgctgcttacaggaggaaactttc

SEQ ID NO: 1892555 - DNA, 25 bp, Homo sapien
agccatcaccctgtccactgcacag

SEQ ID NO: 1892556 - DNA, 25 bp, Homo sapien
gccctgtcctcagcctgcttctctc

SEQ ID NO: 1892557 - DNA, 25 bp, Homo sapien
caactttgggaaggcctgtccagcc

SEQ ID NO: 1892558 - DNA, 25 bp, Homo sapien
cactgcacagcaactttgggaaggc

SEQ ID NO: 1892559 - DNA, 25 bp, Homo sapien
caaaatagacaagtcagcacaaggc

SEQ ID NO: 1892560 - DNA, 25 bp, Homo sapien
aatacatgaacaattggagcctcgt

SEQ ID NO: 1892561 - DNA, 25 bp, Homo sapien
gagcctcgtcatgtgtattacctaa

SEQ ID NO: 1892562 - DNA, 25 bp, Homo sapien
ttgaggtggaatcgagtgtttctgc

SEQ ID NO: 1892563 - DNA, 25 bp, Homo sapien
gtgccatgagcacagcagcactgta

SEQ ID NO: 1892564 - DNA, 25 bp, Homo sapien
gcccttggtcagcaggtgccatgag

SEQ ID NO: 1892565 - DNA, 25 bp, Homo sapien
gccatgagcacagcagcactgtagg

SEQ ID NO: 1892566 - DNA, 25 bp, Homo sapien
cagcccttggtcagcaggtgccatg

SEQ ID NO: 1892567 - DNA, 25 bp, Homo sapien
tgctgaaggtactactgatcctgga

SEQ ID NO: 1892568 - DNA, 25 bp, Homo sapien
gattcggtctcatccaggttattgg

SEQ ID NO: 1892569 - DNA, 25 bp, Homo sapien
ttattggctggaccaaggatcagca

SEQ ID NO: 1892570 - DNA, 25 bp, Homo sapien
tgatcctggacatgatgaagttgcc

SEQ ID NO: 1892571 - DNA, 25 bp, Homo sapien
actgcttgtttcttgccattgatgt

SEQ ID NO: 1892572 - DNA, 25 bp, Homo sapien
ttgccattgatgttcagcacaaggg

SEQ ID NO: 1892573 - DNA, 25 bp, Homo sapien
tgcttcgtggcttgagctcaaacca

SEQ ID NO: 1892574 - DNA, 25 bp, Homo sapien
ctggagttgctgtgctgcgaggaag

SEQ ID NO: 1892575 - DNA, 25 bp, Homo sapien
cagaaaaacatacagacaaaaacat

SEQ ID NO: 1892576 - DNA, 25 bp, Homo sapien
acagaaaaacatacagacaaaaaca

SEQ ID NO: 1892577 - DNA, 25 bp, Homo sapien
cacagaaaaacatacagacaaaaac

SEQ ID NO: 1892578 - DNA, 25 bp, Homo sapien
tttcagtgtcatccgaagcttgaac

SEQ ID NO: 1892579 - DNA, 25 bp, Homo sapien
gaactgtgcaatttgatcactgttt

SEQ ID NO: 1892580 - DNA, 25 bp, Homo sapien
caagccagaccatggaactactctt

SEQ ID NO: 1892581 - DNA, 25 bp, Homo sapien
gcactgaactgtgcaatttgatcac

SEQ ID NO: 1892582 - DNA, 25 bp, Homo sapien
ccagagaaggaagagctacctgaat

SEQ ID NO: 1892583 - DNA, 25 bp, Homo sapien
cataggcattgtacaagttgtagcc

SEQ ID NO: 1892584 - DNA, 25 bp, Homo sapien
agttgtagcctgcacttctcacaga

SEQ ID NO: 1892585 - DNA, 25 bp, Homo sapien
tattgtctaatcataggcattgtac

SEQ ID NO: 1892586 - DNA, 25 bp, Homo sapien
tggagccatggcatgctcagagagc

SEQ ID NO: 1892587 - DNA, 25 bp, Homo sapien
aggttggagccatggcatgctcaga

SEQ ID NO: 1892588 - DNA, 25 bp, Homo sapien
tcaggttggagccatggcatgctca

SEQ ID NO: 1892589 - DNA, 25 bp, Homo sapien
gttggagccatggcatgctcagaga

SEQ ID NO: 1892590 - DNA, 25 bp, Homo sapien
ccatccttaaaggaaatcccacatg

SEQ ID NO: 1892591 - DNA, 25 bp, Homo sapien
agccatccttaaaggaaatcccaca

SEQ ID NO: 1892592 - DNA, 25 bp, Homo sapien
taaaggaaatcccacatgggttaca

SEQ ID NO: 1892593 - DNA, 25 bp, Homo sapien
atccttaaaggaaatcccacatggg

SEQ ID NO: 1892594 - DNA, 25 bp, Homo sapien
ggtagtcctgtggagcaaccatgcc

SEQ ID NO: 1892595 - DNA, 25 bp, Homo sapien
tagtcctgtggagcaaccatgccat

SEQ ID NO: 1892596 - DNA, 25 bp, Homo sapien
ttcaccaataaagaagtggtagctt

SEQ ID NO: 1892597 - DNA, 25 bp, Homo sapien
ccaataaagaagtggtagcttttga

SEQ ID NO: 1892598 - DNA, 25 bp, Homo sapien
ttcatgacagtaaggataccagtga

SEQ ID NO: 1892599 - DNA, 25 bp, Homo sapien
gttcatgacagtaaggataccagtg

SEQ ID NO: 1892600 - DNA, 25 bp, Homo sapien
tcatgacagtaaggataccagtgat

SEQ ID NO: 1892601 - DNA, 25 bp, Homo sapien
tggttcatgacagtaaggataccag

SEQ ID NO: 1892602 - DNA, 25 bp, Homo sapien
cgctttcagtgccttcagcggaggc

SEQ ID NO: 1892603 - DNA, 25 bp, Homo sapien
tctcccggattttgtaaatgtggga

SEQ ID NO: 1892604 - DNA, 25 bp, Homo sapien
catccgcagtctcccggattttgta

SEQ ID NO: 1892605 - DNA, 25 bp, Homo sapien
ttcgctttcagtgccttcagcggag

SEQ ID NO: 1892606 - DNA, 25 bp, Homo sapien
tgatgaggtcccagtagataaatca

SEQ ID NO: 1892607 - DNA, 25 bp, Homo sapien
ctgatgaggtcccagtagataaatc

SEQ ID NO: 1892608 - DNA, 25 bp, Homo sapien
tttactattggttcctacagactgc

SEQ ID NO: 1892609 - DNA, 25 bp, Homo sapien
tattatccattagatagctccagtg

SEQ ID NO: 1892610 - DNA, 25 bp, Homo sapien
tgcagaacttttgcaatccatagcc

SEQ ID NO: 1892611 - DNA, 25 bp, Homo sapien
tagccaacctatggttccggctgaa

SEQ ID NO: 1892612 - DNA, 25 bp, Homo sapien
gcctcggttctatgcatatatggat

SEQ ID NO: 1892613 - DNA, 25 bp, Homo sapien
tacacttggccagtaaaatagggta

SEQ ID NO: 1892614 - DNA, 25 bp, Homo sapien
gaaccactttgcaattgtagattcc

SEQ ID NO: 1892615 - DNA, 25 bp, Homo sapien
aattagagaaagtcacatttagggt

SEQ ID NO: 1892616 - DNA, 25 bp, Homo sapien
gggaatccaaaagcaaggcactagc

SEQ ID NO: 1892617 - DNA, 25 bp, Homo sapien
tcagcagtctgacacaagagtaggc

SEQ ID NO: 1892618 - DNA, 25 bp, Homo sapien
cattcaggctatataagtagctgcc

SEQ ID NO: 1892619 - DNA, 25 bp, Homo sapien
tagacggcaccaactgactgtgtca

SEQ ID NO: 1892620 - DNA, 25 bp, Homo sapien
tacagtggactaagaagacatactc

SEQ ID NO: 1892621 - DNA, 25 bp, Homo sapien
gtctgctaagaacaacagtgggcaa

SEQ ID NO: 1892622 - DNA, 25 bp, Homo sapien
ggtttagtttgcactagcatcacca

SEQ ID NO: 1892623 - DNA, 25 bp, Homo sapien
tggctacatcaccaagcaacaggaa

SEQ ID NO: 1892624 - DNA, 25 bp, Homo sapien
gctatacaatacgaagtttatcagt

SEQ ID NO: 1892625 - DNA, 25 bp, Homo sapien
taataaaatttggatcacagctagc

SEQ ID NO: 1892626 - DNA, 25 bp, Homo sapien
cagctagcaaatgaaagactatgag

SEQ ID NO: 1892627 - DNA, 25 bp, Homo sapien
cctgtttctccatactaggcataat

SEQ ID NO: 1892628 - DNA, 25 bp, Homo sapien
tcgcacagcagaaatttcaatgggt

SEQ ID NO: 1892629 - DNA, 25 bp, Homo sapien
caatgggttattctataccaaatcc

SEQ ID NO: 1892630 - DNA, 25 bp, Homo sapien
agtaaatttctaccaccctcgcaca

SEQ ID NO: 1892631 - DNA, 25 bp, Homo sapien
gtaaatttctaccaccctcgcacag

SEQ ID NO: 1892632 - DNA, 25 bp, Homo sapien
gatgtcacagaggtaacttcctttt

SEQ ID NO: 1892633 - DNA, 25 bp, Homo sapien
tcacagaggtaacttccttttgtac

SEQ ID NO: 1892634 - DNA, 25 bp, Homo sapien
ccaagatgtcacagaggtaacttcc

SEQ ID NO: 1892635 - DNA, 25 bp, Homo sapien
tacatccaagatgtcacagaggtaa

SEQ ID NO: 1892636 - DNA, 25 bp, Homo sapien
tgcctaacagctctagtgtattaaa

SEQ ID NO: 1892637 - DNA, 25 bp, Homo sapien
gctggcatatggagtgagaaatatc

SEQ ID NO: 1892638 - DNA, 25 bp, Homo sapien
gacagctctgttatgaagtctcaaa

SEQ ID NO: 1892639 - DNA, 25 bp, Homo sapien
aaggcaacgtttaatgacagctctg

SEQ ID NO: 1892640 - DNA, 25 bp, Homo sapien
cacttgccaccaaaccgagataact

SEQ ID NO: 1892641 - DNA, 25 bp, Homo sapien
tgtatcacaatgtccaataaaacat

SEQ ID NO: 1892642 - DNA, 25 bp, Homo sapien
gtatcacaatgtccaataaaacata

SEQ ID NO: 1892643 - DNA, 25 bp, Homo sapien
tatcacaatgtccaataaaacataa

SEQ ID NO: 1892644 - DNA, 25 bp, Homo sapien
ctgtatcacaatgtccaataaaaca

SEQ ID NO: 1892645 - DNA, 25 bp, Homo sapien
attaaagattgtggttacctctaag

SEQ ID NO: 1892646 - DNA, 25 bp, Homo sapien
cacacaaaattaaagattgtggtta

SEQ ID NO: 1892647 - DNA, 25 bp, Homo sapien
taaatgttaaggcactaaacacaaa

SEQ ID NO: 1892648 - DNA, 25 bp, Homo sapien
attgtggttacctctaagtgggaag

SEQ ID NO: 1892649 - DNA, 25 bp, Homo sapien
cacaaaagtagcctcagtagtatca

SEQ ID NO: 1892650 - DNA, 25 bp, Homo sapien
gggaatgggactgataatataaaac

SEQ ID NO: 1892651 - DNA, 25 bp, Homo sapien
tgcatgaggacactttcattatgcc

SEQ ID NO: 1892652 - DNA, 25 bp, Homo sapien
atcacaactgtattgagatctcaac

SEQ ID NO: 1892653 - DNA, 25 bp, Homo sapien
tcaccaaacctagccagcatgagtt

SEQ ID NO: 1892654 - DNA, 25 bp, Homo sapien
catgagtttacgagctttaatgagc

SEQ ID NO: 1892655 - DNA, 25 bp, Homo sapien
acctagccagcatgagtttacgagc

SEQ ID NO: 1892656 - DNA, 25 bp, Homo sapien
tacgtcgttcaccaaacctagccag

SEQ ID NO: 1892657 - DNA, 25 bp, Homo sapien
tactggttgctgtaagccatcaaac

SEQ ID NO: 1892658 - DNA, 25 bp, Homo sapien
ttcatacttggtttcttcaccaata

SEQ ID NO: 1892659 - DNA, 25 bp, Homo sapien
cagaagtctgatgctttcatacttg

SEQ ID NO: 1892660 - DNA, 25 bp, Homo sapien
gcttgttgagtactggttgctgtaa

SEQ ID NO: 1892661 - DNA, 25 bp, Homo sapien
agtgtttctataagaggctcctgga

SEQ ID NO: 1892662 - DNA, 25 bp, Homo sapien
tcataaagcaaaatcaccaccctgt

SEQ ID NO: 1892663 - DNA, 25 bp, Homo sapien
taaagtgactcaccattaactggat

SEQ ID NO: 1892664 - DNA, 25 bp, Homo sapien
ttcccagatactaggcaaaaactgc

SEQ ID NO: 1892665 - DNA, 25 bp, Homo sapien
ataatacttattgtattaccccact

SEQ ID NO: 1892666 - DNA, 25 bp, Homo sapien
aaaaatctgctagttggaaaataat

SEQ ID NO: 1892667 - DNA, 25 bp, Homo sapien
atacttattgtattaccccactaag

SEQ ID NO: 1892668 - DNA, 25 bp, Homo sapien
aaatctgctagttggaaaataatac

SEQ ID NO: 1892669 - DNA, 25 bp, Homo sapien
gaagagatttcgcatatgttccctg

SEQ ID NO: 1892670 - DNA, 25 bp, Homo sapien
tctaaggttctgtcctaagacctcc

SEQ ID NO: 1892671 - DNA, 25 bp, Homo sapien
ttcacaaggaagagcagaactattc

SEQ ID NO: 1892672 - DNA, 25 bp, Homo sapien
gacagctcattcctttatagcactg

SEQ ID NO: 1892673 - DNA, 25 bp, Homo sapien
ccttgaagaaaggtagtgtcaatcc

SEQ ID NO: 1892674 - DNA, 25 bp, Homo sapien
cagtagtgagagcatgccttgttcc

SEQ ID NO: 1892675 - DNA, 25 bp, Homo sapien
gaagtcatcgccaaacagaaggtca

SEQ ID NO: 1892676 - DNA, 25 bp, Homo sapien
gacgaagttcagaagaacggacatc

SEQ ID NO: 1892677 - DNA, 25 bp, Homo sapien
tgtcaagaacagaatgccctgactg

SEQ ID NO: 1892678 - DNA, 25 bp, Homo sapien
gctggctagagttggttctttccct

SEQ ID NO: 1892679 - DNA, 25 bp, Homo sapien
tccatcaggtcagtcaggctctggt

SEQ ID NO: 1892680 - DNA, 25 bp, Homo sapien
gacaagatggctagagtgtattgga

SEQ ID NO: 1892681 - DNA, 25 bp, Homo sapien
cttatcttggagagagcgaggttca

SEQ ID NO: 1892682 - DNA, 25 bp, Homo sapien
ttgcttatcttggagagagcgaggt

SEQ ID NO: 1892683 - DNA, 25 bp, Homo sapien
gcttatcttggagagagcgaggttc

SEQ ID NO: 1892684 - DNA, 25 bp, Homo sapien
tatcttggagagagcgaggttcagt

SEQ ID NO: 1892685 - DNA, 25 bp, Homo sapien
gtgttatgagtgagaccaaacggtg

SEQ ID NO: 1892686 - DNA, 25 bp, Homo sapien
gaggattcgagttcccattaagaga

SEQ ID NO: 1892687 - DNA, 25 bp, Homo sapien
aaatagctgttctagtttacactga

SEQ ID NO: 1892688 - DNA, 25 bp, Homo sapien
ccaaacggtgctcctgaaatagctg

SEQ ID NO: 1892689 - DNA, 25 bp, Homo sapien
tagactccttctacagtcatcacct

SEQ ID NO: 1892690 - DNA, 25 bp, Homo sapien
tcagcacggtttgcattatttttaa

SEQ ID NO: 1892691 - DNA, 25 bp, Homo sapien
ctgtattttcagcacggtttgcatt

SEQ ID NO: 1892692 - DNA, 25 bp, Homo sapien
tacatacatcaggtaatcatagact

SEQ ID NO: 1892693 - DNA, 25 bp, Homo sapien
taacaaagtattcattctctcgaca

SEQ ID NO: 1892694 - DNA, 25 bp, Homo sapien
gaaaaagtaatctcaagtagggcaa

SEQ ID NO: 1892695 - DNA, 25 bp, Homo sapien
cacaataccctctgtataccgttca

SEQ ID NO: 1892696 - DNA, 25 bp, Homo sapien
aatagttctttaatgcaatgtgcag

SEQ ID NO: 1892697 - DNA, 25 bp, Homo sapien
tgataaaaggttccaaatgctgacc

SEQ ID NO: 1892698 - DNA, 25 bp, Homo sapien
tgagaatggtcagttctggtctact

SEQ ID NO: 1892699 - DNA, 25 bp, Homo sapien
tggtttaggctttggagactcacaa

SEQ ID NO: 1892700 - DNA, 25 bp, Homo sapien
ttaggctttggagactcacaagaat

SEQ ID NO: 1892701 - DNA, 25 bp, Homo sapien
ctctttcattagttttccaggaaca

SEQ ID NO: 1892702 - DNA, 25 bp, Homo sapien
ctttcattagttttccaggaacaga

SEQ ID NO: 1892703 - DNA, 25 bp, Homo sapien
tttcattagttttccaggaacagat

SEQ ID NO: 1892704 - DNA, 25 bp, Homo sapien
tcattagttttccaggaacagattt

SEQ ID NO: 1892705 - DNA, 25 bp, Homo sapien
tactcagttctggatgctgcagaag

SEQ ID NO: 1892706 - DNA, 25 bp, Homo sapien
catctggtagtatcttatcaagaaa

SEQ ID NO: 1892707 - DNA, 25 bp, Homo sapien
tatcaagaaattgtgtttccccacc

SEQ ID NO: 1892708 - DNA, 25 bp, Homo sapien
gaaagtctgccagaagttgactatt

SEQ ID NO: 1892709 - DNA, 25 bp, Homo sapien
taatttttggggccaatgatcctct

SEQ ID NO: 1892710 - DNA, 25 bp, Homo sapien
tagatattcttggaactcttccctc

SEQ ID NO: 1892711 - DNA, 25 bp, Homo sapien
gatattcttggaactcttccctctt

SEQ ID NO: 1892712 - DNA, 25 bp, Homo sapien
gaattcataatttttggggccaatg

SEQ ID NO: 1892713 - DNA, 25 bp, Homo sapien
ggatcaggggacactctacagagct

SEQ ID NO: 1892714 - DNA, 25 bp, Homo sapien
tcaggggacactctacagagctttt

SEQ ID NO: 1892715 - DNA, 25 bp, Homo sapien
gaatttggatcaggggacactctac

SEQ ID NO: 1892716 - DNA, 25 bp, Homo sapien
aaaccaacctgaatttggatcaggg

SEQ ID NO: 1892717 - DNA, 25 bp, Homo sapien
gaccaatgttcaggctcgtgtccaa

SEQ ID NO: 1892718 - DNA, 25 bp, Homo sapien
tcaagtacatagaattcaagatatc

SEQ ID NO: 1892719 - DNA, 25 bp, Homo sapien
tctgttagttttgattcaagtacat

SEQ ID NO: 1892720 - DNA, 25 bp, Homo sapien
caagatatcttctatagacagacca

SEQ ID NO: 1892721 - DNA, 25 bp, Homo sapien
caaaaaagtctacatatggaatgct

SEQ ID NO: 1892722 - DNA, 25 bp, Homo sapien
gaatgctaattttccatgcagcaag

SEQ ID NO: 1892723 - DNA, 25 bp, Homo sapien
gctcacagcctccactggagaatca

SEQ ID NO: 1892724 - DNA, 25 bp, Homo sapien
tttcagaggagggatcctcaaaaaa

SEQ ID NO: 1892725 - DNA, 25 bp, Homo sapien
aactattaatagaagcggtttctgg

SEQ ID NO: 1892726 - DNA, 25 bp, Homo sapien
gatctactttcttctatccatactt

SEQ ID NO: 1892727 - DNA, 25 bp, Homo sapien
tggtagatatgcacgtacgtggcat

SEQ ID NO: 1892728 - DNA, 25 bp, Homo sapien
tttctgggtggtagatatgcacgta

SEQ ID NO: 1892729 - DNA, 25 bp, Homo sapien
atccaatcagtactaaacacccctt

SEQ ID NO: 1892730 - DNA, 25 bp, Homo sapien
aatccaatcagtactaaacacccct

SEQ ID NO: 1892731 - DNA, 25 bp, Homo sapien
atcaatccaatcagtactaaacacc

SEQ ID NO: 1892732 - DNA, 25 bp, Homo sapien
tcaatccaatcagtactaaacaccc

SEQ ID NO: 1892733 - DNA, 25 bp, Homo sapien
taattaggcaacatagctccctcca

SEQ ID NO: 1892734 - DNA, 25 bp, Homo sapien
aattaggcaacatagctccctccat

SEQ ID NO: 1892735 - DNA, 25 bp, Homo sapien
tgtggtacttttgaatactccttta

SEQ ID NO: 1892736 - DNA, 25 bp, Homo sapien
cctttaattttgctacctattctgc

SEQ ID NO: 1892737 - DNA, 25 bp, Homo sapien
ctgctgattccaaatgattctcccc

SEQ ID NO: 1892738 - DNA, 25 bp, Homo sapien
tttgctacctattctgctgattcca

SEQ ID NO: 1892739 - DNA, 25 bp, Homo sapien
gataaactaaaggtatagctaacat

SEQ ID NO: 1892740 - DNA, 25 bp, Homo sapien
gaaaatgataaactaaaggtatagc

SEQ ID NO: 1892741 - DNA, 25 bp, Homo sapien
ggagttttcatacacggattaagta

SEQ ID NO: 1892742 - DNA, 25 bp, Homo sapien
taagtatcaacatctcagaagtcaa

SEQ ID NO: 1892743 - DNA, 25 bp, Homo sapien
atactgaaaagaatcacatgctcaa

SEQ ID NO: 1892744 - DNA, 25 bp, Homo sapien
tactgaaaagaatcacatgctcaag

SEQ ID NO: 1892745 - DNA, 25 bp, Homo sapien
actgaaaagaatcacatgctcaaga

SEQ ID NO: 1892746 - DNA, 25 bp, Homo sapien
cgaaaatcatccaaacttaggctac

SEQ ID NO: 1892747 - DNA, 25 bp, Homo sapien
gaaaatcatccaaacttaggctacc

SEQ ID NO: 1892748 - DNA, 25 bp, Homo sapien
aaaatcatccaaacttaggctacct

SEQ ID NO: 1892749 - DNA, 25 bp, Homo sapien
aagcttcagaagttacacaggtgta

SEQ ID NO: 1892750 - DNA, 25 bp, Homo sapien
tggaaagtatgcagagactgagcca

SEQ ID NO: 1892751 - DNA, 25 bp, Homo sapien
taaaggtaagataaacgcacatagc

SEQ ID NO: 1892752 - DNA, 25 bp, Homo sapien
aacctggcatggcacaaaaaacaaa

SEQ ID NO: 1892753 - DNA, 25 bp, Homo sapien
ttagatttaaccacgaagcaagctt

SEQ ID NO: 1892754 - DNA, 25 bp, Homo sapien
ttgacttagatttaaccacgaagca

SEQ ID NO: 1892755 - DNA, 25 bp, Homo sapien
gtgttccatcgcacttgactaattt

SEQ ID NO: 1892756 - DNA, 25 bp, Homo sapien
ggatcacaggtgtgttccatcgcac

SEQ ID NO: 1892757 - DNA, 25 bp, Homo sapien
gccacttatgcattcagtccctagt

SEQ ID NO: 1892758 - DNA, 25 bp, Homo sapien
caattcactagtaaaatgccttgtg

SEQ ID NO: 1892759 - DNA, 25 bp, Homo sapien
tcattatgagattaacaaggccaca

SEQ ID NO: 1892760 - DNA, 25 bp, Homo sapien
ggcattttcagatcaccatatagaa

SEQ ID NO: 1892761 - DNA, 25 bp, Homo sapien
tttgaattgcgtgttggtgattctg

SEQ ID NO: 1892762 - DNA, 25 bp, Homo sapien
gattctgcacctcttaaaagttgtc

SEQ ID NO: 1892763 - DNA, 25 bp, Homo sapien
ttttgaattgcgtgttggtgattct

SEQ ID NO: 1892764 - DNA, 25 bp, Homo sapien
taatcttcacttaattacatagcga

SEQ ID NO: 1892765 - DNA, 25 bp, Homo sapien
gaatcactcatctaatgatatcaaa

SEQ ID NO: 1892766 - DNA, 25 bp, Homo sapien
gcaactgtgcccagtaatcttgtct

SEQ ID NO: 1892767 - DNA, 25 bp, Homo sapien
tcctcaaacaaggttaatattttga

SEQ ID NO: 1892768 - DNA, 25 bp, Homo sapien
gcagaacataggagtaaatacattc

SEQ ID NO: 1892769 - DNA, 25 bp, Homo sapien
gggaaagaacatgttcatatgcttc

SEQ ID NO: 1892770 - DNA, 25 bp, Homo sapien
catgttcatatgcttcaaaaagaca

SEQ ID NO: 1892771 - DNA, 25 bp, Homo sapien
tcactatggcagaacataggagtaa

SEQ ID NO: 1892772 - DNA, 25 bp, Homo sapien
taaaatagaataatagctgcccatg

SEQ ID NO: 1892773 - DNA, 25 bp, Homo sapien
tgaaactccactgaaacacactaga

SEQ ID NO: 1892774 - DNA, 25 bp, Homo sapien
ccaagctctagttctgacaaataca

SEQ ID NO: 1892775 - DNA, 25 bp, Homo sapien
tgcccatgtactgcagctagccact

SEQ ID NO: 1892776 - DNA, 25 bp, Homo sapien
gaatctcttctacaatgaagggatc

SEQ ID NO: 1892777 - DNA, 25 bp, Homo sapien
tgaagggatcaaatctaattttgtc

SEQ ID NO: 1892778 - DNA, 25 bp, Homo sapien
tctttgaatctcttctacaatgaag

SEQ ID NO: 1892779 - DNA, 25 bp, Homo sapien
ttctacaatgaagggatcaaatcta

SEQ ID NO: 1892780 - DNA, 25 bp, Homo sapien
tgataattctggtcgtaaaattcta

SEQ ID NO: 1892781 - DNA, 25 bp, Homo sapien
catttgataattctggtcgtaaaat

SEQ ID NO: 1892782 - DNA, 25 bp, Homo sapien
ttgataattctggtcgtaaaattct

SEQ ID NO: 1892783 - DNA, 25 bp, Homo sapien
acgagagtgaaattccgcctcaaac

SEQ ID NO: 1892784 - DNA, 25 bp, Homo sapien
ttcgtaaaatacacaggtaagcctc

SEQ ID NO: 1892785 - DNA, 25 bp, Homo sapien
gatttaaaatattcaaatacattaa

SEQ ID NO: 1892786 - DNA, 25 bp, Homo sapien
atcagatctgatttaaaatattcaa

SEQ ID NO: 1892787 - DNA, 25 bp, Homo sapien
cgtaaaatacacaggtaagcctcac

SEQ ID NO: 1892788 - DNA, 25 bp, Homo sapien
gtgcactgcgccttcttgtttcaga

SEQ ID NO: 1892789 - DNA, 25 bp, Homo sapien
cgtgcactgcgccttcttgtttcag

SEQ ID NO: 1892790 - DNA, 25 bp, Homo sapien
ctgcaacacgtgcactgcgccttct

SEQ ID NO: 1892791 - DNA, 25 bp, Homo sapien
cacgtgcactgcgccttcttgtttc

SEQ ID NO: 1892792 - DNA, 25 bp, Homo sapien
aaggagaagccggttcagttgcttt

SEQ ID NO: 1892793 - DNA, 25 bp, Homo sapien
gagaagccggttcagttgctttttc

SEQ ID NO: 1892794 - DNA, 25 bp, Homo sapien
caaaggagaagccggttcagttgct

SEQ ID NO: 1892795 - DNA, 25 bp, Homo sapien
aggagaagccggttcagttgctttt

SEQ ID NO: 1892796 - DNA, 25 bp, Homo sapien
atctatgaagatgataagcaaatga

SEQ ID NO: 1892797 - DNA, 25 bp, Homo sapien
gtcatctatgaagatgataagcaaa

SEQ ID NO: 1892798 - DNA, 25 bp, Homo sapien
tgaagatgataagcaaatgattcac

SEQ ID NO: 1892799 - DNA, 25 bp, Homo sapien
tgataagcaaatgattcacagtatc

SEQ ID NO: 1892800 - DNA, 25 bp, Homo sapien
tcagctaggaaatccaaagaaggaa

SEQ ID NO: 1892801 - DNA, 25 bp, Homo sapien
gatcagctaggaaatccaaagaagg

SEQ ID NO: 1892802 - DNA, 25 bp, Homo sapien
cagctaggaaatccaaagaaggaag

SEQ ID NO: 1892803 - DNA, 25 bp, Homo sapien
gctaggaaatccaaagaaggaagga

SEQ ID NO: 1892804 - DNA, 25 bp, Homo sapien
tagtgcaattcatctcttcgacttc

SEQ ID NO: 1892805 - DNA, 25 bp, Homo sapien
tgcagtctgttgctttaggaggcaa

SEQ ID NO: 1892806 - DNA, 25 bp, Homo sapien
ttccttaaatagtgcaattcatctc

SEQ ID NO: 1892807 - DNA, 25 bp, Homo sapien
ctgcagtctgttgctttaggaggca

SEQ ID NO: 1892808 - DNA, 25 bp, Homo sapien
tctggctttaactatcacttctata

SEQ ID NO: 1892809 - DNA, 25 bp, Homo sapien
ttcttggttataatagatggaatat

SEQ ID NO: 1892810 - DNA, 25 bp, Homo sapien
ttaatagtttcttggttataataga

SEQ ID NO: 1892811 - DNA, 25 bp, Homo sapien
tggttataatagatggaatatccac

SEQ ID NO: 1892812 - DNA, 25 bp, Homo sapien
cttggttataatagatggaatatcc

SEQ ID NO: 1892813 - DNA, 25 bp, Homo sapien
gaatccactaagctaatccaaagcc

SEQ ID NO: 1892814 - DNA, 25 bp, Homo sapien
tatggctagagggtacaaggtctct

SEQ ID NO: 1892815 - DNA, 25 bp, Homo sapien
tccaaagcctaacataggcctggca

SEQ ID NO: 1892816 - DNA, 25 bp, Homo sapien
tataaaccactccaagtatgaggtg

SEQ ID NO: 1892817 - DNA, 25 bp, Homo sapien
ctgtctctactaaaaatacaaaaat

SEQ ID NO: 1892818 - DNA, 25 bp, Homo sapien
ggccaacatagtgaaactctgtctc

SEQ ID NO: 1892819 - DNA, 25 bp, Homo sapien
ggagaccgaggtgggtgaatcactt

SEQ ID NO: 1892820 - DNA, 25 bp, Homo sapien
gaagtcaggagttcgagaccaggct

SEQ ID NO: 1892821 - DNA, 25 bp, Homo sapien
aaaaagaattagtgaggcggtagtg

SEQ ID NO: 1892822 - DNA, 25 bp, Homo sapien
aagaattagtgaggcggtagtggca

SEQ ID NO: 1892823 - DNA, 25 bp, Homo sapien
aaaagaattagtgaggcggtagtgg

SEQ ID NO: 1892824 - DNA, 25 bp, Homo sapien
aaagaattagtgaggcggtagtggc

SEQ ID NO: 1892825 - DNA, 25 bp, Homo sapien
gcagtgagccgagatcacaccactg

SEQ ID NO: 1892826 - DNA, 25 bp, Homo sapien
ctccagtctgggcaataaagtgaaa

SEQ ID NO: 1892827 - DNA, 25 bp, Homo sapien
cactccagtctgggcaataaagtga

SEQ ID NO: 1892828 - DNA, 25 bp, Homo sapien
tcgcttgagcctggaaggcacaggt

SEQ ID NO: 1892829 - DNA, 25 bp, Homo sapien
gatgcaaaaaaacgtaatgttattc

SEQ ID NO: 1892830 - DNA, 25 bp, Homo sapien
cagatgcaaaaaaacgtaatgttat

SEQ ID NO: 1892831 - DNA, 25 bp, Homo sapien
cttgtgaatccttcttattaagaca

SEQ ID NO: 1892832 - DNA, 25 bp, Homo sapien
caaaaaaacgtaatgttattctcag

SEQ ID NO: 1892833 - DNA, 25 bp, Homo sapien
caaagttttccaacactaattcaag

SEQ ID NO: 1892834 - DNA, 25 bp, Homo sapien
caaatagtgacagtaggcggtgagc

SEQ ID NO: 1892835 - DNA, 25 bp, Homo sapien
cctgatctgaatgctggttacacac

SEQ ID NO: 1892836 - DNA, 25 bp, Homo sapien
tacctctgaagggagtatagtggct

SEQ ID NO: 1892837 - DNA, 25 bp, Homo sapien
taactgaaccaaaaacgtgctatgg

SEQ ID NO: 1892838 - DNA, 25 bp, Homo sapien
cctaaaacatacatttgaccacatc

SEQ ID NO: 1892839 - DNA, 25 bp, Homo sapien
tcttaccccttatactgcagcaatg

SEQ ID NO: 1892840 - DNA, 25 bp, Homo sapien
tccatcctaaatagagttgccaaag

SEQ ID NO: 1892841 - DNA, 25 bp, Homo sapien
tgaccacatcatcctcttgcatgaa

SEQ ID NO: 1892842 - DNA, 25 bp, Homo sapien
tgactgtttcgggtaaaccagtgct

SEQ ID NO: 1892843 - DNA, 25 bp, Homo sapien
cctgatacttggtgctaggaacaaa

SEQ ID NO: 1892844 - DNA, 25 bp, Homo sapien
tgatcagctaccaacaatatacgtg

SEQ ID NO: 1892845 - DNA, 25 bp, Homo sapien
tctgctgcgctatcataaagatgac

SEQ ID NO: 1892846 - DNA, 25 bp, Homo sapien
gaaattttcaggtctagccatggct

SEQ ID NO: 1892847 - DNA, 25 bp, Homo sapien
gccatggctggtagttttcaagtag

SEQ ID NO: 1892848 - DNA, 25 bp, Homo sapien
gagagagatgcatcaaccttggaag

SEQ ID NO: 1892849 - DNA, 25 bp, Homo sapien
ctctgagagagatgcatcaaccttg

SEQ ID NO: 1892850 - DNA, 25 bp, Homo sapien
ccttgaggaaataattcctgaagtc

SEQ ID NO: 1892851 - DNA, 25 bp, Homo sapien
tcactttaccacaaacagcacagct

SEQ ID NO: 1892852 - DNA, 25 bp, Homo sapien
ctatgtcgtttacatttcactttac

SEQ ID NO: 1892853 - DNA, 25 bp, Homo sapien
cagcacagctatgaccttgaggaaa

SEQ ID NO: 1892854 - DNA, 25 bp, Homo sapien
gacaactccagcaacaaatgaccag

SEQ ID NO: 1892855 - DNA, 25 bp, Homo sapien
gtgagcagtagaatgtgacaactcc

SEQ ID NO: 1892856 - DNA, 25 bp, Homo sapien
gaatcaggtcctagtgagcagtaga

SEQ ID NO: 1892857 - DNA, 25 bp, Homo sapien
tatttggtaagagagaatcaggtcc

SEQ ID NO: 1892858 - DNA, 25 bp, Homo sapien
taggcttgcagtaccccttaatgca

SEQ ID NO: 1892859 - DNA, 25 bp, Homo sapien
agattttatccaacaccaccaagga

SEQ ID NO: 1892860 - DNA, 25 bp, Homo sapien
gggaaacatggctcaccaaacaaac

SEQ ID NO: 1892861 - DNA, 25 bp, Homo sapien
caaatcccttcgaataccaggaaag

SEQ ID NO: 1892862 - DNA, 25 bp, Homo sapien
gctaggaccataggctcgctacttt

SEQ ID NO: 1892863 - DNA, 25 bp, Homo sapien
catgttgggagtctccactaaaaac

SEQ ID NO: 1892864 - DNA, 25 bp, Homo sapien
agaattccttgaactgaagaagtgg

SEQ ID NO: 1892865 - DNA, 25 bp, Homo sapien
aaaccccatgttgggagtctccact

SEQ ID NO: 1892866 - DNA, 25 bp, Homo sapien
gcaagacagatcaaggatacaaata

SEQ ID NO: 1892867 - DNA, 25 bp, Homo sapien
ccaactacttgtttggagagacggg

SEQ ID NO: 1892868 - DNA, 25 bp, Homo sapien
gaaaaaagtaaccatagctatactg

SEQ ID NO: 1892869 - DNA, 25 bp, Homo sapien
cctcttaggcacaagtaagtgatcc

SEQ ID NO: 1892870 - DNA, 25 bp, Homo sapien
tcttgctgtctgaggaattgcaggg

SEQ ID NO: 1892871 - DNA, 25 bp, Homo sapien
tgatttctgcccgactttttgccgt

SEQ ID NO: 1892872 - DNA, 25 bp, Homo sapien
tgtaagatccttatgctgaaagacc

SEQ ID NO: 1892873 - DNA, 25 bp, Homo sapien
ggcaggcacactcgactttatagaa

SEQ ID NO: 1892874 - DNA, 25 bp, Homo sapien
cattagtggtactttgtatggatcc

SEQ ID NO: 1892875 - DNA, 25 bp, Homo sapien
cactcggatttctgacttcataggg

SEQ ID NO: 1892876 - DNA, 25 bp, Homo sapien
tagtataccccatctcagaagggcc

SEQ ID NO: 1892877 - DNA, 25 bp, Homo sapien
gggagtactcccagtatcattagtg

SEQ ID NO: 1892878 - DNA, 25 bp, Homo sapien
taatcatatgggctgcgtgcagtcg

SEQ ID NO: 1892879 - DNA, 25 bp, Homo sapien
tatgaccataagtagatgacctcag

SEQ ID NO: 1892880 - DNA, 25 bp, Homo sapien
gtttaacctgctcctactagatggc

SEQ ID NO: 1892881 - DNA, 25 bp, Homo sapien
ggtatacagatcagatggcatccta

SEQ ID NO: 1892882 - DNA, 25 bp, Homo sapien
caaatctttatgatcgtctgtttta

SEQ ID NO: 1892883 - DNA, 25 bp, Homo sapien
tattcaacaatactgcgggaaaagc

SEQ ID NO: 1892884 - DNA, 25 bp, Homo sapien
tactgcgggaaaagcttcagctgca

SEQ ID NO: 1892885 - DNA, 25 bp, Homo sapien
ggacgggtaccactttgctttctga

SEQ ID NO: 1892886 - DNA, 25 bp, Homo sapien
cttcggagaaaagccgccgcccagg

SEQ ID NO: 1892887 - DNA, 25 bp, Homo sapien
ccgggcgtctgcaccttcggagaaa

SEQ ID NO: 1892888 - DNA, 25 bp, Homo sapien
gcggcctccgcacggttaagcagca

SEQ ID NO: 1892889 - DNA, 25 bp, Homo sapien
aggccgctcctctgcggagctcgct

SEQ ID NO: 1892890 - DNA, 25 bp, Homo sapien
agggaggcggcgctgagacagagca

SEQ ID NO: 1892891 - DNA, 25 bp, Homo sapien
ttaagaagcagggaggcggcgctga

SEQ ID NO: 1892892 - DNA, 25 bp, Homo sapien
ggcagatctcgcgtcccacgtccag

SEQ ID NO: 1892893 - DNA, 25 bp, Homo sapien
aggaagcagaacagcgggtactggc

SEQ ID NO: 1892894 - DNA, 25 bp, Homo sapien
gtaacggcgaggccgagactgcgct

SEQ ID NO: 1892895 - DNA, 25 bp, Homo sapien
taacggcgaggccgagactgcgcta

SEQ ID NO: 1892896 - DNA, 25 bp, Homo sapien
ccgtaacggcgaggccgagactgcg

SEQ ID NO: 1892897 - DNA, 25 bp, Homo sapien
ctccgtaacggcgaggccgagactg

SEQ ID NO: 1892898 - DNA, 25 bp, Homo sapien
gacttggcggcgcacacagacgcct

SEQ ID NO: 1892899 - DNA, 25 bp, Homo sapien
taccggcagttagccgccgcaggct

SEQ ID NO: 1892900 - DNA, 25 bp, Homo sapien
ggcagaggtcaaggcgaccccccat

SEQ ID NO: 1892901 - DNA, 25 bp, Homo sapien
ggctgaggtcgcgtccggctgggcc

SEQ ID NO: 1892902 - DNA, 25 bp, Homo sapien
gcgaccggccatttccggaaatcaa

SEQ ID NO: 1892903 - DNA, 25 bp, Homo sapien
tggaaactctgacaacactggcgac

SEQ ID NO: 1892904 - DNA, 25 bp, Homo sapien
agggagcccggaagaaactacagca

SEQ ID NO: 1892905 - DNA, 25 bp, Homo sapien
taactgcctgtattgcggaggagag

SEQ ID NO: 1892906 - DNA, 25 bp, Homo sapien
tgtagtcttcgtgacacgaacccgc

SEQ ID NO: 1892907 - DNA, 25 bp, Homo sapien
tgggaactgtagtcttcgtgacacg

SEQ ID NO: 1892908 - DNA, 25 bp, Homo sapien
agtcttcgtgacacgaacccgcaga

SEQ ID NO: 1892909 - DNA, 25 bp, Homo sapien
gaactgtagtcttcgtgacacgaac

SEQ ID NO: 1892910 - DNA, 25 bp, Homo sapien
aagtgcctcctatggacttgagtgc

SEQ ID NO: 1892911 - DNA, 25 bp, Homo sapien
cactgatcctcacgattagctatta

SEQ ID NO: 1892912 - DNA, 25 bp, Homo sapien
tccacagtggtgtataaaagtaaac

SEQ ID NO: 1892913 - DNA, 25 bp, Homo sapien
gaatggtggtaccaactccacagtg

SEQ ID NO: 1892914 - DNA, 25 bp, Homo sapien
taaacctgttaaagaggccactgaa

SEQ ID NO: 1892915 - DNA, 25 bp, Homo sapien
cagatgcctcctatcacatgacagg

SEQ ID NO: 1892916 - DNA, 25 bp, Homo sapien
gatggatatactacccctgggagcc

SEQ ID NO: 1892917 - DNA, 25 bp, Homo sapien
aattaggcctaaactctgatgaccc

SEQ ID NO: 1892918 - DNA, 25 bp, Homo sapien
taagcctcacttttggagaagcagg

SEQ ID NO: 1892919 - DNA, 25 bp, Homo sapien
tgcttcacagttaagacacctagga

SEQ ID NO: 1892920 - DNA, 25 bp, Homo sapien
tggaaacggaaaatatactcacctg

SEQ ID NO: 1892921 - DNA, 25 bp, Homo sapien
tattctactagtaagggttgctacc

SEQ ID NO: 1892922 - DNA, 25 bp, Homo sapien
ctaataaccttatttgccccagaag

SEQ ID NO: 1892923 - DNA, 25 bp, Homo sapien
gatgttggtagttctaatgtgccta

SEQ ID NO: 1892924 - DNA, 25 bp, Homo sapien
cctataccacaataaaggctgggca

SEQ ID NO: 1892925 - DNA, 25 bp, Homo sapien
cattcaatactgtcgtagactctgg

SEQ ID NO: 1892926 - DNA, 25 bp, Homo sapien
tttaaagtgtcacgttgataattta

SEQ ID NO: 1892927 - DNA, 25 bp, Homo sapien
aagtgtcacgttgataatttaaatg

SEQ ID NO: 1892928 - DNA, 25 bp, Homo sapien
taaatgcctgcctactcagatttcc

SEQ ID NO: 1892929 - DNA, 25 bp, Homo sapien
tcccctttgtcaaattctcatgtca

SEQ ID NO: 1892930 - DNA, 25 bp, Homo sapien
gtcacaagcctaatttggcaaataa

SEQ ID NO: 1892931 - DNA, 25 bp, Homo sapien
actaaacttccacccaactgaacat

SEQ ID NO: 1892932 - DNA, 25 bp, Homo sapien
gatgcacctagctttagcaaatttg

SEQ ID NO: 1892933 - DNA, 25 bp, Homo sapien
gcagtactcatgtaacacaaatgcc

SEQ ID NO: 1892934 - DNA, 25 bp, Homo sapien
gggttttagtatacagatgcaccta

SEQ ID NO: 1892935 - DNA, 25 bp, Homo sapien
gtatacatgtggctctagagtggaa

SEQ ID NO: 1892936 - DNA, 25 bp, Homo sapien
tttaatctgtggtaacaacttgtcc

SEQ ID NO: 1892937 - DNA, 25 bp, Homo sapien
ttcttattgtcagcaagccctggtc

SEQ ID NO: 1892938 - DNA, 25 bp, Homo sapien
tgtccacaccaaatactttgccctt

SEQ ID NO: 1892939 - DNA, 25 bp, Homo sapien
catatggaacctacaaaactcttta

SEQ ID NO: 1892940 - DNA, 25 bp, Homo sapien
ccttttcagaatacagctgaaagcc

SEQ ID NO: 1892941 - DNA, 25 bp, Homo sapien
gtcacaacaatctccttttcagaat

SEQ ID NO: 1892942 - DNA, 25 bp, Homo sapien
cttttcagaatacagctgaaagcct

SEQ ID NO: 1892943 - DNA, 25 bp, Homo sapien
caaagtagaaaatcagacagtcaat

SEQ ID NO: 1892944 - DNA, 25 bp, Homo sapien
tacagtatattatcctaaaataacc

SEQ ID NO: 1892945 - DNA, 25 bp, Homo sapien
tattttgatcccactgtgttagaaa

SEQ ID NO: 1892946 - DNA, 25 bp, Homo sapien
tctagattagaacctgttgtaagcc

SEQ ID NO: 1892947 - DNA, 25 bp, Homo sapien
tcctgatggaagtggccaaaactgc

SEQ ID NO: 1892948 - DNA, 25 bp, Homo sapien
tatggataatcaaagggcgacagac

SEQ ID NO: 1892949 - DNA, 25 bp, Homo sapien
ggaggacacccacaataattcttgg

SEQ ID NO: 1892950 - DNA, 25 bp, Homo sapien
tccaatggcaagtacgggacaacag

SEQ ID NO: 1892951 - DNA, 25 bp, Homo sapien
tattactgaaggcagactgtggtgc

SEQ ID NO: 1892952 - DNA, 25 bp, Homo sapien
tagtggcatgccctattgagtggta

SEQ ID NO: 1892953 - DNA, 25 bp, Homo sapien
cagtgaattcctatggccagatgaa

SEQ ID NO: 1892954 - DNA, 25 bp, Homo sapien
taatccaaatcaaagggcctgcaga

SEQ ID NO: 1892955 - DNA, 25 bp, Homo sapien
tagatgggatcatttaactcctcgg

SEQ ID NO: 1892956 - DNA, 25 bp, Homo sapien
gagaaatgccagcaccaaggattac

SEQ ID NO: 1892957 - DNA, 25 bp, Homo sapien
taagtttcaataaccggcaaggcac

SEQ ID NO: 1892958 - DNA, 25 bp, Homo sapien
gccaataggcatggcaatgacctct

SEQ ID NO: 1892959 - DNA, 25 bp, Homo sapien
caaaaaaccaattaatgtgaaacat

SEQ ID NO: 1892960 - DNA, 25 bp, Homo sapien
gaagatttctacactaacacacatt

SEQ ID NO: 1892961 - DNA, 25 bp, Homo sapien
gaaacatacaggctattggcaacca

SEQ ID NO: 1892962 - DNA, 25 bp, Homo sapien
aatgtgtgcaattctaagtttttaa

SEQ ID NO: 1892963 - DNA, 25 bp, Homo sapien
aaaataagttacactcgcctccagc

SEQ ID NO: 1892964 - DNA, 25 bp, Homo sapien
tattacaaaaataagttacactcgc

SEQ ID NO: 1892965 - DNA, 25 bp, Homo sapien
tacaaaaataagttacactcgcctc

SEQ ID NO: 1892966 - DNA, 25 bp, Homo sapien
caaaaataagttacactcgcctcca

SEQ ID NO: 1892967 - DNA, 25 bp, Homo sapien
gtataaaacaattttatttgcagga

SEQ ID NO: 1892968 - DNA, 25 bp, Homo sapien
acagtataaaacaattttatttgca

SEQ ID NO: 1892969 - DNA, 25 bp, Homo sapien
agtataaaacaattttatttgcagg

SEQ ID NO: 1892970 - DNA, 25 bp, Homo sapien
cagtataaaacaattttatttgcag

SEQ ID NO: 1892971 - DNA, 25 bp, Homo sapien
ggaatgcctgactaaccagctctga

SEQ ID NO: 1892972 - DNA, 25 bp, Homo sapien
aatatccaaatgtcaggcttcgctg

SEQ ID NO: 1892973 - DNA, 25 bp, Homo sapien
caatatctgaagaagcaaggctgct

SEQ ID NO: 1892974 - DNA, 25 bp, Homo sapien
gatcttcatcgtggtgcctattggg

SEQ ID NO: 1892975 - DNA, 25 bp, Homo sapien
tttattctttattaagataccatgc

SEQ ID NO: 1892976 - DNA, 25 bp, Homo sapien
actttattctttattaagataccat

SEQ ID NO: 1892977 - DNA, 25 bp, Homo sapien
tattctttattaagataccatgcta

SEQ ID NO: 1892978 - DNA, 25 bp, Homo sapien
attctttattaagataccatgctag

SEQ ID NO: 1892979 - DNA, 25 bp, Homo sapien
cccgtatttgattccatgatcttca

SEQ ID NO: 1892980 - DNA, 25 bp, Homo sapien
tagtttaataacttgcactgcagag

SEQ ID NO: 1892981 - DNA, 25 bp, Homo sapien
aatagaatatgctcctatacagccg

SEQ ID NO: 1892982 - DNA, 25 bp, Homo sapien
tatttaaggttgcttgatttcctta

SEQ ID NO: 1892983 - DNA, 25 bp, Homo sapien
ggtgtaatcccacatagcaagtcag

SEQ ID NO: 1892984 - DNA, 25 bp, Homo sapien
tctggtgtaatcccacatagcaagt

SEQ ID NO: 1892985 - DNA, 25 bp, Homo sapien
cattactccactgcaagcttctggt

SEQ ID NO: 1892986 - DNA, 25 bp, Homo sapien
agcttctggtgtaatcccacatagc

SEQ ID NO: 1892987 - DNA, 25 bp, Homo sapien
tcattgtaacaggtcaggaccggcc

SEQ ID NO: 1892988 - DNA, 25 bp, Homo sapien
cattgtaacaggtcaggaccggcct

SEQ ID NO: 1892989 - DNA, 25 bp, Homo sapien
ttgtaacaggtcaggaccggcctcg

SEQ ID NO: 1892990 - DNA, 25 bp, Homo sapien
taacaggtcaggaccggcctcgacc

SEQ ID NO: 1892991 - DNA, 25 bp, Homo sapien
caaaaggaatcagttagataaatca

SEQ ID NO: 1892992 - DNA, 25 bp, Homo sapien
tactgtctagccaaaaaagttgcct

SEQ ID NO: 1892993 - DNA, 25 bp, Homo sapien
ttaataactatgaacttctttttgc

SEQ ID NO: 1892994 - DNA, 25 bp, Homo sapien
gacaagccttaacatggtaattcta

SEQ ID NO: 1892995 - DNA, 25 bp, Homo sapien
aaaccttttcactgttgacctagag

SEQ ID NO: 1892996 - DNA, 25 bp, Homo sapien
tgttagaagtatagaccatatggcc

SEQ ID NO: 1892997 - DNA, 25 bp, Homo sapien
taacaggaaacctaaatgaagtcac

SEQ ID NO: 1892998 - DNA, 25 bp, Homo sapien
tttttgcccctttgagtgaggaggc

SEQ ID NO: 1892999 - DNA, 25 bp, Homo sapien
cctttaattggccttgacatgctat

SEQ ID NO: 1893000 - DNA, 25 bp, Homo sapien
tgtgaaaaacgaattgtaaacacaa

SEQ ID NO: 1893001 - DNA, 25 bp, Homo sapien
ttgtgaaaaacgaattgtaaacaca

SEQ ID NO: 1893002 - DNA, 25 bp, Homo sapien
taattggccttgacatgctatacaa

SEQ ID NO: 1893003 - DNA, 25 bp, Homo sapien
ggaaacatcgttgacactacagcca

SEQ ID NO: 1893004 - DNA, 25 bp, Homo sapien
aaatcagttcgccagaagcagttag

SEQ ID NO: 1893005 - DNA, 25 bp, Homo sapien
tgtcacaaattatagcggcacccgt

SEQ ID NO: 1893006 - DNA, 25 bp, Homo sapien
tacagccaaatggacttgagccaaa

SEQ ID NO: 1893007 - DNA, 25 bp, Homo sapien
tacttccactgttgcccaaaagtat

SEQ ID NO: 1893008 - DNA, 25 bp, Homo sapien
aaaagtatcctgataaaactcctgg

SEQ ID NO: 1893009 - DNA, 25 bp, Homo sapien
gttttcagatttgtaaccatagtta

SEQ ID NO: 1893010 - DNA, 25 bp, Homo sapien
ccatagttaccagaatgatcaccac

SEQ ID NO: 1893011 - DNA, 25 bp, Homo sapien
gagccccagttctgattattggtct

SEQ ID NO: 1893012 - DNA, 25 bp, Homo sapien
tctggcgccgcttggaatctggctg

SEQ ID NO: 1893013 - DNA, 25 bp, Homo sapien
tggttgtacccatcagctttgcgct

SEQ ID NO: 1893014 - DNA, 25 bp, Homo sapien
cttggagcggttgctgagcaatggg

SEQ ID NO: 1893015 - DNA, 25 bp, Homo sapien
tttccaccgcggccacccctcgcac

SEQ ID NO: 1893016 - DNA, 25 bp, Homo sapien
ctacatttccaccgcggccacccct

SEQ ID NO: 1893017 - DNA, 25 bp, Homo sapien
atttccaccgcggccacccctcgca

SEQ ID NO: 1893018 - DNA, 25 bp, Homo sapien
acatttccaccgcggccacccctcg

SEQ ID NO: 1893019 - DNA, 25 bp, Homo sapien
ctctttgttgttgggcacctcctct

SEQ ID NO: 1893020 - DNA, 25 bp, Homo sapien
ggtggaccataatagtagtaatcgt

SEQ ID NO: 1893021 - DNA, 25 bp, Homo sapien
gatatccataaccacctctacctcc

SEQ ID NO: 1893022 - DNA, 25 bp, Homo sapien
gatcttcatatccaccacgatagtt

SEQ ID NO: 1893023 - DNA, 25 bp, Homo sapien
tcataaccatagtatggatcttcat

SEQ ID NO: 1893024 - DNA, 25 bp, Homo sapien
gacagagattagagtttaaatcaaa

SEQ ID NO: 1893025 - DNA, 25 bp, Homo sapien
cttagttaacaagtaggcatttagc

SEQ ID NO: 1893026 - DNA, 25 bp, Homo sapien
atcaaattacttagttaacaagtag

SEQ ID NO: 1893027 - DNA, 25 bp, Homo sapien
taacaagtaggcatttagccatttg

SEQ ID NO: 1893028 - DNA, 25 bp, Homo sapien
attttctccctccaagtctttgcca

SEQ ID NO: 1893029 - DNA, 25 bp, Homo sapien
cttttctgatctggtggcttggcaa

SEQ ID NO: 1893030 - DNA, 25 bp, Homo sapien
gattttttgctgcttgcctctgagc

SEQ ID NO: 1893031 - DNA, 25 bp, Homo sapien
gctgcttgcctctgagcttttcttt

SEQ ID NO: 1893032 - DNA, 25 bp, Homo sapien
ttacagtattggcaaggttgcgtac

SEQ ID NO: 1893033 - DNA, 25 bp, Homo sapien
gtattggcaaggttgcgtacaaaca

SEQ ID NO: 1893034 - DNA, 25 bp, Homo sapien
cagtattggcaaggttgcgtacaaa

SEQ ID NO: 1893035 - DNA, 25 bp, Homo sapien
attggcaaggttgcgtacaaacagc

SEQ ID NO: 1893036 - DNA, 25 bp, Homo sapien
caactgtctacagcatgtaggcgac

SEQ ID NO: 1893037 - DNA, 25 bp, Homo sapien
tatacaatgtctccactgactgctg

SEQ ID NO: 1893038 - DNA, 25 bp, Homo sapien
taactgcaagcacctctgctgcggc

SEQ ID NO: 1893039 - DNA, 25 bp, Homo sapien
tacaattatggctaagtatccacgc

SEQ ID NO: 1893040 - DNA, 25 bp, Homo sapien
gatcagcccattcaacagttccaac

SEQ ID NO: 1893041 - DNA, 25 bp, Homo sapien
tgccataacctcaggatcaggatct

SEQ ID NO: 1893042 - DNA, 25 bp, Homo sapien
ataggatcagcccattcaacagttc

SEQ ID NO: 1893043 - DNA, 25 bp, Homo sapien
agttccaacattcccccagaccttg

SEQ ID NO: 1893044 - DNA, 25 bp, Homo sapien
tcttgtcatccggttggtggtataa

SEQ ID NO: 1893045 - DNA, 25 bp, Homo sapien
catccggttggtggtataaaatgac

SEQ ID NO: 1893046 - DNA, 25 bp, Homo sapien
tgatcttcatattcaagaaagcaaa

SEQ ID NO: 1893047 - DNA, 25 bp, Homo sapien
ggtggtataaaatgacgtctgtaag

SEQ ID NO: 1893048 - DNA, 25 bp, Homo sapien
agcccacaaaaagcctattgttggc

SEQ ID NO: 1893049 - DNA, 25 bp, Homo sapien
actcttaggaatagagcccacaaaa

SEQ ID NO: 1893050 - DNA, 25 bp, Homo sapien
gcctattgttggcaactgagatgca

SEQ ID NO: 1893051 - DNA, 25 bp, Homo sapien
cttaggaatagagcccacaaaaagc

SEQ ID NO: 1893052 - DNA, 25 bp, Homo sapien
tttacaataagccaaaatctacttc

SEQ ID NO: 1893053 - DNA, 25 bp, Homo sapien
tacagtgacgcgacttcagctaact

SEQ ID NO: 1893054 - DNA, 25 bp, Homo sapien
cagttgttttctatgcttggctaat

SEQ ID NO: 1893055 - DNA, 25 bp, Homo sapien
cacacaagcacatgactcagttgtt

SEQ ID NO: 1893056 - DNA, 25 bp, Homo sapien
taaatcaacatgtctatttccaaac

SEQ ID NO: 1893057 - DNA, 25 bp, Homo sapien
atcaacatgtctatttccaaacaac

SEQ ID NO: 1893058 - DNA, 25 bp, Homo sapien
ctttaaatcaacatgtctatttcca

SEQ ID NO: 1893059 - DNA, 25 bp, Homo sapien
aatcaacatgtctatttccaaacaa

SEQ ID NO: 1893060 - DNA, 25 bp, Homo sapien
gcaaagtctcctattaattagatag

SEQ ID NO: 1893061 - DNA, 25 bp, Homo sapien
aagtctcctattaattagatagtac

SEQ ID NO: 1893062 - DNA, 25 bp, Homo sapien
tacaaaataattatgcccccagaaa

SEQ ID NO: 1893063 - DNA, 25 bp, Homo sapien
ggctggtttcaatcaatccttgcac

SEQ ID NO: 1893064 - DNA, 25 bp, Homo sapien
tgtgaatgcaggacccacagtagag

SEQ ID NO: 1893065 - DNA, 25 bp, Homo sapien
gggagtatcttcaatcctcagctag

SEQ ID NO: 1893066 - DNA, 25 bp, Homo sapien
tcagctagctgaaactgtgaatgca

SEQ ID NO: 1893067 - DNA, 25 bp, Homo sapien
gagagagcccactgtattagctttc

SEQ ID NO: 1893068 - DNA, 25 bp, Homo sapien
tcattagacgaagatcccatatagg

SEQ ID NO: 1893069 - DNA, 25 bp, Homo sapien
caaataatggaacaagttcatcctc

SEQ ID NO: 1893070 - DNA, 25 bp, Homo sapien
gatctcttgggatctttcccacaaa

SEQ ID NO: 1893071 - DNA, 25 bp, Homo sapien
gagaccagtgagtggatccatcatt

SEQ ID NO: 1893072 - DNA, 25 bp, Homo sapien
taggaaaccagatacctgtgctttt

SEQ ID NO: 1893073 - DNA, 25 bp, Homo sapien
ttgctttaggaaaccagatacctgt

SEQ ID NO: 1893074 - DNA, 25 bp, Homo sapien
ttaagtaaaaaccatggagaattgc

SEQ ID NO: 1893075 - DNA, 25 bp, Homo sapien
agtaaaaaccatggagaattgcttt

SEQ ID NO: 1893076 - DNA, 25 bp, Homo sapien
tcagtgccaacagaaggctgctgac

SEQ ID NO: 1893077 - DNA, 25 bp, Homo sapien
ctcagtgccaacagaaggctgctga

SEQ ID NO: 1893078 - DNA, 25 bp, Homo sapien
taaacggaatctggaggtggtcctc

SEQ ID NO: 1893079 - DNA, 25 bp, Homo sapien
ataaacggaatctggaggtggtcct

SEQ ID NO: 1893080 - DNA, 25 bp, Homo sapien
tgtccagtggtcacatcaagtgtgt

SEQ ID NO: 1893081 - DNA, 25 bp, Homo sapien
gtggtcacatcaagtgtgtagcctg

SEQ ID NO: 1893082 - DNA, 25 bp, Homo sapien
cagtggtcacatcaagtgtgtagcc

SEQ ID NO: 1893083 - DNA, 25 bp, Homo sapien
tccagtggtcacatcaagtgtgtag

SEQ ID NO: 1893084 - DNA, 25 bp, Homo sapien
ttcatacccaaggaatatttaccaa

SEQ ID NO: 1893085 - DNA, 25 bp, Homo sapien
ctaaagggagtatagaaagacatac

SEQ ID NO: 1893086 - DNA, 25 bp, Homo sapien
aacatctaacatacatccatttcat

SEQ ID NO: 1893087 - DNA, 25 bp, Homo sapien
catacatccatttcatacccaagga

SEQ ID NO: 1893088 - DNA, 25 bp, Homo sapien
tggtcctttactagaatctgctact

SEQ ID NO: 1893089 - DNA, 25 bp, Homo sapien
tttgcctcatctggtcctttactag

SEQ ID NO: 1893090 - DNA, 25 bp, Homo sapien
tactagaatctgctactttggtccc

SEQ ID NO: 1893091 - DNA, 25 bp, Homo sapien
tagaatctgctactttggtcccttg

SEQ ID NO: 1893092 - DNA, 25 bp, Homo sapien
gccaatgcaccgtcttcattgaatt

SEQ ID NO: 1893093 - DNA, 25 bp, Homo sapien
gcaccgtcttcattgaattctttta

SEQ ID NO: 1893094 - DNA, 25 bp, Homo sapien
tgaagaactgccaatgcaccgtctt

SEQ ID NO: 1893095 - DNA, 25 bp, Homo sapien
aactgttgaagaactgccaatgcac

SEQ ID NO: 1893096 - DNA, 25 bp, Homo sapien
ggataactgcagaagtagtatccat

SEQ ID NO: 1893097 - DNA, 25 bp, Homo sapien
tgcagaagtagtatccatgggctct

SEQ ID NO: 1893098 - DNA, 25 bp, Homo sapien
taaaccagcatcaagcaatgtctga

SEQ ID NO: 1893099 - DNA, 25 bp, Homo sapien
taactgcagaagtagtatccatggg

SEQ ID NO: 1893100 - DNA, 25 bp, Homo sapien
tgttcaaacgcaataagcaaaatta

SEQ ID NO: 1893101 - DNA, 25 bp, Homo sapien
gttcaaacgcaataagcaaaattaa

SEQ ID NO: 1893102 - DNA, 25 bp, Homo sapien
ctgttcaaacgcaataagcaaaatt

SEQ ID NO: 1893103 - DNA, 25 bp, Homo sapien
tcaaacgcaataagcaaaattaaac

SEQ ID NO: 1893104 - DNA, 25 bp, Homo sapien
cagaaggaccgattcaccatattct

SEQ ID NO: 1893105 - DNA, 25 bp, Homo sapien
gggcacagaaggaccgattcaccat

SEQ ID NO: 1893106 - DNA, 25 bp, Homo sapien
agtcactatcgcctgacaagccaga

SEQ ID NO: 1893107 - DNA, 25 bp, Homo sapien
tgacaagccagatttggagcacagg

SEQ ID NO: 1893108 - DNA, 25 bp, Homo sapien
ggctgaggcggagaaatcctgtccg

SEQ ID NO: 1893109 - DNA, 25 bp, Homo sapien
gctgaggcggagaaatcctgtccga

SEQ ID NO: 1893110 - DNA, 25 bp, Homo sapien
ttgcgggaaacgcgtgctcgctgct

SEQ ID NO: 1893111 - DNA, 25 bp, Homo sapien
tcctgtccgatggtatcgggttgcg

SEQ ID NO: 1893112 - DNA, 25 bp, Homo sapien
gcagcaaacccgatccagttccact

SEQ ID NO: 1893113 - DNA, 25 bp, Homo sapien
ctggcagcaaacccgatccagttcc

SEQ ID NO: 1893114 - DNA, 25 bp, Homo sapien
agcaaacccgatccagttccactcg

SEQ ID NO: 1893115 - DNA, 25 bp, Homo sapien
tccagttccactcgcctccgagcgc

SEQ ID NO: 1893116 - DNA, 25 bp, Homo sapien
tctctcggcctttcttattcccgcc

SEQ ID NO: 1893117 - DNA, 25 bp, Homo sapien
actagcctctgtccgccttctctcg

SEQ ID NO: 1893118 - DNA, 25 bp, Homo sapien
ctctgcggtcgctcaggcacgagtg

SEQ ID NO: 1893119 - DNA, 25 bp, Homo sapien
gtccctgccgagtcggctcctctct

SEQ ID NO: 1893120 - DNA, 25 bp, Homo sapien
ccgcgtagccgttccaggcggtgtc

SEQ ID NO: 1893121 - DNA, 25 bp, Homo sapien
gtagccgttccaggcggtgtccacg

SEQ ID NO: 1893122 - DNA, 25 bp, Homo sapien
tccgcggccgcgtagccgttccagg

SEQ ID NO: 1893123 - DNA, 25 bp, Homo sapien
gcgtagccgttccaggcggtgtcca

SEQ ID NO: 1893124 - DNA, 25 bp, Homo sapien
taagagcctaactctggtgggcaag

SEQ ID NO: 1893125 - DNA, 25 bp, Homo sapien
ggcaccttgctccagtttgcaataa

SEQ ID NO: 1893126 - DNA, 25 bp, Homo sapien
cattagatgccacatggatgaaaga

SEQ ID NO: 1893127 - DNA, 25 bp, Homo sapien
caaaccaaaagtgtcccatagtaat

SEQ ID NO: 1893128 - DNA, 25 bp, Homo sapien
ccattgctatcaccaggaggtcagt

SEQ ID NO: 1893129 - DNA, 25 bp, Homo sapien
caggaaggtctacaccctttttgct

SEQ ID NO: 1893130 - DNA, 25 bp, Homo sapien
caaggagccataattttccattgct

SEQ ID NO: 1893131 - DNA, 25 bp, Homo sapien
ccaggaggtcagtacctttctgctc

SEQ ID NO: 1893132 - DNA, 25 bp, Homo sapien
gatctcaggcccgttagtgtccaga

SEQ ID NO: 1893133 - DNA, 25 bp, Homo sapien
ggtcaggagcctagggacattcact

SEQ ID NO: 1893134 - DNA, 25 bp, Homo sapien
gcaaggctttccatagttgtgcaca

SEQ ID NO: 1893135 - DNA, 25 bp, Homo sapien
tcagatcagggcaattagtacatcc

SEQ ID NO: 1893136 - DNA, 25 bp, Homo sapien
ggcacacactactgtacttagctaa

SEQ ID NO: 1893137 - DNA, 25 bp, Homo sapien
acatagtgtcttccagttccattca

SEQ ID NO: 1893138 - DNA, 25 bp, Homo sapien
tatgactgaatagtagcccattgtg

SEQ ID NO: 1893139 - DNA, 25 bp, Homo sapien
catgcctggcaagatcaactttttt

SEQ ID NO: 1893140 - DNA, 25 bp, Homo sapien
gaaattagatacagtcaaacacctc

SEQ ID NO: 1893141 - DNA, 25 bp, Homo sapien
ttaacagaaaactgtgtaggacaca

SEQ ID NO: 1893142 - DNA, 25 bp, Homo sapien
tcaaaaattgtataacagttacctc

SEQ ID NO: 1893143 - DNA, 25 bp, Homo sapien
tactctagaggtatgtgttctccag

SEQ ID NO: 1893144 - DNA, 25 bp, Homo sapien
ctgtgggtttcatgtccatggattc

SEQ ID NO: 1893145 - DNA, 25 bp, Homo sapien
caccgggccaaccctctatatctgt

SEQ ID NO: 1893146 - DNA, 25 bp, Homo sapien
gcaccgggccaaccctctatatctg

SEQ ID NO: 1893147 - DNA, 25 bp, Homo sapien
tatgctctgactggaataccctgaa

SEQ ID NO: 1893148 - DNA, 25 bp, Homo sapien
cattaagccctacataagctgcagg

SEQ ID NO: 1893149 - DNA, 25 bp, Homo sapien
acttattcgaacgtagtggctcaca

SEQ ID NO: 1893150 - DNA, 25 bp, Homo sapien
gaaacggccctgttctgttacagca

SEQ ID NO: 1893151 - DNA, 25 bp, Homo sapien
tatgttctcattgaagcaattaaac

SEQ ID NO: 1893152 - DNA, 25 bp, Homo sapien
gagtacaccttactattgctccaga

SEQ ID NO: 1893153 - DNA, 25 bp, Homo sapien
gctagtcagtgtacattcactttcg

SEQ ID NO: 1893154 - DNA, 25 bp, Homo sapien
tacgatgtatctcaaggagtacacc

SEQ ID NO: 1893155 - DNA, 25 bp, Homo sapien
taactgcatcaataggaacataggc

SEQ ID NO: 1893156 - DNA, 25 bp, Homo sapien
caccagtaatgattctggacttaca

SEQ ID NO: 1893157 - DNA, 25 bp, Homo sapien
gacttttgaacgtcatcaccagtaa

SEQ ID NO: 1893158 - DNA, 25 bp, Homo sapien
tctctagggcaatagcaaggtgtgt

SEQ ID NO: 1893159 - DNA, 25 bp, Homo sapien
tgctcccaaggagataagcaccaca

SEQ ID NO: 1893160 - DNA, 25 bp, Homo sapien
tccccgatcagcttgggattacaag

SEQ ID NO: 1893161 - DNA, 25 bp, Homo sapien
tcctaggcaccaagtttaaacagag

SEQ ID NO: 1893162 - DNA, 25 bp, Homo sapien
gaagaactgacactccaggtccaga

SEQ ID NO: 1893163 - DNA, 25 bp, Homo sapien
caaggagtctggttctcatactgaa

SEQ ID NO: 1893164 - DNA, 25 bp, Homo sapien
caagatgttactctacaggatggag

SEQ ID NO: 1893165 - DNA, 25 bp, Homo sapien
gctatatggcatgctgagacctcag

SEQ ID NO: 1893166 - DNA, 25 bp, Homo sapien
tcaaataggttggactggactgtac

SEQ ID NO: 1893167 - DNA, 25 bp, Homo sapien
taacaaaacggtaatggcactcttc

SEQ ID NO: 1893168 - DNA, 25 bp, Homo sapien
tggcagagcctagcacaagccagtg

SEQ ID NO: 1893169 - DNA, 25 bp, Homo sapien
tgtgccactgttgacaaaacggttt

SEQ ID NO: 1893170 - DNA, 25 bp, Homo sapien
tctccaaacgttacatgcctaaggc

SEQ ID NO: 1893171 - DNA, 25 bp, Homo sapien
cccatgttatttcaggacctattta

SEQ ID NO: 1893172 - DNA, 25 bp, Homo sapien
ccccatgttatttcaggacctattt

SEQ ID NO: 1893173 - DNA, 25 bp, Homo sapien
tcaagtaaacctcgtggcactagcc

SEQ ID NO: 1893174 - DNA, 25 bp, Homo sapien
cagtcaagtaaacctcgtggcacta

SEQ ID NO: 1893175 - DNA, 25 bp, Homo sapien
gtcaagtaaacctcgtggcactagc

SEQ ID NO: 1893176 - DNA, 25 bp, Homo sapien
aacagtcaagtaaacctcgtggcac

SEQ ID NO: 1893177 - DNA, 25 bp, Homo sapien
aggaaaaacacgagattcttacaag

SEQ ID NO: 1893178 - DNA, 25 bp, Homo sapien
caagactacaaacattacaacatat

SEQ ID NO: 1893179 - DNA, 25 bp, Homo sapien
cgagattcttacaagactacaaaca

SEQ ID NO: 1893180 - DNA, 25 bp, Homo sapien
gactacaaacattacaacatatgta

SEQ ID NO: 1893181 - DNA, 25 bp, Homo sapien
ggttcgggataagatcatcacagat

SEQ ID NO: 1893182 - DNA, 25 bp, Homo sapien
ttcaacagaagttcaggttcgggat

SEQ ID NO: 1893183 - DNA, 25 bp, Homo sapien
cagaagccagatccgtaaaagtttt

SEQ ID NO: 1893184 - DNA, 25 bp, Homo sapien
catctcagaagccagatccgtaaaa

SEQ ID NO: 1893185 - DNA, 25 bp, Homo sapien
acaatattcactgatctctaagcaa

SEQ ID NO: 1893186 - DNA, 25 bp, Homo sapien
ggacacaatattcactgatctctaa

SEQ ID NO: 1893187 - DNA, 25 bp, Homo sapien
gacacaatattcactgatctctaag

SEQ ID NO: 1893188 - DNA, 25 bp, Homo sapien
cacaatattcactgatctctaagca

SEQ ID NO: 1893189 - DNA, 25 bp, Homo sapien
agaaatcgttgcaactttggaactt

SEQ ID NO: 1893190 - DNA, 25 bp, Homo sapien
gacaatctggcctctatcaatgggc

SEQ ID NO: 1893191 - DNA, 25 bp, Homo sapien
ctatcaatgggcagacagcgaccct

SEQ ID NO: 1893192 - DNA, 25 bp, Homo sapien
tttggaacttccaagacaatctggc

SEQ ID NO: 1893193 - DNA, 25 bp, Homo sapien
gacactgactacaaaccaaggtaat

SEQ ID NO: 1893194 - DNA, 25 bp, Homo sapien
tcttaatctcagaagccgaatccgt

SEQ ID NO: 1893195 - DNA, 25 bp, Homo sapien
taaactgcacttctgtgacactgac

SEQ ID NO: 1893196 - DNA, 25 bp, Homo sapien
ccaaggtaatgctaaaaggcaagta

SEQ ID NO: 1893197 - DNA, 25 bp, Homo sapien
tcagtcacattcgacattcattatc

SEQ ID NO: 1893198 - DNA, 25 bp, Homo sapien
tgctagtcagtcacattcgacattc

SEQ ID NO: 1893199 - DNA, 25 bp, Homo sapien
tagtcagtcacattcgacattcatt

SEQ ID NO: 1893200 - DNA, 25 bp, Homo sapien
gtcacattcgacattcattatcttc

SEQ ID NO: 1893201 - DNA, 25 bp, Homo sapien
aaaatttgatttagtctaggtgtgg

SEQ ID NO: 1893202 - DNA, 25 bp, Homo sapien
tctaggtgtggattaaatgctatgc

SEQ ID NO: 1893203 - DNA, 25 bp, Homo sapien
gctcaatcataaagtactaaaacaa

SEQ ID NO: 1893204 - DNA, 25 bp, Homo sapien
aatgctatgctcaatcataaagtac

SEQ ID NO: 1893205 - DNA, 25 bp, Homo sapien
tccattaaatattctcccagatgtt

SEQ ID NO: 1893206 - DNA, 25 bp, Homo sapien
tttccattaaatattctcccagatg

SEQ ID NO: 1893207 - DNA, 25 bp, Homo sapien
cattaaatattctcccagatgttct

SEQ ID NO: 1893208 - DNA, 25 bp, Homo sapien
taaatattctcccagatgttctgga

SEQ ID NO: 1893209 - DNA, 25 bp, Homo sapien
gaaactaagcttaactaagctctta

SEQ ID NO: 1893210 - DNA, 25 bp, Homo sapien
ttggaaactaagcttaactaagctc

SEQ ID NO: 1893211 - DNA, 25 bp, Homo sapien
tggaaactaagcttaactaagctct

SEQ ID NO: 1893212 - DNA, 25 bp, Homo sapien
gagctgctccactgtgccactgaag

SEQ ID NO: 1893213 - DNA, 25 bp, Homo sapien
cagagctgctccactgtgccactga

SEQ ID NO: 1893214 - DNA, 25 bp, Homo sapien
catcttcagagctgctccactgtgc

SEQ ID NO: 1893215 - DNA, 25 bp, Homo sapien
ctttgcatcttcagagctgctccac

SEQ ID NO: 1893216 - DNA, 25 bp, Homo sapien
ttaatccgaattgcacacaacgccg

SEQ ID NO: 1893217 - DNA, 25 bp, Homo sapien
aacgccgccttcgaacagctcagtt

SEQ ID NO: 1893218 - DNA, 25 bp, Homo sapien
cgacggaaggccttcgccattttag

SEQ ID NO: 1893219 - DNA, 25 bp, Homo sapien
tcagtttcaatacagggtcgaggct

SEQ ID NO: 1893220 - DNA, 25 bp, Homo sapien
tcacgccaaaactcggagcctgtgg

SEQ ID NO: 1893221 - DNA, 25 bp, Homo sapien
ttaaagctcttaactcggcctgcgc

SEQ ID NO: 1893222 - DNA, 25 bp, Homo sapien
tcaacctcagtacatgtggcagtcc

SEQ ID NO: 1893223 - DNA, 25 bp, Homo sapien
tgcgccaccatcttttgctcggata

SEQ ID NO: 1893224 - DNA, 25 bp, Homo sapien
cgcccagacgctcgcgaaggccgac

SEQ ID NO: 1893225 - DNA, 25 bp, Homo sapien
ccagacgctcgcgaaggccgacgta

SEQ ID NO: 1893226 - DNA, 25 bp, Homo sapien
cacccgcccagacgctcgcgaaggc

SEQ ID NO: 1893227 - DNA, 25 bp, Homo sapien
gacgctcgcgaaggccgacgtaaaa

SEQ ID NO: 1893228 - DNA, 25 bp, Homo sapien
ccgacctcaagcgttctgccctcct

SEQ ID NO: 1893229 - DNA, 25 bp, Homo sapien
gcctagccaatactggttcttttaa

SEQ ID NO: 1893230 - DNA, 25 bp, Homo sapien
aaaagcacatataaattcacagtat

SEQ ID NO: 1893231 - DNA, 25 bp, Homo sapien
catgcctagccaatactggttcttt

SEQ ID NO: 1893232 - DNA, 25 bp, Homo sapien
agcaggtgcacgtgttcgagaacct

SEQ ID NO: 1893233 - DNA, 25 bp, Homo sapien
cagcaggtgcacgtgttcgagaacc

SEQ ID NO: 1893234 - DNA, 25 bp, Homo sapien
gcaggtgcacgtgttcgagaacctt

SEQ ID NO: 1893235 - DNA, 25 bp, Homo sapien
atctgtgaacagttgtataactgtg

SEQ ID NO: 1893236 - DNA, 25 bp, Homo sapien
tgtgaacagttgtataactgtgaac

SEQ ID NO: 1893237 - DNA, 25 bp, Homo sapien
tctgtgaacagttgtataactgtga

SEQ ID NO: 1893238 - DNA, 25 bp, Homo sapien
tgaacagttgtataactgtgaacaa

SEQ ID NO: 1893239 - DNA, 25 bp, Homo sapien
ctcatccctgctaaactactgccat

SEQ ID NO: 1893240 - DNA, 25 bp, Homo sapien
cactcatccctgctaaactactgcc

SEQ ID NO: 1893241 - DNA, 25 bp, Homo sapien
tcatccctgctaaactactgccatt

SEQ ID NO: 1893242 - DNA, 25 bp, Homo sapien
actcatccctgctaaactactgcca

SEQ ID NO: 1893243 - DNA, 25 bp, Homo sapien
cagttcacagtgattccagtttgct

SEQ ID NO: 1893244 - DNA, 25 bp, Homo sapien
gtttgcttgatcaaacacatgaata

SEQ ID NO: 1893245 - DNA, 25 bp, Homo sapien
gatcttagctaacaggccaggaagc

SEQ ID NO: 1893246 - DNA, 25 bp, Homo sapien
tcttatatggtatttaaactgataa

SEQ ID NO: 1893247 - DNA, 25 bp, Homo sapien
acacttgatcttagctaacaggcca

SEQ ID NO: 1893248 - DNA, 25 bp, Homo sapien
cttgatcttagctaacaggccagga

SEQ ID NO: 1893249 - DNA, 25 bp, Homo sapien
ttgagcaatcaccacactgacttcc

SEQ ID NO: 1893250 - DNA, 25 bp, Homo sapien
tccttgagcaatcaccacactgact

SEQ ID NO: 1893251 - DNA, 25 bp, Homo sapien
ccttgagcaatcaccacactgactt

SEQ ID NO: 1893252 - DNA, 25 bp, Homo sapien
gatccttgagcaatcaccacactga

SEQ ID NO: 1893253 - DNA, 25 bp, Homo sapien
gattgaatggatgtttgagtaagta

SEQ ID NO: 1893254 - DNA, 25 bp, Homo sapien
tgagtaagtaaaatgagtgggttga

SEQ ID NO: 1893255 - DNA, 25 bp, Homo sapien
gaaggtttagtttcagtcatattga

SEQ ID NO: 1893256 - DNA, 25 bp, Homo sapien
tgaggtattagtggaatatctgggc

SEQ ID NO: 1893257 - DNA, 25 bp, Homo sapien
ctcgctcctctgtgagcctgccacc

SEQ ID NO: 1893258 - DNA, 25 bp, Homo sapien
tgaggtcacttgtctgcccagcagg

SEQ ID NO: 1893259 - DNA, 25 bp, Homo sapien
gaaagagttccgatgttactcacca

SEQ ID NO: 1893260 - DNA, 25 bp, Homo sapien
ggaacttcgcggtgtatgttacagc

SEQ ID NO: 1893261 - DNA, 25 bp, Homo sapien
cactaacttcggagaatgaagctac

SEQ ID NO: 1893262 - DNA, 25 bp, Homo sapien
tactcaccactttggaaatcccagg

SEQ ID NO: 1893263 - DNA, 25 bp, Homo sapien
ccaatactgactatgttacaagtca

SEQ ID NO: 1893264 - DNA, 25 bp, Homo sapien
atactgactatgttacaagtcatca

SEQ ID NO: 1893265 - DNA, 25 bp, Homo sapien
tactgactatgttacaagtcatcat

SEQ ID NO: 1893266 - DNA, 25 bp, Homo sapien
gccaatactgactatgttacaagtc

SEQ ID NO: 1893267 - DNA, 25 bp, Homo sapien
taggacagaggaagattataatggc

SEQ ID NO: 1893268 - DNA, 25 bp, Homo sapien
tcattgtgaatgtctaaaggctatc

SEQ ID NO: 1893269 - DNA, 25 bp, Homo sapien
agttagctccagaagacattaagtt

SEQ ID NO: 1893270 - DNA, 25 bp, Homo sapien
cattaatacagttgtctccacacca

SEQ ID NO: 1893271 - DNA, 25 bp, Homo sapien
ctatgtatgtctttgcacaggagat

SEQ ID NO: 1893272 - DNA, 25 bp, Homo sapien
tatgtatgtctttgcacaggagatg

SEQ ID NO: 1893273 - DNA, 25 bp, Homo sapien
ctttgcacaggagatgggtctcctg

SEQ ID NO: 1893274 - DNA, 25 bp, Homo sapien
atgtatgtctttgcacaggagatgg

SEQ ID NO: 1893275 - DNA, 25 bp, Homo sapien
tctgtgtgcttgatagattccatcc

SEQ ID NO: 1893276 - DNA, 25 bp, Homo sapien
gatgatctgtctgaccctgctagtg

SEQ ID NO: 1893277 - DNA, 25 bp, Homo sapien
taaagtcagaatagtaccccgtgct

SEQ ID NO: 1893278 - DNA, 25 bp, Homo sapien
tgtataatatcaatgggctctgtac

SEQ ID NO: 1893279 - DNA, 25 bp, Homo sapien
accaagagatcgagctgtcaaagca

SEQ ID NO: 1893280 - DNA, 25 bp, Homo sapien
gaagatactgaagggccacagaaag

SEQ ID NO: 1893281 - DNA, 25 bp, Homo sapien
gctgtcaaagcattatctgtcaaag

SEQ ID NO: 1893282 - DNA, 25 bp, Homo sapien
atactgaagggccacagaaagttat

SEQ ID NO: 1893283 - DNA, 25 bp, Homo sapien
tcagcttcacaaaagctccattgaa

SEQ ID NO: 1893284 - DNA, 25 bp, Homo sapien
cagcttcacaaaagctccattgaag

SEQ ID NO: 1893285 - DNA, 25 bp, Homo sapien
ttcagcttcacaaaagctccattga

SEQ ID NO: 1893286 - DNA, 25 bp, Homo sapien
gctcacaccattgatacctctgatc

SEQ ID NO: 1893287 - DNA, 25 bp, Homo sapien
ctttgggctcacaccattgatacct

SEQ ID NO: 1893288 - DNA, 25 bp, Homo sapien
ttgggctcacaccattgatacctct

SEQ ID NO: 1893289 - DNA, 25 bp, Homo sapien
acaccattgatacctctgatcctga

SEQ ID NO: 1893290 - DNA, 25 bp, Homo sapien
acattttcctatattccttatgaca

SEQ ID NO: 1893291 - DNA, 25 bp, Homo sapien
tttcctatattccttatgacagtgc

SEQ ID NO: 1893292 - DNA, 25 bp, Homo sapien
tcctatattccttatgacagtgctt

SEQ ID NO: 1893293 - DNA, 25 bp, Homo sapien
attttcctatattccttatgacagt

SEQ ID NO: 1893294 - DNA, 25 bp, Homo sapien
caaacttcttactcaggcactggat

SEQ ID NO: 1893295 - DNA, 25 bp, Homo sapien
acttcttactcaggcactggatctt

SEQ ID NO: 1893296 - DNA, 25 bp, Homo sapien
tcttactcaggcactggatctttag

SEQ ID NO: 1893297 - DNA, 25 bp, Homo sapien
ttactcaggcactggatctttagct

SEQ ID NO: 1893298 - DNA, 25 bp, Homo sapien
ttgggtgataggtgcatgaaaatct

SEQ ID NO: 1893299 - DNA, 25 bp, Homo sapien
gggaccagaactattgccttaccat

SEQ ID NO: 1893300 - DNA, 25 bp, Homo sapien
caagagaggcatgggtcacatagat

SEQ ID NO: 1893301 - DNA, 25 bp, Homo sapien
gttgccaagaagagacggagcttac

SEQ ID NO: 1893302 - DNA, 25 bp, Homo sapien
gagagctgcagcatcgtacagccag

SEQ ID NO: 1893303 - DNA, 25 bp, Homo sapien
cctgactgcttgaccaaagtggtct

SEQ ID NO: 1893304 - DNA, 25 bp, Homo sapien
gatgccattttcatgaaagtctgtt

SEQ ID NO: 1893305 - DNA, 25 bp, Homo sapien
aattttagcatcaaccttcacctga

SEQ ID NO: 1893306 - DNA, 25 bp, Homo sapien
cagctgttgctctagtcccatttgc

SEQ ID NO: 1893307 - DNA, 25 bp, Homo sapien
tttgacattatcgaaggactcctga

SEQ ID NO: 1893308 - DNA, 25 bp, Homo sapien
tagccccagagttgccaataagaag

SEQ ID NO: 1893309 - DNA, 25 bp, Homo sapien
tgttgtgtcccctagttgaagcttg

SEQ ID NO: 1893310 - DNA, 25 bp, Homo sapien
tacagccttaggctcctgtgtaata

SEQ ID NO: 1893311 - DNA, 25 bp, Homo sapien
taaatgtattaaggcttgttttata

SEQ ID NO: 1893312 - DNA, 25 bp, Homo sapien
gtattaaggcttgttttatagccta

SEQ ID NO: 1893313 - DNA, 25 bp, Homo sapien
ttaaggcttgttttatagcctatca

SEQ ID NO: 1893314 - DNA, 25 bp, Homo sapien
aaggcttgttttatagcctatcata

SEQ ID NO: 1893315 - DNA, 25 bp, Homo sapien
tctcatgtggattctcacatacagc

SEQ ID NO: 1893316 - DNA, 25 bp, Homo sapien
cacaggaccagtagtcttcttcagc

SEQ ID NO: 1893317 - DNA, 25 bp, Homo sapien
tggttctactttaagcatagctagc

SEQ ID NO: 1893318 - DNA, 25 bp, Homo sapien
tcacatacagccaatctcacaggac

SEQ ID NO: 1893319 - DNA, 25 bp, Homo sapien
ctctgagggtttggccagaaagaat

SEQ ID NO: 1893320 - DNA, 25 bp, Homo sapien
tacccaagttcttactggagagctg

SEQ ID NO: 1893321 - DNA, 25 bp, Homo sapien
ccaagttcttactggagagctgcac

SEQ ID NO: 1893322 - DNA, 25 bp, Homo sapien
ttctcttctacccaagttcttactg

SEQ ID NO: 1893323 - DNA, 25 bp, Homo sapien
gcaggttcttcaattgtaaacagtg

SEQ ID NO: 1893324 - DNA, 25 bp, Homo sapien
atttgtctccacattaaatggctca

SEQ ID NO: 1893325 - DNA, 25 bp, Homo sapien
taaatggctcagctagaaataaaat

SEQ ID NO: 1893326 - DNA, 25 bp, Homo sapien
gtgaacactgtccaatatgtcagct

SEQ ID NO: 1893327 - DNA, 25 bp, Homo sapien
aaaagttagctatctctggctctct

SEQ ID NO: 1893328 - DNA, 25 bp, Homo sapien
cagatgttgacaccatgctcttaga

SEQ ID NO: 1893329 - DNA, 25 bp, Homo sapien
catggaagtggctctgttataaaag

SEQ ID NO: 1893330 - DNA, 25 bp, Homo sapien
tccagagtcaggagctaaataaact

SEQ ID NO: 1893331 - DNA, 25 bp, Homo sapien
ctgggtgtcaccaaacctttctgca

SEQ ID NO: 1893332 - DNA, 25 bp, Homo sapien
gctgggtgtcaccaaacctttctgc

SEQ ID NO: 1893333 - DNA, 25 bp, Homo sapien
tcagctgggtgtcaccaaacctttc

SEQ ID NO: 1893334 - DNA, 25 bp, Homo sapien
agctgggtgtcaccaaacctttctg

SEQ ID NO: 1893335 - DNA, 25 bp, Homo sapien
tgcagacccatccaacaactgagtc

SEQ ID NO: 1893336 - DNA, 25 bp, Homo sapien
gtgcagacccatccaacaactgagt

SEQ ID NO: 1893337 - DNA, 25 bp, Homo sapien
gcagacccatccaacaactgagtca

SEQ ID NO: 1893338 - DNA, 25 bp, Homo sapien
ccagtccttgtttcctatcagcttt

SEQ ID NO: 1893339 - DNA, 25 bp, Homo sapien
tccttgtttcctatcagcttttgtc

SEQ ID NO: 1893340 - DNA, 25 bp, Homo sapien
tccagtccttgtttcctatcagctt

SEQ ID NO: 1893341 - DNA, 25 bp, Homo sapien
agtccttgtttcctatcagcttttg

SEQ ID NO: 1893342 - DNA, 25 bp, Homo sapien
ctggatcttggtgctctcacattac

SEQ ID NO: 1893343 - DNA, 25 bp, Homo sapien
gccctggatcttggtgctctcacat

SEQ ID NO: 1893344 - DNA, 25 bp, Homo sapien
ttgccctggatcttggtgctctcac

SEQ ID NO: 1893345 - DNA, 25 bp, Homo sapien
atcttggtgctctcacattacccat

SEQ ID NO: 1893346 - DNA, 25 bp, Homo sapien
cttggtgcattcagggtcaacctgc

SEQ ID NO: 1893347 - DNA, 25 bp, Homo sapien
tagtagccatcctgtcttccttgaa

SEQ ID NO: 1893348 - DNA, 25 bp, Homo sapien
gctgagatccaagctctcttggtgc

SEQ ID NO: 1893349 - DNA, 25 bp, Homo sapien
gccagctcagacttgcatatagtag

SEQ ID NO: 1893350 - DNA, 25 bp, Homo sapien
cttttacttcttctccccactgcat

SEQ ID NO: 1893351 - DNA, 25 bp, Homo sapien
ccttttacttcttctccccactgca

SEQ ID NO: 1893352 - DNA, 25 bp, Homo sapien
tgggcccctgcttctttatactcct

SEQ ID NO: 1893353 - DNA, 25 bp, Homo sapien
tctccatgctagaggccaggcaaag

SEQ ID NO: 1893354 - DNA, 25 bp, Homo sapien
aagcctggagcttcatgggcccctg

SEQ ID NO: 1893355 - DNA, 25 bp, Homo sapien
tgaaggtcttctccatgctagaggc

SEQ ID NO: 1893356 - DNA, 25 bp, Homo sapien
ggtggggcaggttcgtatggtcctg

SEQ ID NO: 1893357 - DNA, 25 bp, Homo sapien
gcaggttcgtatggtcctggaaggc

SEQ ID NO: 1893358 - DNA, 25 bp, Homo sapien
ggcaggttcgtatggtcctggaagg

SEQ ID NO: 1893359 - DNA, 25 bp, Homo sapien
caggttcgtatggtcctggaaggca

SEQ ID NO: 1893360 - DNA, 25 bp, Homo sapien
ggagagatgagcaccagttgcttca

SEQ ID NO: 1893361 - DNA, 25 bp, Homo sapien
cagtaggagaggggcgacggagaga

SEQ ID NO: 1893362 - DNA, 25 bp, Homo sapien
ggagaggggcgacggagagatgagc

SEQ ID NO: 1893363 - DNA, 25 bp, Homo sapien
tgagcaccagttgcttcatggagca

SEQ ID NO: 1893364 - DNA, 25 bp, Homo sapien
caaagatgggaccagttctagcctc

SEQ ID NO: 1893365 - DNA, 25 bp, Homo sapien
catgccactgacagatcagtaggat

SEQ ID NO: 1893366 - DNA, 25 bp, Homo sapien
gaaagatccatcctgggcaaacagc

SEQ ID NO: 1893367 - DNA, 25 bp, Homo sapien
tcttctacatcagctaaaacaaaga

SEQ ID NO: 1893368 - DNA, 25 bp, Homo sapien
gaatagcaatctccttaacaatcat

SEQ ID NO: 1893369 - DNA, 25 bp, Homo sapien
cacttcaaagggtggagaatcatgg

SEQ ID NO: 1893370 - DNA, 25 bp, Homo sapien
gatgcgcattatgttgccaggtaac

SEQ ID NO: 1893371 - DNA, 25 bp, Homo sapien
gttgggtgctataacaagcttaacc

SEQ ID NO: 1893372 - DNA, 25 bp, Homo sapien
aagcctgccatcctagacttgaaca

SEQ ID NO: 1893373 - DNA, 25 bp, Homo sapien
gttattgtagtctccattaacttta

SEQ ID NO: 1893374 - DNA, 25 bp, Homo sapien
cctgtatggggttattgtagtctcc

SEQ ID NO: 1893375 - DNA, 25 bp, Homo sapien
gaaaagtgtgcaccttgatagtttc

SEQ ID NO: 1893376 - DNA, 25 bp, Homo sapien
tctctgtctggtggtgtgacccagc

SEQ ID NO: 1893377 - DNA, 25 bp, Homo sapien
cctgatgctcaagcaacaaaatgat

SEQ ID NO: 1893378 - DNA, 25 bp, Homo sapien
aatgatatccccttgataatcaaga

SEQ ID NO: 1893379 - DNA, 25 bp, Homo sapien
tgagtttatgtcctatgatctctcc

SEQ ID NO: 1893380 - DNA, 25 bp, Homo sapien
gcaacaaaatgatatccccttgata

SEQ ID NO: 1893381 - DNA, 25 bp, Homo sapien
tgatattgattggaatctataaccc

SEQ ID NO: 1893382 - DNA, 25 bp, Homo sapien
cagtgcctggtaaaccagagcatat

SEQ ID NO: 1893383 - DNA, 25 bp, Homo sapien
ccagagcatatgacagtgtgagtca

SEQ ID NO: 1893384 - DNA, 25 bp, Homo sapien
aaagactcatagacagtgcctggta

SEQ ID NO: 1893385 - DNA, 25 bp, Homo sapien
cctgcagacacagagtccattttta

SEQ ID NO: 1893386 - DNA, 25 bp, Homo sapien
tttttagctgctctgcttcactcat

SEQ ID NO: 1893387 - DNA, 25 bp, Homo sapien
ttttacattctttgatgatttccac

SEQ ID NO: 1893388 - DNA, 25 bp, Homo sapien
gatttccacatttttagctgctctg

SEQ ID NO: 1893389 - DNA, 25 bp, Homo sapien
ctctgcaggcgagatgggtttcttg

SEQ ID NO: 1893390 - DNA, 25 bp, Homo sapien
tcttcctagcattgacagtcttttc

SEQ ID NO: 1893391 - DNA, 25 bp, Homo sapien
agcattgacagtcttttcaatttag

SEQ ID NO: 1893392 - DNA, 25 bp, Homo sapien
ttcctagcattgacagtcttttcaa

SEQ ID NO: 1893393 - DNA, 25 bp, Homo sapien
gagctcagcactatgtgatacagag

SEQ ID NO: 1893394 - DNA, 25 bp, Homo sapien
gatattgttgagacccatgtgcaca

SEQ ID NO: 1893395 - DNA, 25 bp, Homo sapien
ttactctgagtacaaaaggacatgc

SEQ ID NO: 1893396 - DNA, 25 bp, Homo sapien
ggagctcacaaactagagatgacgg

SEQ ID NO: 1893397 - DNA, 25 bp, Homo sapien
ggtgaggaatgctgtaatacgccat

SEQ ID NO: 1893398 - DNA, 25 bp, Homo sapien
taatacgccatgagaatgccagtca

SEQ ID NO: 1893399 - DNA, 25 bp, Homo sapien
ctttgcaagtcaagatctataggtt

SEQ ID NO: 1893400 - DNA, 25 bp, Homo sapien
gctgataagtaccaccaggtgagga

SEQ ID NO: 1893401 - DNA, 25 bp, Homo sapien
gaatccatacccttttggatcaata

SEQ ID NO: 1893402 - DNA, 25 bp, Homo sapien
ttattctgggatgcctgcacctttg

SEQ ID NO: 1893403 - DNA, 25 bp, Homo sapien
gtcttttactgagcttctcttgatg

SEQ ID NO: 1893404 - DNA, 25 bp, Homo sapien
caatagccagaagtacccgaaagtc

SEQ ID NO: 1893405 - DNA, 25 bp, Homo sapien
cactcttgttattgtcttctttctc

SEQ ID NO: 1893406 - DNA, 25 bp, Homo sapien
tgcactcttgttattgtcttctttc

SEQ ID NO: 1893407 - DNA, 25 bp, Homo sapien
ctcttgttattgtcttctttctcat

SEQ ID NO: 1893408 - DNA, 25 bp, Homo sapien
tgtgcactcttgttattgtcttctt

SEQ ID NO: 1893409 - DNA, 25 bp, Homo sapien
tccttctgagacttgctctcctaat

SEQ ID NO: 1893410 - DNA, 25 bp, Homo sapien
ccttctgagacttgctctcctaatc

SEQ ID NO: 1893411 - DNA, 25 bp, Homo sapien
ctgagacttgctctcctaatcctac

SEQ ID NO: 1893412 - DNA, 25 bp, Homo sapien
ttctgagacttgctctcctaatcct

SEQ ID NO: 1893413 - DNA, 25 bp, Homo sapien
ctctttgttgagccttctttttcat

SEQ ID NO: 1893414 - DNA, 25 bp, Homo sapien
aatcttctctttgttgagccttctt

SEQ ID NO: 1893415 - DNA, 25 bp, Homo sapien
tctctttgttgagccttctttttca

SEQ ID NO: 1893416 - DNA, 25 bp, Homo sapien
gaagttgtgctgaatgtagttccat

SEQ ID NO: 1893417 - DNA, 25 bp, Homo sapien
tacaaatattgctgctacaaaagca

SEQ ID NO: 1893418 - DNA, 25 bp, Homo sapien
ttccattgttggaatgctgctgaac

SEQ ID NO: 1893419 - DNA, 25 bp, Homo sapien
gctgctgaacacacaaacgttccgc

SEQ ID NO: 1893420 - DNA, 25 bp, Homo sapien
caggtacaccgaaagcataacaaag

SEQ ID NO: 1893421 - DNA, 25 bp, Homo sapien
aacaggtacaccgaaagcataacaa

SEQ ID NO: 1893422 - DNA, 25 bp, Homo sapien
acatgaacaacaggtacaccgaaag

SEQ ID NO: 1893423 - DNA, 25 bp, Homo sapien
gaacaacaggtacaccgaaagcata

SEQ ID NO: 1893424 - DNA, 25 bp, Homo sapien
tttcttattgcctttttatatgacc

SEQ ID NO: 1893425 - DNA, 25 bp, Homo sapien
tattgcctttttatatgaccaaata

SEQ ID NO: 1893426 - DNA, 25 bp, Homo sapien
tgaccaaatatttagattgttaagt

SEQ ID NO: 1893427 - DNA, 25 bp, Homo sapien
ttagattgttaagttctttctgcat

SEQ ID NO: 1893428 - DNA, 25 bp, Homo sapien
tcagtccacatcacatggagtcagc

SEQ ID NO: 1893429 - DNA, 25 bp, Homo sapien
ccagacaactgtgggcatagaggcc

SEQ ID NO: 1893430 - DNA, 25 bp, Homo sapien
gaggccagggtgagatacacaacct

SEQ ID NO: 1893431 - DNA, 25 bp, Homo sapien
gcctgttgagggtactggcccagaa

SEQ ID NO: 1893432 - DNA, 25 bp, Homo sapien
gctttaggtgaattccaagtaagtc

SEQ ID NO: 1893433 - DNA, 25 bp, Homo sapien
tgctttaggtgaattccaagtaagt

SEQ ID NO: 1893434 - DNA, 25 bp, Homo sapien
ttgctttaggtgaattccaagtaag

SEQ ID NO: 1893435 - DNA, 25 bp, Homo sapien
cttgctttaggtgaattccaagtaa

SEQ ID NO: 1893436 - DNA, 25 bp, Homo sapien
aaattgagcaagaaggttttgggca

SEQ ID NO: 1893437 - DNA, 25 bp, Homo sapien
taatatgcccaaagtaagccctgtc

SEQ ID NO: 1893438 - DNA, 25 bp, Homo sapien
gaaggttttgggcataatatgccca

SEQ ID NO: 1893439 - DNA, 25 bp, Homo sapien
aaagtaagccctgtctgtgtacagc

SEQ ID NO: 1893440 - DNA, 25 bp, Homo sapien
ctggcaggtactcccgttggtgttg

SEQ ID NO: 1893441 - DNA, 25 bp, Homo sapien
tcccgttggtgttggctaggctcat

SEQ ID NO: 1893442 - DNA, 25 bp, Homo sapien
catctggcaggtactcccgttggtg

SEQ ID NO: 1893443 - DNA, 25 bp, Homo sapien
tctggcaggtactcccgttggtgtt

SEQ ID NO: 1893444 - DNA, 25 bp, Homo sapien
gtacaacctgttactaagtgactgc

SEQ ID NO: 1893445 - DNA, 25 bp, Homo sapien
gtaaataaggaacttctctcatttc

SEQ ID NO: 1893446 - DNA, 25 bp, Homo sapien
cctgttactaagtgactgccagtaa

SEQ ID NO: 1893447 - DNA, 25 bp, Homo sapien
taagtgactgccagtaaataaggaa

SEQ ID NO: 1893448 - DNA, 25 bp, Homo sapien
cacctttccggagttggctctcctt

SEQ ID NO: 1893449 - DNA, 25 bp, Homo sapien
catgtaagtgaccatgtgggtggca

SEQ ID NO: 1893450 - DNA, 25 bp, Homo sapien
tgtttcaggtatgagctcatgtaag

SEQ ID NO: 1893451 - DNA, 25 bp, Homo sapien
cacagattcttgaaggtagttaccc

SEQ ID NO: 1893452 - DNA, 25 bp, Homo sapien
gacacaaatatactcccaagcttgg

SEQ ID NO: 1893453 - DNA, 25 bp, Homo sapien
tggccagtagatccacttagcaatg

SEQ ID NO: 1893454 - DNA, 25 bp, Homo sapien
cggactgatgccctttgacatcttg

SEQ ID NO: 1893455 - DNA, 25 bp, Homo sapien
gtaggcaagtccatcaagcttcgga

SEQ ID NO: 1893456 - DNA, 25 bp, Homo sapien
ctgacaaagtgcatgttacgcccca

SEQ ID NO: 1893457 - DNA, 25 bp, Homo sapien
tcatatcttcgtaattgtggtttct

SEQ ID NO: 1893458 - DNA, 25 bp, Homo sapien
gttacgccccattaagagattcata

SEQ ID NO: 1893459 - DNA, 25 bp, Homo sapien
aagtgcatgttacgccccattaaga

SEQ ID NO: 1893460 - DNA, 25 bp, Homo sapien
tacgcaatccactttgaggcactag

SEQ ID NO: 1893461 - DNA, 25 bp, Homo sapien
tctgatttcccattttcagtacgca

SEQ ID NO: 1893462 - DNA, 25 bp, Homo sapien
ttttcagtacgcaatccactttgag

SEQ ID NO: 1893463 - DNA, 25 bp, Homo sapien
ccactttgaggcactagtgcagaga

SEQ ID NO: 1893464 - DNA, 25 bp, Homo sapien
agtaatcttcaagggttagcaaagg

SEQ ID NO: 1893465 - DNA, 25 bp, Homo sapien
tctttgagtaatcttcaagggttag

SEQ ID NO: 1893466 - DNA, 25 bp, Homo sapien
tctggcccaagatatgggcccaaat

SEQ ID NO: 1893467 - DNA, 25 bp, Homo sapien
ggcccaagatatgggcccaaatgct

SEQ ID NO: 1893468 - DNA, 25 bp, Homo sapien
tgtcacccacagtatcccagttatc

SEQ ID NO: 1893469 - DNA, 25 bp, Homo sapien
ctgtcacccacagtatcccagttat

SEQ ID NO: 1893470 - DNA, 25 bp, Homo sapien
gtcacccacagtatcccagttatca

SEQ ID NO: 1893471 - DNA, 25 bp, Homo sapien
actgtcacccacagtatcccagtta

SEQ ID NO: 1893472 - DNA, 25 bp, Homo sapien
ttagaggtaactctcagtaggctga

SEQ ID NO: 1893473 - DNA, 25 bp, Homo sapien
gaggtaactctcagtaggctgaagt

SEQ ID NO: 1893474 - DNA, 25 bp, Homo sapien
gtaactctcagtaggctgaagtaca

SEQ ID NO: 1893475 - DNA, 25 bp, Homo sapien
tagaggtaactctcagtaggctgaa

SEQ ID NO: 1893476 - DNA, 25 bp, Homo sapien
ctgaggaggcaactggaaatgcagc

SEQ ID NO: 1893477 - DNA, 25 bp, Homo sapien
actggaaatgcagcgagcagcaagg

SEQ ID NO: 1893478 - DNA, 25 bp, Homo sapien
caactggaaatgcagcgagcagcaa

SEQ ID NO: 1893479 - DNA, 25 bp, Homo sapien
ggcaactggaaatgcagcgagcagc

SEQ ID NO: 1893480 - DNA, 25 bp, Homo sapien
tgggttcacctagctcttgtttttc

SEQ ID NO: 1893481 - DNA, 25 bp, Homo sapien
aagcctaaccatatcgggtcctgag

SEQ ID NO: 1893482 - DNA, 25 bp, Homo sapien
ggtgtactcattcatagctatactc

SEQ ID NO: 1893483 - DNA, 25 bp, Homo sapien
tccactcatcattcaggtgcatatt

SEQ ID NO: 1893484 - DNA, 25 bp, Homo sapien
agctggcagtacaggagtatgtcac

SEQ ID NO: 1893485 - DNA, 25 bp, Homo sapien
tggcagtacaggagtatgtcaccac

SEQ ID NO: 1893486 - DNA, 25 bp, Homo sapien
ggcagtacaggagtatgtcaccaca

SEQ ID NO: 1893487 - DNA, 25 bp, Homo sapien
gctggcagtacaggagtatgtcacc

SEQ ID NO: 1893488 - DNA, 25 bp, Homo sapien
tgggtgcatttatgggatccaacat

SEQ ID NO: 1893489 - DNA, 25 bp, Homo sapien
gggtgcatttatgggatccaacatc

SEQ ID NO: 1893490 - DNA, 25 bp, Homo sapien
ttgggtgcatttatgggatccaaca

SEQ ID NO: 1893491 - DNA, 25 bp, Homo sapien
acataaccatcaagtattttgaaaa

SEQ ID NO: 1893492 - DNA, 25 bp, Homo sapien
aagctgcagaaaattccctcgctgc

SEQ ID NO: 1893493 - DNA, 25 bp, Homo sapien
caagctgcagaaaattccctcgctg

SEQ ID NO: 1893494 - DNA, 25 bp, Homo sapien
gctgcagaaaattccctcgctgcaa

SEQ ID NO: 1893495 - DNA, 25 bp, Homo sapien
tcaagctgcagaaaattccctcgct

SEQ ID NO: 1893496 - DNA, 25 bp, Homo sapien
ccatactgagctatgcattcaatta

SEQ ID NO: 1893497 - DNA, 25 bp, Homo sapien
tgctccatactgagctatgcattca

SEQ ID NO: 1893498 - DNA, 25 bp, Homo sapien
tagtattttggatggatgacttcca

SEQ ID NO: 1893499 - DNA, 25 bp, Homo sapien
taactgggttatagcagatgctcca

SEQ ID NO: 1893500 - DNA, 25 bp, Homo sapien
tagcagtgtagatcagtaatctcca

SEQ ID NO: 1893501 - DNA, 25 bp, Homo sapien
gctgtcttgattcaccatcacatag

SEQ ID NO: 1893502 - DNA, 25 bp, Homo sapien
ccatcacatagcagtgtagatcagt

SEQ ID NO: 1893503 - DNA, 25 bp, Homo sapien
gattcaccatcacatagcagtgtag

SEQ ID NO: 1893504 - DNA, 25 bp, Homo sapien
gcttccccggtgactagctgtgaga

SEQ ID NO: 1893505 - DNA, 25 bp, Homo sapien
aaaaatagcattgcccttccctgca

SEQ ID NO: 1893506 - DNA, 25 bp, Homo sapien
catgaggtgcagctgggattctagc

SEQ ID NO: 1893507 - DNA, 25 bp, Homo sapien
ggtatttgttaatcccttattggca

SEQ ID NO: 1893508 - DNA, 25 bp, Homo sapien
tatttctatataccctctcttcctt

SEQ ID NO: 1893509 - DNA, 25 bp, Homo sapien
tcccttcccatcagatggaagtctt

SEQ ID NO: 1893510 - DNA, 25 bp, Homo sapien
tcccatcagatggaagtcttcctta

SEQ ID NO: 1893511 - DNA, 25 bp, Homo sapien
ttccaaagtggactcttccactggg

SEQ ID NO: 1893512 - DNA, 25 bp, Homo sapien
tggatctctagctgggagtgtgttc

SEQ ID NO: 1893513 - DNA, 25 bp, Homo sapien
ctagctgggagtgtgttctggcctt

SEQ ID NO: 1893514 - DNA, 25 bp, Homo sapien
cttggatctctagctgggagtgtgt

SEQ ID NO: 1893515 - DNA, 25 bp, Homo sapien
ctctagctgggagtgtgttctggcc

SEQ ID NO: 1893516 - DNA, 25 bp, Homo sapien
ccacattggaatgagagtgaaatga

SEQ ID NO: 1893517 - DNA, 25 bp, Homo sapien
gtgactctgtttccacattggaatg

SEQ ID NO: 1893518 - DNA, 25 bp, Homo sapien
tccacattggaatgagagtgaaatg

SEQ ID NO: 1893519 - DNA, 25 bp, Homo sapien
gagactgacgctttcttccacaagg

SEQ ID NO: 1893520 - DNA, 25 bp, Homo sapien
gaaaagccagttctcgtggtcaagc

SEQ ID NO: 1893521 - DNA, 25 bp, Homo sapien
taaaaattcacaaacggcagccacc

SEQ ID NO: 1893522 - DNA, 25 bp, Homo sapien
gaaaatcaattcgtagctccctgga

SEQ ID NO: 1893523 - DNA, 25 bp, Homo sapien
ttactcaacttctccattggaagct

SEQ ID NO: 1893524 - DNA, 25 bp, Homo sapien
actcaacttctccattggaagcttc

SEQ ID NO: 1893525 - DNA, 25 bp, Homo sapien
ctcaacttctccattggaagcttct

SEQ ID NO: 1893526 - DNA, 25 bp, Homo sapien
tactcaacttctccattggaagctt

SEQ ID NO: 1893527 - DNA, 25 bp, Homo sapien
gtaccaggtcaagcctatttatact

SEQ ID NO: 1893528 - DNA, 25 bp, Homo sapien
caggtcaagcctatttatactcttc

SEQ ID NO: 1893529 - DNA, 25 bp, Homo sapien
ccaggtcaagcctatttatactctt

SEQ ID NO: 1893530 - DNA, 25 bp, Homo sapien
accaggtcaagcctatttatactct

SEQ ID NO: 1893531 - DNA, 25 bp, Homo sapien
atttagcagactgcccctgcccatg

SEQ ID NO: 1893532 - DNA, 25 bp, Homo sapien
gcgctcccaggttctgtctcgccgc

SEQ ID NO: 1893533 - DNA, 25 bp, Homo sapien
gtagatgatttagcagactgcccct

SEQ ID NO: 1893534 - DNA, 25 bp, Homo sapien
agcgcctgccaccagcggtgcctcg

SEQ ID NO: 1893535 - DNA, 25 bp, Homo sapien
tctggtgtctatacaaaatatttgc

SEQ ID NO: 1893536 - DNA, 25 bp, Homo sapien
ccatttcttcttatcgatgcctggt

SEQ ID NO: 1893537 - DNA, 25 bp, Homo sapien
cttttgaggaagataacgaagtcag

SEQ ID NO: 1893538 - DNA, 25 bp, Homo sapien
gcctggtcagcaacaatcatgtaaa

SEQ ID NO: 1893539 - DNA, 25 bp, Homo sapien
ccaagtttgtgccacggcactacag

SEQ ID NO: 1893540 - DNA, 25 bp, Homo sapien
caagtttgtgccacggcactacagc

SEQ ID NO: 1893541 - DNA, 25 bp, Homo sapien
cgcttgagcccagaaagccaaagtt

SEQ ID NO: 1893542 - DNA, 25 bp, Homo sapien
ttgagcccagaaagccaaagttgca

SEQ ID NO: 1893543 - DNA, 25 bp, Homo sapien
cacacgtgacctaggcaaagctgct

SEQ ID NO: 1893544 - DNA, 25 bp, Homo sapien
caaagctgcttgatacgagtcactc

SEQ ID NO: 1893545 - DNA, 25 bp, Homo sapien
cccaaggagagctaatgtgacacag

SEQ ID NO: 1893546 - DNA, 25 bp, Homo sapien
tgaagccctggatcaaactggaaac

SEQ ID NO: 1893547 - DNA, 25 bp, Homo sapien
aaagccgcaataaactgccttgctg

SEQ ID NO: 1893548 - DNA, 25 bp, Homo sapien
gctgaagcccatcttagactctcca

SEQ ID NO: 1893549 - DNA, 25 bp, Homo sapien
ccttgctgaagcccatcttagactc

SEQ ID NO: 1893550 - DNA, 25 bp, Homo sapien
ttgctgaagcccatcttagactctc

SEQ ID NO: 1893551 - DNA, 25 bp, Homo sapien
catgcaattttcacatcctaaacca

SEQ ID NO: 1893552 - DNA, 25 bp, Homo sapien
gcaattttcacatcctaaaccatcc

SEQ ID NO: 1893553 - DNA, 25 bp, Homo sapien
aattttcacatcctaaaccatccag

SEQ ID NO: 1893554 - DNA, 25 bp, Homo sapien
tgcaattttcacatcctaaaccatc

SEQ ID NO: 1893555 - DNA, 25 bp, Homo sapien
tgttctaagggatcctccaggttac

SEQ ID NO: 1893556 - DNA, 25 bp, Homo sapien
ctgtcttcctgagtaccggtcccca

SEQ ID NO: 1893557 - DNA, 25 bp, Homo sapien
tgtccctaccccgacaccacactgc

SEQ ID NO: 1893558 - DNA, 25 bp, Homo sapien
tgagtaccggtccccaaatcaccaa

SEQ ID NO: 1893559 - DNA, 25 bp, Homo sapien
gttcagcatccattctcagtgtgag

SEQ ID NO: 1893560 - DNA, 25 bp, Homo sapien
ctgaggtagcttgagaaagttcagc

SEQ ID NO: 1893561 - DNA, 25 bp, Homo sapien
gcttgagaaagttcagcatccattc

SEQ ID NO: 1893562 - DNA, 25 bp, Homo sapien
gaaagttcagcatccattctcagtg

SEQ ID NO: 1893563 - DNA, 25 bp, Homo sapien
tttgccagttatgggaccttgacct

SEQ ID NO: 1893564 - DNA, 25 bp, Homo sapien
cattccctctgtcatgggaccaaca

SEQ ID NO: 1893565 - DNA, 25 bp, Homo sapien
taatgtgtggctatttcaagctctt

SEQ ID NO: 1893566 - DNA, 25 bp, Homo sapien
agacttcagcacttcccacttatca

SEQ ID NO: 1893567 - DNA, 25 bp, Homo sapien
tgtgctctttactcttctgataacc

SEQ ID NO: 1893568 - DNA, 25 bp, Homo sapien
ttaacactgttatactctttgggcc

SEQ ID NO: 1893569 - DNA, 25 bp, Homo sapien
tttcctacacttgttcttgcttgca

SEQ ID NO: 1893570 - DNA, 25 bp, Homo sapien
ggactggatgccagtaaaggaatta

SEQ ID NO: 1893571 - DNA, 25 bp, Homo sapien
ccctaccactagctcaaggacaggg

SEQ ID NO: 1893572 - DNA, 25 bp, Homo sapien
gtgtcaggcattccaaccccaaact

SEQ ID NO: 1893573 - DNA, 25 bp, Homo sapien
caaacagaattgtcaagagtgtcag

SEQ ID NO: 1893574 - DNA, 25 bp, Homo sapien
gattagataagcaccttcccctacc

SEQ ID NO: 1893575 - DNA, 25 bp, Homo sapien
atgcagaattgcttctgctagccat

SEQ ID NO: 1893576 - DNA, 25 bp, Homo sapien
gccaatgcagaattgcttctgctag

SEQ ID NO: 1893577 - DNA, 25 bp, Homo sapien
caatgcagaattgcttctgctagcc

SEQ ID NO: 1893578 - DNA, 25 bp, Homo sapien
cagccaatgcagaattgcttctgct

SEQ ID NO: 1893579 - DNA, 25 bp, Homo sapien
caaggcatcatcttcacaaggtggc

SEQ ID NO: 1893580 - DNA, 25 bp, Homo sapien
gggaagcaaggcatcatcttcacaa

SEQ ID NO: 1893581 - DNA, 25 bp, Homo sapien
gaagcaaggcatcatcttcacaagg

SEQ ID NO: 1893582 - DNA, 25 bp, Homo sapien
agcaaggcatcatcttcacaaggtg

SEQ ID NO: 1893583 - DNA, 25 bp, Homo sapien
ctaagacaaccgattattatgctgt

SEQ ID NO: 1893584 - DNA, 25 bp, Homo sapien
caacttgtgctttccccctttgtca

SEQ ID NO: 1893585 - DNA, 25 bp, Homo sapien
tattatgctgttttagattaggcaa

SEQ ID NO: 1893586 - DNA, 25 bp, Homo sapien
ttagattaggcaacttgtgctttcc

SEQ ID NO: 1893587 - DNA, 25 bp, Homo sapien
tatgccatgaatccaaaggggacag

SEQ ID NO: 1893588 - DNA, 25 bp, Homo sapien
catgaatccaaaggggacagcttcc

SEQ ID NO: 1893589 - DNA, 25 bp, Homo sapien
atccaaaggggacagcttccagcag

SEQ ID NO: 1893590 - DNA, 25 bp, Homo sapien
gaatccaaaggggacagcttccagc

SEQ ID NO: 1893591 - DNA, 25 bp, Homo sapien
taacttgtgtgtttacagcaatgct

SEQ ID NO: 1893592 - DNA, 25 bp, Homo sapien
ctatttcagttcttagagtgcttaa

SEQ ID NO: 1893593 - DNA, 25 bp, Homo sapien
cttgtgtgtttacagcaatgctaac

SEQ ID NO: 1893594 - DNA, 25 bp, Homo sapien
tgtgtgtttacagcaatgctaacag

SEQ ID NO: 1893595 - DNA, 25 bp, Homo sapien
ctggacttcctgaggtcgtaaagta

SEQ ID NO: 1893596 - DNA, 25 bp, Homo sapien
tgtgagatactcagtccttctggac

SEQ ID NO: 1893597 - DNA, 25 bp, Homo sapien
cgttggagttgccaaaaggtgaaag

SEQ ID NO: 1893598 - DNA, 25 bp, Homo sapien
taagaagataagtgtgagatactca

SEQ ID NO: 1893599 - DNA, 25 bp, Homo sapien
tgatttagccatgactcccacagtt

SEQ ID NO: 1893600 - DNA, 25 bp, Homo sapien
tgaacccctgtgcagagtcctagac

SEQ ID NO: 1893601 - DNA, 25 bp, Homo sapien
aactttccttagagtggcacaccag

SEQ ID NO: 1893602 - DNA, 25 bp, Homo sapien
catgtgaacggtcaaagcccagcgt

SEQ ID NO: 1893603 - DNA, 25 bp, Homo sapien
tcttccagaagctccatggaccact

SEQ ID NO: 1893604 - DNA, 25 bp, Homo sapien
gaagctccatggaccacttgtccac

SEQ ID NO: 1893605 - DNA, 25 bp, Homo sapien
catggaccacttgtccacaaggggc

SEQ ID NO: 1893606 - DNA, 25 bp, Homo sapien
ccagaagctccatggaccacttgtc

SEQ ID NO: 1893607 - DNA, 25 bp, Homo sapien
aaatccatagctggcagtgagggag

SEQ ID NO: 1893608 - DNA, 25 bp, Homo sapien
ctttggccacgctcagtttcacacg

SEQ ID NO: 1893609 - DNA, 25 bp, Homo sapien
tctctttggccacgctcagtttcac

SEQ ID NO: 1893610 - DNA, 25 bp, Homo sapien
gaaatccatagctggcagtgaggga

SEQ ID NO: 1893611 - DNA, 25 bp, Homo sapien
acaaagtagtagaagtcttgcatct

SEQ ID NO: 1893612 - DNA, 25 bp, Homo sapien
agtagtagaagtcttgcatctttgc

SEQ ID NO: 1893613 - DNA, 25 bp, Homo sapien
aatatcactataatcactttggagt

SEQ ID NO: 1893614 - DNA, 25 bp, Homo sapien
tagtagaagtcttgcatctttgctt

SEQ ID NO: 1893615 - DNA, 25 bp, Homo sapien
gctgcagtatatccttgaagcgtgt

SEQ ID NO: 1893616 - DNA, 25 bp, Homo sapien
ccaaatgaaaagaactagactgctg

SEQ ID NO: 1893617 - DNA, 25 bp, Homo sapien
gaaaatcagcagtcatcaagacagc

SEQ ID NO: 1893618 - DNA, 25 bp, Homo sapien
tgcagtggaacaagctaaatgctgt

SEQ ID NO: 1893619 - DNA, 25 bp, Homo sapien
agtggcacgccgtgtggttctccac

SEQ ID NO: 1893620 - DNA, 25 bp, Homo sapien
taataacaagtactgcagtggcacg

SEQ ID NO: 1893621 - DNA, 25 bp, Homo sapien
tactgcagtggcacgccgtgtggtt

SEQ ID NO: 1893622 - DNA, 25 bp, Homo sapien
gccgtgtggttctccactttgaaac

SEQ ID NO: 1893623 - DNA, 25 bp, Homo sapien
tgtacaaatgctcgacagaggctgg

SEQ ID NO: 1893624 - DNA, 25 bp, Homo sapien
gctgggtcattagacacctttggca

SEQ ID NO: 1893625 - DNA, 25 bp, Homo sapien
gcattaaattccatgggtgggctct

SEQ ID NO: 1893626 - DNA, 25 bp, Homo sapien
ggtgggctctatgaacatttctctg

SEQ ID NO: 1893627 - DNA, 25 bp, Homo sapien
tcttcttggaccttagtggagtggg

SEQ ID NO: 1893628 - DNA, 25 bp, Homo sapien
agcagcccatgcactgaagtattgg

SEQ ID NO: 1893629 - DNA, 25 bp, Homo sapien
gatatgctctagagaagcagcagcc

SEQ ID NO: 1893630 - DNA, 25 bp, Homo sapien
tgaggtgacgttcttttggaccaac

SEQ ID NO: 1893631 - DNA, 25 bp, Homo sapien
ggaggccttagtgggtggattgctt

SEQ ID NO: 1893632 - DNA, 25 bp, Homo sapien
gagctcaggagtttgagagcagcct

SEQ ID NO: 1893633 - DNA, 25 bp, Homo sapien
gcctgggcaacatggtgaaaccctg

SEQ ID NO: 1893634 - DNA, 25 bp, Homo sapien
tgggcaacatggtgaaaccctgtct

SEQ ID NO: 1893635 - DNA, 25 bp, Homo sapien
gaaacaccgacaatgtgaccagaaa

SEQ ID NO: 1893636 - DNA, 25 bp, Homo sapien
gaccagaaagatagctgcatatttt

SEQ ID NO: 1893637 - DNA, 25 bp, Homo sapien
tcaggagcggaatggagaacatgca

SEQ ID NO: 1893638 - DNA, 25 bp, Homo sapien
gaacatgcagaaacaccgacaatgt

SEQ ID NO: 1893639 - DNA, 25 bp, Homo sapien
tatgccccaacagttgcacttttgg

SEQ ID NO: 1893640 - DNA, 25 bp, Homo sapien
catcagaaggtgaatggtcatacaa

SEQ ID NO: 1893641 - DNA, 25 bp, Homo sapien
catggaatactgtccagcaacaaaa

SEQ ID NO: 1893642 - DNA, 25 bp, Homo sapien
cacacagcagcttgaatggatctca

SEQ ID NO: 1893643 - DNA, 25 bp, Homo sapien
aggatggaatgcagtcatgcagtct

SEQ ID NO: 1893644 - DNA, 25 bp, Homo sapien
gcacatgccaccacgcttggctaat

SEQ ID NO: 1893645 - DNA, 25 bp, Homo sapien
atggaatgcagtcatgcagtcttgg

SEQ ID NO: 1893646 - DNA, 25 bp, Homo sapien
ggcacatgccaccacgcttggctaa

SEQ ID NO: 1893647 - DNA, 25 bp, Homo sapien
gtatatcccttaactgacctggcag

SEQ ID NO: 1893648 - DNA, 25 bp, Homo sapien
cataggcccttgactgcttagatca

SEQ ID NO: 1893649 - DNA, 25 bp, Homo sapien
cactgggcaagtagtaggtatatcc

SEQ ID NO: 1893650 - DNA, 25 bp, Homo sapien
gaggagctgcaaagtgaagcccctt

SEQ ID NO: 1893651 - DNA, 25 bp, Homo sapien
aagtgccccaccttaaaccacagag

SEQ ID NO: 1893652 - DNA, 25 bp, Homo sapien
cactgcaactgaaaatctgctctgg

SEQ ID NO: 1893653 - DNA, 25 bp, Homo sapien
gacaacaggagtgtgccagcaagcc

SEQ ID NO: 1893654 - DNA, 25 bp, Homo sapien
tgtactacccctatagcctagaagt

SEQ ID NO: 1893655 - DNA, 25 bp, Homo sapien
tgaaccactttatcatgggccagct

SEQ ID NO: 1893656 - DNA, 25 bp, Homo sapien
gacaggcactcaagcatctcagcag

SEQ ID NO: 1893657 - DNA, 25 bp, Homo sapien
taatgtctacttgccctctgtctgg

SEQ ID NO: 1893658 - DNA, 25 bp, Homo sapien
caagtctgcatgagaacatctattc

SEQ ID NO: 1893659 - DNA, 25 bp, Homo sapien
tgtggatccgaagagggattttagc

SEQ ID NO: 1893660 - DNA, 25 bp, Homo sapien
gcttcgtcttatgagttctcagtaa

SEQ ID NO: 1893661 - DNA, 25 bp, Homo sapien
gagggattttagcttcgtcttatga

SEQ ID NO: 1893662 - DNA, 25 bp, Homo sapien
tgttcagggcggttgactgtggatc

SEQ ID NO: 1893663 - DNA, 25 bp, Homo sapien
ccattttcaggtgatggtgacgaca

SEQ ID NO: 1893664 - DNA, 25 bp, Homo sapien
gcccatgaaaagagagtacgctgtc

SEQ ID NO: 1893665 - DNA, 25 bp, Homo sapien
ggtgacgacaaggtcagcccatgaa

SEQ ID NO: 1893666 - DNA, 25 bp, Homo sapien
tataccagcagagtgtttccacctg

SEQ ID NO: 1893667 - DNA, 25 bp, Homo sapien
ccttgtcctcattccatagcataag

SEQ ID NO: 1893668 - DNA, 25 bp, Homo sapien
tcctcattccatagcataagctgtt

SEQ ID NO: 1893669 - DNA, 25 bp, Homo sapien
tcagagtatcaccttgtcctcattc

SEQ ID NO: 1893670 - DNA, 25 bp, Homo sapien
gagtatcaccttgtcctcattccat

SEQ ID NO: 1893671 - DNA, 25 bp, Homo sapien
tgggatcttccccataattggtagt

SEQ ID NO: 1893672 - DNA, 25 bp, Homo sapien
ttgtttttgtctgactcatatatac

SEQ ID NO: 1893673 - DNA, 25 bp, Homo sapien
gttccagttctccaatatttcctct

SEQ ID NO: 1893674 - DNA, 25 bp, Homo sapien
cttgtttttgtctgactcatatata

SEQ ID NO: 1893675 - DNA, 25 bp, Homo sapien
ctctttagcctctgattcttgtttt

SEQ ID NO: 1893676 - DNA, 25 bp, Homo sapien
aatctcgtctttgtccaacttccgg

SEQ ID NO: 1893677 - DNA, 25 bp, Homo sapien
atctcgtctttgtccaacttccggt

SEQ ID NO: 1893678 - DNA, 25 bp, Homo sapien
gaatctcgtctttgtccaacttccg

SEQ ID NO: 1893679 - DNA, 25 bp, Homo sapien
tctcgtctttgtccaacttccggtc

SEQ ID NO: 1893680 - DNA, 25 bp, Homo sapien
ctgtcagggcgccatcgaggtctgc

SEQ ID NO: 1893681 - DNA, 25 bp, Homo sapien
ttcatatgctcaaactcttcggtat

SEQ ID NO: 1893682 - DNA, 25 bp, Homo sapien
tcagggcgccatcgaggtctgcagc

SEQ ID NO: 1893683 - DNA, 25 bp, Homo sapien
gggcgccatcgaggtctgcagcttt

SEQ ID NO: 1893684 - DNA, 25 bp, Homo sapien
ggtcataggtggcttgtttgtattc

SEQ ID NO: 1893685 - DNA, 25 bp, Homo sapien
cataggtggcttgtttgtattcttc

SEQ ID NO: 1893686 - DNA, 25 bp, Homo sapien
taggtcataggtggcttgtttgtat

SEQ ID NO: 1893687 - DNA, 25 bp, Homo sapien
ctaggtcataggtggcttgtttgta

SEQ ID NO: 1893688 - DNA, 25 bp, Homo sapien
tccttgtccctatcgtaatcccgcc

SEQ ID NO: 1893689 - DNA, 25 bp, Homo sapien
tgtccctatcgtaatcccgccagac

SEQ ID NO: 1893690 - DNA, 25 bp, Homo sapien
cttgtccctatcgtaatcccgccag

SEQ ID NO: 1893691 - DNA, 25 bp, Homo sapien
atccttgtccctatcgtaatcccgc

SEQ ID NO: 1893692 - DNA, 25 bp, Homo sapien
catcatcgaagatgtatcttttctg

SEQ ID NO: 1893693 - DNA, 25 bp, Homo sapien
catcgaagatgtatcttttctgcac

SEQ ID NO: 1893694 - DNA, 25 bp, Homo sapien
tttggcgacatcatcgaagatgtat

SEQ ID NO: 1893695 - DNA, 25 bp, Homo sapien
gcgacatcatcgaagatgtatcttt

SEQ ID NO: 1893696 - DNA, 25 bp, Homo sapien
ctcatggcggtaccggaagctccgg

SEQ ID NO: 1893697 - DNA, 25 bp, Homo sapien
ggttgacctctggaagccgctcgcc

SEQ ID NO: 1893698 - DNA, 25 bp, Homo sapien
gaagctccggttgacctctggaagc

SEQ ID NO: 1893699 - DNA, 25 bp, Homo sapien
ggaaggcctcatggcggtaccggaa

SEQ ID NO: 1893700 - DNA, 25 bp, Homo sapien
tggcccgcagcgcccgcaggccagc

SEQ ID NO: 1893701 - DNA, 25 bp, Homo sapien
ttggcccgcagcgcccgcaggccag

SEQ ID NO: 1893702 - DNA, 25 bp, Homo sapien
gcccgcagcgcccgcaggccagcac

SEQ ID NO: 1893703 - DNA, 25 bp, Homo sapien
cttggcccgcagcgcccgcaggcca

SEQ ID NO: 1893704 - DNA, 25 bp, Homo sapien
caggacgagcccgaggactagcccc

SEQ ID NO: 1893705 - DNA, 25 bp, Homo sapien
gacgagcccgaggactagccccagg

SEQ ID NO: 1893706 - DNA, 25 bp, Homo sapien
agcccgaggactagccccaggcggc

SEQ ID NO: 1893707 - DNA, 25 bp, Homo sapien
gagcccgaggactagccccaggcgg

SEQ ID NO: 1893708 - DNA, 25 bp, Homo sapien
tctctgagctaacattaagggcttc

SEQ ID NO: 1893709 - DNA, 25 bp, Homo sapien
tctgagctaacattaagggcttctt

SEQ ID NO: 1893710 - DNA, 25 bp, Homo sapien
ggagatgtgaggcttcctaatctct

SEQ ID NO: 1893711 - DNA, 25 bp, Homo sapien
tgaggcttcctaatctctgagctaa

SEQ ID NO: 1893712 - DNA, 25 bp, Homo sapien
taattgaggctctattaaaagcatg

SEQ ID NO: 1893713 - DNA, 25 bp, Homo sapien
tgttcctctcgaagaaaatgtcttc

SEQ ID NO: 1893714 - DNA, 25 bp, Homo sapien
gaaaagtgtggtgtctaaccgatcc

SEQ ID NO: 1893715 - DNA, 25 bp, Homo sapien
tttggaatcacttcaacatgtggca

SEQ ID NO: 1893716 - DNA, 25 bp, Homo sapien
tccagaaaaagagtgcaccggcgtg

SEQ ID NO: 1893717 - DNA, 25 bp, Homo sapien
tcaggcccggctatttcaagaattc

SEQ ID NO: 1893718 - DNA, 25 bp, Homo sapien
ttcaaaatgggcatgggtgctcgcg

SEQ ID NO: 1893719 - DNA, 25 bp, Homo sapien
gattacaccacgtccttagcagtcg

SEQ ID NO: 1893720 - DNA, 25 bp, Homo sapien
caggtccaggtaaatgatattcaac

SEQ ID NO: 1893721 - DNA, 25 bp, Homo sapien
taggagataaaagatacgggcaact

SEQ ID NO: 1893722 - DNA, 25 bp, Homo sapien
caagcaattgcataaacagttagta

SEQ ID NO: 1893723 - DNA, 25 bp, Homo sapien
ggttaaagagggtagcaaattcagc

SEQ ID NO: 1893724 - DNA, 25 bp, Homo sapien
aatttgctagcttgtggtaccatca

SEQ ID NO: 1893725 - DNA, 25 bp, Homo sapien
gccagtctgactagaagacactttg

SEQ ID NO: 1893726 - DNA, 25 bp, Homo sapien
gaaaacaaggtcctagtcctgatgc

SEQ ID NO: 1893727 - DNA, 25 bp, Homo sapien
tttaggcgagcattccaaaagtggg

SEQ ID NO: 1893728 - DNA, 25 bp, Homo sapien
cctgttaaggtagcagagtgatgtg

SEQ ID NO: 1893729 - DNA, 25 bp, Homo sapien
aatgccagtgtatttcctgttaagg

SEQ ID NO: 1893730 - DNA, 25 bp, Homo sapien
caactttcatgttatatgcaatggg

SEQ ID NO: 1893731 - DNA, 25 bp, Homo sapien
gagcttcacattaagcttctctgca

SEQ ID NO: 1893732 - DNA, 25 bp, Homo sapien
caggcaggaattcaccaacacccaa

SEQ ID NO: 1893733 - DNA, 25 bp, Homo sapien
ggaattcaccaacacccaagcagca

SEQ ID NO: 1893734 - DNA, 25 bp, Homo sapien
caagcagcaggataggtcggcagct

SEQ ID NO: 1893735 - DNA, 25 bp, Homo sapien
caccaacacccaagcagcaggatag

SEQ ID NO: 1893736 - DNA, 25 bp, Homo sapien
ctaggaaaggaaggacatgttcagc

SEQ ID NO: 1893737 - DNA, 25 bp, Homo sapien
acctctgaacaacctgcagccgtgt

SEQ ID NO: 1893738 - DNA, 25 bp, Homo sapien
cctgcagccgtgtgatttgtccaag

SEQ ID NO: 1893739 - DNA, 25 bp, Homo sapien
ccacctctgaacaacctgcagccgt

SEQ ID NO: 1893740 - DNA, 25 bp, Homo sapien
cctctgaacaacctgcagccgtgtg

SEQ ID NO: 1893741 - DNA, 25 bp, Homo sapien
ctggttgataatccatgctttacat

SEQ ID NO: 1893742 - DNA, 25 bp, Homo sapien
tgataatccatgctttacatactca

SEQ ID NO: 1893743 - DNA, 25 bp, Homo sapien
catgctttacatactcatcttcagc

SEQ ID NO: 1893744 - DNA, 25 bp, Homo sapien
taatccatgctttacatactcatct

SEQ ID NO: 1893745 - DNA, 25 bp, Homo sapien
catgcctgccttctggagagccagc

SEQ ID NO: 1893746 - DNA, 25 bp, Homo sapien
agccagctgccaatattccaacttc

SEQ ID NO: 1893747 - DNA, 25 bp, Homo sapien
gagagccagctgccaatattccaac

SEQ ID NO: 1893748 - DNA, 25 bp, Homo sapien
ctcatgcctgccttctggagagcca

SEQ ID NO: 1893749 - DNA, 25 bp, Homo sapien
gttgctgtagcaaagctcagtccag

SEQ ID NO: 1893750 - DNA, 25 bp, Homo sapien
ccaattgatggtgccacagtgaggt

SEQ ID NO: 1893751 - DNA, 25 bp, Homo sapien
attgaaagcttcgaggaccctgagg

SEQ ID NO: 1893752 - DNA, 25 bp, Homo sapien
aaaagtcttgtcctaactctcagag

SEQ ID NO: 1893753 - DNA, 25 bp, Homo sapien
tgcccttaaggttcatctgacctcc

SEQ ID NO: 1893754 - DNA, 25 bp, Homo sapien
cagtgccacgaaagcttttattatc

SEQ ID NO: 1893755 - DNA, 25 bp, Homo sapien
tattatcagttcagtccctgccctt

SEQ ID NO: 1893756 - DNA, 25 bp, Homo sapien
tattgaaatcacctttgacgtgttg

SEQ ID NO: 1893757 - DNA, 25 bp, Homo sapien
tcatctttatggtttacttggccct

SEQ ID NO: 1893758 - DNA, 25 bp, Homo sapien
cagaactttcaccagtaagaacttg

SEQ ID NO: 1893759 - DNA, 25 bp, Homo sapien
tctgcaagacagatacccttcatcc

SEQ ID NO: 1893760 - DNA, 25 bp, Homo sapien
tcttgcatatcgtaatagaggagtg

SEQ ID NO: 1893761 - DNA, 25 bp, Homo sapien
caatgggaatcctgcttgttcggcc

SEQ ID NO: 1893762 - DNA, 25 bp, Homo sapien
tgttcggcccagttgcagcatgtct

SEQ ID NO: 1893763 - DNA, 25 bp, Homo sapien
taacccaccgaaaggagcatcaagt

SEQ ID NO: 1893764 - DNA, 25 bp, Homo sapien
taaagataatgaagacgccaagcgc

SEQ ID NO: 1893765 - DNA, 25 bp, Homo sapien
tagcacaagtgtagagacccaagct

SEQ ID NO: 1893766 - DNA, 25 bp, Homo sapien
gaaatgatgccctgtctgagtgtac

SEQ ID NO: 1893767 - DNA, 25 bp, Homo sapien
gctgtgaccgtatatatgcaacccg

SEQ ID NO: 1893768 - DNA, 25 bp, Homo sapien
ttcgtccaagaagattaacaccagg

SEQ ID NO: 1893769 - DNA, 25 bp, Homo sapien
gaaatgaaacctaccgtcagtctga

SEQ ID NO: 1893770 - DNA, 25 bp, Homo sapien
gatatcagtataggtaaagccacag

SEQ ID NO: 1893771 - DNA, 25 bp, Homo sapien
aataggaagccatcaagcatgctag

SEQ ID NO: 1893772 - DNA, 25 bp, Homo sapien
tgtacagtttgccaatccatcacag

SEQ ID NO: 1893773 - DNA, 25 bp, Homo sapien
tgctctgctttgtaaatttgccatc

SEQ ID NO: 1893774 - DNA, 25 bp, Homo sapien
gatgatatcaagattacttttcaca

SEQ ID NO: 1893775 - DNA, 25 bp, Homo sapien
taggcacattatatcaacactttgc

SEQ ID NO: 1893776 - DNA, 25 bp, Homo sapien
gaaactctgccatagttcattgatt

SEQ ID NO: 1893777 - DNA, 25 bp, Homo sapien
tattattggcctgagatattgatga

SEQ ID NO: 1893778 - DNA, 25 bp, Homo sapien
taagcatggtcaaggagtgaactat

SEQ ID NO: 1893779 - DNA, 25 bp, Homo sapien
aaatgtgtacattccctgtgcaaca

SEQ ID NO: 1893780 - DNA, 25 bp, Homo sapien
tactgaaatcgctggtactctgaat

SEQ ID NO: 1893781 - DNA, 25 bp, Homo sapien
tttggagaccactgaaatgatagct

SEQ ID NO: 1893782 - DNA, 25 bp, Homo sapien
ttcatttcagctcggaggccatcac

SEQ ID NO: 1893783 - DNA, 25 bp, Homo sapien
tccctgaatcggcaagaggcctggg

SEQ ID NO: 1893784 - DNA, 25 bp, Homo sapien
tagagtgaccctttcggatgtctgc

SEQ ID NO: 1893785 - DNA, 25 bp, Homo sapien
agacagcacttaataaagcacttga

SEQ ID NO: 1893786 - DNA, 25 bp, Homo sapien
gagacagcacttaataaagcacttg

SEQ ID NO: 1893787 - DNA, 25 bp, Homo sapien
gaaattcaacacaatacacaagcat

SEQ ID NO: 1893788 - DNA, 25 bp, Homo sapien
gaagatcgtcttctcagtgggtttg

SEQ ID NO: 1893789 - DNA, 25 bp, Homo sapien
agaggatgaagatcgtcttctcagt

SEQ ID NO: 1893790 - DNA, 25 bp, Homo sapien
catgaggtgatgaccaagaagagga

SEQ ID NO: 1893791 - DNA, 25 bp, Homo sapien
gggaacactaaagccatcatatagc

SEQ ID NO: 1893792 - DNA, 25 bp, Homo sapien
ccagttttaacaatgaggctgataa

SEQ ID NO: 1893793 - DNA, 25 bp, Homo sapien
gataagataagcgtaccataggccc

SEQ ID NO: 1893794 - DNA, 25 bp, Homo sapien
tataaggtagggaacactaaagcca

SEQ ID NO: 1893795 - DNA, 25 bp, Homo sapien
ttctctctaccctcatgataggcta

SEQ ID NO: 1893796 - DNA, 25 bp, Homo sapien
tctctctaccctcatgataggctac

SEQ ID NO: 1893797 - DNA, 25 bp, Homo sapien
tatcagttgtaaggcccaaagtctg

SEQ ID NO: 1893798 - DNA, 25 bp, Homo sapien
caaatccatccagtcccagtggagt

SEQ ID NO: 1893799 - DNA, 25 bp, Homo sapien
cacatttttgcaaccgggctgtcta

SEQ ID NO: 1893800 - DNA, 25 bp, Homo sapien
ccatgtagaccagcaaacggaagac

SEQ ID NO: 1893801 - DNA, 25 bp, Homo sapien
gacttaggctcaaaagaaggcaaga

SEQ ID NO: 1893802 - DNA, 25 bp, Homo sapien
cttaggctcaaaagaaggcaagact

SEQ ID NO: 1893803 - DNA, 25 bp, Homo sapien
acttaggctcaaaagaaggcaagac

SEQ ID NO: 1893804 - DNA, 25 bp, Homo sapien
tggccctgctcaaaatgaagattac

SEQ ID NO: 1893805 - DNA, 25 bp, Homo sapien
taaaaagcgctagtggcatcagtgg

SEQ ID NO: 1893806 - DNA, 25 bp, Homo sapien
tattattaaatattgatggccctgc

SEQ ID NO: 1893807 - DNA, 25 bp, Homo sapien
ttacaaaagccgaatcagattggca

SEQ ID NO: 1893808 - DNA, 25 bp, Homo sapien
aacatacttctaggagatgtctcct

SEQ ID NO: 1893809 - DNA, 25 bp, Homo sapien
gaaccggaaaggctagcactggatg

SEQ ID NO: 1893810 - DNA, 25 bp, Homo sapien
caccgaactggaacgtaatttgaag

SEQ ID NO: 1893811 - DNA, 25 bp, Homo sapien
gaagaaagcaaaaacgtcccttgca

SEQ ID NO: 1893812 - DNA, 25 bp, Homo sapien
gtcttggctcaccagactcataggg

SEQ ID NO: 1893813 - DNA, 25 bp, Homo sapien
tagtgcggacactcgtgctttttca

SEQ ID NO: 1893814 - DNA, 25 bp, Homo sapien
gtgttttgaggagacgccgcttttc

SEQ ID NO: 1893815 - DNA, 25 bp, Homo sapien
tgttcggtgcttcatccatggacac

SEQ ID NO: 1893816 - DNA, 25 bp, Homo sapien
atcttctgcgttgctcactctggga

SEQ ID NO: 1893817 - DNA, 25 bp, Homo sapien
ccatcttctgcgttgctcactctgg

SEQ ID NO: 1893818 - DNA, 25 bp, Homo sapien
acccatcttctgcgttgctcactct

SEQ ID NO: 1893819 - DNA, 25 bp, Homo sapien
cccggtacctcgactggaaatgcag

SEQ ID NO: 1893820 - DNA, 25 bp, Homo sapien
ggtaggcccgcacacaaattaatca

SEQ ID NO: 1893821 - DNA, 25 bp, Homo sapien
taataactagagattggtcaatatc

SEQ ID NO: 1893822 - DNA, 25 bp, Homo sapien
gatcctcaaagtgataataactaga

SEQ ID NO: 1893823 - DNA, 25 bp, Homo sapien
aagagcagtgtaatgccaggttccc

SEQ ID NO: 1893824 - DNA, 25 bp, Homo sapien
taagataactgacaatcacatttgg

SEQ ID NO: 1893825 - DNA, 25 bp, Homo sapien
gggtgcgcacaacaaccttatttcg

SEQ ID NO: 1893826 - DNA, 25 bp, Homo sapien
gaaagagtttcaaagcccagggctc

SEQ ID NO: 1893827 - DNA, 25 bp, Homo sapien
ttgatcaagatgtcttcagcacctg

SEQ ID NO: 1893828 - DNA, 25 bp, Homo sapien
ggcacagttatatgaggcggaaaac

SEQ ID NO: 1893829 - DNA, 25 bp, Homo sapien
gaccttgtgagtgtacagtatcatg

SEQ ID NO: 1893830 - DNA, 25 bp, Homo sapien
gatagcagttgcaaccagacaactg

SEQ ID NO: 1893831 - DNA, 25 bp, Homo sapien
tagtgctggttagtgcagatggacc

SEQ ID NO: 1893832 - DNA, 25 bp, Homo sapien
tagagtcagtcaagcacaaagctgt

SEQ ID NO: 1893833 - DNA, 25 bp, Homo sapien
caaatcattgtcattgggcctcagt

SEQ ID NO: 1893834 - DNA, 25 bp, Homo sapien
tgcagtgcaggagggcaacagaaac

SEQ ID NO: 1893835 - DNA, 25 bp, Homo sapien
ttgaagtttatatgccagcaggcct

SEQ ID NO: 1893836 - DNA, 25 bp, Homo sapien
caatgatgaactctatgacagggtc

SEQ ID NO: 1893837 - DNA, 25 bp, Homo sapien
taaaccacatggcatacatcacagg

SEQ ID NO: 1893838 - DNA, 25 bp, Homo sapien
gaatatcccctgctcagtacaagga

SEQ ID NO: 1893839 - DNA, 25 bp, Homo sapien
tgagatctcactagcttgccaacct

SEQ ID NO: 1893840 - DNA, 25 bp, Homo sapien
gagataaacgtgctactgtcactga

SEQ ID NO: 1893841 - DNA, 25 bp, Homo sapien
caatcaggtcatcacagaaggtctg

SEQ ID NO: 1893842 - DNA, 25 bp, Homo sapien
tacaatatgtcgttccacttgggaa

SEQ ID NO: 1893843 - DNA, 25 bp, Homo sapien
aatatgtcaccctcagatcttggag

SEQ ID NO: 1893844 - DNA, 25 bp, Homo sapien
cagcttctaggtcccattgaaaaac

SEQ ID NO: 1893845 - DNA, 25 bp, Homo sapien
gcttctaggtcccattgaaaaactg

SEQ ID NO: 1893846 - DNA, 25 bp, Homo sapien
cttctaggtcccattgaaaaactgt

SEQ ID NO: 1893847 - DNA, 25 bp, Homo sapien
gcagcttctaggtcccattgaaaaa

SEQ ID NO: 1893848 - DNA, 25 bp, Homo sapien
atacttgctgggttgtaggccacat

SEQ ID NO: 1893849 - DNA, 25 bp, Homo sapien
tttccattttactggtattttgaca

SEQ ID NO: 1893850 - DNA, 25 bp, Homo sapien
catacttgctgggttgtaggccaca

SEQ ID NO: 1893851 - DNA, 25 bp, Homo sapien
tactaatgagatttgtaacctttcc

SEQ ID NO: 1893852 - DNA, 25 bp, Homo sapien
taaggctcaccacttgtaagcctgg

SEQ ID NO: 1893853 - DNA, 25 bp, Homo sapien
gtctgtgtgtgaaaagcgcttgtaa

SEQ ID NO: 1893854 - DNA, 25 bp, Homo sapien
ttaacaggccttcccacaggaaagc

SEQ ID NO: 1893855 - DNA, 25 bp, Homo sapien
gaaaagagagcctactgagttcctg

SEQ ID NO: 1893856 - DNA, 25 bp, Homo sapien
gggtgtagcttggattcctgagccc

SEQ ID NO: 1893857 - DNA, 25 bp, Homo sapien
tcgatccgcgttctccccattttgg

SEQ ID NO: 1893858 - DNA, 25 bp, Homo sapien
cccagttttagtgcgtggccgaccg

SEQ ID NO: 1893859 - DNA, 25 bp, Homo sapien
ggcttcgtctctatgaccacaaggg

SEQ ID NO: 1893860 - DNA, 25 bp, Homo sapien
tgggaaccgaattctgacaggccgg

SEQ ID NO: 1893861 - DNA, 25 bp, Homo sapien
acccagcgaggcaggacagttcttc

SEQ ID NO: 1893862 - DNA, 25 bp, Homo sapien
agtgggtgggaaccgaattctgaca

SEQ ID NO: 1893863 - DNA, 25 bp, Homo sapien
gggctggaccgcattacccagcgag

SEQ ID NO: 1893864 - DNA, 25 bp, Homo sapien
actttttgctgagcagtgtgtgtaa

SEQ ID NO: 1893865 - DNA, 25 bp, Homo sapien
ctgagcagtgtgtgtaagttgggac

SEQ ID NO: 1893866 - DNA, 25 bp, Homo sapien
cactttttgctgagcagtgtgtgta

SEQ ID NO: 1893867 - DNA, 25 bp, Homo sapien
tttgctgagcagtgtgtgtaagttg

SEQ ID NO: 1893868 - DNA, 25 bp, Homo sapien
gggcaacacccggattcttgctcca

SEQ ID NO: 1893869 - DNA, 25 bp, Homo sapien
ctgtggtgcattaaccaggagaagt

SEQ ID NO: 1893870 - DNA, 25 bp, Homo sapien
gtggtgcattaaccaggagaagttg

SEQ ID NO: 1893871 - DNA, 25 bp, Homo sapien
gagaagttgggcaacacccggattc

SEQ ID NO: 1893872 - DNA, 25 bp, Homo sapien
attaagaagaacttagatcttggcc

SEQ ID NO: 1893873 - DNA, 25 bp, Homo sapien
atgacaatttcaggatattatggga

SEQ ID NO: 1893874 - DNA, 25 bp, Homo sapien
aagaagaacttagatcttggccagg

SEQ ID NO: 1893875 - DNA, 25 bp, Homo sapien
taagaagaacttagatcttggccag

SEQ ID NO: 1893876 - DNA, 25 bp, Homo sapien
tcgaagtagcacctgaaaccatgtt

SEQ ID NO: 1893877 - DNA, 25 bp, Homo sapien
tctttgcttagtgaatagtcttggc

SEQ ID NO: 1893878 - DNA, 25 bp, Homo sapien
tacatatattatacgggagtgggag

SEQ ID NO: 1893879 - DNA, 25 bp, Homo sapien
tataatgggacagtcaggttcacgc

SEQ ID NO: 1893880 - DNA, 25 bp, Homo sapien
ttggtttctctaatgtctacattag

SEQ ID NO: 1893881 - DNA, 25 bp, Homo sapien
cttggtttctctaatgtctacatta

SEQ ID NO: 1893882 - DNA, 25 bp, Homo sapien
tcctctgttacttgggctggtctcc

SEQ ID NO: 1893883 - DNA, 25 bp, Homo sapien
ttcctctgttacttgggctggtctc

SEQ ID NO: 1893884 - DNA, 25 bp, Homo sapien
cgtgagctgcagttaggaccattat

SEQ ID NO: 1893885 - DNA, 25 bp, Homo sapien
tacaagccagattagccacgtcctt

SEQ ID NO: 1893886 - DNA, 25 bp, Homo sapien
tcaatgagctgatttatgatacagg

SEQ ID NO: 1893887 - DNA, 25 bp, Homo sapien
tgactcttcctaacccacttaacga

SEQ ID NO: 1893888 - DNA, 25 bp, Homo sapien
tttaatgttaaaccggacactcagc

SEQ ID NO: 1893889 - DNA, 25 bp, Homo sapien
tgacctaccagttgaagattccgtg

SEQ ID NO: 1893890 - DNA, 25 bp, Homo sapien
gctgtgtgctggagttacgcttgta

SEQ ID NO: 1893891 - DNA, 25 bp, Homo sapien
tgtacagtggaaaccagcccaagct

SEQ ID NO: 1893892 - DNA, 25 bp, Homo sapien
tctaagggttaaagtgccaaagcca

SEQ ID NO: 1893893 - DNA, 25 bp, Homo sapien
tcagtgcggttatgtggaaacaaca

SEQ ID NO: 1893894 - DNA, 25 bp, Homo sapien
caaacgaagctatctgagtgaactg

SEQ ID NO: 1893895 - DNA, 25 bp, Homo sapien
tgtgattttagcctcacgtgagact

SEQ ID NO: 1893896 - DNA, 25 bp, Homo sapien
tcccatggctggtttatgctaagaa

SEQ ID NO: 1893897 - DNA, 25 bp, Homo sapien
aatactcgggaagacactactgatc

SEQ ID NO: 1893898 - DNA, 25 bp, Homo sapien
tatcggttagggttctctggctgca

SEQ ID NO: 1893899 - DNA, 25 bp, Homo sapien
gctacaggcgtctaggttctaagaa

SEQ ID NO: 1893900 - DNA, 25 bp, Homo sapien
tacagattctgacacagaataatag

SEQ ID NO: 1893901 - DNA, 25 bp, Homo sapien
gattctgacacagaataatagttta

SEQ ID NO: 1893902 - DNA, 25 bp, Homo sapien
ttctgacacagaataatagtttaac

SEQ ID NO: 1893903 - DNA, 25 bp, Homo sapien
ctgacacagaataatagtttaactt

SEQ ID NO: 1893904 - DNA, 25 bp, Homo sapien
aggtgttattccaagaagtttcatt

SEQ ID NO: 1893905 - DNA, 25 bp, Homo sapien
cagaacggacagctttgaaaagatg

SEQ ID NO: 1893906 - DNA, 25 bp, Homo sapien
tggctaggacagaacggacagcttt

SEQ ID NO: 1893907 - DNA, 25 bp, Homo sapien
taggacagaacggacagctttgaaa

SEQ ID NO: 1893908 - DNA, 25 bp, Homo sapien
gttttgtgtgccacagctgcaagat

SEQ ID NO: 1893909 - DNA, 25 bp, Homo sapien
tgttttgtgtgccacagctgcaaga

SEQ ID NO: 1893910 - DNA, 25 bp, Homo sapien
gtgttttgtgtgccacagctgcaag

SEQ ID NO: 1893911 - DNA, 25 bp, Homo sapien
ttttgtgtgccacagctgcaagatg

SEQ ID NO: 1893912 - DNA, 25 bp, Homo sapien
tcataagacttggtatattagctgg

SEQ ID NO: 1893913 - DNA, 25 bp, Homo sapien
taagacttggtatattagctgggca

SEQ ID NO: 1893914 - DNA, 25 bp, Homo sapien
gtataacaatgtgccggagaaatga

SEQ ID NO: 1893915 - DNA, 25 bp, Homo sapien
tgtgccggagaaatgatacttaaga

SEQ ID NO: 1893916 - DNA, 25 bp, Homo sapien
agccgagatcacgctccagcctgga

SEQ ID NO: 1893917 - DNA, 25 bp, Homo sapien
cctggacaacagagcgagacaccat

SEQ ID NO: 1893918 - DNA, 25 bp, Homo sapien
cagcctggacaacagagcgagacac

SEQ ID NO: 1893919 - DNA, 25 bp, Homo sapien
gccgagatcacgctccagcctggac

SEQ ID NO: 1893920 - DNA, 25 bp, Homo sapien
agactttgtagcttcttcacctctg

SEQ ID NO: 1893921 - DNA, 25 bp, Homo sapien
tcttaagtgtcatttaaaggaagaa

SEQ ID NO: 1893922 - DNA, 25 bp, Homo sapien
gctgctatacaagggtggactcaat

SEQ ID NO: 1893923 - DNA, 25 bp, Homo sapien
tgctaaaatagacaccatgaaattg

SEQ ID NO: 1893924 - DNA, 25 bp, Homo sapien
ctgacgatatgcctgggttgaaagt

SEQ ID NO: 1893925 - DNA, 25 bp, Homo sapien
gagatgatttataaagcacctcgtc

SEQ ID NO: 1893926 - DNA, 25 bp, Homo sapien
tgatttataaagcacctcgtcgaac

SEQ ID NO: 1893927 - DNA, 25 bp, Homo sapien
ttagaaggtaactgacgatatgcct

SEQ ID NO: 1893928 - DNA, 25 bp, Homo sapien
atataaggttgactcgacacgatta

SEQ ID NO: 1893929 - DNA, 25 bp, Homo sapien
aaaagattgtgaatataaggttgac

SEQ ID NO: 1893930 - DNA, 25 bp, Homo sapien
tgtacacattacactaagacattag

SEQ ID NO: 1893931 - DNA, 25 bp, Homo sapien
cgattaagagtagaaggtatggcca

SEQ ID NO: 1893932 - DNA, 25 bp, Homo sapien
gaaggacttacggtctctgggaagc

SEQ ID NO: 1893933 - DNA, 25 bp, Homo sapien
tagacatgtgcgctattcatcagtg

SEQ ID NO: 1893934 - DNA, 25 bp, Homo sapien
aaagactgtcctccttgggcattgg

SEQ ID NO: 1893935 - DNA, 25 bp, Homo sapien
aaaatgtgtgggtgtcttgcctagc

SEQ ID NO: 1893936 - DNA, 25 bp, Homo sapien
aatgctaatagccattttgataagc

SEQ ID NO: 1893937 - DNA, 25 bp, Homo sapien
aaggcagctactggactgttgactc

SEQ ID NO: 1893938 - DNA, 25 bp, Homo sapien
gttgactctactgggcagcaaaaat

SEQ ID NO: 1893939 - DNA, 25 bp, Homo sapien
agcacacttgatgatccctggaaaa

SEQ ID NO: 1893940 - DNA, 25 bp, Homo sapien
ggtacccacatccaaaagtctcttc

SEQ ID NO: 1893941 - DNA, 25 bp, Homo sapien
ctgtggctcttgtaaacaagcagtg

SEQ ID NO: 1893942 - DNA, 25 bp, Homo sapien
aggtacccacatccaaaagtctctt

SEQ ID NO: 1893943 - DNA, 25 bp, Homo sapien
ttgaaacagactgtggctcttgtaa

SEQ ID NO: 1893944 - DNA, 25 bp, Homo sapien
tatccatacacagtggaggtaacag

SEQ ID NO: 1893945 - DNA, 25 bp, Homo sapien
tcgacagggttattctgaggactaa

SEQ ID NO: 1893946 - DNA, 25 bp, Homo sapien
gaggtaacagtatatttttcgacag

SEQ ID NO: 1893947 - DNA, 25 bp, Homo sapien
gatgaacatgaccttataatacaca

SEQ ID NO: 1893948 - DNA, 25 bp, Homo sapien
tcctaaaagaaggtctactctagtc

SEQ ID NO: 1893949 - DNA, 25 bp, Homo sapien
cagggcctctggtcttagaatcaca

SEQ ID NO: 1893950 - DNA, 25 bp, Homo sapien
tagaagatattggaaaagcccagaa

SEQ ID NO: 1893951 - DNA, 25 bp, Homo sapien
tagaatcacaggacctagcctaagt

SEQ ID NO: 1893952 - DNA, 25 bp, Homo sapien
ctgtgtccccgcgactctggaaaac

SEQ ID NO: 1893953 - DNA, 25 bp, Homo sapien
acttgtagtcagataagagtaaacc

SEQ ID NO: 1893954 - DNA, 25 bp, Homo sapien
tggaaaacacgatcccagctgaact

SEQ ID NO: 1893955 - DNA, 25 bp, Homo sapien
tactgtaggaagactcctgtgtccc

SEQ ID NO: 1893956 - DNA, 25 bp, Homo sapien
gcctcacaggtaggagtcttaacag

SEQ ID NO: 1893957 - DNA, 25 bp, Homo sapien
ggcctcacaggtaggagtcttaaca

SEQ ID NO: 1893958 - DNA, 25 bp, Homo sapien
tagtaccaaacaaaagggcctcaca

SEQ ID NO: 1893959 - DNA, 25 bp, Homo sapien
tgctgggatttgctctagtaccaaa

SEQ ID NO: 1893960 - DNA, 25 bp, Homo sapien
ataatgagtgctgcgagcccgaccc

SEQ ID NO: 1893961 - DNA, 25 bp, Homo sapien
ctgaataatgagtgctgcgagcccg

SEQ ID NO: 1893962 - DNA, 25 bp, Homo sapien
gaataatgagtgctgcgagcccgac

SEQ ID NO: 1893963 - DNA, 25 bp, Homo sapien
atgagtgctgcgagcccgaccctct

SEQ ID NO: 1893964 - DNA, 25 bp, Homo sapien
ctttgataatgacatttcccctgcc

SEQ ID NO: 1893965 - DNA, 25 bp, Homo sapien
ttagtctacatgacactgtgccaat

SEQ ID NO: 1893966 - DNA, 25 bp, Homo sapien
tgaaacagacaaaggcagctatctt

SEQ ID NO: 1893967 - DNA, 25 bp, Homo sapien
tcagaatgagtaattacttgcctaa

SEQ ID NO: 1893968 - DNA, 25 bp, Homo sapien
tatgactttaataagaaaaaactga

SEQ ID NO: 1893969 - DNA, 25 bp, Homo sapien
cttaattgaagccatgttctgtagc

SEQ ID NO: 1893970 - DNA, 25 bp, Homo sapien
gacatctcctcttcgagtcttcatt

SEQ ID NO: 1893971 - DNA, 25 bp, Homo sapien
cttccaggaaagtgacatctcctct

SEQ ID NO: 1893972 - DNA, 25 bp, Homo sapien
attgaagccatgttctgtagcatcc

SEQ ID NO: 1893973 - DNA, 25 bp, Homo sapien
ttccacaccagtatcttgaaacaaa

SEQ ID NO: 1893974 - DNA, 25 bp, Homo sapien
atctgagtgaaaaactttaaccact

SEQ ID NO: 1893975 - DNA, 25 bp, Homo sapien
tccacaccagtatcttgaaacaaag

SEQ ID NO: 1893976 - DNA, 25 bp, Homo sapien
ctttaaccactaggtacattttcag

SEQ ID NO: 1893977 - DNA, 25 bp, Homo sapien
ttctgcccagtcatatcccatgatc

SEQ ID NO: 1893978 - DNA, 25 bp, Homo sapien
ctttctgcccagtcatatcccatga

SEQ ID NO: 1893979 - DNA, 25 bp, Homo sapien
tttctgcccagtcatatcccatgat

SEQ ID NO: 1893980 - DNA, 25 bp, Homo sapien
tctgcccagtcatatcccatgatct

SEQ ID NO: 1893981 - DNA, 25 bp, Homo sapien
gaatacttgctgaaaatgctttttt

SEQ ID NO: 1893982 - DNA, 25 bp, Homo sapien
tcagcatttggaatacttgctgaaa

SEQ ID NO: 1893983 - DNA, 25 bp, Homo sapien
tggaatacttgctgaaaatgctttt

SEQ ID NO: 1893984 - DNA, 25 bp, Homo sapien
ttgctgaaaatgctttttttgtcct

SEQ ID NO: 1893985 - DNA, 25 bp, Homo sapien
taagagccatacaactccaccgagt

SEQ ID NO: 1893986 - DNA, 25 bp, Homo sapien
tatttaagtttctgccctctcggct

SEQ ID NO: 1893987 - DNA, 25 bp, Homo sapien
tccaccgagtcagtaggaaatgtga

SEQ ID NO: 1893988 - DNA, 25 bp, Homo sapien
tgtctaagtggactgctctacaagg

SEQ ID NO: 1893989 - DNA, 25 bp, Homo sapien
tatacttgtccattcgatctatagc

SEQ ID NO: 1893990 - DNA, 25 bp, Homo sapien
tcgatctatagcagctgcaagatct

SEQ ID NO: 1893991 - DNA, 25 bp, Homo sapien
ttgtccattcgatctatagcagctg

SEQ ID NO: 1893992 - DNA, 25 bp, Homo sapien
ccattcgatctatagcagctgcaag

SEQ ID NO: 1893993 - DNA, 25 bp, Homo sapien
caaagtggccataaaccaagagtta

SEQ ID NO: 1893994 - DNA, 25 bp, Homo sapien
ctgaaacaaagtggccataaaccaa

SEQ ID NO: 1893995 - DNA, 25 bp, Homo sapien
taaaccaagagttactaagcagatc

SEQ ID NO: 1893996 - DNA, 25 bp, Homo sapien
tactaagcagatccgggtaataatt

SEQ ID NO: 1893997 - DNA, 25 bp, Homo sapien
ctgaggaattccacccacacttaga

SEQ ID NO: 1893998 - DNA, 25 bp, Homo sapien
gggtgaagtgtcttgtagataaatg

SEQ ID NO: 1893999 - DNA, 25 bp, Homo sapien
caactaaaatagctctgggtgaagt

SEQ ID NO: 1894000 - DNA, 25 bp, Homo sapien
tttaaattataccacagcctgagga

SEQ ID NO: 1894001 - DNA, 25 bp, Homo sapien
aacaggtattgtctagatactctcc

SEQ ID NO: 1894002 - DNA, 25 bp, Homo sapien
tttcaaagtcttgggtcagtcaggg

SEQ ID NO: 1894003 - DNA, 25 bp, Homo sapien
aaaagaccataaagtcggccaggtg

SEQ ID NO: 1894004 - DNA, 25 bp, Homo sapien
tactctcctattagtattactaagg

SEQ ID NO: 1894005 - DNA, 25 bp, Homo sapien
agagaagtcccatcacttcgcatta

SEQ ID NO: 1894006 - DNA, 25 bp, Homo sapien
ccatcacttcgcattacagtacaaa

SEQ ID NO: 1894007 - DNA, 25 bp, Homo sapien
gcattacagtacaaattgaggaggg

SEQ ID NO: 1894008 - DNA, 25 bp, Homo sapien
gaggggtcgccattcccagagagat

SEQ ID NO: 1894009 - DNA, 25 bp, Homo sapien
gagtcctttactctccagcaacttt

SEQ ID NO: 1894010 - DNA, 25 bp, Homo sapien
cagcaactttaagacctcttgagat

SEQ ID NO: 1894011 - DNA, 25 bp, Homo sapien
gacctcttgagatttttcacgataa

SEQ ID NO: 1894012 - DNA, 25 bp, Homo sapien
tttactctccagcaactttaagacc

SEQ ID NO: 1894013 - DNA, 25 bp, Homo sapien
tcaagtcccgaaatttttgccacag

SEQ ID NO: 1894014 - DNA, 25 bp, Homo sapien
gtgaaagtgcttgcacatcgcccag

SEQ ID NO: 1894015 - DNA, 25 bp, Homo sapien
tcgttggaagaactcctgtgctgct

SEQ ID NO: 1894016 - DNA, 25 bp, Homo sapien
tgtactcttcaatgctcaagtcccg

SEQ ID NO: 1894017 - DNA, 25 bp, Homo sapien
caaacattagtgaaaatcaactgac

SEQ ID NO: 1894018 - DNA, 25 bp, Homo sapien
cttaaaacgtgaatattcttagtat

SEQ ID NO: 1894019 - DNA, 25 bp, Homo sapien
caaagagaagagctttaataagcac

SEQ ID NO: 1894020 - DNA, 25 bp, Homo sapien
ttcttagtatttccgcaatatgtac

SEQ ID NO: 1894021 - DNA, 25 bp, Homo sapien
ctacatagcgatcttgtctctagac

SEQ ID NO: 1894022 - DNA, 25 bp, Homo sapien
tgggaaatggttcacggtgtgtcta

SEQ ID NO: 1894023 - DNA, 25 bp, Homo sapien
ggttcacggtgtgtctacatagcga

SEQ ID NO: 1894024 - DNA, 25 bp, Homo sapien
ggtgtgtctacatagcgatcttgtc

SEQ ID NO: 1894025 - DNA, 25 bp, Homo sapien
ccttaaatcctgctagaaaggggca

SEQ ID NO: 1894026 - DNA, 25 bp, Homo sapien
tatctagtgatacactaacccctca

SEQ ID NO: 1894027 - DNA, 25 bp, Homo sapien
tcctgctagaaaggggcaaggtaga

SEQ ID NO: 1894028 - DNA, 25 bp, Homo sapien
caaaactattacgtaaattatctag

SEQ ID NO: 1894029 - DNA, 25 bp, Homo sapien
gtttttcctcatagccaaacagctg

SEQ ID NO: 1894030 - DNA, 25 bp, Homo sapien
ttcaaagagatgctgtagaggattg

SEQ ID NO: 1894031 - DNA, 25 bp, Homo sapien
agtttttcctcatagccaaacagct

SEQ ID NO: 1894032 - DNA, 25 bp, Homo sapien
atgctgtagaggattggactgcagt

SEQ ID NO: 1894033 - DNA, 25 bp, Homo sapien
tgtcctaaagcttctttgagatttg

SEQ ID NO: 1894034 - DNA, 25 bp, Homo sapien
cccaatcgccaaggtaatttattct

SEQ ID NO: 1894035 - DNA, 25 bp, Homo sapien
aactgcatgccccaatcgccaaggt

SEQ ID NO: 1894036 - DNA, 25 bp, Homo sapien
aaagcttctttgagatttgctataa

SEQ ID NO: 1894037 - DNA, 25 bp, Homo sapien
gcaggaggctcatataaatttaaac

SEQ ID NO: 1894038 - DNA, 25 bp, Homo sapien
gtaaccaatgtcatccatttcctga

SEQ ID NO: 1894039 - DNA, 25 bp, Homo sapien
aatctgaaaggttatacatccccac

SEQ ID NO: 1894040 - DNA, 25 bp, Homo sapien
caggtcttccccatatttatactta

SEQ ID NO: 1894041 - DNA, 25 bp, Homo sapien
cgtttagcattttatgtgaaactaa

SEQ ID NO: 1894042 - DNA, 25 bp, Homo sapien
gaacgtttagcattttatgtgaaac

SEQ ID NO: 1894043 - DNA, 25 bp, Homo sapien
acttcctcaaaggaacgtttagcat

SEQ ID NO: 1894044 - DNA, 25 bp, Homo sapien
cttcctcaaaggaacgtttagcatt

SEQ ID NO: 1894045 - DNA, 25 bp, Homo sapien
atgatggtagaacgcaaatgtccaa

SEQ ID NO: 1894046 - DNA, 25 bp, Homo sapien
tatgatggtagaacgcaaatgtcca

SEQ ID NO: 1894047 - DNA, 25 bp, Homo sapien
ctatgatggtagaacgcaaatgtcc

SEQ ID NO: 1894048 - DNA, 25 bp, Homo sapien
tgacaaaactgtggagtatggcctt

SEQ ID NO: 1894049 - DNA, 25 bp, Homo sapien
taagaatcaactaggtcatgcctcc

SEQ ID NO: 1894050 - DNA, 25 bp, Homo sapien
gactcctgaagtaatagcattcacg

SEQ ID NO: 1894051 - DNA, 25 bp, Homo sapien
aatgaaattgatcttgtgactcctg

SEQ ID NO: 1894052 - DNA, 25 bp, Homo sapien
tatcactcccgtgtgtgctcaagaa

SEQ ID NO: 1894053 - DNA, 25 bp, Homo sapien
gaacaatcagaatgtggctcaccac

SEQ ID NO: 1894054 - DNA, 25 bp, Homo sapien
gcttcacacacttcatgggcattaa

SEQ ID NO: 1894055 - DNA, 25 bp, Homo sapien
aagtagaacggtagcttgggcccag

SEQ ID NO: 1894056 - DNA, 25 bp, Homo sapien
caacagcaagaactatagcacctgg

SEQ ID NO: 1894057 - DNA, 25 bp, Homo sapien
cagcaagaactatagcacctggaaa

SEQ ID NO: 1894058 - DNA, 25 bp, Homo sapien
tcacaacagcaagaactatagcacc

SEQ ID NO: 1894059 - DNA, 25 bp, Homo sapien
caagaactatagcacctggaaaacc

SEQ ID NO: 1894060 - DNA, 25 bp, Homo sapien
gctgtgcctgtttcaagactagatg

SEQ ID NO: 1894061 - DNA, 25 bp, Homo sapien
gagtacctttgtaaagaggtcttgc

SEQ ID NO: 1894062 - DNA, 25 bp, Homo sapien
cattaagagatgtactctatttttc

SEQ ID NO: 1894063 - DNA, 25 bp, Homo sapien
gactagatgatttcactatcttaga

SEQ ID NO: 1894064 - DNA, 25 bp, Homo sapien
ttttgagccatcttcaattacttgt

SEQ ID NO: 1894065 - DNA, 25 bp, Homo sapien
attttgagccatcttcaattacttg

SEQ ID NO: 1894066 - DNA, 25 bp, Homo sapien
tatatgcattaacttacttactcct

SEQ ID NO: 1894067 - DNA, 25 bp, Homo sapien
attaacttacttactcctcacgaca

SEQ ID NO: 1894068 - DNA, 25 bp, Homo sapien
tatgcattaacttacttactcctca

SEQ ID NO: 1894069 - DNA, 25 bp, Homo sapien
gcattaacttacttactcctcacga

SEQ ID NO: 1894070 - DNA, 25 bp, Homo sapien
aaaagttaaacaagctgagatataa

SEQ ID NO: 1894071 - DNA, 25 bp, Homo sapien
gaaaagttaaacaagctgagatata

SEQ ID NO: 1894072 - DNA, 25 bp, Homo sapien
aaagttaaacaagctgagatataaa

SEQ ID NO: 1894073 - DNA, 25 bp, Homo sapien
taagagctctctgtttattttgaaa

SEQ ID NO: 1894074 - DNA, 25 bp, Homo sapien
tttgaaatttacagtcctttgacca

SEQ ID NO: 1894075 - DNA, 25 bp, Homo sapien
ctttgaccagtactgatttcactca

SEQ ID NO: 1894076 - DNA, 25 bp, Homo sapien
tactgatttcactcaccactgtatc

SEQ ID NO: 1894077 - DNA, 25 bp, Homo sapien
tatattacacaagatgcctcaaaga

SEQ ID NO: 1894078 - DNA, 25 bp, Homo sapien
gctgagatagcctgcaaagtacttt

SEQ ID NO: 1894079 - DNA, 25 bp, Homo sapien
acactattaaattcactattatggc

SEQ ID NO: 1894080 - DNA, 25 bp, Homo sapien
gaggagtgctttataactaatctga

SEQ ID NO: 1894081 - DNA, 25 bp, Homo sapien
aagaatccacagaaagctgaaaatc

SEQ ID NO: 1894082 - DNA, 25 bp, Homo sapien
ccacagaaagctgaaaatcagctac

SEQ ID NO: 1894083 - DNA, 25 bp, Homo sapien
ttggcttgaacttgaatatctggtc

SEQ ID NO: 1894084 - DNA, 25 bp, Homo sapien
cttggcttgaacttgaatatctggt

SEQ ID NO: 1894085 - DNA, 25 bp, Homo sapien
gatagaactgttaccttaaaagcat

SEQ ID NO: 1894086 - DNA, 25 bp, Homo sapien
taaacaaagactaatcactatgagt

SEQ ID NO: 1894087 - DNA, 25 bp, Homo sapien
cgaaacgagatagaactgttacctt

SEQ ID NO: 1894088 - DNA, 25 bp, Homo sapien
tgagacatacctttaccagaagaag

SEQ ID NO: 1894089 - DNA, 25 bp, Homo sapien
aggtggagactgcagcgagtcaaga

SEQ ID NO: 1894090 - DNA, 25 bp, Homo sapien
gcttgaatcctggaggtggagactg

SEQ ID NO: 1894091 - DNA, 25 bp, Homo sapien
gtggagactgcagcgagtcaagatt

SEQ ID NO: 1894092 - DNA, 25 bp, Homo sapien
ggagactgcagcgagtcaagattgt

SEQ ID NO: 1894093 - DNA, 25 bp, Homo sapien
catgagatcagttctctctagggaa

SEQ ID NO: 1894094 - DNA, 25 bp, Homo sapien
cattaaagagatggacaatgccatt

SEQ ID NO: 1894095 - DNA, 25 bp, Homo sapien
caaacacaaagcaactgattcgtga

SEQ ID NO: 1894096 - DNA, 25 bp, Homo sapien
gatgtctggcaagctaaatgtctcc

SEQ ID NO: 1894097 - DNA, 25 bp, Homo sapien
tctggtggaagattcaacactctgg

SEQ ID NO: 1894098 - DNA, 25 bp, Homo sapien
tggtggaagattcaacactctggaa

SEQ ID NO: 1894099 - DNA, 25 bp, Homo sapien
ttctggtggaagattcaacactctg

SEQ ID NO: 1894100 - DNA, 25 bp, Homo sapien
ctggtggaagattcaacactctgga

SEQ ID NO: 1894101 - DNA, 25 bp, Homo sapien
tgtgagagtgccaatgtcttcatcc

SEQ ID NO: 1894102 - DNA, 25 bp, Homo sapien
cggtgatgctgtctaaatttgaaac

SEQ ID NO: 1894103 - DNA, 25 bp, Homo sapien
tagaggttgtgcagatatggttact

SEQ ID NO: 1894104 - DNA, 25 bp, Homo sapien
tcttcatcccttatggtagacggtg

SEQ ID NO: 1894105 - DNA, 25 bp, Homo sapien
aacacttatgtttcgggcactttgc

SEQ ID NO: 1894106 - DNA, 25 bp, Homo sapien
tggagttcctttagccaccacacca

SEQ ID NO: 1894107 - DNA, 25 bp, Homo sapien
gagatcacaacagagatactcaggt

SEQ ID NO: 1894108 - DNA, 25 bp, Homo sapien
tgaactcattcagtgaagctgcata

SEQ ID NO: 1894109 - DNA, 25 bp, Homo sapien
ctgatcccagccgacgctccacagg

SEQ ID NO: 1894110 - DNA, 25 bp, Homo sapien
tcccagccgacgctccacaggactt

SEQ ID NO: 1894111 - DNA, 25 bp, Homo sapien
tcaaagtttacttttcaccgagaca

SEQ ID NO: 1894112 - DNA, 25 bp, Homo sapien
tttcaccgagacaaactgatcccag

SEQ ID NO: 1894113 - DNA, 25 bp, Homo sapien
tggcccgcagcggtgaaaggccttt

SEQ ID NO: 1894114 - DNA, 25 bp, Homo sapien
ccagctgactgaggactggcccgca

SEQ ID NO: 1894115 - DNA, 25 bp, Homo sapien
agggactcctctgcgcgctccggga

SEQ ID NO: 1894116 - DNA, 25 bp, Homo sapien
agctgactgaggactggcccgcagc

SEQ ID NO: 1894117 - DNA, 25 bp, Homo sapien
tggcaagcaatagcgcggcgaaagc

SEQ ID NO: 1894118 - DNA, 25 bp, Homo sapien
caatagcgcggcgaaagccgcacgc

SEQ ID NO: 1894119 - DNA, 25 bp, Homo sapien
ctggcaagcaatagcgcggcgaaag

SEQ ID NO: 1894120 - DNA, 25 bp, Homo sapien
tagcgcggcgaaagccgcacgccat

SEQ ID NO: 1894121 - DNA, 25 bp, Homo sapien
acctctacggaagtgcgccgcagtc

SEQ ID NO: 1894122 - DNA, 25 bp, Homo sapien
tccacctctacggaagtgcgccgca

SEQ ID NO: 1894123 - DNA, 25 bp, Homo sapien
gaagtgcgccgcagtccgccagttc

SEQ ID NO: 1894124 - DNA, 25 bp, Homo sapien
cagtccgccagttccggcctcgccc

SEQ ID NO: 1894125 - DNA, 25 bp, Homo sapien
gcgcgcgggaaatcccgagtgcatc

SEQ ID NO: 1894126 - DNA, 25 bp, Homo sapien
gaatacgcagagtcagtaagaccat

SEQ ID NO: 1894127 - DNA, 25 bp, Homo sapien
tcccgagtgcatctggaatacgcag

SEQ ID NO: 1894128 - DNA, 25 bp, Homo sapien
gcatctggaatacgcagagtcagta

SEQ ID NO: 1894129 - DNA, 25 bp, Homo sapien
gaagccgaggttacgtaggcatccc

SEQ ID NO: 1894130 - DNA, 25 bp, Homo sapien
ccctttgaagaagggatgaagccga

SEQ ID NO: 1894131 - DNA, 25 bp, Homo sapien
tggccgatgcgcactgtggctctac

SEQ ID NO: 1894132 - DNA, 25 bp, Homo sapien
tcgatgtctaaggtatgtggtggcc

SEQ ID NO: 1894133 - DNA, 25 bp, Homo sapien
gttgtatagacatgcctaccattag

SEQ ID NO: 1894134 - DNA, 25 bp, Homo sapien
gtatagacatgcctaccattagagt

SEQ ID NO: 1894135 - DNA, 25 bp, Homo sapien
tatatagttgtatagacatgcctac

SEQ ID NO: 1894136 - DNA, 25 bp, Homo sapien
gacatgcctaccattagagtttatc

SEQ ID NO: 1894137 - DNA, 25 bp, Homo sapien
tgccacataagtgctaggagaaagc

SEQ ID NO: 1894138 - DNA, 25 bp, Homo sapien
gagaagactagcactcttgccacat

SEQ ID NO: 1894139 - DNA, 25 bp, Homo sapien
gggcattagcctagtgtgtcaggaa

SEQ ID NO: 1894140 - DNA, 25 bp, Homo sapien
tcttgatctatactgctgaggtagg

SEQ ID NO: 1894141 - DNA, 25 bp, Homo sapien
tacaatgtccaactacacataaaat

SEQ ID NO: 1894142 - DNA, 25 bp, Homo sapien
tattaaccatatggtgctagaataa

SEQ ID NO: 1894143 - DNA, 25 bp, Homo sapien
tataatttctccaggtctacactag

SEQ ID NO: 1894144 - DNA, 25 bp, Homo sapien
gatatttataaaggcgtactccaaa

SEQ ID NO: 1894145 - DNA, 25 bp, Homo sapien
taaccccatctgtacattaagaaac

SEQ ID NO: 1894146 - DNA, 25 bp, Homo sapien
tattcaaatactaaccccatctgta

SEQ ID NO: 1894147 - DNA, 25 bp, Homo sapien
ttcaaatactaaccccatctgtaca

SEQ ID NO: 1894148 - DNA, 25 bp, Homo sapien
ctttattcaaatactaaccccatct

SEQ ID NO: 1894149 - DNA, 25 bp, Homo sapien
ccagtactacaagggcagtaaaaca

SEQ ID NO: 1894150 - DNA, 25 bp, Homo sapien
tcttccaactaaattccagtactac

SEQ ID NO: 1894151 - DNA, 25 bp, Homo sapien
tacagctcggttgtagtgcacaatt

SEQ ID NO: 1894152 - DNA, 25 bp, Homo sapien
taaaattagtaactggttacagctc

SEQ ID NO: 1894153 - DNA, 25 bp, Homo sapien
ctagaataccagctttaatcctttt

SEQ ID NO: 1894154 - DNA, 25 bp, Homo sapien
taatgatacagcaaaatgaggccac

SEQ ID NO: 1894155 - DNA, 25 bp, Homo sapien
tttatttacacaaccagtgaagggc

SEQ ID NO: 1894156 - DNA, 25 bp, Homo sapien
agttgctgctgcctaagagtggttg

SEQ ID NO: 1894157 - DNA, 25 bp, Homo sapien
aaggaacaaggcagcccacaaatgc

SEQ ID NO: 1894158 - DNA, 25 bp, Homo sapien
ggcagcccacaaatgcaggatacgt

SEQ ID NO: 1894159 - DNA, 25 bp, Homo sapien
aacaaggcagcccacaaatgcagga

SEQ ID NO: 1894160 - DNA, 25 bp, Homo sapien
agcccacaaatgcaggatacgtgat

SEQ ID NO: 1894161 - DNA, 25 bp, Homo sapien
gggtgagaaaaagaaaattagtgca

SEQ ID NO: 1894162 - DNA, 25 bp, Homo sapien
aaaagaaaattagtgcaaaatacag

SEQ ID NO: 1894163 - DNA, 25 bp, Homo sapien
tgagaaaaagaaaattagtgcaaaa

SEQ ID NO: 1894164 - DNA, 25 bp, Homo sapien
aagaaaattagtgcaaaatacaggt

SEQ ID NO: 1894165 - DNA, 25 bp, Homo sapien
gctgttctccatatcgtcgcattat

SEQ ID NO: 1894166 - DNA, 25 bp, Homo sapien
ttatttgatcatgcgtaaacttcac

SEQ ID NO: 1894167 - DNA, 25 bp, Homo sapien
tgcgtaaacttcacaaacgcatcat

SEQ ID NO: 1894168 - DNA, 25 bp, Homo sapien
tatcgtcgcattatttgatcatgcg

SEQ ID NO: 1894169 - DNA, 25 bp, Homo sapien
aaaatgccttattagagccagataa

SEQ ID NO: 1894170 - DNA, 25 bp, Homo sapien
gtaaaatgccttattagagccagat

SEQ ID NO: 1894171 - DNA, 25 bp, Homo sapien
aaatgccttattagagccagataaa

SEQ ID NO: 1894172 - DNA, 25 bp, Homo sapien
taaaatgccttattagagccagata

SEQ ID NO: 1894173 - DNA, 25 bp, Homo sapien
gatcatcccaacctgccgtagagta

SEQ ID NO: 1894174 - DNA, 25 bp, Homo sapien
caacaaacgttcacagatcatccca

SEQ ID NO: 1894175 - DNA, 25 bp, Homo sapien
ccgtagagtaaataagggctgttct

SEQ ID NO: 1894176 - DNA, 25 bp, Homo sapien
tcttctcgaactttctcttcacgtt

SEQ ID NO: 1894177 - DNA, 25 bp, Homo sapien
tggctgtgcatcagaagtacaacac

SEQ ID NO: 1894178 - DNA, 25 bp, Homo sapien
tcttctgcattcgtttatactcttg

SEQ ID NO: 1894179 - DNA, 25 bp, Homo sapien
gaaactcgtttctaaatgtcttctc

SEQ ID NO: 1894180 - DNA, 25 bp, Homo sapien
cacggatctgtctgttggaaactcg

SEQ ID NO: 1894181 - DNA, 25 bp, Homo sapien
gagggaccgtgtctttatgacacac

SEQ ID NO: 1894182 - DNA, 25 bp, Homo sapien
tccatagctcccaagttaacaggtt

SEQ ID NO: 1894183 - DNA, 25 bp, Homo sapien
caatgtgaaactacatccctagaag

SEQ ID NO: 1894184 - DNA, 25 bp, Homo sapien
gatagagtggagtgtagccttaaca

SEQ ID NO: 1894185 - DNA, 25 bp, Homo sapien
cgtggcaaccatagtgaatagtacc

SEQ ID NO: 1894186 - DNA, 25 bp, Homo sapien
caaagacccgattagtatgtactac

SEQ ID NO: 1894187 - DNA, 25 bp, Homo sapien
atagtaccttccacacctaaagagg

SEQ ID NO: 1894188 - DNA, 25 bp, Homo sapien
tagccatgtttagcctatgtgttgc

SEQ ID NO: 1894189 - DNA, 25 bp, Homo sapien
aaacctcactgctgacaccccacat

SEQ ID NO: 1894190 - DNA, 25 bp, Homo sapien
ttataaacctcactgctgacacccc

SEQ ID NO: 1894191 - DNA, 25 bp, Homo sapien
cccaggggtattataaacctcactg

SEQ ID NO: 1894192 - DNA, 25 bp, Homo sapien
ggtattataaacctcactgctgaca

SEQ ID NO: 1894193 - DNA, 25 bp, Homo sapien
gatagctgtgtgttaaggagtccct

SEQ ID NO: 1894194 - DNA, 25 bp, Homo sapien
gaatagtcaagtcaaacttcctggg

SEQ ID NO: 1894195 - DNA, 25 bp, Homo sapien
gggaagctctttgatacctgcacaa

SEQ ID NO: 1894196 - DNA, 25 bp, Homo sapien
gaaagcaagcttaacttccgtcagc

SEQ ID NO: 1894197 - DNA, 25 bp, Homo sapien
cactacaactctaaaacagtatgtc

SEQ ID NO: 1894198 - DNA, 25 bp, Homo sapien
tccgtaaaaactcactacaactcta

SEQ ID NO: 1894199 - DNA, 25 bp, Homo sapien
cagtatgtccttaaattagaccaaa

SEQ ID NO: 1894200 - DNA, 25 bp, Homo sapien
cacagtttagtaaggtcattaaata

SEQ ID NO: 1894201 - DNA, 25 bp, Homo sapien
aaaagcctatcctaggattgtgcca

SEQ ID NO: 1894202 - DNA, 25 bp, Homo sapien
tattctcaaggctaggttgttttcc

SEQ ID NO: 1894203 - DNA, 25 bp, Homo sapien
caaggtctagacttatagtgtgatc

SEQ ID NO: 1894204 - DNA, 25 bp, Homo sapien
cagtctctctcaggaaatgtttcaa

SEQ ID NO: 1894205 - DNA, 25 bp, Homo sapien
cgggaagagcattttctttgttgtt

SEQ ID NO: 1894206 - DNA, 25 bp, Homo sapien
aagagcattttctttgttgttgacc

SEQ ID NO: 1894207 - DNA, 25 bp, Homo sapien
tcgggaagagcattttctttgttgt

SEQ ID NO: 1894208 - DNA, 25 bp, Homo sapien
agcattttctttgttgttgaccctg

SEQ ID NO: 1894209 - DNA, 25 bp, Homo sapien
tagggaaacaggtcttgactcagcc

SEQ ID NO: 1894210 - DNA, 25 bp, Homo sapien
tcttgtgggtgattaatgacaggcc

SEQ ID NO: 1894211 - DNA, 25 bp, Homo sapien
ctcagccaaagtggcgttcttgtgg

SEQ ID NO: 1894212 - DNA, 25 bp, Homo sapien
tagatctcgccctagtgacatccat

SEQ ID NO: 1894213 - DNA, 25 bp, Homo sapien
cccagtcccagagttaatagctgca

SEQ ID NO: 1894214 - DNA, 25 bp, Homo sapien
aaatcagccgtgtctgaactgaagg

SEQ ID NO: 1894215 - DNA, 25 bp, Homo sapien
tacggcaagcacacatccagattgg

SEQ ID NO: 1894216 - DNA, 25 bp, Homo sapien
aatagctgcaaccaatcgattacgg

SEQ ID NO: 1894217 - DNA, 25 bp, Homo sapien
gagtccttttcagagtggctccgca

SEQ ID NO: 1894218 - DNA, 25 bp, Homo sapien
cagcgggtcgaaatccagagtcctt

SEQ ID NO: 1894219 - DNA, 25 bp, Homo sapien
gacaatggcgcacatcgcctgcgct

SEQ ID NO: 1894220 - DNA, 25 bp, Homo sapien
ttcggagatacttctgcggcgaggc

SEQ ID NO: 1894221 - DNA, 25 bp, Homo sapien
cagtagcttgcgagcggcgatcgat

SEQ ID NO: 1894222 - DNA, 25 bp, Homo sapien
taatacgcccgagtacggtcagtag

SEQ ID NO: 1894223 - DNA, 25 bp, Homo sapien
gaggcgcttctgtgctgagactaga

SEQ ID NO: 1894224 - DNA, 25 bp, Homo sapien
agattgcgaggtagctgccgcagca

SEQ ID NO: 1894225 - DNA, 25 bp, Homo sapien
ggatcttattttccagtccaaacca

SEQ ID NO: 1894226 - DNA, 25 bp, Homo sapien
tggggatcttattttccagtccaaa

SEQ ID NO: 1894227 - DNA, 25 bp, Homo sapien
tcaaatgtgcttggggatcttattt

SEQ ID NO: 1894228 - DNA, 25 bp, Homo sapien
cagtccaaaccaactggaagaatat

SEQ ID NO: 1894229 - DNA, 25 bp, Homo sapien
actgcagctgtctgttccgttgtct

SEQ ID NO: 1894230 - DNA, 25 bp, Homo sapien
gcctgactcagaattggtgtcactg

SEQ ID NO: 1894231 - DNA, 25 bp, Homo sapien
tccgttgtcttgcttaagtccaagc

SEQ ID NO: 1894232 - DNA, 25 bp, Homo sapien
gtcaggctctcgttccctcttgtgc

SEQ ID NO: 1894233 - DNA, 25 bp, Homo sapien
cctgggtttcattttagtctcatct

SEQ ID NO: 1894234 - DNA, 25 bp, Homo sapien
ttttagtctcatctgtgagctggcc

SEQ ID NO: 1894235 - DNA, 25 bp, Homo sapien
acctgggtttcattttagtctcatc

SEQ ID NO: 1894236 - DNA, 25 bp, Homo sapien
ttagtctcatctgtgagctggcctt

SEQ ID NO: 1894237 - DNA, 25 bp, Homo sapien
ttctatgaggtaaaaacgttcaaca

SEQ ID NO: 1894238 - DNA, 25 bp, Homo sapien
taatatactggacttcataatctcc

SEQ ID NO: 1894239 - DNA, 25 bp, Homo sapien
caaagtaagcacatgtacatagttt

SEQ ID NO: 1894240 - DNA, 25 bp, Homo sapien
cactacacccggctgtacgtagttt

SEQ ID NO: 1894241 - DNA, 25 bp, Homo sapien
gctttgttttatctgcggtgtcaca

SEQ ID NO: 1894242 - DNA, 25 bp, Homo sapien
ctttgctggagagccgaagcctctt

SEQ ID NO: 1894243 - DNA, 25 bp, Homo sapien
ggctctttggatcagcgacattaat

SEQ ID NO: 1894244 - DNA, 25 bp, Homo sapien
ccattgggtccaagtgcagcagaac

SEQ ID NO: 1894245 - DNA, 25 bp, Homo sapien
tgtgagggtgcctttggctgctgtg

SEQ ID NO: 1894246 - DNA, 25 bp, Homo sapien
tctgggacttgatgtgagggtgcct

SEQ ID NO: 1894247 - DNA, 25 bp, Homo sapien
tcatcattatcaagttctgggactt

SEQ ID NO: 1894248 - DNA, 25 bp, Homo sapien
aaccctccactcaaggccaacatca

SEQ ID NO: 1894249 - DNA, 25 bp, Homo sapien
aaaatctgagaaagttgggaccaga

SEQ ID NO: 1894250 - DNA, 25 bp, Homo sapien
gtaaaatctgagaaagttgggacca

SEQ ID NO: 1894251 - DNA, 25 bp, Homo sapien
atctgagaaagttgggaccagaagt

SEQ ID NO: 1894252 - DNA, 25 bp, Homo sapien
aatctgagaaagttgggaccagaag

SEQ ID NO: 1894253 - DNA, 25 bp, Homo sapien
tatgactgttgtaaagggttgctgg

SEQ ID NO: 1894254 - DNA, 25 bp, Homo sapien
gattggaaaccaagaaccagtggcc

SEQ ID NO: 1894255 - DNA, 25 bp, Homo sapien
gggttgctggcgattcttcatgtat

SEQ ID NO: 1894256 - DNA, 25 bp, Homo sapien
ggaggtggaccgatacagacactga

SEQ ID NO: 1894257 - DNA, 25 bp, Homo sapien
cataaacacgatggttgtgggcagt

SEQ ID NO: 1894258 - DNA, 25 bp, Homo sapien
ggtgctctcaactatctcactatca

SEQ ID NO: 1894259 - DNA, 25 bp, Homo sapien
tatctcactatcataaacacgatgg

SEQ ID NO: 1894260 - DNA, 25 bp, Homo sapien
ttaatgtctggtgctctcaactatc

SEQ ID NO: 1894261 - DNA, 25 bp, Homo sapien
cacttttgttagcttaaggtccatc

SEQ ID NO: 1894262 - DNA, 25 bp, Homo sapien
tattgagacacttttgttagcttaa

SEQ ID NO: 1894263 - DNA, 25 bp, Homo sapien
gagacacttttgttagcttaaggtc

SEQ ID NO: 1894264 - DNA, 25 bp, Homo sapien
tgttagcttaaggtccatctcccac

SEQ ID NO: 1894265 - DNA, 25 bp, Homo sapien
gctttgcaggagacagtgctaatgt

SEQ ID NO: 1894266 - DNA, 25 bp, Homo sapien
tcttgatatccttatgagaggccat

SEQ ID NO: 1894267 - DNA, 25 bp, Homo sapien
ctttattaaccaggagctttgcagg

SEQ ID NO: 1894268 - DNA, 25 bp, Homo sapien
tcaactatcccatcaaacaagggtt

SEQ ID NO: 1894269 - DNA, 25 bp, Homo sapien
tggagcctttcatcccatgagttaa

SEQ ID NO: 1894270 - DNA, 25 bp, Homo sapien
tcatcccatgagttaagatgggagg

SEQ ID NO: 1894271 - DNA, 25 bp, Homo sapien
tgggaaacagaagctctgtggagcc

SEQ ID NO: 1894272 - DNA, 25 bp, Homo sapien
gaaacagaagctctgtggagccttt

SEQ ID NO: 1894273 - DNA, 25 bp, Homo sapien
gaggactgaacattgtccagggcac

SEQ ID NO: 1894274 - DNA, 25 bp, Homo sapien
cctgaggactgaacattgtccaggg

SEQ ID NO: 1894275 - DNA, 25 bp, Homo sapien
gactgaacattgtccagggcacatt

SEQ ID NO: 1894276 - DNA, 25 bp, Homo sapien
tgaggactgaacattgtccagggca

SEQ ID NO: 1894277 - DNA, 25 bp, Homo sapien
ctaaggtgggctgggtgttgttgac

SEQ ID NO: 1894278 - DNA, 25 bp, Homo sapien
aaggtgggctgggtgttgttgacca

SEQ ID NO: 1894279 - DNA, 25 bp, Homo sapien
taaggtgggctgggtgttgttgacc

SEQ ID NO: 1894280 - DNA, 25 bp, Homo sapien
aggtgggctgggtgttgttgaccat

SEQ ID NO: 1894281 - DNA, 25 bp, Homo sapien
tgtcacaaagtcacaatgagaggaa

SEQ ID NO: 1894282 - DNA, 25 bp, Homo sapien
catgttttaaacgtagtactgtgca

SEQ ID NO: 1894283 - DNA, 25 bp, Homo sapien
tgggacaacctcattaatgtcttct

SEQ ID NO: 1894284 - DNA, 25 bp, Homo sapien
tatttaagagctttgactgtccctc

SEQ ID NO: 1894285 - DNA, 25 bp, Homo sapien
tcagtgtatgttaccaggctcttgt

SEQ ID NO: 1894286 - DNA, 25 bp, Homo sapien
aggagtttgatctgtaactgactgt

SEQ ID NO: 1894287 - DNA, 25 bp, Homo sapien
ctagtcacatgcagtagtgagatgg

SEQ ID NO: 1894288 - DNA, 25 bp, Homo sapien
actgactgtgaacagccaattgaga

SEQ ID NO: 1894289 - DNA, 25 bp, Homo sapien
tgagatgggaggaaagagtagaaaa

SEQ ID NO: 1894290 - DNA, 25 bp, Homo sapien
ctggaggaggaagcttcctgtcacc

SEQ ID NO: 1894291 - DNA, 25 bp, Homo sapien
tggaggaggaagcttcctgtcacca

SEQ ID NO: 1894292 - DNA, 25 bp, Homo sapien
caaagtcgtcagaatcaagtttcat

SEQ ID NO: 1894293 - DNA, 25 bp, Homo sapien
cagccaacatagaattctctggaga

SEQ ID NO: 1894294 - DNA, 25 bp, Homo sapien
aaagtgctggtgaaactttcaagaa

SEQ ID NO: 1894295 - DNA, 25 bp, Homo sapien
aaccagtcttagcagcagctggcgg

SEQ ID NO: 1894296 - DNA, 25 bp, Homo sapien
ctagtcaacaaccaggtggtttgct

SEQ ID NO: 1894297 - DNA, 25 bp, Homo sapien
taagattctctactaatttactact

SEQ ID NO: 1894298 - DNA, 25 bp, Homo sapien
tttactgtggctctgtacagccata

SEQ ID NO: 1894299 - DNA, 25 bp, Homo sapien
cagtatcagagtgataaattgtttg

SEQ ID NO: 1894300 - DNA, 25 bp, Homo sapien
taaccactctcgattcagtatcaga

SEQ ID NO: 1894301 - DNA, 25 bp, Homo sapien
gaagtgtaggagatttatacctaaa

SEQ ID NO: 1894302 - DNA, 25 bp, Homo sapien
ctgttgtggagatcaggaagtgtag

SEQ ID NO: 1894303 - DNA, 25 bp, Homo sapien
aagaaggaacaatagtctcgaattc

SEQ ID NO: 1894304 - DNA, 25 bp, Homo sapien
caggaagtgtaggagatttatacct

SEQ ID NO: 1894305 - DNA, 25 bp, Homo sapien
tgcattgtaattcaagtcttcactg

SEQ ID NO: 1894306 - DNA, 25 bp, Homo sapien
gattatacttcggtctggcctttga

SEQ ID NO: 1894307 - DNA, 25 bp, Homo sapien
tgaaggactaagctgtgcattgtaa

SEQ ID NO: 1894308 - DNA, 25 bp, Homo sapien
taatgatactctatggtgcttggac

SEQ ID NO: 1894309 - DNA, 25 bp, Homo sapien
ctttgagttttgtacttagatttgc

SEQ ID NO: 1894310 - DNA, 25 bp, Homo sapien
aaaccacattgaacaacccaatctc

SEQ ID NO: 1894311 - DNA, 25 bp, Homo sapien
tgtctttgagttttgtacttagatt

SEQ ID NO: 1894312 - DNA, 25 bp, Homo sapien
tctttgagttttgtacttagatttg

SEQ ID NO: 1894313 - DNA, 25 bp, Homo sapien
tgtatgaaatacagacccagggctt

SEQ ID NO: 1894314 - DNA, 25 bp, Homo sapien
taccacagaagcacattgtatgaaa

SEQ ID NO: 1894315 - DNA, 25 bp, Homo sapien
gggcttcttattataccacaaggaa

SEQ ID NO: 1894316 - DNA, 25 bp, Homo sapien
gttgctgaagcaggtaagaagactg

SEQ ID NO: 1894317 - DNA, 25 bp, Homo sapien
cagtgtgtactggtttgtatgtgta

SEQ ID NO: 1894318 - DNA, 25 bp, Homo sapien
tagagtgacactttcaaatgtggga

SEQ ID NO: 1894319 - DNA, 25 bp, Homo sapien
ggttgtagactctcgggccttcctg

SEQ ID NO: 1894320 - DNA, 25 bp, Homo sapien
cctaggctgtccattcgatttagag

SEQ ID NO: 1894321 - DNA, 25 bp, Homo sapien
gtgacatgaaggtgccatgaactca

SEQ ID NO: 1894322 - DNA, 25 bp, Homo sapien
tgtgacatgaaggtgccatgaactc

SEQ ID NO: 1894323 - DNA, 25 bp, Homo sapien
ctgtgacatgaaggtgccatgaact

SEQ ID NO: 1894324 - DNA, 25 bp, Homo sapien
tgacatgaaggtgccatgaactcac

SEQ ID NO: 1894325 - DNA, 25 bp, Homo sapien
tagtgaagggtgcaagttagtctcc

SEQ ID NO: 1894326 - DNA, 25 bp, Homo sapien
gtggtaactctctcttgggactcag

SEQ ID NO: 1894327 - DNA, 25 bp, Homo sapien
ggactcagagtcgacgttttaagga

SEQ ID NO: 1894328 - DNA, 25 bp, Homo sapien
actgcttgctccagggaatagtgaa

SEQ ID NO: 1894329 - DNA, 25 bp, Homo sapien
ggaaatagttactggagcctagaag

SEQ ID NO: 1894330 - DNA, 25 bp, Homo sapien
cgataattttgtgatctagggtcat

SEQ ID NO: 1894331 - DNA, 25 bp, Homo sapien
gagtcattcgtttacttttggtgaa

SEQ ID NO: 1894332 - DNA, 25 bp, Homo sapien
tatttatagccattggagtcattcg

SEQ ID NO: 1894333 - DNA, 25 bp, Homo sapien
actgcatactgcttgtcttcccctg

SEQ ID NO: 1894334 - DNA, 25 bp, Homo sapien
cacttcccagtgaaagtttttatct

SEQ ID NO: 1894335 - DNA, 25 bp, Homo sapien
ttactggactgcatactgcttgtct

SEQ ID NO: 1894336 - DNA, 25 bp, Homo sapien
ccctgccacttcccagtgaaagttt

SEQ ID NO: 1894337 - DNA, 25 bp, Homo sapien
tcagcaacagcgagtagaagaccag

SEQ ID NO: 1894338 - DNA, 25 bp, Homo sapien
gaattgcacaggatctaagggccac

SEQ ID NO: 1894339 - DNA, 25 bp, Homo sapien
tgtaaatgagcaagcaacagggtgc

SEQ ID NO: 1894340 - DNA, 25 bp, Homo sapien
caaagagcttcttcctaacagggaa

SEQ ID NO: 1894341 - DNA, 25 bp, Homo sapien
aacctgctgttaactgaaggaaggc

SEQ ID NO: 1894342 - DNA, 25 bp, Homo sapien
cttgatggtagcatgtagacatacg

SEQ ID NO: 1894343 - DNA, 25 bp, Homo sapien
tgttctggctcaaacgatgttgctt

SEQ ID NO: 1894344 - DNA, 25 bp, Homo sapien
cagaagagtgtgatatatagtcgta

SEQ ID NO: 1894345 - DNA, 25 bp, Homo sapien
cacatcatatgacttgacatcttca

SEQ ID NO: 1894346 - DNA, 25 bp, Homo sapien
tgggtccacacatcatatgacttga

SEQ ID NO: 1894347 - DNA, 25 bp, Homo sapien
gctcttgggcttaattctttggcgg

SEQ ID NO: 1894348 - DNA, 25 bp, Homo sapien
aattctttggcggacatgcttattc

SEQ ID NO: 1894349 - DNA, 25 bp, Homo sapien
aagacatccatatgctgctacttgg

SEQ ID NO: 1894350 - DNA, 25 bp, Homo sapien
gacggcgtgactacagcaacatgct

SEQ ID NO: 1894351 - DNA, 25 bp, Homo sapien
cacacgatgagatatatttgagcaa

SEQ ID NO: 1894352 - DNA, 25 bp, Homo sapien
gattggattgcagcccagacggcgt

SEQ ID NO: 1894353 - DNA, 25 bp, Homo sapien
tatttgcgagaaacaccatcaacaa

SEQ ID NO: 1894354 - DNA, 25 bp, Homo sapien
gcccacagtgttgcatttgtaaccc

SEQ ID NO: 1894355 - DNA, 25 bp, Homo sapien
agtaacctcagaattatagacaggg

SEQ ID NO: 1894356 - DNA, 25 bp, Homo sapien
tttgtccagaagtaacctcagaatt

SEQ ID NO: 1894357 - DNA, 25 bp, Homo sapien
agatgccctcagttgcagtttgttt

SEQ ID NO: 1894358 - DNA, 25 bp, Homo sapien
ctctgggttctagggttccagtgat

SEQ ID NO: 1894359 - DNA, 25 bp, Homo sapien
ctagggttccagtgatcccgggcca

SEQ ID NO: 1894360 - DNA, 25 bp, Homo sapien
gccctcagttgcagtttgtttctct

SEQ ID NO: 1894361 - DNA, 25 bp, Homo sapien
aactgaccagttgtgagagttgctc

SEQ ID NO: 1894362 - DNA, 25 bp, Homo sapien
caaagtgtgcattttaagggacagc

SEQ ID NO: 1894363 - DNA, 25 bp, Homo sapien
tgaccctctggtgcagtaaacactg

SEQ ID NO: 1894364 - DNA, 25 bp, Homo sapien
gatgccgcctttttatgccctgcag

SEQ ID NO: 1894365 - DNA, 25 bp, Homo sapien
taacgtccctcataatcttgtcaag

SEQ ID NO: 1894366 - DNA, 25 bp, Homo sapien
aagccagagtgtatgcaagttcact

SEQ ID NO: 1894367 - DNA, 25 bp, Homo sapien
tgacataaatgttcccgagacttct

SEQ ID NO: 1894368 - DNA, 25 bp, Homo sapien
taagcctcaaagtatggcaccctat

SEQ ID NO: 1894369 - DNA, 25 bp, Homo sapien
tgtgccatatacattgtgactgtcc

SEQ ID NO: 1894370 - DNA, 25 bp, Homo sapien
tttttaatacatcagctttgctgag

SEQ ID NO: 1894371 - DNA, 25 bp, Homo sapien
gaataacctttagtgcaggacttct

SEQ ID NO: 1894372 - DNA, 25 bp, Homo sapien
tagtggtcaaacgaggtgaataacc

SEQ ID NO: 1894373 - DNA, 25 bp, Homo sapien
cacttcgaccttctactgttgcaga

SEQ ID NO: 1894374 - DNA, 25 bp, Homo sapien
gttgcagacccaccgcgatggcttt

SEQ ID NO: 1894375 - DNA, 25 bp, Homo sapien
ggatccaggtaaataaagccaagcc

SEQ ID NO: 1894376 - DNA, 25 bp, Homo sapien
aatacacttttgaggactgtccctg

SEQ ID NO: 1894377 - DNA, 25 bp, Homo sapien
gatgctctcaaacgcctagtctgcc

SEQ ID NO: 1894378 - DNA, 25 bp, Homo sapien
gatggttccctgaaagatgccgttt

SEQ ID NO: 1894379 - DNA, 25 bp, Homo sapien
ggaagatcccctttcccagacagct

SEQ ID NO: 1894380 - DNA, 25 bp, Homo sapien
agctgctgccggaaaaggtgattgt

SEQ ID NO: 1894381 - DNA, 25 bp, Homo sapien
gagcattagattgcagcagggatac

SEQ ID NO: 1894382 - DNA, 25 bp, Homo sapien
ttcatcttgagcattagattgcagc

SEQ ID NO: 1894383 - DNA, 25 bp, Homo sapien
cttgttttgactagagaacacccca

SEQ ID NO: 1894384 - DNA, 25 bp, Homo sapien
ttgactagagaacaccccaaggctg

SEQ ID NO: 1894385 - DNA, 25 bp, Homo sapien
atctgcctgcatcttttttctgcac

SEQ ID NO: 1894386 - DNA, 25 bp, Homo sapien
gtccacttgctcctgcagactctcc

SEQ ID NO: 1894387 - DNA, 25 bp, Homo sapien
gcagactctcccatctgcctgcatc

SEQ ID NO: 1894388 - DNA, 25 bp, Homo sapien
ctttgtgtccacttgctcctgcaga

SEQ ID NO: 1894389 - DNA, 25 bp, Homo sapien
ttccaggtaactttggacaatagac

SEQ ID NO: 1894390 - DNA, 25 bp, Homo sapien
tcttcatggtaatctagaattttta

SEQ ID NO: 1894391 - DNA, 25 bp, Homo sapien
tttggacaatagacatgatgagatg

SEQ ID NO: 1894392 - DNA, 25 bp, Homo sapien
ggtaactttggacaatagacatgat

SEQ ID NO: 1894393 - DNA, 25 bp, Homo sapien
ctgtgggcttaatacattgtaaata

SEQ ID NO: 1894394 - DNA, 25 bp, Homo sapien
atactgtgggcttaatacattgtaa

SEQ ID NO: 1894395 - DNA, 25 bp, Homo sapien
aataaaatatactgtgggcttaata

SEQ ID NO: 1894396 - DNA, 25 bp, Homo sapien
gaagaagtactactttgctatagta

SEQ ID NO: 1894397 - DNA, 25 bp, Homo sapien
tcctgccttagagcgtgaaccgtaa

SEQ ID NO: 1894398 - DNA, 25 bp, Homo sapien
taactatagcgctactcatccaggg

SEQ ID NO: 1894399 - DNA, 25 bp, Homo sapien
catggtcagggcaagtacatcatcc

SEQ ID NO: 1894400 - DNA, 25 bp, Homo sapien
gaggcagccctacttgtgcaaatga

SEQ ID NO: 1894401 - DNA, 25 bp, Homo sapien
catacaccatgattgcaagcagagg

SEQ ID NO: 1894402 - DNA, 25 bp, Homo sapien
tgcgcagtgccttcacaagagggaa

SEQ ID NO: 1894403 - DNA, 25 bp, Homo sapien
ttcacggtggagttcagcaggcaga

SEQ ID NO: 1894404 - DNA, 25 bp, Homo sapien
aacatgctccggaaagcgtgtcgca

SEQ ID NO: 1894405 - DNA, 25 bp, Homo sapien
tgcggctatctttgcggtggaacac

SEQ ID NO: 1894406 - DNA, 25 bp, Homo sapien
taacctaatgtccatgcgggcttgg

SEQ ID NO: 1894407 - DNA, 25 bp, Homo sapien
aacagaagcagtacgctggtgaccc

SEQ ID NO: 1894408 - DNA, 25 bp, Homo sapien
gcagcacggcgatcacaatggctat

SEQ ID NO: 1894409 - DNA, 25 bp, Homo sapien
gtaatgttcacctggtctgctggga

SEQ ID NO: 1894410 - DNA, 25 bp, Homo sapien
acgagagagacttgttgtaaaattc

SEQ ID NO: 1894411 - DNA, 25 bp, Homo sapien
taccctaatttggatgccatgtcac

SEQ ID NO: 1894412 - DNA, 25 bp, Homo sapien
ggttgtctcccgcagtcatcttctc

SEQ ID NO: 1894413 - DNA, 25 bp, Homo sapien
ctttgatgtcttcgtactgaatgtc

SEQ ID NO: 1894414 - DNA, 25 bp, Homo sapien
tcatttgagcccacgtacaggaggt

SEQ ID NO: 1894415 - DNA, 25 bp, Homo sapien
tgaatgtcatttgagcccacgtaca

SEQ ID NO: 1894416 - DNA, 25 bp, Homo sapien
gatggtgcggaaggtggtatctgca

SEQ ID NO: 1894417 - DNA, 25 bp, Homo sapien
gctgagctcaaaatgactgagaaag

SEQ ID NO: 1894418 - DNA, 25 bp, Homo sapien
taggctgagctcaaaatgactgaga

SEQ ID NO: 1894419 - DNA, 25 bp, Homo sapien
ttgattaggctgagctcaaaatgac

SEQ ID NO: 1894420 - DNA, 25 bp, Homo sapien
ctgagaaagtgacccacagggggca

SEQ ID NO: 1894421 - DNA, 25 bp, Homo sapien
ttctgaccctcaggctcttgtcctt

SEQ ID NO: 1894422 - DNA, 25 bp, Homo sapien
tgaccctcaggctcttgtccttaat

SEQ ID NO: 1894423 - DNA, 25 bp, Homo sapien
attctgaccctcaggctcttgtcct

SEQ ID NO: 1894424 - DNA, 25 bp, Homo sapien
ctgaccctcaggctcttgtccttaa

SEQ ID NO: 1894425 - DNA, 25 bp, Homo sapien
cactaatgtgacaggtaagccagaa

SEQ ID NO: 1894426 - DNA, 25 bp, Homo sapien
ttttacaagatcactgtagcctgtg

SEQ ID NO: 1894427 - DNA, 25 bp, Homo sapien
ctgccaaactgagggccccgaatct

SEQ ID NO: 1894428 - DNA, 25 bp, Homo sapien
tagctcctccatggttgtgtaaccc

SEQ ID NO: 1894429 - DNA, 25 bp, Homo sapien
atggtccttgcacatccacaaacct

SEQ ID NO: 1894430 - DNA, 25 bp, Homo sapien
acttttgcctttcgactcccactca

SEQ ID NO: 1894431 - DNA, 25 bp, Homo sapien
cttttgcctttcgactcccactcat

SEQ ID NO: 1894432 - DNA, 25 bp, Homo sapien
tggccctgagtgacttgctgctctt

SEQ ID NO: 1894433 - DNA, 25 bp, Homo sapien
tgacttgctgctctttgaatacacc

SEQ ID NO: 1894434 - DNA, 25 bp, Homo sapien
tgctgctctttgaatacaccgtcat

SEQ ID NO: 1894435 - DNA, 25 bp, Homo sapien
cttgctgctctttgaatacaccgtc

SEQ ID NO: 1894436 - DNA, 25 bp, Homo sapien
gagttcccacagaaatgttcacctg

SEQ ID NO: 1894437 - DNA, 25 bp, Homo sapien
aaaccagagtttgagcctccatctc

SEQ ID NO: 1894438 - DNA, 25 bp, Homo sapien
gttcacctgaacctaataaaatggc

SEQ ID NO: 1894439 - DNA, 25 bp, Homo sapien
tatgcaatagacatttagcctgaaa

SEQ ID NO: 1894440 - DNA, 25 bp, Homo sapien
gaacttaggacattgacttatacga

SEQ ID NO: 1894441 - DNA, 25 bp, Homo sapien
caacttcattgggttaggaactacg

SEQ ID NO: 1894442 - DNA, 25 bp, Homo sapien
ggaactacgtggtgatgatgctaag

SEQ ID NO: 1894443 - DNA, 25 bp, Homo sapien
tattggtaacactcaattggctctc

SEQ ID NO: 1894444 - DNA, 25 bp, Homo sapien
cctaactctgtgatgaaaaagaaca

SEQ ID NO: 1894445 - DNA, 25 bp, Homo sapien
taatcactactggtcctaactctgt

SEQ ID NO: 1894446 - DNA, 25 bp, Homo sapien
ccaagagatgttaaaagtaagaggg

SEQ ID NO: 1894447 - DNA, 25 bp, Homo sapien
tattgtagggactaaaatggaatat

SEQ ID NO: 1894448 - DNA, 25 bp, Homo sapien
tgccacaaatacagtggttcttttt

SEQ ID NO: 1894449 - DNA, 25 bp, Homo sapien
cacactgatcctgcagctaggctta

SEQ ID NO: 1894450 - DNA, 25 bp, Homo sapien
gatcctgcagctaggcttattagag

SEQ ID NO: 1894451 - DNA, 25 bp, Homo sapien
cagctaggcttattagagaagagca

SEQ ID NO: 1894452 - DNA, 25 bp, Homo sapien
cagccaagagcgctcctcgcctgga

SEQ ID NO: 1894453 - DNA, 25 bp, Homo sapien
gccaagagcgctcctcgcctggagt

SEQ ID NO: 1894454 - DNA, 25 bp, Homo sapien
ccaagagcgctcctcgcctggagtg

SEQ ID NO: 1894455 - DNA, 25 bp, Homo sapien
ctcagccaagagcgctcctcgcctg

SEQ ID NO: 1894456 - DNA, 25 bp, Homo sapien
tatttgagaggtgatccgtttatga

SEQ ID NO: 1894457 - DNA, 25 bp, Homo sapien
gctagttctgagttaaacggttcca

SEQ ID NO: 1894458 - DNA, 25 bp, Homo sapien
cgtttatgatttgtaagccttaaca

SEQ ID NO: 1894459 - DNA, 25 bp, Homo sapien
ttaactttagtcatctaacagctag

SEQ ID NO: 1894460 - DNA, 25 bp, Homo sapien
taagtaaacaccgacgcacgattcg

SEQ ID NO: 1894461 - DNA, 25 bp, Homo sapien
gagatcgatgtatttccctgggaag

SEQ ID NO: 1894462 - DNA, 25 bp, Homo sapien
tatttccaaacgcaactctgccagg

SEQ ID NO: 1894463 - DNA, 25 bp, Homo sapien
tagtcagtttctaggcttgcagcag

SEQ ID NO: 1894464 - DNA, 25 bp, Homo sapien
cagtcccatttatgaagcgcggtcc

SEQ ID NO: 1894465 - DNA, 25 bp, Homo sapien
gctggttgtccgctagaacgaaata

SEQ ID NO: 1894466 - DNA, 25 bp, Homo sapien
gcggtcagcaagtcagtccgtccga

SEQ ID NO: 1894467 - DNA, 25 bp, Homo sapien
gcgcggtcccatcacgtgttaatga

SEQ ID NO: 1894468 - DNA, 25 bp, Homo sapien
ttcgctacctggctgcggtcgcgcg

SEQ ID NO: 1894469 - DNA, 25 bp, Homo sapien
cggccacctgtcctccgccctcggg

SEQ ID NO: 1894470 - DNA, 25 bp, Homo sapien
cgagccgttcgctacctggctgcgg

SEQ ID NO: 1894471 - DNA, 25 bp, Homo sapien
gccgttcgctacctggctgcggtcg

SEQ ID NO: 1894472 - DNA, 25 bp, Homo sapien
cctggtttggaaagcgacatcactc

SEQ ID NO: 1894473 - DNA, 25 bp, Homo sapien
catctagtagtgactccagccgaga

SEQ ID NO: 1894474 - DNA, 25 bp, Homo sapien
gaaagatgctcttcggtaccttgga

SEQ ID NO: 1894475 - DNA, 25 bp, Homo sapien
aaacctaagatcgttgatgggccag

SEQ ID NO: 1894476 - DNA, 25 bp, Homo sapien
tctgaaatgcctgctcgtgagttgc

SEQ ID NO: 1894477 - DNA, 25 bp, Homo sapien
gtgagttgctccaccagcgatgcga

SEQ ID NO: 1894478 - DNA, 25 bp, Homo sapien
gccatccacagcgtaaggtctgaaa

SEQ ID NO: 1894479 - DNA, 25 bp, Homo sapien
tgcgagcaactgaaagaaactcctg

SEQ ID NO: 1894480 - DNA, 25 bp, Homo sapien
ttcaccttctcaccttctttcatta

SEQ ID NO: 1894481 - DNA, 25 bp, Homo sapien
tgtcgttcaccttctcaccttcttt

SEQ ID NO: 1894482 - DNA, 25 bp, Homo sapien
gttgtcgttcaccttctcaccttct

SEQ ID NO: 1894483 - DNA, 25 bp, Homo sapien
taaatccagatctttaacatcccag

SEQ ID NO: 1894484 - DNA, 25 bp, Homo sapien
aaagccaatggggtgtgcggtttat

SEQ ID NO: 1894485 - DNA, 25 bp, Homo sapien
tttggatgtcttgtctggcttgttg

SEQ ID NO: 1894486 - DNA, 25 bp, Homo sapien
ctttggatgtcttgtctggcttgtt

SEQ ID NO: 1894487 - DNA, 25 bp, Homo sapien
gtgtgcggtttatctttggatgtct

SEQ ID NO: 1894488 - DNA, 25 bp, Homo sapien
gaatcttagagcttcgacagcactg

SEQ ID NO: 1894489 - DNA, 25 bp, Homo sapien
tgctgtggtctaagtgttggcgtcc

SEQ ID NO: 1894490 - DNA, 25 bp, Homo sapien
tataaaacaggttgaagggagctac

SEQ ID NO: 1894491 - DNA, 25 bp, Homo sapien
tagtagcccaagtggatgaagacat

SEQ ID NO: 1894492 - DNA, 25 bp, Homo sapien
actctttaactttgaactcagtcat

SEQ ID NO: 1894493 - DNA, 25 bp, Homo sapien
aactcagtcatttgtttatccatca

SEQ ID NO: 1894494 - DNA, 25 bp, Homo sapien
taactttgaactcagtcatttgttt

SEQ ID NO: 1894495 - DNA, 25 bp, Homo sapien
tatccatcaaatcttcattatcaga

SEQ ID NO: 1894496 - DNA, 25 bp, Homo sapien
ctgtccatgtcaggttgggtttgca

SEQ ID NO: 1894497 - DNA, 25 bp, Homo sapien
tttgcaggcggcttgcagtccaggc

SEQ ID NO: 1894498 - DNA, 25 bp, Homo sapien
gctctttgtgtaaggttagttccat

SEQ ID NO: 1894499 - DNA, 25 bp, Homo sapien
cattatcagtgtggcattcgctgtc

SEQ ID NO: 1894500 - DNA, 25 bp, Homo sapien
ccctaccctgaggtgtgggttcaga

SEQ ID NO: 1894501 - DNA, 25 bp, Homo sapien
tgcccttccactcccatgtgggctt

SEQ ID NO: 1894502 - DNA, 25 bp, Homo sapien
aagggcacttcccatattagtaaag

SEQ ID NO: 1894503 - DNA, 25 bp, Homo sapien
gttcagaggtgttggagtgctgccc

SEQ ID NO: 1894504 - DNA, 25 bp, Homo sapien
ggactacttatggatcctgggaccc

SEQ ID NO: 1894505 - DNA, 25 bp, Homo sapien
tcagtgaactttgagaactatggca

SEQ ID NO: 1894506 - DNA, 25 bp, Homo sapien
ccaactctgtttgctgggacttaca

SEQ ID NO: 1894507 - DNA, 25 bp, Homo sapien
gatactatgctatttgccaagaggc

SEQ ID NO: 1894508 - DNA, 25 bp, Homo sapien
ttccatccattcgatcagtctgccg

SEQ ID NO: 1894509 - DNA, 25 bp, Homo sapien
caatttctgctaggcattccatcca

SEQ ID NO: 1894510 - DNA, 25 bp, Homo sapien
agattgtgcttagtgtgacctggac

SEQ ID NO: 1894511 - DNA, 25 bp, Homo sapien
ttgaaccaaggtagagagactggac

SEQ ID NO: 1894512 - DNA, 25 bp, Homo sapien
taccctggcaaggttagaagcctaa

SEQ ID NO: 1894513 - DNA, 25 bp, Homo sapien
cataatggcttattctcacttgggt

SEQ ID NO: 1894514 - DNA, 25 bp, Homo sapien
gtaacttttgcaacagaccatggag

SEQ ID NO: 1894515 - DNA, 25 bp, Homo sapien
cccgtgattaggttatgatctggta

SEQ ID NO: 1894516 - DNA, 25 bp, Homo sapien
tgtggtggacgatggaggggccgga

SEQ ID NO: 1894517 - DNA, 25 bp, Homo sapien
tggtggacgatggaggggccggact

SEQ ID NO: 1894518 - DNA, 25 bp, Homo sapien
gtggacgatggaggggccggactcg

SEQ ID NO: 1894519 - DNA, 25 bp, Homo sapien
ggacgatggaggggccggactcgtc

SEQ ID NO: 1894520 - DNA, 25 bp, Homo sapien
caatccacacggagtgcttgcactg

SEQ ID NO: 1894521 - DNA, 25 bp, Homo sapien
atggagtagccaatccacacggagt

SEQ ID NO: 1894522 - DNA, 25 bp, Homo sapien
aatccacacggagtgcttgcactgg

SEQ ID NO: 1894523 - DNA, 25 bp, Homo sapien
gagtagccaatccacacggagtgct

SEQ ID NO: 1894524 - DNA, 25 bp, Homo sapien
gctcgaattccagggcgacgtagca

SEQ ID NO: 1894525 - DNA, 25 bp, Homo sapien
gatgacctggtcatctggcagctca

SEQ ID NO: 1894526 - DNA, 25 bp, Homo sapien
tcctgctcgaattccagggcgacgt

SEQ ID NO: 1894527 - DNA, 25 bp, Homo sapien
atgacctggtcatctggcagctcat

SEQ ID NO: 1894528 - DNA, 25 bp, Homo sapien
gagggcgtacccctcctagatggac

SEQ ID NO: 1894529 - DNA, 25 bp, Homo sapien
ggcgtacccctcctagatggacaga

SEQ ID NO: 1894530 - DNA, 25 bp, Homo sapien
tacccctcctagatggacagagtgt

SEQ ID NO: 1894531 - DNA, 25 bp, Homo sapien
gcgtacccctcctagatggacagag

SEQ ID NO: 1894532 - DNA, 25 bp, Homo sapien
ggggtgcatcacgatgccagtggta

SEQ ID NO: 1894533 - DNA, 25 bp, Homo sapien
cggggtgcatcacgatgccagtggt

SEQ ID NO: 1894534 - DNA, 25 bp, Homo sapien
gggtgcatcacgatgccagtggtac

SEQ ID NO: 1894535 - DNA, 25 bp, Homo sapien
aactgggtcgtcttctcatggttga

SEQ ID NO: 1894536 - DNA, 25 bp, Homo sapien
gatgaactgggtcgtcttctcatgg

SEQ ID NO: 1894537 - DNA, 25 bp, Homo sapien
ctgggtcgtcttctcatggttgagc

SEQ ID NO: 1894538 - DNA, 25 bp, Homo sapien
acatgatgaactgggtcgtcttctc

SEQ ID NO: 1894539 - DNA, 25 bp, Homo sapien
gttgtcccagttcgtgacgttgcca

SEQ ID NO: 1894540 - DNA, 25 bp, Homo sapien
tgtcccagttcgtgacgttgccatg

SEQ ID NO: 1894541 - DNA, 25 bp, Homo sapien
acgcacctcgttgtaggtgtggtgc

SEQ ID NO: 1894542 - DNA, 25 bp, Homo sapien
catgttgtcccagttcgtgacgttg

SEQ ID NO: 1894543 - DNA, 25 bp, Homo sapien
ctggtgcctagggtgccccacaatg

SEQ ID NO: 1894544 - DNA, 25 bp, Homo sapien
cctggggagccttgcgcatgctgga

SEQ ID NO: 1894545 - DNA, 25 bp, Homo sapien
ggtgcctagggtgccccacaatgga

SEQ ID NO: 1894546 - DNA, 25 bp, Homo sapien
tgctggagcagttgtcgacgacgac

SEQ ID NO: 1894547 - DNA, 25 bp, Homo sapien
aattttgactgagatctttggagaa

SEQ ID NO: 1894548 - DNA, 25 bp, Homo sapien
cttggactgagaagagcagctaaat

SEQ ID NO: 1894549 - DNA, 25 bp, Homo sapien
aggcttggactgagaagagcagcta

SEQ ID NO: 1894550 - DNA, 25 bp, Homo sapien
gagcagctaaattttgactgagatc

SEQ ID NO: 1894551 - DNA, 25 bp, Homo sapien
tgcttcaggtgaggaactgatggta

SEQ ID NO: 1894552 - DNA, 25 bp, Homo sapien
caggtgaggaactgatggtaaaagt

SEQ ID NO: 1894553 - DNA, 25 bp, Homo sapien
tgatggtaaaagttatctgtaggac

SEQ ID NO: 1894554 - DNA, 25 bp, Homo sapien
gaggaactgatggtaaaagttatct

SEQ ID NO: 1894555 - DNA, 25 bp, Homo sapien
ggcgcgtccatcctaatgattcagg

SEQ ID NO: 1894556 - DNA, 25 bp, Homo sapien
gattctgttgatggcgcgtccatcc

SEQ ID NO: 1894557 - DNA, 25 bp, Homo sapien
cctaatgattcaggagctcagtttg

SEQ ID NO: 1894558 - DNA, 25 bp, Homo sapien
tgttgatggcgcgtccatcctaatg

SEQ ID NO: 1894559 - DNA, 25 bp, Homo sapien
tacctaagcagcagggatgacaacg

SEQ ID NO: 1894560 - DNA, 25 bp, Homo sapien
ttgtagttgcatcccctagtctgtg

SEQ ID NO: 1894561 - DNA, 25 bp, Homo sapien
aagagggtgttgcatccactgcgcc

SEQ ID NO: 1894562 - DNA, 25 bp, Homo sapien
tgtagtacagccgtggaaaacccac

SEQ ID NO: 1894563 - DNA, 25 bp, Homo sapien
gtccaagtctaggtctggatggagc

SEQ ID NO: 1894564 - DNA, 25 bp, Homo sapien
gaggcaagcaaacaactgcctattg

SEQ ID NO: 1894565 - DNA, 25 bp, Homo sapien
gaattaggtatacaagatgatcacc

SEQ ID NO: 1894566 - DNA, 25 bp, Homo sapien
ctgtccgagtctgaagatgaagcca

SEQ ID NO: 1894567 - DNA, 25 bp, Homo sapien
taatcattgaggatctgatctcatc

SEQ ID NO: 1894568 - DNA, 25 bp, Homo sapien
tattgtctaatcattgaggatctga

SEQ ID NO: 1894569 - DNA, 25 bp, Homo sapien
ctgatctcatcaattcgctgacttt

SEQ ID NO: 1894570 - DNA, 25 bp, Homo sapien
caattcgctgactttcattatatcc

SEQ ID NO: 1894571 - DNA, 25 bp, Homo sapien
ggccaggaagatgtgaaacacagca

SEQ ID NO: 1894572 - DNA, 25 bp, Homo sapien
gctatggctggcataggggtggcca

SEQ ID NO: 1894573 - DNA, 25 bp, Homo sapien
cacagcatgagcacctctgcattca

SEQ ID NO: 1894574 - DNA, 25 bp, Homo sapien
tcatgttgtcagcaggcagctggca

SEQ ID NO: 1894575 - DNA, 25 bp, Homo sapien
ttgtggcatctccaaggctcagatt

SEQ ID NO: 1894576 - DNA, 25 bp, Homo sapien
tggcatctccaaggctcagattcat

SEQ ID NO: 1894577 - DNA, 25 bp, Homo sapien
cttgtggcatctccaaggctcagat

SEQ ID NO: 1894578 - DNA, 25 bp, Homo sapien
tgtggcatctccaaggctcagattc

SEQ ID NO: 1894579 - DNA, 25 bp, Homo sapien
tgtttctgttagaaattgcacagcc

SEQ ID NO: 1894580 - DNA, 25 bp, Homo sapien
tactatcaaacaacacctggaaggc

SEQ ID NO: 1894581 - DNA, 25 bp, Homo sapien
tacgtgagtggctccaaaagtttga

SEQ ID NO: 1894582 - DNA, 25 bp, Homo sapien
aaattgcacagccaaggcagtaggg

SEQ ID NO: 1894583 - DNA, 25 bp, Homo sapien
tcccttagaagtatggtcacagaaa

SEQ ID NO: 1894584 - DNA, 25 bp, Homo sapien
gaaaaagctcttgatggcctgtggg

SEQ ID NO: 1894585 - DNA, 25 bp, Homo sapien
caagtctgagaaaagggcttgccaa

SEQ ID NO: 1894586 - DNA, 25 bp, Homo sapien
tgccaagaagccgaacttaaggaga

SEQ ID NO: 1894587 - DNA, 25 bp, Homo sapien
catccttgacctgctgaggtgttaa

SEQ ID NO: 1894588 - DNA, 25 bp, Homo sapien
agatacccagaagtttccaccccag

SEQ ID NO: 1894589 - DNA, 25 bp, Homo sapien
cccaggaagccaattctgtgtgctc

SEQ ID NO: 1894590 - DNA, 25 bp, Homo sapien
cttcctggtgagatacccagaagtt

SEQ ID NO: 1894591 - DNA, 25 bp, Homo sapien
tcagagcagagcatgaaatgctggc

SEQ ID NO: 1894592 - DNA, 25 bp, Homo sapien
cagagcagagcatgaaatgctggcc

SEQ ID NO: 1894593 - DNA, 25 bp, Homo sapien
ctgtcagagcagagcatgaaatgct

SEQ ID NO: 1894594 - DNA, 25 bp, Homo sapien
taataacaacacctctgctcaaagt

SEQ ID NO: 1894595 - DNA, 25 bp, Homo sapien
agtcatcctcagctaagtttcttag

SEQ ID NO: 1894596 - DNA, 25 bp, Homo sapien
tcttagctgtctgaaatatttgcga

SEQ ID NO: 1894597 - DNA, 25 bp, Homo sapien
caggcactggagttgacgcatcact

SEQ ID NO: 1894598 - DNA, 25 bp, Homo sapien
ttctcctacatgaatcaccaaacaa

SEQ ID NO: 1894599 - DNA, 25 bp, Homo sapien
cttccgtctgctccctccaatttct

SEQ ID NO: 1894600 - DNA, 25 bp, Homo sapien
tcctacatgaatcaccaaacaaaac

SEQ ID NO: 1894601 - DNA, 25 bp, Homo sapien
ccaatttctcctacatgaatcacca

SEQ ID NO: 1894602 - DNA, 25 bp, Homo sapien
atccagacagacatgacacaaatac

SEQ ID NO: 1894603 - DNA, 25 bp, Homo sapien
tccagacagacatgacacaaataca

SEQ ID NO: 1894604 - DNA, 25 bp, Homo sapien
cacaaatacacatttgctactgaca

SEQ ID NO: 1894605 - DNA, 25 bp, Homo sapien
gaagacccataaccaactgccttcc

SEQ ID NO: 1894606 - DNA, 25 bp, Homo sapien
tgaagacccataaccaactgccttc

SEQ ID NO: 1894607 - DNA, 25 bp, Homo sapien
atgaagacccataaccaactgcctt

SEQ ID NO: 1894608 - DNA, 25 bp, Homo sapien
aatgaagacccataaccaactgcct

SEQ ID NO: 1894609 - DNA, 25 bp, Homo sapien
tttggtgcagttcagctgttttgca

SEQ ID NO: 1894610 - DNA, 25 bp, Homo sapien
gtactaccatttattgccaatagtg

SEQ ID NO: 1894611 - DNA, 25 bp, Homo sapien
gttttgcaagacatagtactaccat

SEQ ID NO: 1894612 - DNA, 25 bp, Homo sapien
agagcctcggcgaatgagaaactgc

SEQ ID NO: 1894613 - DNA, 25 bp, Homo sapien
tacgtcaagtctatgaaccatccag

SEQ ID NO: 1894614 - DNA, 25 bp, Homo sapien
ccaggtttattctcctctaaagtca

SEQ ID NO: 1894615 - DNA, 25 bp, Homo sapien
cttcataaggtgagtgactgagtcc

SEQ ID NO: 1894616 - DNA, 25 bp, Homo sapien
gctctgtttgtatgacttcataagg

SEQ ID NO: 1894617 - DNA, 25 bp, Homo sapien
gtatccgcaacctcgtctctcggca

SEQ ID NO: 1894618 - DNA, 25 bp, Homo sapien
aacctcgtctctcggcactgaacca

SEQ ID NO: 1894619 - DNA, 25 bp, Homo sapien
cgcaacctcgtctctcggcactgaa

SEQ ID NO: 1894620 - DNA, 25 bp, Homo sapien
ctgtatccgcaacctcgtctctcgg

SEQ ID NO: 1894621 - DNA, 25 bp, Homo sapien
ttccctccatctgagaacactctca

SEQ ID NO: 1894622 - DNA, 25 bp, Homo sapien
tcttggttagactctacagtctgtt

SEQ ID NO: 1894623 - DNA, 25 bp, Homo sapien
tcttcttggttagactctacagtct

SEQ ID NO: 1894624 - DNA, 25 bp, Homo sapien
attctcttcttggttagactctaca

SEQ ID NO: 1894625 - DNA, 25 bp, Homo sapien
tatggtgataactccatttctgttt

SEQ ID NO: 1894626 - DNA, 25 bp, Homo sapien
ttatggtgataactccatttctgtt

SEQ ID NO: 1894627 - DNA, 25 bp, Homo sapien
aactgaggatcaagaaaaccattct

SEQ ID NO: 1894628 - DNA, 25 bp, Homo sapien
tggtgataactccatttctgtttgt

SEQ ID NO: 1894629 - DNA, 25 bp, Homo sapien
actgtgacacgagtgaatctgctga

SEQ ID NO: 1894630 - DNA, 25 bp, Homo sapien
ttcatactgtgacacgagtgaatct

SEQ ID NO: 1894631 - DNA, 25 bp, Homo sapien
tcttcttgacatcttctaagtatct

SEQ ID NO: 1894632 - DNA, 25 bp, Homo sapien
agtgaatctgctgataccgggcctc

SEQ ID NO: 1894633 - DNA, 25 bp, Homo sapien
cagcaagcaacgcagatgcagataa

SEQ ID NO: 1894634 - DNA, 25 bp, Homo sapien
gaaggagtttaacaccgtgcttctc

SEQ ID NO: 1894635 - DNA, 25 bp, Homo sapien
cagggacatattctctcagcaagca

SEQ ID NO: 1894636 - DNA, 25 bp, Homo sapien
caacactttctgaggtaaggcttct

SEQ ID NO: 1894637 - DNA, 25 bp, Homo sapien
cttggacaatgtcattatgaggaag

SEQ ID NO: 1894638 - DNA, 25 bp, Homo sapien
ggacaatgtcattatgaggaagcag

SEQ ID NO: 1894639 - DNA, 25 bp, Homo sapien
tggacaatgtcattatgaggaagca

SEQ ID NO: 1894640 - DNA, 25 bp, Homo sapien
ttggacaatgtcattatgaggaagc

SEQ ID NO: 1894641 - DNA, 25 bp, Homo sapien
catttgttgactagagattgagatt

SEQ ID NO: 1894642 - DNA, 25 bp, Homo sapien
cagtcctcaactaggacaaaccaag

SEQ ID NO: 1894643 - DNA, 25 bp, Homo sapien
ttccctcttatgaaagaaggtcagg

SEQ ID NO: 1894644 - DNA, 25 bp, Homo sapien
tgctgagcttcactgacaagttcca

SEQ ID NO: 1894645 - DNA, 25 bp, Homo sapien
agaagagaaagcaggttggagaacc

SEQ ID NO: 1894646 - DNA, 25 bp, Homo sapien
aggttggagaaccagttgtgggagg

SEQ ID NO: 1894647 - DNA, 25 bp, Homo sapien
cacagacagttaggggtagagtgga

SEQ ID NO: 1894648 - DNA, 25 bp, Homo sapien
gtgggaggcacagacagttaggggt

SEQ ID NO: 1894649 - DNA, 25 bp, Homo sapien
tgtccatggtaggtactgcctctga

SEQ ID NO: 1894650 - DNA, 25 bp, Homo sapien
caaaagccgctgtccatggtaggta

SEQ ID NO: 1894651 - DNA, 25 bp, Homo sapien
gcttgaggtgtcatgcttcagtttc

SEQ ID NO: 1894652 - DNA, 25 bp, Homo sapien
ccagtgtgggcagccgctgacaaaa

SEQ ID NO: 1894653 - DNA, 25 bp, Homo sapien
tctgcgagcctgatccatgtctaag

SEQ ID NO: 1894654 - DNA, 25 bp, Homo sapien
tagctcctgttgtgtgccatgggct

SEQ ID NO: 1894655 - DNA, 25 bp, Homo sapien
tcaatgtcttgaagtcagtcaccgc

SEQ ID NO: 1894656 - DNA, 25 bp, Homo sapien
tcagtcaccgccttatttattccgt

SEQ ID NO: 1894657 - DNA, 25 bp, Homo sapien
tggtttcctctgtgaccaaagcagc

SEQ ID NO: 1894658 - DNA, 25 bp, Homo sapien
tcttgtcactaaacgtcagtccgtg

SEQ ID NO: 1894659 - DNA, 25 bp, Homo sapien
ctcataggctaattgggaggtgcca

SEQ ID NO: 1894660 - DNA, 25 bp, Homo sapien
gccagagaggccattaaccaccctt

SEQ ID NO: 1894661 - DNA, 25 bp, Homo sapien
gggacagctctgagctataatcgat

SEQ ID NO: 1894662 - DNA, 25 bp, Homo sapien
tataatcgattcctgtgcccaacac

SEQ ID NO: 1894663 - DNA, 25 bp, Homo sapien
tgcccaacaccggccagactgtgaa

SEQ ID NO: 1894664 - DNA, 25 bp, Homo sapien
gagctataatcgattcctgtgccca

SEQ ID NO: 1894665 - DNA, 25 bp, Homo sapien
ttcatatcgtggaacccggaagccc

SEQ ID NO: 1894666 - DNA, 25 bp, Homo sapien
aactccactggtgaaccggcgttca

SEQ ID NO: 1894667 - DNA, 25 bp, Homo sapien
ccggcgttcagccttgatgacagaa

SEQ ID NO: 1894668 - DNA, 25 bp, Homo sapien
gacagaaattgatttgggaccacag

SEQ ID NO: 1894669 - DNA, 25 bp, Homo sapien
gagaacacagatgctccaaccactg

SEQ ID NO: 1894670 - DNA, 25 bp, Homo sapien
tgagaacacagatgctccaaccact

SEQ ID NO: 1894671 - DNA, 25 bp, Homo sapien
cttgagaacacagatgctccaacca

SEQ ID NO: 1894672 - DNA, 25 bp, Homo sapien
gaacacagatgctccaaccactgac

SEQ ID NO: 1894673 - DNA, 25 bp, Homo sapien
tttgtgaagcggcttgagaattcat

SEQ ID NO: 1894674 - DNA, 25 bp, Homo sapien
atgcatctgggtgatagaagaaggc

SEQ ID NO: 1894675 - DNA, 25 bp, Homo sapien
cagctcgtggcagaaatgcatctgg

SEQ ID NO: 1894676 - DNA, 25 bp, Homo sapien
cctcagctcgtggcagaaatgcatc

SEQ ID NO: 1894677 - DNA, 25 bp, Homo sapien
cgaagggcatcccactcttcctgga

SEQ ID NO: 1894678 - DNA, 25 bp, Homo sapien
catggtgctgcaggattctcttcag

SEQ ID NO: 1894679 - DNA, 25 bp, Homo sapien
gatctcctagacaaacaagtttggc

SEQ ID NO: 1894680 - DNA, 25 bp, Homo sapien
aagtttggccggcacccatggtgct

SEQ ID NO: 1894681 - DNA, 25 bp, Homo sapien
cagctgacgacatttaagacctgag

SEQ ID NO: 1894682 - DNA, 25 bp, Homo sapien
taagtatgtctatttaagatgtcag

SEQ ID NO: 1894683 - DNA, 25 bp, Homo sapien
gagctgaacttatgtaacgtttcca

SEQ ID NO: 1894684 - DNA, 25 bp, Homo sapien
taacgtttccaataataagtatgtc

SEQ ID NO: 1894685 - DNA, 25 bp, Homo sapien
tctcttccgtctggctgacggatgt

SEQ ID NO: 1894686 - DNA, 25 bp, Homo sapien
tcttccgtctggctgacggatgtca

SEQ ID NO: 1894687 - DNA, 25 bp, Homo sapien
ttctcttccgtctggctgacggatg

SEQ ID NO: 1894688 - DNA, 25 bp, Homo sapien
cttccgtctggctgacggatgtcat

SEQ ID NO: 1894689 - DNA, 25 bp, Homo sapien
cttttagtttaggcaaagcagaggg

SEQ ID NO: 1894690 - DNA, 25 bp, Homo sapien
caataccaccactgtccttgtcact

SEQ ID NO: 1894691 - DNA, 25 bp, Homo sapien
ccaagtccacttgtcaataccacca

SEQ ID NO: 1894692 - DNA, 25 bp, Homo sapien
ataccaccactgtccttgtcactga

SEQ ID NO: 1894693 - DNA, 25 bp, Homo sapien
aagtccacttgtcaataccaccact

SEQ ID NO: 1894694 - DNA, 25 bp, Homo sapien
aggagccacaccctgaactctgctg

SEQ ID NO: 1894695 - DNA, 25 bp, Homo sapien
gaactctgctgtagatggcctcata

SEQ ID NO: 1894696 - DNA, 25 bp, Homo sapien
ggtctggcacacgagcccccaatag

SEQ ID NO: 1894697 - DNA, 25 bp, Homo sapien
tagatggcctcatactctgtactca

SEQ ID NO: 1894698 - DNA, 25 bp, Homo sapien
tgatagcccaaagactgggcatcag

SEQ ID NO: 1894699 - DNA, 25 bp, Homo sapien
gactgggcatcaggcctttgccttc

SEQ ID NO: 1894700 - DNA, 25 bp, Homo sapien
ctgatagcccaaagactgggcatca

SEQ ID NO: 1894701 - DNA, 25 bp, Homo sapien
ccaaagactgggcatcaggcctttg

SEQ ID NO: 1894702 - DNA, 25 bp, Homo sapien
tccatttggaagtcataaaactcgt

SEQ ID NO: 1894703 - DNA, 25 bp, Homo sapien
acacctccagagtggccatccccat

SEQ ID NO: 1894704 - DNA, 25 bp, Homo sapien
tggaagtcataaaactcgtaatggc

SEQ ID NO: 1894705 - DNA, 25 bp, Homo sapien
taaaactcgtaatggccaccaacac

SEQ ID NO: 1894706 - DNA, 25 bp, Homo sapien
gggctctacgtttgtatggtccagg

SEQ ID NO: 1894707 - DNA, 25 bp, Homo sapien
cagcaaaacttgcttagggtagaag

SEQ ID NO: 1894708 - DNA, 25 bp, Homo sapien
tgctcctcacatgcattcctgatgc

SEQ ID NO: 1894709 - DNA, 25 bp, Homo sapien
tcactgaggaggtgttcatgctcct

SEQ ID NO: 1894710 - DNA, 25 bp, Homo sapien
tggctgatgcaagtacacggtctct

SEQ ID NO: 1894711 - DNA, 25 bp, Homo sapien
gagctattcagtttcaaggccaaga

SEQ ID NO: 1894712 - DNA, 25 bp, Homo sapien
ggtctctcccgagaaaggtccacag

SEQ ID NO: 1894713 - DNA, 25 bp, Homo sapien
caaatgcagaagtaacgagcaggac

SEQ ID NO: 1894714 - DNA, 25 bp, Homo sapien
gctttgcttgtcctgaaaggctgca

SEQ ID NO: 1894715 - DNA, 25 bp, Homo sapien
gaatgtaggtcagccattccatctg

SEQ ID NO: 1894716 - DNA, 25 bp, Homo sapien
ggtgtgcaccaacattccaactcca

SEQ ID NO: 1894717 - DNA, 25 bp, Homo sapien
tggtaacttgccacttgccaagaat

SEQ ID NO: 1894718 - DNA, 25 bp, Homo sapien
tgcctataatttcccctgaaaggag

SEQ ID NO: 1894719 - DNA, 25 bp, Homo sapien
aatgggcagtgtcacgccttgcagc

SEQ ID NO: 1894720 - DNA, 25 bp, Homo sapien
tgcccagtagctctatgagcccctt

SEQ ID NO: 1894721 - DNA, 25 bp, Homo sapien
gcagtgtcacgccttgcagctggcc

SEQ ID NO: 1894722 - DNA, 25 bp, Homo sapien
gcagctggcctcgtccagtctccat

SEQ ID NO: 1894723 - DNA, 25 bp, Homo sapien
tgagaacattaaacttccccttcat

SEQ ID NO: 1894724 - DNA, 25 bp, Homo sapien
gaagggacacaagagtatcaccagt

SEQ ID NO: 1894725 - DNA, 25 bp, Homo sapien
gatgtgatgccagcaatagaaggga

SEQ ID NO: 1894726 - DNA, 25 bp, Homo sapien
tagttcacgacttcatcatttcaga

SEQ ID NO: 1894727 - DNA, 25 bp, Homo sapien
ctacaaagccagatggattacactg

SEQ ID NO: 1894728 - DNA, 25 bp, Homo sapien
atcagtagttttattacaatacgca

SEQ ID NO: 1894729 - DNA, 25 bp, Homo sapien
cagtagttttattacaatacgcact

SEQ ID NO: 1894730 - DNA, 25 bp, Homo sapien
tcagtagttttattacaatacgcac

SEQ ID NO: 1894731 - DNA, 25 bp, Homo sapien
aatcagtagttttattacaatacgc

SEQ ID NO: 1894732 - DNA, 25 bp, Homo sapien
aaatgtaaccatccacgcagtagag

SEQ ID NO: 1894733 - DNA, 25 bp, Homo sapien
tgctttcgtatctgcaaaagggctc

SEQ ID NO: 1894734 - DNA, 25 bp, Homo sapien
cgcagtagagtcatccacacctttt

SEQ ID NO: 1894735 - DNA, 25 bp, Homo sapien
tttccacaggctcggagggaaagca

SEQ ID NO: 1894736 - DNA, 25 bp, Homo sapien
gaacagtttatcaacaatggcagac

SEQ ID NO: 1894737 - DNA, 25 bp, Homo sapien
ttaatccctttagcgcccaaatgtg

SEQ ID NO: 1894738 - DNA, 25 bp, Homo sapien
tatgtccatatagaaatcccgtcag

SEQ ID NO: 1894739 - DNA, 25 bp, Homo sapien
tacattacatgacttgggaacaacg

SEQ ID NO: 1894740 - DNA, 25 bp, Homo sapien
ggagaacaacacataaaggacctgg

SEQ ID NO: 1894741 - DNA, 25 bp, Homo sapien
ccactgaggtaaagcagaagtagcc

SEQ ID NO: 1894742 - DNA, 25 bp, Homo sapien
ttaagtccacgatgtattgcagcac

SEQ ID NO: 1894743 - DNA, 25 bp, Homo sapien
tacaggctggctacgataactttct

SEQ ID NO: 1894744 - DNA, 25 bp, Homo sapien
gatgttttcgcttctgtccttgaga

SEQ ID NO: 1894745 - DNA, 25 bp, Homo sapien
tccttggtgacagggtttgagatgc

SEQ ID NO: 1894746 - DNA, 25 bp, Homo sapien
gaagctgcagtacatctgtcgatga

SEQ ID NO: 1894747 - DNA, 25 bp, Homo sapien
ggcatgagctccgtgtcagggtcca

SEQ ID NO: 1894748 - DNA, 25 bp, Homo sapien
ttctataattttgttgtcatactgt

SEQ ID NO: 1894749 - DNA, 25 bp, Homo sapien
gctgttgttctcaaatttgcattct

SEQ ID NO: 1894750 - DNA, 25 bp, Homo sapien
tgttgttctcaaatttgcattctat

SEQ ID NO: 1894751 - DNA, 25 bp, Homo sapien
tctataattttgttgtcatactgtt

SEQ ID NO: 1894752 - DNA, 25 bp, Homo sapien
caagtatccatggtaactacgaacc

SEQ ID NO: 1894753 - DNA, 25 bp, Homo sapien
caagcttaaggtatggtgtgcactc

SEQ ID NO: 1894754 - DNA, 25 bp, Homo sapien
gaagctaggcagaaaccagccatgc

SEQ ID NO: 1894755 - DNA, 25 bp, Homo sapien
cactgggctgtgagaatggttttca

SEQ ID NO: 1894756 - DNA, 25 bp, Homo sapien
ctttcaattcgcagattaggcagca

SEQ ID NO: 1894757 - DNA, 25 bp, Homo sapien
cctaggaatatgacgagaagtaagt

SEQ ID NO: 1894758 - DNA, 25 bp, Homo sapien
taaaagatgctttcaattcgcagat

SEQ ID NO: 1894759 - DNA, 25 bp, Homo sapien
tattcactaccacctaggaatatga

SEQ ID NO: 1894760 - DNA, 25 bp, Homo sapien
taaaacgacaatgcaggaaggatgt

SEQ ID NO: 1894761 - DNA, 25 bp, Homo sapien
ttaagcaagtacaccggcaaccctg

SEQ ID NO: 1894762 - DNA, 25 bp, Homo sapien
agtagcacacttgctatatgagggt

SEQ ID NO: 1894763 - DNA, 25 bp, Homo sapien
tatgagggtctgctacagtaaaacg

SEQ ID NO: 1894764 - DNA, 25 bp, Homo sapien
cctctggatagccagttcttccacc

SEQ ID NO: 1894765 - DNA, 25 bp, Homo sapien
ctctggatagccagttcttccacca

SEQ ID NO: 1894766 - DNA, 25 bp, Homo sapien
tctggatagccagttcttccaccag

SEQ ID NO: 1894767 - DNA, 25 bp, Homo sapien
ttggcttcgagtcccttaaaattca

SEQ ID NO: 1894768 - DNA, 25 bp, Homo sapien
ctctgtgagtctgccctgagtgtat

SEQ ID NO: 1894769 - DNA, 25 bp, Homo sapien
tctgccctgagtgtataaagggttg

SEQ ID NO: 1894770 - DNA, 25 bp, Homo sapien
tgtataaagggttggcttcgagtcc

SEQ ID NO: 1894771 - DNA, 25 bp, Homo sapien
tagtcatggagggttctcagccttc

SEQ ID NO: 1894772 - DNA, 25 bp, Homo sapien
tcccaagatgataaaataaggcccc

SEQ ID NO: 1894773 - DNA, 25 bp, Homo sapien
tttgataaatgtgcactgggctcca

SEQ ID NO: 1894774 - DNA, 25 bp, Homo sapien
cagtttggttatagcctcctgcaga

SEQ ID NO: 1894775 - DNA, 25 bp, Homo sapien
tcactgaactgtttcggtcaaagtc

SEQ ID NO: 1894776 - DNA, 25 bp, Homo sapien
tcggcctcaaaaagcactggtagtg

SEQ ID NO: 1894777 - DNA, 25 bp, Homo sapien
ctctaaatgtactcttctaaatgaa

SEQ ID NO: 1894778 - DNA, 25 bp, Homo sapien
aaagattaatctctaaatgtactct

SEQ ID NO: 1894779 - DNA, 25 bp, Homo sapien
gatggattctagataagagaacatc

SEQ ID NO: 1894780 - DNA, 25 bp, Homo sapien
tatgttgattattattagcaaggtt

SEQ ID NO: 1894781 - DNA, 25 bp, Homo sapien
tggattctagataagagaacatcca

SEQ ID NO: 1894782 - DNA, 25 bp, Homo sapien
gttttgatggattctagataagaga

SEQ ID NO: 1894783 - DNA, 25 bp, Homo sapien
cataacctccaacatacaggaggcc

SEQ ID NO: 1894784 - DNA, 25 bp, Homo sapien
taacctccaacatacaggaggccaa

SEQ ID NO: 1894785 - DNA, 25 bp, Homo sapien
ttcataacctccaacatacaggagg

SEQ ID NO: 1894786 - DNA, 25 bp, Homo sapien
cctccaacatacaggaggccaacat

SEQ ID NO: 1894787 - DNA, 25 bp, Homo sapien
gaaattgatgagttaagtatccacc

SEQ ID NO: 1894788 - DNA, 25 bp, Homo sapien
gaattgattctgaatgaggctgaca

SEQ ID NO: 1894789 - DNA, 25 bp, Homo sapien
tcaaaagtcagaatagagacactcc

SEQ ID NO: 1894790 - DNA, 25 bp, Homo sapien
taatgcagatcatagcctcagaaca

SEQ ID NO: 1894791 - DNA, 25 bp, Homo sapien
gggacacagccctagctaacctaag

SEQ ID NO: 1894792 - DNA, 25 bp, Homo sapien
ggctgtgggaatatgaagcaagaca

SEQ ID NO: 1894793 - DNA, 25 bp, Homo sapien
gacatgaggccaagttttatctcca

SEQ ID NO: 1894794 - DNA, 25 bp, Homo sapien
agggactgtacatcacgggacacag

SEQ ID NO: 1894795 - DNA, 25 bp, Homo sapien
aaaatcttactttatggtcagacat

SEQ ID NO: 1894796 - DNA, 25 bp, Homo sapien
atcttactttatggtcagacattaa

SEQ ID NO: 1894797 - DNA, 25 bp, Homo sapien
aaaaatcttactttatggtcagaca

SEQ ID NO: 1894798 - DNA, 25 bp, Homo sapien
ataaaaatcttactttatggtcaga

SEQ ID NO: 1894799 - DNA, 25 bp, Homo sapien
tgtagctggtccaaagttctgtgga

SEQ ID NO: 1894800 - DNA, 25 bp, Homo sapien
tcttgtcccaccaatgtagagcttt

SEQ ID NO: 1894801 - DNA, 25 bp, Homo sapien
gctgtagctggtccaaagttctgtg

SEQ ID NO: 1894802 - DNA, 25 bp, Homo sapien
caggagtcttgtcccaccaatgtag

SEQ ID NO: 1894803 - DNA, 25 bp, Homo sapien
ttacagggctagtcctacaatttcc

SEQ ID NO: 1894804 - DNA, 25 bp, Homo sapien
ttccaaatgtgaagatacgctatat

SEQ ID NO: 1894805 - DNA, 25 bp, Homo sapien
cagggctagtcctacaatttccaaa

SEQ ID NO: 1894806 - DNA, 25 bp, Homo sapien
gaagatacgctatatttcccaaagc

SEQ ID NO: 1894807 - DNA, 25 bp, Homo sapien
ttctagcagaccaactctgattttc

SEQ ID NO: 1894808 - DNA, 25 bp, Homo sapien
gccggtattctatggcaaatttccc

SEQ ID NO: 1894809 - DNA, 25 bp, Homo sapien
accaccaaagagtggcttctagcag

SEQ ID NO: 1894810 - DNA, 25 bp, Homo sapien
agcagaccagctctagcctgccggt

SEQ ID NO: 1894811 - DNA, 25 bp, Homo sapien
gcaagtttcttcacaaccaactggc

SEQ ID NO: 1894812 - DNA, 25 bp, Homo sapien
agcaagtttcttcacaaccaactgg

SEQ ID NO: 1894813 - DNA, 25 bp, Homo sapien
caagtttcttcacaaccaactggct

SEQ ID NO: 1894814 - DNA, 25 bp, Homo sapien
taaaggagaccatgcagtcaattct

SEQ ID NO: 1894815 - DNA, 25 bp, Homo sapien
aggaagctagcatttctcagtttta

SEQ ID NO: 1894816 - DNA, 25 bp, Homo sapien
tcagttttaaatgtgcagaccttac

SEQ ID NO: 1894817 - DNA, 25 bp, Homo sapien
tattccattctgcttgctaggaagc

SEQ ID NO: 1894818 - DNA, 25 bp, Homo sapien
aaaccagaaccttctggccaggcat

SEQ ID NO: 1894819 - DNA, 25 bp, Homo sapien
gtattgcaatactactacaaccatg

SEQ ID NO: 1894820 - DNA, 25 bp, Homo sapien
gcaaactatagtctacaggccacat

SEQ ID NO: 1894821 - DNA, 25 bp, Homo sapien
tacagtactgtaaatccacagttgg

SEQ ID NO: 1894822 - DNA, 25 bp, Homo sapien
tagctttgatttagcaccacaatgg

SEQ ID NO: 1894823 - DNA, 25 bp, Homo sapien
taagagcccattgcctaagtaagat

SEQ ID NO: 1894824 - DNA, 25 bp, Homo sapien
agtggtcactctgacactacacaga

SEQ ID NO: 1894825 - DNA, 25 bp, Homo sapien
tatgtaactgtttgccacactggct

SEQ ID NO: 1894826 - DNA, 25 bp, Homo sapien
tggctgcaccaacttacaatctcaa

SEQ ID NO: 1894827 - DNA, 25 bp, Homo sapien
taatgcccattgaaagagttgtacc

SEQ ID NO: 1894828 - DNA, 25 bp, Homo sapien
tgtagatgctaggtctgagttcaac

SEQ ID NO: 1894829 - DNA, 25 bp, Homo sapien
ctggagtgcctactataaacaagtc

SEQ ID NO: 1894830 - DNA, 25 bp, Homo sapien
tcttgtatctcaacagactagacca

SEQ ID NO: 1894831 - DNA, 25 bp, Homo sapien
tattactctggctaaccgaatatgt

SEQ ID NO: 1894832 - DNA, 25 bp, Homo sapien
gagacatagctactcccctttcgaa

SEQ ID NO: 1894833 - DNA, 25 bp, Homo sapien
cactaagaactgactgtaaaaggca

SEQ ID NO: 1894834 - DNA, 25 bp, Homo sapien
tctatgtttagcctcaggaagcctt

SEQ ID NO: 1894835 - DNA, 25 bp, Homo sapien
ctcaaataaaatgttaaataccctg

SEQ ID NO: 1894836 - DNA, 25 bp, Homo sapien
cagcctcaaataaaatgttaaatac

SEQ ID NO: 1894837 - DNA, 25 bp, Homo sapien
ccagcctcaaataaaatgttaaata

SEQ ID NO: 1894838 - DNA, 25 bp, Homo sapien
tatttttagacgaaaatccacagaa

SEQ ID NO: 1894839 - DNA, 25 bp, Homo sapien
tgttatttttagacgaaaatccaca

SEQ ID NO: 1894840 - DNA, 25 bp, Homo sapien
catcacatcgaccaggtttgtattt

SEQ ID NO: 1894841 - DNA, 25 bp, Homo sapien
caaaatatcatcacatcgaccaggt

SEQ ID NO: 1894842 - DNA, 25 bp, Homo sapien
aaaattgcctcctgctacccgaatg

SEQ ID NO: 1894843 - DNA, 25 bp, Homo sapien
ggtggcctaaactgaggataaacta

SEQ ID NO: 1894844 - DNA, 25 bp, Homo sapien
aaactggagcctattctggatggca

SEQ ID NO: 1894845 - DNA, 25 bp, Homo sapien
gaccactctggtgatggtggcctaa

SEQ ID NO: 1894846 - DNA, 25 bp, Homo sapien
cctcccttaaccacagaagatattt

SEQ ID NO: 1894847 - DNA, 25 bp, Homo sapien
taaccacagaagatatttctgttct

SEQ ID NO: 1894848 - DNA, 25 bp, Homo sapien
ccttaaccacagaagatatttctgt

SEQ ID NO: 1894849 - DNA, 25 bp, Homo sapien
tcccttaaccacagaagatatttct

SEQ ID NO: 1894850 - DNA, 25 bp, Homo sapien
ccatccatttcatggctcacttctt

SEQ ID NO: 1894851 - DNA, 25 bp, Homo sapien
tccagtaggctgaaaaataagtcca

SEQ ID NO: 1894852 - DNA, 25 bp, Homo sapien
ttcatggctcacttctttggcaaaa

SEQ ID NO: 1894853 - DNA, 25 bp, Homo sapien
ccatttcatggctcacttctttggc

SEQ ID NO: 1894854 - DNA, 25 bp, Homo sapien
ctgggataccaaatggcattttagc

SEQ ID NO: 1894855 - DNA, 25 bp, Homo sapien
atggcattttagctgtaaactaaac

SEQ ID NO: 1894856 - DNA, 25 bp, Homo sapien
cactgggataccaaatggcatttta

SEQ ID NO: 1894857 - DNA, 25 bp, Homo sapien
ccacactgggataccaaatggcatt

SEQ ID NO: 1894858 - DNA, 25 bp, Homo sapien
catttcaacaatgaccaacagaagc

SEQ ID NO: 1894859 - DNA, 25 bp, Homo sapien
tccatcatttcaacaatgaccaaca

SEQ ID NO: 1894860 - DNA, 25 bp, Homo sapien
catcatttcaacaatgaccaacaga

SEQ ID NO: 1894861 - DNA, 25 bp, Homo sapien
tttcaacaatgaccaacagaagctt

SEQ ID NO: 1894862 - DNA, 25 bp, Homo sapien
gaaggaagcaccaaatacggaagga

SEQ ID NO: 1894863 - DNA, 25 bp, Homo sapien
gaaaaaaccagtatcaaccactgca

SEQ ID NO: 1894864 - DNA, 25 bp, Homo sapien
ctgaaggaagcaccaaatacggaag

SEQ ID NO: 1894865 - DNA, 25 bp, Homo sapien
caagccagaggagagattcaacatt

SEQ ID NO: 1894866 - DNA, 25 bp, Homo sapien
cttcccattacaatacactgccttg

SEQ ID NO: 1894867 - DNA, 25 bp, Homo sapien
ttcccattacaatacactgccttgc

SEQ ID NO: 1894868 - DNA, 25 bp, Homo sapien
tgttttgtcaatgagcccagtcttc

SEQ ID NO: 1894869 - DNA, 25 bp, Homo sapien
tatttctgacgctaaatggttcctg

SEQ ID NO: 1894870 - DNA, 25 bp, Homo sapien
cagatgtcaaaaaacggcttatttc

SEQ ID NO: 1894871 - DNA, 25 bp, Homo sapien
cattttttcgtgtcgaggacttata

SEQ ID NO: 1894872 - DNA, 25 bp, Homo sapien
gcagacgaacattaaaatcacaatc

SEQ ID NO: 1894873 - DNA, 25 bp, Homo sapien
ctgcagacgaacattaaaatcacaa

SEQ ID NO: 1894874 - DNA, 25 bp, Homo sapien
tgcagacgaacattaaaatcacaat

SEQ ID NO: 1894875 - DNA, 25 bp, Homo sapien
taggaacagcctgtccatttactct

SEQ ID NO: 1894876 - DNA, 25 bp, Homo sapien
catttactctgtcaataatcatctc

SEQ ID NO: 1894877 - DNA, 25 bp, Homo sapien
ctaggaacagcctgtccatttactc

SEQ ID NO: 1894878 - DNA, 25 bp, Homo sapien
ccatttactctgtcaataatcatct

SEQ ID NO: 1894879 - DNA, 25 bp, Homo sapien
tgtgccatcaatcaacatcatgtac

SEQ ID NO: 1894880 - DNA, 25 bp, Homo sapien
tggaaattccagatttgaaacatga

SEQ ID NO: 1894881 - DNA, 25 bp, Homo sapien
catgaaatactgaattgtctctatc

SEQ ID NO: 1894882 - DNA, 25 bp, Homo sapien
ttgataaatgcatacgaagatcttt

SEQ ID NO: 1894883 - DNA, 25 bp, Homo sapien
gggaattcatacacttaacaacctg

SEQ ID NO: 1894884 - DNA, 25 bp, Homo sapien
ggcataagcctcaaagaaacagaat

SEQ ID NO: 1894885 - DNA, 25 bp, Homo sapien
ggaagctatgctaccaaatggataa

SEQ ID NO: 1894886 - DNA, 25 bp, Homo sapien
ccagatggactgatgttgaagacat

SEQ ID NO: 1894887 - DNA, 25 bp, Homo sapien
tgtatggcttcaggtctaaaagttt

SEQ ID NO: 1894888 - DNA, 25 bp, Homo sapien
ttgtatggcttcaggtctaaaagtt

SEQ ID NO: 1894889 - DNA, 25 bp, Homo sapien
ccagccacagaattgatgacacttc

SEQ ID NO: 1894890 - DNA, 25 bp, Homo sapien
ggttgtgttgttacttgagttacac

SEQ ID NO: 1894891 - DNA, 25 bp, Homo sapien
tggttgtgttgttacttgagttaca

SEQ ID NO: 1894892 - DNA, 25 bp, Homo sapien
tttggttgtgttgttacttgagtta

SEQ ID NO: 1894893 - DNA, 25 bp, Homo sapien
ttggttgtgttgttacttgagttac

SEQ ID NO: 1894894 - DNA, 25 bp, Homo sapien
acagtaacaccttccaagaaaatag

SEQ ID NO: 1894895 - DNA, 25 bp, Homo sapien
agtaacaccttccaagaaaatagcg

SEQ ID NO: 1894896 - DNA, 25 bp, Homo sapien
gtaacaccttccaagaaaatagcgc

SEQ ID NO: 1894897 - DNA, 25 bp, Homo sapien
taacaccttccaagaaaatagcgcc

SEQ ID NO: 1894898 - DNA, 25 bp, Homo sapien
tccttttgccaaaagaagcacttga

SEQ ID NO: 1894899 - DNA, 25 bp, Homo sapien
ctccttttgccaaaagaagcacttg

SEQ ID NO: 1894900 - DNA, 25 bp, Homo sapien
ttctccttttgccaaaagaagcact

SEQ ID NO: 1894901 - DNA, 25 bp, Homo sapien
ccttttgccaaaagaagcacttgac

SEQ ID NO: 1894902 - DNA, 25 bp, Homo sapien
taatcacccttgtagattcctggtg

SEQ ID NO: 1894903 - DNA, 25 bp, Homo sapien
tatgtcaccataccgacgaaaaagt

SEQ ID NO: 1894904 - DNA, 25 bp, Homo sapien
tcaaaacaccaatctggcaatagag

SEQ ID NO: 1894905 - DNA, 25 bp, Homo sapien
tggcttgggcaaaagtagcaactgc

SEQ ID NO: 1894906 - DNA, 25 bp, Homo sapien
tgaggaaaccagtgcgattgaagcc

SEQ ID NO: 1894907 - DNA, 25 bp, Homo sapien
gaaaccagtgcgattgaagccatga

SEQ ID NO: 1894908 - DNA, 25 bp, Homo sapien
catatgaggaaaccagtgcgattga

SEQ ID NO: 1894909 - DNA, 25 bp, Homo sapien
ttgaagccatgagtacaatgaacac

SEQ ID NO: 1894910 - DNA, 25 bp, Homo sapien
acggtgcagctgcagcaaaacacca

SEQ ID NO: 1894911 - DNA, 25 bp, Homo sapien
cacggtgcagctgcagcaaaacacc

SEQ ID NO: 1894912 - DNA, 25 bp, Homo sapien
cggtgcagctgcagcaaaacaccac

SEQ ID NO: 1894913 - DNA, 25 bp, Homo sapien
tgccactgccataggaccatagtgt

SEQ ID NO: 1894914 - DNA, 25 bp, Homo sapien
caggtcctgctatctgcagggcgaa

SEQ ID NO: 1894915 - DNA, 25 bp, Homo sapien
ctccagcttgtactgagtggctgca

SEQ ID NO: 1894916 - DNA, 25 bp, Homo sapien
cgaagagagtaagactgccactgcc

SEQ ID NO: 1894917 - DNA, 25 bp, Homo sapien
tattctcagtggtagggcactcacc

SEQ ID NO: 1894918 - DNA, 25 bp, Homo sapien
tataagttcaggtggatttctttca

SEQ ID NO: 1894919 - DNA, 25 bp, Homo sapien
aataaaggtctcagtattctcagtg

SEQ ID NO: 1894920 - DNA, 25 bp, Homo sapien
tcattaaaccgctcacacagacgaa

SEQ ID NO: 1894921 - DNA, 25 bp, Homo sapien
gtcatttcggtcatagaaccttgaa

SEQ ID NO: 1894922 - DNA, 25 bp, Homo sapien
gtatttgtcaggtccaccaacaagc

SEQ ID NO: 1894923 - DNA, 25 bp, Homo sapien
aagtatttgtcaggtccaccaacaa

SEQ ID NO: 1894924 - DNA, 25 bp, Homo sapien
ttttctatgtcatttcggtcataga

SEQ ID NO: 1894925 - DNA, 25 bp, Homo sapien
ttattcaggctcatttcaggttcca

SEQ ID NO: 1894926 - DNA, 25 bp, Homo sapien
aatgttaggattcaggtggggtgca

SEQ ID NO: 1894927 - DNA, 25 bp, Homo sapien
gtaatacactgtaaagtagtgtgat

SEQ ID NO: 1894928 - DNA, 25 bp, Homo sapien
taatacactgtaaagtagtgtgatg

SEQ ID NO: 1894929 - DNA, 25 bp, Homo sapien
cagcaacttgactatcatatcttgg

SEQ ID NO: 1894930 - DNA, 25 bp, Homo sapien
tatcttggtcctaacattgtcttca

SEQ ID NO: 1894931 - DNA, 25 bp, Homo sapien
taggtaatttgagagcatgctggga

SEQ ID NO: 1894932 - DNA, 25 bp, Homo sapien
catgctgggatggaaccgattttct

SEQ ID NO: 1894933 - DNA, 25 bp, Homo sapien
cttttcaaagatactaccctacatc

SEQ ID NO: 1894934 - DNA, 25 bp, Homo sapien
tcaaagatactaccctacatctttt

SEQ ID NO: 1894935 - DNA, 25 bp, Homo sapien
cataaagtactctcaatttaaacta

SEQ ID NO: 1894936 - DNA, 25 bp, Homo sapien
aagtgttcataaagtactctcaatt

SEQ ID NO: 1894937 - DNA, 25 bp, Homo sapien
tatatgtatgcgtattatttttgag

SEQ ID NO: 1894938 - DNA, 25 bp, Homo sapien
atatgtatgcgtattatttttgaga

SEQ ID NO: 1894939 - DNA, 25 bp, Homo sapien
caaaacatctgaaggagcacaaaca

SEQ ID NO: 1894940 - DNA, 25 bp, Homo sapien
taccaaacatccacaaaagattaac

SEQ ID NO: 1894941 - DNA, 25 bp, Homo sapien
acaaaacactggttctggatgtggt

SEQ ID NO: 1894942 - DNA, 25 bp, Homo sapien
gaataaactgaacccaaacccagca

SEQ ID NO: 1894943 - DNA, 25 bp, Homo sapien
ggggacagttcagccaccgcggcgg

SEQ ID NO: 1894944 - DNA, 25 bp, Homo sapien
agccaccgcggcgggatcttgttgt

SEQ ID NO: 1894945 - DNA, 25 bp, Homo sapien
ccaccgcggcgggatcttgttgtga

SEQ ID NO: 1894946 - DNA, 25 bp, Homo sapien
ggccgcgccggggacagttcagcca

SEQ ID NO: 1894947 - DNA, 25 bp, Homo sapien
gggctgcgcagagctgccctccctc

SEQ ID NO: 1894948 - DNA, 25 bp, Homo sapien
cttggggctgcgcagagctgccctc

SEQ ID NO: 1894949 - DNA, 25 bp, Homo sapien
gtcttggggctgcgcagagctgccc

SEQ ID NO: 1894950 - DNA, 25 bp, Homo sapien
gctgcgcagagctgccctccctcac

SEQ ID NO: 1894951 - DNA, 25 bp, Homo sapien
ctctccgatccgggtaacgtcaggg

SEQ ID NO: 1894952 - DNA, 25 bp, Homo sapien
tcgcagccgtaatctgaattccaac

SEQ ID NO: 1894953 - DNA, 25 bp, Homo sapien
gttcaccgcgcctttggagccgcct

SEQ ID NO: 1894954 - DNA, 25 bp, Homo sapien
gggtccgagacacccgaatcgcagc

SEQ ID NO: 1894955 - DNA, 25 bp, Homo sapien
tcattcaggatcaactccacagctc

SEQ ID NO: 1894956 - DNA, 25 bp, Homo sapien
gatcaactccacagctccaggagaa

SEQ ID NO: 1894957 - DNA, 25 bp, Homo sapien
ttcattcaggatcaactccacagct

SEQ ID NO: 1894958 - DNA, 25 bp, Homo sapien
tcaggatcaactccacagctccagg

SEQ ID NO: 1894959 - DNA, 25 bp, Homo sapien
cccggacgctactggttcgcctttg

SEQ ID NO: 1894960 - DNA, 25 bp, Homo sapien
cctttgcgcatgtgcaattgccctc

SEQ ID NO: 1894961 - DNA, 25 bp, Homo sapien
ctactggttcgcctttgcgcatgtg

SEQ ID NO: 1894962 - DNA, 25 bp, Homo sapien
tgcgcatgtgcaattgccctcgtac

SEQ ID NO: 1894963 - DNA, 25 bp, Homo sapien
cgaactccgcaggacgaagcgtgta

SEQ ID NO: 1894964 - DNA, 25 bp, Homo sapien
gaactccgcaggacgaagcgtgtat

SEQ ID NO: 1894965 - DNA, 25 bp, Homo sapien
ccgcaggacgaagcgtgtatttttt

SEQ ID NO: 1894966 - DNA, 25 bp, Homo sapien
actccgcaggacgaagcgtgtattt

SEQ ID NO: 1894967 - DNA, 25 bp, Homo sapien
cccagaaaatgccctcggactctag

SEQ ID NO: 1894968 - DNA, 25 bp, Homo sapien
aaaatgccctcggactctagaggct

SEQ ID NO: 1894969 - DNA, 25 bp, Homo sapien
gtccgccccagaaaatgccctcgga

SEQ ID NO: 1894970 - DNA, 25 bp, Homo sapien
atgccctcggactctagaggctcac

SEQ ID NO: 1894971 - DNA, 25 bp, Homo sapien
tggagacaggacagctatgcacttc

SEQ ID NO: 1894972 - DNA, 25 bp, Homo sapien
atcatgtgacatgccaaggaactgg

SEQ ID NO: 1894973 - DNA, 25 bp, Homo sapien
tggtttttccacctataggccagtg

SEQ ID NO: 1894974 - DNA, 25 bp, Homo sapien
cattctgaatactgccaagtcctgt

SEQ ID NO: 1894975 - DNA, 25 bp, Homo sapien
cagcatagtaattgggtcacacctt

SEQ ID NO: 1894976 - DNA, 25 bp, Homo sapien
tagagattccccattgtctacagga

SEQ ID NO: 1894977 - DNA, 25 bp, Homo sapien
gataataacaaccacgacctctgag

SEQ ID NO: 1894978 - DNA, 25 bp, Homo sapien
cagttatacctcaaaggctccgtgc

SEQ ID NO: 1894979 - DNA, 25 bp, Homo sapien
taagaagagacactgtacttgatct

SEQ ID NO: 1894980 - DNA, 25 bp, Homo sapien
cctcagacaaaggacgtatcagata

SEQ ID NO: 1894981 - DNA, 25 bp, Homo sapien
actgataagaagagacactgtactt

SEQ ID NO: 1894982 - DNA, 25 bp, Homo sapien
agagagcacagatcctggaggtact

SEQ ID NO: 1894983 - DNA, 25 bp, Homo sapien
ccaatttcattgttcgcgggaccga

SEQ ID NO: 1894984 - DNA, 25 bp, Homo sapien
taataagcagcgatgccgaaccaag

SEQ ID NO: 1894985 - DNA, 25 bp, Homo sapien
ttgtgtgtgtctacccgaagctgcg

SEQ ID NO: 1894986 - DNA, 25 bp, Homo sapien
tcgttgctgagcgacaagcttccta

SEQ ID NO: 1894987 - DNA, 25 bp, Homo sapien
gaaagtatgtattttgccctgccca

SEQ ID NO: 1894988 - DNA, 25 bp, Homo sapien
tgctaaggcacatggaagaccgatt

SEQ ID NO: 1894989 - DNA, 25 bp, Homo sapien
gagcatagtacccagtaggtcccca

SEQ ID NO: 1894990 - DNA, 25 bp, Homo sapien
tcggagaaaattgcccttccccatg

SEQ ID NO: 1894991 - DNA, 25 bp, Homo sapien
tgcctcctatggactgtcaacttca

SEQ ID NO: 1894992 - DNA, 25 bp, Homo sapien
catcttattgctggataaactatcc

SEQ ID NO: 1894993 - DNA, 25 bp, Homo sapien
ccgtacctgtaaaagtctgtgttag

SEQ ID NO: 1894994 - DNA, 25 bp, Homo sapien
tgaaaggctgatagtcccatcatac

SEQ ID NO: 1894995 - DNA, 25 bp, Homo sapien
gacaacatggaatcagagggctttt

SEQ ID NO: 1894996 - DNA, 25 bp, Homo sapien
tgtgatgcctgagaccagatcctga

SEQ ID NO: 1894997 - DNA, 25 bp, Homo sapien
gagtcactgttcattcagtccagtc

SEQ ID NO: 1894998 - DNA, 25 bp, Homo sapien
caaccaaggttttctggctgtactt

SEQ ID NO: 1894999 - DNA, 25 bp, Homo sapien
tttgaccactgataggcagctcaga

SEQ ID NO: 1895000 - DNA, 25 bp, Homo sapien
caaggtgtggtcacaaaagcccaaa

SEQ ID NO: 1895001 - DNA, 25 bp, Homo sapien
taatgctgagttaacaccagtggag

SEQ ID NO: 1895002 - DNA, 25 bp, Homo sapien
taatgtggtactgcagatcaagtcc

SEQ ID NO: 1895003 - DNA, 25 bp, Homo sapien
aaagtatctctcttaaatgggccaa

SEQ ID NO: 1895004 - DNA, 25 bp, Homo sapien
caaagtatctctcttaaatgggcca

SEQ ID NO: 1895005 - DNA, 25 bp, Homo sapien
taaacaaagtatctctcttaaatgg

SEQ ID NO: 1895006 - DNA, 25 bp, Homo sapien
attaataaacaaagtatctctctta

SEQ ID NO: 1895007 - DNA, 25 bp, Homo sapien
gtagtggtactaggttggcgcaaaa

SEQ ID NO: 1895008 - DNA, 25 bp, Homo sapien
tctatgacaaaagtgaaccctggaa

SEQ ID NO: 1895009 - DNA, 25 bp, Homo sapien
gaagaggactctgaagcccagtcac

SEQ ID NO: 1895010 - DNA, 25 bp, Homo sapien
gaagacaattttccaggatacccag

SEQ ID NO: 1895011 - DNA, 25 bp, Homo sapien
tagtgtgggccctttaaatggagac

SEQ ID NO: 1895012 - DNA, 25 bp, Homo sapien
ttggcccaagtttaaacagaagaca

SEQ ID NO: 1895013 - DNA, 25 bp, Homo sapien
gaaaagtacccttctgccacaatgt

SEQ ID NO: 1895014 - DNA, 25 bp, Homo sapien
gaactaatatccaccaggaattggc

SEQ ID NO: 1895015 - DNA, 25 bp, Homo sapien
aacttatattaaagacggcgtggtg

SEQ ID NO: 1895016 - DNA, 25 bp, Homo sapien
ttatattaaagacggcgtggtgctc

SEQ ID NO: 1895017 - DNA, 25 bp, Homo sapien
agacggcgtggtgctctttctgttg

SEQ ID NO: 1895018 - DNA, 25 bp, Homo sapien
ttaaagacggcgtggtgctctttct

SEQ ID NO: 1895019 - DNA, 25 bp, Homo sapien
ttatgacgataacttcgagatctgg

SEQ ID NO: 1895020 - DNA, 25 bp, Homo sapien
tgtttttatgacgataacttcgaga

SEQ ID NO: 1895021 - DNA, 25 bp, Homo sapien
acttcgagatctggaatgtgaccga

SEQ ID NO: 1895022 - DNA, 25 bp, Homo sapien
ttcgagatctggaatgtgaccgaaa

SEQ ID NO: 1895023 - DNA, 25 bp, Homo sapien
gatttggaacgagatttagactggc

SEQ ID NO: 1895024 - DNA, 25 bp, Homo sapien
tgccttgctgaggtagaccgccttg

SEQ ID NO: 1895025 - DNA, 25 bp, Homo sapien
gctataagaaaatcgcctgtgtcga

SEQ ID NO: 1895026 - DNA, 25 bp, Homo sapien
tgtaaggacttggaccttgaccgtc

SEQ ID NO: 1895027 - DNA, 25 bp, Homo sapien
ttccccatgaagaacttctacttcg

SEQ ID NO: 1895028 - DNA, 25 bp, Homo sapien
catgaagaacttctacttcgagttc

SEQ ID NO: 1895029 - DNA, 25 bp, Homo sapien
tctttaaggctgtctgaccgcctcc

SEQ ID NO: 1895030 - DNA, 25 bp, Homo sapien
gaccgcctcctatttcttccccatg

SEQ ID NO: 1895031 - DNA, 25 bp, Homo sapien
caaggatgacgttcttttgatttca

SEQ ID NO: 1895032 - DNA, 25 bp, Homo sapien
gaacaaggatgacgttcttttgatt

SEQ ID NO: 1895033 - DNA, 25 bp, Homo sapien
ggagaacaaggatgacgttcttttg

SEQ ID NO: 1895034 - DNA, 25 bp, Homo sapien
gagaacaaggatgacgttcttttga

SEQ ID NO: 1895035 - DNA, 25 bp, Homo sapien
ctgtatttcaatctgacggccacat

SEQ ID NO: 1895036 - DNA, 25 bp, Homo sapien
gccacatacccactttctattgagg

SEQ ID NO: 1895037 - DNA, 25 bp, Homo sapien
tgcgatcaccttgtgcaaactgtat

SEQ ID NO: 1895038 - DNA, 25 bp, Homo sapien
tgaggttataaagagcatcttcagc

SEQ ID NO: 1895039 - DNA, 25 bp, Homo sapien
ctttcagataaaggatccatcagat

SEQ ID NO: 1895040 - DNA, 25 bp, Homo sapien
tgtggctgcagtatgcatgtataat

SEQ ID NO: 1895041 - DNA, 25 bp, Homo sapien
tacaaactgtttaggactcactccc

SEQ ID NO: 1895042 - DNA, 25 bp, Homo sapien
tagtgtctacaatagtgtggctgca

SEQ ID NO: 1895043 - DNA, 25 bp, Homo sapien
gactttataagagacgcagaaccaa

SEQ ID NO: 1895044 - DNA, 25 bp, Homo sapien
gacgcagaaccaacaaaatcagact

SEQ ID NO: 1895045 - DNA, 25 bp, Homo sapien
ctttaaggcttgcaagatggacttt

SEQ ID NO: 1895046 - DNA, 25 bp, Homo sapien
gatcttgaaccttgacctttactct

SEQ ID NO: 1895047 - DNA, 25 bp, Homo sapien
tagctaacaggttggttcaaactgg

SEQ ID NO: 1895048 - DNA, 25 bp, Homo sapien
gaaagccgaagtctcaacctggtgt

SEQ ID NO: 1895049 - DNA, 25 bp, Homo sapien
ctcgcctgctgggtttatgcttgga

SEQ ID NO: 1895050 - DNA, 25 bp, Homo sapien
cagctactgtggactgctttagatc

SEQ ID NO: 1895051 - DNA, 25 bp, Homo sapien
agggccatatcgaccaaactcacgg

SEQ ID NO: 1895052 - DNA, 25 bp, Homo sapien
aaactcacggcgcaagtcctcaggc

SEQ ID NO: 1895053 - DNA, 25 bp, Homo sapien
gaatgtaaacgtctactatagggcc

SEQ ID NO: 1895054 - DNA, 25 bp, Homo sapien
cgagtgtagaagtcaagtggaatgt

SEQ ID NO: 1895055 - DNA, 25 bp, Homo sapien
ctgaagtgttttagaaataaggcaa

SEQ ID NO: 1895056 - DNA, 25 bp, Homo sapien
tttagaaataaggcaaagaaatatg

SEQ ID NO: 1895057 - DNA, 25 bp, Homo sapien
tagaaataaggcaaagaaatatgaa

SEQ ID NO: 1895058 - DNA, 25 bp, Homo sapien
gaaataaggcaaagaaatatgaata

SEQ ID NO: 1895059 - DNA, 25 bp, Homo sapien
attgtttcactaagaacacattcat

SEQ ID NO: 1895060 - DNA, 25 bp, Homo sapien
tattataagacctaataagtaattg

SEQ ID NO: 1895061 - DNA, 25 bp, Homo sapien
gacctaataagtaattgtttcacta

SEQ ID NO: 1895062 - DNA, 25 bp, Homo sapien
tgaaagttattataagacctaataa

SEQ ID NO: 1895063 - DNA, 25 bp, Homo sapien
ctggtggcgtccgcgacgttcctga

SEQ ID NO: 1895064 - DNA, 25 bp, Homo sapien
cgacgttcctgatgaacagggaggt

SEQ ID NO: 1895065 - DNA, 25 bp, Homo sapien
ccgcgacgttcctgatgaacaggga

SEQ ID NO: 1895066 - DNA, 25 bp, Homo sapien
ggcgtccgcgacgttcctgatgaac

SEQ ID NO: 1895067 - DNA, 25 bp, Homo sapien
ccgctggactcgctccgtctcccgc

SEQ ID NO: 1895068 - DNA, 25 bp, Homo sapien
ctcgctccgtctcccgctaccgctg

SEQ ID NO: 1895069 - DNA, 25 bp, Homo sapien
tctgcccgcggccgctggactcgct

SEQ ID NO: 1895070 - DNA, 25 bp, Homo sapien
tccctccgggtctgcccgcggccgc

SEQ ID NO: 1895071 - DNA, 25 bp, Homo sapien
gcctcagccccgccagcgcgcagcc

SEQ ID NO: 1895072 - DNA, 25 bp, Homo sapien
ctcggcctcagccccgccagcgcgc

SEQ ID NO: 1895073 - DNA, 25 bp, Homo sapien
ctaccaccacaggagctccgccggc

SEQ ID NO: 1895074 - DNA, 25 bp, Homo sapien
gcgcgacccccacccctcggcctca

SEQ ID NO: 1895075 - DNA, 25 bp, Homo sapien
tggtgctagctttcctctagtgaga

SEQ ID NO: 1895076 - DNA, 25 bp, Homo sapien
atggtgctagctttcctctagtgag

SEQ ID NO: 1895077 - DNA, 25 bp, Homo sapien
gaggaatcgccactttgatttctat

SEQ ID NO: 1895078 - DNA, 25 bp, Homo sapien
gacaaatatatacgcttgtgtaacc

SEQ ID NO: 1895079 - DNA, 25 bp, Homo sapien
acttctgaagaggaatcgccacttt

SEQ ID NO: 1895080 - DNA, 25 bp, Homo sapien
caactctccaatctagatataaaac

SEQ ID NO: 1895081 - DNA, 25 bp, Homo sapien
tttctcttgaccagctctactggtg

SEQ ID NO: 1895082 - DNA, 25 bp, Homo sapien
cagctctactggtggcctacttagg

SEQ ID NO: 1895083 - DNA, 25 bp, Homo sapien
taattaattgaacctatcctttctc

SEQ ID NO: 1895084 - DNA, 25 bp, Homo sapien
tcttgaccagctctactggtggcct

SEQ ID NO: 1895085 - DNA, 25 bp, Homo sapien
gatgacatgagtccaattcctgcca

SEQ ID NO: 1895086 - DNA, 25 bp, Homo sapien
cacaaacgctggttgcaccgattca

SEQ ID NO: 1895087 - DNA, 25 bp, Homo sapien
tgttcagacttgtccagttggccag

SEQ ID NO: 1895088 - DNA, 25 bp, Homo sapien
gccagagtcagtagtgtgtgcacct

SEQ ID NO: 1895089 - DNA, 25 bp, Homo sapien
tgggaagcacttacggagccctctc

SEQ ID NO: 1895090 - DNA, 25 bp, Homo sapien
tcaatgggcaggagtttttcctgca

SEQ ID NO: 1895091 - DNA, 25 bp, Homo sapien
cttctctccaataggaggttcattt

SEQ ID NO: 1895092 - DNA, 25 bp, Homo sapien
tccaataggaggttcatttttgccc

SEQ ID NO: 1895093 - DNA, 25 bp, Homo sapien
tatttcaatggcatatgagtttata

SEQ ID NO: 1895094 - DNA, 25 bp, Homo sapien
tttaggattatcgtcaaatttggta

SEQ ID NO: 1895095 - DNA, 25 bp, Homo sapien
caaatttggtaaagcctctatcaaa

SEQ ID NO: 1895096 - DNA, 25 bp, Homo sapien
gttctctttgaattggccacactca

SEQ ID NO: 1895097 - DNA, 25 bp, Homo sapien
gagagcatcaactgctgccacttgg

SEQ ID NO: 1895098 - DNA, 25 bp, Homo sapien
caaagtgctaatcacaaaggcgggc

SEQ ID NO: 1895099 - DNA, 25 bp, Homo sapien
taaatatctctatcagtcctggcat

SEQ ID NO: 1895100 - DNA, 25 bp, Homo sapien
aattggccagctatcacatttgcct

SEQ ID NO: 1895101 - DNA, 25 bp, Homo sapien
ccgtgattacattcctgtgccacca

SEQ ID NO: 1895102 - DNA, 25 bp, Homo sapien
gcaaataggactgtaaaatgaagct

SEQ ID NO: 1895103 - DNA, 25 bp, Homo sapien
tggagaggtaaagtctcatgttggc

SEQ ID NO: 1895104 - DNA, 25 bp, Homo sapien
taggcctcccatagcaccgtgatta

SEQ ID NO: 1895105 - DNA, 25 bp, Homo sapien
gaagccaaagggagcctcaggtcat

SEQ ID NO: 1895106 - DNA, 25 bp, Homo sapien
catcaggtaccaggacattcagggc

SEQ ID NO: 1895107 - DNA, 25 bp, Homo sapien
cattcagggctttaaagtcactgcc

SEQ ID NO: 1895108 - DNA, 25 bp, Homo sapien
ttgtgggccatttgaagaaatccgc

SEQ ID NO: 1895109 - DNA, 25 bp, Homo sapien
gtttctggagttaaccaagtttgca

SEQ ID NO: 1895110 - DNA, 25 bp, Homo sapien
gtttgtttcagctagagaagtttct

SEQ ID NO: 1895111 - DNA, 25 bp, Homo sapien
gaccagtataccaaagtgacactgt

SEQ ID NO: 1895112 - DNA, 25 bp, Homo sapien
gaatgttgtaaatgaccagtatacc

SEQ ID NO: 1895113 - DNA, 25 bp, Homo sapien
tctagaaagccacatgtccaactcc

SEQ ID NO: 1895114 - DNA, 25 bp, Homo sapien
cagctccacataaaggactgagaag

SEQ ID NO: 1895115 - DNA, 25 bp, Homo sapien
ccccagctccacataaaggactgag

SEQ ID NO: 1895116 - DNA, 25 bp, Homo sapien
tagaaagccacatgtccaactccat

SEQ ID NO: 1895117 - DNA, 25 bp, Homo sapien
tacagagtggcgtttttccgaggac

SEQ ID NO: 1895118 - DNA, 25 bp, Homo sapien
gactgtgttccacttggtctgtctc

SEQ ID NO: 1895119 - DNA, 25 bp, Homo sapien
gtctgtctctgatggctattaacta

SEQ ID NO: 1895120 - DNA, 25 bp, Homo sapien
taactaataaccgttctcattctgc

SEQ ID NO: 1895121 - DNA, 25 bp, Homo sapien
ctgtgggaaataagcaacaacggaa

SEQ ID NO: 1895122 - DNA, 25 bp, Homo sapien
tagagcataactcaaaggccagagc

SEQ ID NO: 1895123 - DNA, 25 bp, Homo sapien
aggtggaagagtcccgagccctgcc

SEQ ID NO: 1895124 - DNA, 25 bp, Homo sapien
taatcgataatcttagagcataact

SEQ ID NO: 1895125 - DNA, 25 bp, Homo sapien
gggtgcgggaccctatccgactgcc

SEQ ID NO: 1895126 - DNA, 25 bp, Homo sapien
gtgtgtgtgggaccgcgctaaacct

SEQ ID NO: 1895127 - DNA, 25 bp, Homo sapien
gtcaaagtcagttcgcgttgccgac

SEQ ID NO: 1895128 - DNA, 25 bp, Homo sapien
ggaagggcgggactctcgtgcgtcc

SEQ ID NO: 1895129 - DNA, 25 bp, Homo sapien
cttgcagattattgtttcctcctct

SEQ ID NO: 1895130 - DNA, 25 bp, Homo sapien
gctctgctgagttgttcccttagga

SEQ ID NO: 1895131 - DNA, 25 bp, Homo sapien
ggcaacagcaatttgctgacaaggt

SEQ ID NO: 1895132 - DNA, 25 bp, Homo sapien
aaagaacttacacccaagcctggtg

SEQ ID NO: 1895133 - DNA, 25 bp, Homo sapien
ggattatgatattacaggagctggt

SEQ ID NO: 1895134 - DNA, 25 bp, Homo sapien
tattcagaattgacacccatgagag

SEQ ID NO: 1895135 - DNA, 25 bp, Homo sapien
taacctggaggatacatggcatcat

SEQ ID NO: 1895136 - DNA, 25 bp, Homo sapien
tacctgataagtgaggacagggtgt

SEQ ID NO: 1895137 - DNA, 25 bp, Homo sapien
ttttgtaaacagtggcaggagcgtg

SEQ ID NO: 1895138 - DNA, 25 bp, Homo sapien
tatctgagcaacattgggactgagg

SEQ ID NO: 1895139 - DNA, 25 bp, Homo sapien
taaaagcaggccttaatatgggacc

SEQ ID NO: 1895140 - DNA, 25 bp, Homo sapien
cactcataagagctagggcattagg

SEQ ID NO: 1895141 - DNA, 25 bp, Homo sapien
atctttgccttctaaaacttggtga

SEQ ID NO: 1895142 - DNA, 25 bp, Homo sapien
tctttgccttctaaaacttggtgaa

SEQ ID NO: 1895143 - DNA, 25 bp, Homo sapien
aatctttgccttctaaaacttggtg

SEQ ID NO: 1895144 - DNA, 25 bp, Homo sapien
cgagtataaatgcagatgtccagtg

SEQ ID NO: 1895145 - DNA, 25 bp, Homo sapien
caattgcgccaatctaaagagcttt

SEQ ID NO: 1895146 - DNA, 25 bp, Homo sapien
cctgacatcagttgccattgggcca

SEQ ID NO: 1895147 - DNA, 25 bp, Homo sapien
tctaatgagttacaagtagtcccaa

SEQ ID NO: 1895148 - DNA, 25 bp, Homo sapien
tctaacgggtggaactaaatgtgcc

SEQ ID NO: 1895149 - DNA, 25 bp, Homo sapien
taacatcagtcgctacagtgtcgta

SEQ ID NO: 1895150 - DNA, 25 bp, Homo sapien
catgcaaatggcctgtaggtgcttc

SEQ ID NO: 1895151 - DNA, 25 bp, Homo sapien
gaatagcatcaagggtctaacgggt

SEQ ID NO: 1895152 - DNA, 25 bp, Homo sapien
tcaatagatggttaataagtgcaaa

SEQ ID NO: 1895153 - DNA, 25 bp, Homo sapien
taaaccagtaagtgtctcgtcaatg

SEQ ID NO: 1895154 - DNA, 25 bp, Homo sapien
tcaatgtagctttggaaagctgcag

SEQ ID NO: 1895155 - DNA, 25 bp, Homo sapien
taagtgcaaattaaaccagtaagtg

SEQ ID NO: 1895156 - DNA, 25 bp, Homo sapien
gcgtgggtgtcgattctcatgctca

SEQ ID NO: 1895157 - DNA, 25 bp, Homo sapien
tttatcaatggcgtgggtgtcgatt

SEQ ID NO: 1895158 - DNA, 25 bp, Homo sapien
taaaatgtatgctgctggaaagatg

SEQ ID NO: 1895159 - DNA, 25 bp, Homo sapien
ggagaaaatagaccagtatattaaa

SEQ ID NO: 1895160 - DNA, 25 bp, Homo sapien
cagggtcagctgcaccatcatcctg

SEQ ID NO: 1895161 - DNA, 25 bp, Homo sapien
tgcaccatcatcctgtcgggcttct

SEQ ID NO: 1895162 - DNA, 25 bp, Homo sapien
tcagctgcaccatcatcctgtcggg

SEQ ID NO: 1895163 - DNA, 25 bp, Homo sapien
gctgcaccatcatcctgtcgggctt

SEQ ID NO: 1895164 - DNA, 25 bp, Homo sapien
actgtagttgccgtccagcatcgca

SEQ ID NO: 1895165 - DNA, 25 bp, Homo sapien
tgtagttgccgtccagcatcgcagt

SEQ ID NO: 1895166 - DNA, 25 bp, Homo sapien
ccatcactgtagttgccgtccagca

SEQ ID NO: 1895167 - DNA, 25 bp, Homo sapien
ggcggaggtaatccgctggtgcagg

SEQ ID NO: 1895168 - DNA, 25 bp, Homo sapien
cactataagcgcatggcaaagtcac

SEQ ID NO: 1895169 - DNA, 25 bp, Homo sapien
acactataagcgcatggcaaagtca

SEQ ID NO: 1895170 - DNA, 25 bp, Homo sapien
cagacactataagcgcatggcaaag

SEQ ID NO: 1895171 - DNA, 25 bp, Homo sapien
gacactataagcgcatggcaaagtc

SEQ ID NO: 1895172 - DNA, 25 bp, Homo sapien
tcacgcccgtgatgatggtggacat

SEQ ID NO: 1895173 - DNA, 25 bp, Homo sapien
cattcacgcccgtgatgatggtgga

SEQ ID NO: 1895174 - DNA, 25 bp, Homo sapien
gatgtccacggccttgatgtaggag

SEQ ID NO: 1895175 - DNA, 25 bp, Homo sapien
agaggtagatgtccacggccttgat

SEQ ID NO: 1895176 - DNA, 25 bp, Homo sapien
tagcggggaaataagtttggagcaa

SEQ ID NO: 1895177 - DNA, 25 bp, Homo sapien
tggcgacgcaacgtgaaattaatgt

SEQ ID NO: 1895178 - DNA, 25 bp, Homo sapien
gaagatgtggcgacgcaacgtgaaa

SEQ ID NO: 1895179 - DNA, 25 bp, Homo sapien
gacagcatgaccatcagggtagcgg

SEQ ID NO: 1895180 - DNA, 25 bp, Homo sapien
gatccgttcatctgtctttaaggag

SEQ ID NO: 1895181 - DNA, 25 bp, Homo sapien
agtgagatccgttcatctgtcttta

SEQ ID NO: 1895182 - DNA, 25 bp, Homo sapien
tgtctttaaggagtcattgcccttt

SEQ ID NO: 1895183 - DNA, 25 bp, Homo sapien
tgggagagtgagatccgttcatctg

SEQ ID NO: 1895184 - DNA, 25 bp, Homo sapien
agcataactgaggagaagcctcatg

SEQ ID NO: 1895185 - DNA, 25 bp, Homo sapien
agaagcctcatggcactgccagtcc

SEQ ID NO: 1895186 - DNA, 25 bp, Homo sapien
tgagcataactgaggagaagcctca

SEQ ID NO: 1895187 - DNA, 25 bp, Homo sapien
gaagcctcatggcactgccagtcca

SEQ ID NO: 1895188 - DNA, 25 bp, Homo sapien
gagtgtaggagtcacaggggtgtcc

SEQ ID NO: 1895189 - DNA, 25 bp, Homo sapien
tgccagtgttcaggaggagtgtagg

SEQ ID NO: 1895190 - DNA, 25 bp, Homo sapien
agtgttcaggaggagtgtaggagtc

SEQ ID NO: 1895191 - DNA, 25 bp, Homo sapien
gagtgccagtgttcaggaggagtgt

SEQ ID NO: 1895192 - DNA, 25 bp, Homo sapien
tgtccaagggaaatcggctgaagtc

SEQ ID NO: 1895193 - DNA, 25 bp, Homo sapien
tgttgcacattgcagttactgtaac

SEQ ID NO: 1895194 - DNA, 25 bp, Homo sapien
gctttcaatttcaagagagcacgtt

SEQ ID NO: 1895195 - DNA, 25 bp, Homo sapien
tttcaagagagcacgtttgtgtgtc

SEQ ID NO: 1895196 - DNA, 25 bp, Homo sapien
gagtaccatgagtttctaaagttcc

SEQ ID NO: 1895197 - DNA, 25 bp, Homo sapien
ccacaaagcacaagaggagcagacc

SEQ ID NO: 1895198 - DNA, 25 bp, Homo sapien
gaaactggaatgcaccgtccacaaa

SEQ ID NO: 1895199 - DNA, 25 bp, Homo sapien
gagcagaccacagcaagtgaccaca

SEQ ID NO: 1895200 - DNA, 25 bp, Homo sapien
ggctggacccgcaacatgacgttgt

SEQ ID NO: 1895201 - DNA, 25 bp, Homo sapien
gccggccgtcaaacgtcatgctgag

SEQ ID NO: 1895202 - DNA, 25 bp, Homo sapien
tgcacgaaaaacatgtcagggaccc

SEQ ID NO: 1895203 - DNA, 25 bp, Homo sapien
tcaggtagagggtcatcgtaaagtc

SEQ ID NO: 1895204 - DNA, 25 bp, Homo sapien
cagagagggaaccccagacacacac

SEQ ID NO: 1895205 - DNA, 25 bp, Homo sapien
gcagagagggaaccccagacacaca

SEQ ID NO: 1895206 - DNA, 25 bp, Homo sapien
aacctctgagatgctatccaaactc

SEQ ID NO: 1895207 - DNA, 25 bp, Homo sapien
cagaagctgttctgactttgtcaga

SEQ ID NO: 1895208 - DNA, 25 bp, Homo sapien
catgctgaaatcatggtcatctatc

SEQ ID NO: 1895209 - DNA, 25 bp, Homo sapien
catggtcatctatcctcagaagctg

SEQ ID NO: 1895210 - DNA, 25 bp, Homo sapien
tgtcagaggcgatttggtgatgtca

SEQ ID NO: 1895211 - DNA, 25 bp, Homo sapien
acagatataagggaggaagccgggc

SEQ ID NO: 1895212 - DNA, 25 bp, Homo sapien
gaaccagtgagctgcttacagatat

SEQ ID NO: 1895213 - DNA, 25 bp, Homo sapien
ggaacaccagctcccattgccgcgg

SEQ ID NO: 1895214 - DNA, 25 bp, Homo sapien
caccagctcccattgccgcggacat

SEQ ID NO: 1895215 - DNA, 25 bp, Homo sapien
tctgatccttggtgaggggtcgggg

SEQ ID NO: 1895216 - DNA, 25 bp, Homo sapien
ccccgccacccctgactgccgtctc

SEQ ID NO: 1895217 - DNA, 25 bp, Homo sapien
cccgccacccctgactgccgtctcc

SEQ ID NO: 1895218 - DNA, 25 bp, Homo sapien
tgatccttggtgaggggtcggggag

SEQ ID NO: 1895219 - DNA, 25 bp, Homo sapien
tcttcatgtacttctcgtctttgtc

SEQ ID NO: 1895220 - DNA, 25 bp, Homo sapien
tgtgggcatcttcatgtacttctcg

SEQ ID NO: 1895221 - DNA, 25 bp, Homo sapien
ggcatcttcatgtacttctcgtctt

SEQ ID NO: 1895222 - DNA, 25 bp, Homo sapien
tgtacttctcgtctttgtctttggg

SEQ ID NO: 1895223 - DNA, 25 bp, Homo sapien
ctgatgaaaggaggtttgtcaaatt

SEQ ID NO: 1895224 - DNA, 25 bp, Homo sapien
gccagcctgaaatggaaccagtcac

SEQ ID NO: 1895225 - DNA, 25 bp, Homo sapien
aggtttgtcaaattctgagatgcca

SEQ ID NO: 1895226 - DNA, 25 bp, Homo sapien
ggccagcctgaaatggaaccagtca

SEQ ID NO: 1895227 - DNA, 25 bp, Homo sapien
tcagaactttcttggaggtgagctg

SEQ ID NO: 1895228 - DNA, 25 bp, Homo sapien
ctggaaggctcattcagctaatggc

SEQ ID NO: 1895229 - DNA, 25 bp, Homo sapien
tgacaaattccaacctacaagactt

SEQ ID NO: 1895230 - DNA, 25 bp, Homo sapien
gcatctgataagttacacttcacct

SEQ ID NO: 1895231 - DNA, 25 bp, Homo sapien
aaataggttgccactctaactctgg

SEQ ID NO: 1895232 - DNA, 25 bp, Homo sapien
gaccaacagagtttgttgtcgttgt

SEQ ID NO: 1895233 - DNA, 25 bp, Homo sapien
aaagtttttgatgaagaccaacaga

SEQ ID NO: 1895234 - DNA, 25 bp, Homo sapien
tcaccgatatttgcaaataggttgc

SEQ ID NO: 1895235 - DNA, 25 bp, Homo sapien
tgctttcagtggccaaaacccatcc

SEQ ID NO: 1895236 - DNA, 25 bp, Homo sapien
gacatctcgtggacttctcttccgg

SEQ ID NO: 1895237 - DNA, 25 bp, Homo sapien
ctttcttagacatctcgtggacttc

SEQ ID NO: 1895238 - DNA, 25 bp, Homo sapien
tcttccgggccagtgcattctgctt

SEQ ID NO: 1895239 - DNA, 25 bp, Homo sapien
tccaaattcaaacagctctctccag

SEQ ID NO: 1895240 - DNA, 25 bp, Homo sapien
tcattattagaaggatgtttactca

SEQ ID NO: 1895241 - DNA, 25 bp, Homo sapien
tctctcttaagacattattggtctg

SEQ ID NO: 1895242 - DNA, 25 bp, Homo sapien
atttgggacagccaacatgggtttc

SEQ ID NO: 1895243 - DNA, 25 bp, Homo sapien
cggtacctgcgtgggctgtctatat

SEQ ID NO: 1895244 - DNA, 25 bp, Homo sapien
cattattatttgctttagctgaggg

SEQ ID NO: 1895245 - DNA, 25 bp, Homo sapien
gctgaatccctgaaaccccagggct

SEQ ID NO: 1895246 - DNA, 25 bp, Homo sapien
tatttgctttagctgagggctggat

SEQ ID NO: 1895247 - DNA, 25 bp, Homo sapien
caggacaggcggtaccagctgctga

SEQ ID NO: 1895248 - DNA, 25 bp, Homo sapien
tctcttagctaaggagagctggttc

SEQ ID NO: 1895249 - DNA, 25 bp, Homo sapien
agcctttgcaacaaggccacttcct

SEQ ID NO: 1895250 - DNA, 25 bp, Homo sapien
tagctaaggagagctggttcagcag

SEQ ID NO: 1895251 - DNA, 25 bp, Homo sapien
gccctgtcttagagccctttctgct

SEQ ID NO: 1895252 - DNA, 25 bp, Homo sapien
gggccctgtcttagagccctttctg

SEQ ID NO: 1895253 - DNA, 25 bp, Homo sapien
tgggcttgagccaaccatgcatccc

SEQ ID NO: 1895254 - DNA, 25 bp, Homo sapien
ttctgctttgggcttgagccaacca

SEQ ID NO: 1895255 - DNA, 25 bp, Homo sapien
actgatgggtgaacggcaggcagca

SEQ ID NO: 1895256 - DNA, 25 bp, Homo sapien
tcagctgtttccacgtgctccctgc

SEQ ID NO: 1895257 - DNA, 25 bp, Homo sapien
atcagctgtttccacgtgctccctg

SEQ ID NO: 1895258 - DNA, 25 bp, Homo sapien
gactgatgggtgaacggcaggcagc

SEQ ID NO: 1895259 - DNA, 25 bp, Homo sapien
cgtgggttttacatctgtagattca

SEQ ID NO: 1895260 - DNA, 25 bp, Homo sapien
catccgtgggttttacatctgtaga

SEQ ID NO: 1895261 - DNA, 25 bp, Homo sapien
gcatccgtgggttttacatctgtag

SEQ ID NO: 1895262 - DNA, 25 bp, Homo sapien
tccgtgggttttacatctgtagatt

SEQ ID NO: 1895263 - DNA, 25 bp, Homo sapien
taggcttctaggctcaaatacagac

SEQ ID NO: 1895264 - DNA, 25 bp, Homo sapien
caagcctgcctttgattgaaatcca

SEQ ID NO: 1895265 - DNA, 25 bp, Homo sapien
aaatacagactcacaagaagtcccc

SEQ ID NO: 1895266 - DNA, 25 bp, Homo sapien
tcgatatgcttgtcaggtttcaggg

SEQ ID NO: 1895267 - DNA, 25 bp, Homo sapien
ggagatggagccagccgatctctag

SEQ ID NO: 1895268 - DNA, 25 bp, Homo sapien
gacctctgcttctaactgttctgta

SEQ ID NO: 1895269 - DNA, 25 bp, Homo sapien
ctaaagttggcaatgcaggtggttt

SEQ ID NO: 1895270 - DNA, 25 bp, Homo sapien
tagtaccatttaggtacaactggta

SEQ ID NO: 1895271 - DNA, 25 bp, Homo sapien
accatagcctctcaggcaaaaggag

SEQ ID NO: 1895272 - DNA, 25 bp, Homo sapien
tctggttaccatagcctctcaggca

SEQ ID NO: 1895273 - DNA, 25 bp, Homo sapien
ctccagtctggttaccatagcctct

SEQ ID NO: 1895274 - DNA, 25 bp, Homo sapien
ccatagcctctcaggcaaaaggagg

SEQ ID NO: 1895275 - DNA, 25 bp, Homo sapien
gacaccaggaaagagttggagatgt

SEQ ID NO: 1895276 - DNA, 25 bp, Homo sapien
aaagagttggagatgtggaggcagc

SEQ ID NO: 1895277 - DNA, 25 bp, Homo sapien
tgagaaaggtctgtggctaggtgcc

SEQ ID NO: 1895278 - DNA, 25 bp, Homo sapien
aggtctgtggctaggtgccactcta

SEQ ID NO: 1895279 - DNA, 25 bp, Homo sapien
tccccttcagttttggccattttca

SEQ ID NO: 1895280 - DNA, 25 bp, Homo sapien
ggtgtcattgtatcatggccctgca

SEQ ID NO: 1895281 - DNA, 25 bp, Homo sapien
ggcaatgctaaatacaatggtgtca

SEQ ID NO: 1895282 - DNA, 25 bp, Homo sapien
caagtagtgtcagactagtatactg

SEQ ID NO: 1895283 - DNA, 25 bp, Homo sapien
tccagggtgaatcatcccatgttct

SEQ ID NO: 1895284 - DNA, 25 bp, Homo sapien
cacactgaactattactgaggcact

SEQ ID NO: 1895285 - DNA, 25 bp, Homo sapien
ccatatgagacagcccagatctagg

SEQ ID NO: 1895286 - DNA, 25 bp, Homo sapien
gaccccaatgtacctagtgcagaga

SEQ ID NO: 1895287 - DNA, 25 bp, Homo sapien
cagatctaggatgcattctgctcca

SEQ ID NO: 1895288 - DNA, 25 bp, Homo sapien
cacacaagaacagaaggtcccagag

SEQ ID NO: 1895289 - DNA, 25 bp, Homo sapien
tcttctaggaacagccttggagccc

SEQ ID NO: 1895290 - DNA, 25 bp, Homo sapien
ggcgtgtggtcaacaagtccgtctg

SEQ ID NO: 1895291 - DNA, 25 bp, Homo sapien
tgacgcgagacagcatgaacatgga

SEQ ID NO: 1895292 - DNA, 25 bp, Homo sapien
ttgaaaaatatgtaggaggcaggga

SEQ ID NO: 1895293 - DNA, 25 bp, Homo sapien
tatgtaggaggcagggaatatcaac

SEQ ID NO: 1895294 - DNA, 25 bp, Homo sapien
aatatgtaggaggcagggaatatca

SEQ ID NO: 1895295 - DNA, 25 bp, Homo sapien
aattaagttgaaaaatatgtaggag

SEQ ID NO: 1895296 - DNA, 25 bp, Homo sapien
tggaagatacgaaaacccgtctggc

SEQ ID NO: 1895297 - DNA, 25 bp, Homo sapien
caggtggaccactattttgtcttgc

SEQ ID NO: 1895298 - DNA, 25 bp, Homo sapien
ctagagtatttgtcaatggcatggg

SEQ ID NO: 1895299 - DNA, 25 bp, Homo sapien
ttctttctggcagcgttggcttcac

SEQ ID NO: 1895300 - DNA, 25 bp, Homo sapien
tcactgtagcttccatccagcatca

SEQ ID NO: 1895301 - DNA, 25 bp, Homo sapien
aggctgttggcctcagactcactgt

SEQ ID NO: 1895302 - DNA, 25 bp, Homo sapien
tcttctgtcaggatatggcttctgg

SEQ ID NO: 1895303 - DNA, 25 bp, Homo sapien
gaagcattccacacatgcacgggaa

SEQ ID NO: 1895304 - DNA, 25 bp, Homo sapien
agatgtccacggccttgacgtagga

SEQ ID NO: 1895305 - DNA, 25 bp, Homo sapien
ggtagatgtccacggccttgacgta

SEQ ID NO: 1895306 - DNA, 25 bp, Homo sapien
agaggtagatgtccacggccttgac

SEQ ID NO: 1895307 - DNA, 25 bp, Homo sapien
gatgtccacggccttgacgtaggag

SEQ ID NO: 1895308 - DNA, 25 bp, Homo sapien
aaactttcactctggaattcagggt

SEQ ID NO: 1895309 - DNA, 25 bp, Homo sapien
tttctcaaagcccaacctaatgttg

SEQ ID NO: 1895310 - DNA, 25 bp, Homo sapien
taatgttgtctaaatttacaatgac

SEQ ID NO: 1895311 - DNA, 25 bp, Homo sapien
gtaaactttcactctggaattcagg

SEQ ID NO: 1895312 - DNA, 25 bp, Homo sapien
gaagatgtggcgacgcaacgtgaag

SEQ ID NO: 1895313 - DNA, 25 bp, Homo sapien
tggcgacgcaacgtgaagttaatgt

SEQ ID NO: 1895314 - DNA, 25 bp, Homo sapien
tgtggcgacgcaacgtgaagttaat

SEQ ID NO: 1895315 - DNA, 25 bp, Homo sapien
gatgtggcgacgcaacgtgaagtta

SEQ ID NO: 1895316 - DNA, 25 bp, Homo sapien
gggatgcaggaagaagccaatgagg

SEQ ID NO: 1895317 - DNA, 25 bp, Homo sapien
gatgcaggaagaagccaatgaggtt

SEQ ID NO: 1895318 - DNA, 25 bp, Homo sapien
caggaagaagccaatgaggttccat

SEQ ID NO: 1895319 - DNA, 25 bp, Homo sapien
gcaggaagaagccaatgaggttcca

SEQ ID NO: 1895320 - DNA, 25 bp, Homo sapien
aatgcccaggcgagtgtacagttca

SEQ ID NO: 1895321 - DNA, 25 bp, Homo sapien
cagttgagcttggttcaacccaggc

SEQ ID NO: 1895322 - DNA, 25 bp, Homo sapien
aaagccttagctagagtcagttgag

SEQ ID NO: 1895323 - DNA, 25 bp, Homo sapien
ctaaagtctgacatttgggacatga

SEQ ID NO: 1895324 - DNA, 25 bp, Homo sapien
tttgaatcagattgtggcaaaagat

SEQ ID NO: 1895325 - DNA, 25 bp, Homo sapien
gctgtagaaggccagcctggaagtt

SEQ ID NO: 1895326 - DNA, 25 bp, Homo sapien
tgtttttagggattcatccccattc

SEQ ID NO: 1895327 - DNA, 25 bp, Homo sapien
aaggccagcctggaagttgtgtgaa

SEQ ID NO: 1895328 - DNA, 25 bp, Homo sapien
aaactgagacaaggagatcttctca

SEQ ID NO: 1895329 - DNA, 25 bp, Homo sapien
gtggctgaagtccatgttgcacatg

SEQ ID NO: 1895330 - DNA, 25 bp, Homo sapien
gtccatgttgcacatggcagtgacc

SEQ ID NO: 1895331 - DNA, 25 bp, Homo sapien
gttgcacatggcagtgaccgtaatc

SEQ ID NO: 1895332 - DNA, 25 bp, Homo sapien
tccaggggaaagtggctgaagtcca

SEQ ID NO: 1895333 - DNA, 25 bp, Homo sapien
ttggcttgtgcggtgaattattggc

SEQ ID NO: 1895334 - DNA, 25 bp, Homo sapien
cacatattggcttgtgcggtgaatt

SEQ ID NO: 1895335 - DNA, 25 bp, Homo sapien
tgcggtgaattattggctcctacat

SEQ ID NO: 1895336 - DNA, 25 bp, Homo sapien
gcttgtgcggtgaattattggctcc

SEQ ID NO: 1895337 - DNA, 25 bp, Homo sapien
tgctggcgctggagaaagctagcct

SEQ ID NO: 1895338 - DNA, 25 bp, Homo sapien
tctgggaacaccctcagcatgatgt

SEQ ID NO: 1895339 - DNA, 25 bp, Homo sapien
cagtaatgccgcaggtacagggtca

SEQ ID NO: 1895340 - DNA, 25 bp, Homo sapien
gccggccatcgaaggtcatgctctt

SEQ ID NO: 1895341 - DNA, 25 bp, Homo sapien
ggagccggggtgagaccagacaaaa

SEQ ID NO: 1895342 - DNA, 25 bp, Homo sapien
ctgtgggagccggggtgagaccaga

SEQ ID NO: 1895343 - DNA, 25 bp, Homo sapien
tgggagccggggtgagaccagacaa

SEQ ID NO: 1895344 - DNA, 25 bp, Homo sapien
agccggggtgagaccagacaaaaat

SEQ ID NO: 1895345 - DNA, 25 bp, Homo sapien
tgttctagacacagctggttctgga

SEQ ID NO: 1895346 - DNA, 25 bp, Homo sapien
ggttgattcagtctagggcagccag

SEQ ID NO: 1895347 - DNA, 25 bp, Homo sapien
agacatctgggttgattcagtctag

SEQ ID NO: 1895348 - DNA, 25 bp, Homo sapien
ccaggctgttctagacacagctggt

SEQ ID NO: 1895349 - DNA, 25 bp, Homo sapien
ggagatgctgtccaggctctccacc

SEQ ID NO: 1895350 - DNA, 25 bp, Homo sapien
agatgctgtccaggctctccacctg

SEQ ID NO: 1895351 - DNA, 25 bp, Homo sapien
tctccacctgtacgtccacgcccac

SEQ ID NO: 1895352 - DNA, 25 bp, Homo sapien
ctcggagatgctgtccaggctctcc

SEQ ID NO: 1895353 - DNA, 25 bp, Homo sapien
aagagcagagacagctggttaaggc

SEQ ID NO: 1895354 - DNA, 25 bp, Homo sapien
ttcctctctacctttgggctgggaa

SEQ ID NO: 1895355 - DNA, 25 bp, Homo sapien
tcctctctacctttgggctgggaac

SEQ ID NO: 1895356 - DNA, 25 bp, Homo sapien
gatcaccactttttacatcccaggg

SEQ ID NO: 1895357 - DNA, 25 bp, Homo sapien
gcctgccttatgtgccatccctggg

SEQ ID NO: 1895358 - DNA, 25 bp, Homo sapien
gggtgtctgagctctctccacaacg

SEQ ID NO: 1895359 - DNA, 25 bp, Homo sapien
gggccaggctgaatgtgtaatccat

SEQ ID NO: 1895360 - DNA, 25 bp, Homo sapien
taggcttgcaaacacttgaaatccc

SEQ ID NO: 1895361 - DNA, 25 bp, Homo sapien
caggatcaggacgttgtgacccact

SEQ ID NO: 1895362 - DNA, 25 bp, Homo sapien
caaatgcagggtagaggtcctcttg

SEQ ID NO: 1895363 - DNA, 25 bp, Homo sapien
cccacactgcgtacgtaggaactag

SEQ ID NO: 1895364 - DNA, 25 bp, Homo sapien
gggatggcccggtatttggatctac

SEQ ID NO: 1895365 - DNA, 25 bp, Homo sapien
ggcatttgccaattcaggaggggaa

SEQ ID NO: 1895366 - DNA, 25 bp, Homo sapien
tggatctacttctcttaggggcatt

SEQ ID NO: 1895367 - DNA, 25 bp, Homo sapien
ggtctaggtgaagcagagtcccaag

SEQ ID NO: 1895368 - DNA, 25 bp, Homo sapien
gcagaaaagcgtttgttaaaatcag

SEQ ID NO: 1895369 - DNA, 25 bp, Homo sapien
ccattgtcctaaaggttttagccag

SEQ ID NO: 1895370 - DNA, 25 bp, Homo sapien
aatgccattgatgccactaccattg

SEQ ID NO: 1895371 - DNA, 25 bp, Homo sapien
tatgaccgttggaaagttatgacat

SEQ ID NO: 1895372 - DNA, 25 bp, Homo sapien
ccttcatcaactttcagggagagca

SEQ ID NO: 1895373 - DNA, 25 bp, Homo sapien
tcagggagagcaactgtctttctgc

SEQ ID NO: 1895374 - DNA, 25 bp, Homo sapien
ctttcagggagagcaactgtctttc

SEQ ID NO: 1895375 - DNA, 25 bp, Homo sapien
tcaactttcagggagagcaactgtc

SEQ ID NO: 1895376 - DNA, 25 bp, Homo sapien
tggactcaggaagcgggcccctgaa

SEQ ID NO: 1895377 - DNA, 25 bp, Homo sapien
gagaaaccgccatgccctgtgcatg

SEQ ID NO: 1895378 - DNA, 25 bp, Homo sapien
gaagtggatgataagcccgagaaac

SEQ ID NO: 1895379 - DNA, 25 bp, Homo sapien
ttgctgtggctcacagtatgggcca

SEQ ID NO: 1895380 - DNA, 25 bp, Homo sapien
tggagatgcataggccgcagttcct

SEQ ID NO: 1895381 - DNA, 25 bp, Homo sapien
aaatccgtggagaggagcaactgac

SEQ ID NO: 1895382 - DNA, 25 bp, Homo sapien
cagactgcaattcgcaatatggaga

SEQ ID NO: 1895383 - DNA, 25 bp, Homo sapien
tgtgtccaccagaccaagccctgag

SEQ ID NO: 1895384 - DNA, 25 bp, Homo sapien
gaaggctgtcatgcccctctctgac

SEQ ID NO: 1895385 - DNA, 25 bp, Homo sapien
gacttcagaaggctgtcatgcccct

SEQ ID NO: 1895386 - DNA, 25 bp, Homo sapien
tcatggacttcagaaggctgtcatg

SEQ ID NO: 1895387 - DNA, 25 bp, Homo sapien
actcagcttcaactcatccgtccag

SEQ ID NO: 1895388 - DNA, 25 bp, Homo sapien
gaaaacgagtttgcctgtgggcagc

SEQ ID NO: 1895389 - DNA, 25 bp, Homo sapien
tctgtgaaaacgagtttgcctgtgg

SEQ ID NO: 1895390 - DNA, 25 bp, Homo sapien
acagccccgtatccctctcctctgt

SEQ ID NO: 1895391 - DNA, 25 bp, Homo sapien
tccactgactctaagcttaattgtg

SEQ ID NO: 1895392 - DNA, 25 bp, Homo sapien
gcaaccggggccctgctgaccagga

SEQ ID NO: 1895393 - DNA, 25 bp, Homo sapien
tccgtgagccttggtgggaccagag

SEQ ID NO: 1895394 - DNA, 25 bp, Homo sapien
gcccttgctctgagtcggctccgtg

SEQ ID NO: 1895395 - DNA, 25 bp, Homo sapien
ggtgggaccagaggcgcggcaaccg

SEQ ID NO: 1895396 - DNA, 25 bp, Homo sapien
tccgtcagaaggagcaagaccatgc

SEQ ID NO: 1895397 - DNA, 25 bp, Homo sapien
gaggaaagagattaagctgggctct

SEQ ID NO: 1895398 - DNA, 25 bp, Homo sapien
tgtgaacaaatgctcgcaggcagaa

SEQ ID NO: 1895399 - DNA, 25 bp, Homo sapien
tctaggcatggtgagtccgtcagaa

SEQ ID NO: 1895400 - DNA, 25 bp, Homo sapien
ccactttcctcctggaactggcttg

SEQ ID NO: 1895401 - DNA, 25 bp, Homo sapien
tcacaccacaaggagtccactttcc

SEQ ID NO: 1895402 - DNA, 25 bp, Homo sapien
agtcctgaccctctacgctctggag

SEQ ID NO: 1895403 - DNA, 25 bp, Homo sapien
cctcctggaactggcttgaggaagg

SEQ ID NO: 1895404 - DNA, 25 bp, Homo sapien
tcagagtcagggtttctgggaacat

SEQ ID NO: 1895405 - DNA, 25 bp, Homo sapien
ctgtggcgtgttgcagcattctgct

SEQ ID NO: 1895406 - DNA, 25 bp, Homo sapien
attctgctcagagtcagggtttctg

SEQ ID NO: 1895407 - DNA, 25 bp, Homo sapien
gtggcgtgttgcagcattctgctca

SEQ ID NO: 1895408 - DNA, 25 bp, Homo sapien
ctccgaaggcgggtctcatgctgaa

SEQ ID NO: 1895409 - DNA, 25 bp, Homo sapien
tggtcacatcaaggttcttcttata

SEQ ID NO: 1895410 - DNA, 25 bp, Homo sapien
agtcgtgctcgtccactctgagaag

SEQ ID NO: 1895411 - DNA, 25 bp, Homo sapien
ggatcttggtcacatcaaggttctt

SEQ ID NO: 1895412 - DNA, 25 bp, Homo sapien
acacacgccagatcctcacaggtag

SEQ ID NO: 1895413 - DNA, 25 bp, Homo sapien
caggtagactgacctgaggaccagg

SEQ ID NO: 1895414 - DNA, 25 bp, Homo sapien
ccagatcctcacaggtagactgacc

SEQ ID NO: 1895415 - DNA, 25 bp, Homo sapien
cttctggagccttctgaaagtggat

SEQ ID NO: 1895416 - DNA, 25 bp, Homo sapien
cagcatctactacaacgaggcctct

SEQ ID NO: 1895417 - DNA, 25 bp, Homo sapien
tctcataagtatgtgcctcgggcca

SEQ ID NO: 1895418 - DNA, 25 bp, Homo sapien
cccgggaccatggacagtgtcggct

SEQ ID NO: 1895419 - DNA, 25 bp, Homo sapien
cccagtatgagggagatcctgcaca

SEQ ID NO: 1895420 - DNA, 25 bp, Homo sapien
gggggcacaagctcgggtatgggca

SEQ ID NO: 1895421 - DNA, 25 bp, Homo sapien
acaagctcgggtatgggcacgctgc

SEQ ID NO: 1895422 - DNA, 25 bp, Homo sapien
ggcgggggcacaagctcgggtatgg

SEQ ID NO: 1895423 - DNA, 25 bp, Homo sapien
gcacaagctcgggtatgggcacgct

SEQ ID NO: 1895424 - DNA, 25 bp, Homo sapien
catgaggagtatcccaactgcatca

SEQ ID NO: 1895425 - DNA, 25 bp, Homo sapien
agcaagatgcatgaggagtatccca

SEQ ID NO: 1895426 - DNA, 25 bp, Homo sapien
caagatgcatgaggagtatcccaac

SEQ ID NO: 1895427 - DNA, 25 bp, Homo sapien
gatgcatgaggagtatcccaactgc

SEQ ID NO: 1895428 - DNA, 25 bp, Homo sapien
tctaggacatctgcgtcagcaccct

SEQ ID NO: 1895429 - DNA, 25 bp, Homo sapien
caaggaggcgctctaggacatctgc

SEQ ID NO: 1895430 - DNA, 25 bp, Homo sapien
ctactgcatcaacaaggaggcgctc

SEQ ID NO: 1895431 - DNA, 25 bp, Homo sapien
caggatcactacctccttgtgcttc

SEQ ID NO: 1895432 - DNA, 25 bp, Homo sapien
catgccaggcatgaagcccgggcag

SEQ ID NO: 1895433 - DNA, 25 bp, Homo sapien
tgccaggcatgaagcccgggcagcc

SEQ ID NO: 1895434 - DNA, 25 bp, Homo sapien
caggcatgaagcccgggcagccagc

SEQ ID NO: 1895435 - DNA, 25 bp, Homo sapien
tcatgccaggcatgaagcccgggca

SEQ ID NO: 1895436 - DNA, 25 bp, Homo sapien
aacatgatggctgcccgcgaccggc

SEQ ID NO: 1895437 - DNA, 25 bp, Homo sapien
tacactggtacatgggcaagggcat

SEQ ID NO: 1895438 - DNA, 25 bp, Homo sapien
agggtgagatgttcgcagatgagga

SEQ ID NO: 1895439 - DNA, 25 bp, Homo sapien
ctcatcagcaacagcacgggcatcc

SEQ ID NO: 1895440 - DNA, 25 bp, Homo sapien
acagagggggctccacgttgagacc

SEQ ID NO: 1895441 - DNA, 25 bp, Homo sapien
gggctccacgttgagacctgcaggg

SEQ ID NO: 1895442 - DNA, 25 bp, Homo sapien
cagagtcagctctcaagggagaagt

SEQ ID NO: 1895443 - DNA, 25 bp, Homo sapien
gcctgacagtactgtccagggcaca

SEQ ID NO: 1895444 - DNA, 25 bp, Homo sapien
gcaatcgtgtggtcaggaggccaac

SEQ ID NO: 1895445 - DNA, 25 bp, Homo sapien
agaaagaagggcaatcgtgtggtca

SEQ ID NO: 1895446 - DNA, 25 bp, Homo sapien
caggaggagtaggaataaagttgga

SEQ ID NO: 1895447 - DNA, 25 bp, Homo sapien
agcaggccaggaggagtaggaataa

SEQ ID NO: 1895448 - DNA, 25 bp, Homo sapien
cttggcttgggcatttccacctgcc

SEQ ID NO: 1895449 - DNA, 25 bp, Homo sapien
gggttttctgctctccacgagaacc

SEQ ID NO: 1895450 - DNA, 25 bp, Homo sapien
cctgtccatcgcttcctcttgggtt

SEQ ID NO: 1895451 - DNA, 25 bp, Homo sapien
cacgagaaccatcaagcaaaacaag

SEQ ID NO: 1895452 - DNA, 25 bp, Homo sapien
ttgtggacatctgtgaggcaaaaag

SEQ ID NO: 1895453 - DNA, 25 bp, Homo sapien
tggacatctgtgaggcaaaaagctg

SEQ ID NO: 1895454 - DNA, 25 bp, Homo sapien
acatctgtgaggcaaaaagctgctt

SEQ ID NO: 1895455 - DNA, 25 bp, Homo sapien
atctgtgaggcaaaaagctgctttc

SEQ ID NO: 1895456 - DNA, 25 bp, Homo sapien
ggcagagcaaatcccccctggcttg

SEQ ID NO: 1895457 - DNA, 25 bp, Homo sapien
agcaaatcccccctggcttgaccat

SEQ ID NO: 1895458 - DNA, 25 bp, Homo sapien
aatcccccctggcttgaccattgat

SEQ ID NO: 1895459 - DNA, 25 bp, Homo sapien
caaatcccccctggcttgaccattg

SEQ ID NO: 1895460 - DNA, 25 bp, Homo sapien
tatttgatactgacgccccactcac

SEQ ID NO: 1895461 - DNA, 25 bp, Homo sapien
tactatttgatactgacgccccact

SEQ ID NO: 1895462 - DNA, 25 bp, Homo sapien
ggctggccaggctagttgtcccgat

SEQ ID NO: 1895463 - DNA, 25 bp, Homo sapien
gttgtcccgatttactatttgatac

SEQ ID NO: 1895464 - DNA, 25 bp, Homo sapien
acaccaggctttgccctccctgctg

SEQ ID NO: 1895465 - DNA, 25 bp, Homo sapien
ggctttgccctccctgctgattagt

SEQ ID NO: 1895466 - DNA, 25 bp, Homo sapien
caaacaccaggctttgccctccctg

SEQ ID NO: 1895467 - DNA, 25 bp, Homo sapien
gacacaaacaccaggctttgccctc

SEQ ID NO: 1895468 - DNA, 25 bp, Homo sapien
tattttgtgagatccctaggtaggg

SEQ ID NO: 1895469 - DNA, 25 bp, Homo sapien
tgattacccaattacccagcatggt

SEQ ID NO: 1895470 - DNA, 25 bp, Homo sapien
cagagagcctgaccaatcagtaggt

SEQ ID NO: 1895471 - DNA, 25 bp, Homo sapien
tgggtgcagtgagaactcccagtct

SEQ ID NO: 1895472 - DNA, 25 bp, Homo sapien
accctgtatgcctttaggtactcac

SEQ ID NO: 1895473 - DNA, 25 bp, Homo sapien
gcctttaggtactcacagtttagct

SEQ ID NO: 1895474 - DNA, 25 bp, Homo sapien
tatgcctttaggtactcacagttta

SEQ ID NO: 1895475 - DNA, 25 bp, Homo sapien
tttaggtactcacagtttagctccc

SEQ ID NO: 1895476 - DNA, 25 bp, Homo sapien
tttgcaggtggtagtttagctatag

SEQ ID NO: 1895477 - DNA, 25 bp, Homo sapien
gaaatcttcagggacatattaagag

SEQ ID NO: 1895478 - DNA, 25 bp, Homo sapien
ggaaaactggcaagtgacatgtaga

SEQ ID NO: 1895479 - DNA, 25 bp, Homo sapien
cacagaatcttggagaatcttcact

SEQ ID NO: 1895480 - DNA, 25 bp, Homo sapien
tgctattgattacactctaagaggg

SEQ ID NO: 1895481 - DNA, 25 bp, Homo sapien
cgtttcctctacaaaggctcatgtg

SEQ ID NO: 1895482 - DNA, 25 bp, Homo sapien
catagaggtaacaatcacaagagtc

SEQ ID NO: 1895483 - DNA, 25 bp, Homo sapien
caagaatggtgatcagttgcaccaa

SEQ ID NO: 1895484 - DNA, 25 bp, Homo sapien
tagacatacaatatgtccatagaca

SEQ ID NO: 1895485 - DNA, 25 bp, Homo sapien
ataccataaactcacccctttaatg

SEQ ID NO: 1895486 - DNA, 25 bp, Homo sapien
gaatattccgttatgcagctcccct

SEQ ID NO: 1895487 - DNA, 25 bp, Homo sapien
tgtttccagggttcatcaatgaagc

SEQ ID NO: 1895488 - DNA, 25 bp, Homo sapien
gagtgtaaactggaatcactgtggt

SEQ ID NO: 1895489 - DNA, 25 bp, Homo sapien
tccttgtgagtgtaaactggaatca

SEQ ID NO: 1895490 - DNA, 25 bp, Homo sapien
cacgaacacttgttatctggctttt

SEQ ID NO: 1895491 - DNA, 25 bp, Homo sapien
tcctcacgaacacttgttatctggc

SEQ ID NO: 1895492 - DNA, 25 bp, Homo sapien
gactctagtcatgcacagccttgtg

SEQ ID NO: 1895493 - DNA, 25 bp, Homo sapien
tatagccccagtggatcgaggtcag

SEQ ID NO: 1895494 - DNA, 25 bp, Homo sapien
gattatgccagacacctaggtggga

SEQ ID NO: 1895495 - DNA, 25 bp, Homo sapien
gggtttcaccctatctaagagcaac

SEQ ID NO: 1895496 - DNA, 25 bp, Homo sapien
caacagcttttgagcaatgcacagc

SEQ ID NO: 1895497 - DNA, 25 bp, Homo sapien
tgagcagctcaaactagttctgaag

SEQ ID NO: 1895498 - DNA, 25 bp, Homo sapien
gcagcatgaaaacgtaaagtgctac

SEQ ID NO: 1895499 - DNA, 25 bp, Homo sapien
gttcagaaggcgttcccaacagctt

SEQ ID NO: 1895500 - DNA, 25 bp, Homo sapien
ttattggcttaaacagttacaggtg

SEQ ID NO: 1895501 - DNA, 25 bp, Homo sapien
tattggcttaaacagttacaggtga

SEQ ID NO: 1895502 - DNA, 25 bp, Homo sapien
tggcttaaacagttacaggtgaaac

SEQ ID NO: 1895503 - DNA, 25 bp, Homo sapien
cttaaacagttacaggtgaaacaga

SEQ ID NO: 1895504 - DNA, 25 bp, Homo sapien
gagtcctcagcctttacttgccaga

SEQ ID NO: 1895505 - DNA, 25 bp, Homo sapien
acaagcaggtggctagctgacaggt

SEQ ID NO: 1895506 - DNA, 25 bp, Homo sapien
caagtcagatagcaaaggatctgca

SEQ ID NO: 1895507 - DNA, 25 bp, Homo sapien
attttgctcattaacctcacactgg

SEQ ID NO: 1895508 - DNA, 25 bp, Homo sapien
gcttaaagtataggtacaccccatg

SEQ ID NO: 1895509 - DNA, 25 bp, Homo sapien
tctcatatgacgctaccgtcggtga

SEQ ID NO: 1895510 - DNA, 25 bp, Homo sapien
tcacatcgatccagaggctggctca

SEQ ID NO: 1895511 - DNA, 25 bp, Homo sapien
gacttcttactaggagaccactgag

SEQ ID NO: 1895512 - DNA, 25 bp, Homo sapien
gtacaatatgttcttattttagatg

SEQ ID NO: 1895513 - DNA, 25 bp, Homo sapien
gtttaagacaattctgtattatata

SEQ ID NO: 1895514 - DNA, 25 bp, Homo sapien
atataatagtgtacaatatgttctt

SEQ ID NO: 1895515 - DNA, 25 bp, Homo sapien
tattttagatgtagaaataaaggaa

SEQ ID NO: 1895516 - DNA, 25 bp, Homo sapien
tcgtggaccgatctagaacctaaat

SEQ ID NO: 1895517 - DNA, 25 bp, Homo sapien
tgctgcgaactgaacatgctgaagg

SEQ ID NO: 1895518 - DNA, 25 bp, Homo sapien
gaagaaaaccaagcgatctcctggc

SEQ ID NO: 1895519 - DNA, 25 bp, Homo sapien
tattatctactagagtctgtggcgc

SEQ ID NO: 1895520 - DNA, 25 bp, Homo sapien
agttgagtcacagctcataagtcac

SEQ ID NO: 1895521 - DNA, 25 bp, Homo sapien
gttgagtcacagctcataagtcaca

SEQ ID NO: 1895522 - DNA, 25 bp, Homo sapien
aatgcagaatgtttaatgaagcagt

SEQ ID NO: 1895523 - DNA, 25 bp, Homo sapien
ttgagtcacagctcataagtcacaa

SEQ ID NO: 1895524 - DNA, 25 bp, Homo sapien
aagtcaggatgacaatcagtacagc

SEQ ID NO: 1895525 - DNA, 25 bp, Homo sapien
gtattcgtttgccagatatattcgt

SEQ ID NO: 1895526 - DNA, 25 bp, Homo sapien
cggaatataagagctgccaatgcca

SEQ ID NO: 1895527 - DNA, 25 bp, Homo sapien
caggatgacaatcagtacagctgac

SEQ ID NO: 1895528 - DNA, 25 bp, Homo sapien
tgatcagtgtggttgtctcttggct

SEQ ID NO: 1895529 - DNA, 25 bp, Homo sapien
ctacaggttgggtaggttgatgaaa

SEQ ID NO: 1895530 - DNA, 25 bp, Homo sapien
gggctcatggaggtattcttagcta

SEQ ID NO: 1895531 - DNA, 25 bp, Homo sapien
gattacatctggtgaagtagacaac

SEQ ID NO: 1895532 - DNA, 25 bp, Homo sapien
cacattcttagttaagtccctagtg

SEQ ID NO: 1895533 - DNA, 25 bp, Homo sapien
cccttaaaacattggtctagatgat

SEQ ID NO: 1895534 - DNA, 25 bp, Homo sapien
attaggttcctatgtttcagatgcc

SEQ ID NO: 1895535 - DNA, 25 bp, Homo sapien
ggcttattcagaacctcgatcccta

SEQ ID NO: 1895536 - DNA, 25 bp, Homo sapien
tacgttattgctgggtaaagggcaa

SEQ ID NO: 1895537 - DNA, 25 bp, Homo sapien
tacagtggagaagcggaaagagacc

SEQ ID NO: 1895538 - DNA, 25 bp, Homo sapien
tactatatagaaggcactaagccag

SEQ ID NO: 1895539 - DNA, 25 bp, Homo sapien
catcacaaacattaggaggctgtcc

SEQ ID NO: 1895540 - DNA, 25 bp, Homo sapien
caccctggaatgttgtaggtatatc

SEQ ID NO: 1895541 - DNA, 25 bp, Homo sapien
aagagtggtttaagtctgactcaga

SEQ ID NO: 1895542 - DNA, 25 bp, Homo sapien
atgtactggccgtagcaccctggaa

SEQ ID NO: 1895543 - DNA, 25 bp, Homo sapien
tcatcttgtaaatcagttagtgaaa

SEQ ID NO: 1895544 - DNA, 25 bp, Homo sapien
gaagccgttacttgatgagggacaa

SEQ ID NO: 1895545 - DNA, 25 bp, Homo sapien
taacacccatggttcacaatccaca

SEQ ID NO: 1895546 - DNA, 25 bp, Homo sapien
cctgatatgagctgatgtgaaccta

SEQ ID NO: 1895547 - DNA, 25 bp, Homo sapien
taggaagaagcatacacaacacctg

SEQ ID NO: 1895548 - DNA, 25 bp, Homo sapien
aaaagggatatataggagggatgcc

SEQ ID NO: 1895549 - DNA, 25 bp, Homo sapien
cagtagctatttcttggcggtgaga

SEQ ID NO: 1895550 - DNA, 25 bp, Homo sapien
gggacagttctgaatgcaacacatg

SEQ ID NO: 1895551 - DNA, 25 bp, Homo sapien
tataggagggatgccaaaatattaa

SEQ ID NO: 1895552 - DNA, 25 bp, Homo sapien
ggttgcaagattagcatttatttaa

SEQ ID NO: 1895553 - DNA, 25 bp, Homo sapien
gggttgcaagattagcatttattta

SEQ ID NO: 1895554 - DNA, 25 bp, Homo sapien
gttgcaagattagcatttatttaag

SEQ ID NO: 1895555 - DNA, 25 bp, Homo sapien
ggcttgaatcgcttccagattttaa

SEQ ID NO: 1895556 - DNA, 25 bp, Homo sapien
cttaaagcttatttgcctagccagt

SEQ ID NO: 1895557 - DNA, 25 bp, Homo sapien
tcagcttggcttgaatcgcttccag

SEQ ID NO: 1895558 - DNA, 25 bp, Homo sapien
ttaaagcttatttgcctagccagtt

SEQ ID NO: 1895559 - DNA, 25 bp, Homo sapien
catgctaccacggttgaatgcaaaa

SEQ ID NO: 1895560 - DNA, 25 bp, Homo sapien
actgttgaccacacacctttgagaa

SEQ ID NO: 1895561 - DNA, 25 bp, Homo sapien
cctttgagaattggttatatacaaa

SEQ ID NO: 1895562 - DNA, 25 bp, Homo sapien
cctgtgttatccagattggtccaga

SEQ ID NO: 1895563 - DNA, 25 bp, Homo sapien
cacatagtaagaggtaggccctacc

SEQ ID NO: 1895564 - DNA, 25 bp, Homo sapien
tcatatagacaaaagtgcacctgca

SEQ ID NO: 1895565 - DNA, 25 bp, Homo sapien
taggtatcagcactactcaaagagg

SEQ ID NO: 1895566 - DNA, 25 bp, Homo sapien
gggctactctgaatggaaggactga

SEQ ID NO: 1895567 - DNA, 25 bp, Homo sapien
tctttcctcaggagtgtaatctaga

SEQ ID NO: 1895568 - DNA, 25 bp, Homo sapien
caatgatggctaataatgctgtcct

SEQ ID NO: 1895569 - DNA, 25 bp, Homo sapien
gtaatctagagaacctatggctccc

SEQ ID NO: 1895570 - DNA, 25 bp, Homo sapien
cccaatgatggctaataatgctgtc

SEQ ID NO: 1895571 - DNA, 25 bp, Homo sapien
aaaaagtaaatatcaatctaaattg

SEQ ID NO: 1895572 - DNA, 25 bp, Homo sapien
tgtaaaagcaactgggtttattctg

SEQ ID NO: 1895573 - DNA, 25 bp, Homo sapien
aaatcagagtattatacttcataac

SEQ ID NO: 1895574 - DNA, 25 bp, Homo sapien
cataactatgaattgactgaagtta

SEQ ID NO: 1895575 - DNA, 25 bp, Homo sapien
gatgctcaaacagattttcttgccc

SEQ ID NO: 1895576 - DNA, 25 bp, Homo sapien
ggatgatggcctgagatgctcaaac

SEQ ID NO: 1895577 - DNA, 25 bp, Homo sapien
ttcttgcccacttcaaatcgaccat

SEQ ID NO: 1895578 - DNA, 25 bp, Homo sapien
tgcccacttcaaatcgaccattagc

SEQ ID NO: 1895579 - DNA, 25 bp, Homo sapien
ctcctccatcaaaatcggagtctgg

SEQ ID NO: 1895580 - DNA, 25 bp, Homo sapien
cgttaggagaataatgcttggtggt

SEQ ID NO: 1895581 - DNA, 25 bp, Homo sapien
ggtggcagtactatccgcccgtgat

SEQ ID NO: 1895582 - DNA, 25 bp, Homo sapien
taaccgtgaagtgccattcaaaaag

SEQ ID NO: 1895583 - DNA, 25 bp, Homo sapien
aggctgcgcatggtaatgatctgtt

SEQ ID NO: 1895584 - DNA, 25 bp, Homo sapien
gatctttcaattctgccgcttcttt

SEQ ID NO: 1895585 - DNA, 25 bp, Homo sapien
cgcatggtaatgatctgttggatct

SEQ ID NO: 1895586 - DNA, 25 bp, Homo sapien
tctttcaattctgccgcttctttca

SEQ ID NO: 1895587 - DNA, 25 bp, Homo sapien
ctcttcaggttgtagcgggtctcca

SEQ ID NO: 1895588 - DNA, 25 bp, Homo sapien
tcttcaggttgtagcgggtctccat

SEQ ID NO: 1895589 - DNA, 25 bp, Homo sapien
actcttcaggttgtagcgggtctcc

SEQ ID NO: 1895590 - DNA, 25 bp, Homo sapien
ggactcttcaggttgtagcgggtct

SEQ ID NO: 1895591 - DNA, 25 bp, Homo sapien
gcgaggcgctcgcttcgcgatggcg

SEQ ID NO: 1895592 - DNA, 25 bp, Homo sapien
tcagcctcctcgggtagtcgcaggc

SEQ ID NO: 1895593 - DNA, 25 bp, Homo sapien
ggagcctcggcaaatgccgcccagt

SEQ ID NO: 1895594 - DNA, 25 bp, Homo sapien
gcaaggctgagtgcgggcgaggcgc

SEQ ID NO: 1895595 - DNA, 25 bp, Homo sapien
tagagacccagttgtaaacgatgca

SEQ ID NO: 1895596 - DNA, 25 bp, Homo sapien
tctgattcaagaagaccgggatggg

SEQ ID NO: 1895597 - DNA, 25 bp, Homo sapien
caagttgggtctaggtacagatgct

SEQ ID NO: 1895598 - DNA, 25 bp, Homo sapien
gatgcaagaaagctcccctaggtga

SEQ ID NO: 1895599 - DNA, 25 bp, Homo sapien
gctgaaagaaccgagtgactgactg

SEQ ID NO: 1895600 - DNA, 25 bp, Homo sapien
ggaccccttaggagtcagacatgag

SEQ ID NO: 1895601 - DNA, 25 bp, Homo sapien
taaatagctactgaaaggtccgatg

SEQ ID NO: 1895602 - DNA, 25 bp, Homo sapien
tctgctgcgcacagtggtaaagtcc

SEQ ID NO: 1895603 - DNA, 25 bp, Homo sapien
gaataggtacttctcaatatgccag

SEQ ID NO: 1895604 - DNA, 25 bp, Homo sapien
tgaagtacatttagaagactgctcc

SEQ ID NO: 1895605 - DNA, 25 bp, Homo sapien
tcatgcccatgtagtaattagtagt

SEQ ID NO: 1895606 - DNA, 25 bp, Homo sapien
ggtggataaactccaatgtatctgg

SEQ ID NO: 1895607 - DNA, 25 bp, Homo sapien
agttctacagccctaactggcatgt

SEQ ID NO: 1895608 - DNA, 25 bp, Homo sapien
catacatgtatggtaagcaacctca

SEQ ID NO: 1895609 - DNA, 25 bp, Homo sapien
taccaaatggatgtaacagggccaa

SEQ ID NO: 1895610 - DNA, 25 bp, Homo sapien
tctgctcccagaaagcttagctatg

SEQ ID NO: 1895611 - DNA, 25 bp, Homo sapien
tctgatgttactttagccctgggtg

SEQ ID NO: 1895612 - DNA, 25 bp, Homo sapien
aattcctggcagttctcacacggga

SEQ ID NO: 1895613 - DNA, 25 bp, Homo sapien
tcaaacagagttggcatataacccg

SEQ ID NO: 1895614 - DNA, 25 bp, Homo sapien
taaaaaccgttgagcagggaagcac

SEQ ID NO: 1895615 - DNA, 25 bp, Homo sapien
tcaatggtatgtgtcccaatctcct

SEQ ID NO: 1895616 - DNA, 25 bp, Homo sapien
cagcagcctcatggataaggtctga

SEQ ID NO: 1895617 - DNA, 25 bp, Homo sapien
tcaaaagacattcctgaaacctcac

SEQ ID NO: 1895618 - DNA, 25 bp, Homo sapien
tttagtgcaacatggcgcagcagcc

SEQ ID NO: 1895619 - DNA, 25 bp, Homo sapien
cctttcgagattttactactttcat

SEQ ID NO: 1895620 - DNA, 25 bp, Homo sapien
acctcaaaaacttcatgaatggcct

SEQ ID NO: 1895621 - DNA, 25 bp, Homo sapien
ggccttccggaagcaatgaaaatta

SEQ ID NO: 1895622 - DNA, 25 bp, Homo sapien
gcagccgattctgaacctttcgaga

SEQ ID NO: 1895623 - DNA, 25 bp, Homo sapien
ccatcttttcatgggacccatggcc

SEQ ID NO: 1895624 - DNA, 25 bp, Homo sapien
tataaatgtcacgtagaaataatct

SEQ ID NO: 1895625 - DNA, 25 bp, Homo sapien
cacgtagaaataatctccatctttt

SEQ ID NO: 1895626 - DNA, 25 bp, Homo sapien
tgtcacgtagaaataatctccatct

SEQ ID NO: 1895627 - DNA, 25 bp, Homo sapien
ggtacaatgaaatactcaacttggg

SEQ ID NO: 1895628 - DNA, 25 bp, Homo sapien
tggctcaatgagaagggtacaatga

SEQ ID NO: 1895629 - DNA, 25 bp, Homo sapien
gaaagaccaatgtcacaagcaaggg

SEQ ID NO: 1895630 - DNA, 25 bp, Homo sapien
cttctgcagagagagtgaaccacta

SEQ ID NO: 1895631 - DNA, 25 bp, Homo sapien
taaagcacggttgtattattaagct

SEQ ID NO: 1895632 - DNA, 25 bp, Homo sapien
tctgacaaagcaaacgagagccagg

SEQ ID NO: 1895633 - DNA, 25 bp, Homo sapien
tattaagctttatgatggctgtgga

SEQ ID NO: 1895634 - DNA, 25 bp, Homo sapien
attccttgtcatagggggttcctgc

SEQ ID NO: 1895635 - DNA, 25 bp, Homo sapien
aatacaagagatgtcaataaccaca

SEQ ID NO: 1895636 - DNA, 25 bp, Homo sapien
agctcataggtttgcatatccaccg

SEQ ID NO: 1895637 - DNA, 25 bp, Homo sapien
tatccaccggagtactatcagttgc

SEQ ID NO: 1895638 - DNA, 25 bp, Homo sapien
catctatcatatcacagcagagctc

SEQ ID NO: 1895639 - DNA, 25 bp, Homo sapien
gttcagcaaattctccagagttggg

SEQ ID NO: 1895640 - DNA, 25 bp, Homo sapien
tattgaatgatcatatatgcttgtc

SEQ ID NO: 1895641 - DNA, 25 bp, Homo sapien
tctgaacaactttgctaaaagcttc

SEQ ID NO: 1895642 - DNA, 25 bp, Homo sapien
gagttgggagttgtggaatcagttt

SEQ ID NO: 1895643 - DNA, 25 bp, Homo sapien
tttgtaggccctggtcaccgtgagg

SEQ ID NO: 1895644 - DNA, 25 bp, Homo sapien
gatgtcagtattcactttgtaggcc

SEQ ID NO: 1895645 - DNA, 25 bp, Homo sapien
caaggtcatcgtttgccctctggtg

SEQ ID NO: 1895646 - DNA, 25 bp, Homo sapien
taaacacctcgaagttgatgtcagt

SEQ ID NO: 1895647 - DNA, 25 bp, Homo sapien
taggaccaaaggcaacgcctgtgag

SEQ ID NO: 1895648 - DNA, 25 bp, Homo sapien
gaccaaaggcaacgcctgtgagaga

SEQ ID NO: 1895649 - DNA, 25 bp, Homo sapien
gagagaaggccgctttgcttcctga

SEQ ID NO: 1895650 - DNA, 25 bp, Homo sapien
aaaggcaacgcctgtgagagaaggc

SEQ ID NO: 1895651 - DNA, 25 bp, Homo sapien
aaaggttcccctcaacaagctggct

SEQ ID NO: 1895652 - DNA, 25 bp, Homo sapien
ggcttcttataattccagtgtgaaa

SEQ ID NO: 1895653 - DNA, 25 bp, Homo sapien
tgcaaccccccgaaatacgttgcaa

SEQ ID NO: 1895654 - DNA, 25 bp, Homo sapien
tcttcacctggaaaccatgtggctg

SEQ ID NO: 1895655 - DNA, 25 bp, Homo sapien
tcaggaagagaaacggaccctactc

SEQ ID NO: 1895656 - DNA, 25 bp, Homo sapien
gcagaagtcagcagaccaccgtctg

SEQ ID NO: 1895657 - DNA, 25 bp, Homo sapien
gacagtcataaagatcagagttggc

SEQ ID NO: 1895658 - DNA, 25 bp, Homo sapien
gctgaggagcaattttaagaaccac

SEQ ID NO: 1895659 - DNA, 25 bp, Homo sapien
gccctggacgtggtgcaggtaacac

SEQ ID NO: 1895660 - DNA, 25 bp, Homo sapien
gaaaacaggtcagtacaagtgggac

SEQ ID NO: 1895661 - DNA, 25 bp, Homo sapien
cagtacaagtgggacagtcaggaaa

SEQ ID NO: 1895662 - DNA, 25 bp, Homo sapien
caagaccacagatgggccagaaaac

SEQ ID NO: 1895663 - DNA, 25 bp, Homo sapien
gacaaatatcagtgctcctgttccc

SEQ ID NO: 1895664 - DNA, 25 bp, Homo sapien
caaatatcagtgctcctgttccccg

SEQ ID NO: 1895665 - DNA, 25 bp, Homo sapien
tcaatctgtcctgggaagtcccaaa

SEQ ID NO: 1895666 - DNA, 25 bp, Homo sapien
aaaaaagtcaatctgtcctgggaag

SEQ ID NO: 1895667 - DNA, 25 bp, Homo sapien
caggattctcggcttcacttcagtg

SEQ ID NO: 1895668 - DNA, 25 bp, Homo sapien
caagaacagagtttcgttgggagac

SEQ ID NO: 1895669 - DNA, 25 bp, Homo sapien
tgacaaaggagctgttggaaacatc

SEQ ID NO: 1895670 - DNA, 25 bp, Homo sapien
gaatagacgacttgccgcttctcct

SEQ ID NO: 1895671 - DNA, 25 bp, Homo sapien
gatgcttgttgacgtgagttatgcc

SEQ ID NO: 1895672 - DNA, 25 bp, Homo sapien
gaaaatgggccttggactagatgtc

SEQ ID NO: 1895673 - DNA, 25 bp, Homo sapien
tctgagcattcaggagccatattgt

SEQ ID NO: 1895674 - DNA, 25 bp, Homo sapien
ggctagtactctcccaagccacgaa

SEQ ID NO: 1895675 - DNA, 25 bp, Homo sapien
tggactgctgtagaccccaggaaat

SEQ ID NO: 1895676 - DNA, 25 bp, Homo sapien
ggaaattcaatcacccaaggaacag

SEQ ID NO: 1895677 - DNA, 25 bp, Homo sapien
tccacttggtgctatcaatacccag

SEQ ID NO: 1895678 - DNA, 25 bp, Homo sapien
gatctcagccttcgaactggactgc

SEQ ID NO: 1895679 - DNA, 25 bp, Homo sapien
aaatacttcgctcatttctagctca

SEQ ID NO: 1895680 - DNA, 25 bp, Homo sapien
gctcatttctagctcatgatagggc

SEQ ID NO: 1895681 - DNA, 25 bp, Homo sapien
ttgatcctcttctaaatacttcgct

SEQ ID NO: 1895682 - DNA, 25 bp, Homo sapien
ctcatgatagggcagtagaaaagcc

SEQ ID NO: 1895683 - DNA, 25 bp, Homo sapien
agtcccacgtctccactaagtgcag

SEQ ID NO: 1895684 - DNA, 25 bp, Homo sapien
tcttggatgcatacagtttcactga

SEQ ID NO: 1895685 - DNA, 25 bp, Homo sapien
gattcattgaaagtcgtgcctgcca

SEQ ID NO: 1895686 - DNA, 25 bp, Homo sapien
tgaaactaccctagtgagaaaagct

SEQ ID NO: 1895687 - DNA, 25 bp, Homo sapien
gctttctcatctaccaggcgcaagg

SEQ ID NO: 1895688 - DNA, 25 bp, Homo sapien
tgacaacggtgtttgcgtggatccc

SEQ ID NO: 1895689 - DNA, 25 bp, Homo sapien
ggagactcccacaacagcttggcga

SEQ ID NO: 1895690 - DNA, 25 bp, Homo sapien
cgtggatcccgggaaatctgcggcc

SEQ ID NO: 1895691 - DNA, 25 bp, Homo sapien
tccaggtggtgataccgagagcaga

SEQ ID NO: 1895692 - DNA, 25 bp, Homo sapien
cgacatctgaccctggcttcaacag

SEQ ID NO: 1895693 - DNA, 25 bp, Homo sapien
cagcaccgttctgggagagaggtcc

SEQ ID NO: 1895694 - DNA, 25 bp, Homo sapien
gggcgagactgacacccgcagctgc

SEQ ID NO: 1895695 - DNA, 25 bp, Homo sapien
cggctgcctttttttagccacgaca

SEQ ID NO: 1895696 - DNA, 25 bp, Homo sapien
gcagctcgaggtcgggcttttggcg

SEQ ID NO: 1895697 - DNA, 25 bp, Homo sapien
ctccaagtcggtggctcgcgcacgg

SEQ ID NO: 1895698 - DNA, 25 bp, Homo sapien
tttccaccgatcctggttgcccctc

SEQ ID NO: 1895699 - DNA, 25 bp, Homo sapien
cgcgctccctcatttggcagctcga

SEQ ID NO: 1895700 - DNA, 25 bp, Homo sapien
tccgcgtcgtcctcgtcctgcggct

SEQ ID NO: 1895701 - DNA, 25 bp, Homo sapien
ggatcggcgtcggaggagtcgggcc

SEQ ID NO: 1895702 - DNA, 25 bp, Homo sapien
tctgtgccgctgtccggatcggcgt

SEQ ID NO: 1895703 - DNA, 25 bp, Homo sapien
gggcccgtctccgtagtccgctagc

SEQ ID NO: 1895704 - DNA, 25 bp, Homo sapien
cagcctatttctgaagcggaggttt

SEQ ID NO: 1895705 - DNA, 25 bp, Homo sapien
gcgctgggccgaggacacacatgca

SEQ ID NO: 1895706 - DNA, 25 bp, Homo sapien
acacgcacacgcacgaggagaccgg

SEQ ID NO: 1895707 - DNA, 25 bp, Homo sapien
gagagagactgcgtgacccgagtca

SEQ ID NO: 1895708 - DNA, 25 bp, Homo sapien
taaatctttgatcttagttccccgc

SEQ ID NO: 1895709 - DNA, 25 bp, Homo sapien
tccccaagccaaactatgtaggtgt

SEQ ID NO: 1895710 - DNA, 25 bp, Homo sapien
tagcgactctagtaaccctcatagc

SEQ ID NO: 1895711 - DNA, 25 bp, Homo sapien
tagcctttcacagacccagtttgga

SEQ ID NO: 1895712 - DNA, 25 bp, Homo sapien
tggttcttcatcaaatgcggctgct

SEQ ID NO: 1895713 - DNA, 25 bp, Homo sapien
cttcactgcaagattcagtgccaga

SEQ ID NO: 1895714 - DNA, 25 bp, Homo sapien
tgagttctggtactgattcttcact

SEQ ID NO: 1895715 - DNA, 25 bp, Homo sapien
ttgagttctggtactgattcttcac

SEQ ID NO: 1895716 - DNA, 25 bp, Homo sapien
ctgtgcagggaatataaagatggca

SEQ ID NO: 1895717 - DNA, 25 bp, Homo sapien
tgtgcagggaatataaagatggcag

SEQ ID NO: 1895718 - DNA, 25 bp, Homo sapien
caggcgacctcgccggctccctggg

SEQ ID NO: 1895719 - DNA, 25 bp, Homo sapien
aggcgacctcgccggctccctggga

SEQ ID NO: 1895720 - DNA, 25 bp, Homo sapien
ggcgacctcgccggctccctgggac

SEQ ID NO: 1895721 - DNA, 25 bp, Homo sapien
gcgacctcgccggctccctgggacc

SEQ ID NO: 1895722 - DNA, 25 bp, Homo sapien
tgggcgcctcaggtcggggaggacg

SEQ ID NO: 1895723 - DNA, 25 bp, Homo sapien
tctgcggcgcgtaggagggtaggtc

SEQ ID NO: 1895724 - DNA, 25 bp, Homo sapien
gaatatggaacttcgggcgagggag

SEQ ID NO: 1895725 - DNA, 25 bp, Homo sapien
cgagggaggtggagaactttcttct

SEQ ID NO: 1895726 - DNA, 25 bp, Homo sapien
cctgctcgcttgcagtttgaaggaa

SEQ ID NO: 1895727 - DNA, 25 bp, Homo sapien
gcttttaagtgtgttgcttccggta

SEQ ID NO: 1895728 - DNA, 25 bp, Homo sapien
taagtgtgttgcttccggtagatct

SEQ ID NO: 1895729 - DNA, 25 bp, Homo sapien
agtgtgttgcttccggtagatctcg

SEQ ID NO: 1895730 - DNA, 25 bp, Homo sapien
tgggcttttaagtgtgttgcttccg

SEQ ID NO: 1895731 - DNA, 25 bp, Homo sapien
ctgggtccaaggtggtcccatccat

SEQ ID NO: 1895732 - DNA, 25 bp, Homo sapien
tatctgcgtgccttagaaacaaaga

SEQ ID NO: 1895733 - DNA, 25 bp, Homo sapien
tgcgtgccttagaaacaaagacatc

SEQ ID NO: 1895734 - DNA, 25 bp, Homo sapien
ctatctgcgtgccttagaaacaaag

SEQ ID NO: 1895735 - DNA, 25 bp, Homo sapien
tctgcgtgccttagaaacaaagaca

SEQ ID NO: 1895736 - DNA, 25 bp, Homo sapien
gaagcacctccaactagtaaatact

SEQ ID NO: 1895737 - DNA, 25 bp, Homo sapien
gggactggagtgaagcacctccaac

SEQ ID NO: 1895738 - DNA, 25 bp, Homo sapien
gcacctccaactagtaaatactgaa

SEQ ID NO: 1895739 - DNA, 25 bp, Homo sapien
tggagtgaagcacctccaactagta

SEQ ID NO: 1895740 - DNA, 25 bp, Homo sapien
ctgaggggttattgatgggacctac

SEQ ID NO: 1895741 - DNA, 25 bp, Homo sapien
tctgaggggttattgatgggaccta

SEQ ID NO: 1895742 - DNA, 25 bp, Homo sapien
tctgcatagaattctgaggggttat

SEQ ID NO: 1895743 - DNA, 25 bp, Homo sapien
tacgtctgcatagaattctgagggg

SEQ ID NO: 1895744 - DNA, 25 bp, Homo sapien
aaaagaattctcagggaattgggtg

SEQ ID NO: 1895745 - DNA, 25 bp, Homo sapien
aattctcagggaattgggtgggcca

SEQ ID NO: 1895746 - DNA, 25 bp, Homo sapien
gagtgctgccacatgcggcataaga

SEQ ID NO: 1895747 - DNA, 25 bp, Homo sapien
cacatgcggcataagatttcaataa

SEQ ID NO: 1895748 - DNA, 25 bp, Homo sapien
gaaagctgagacgacacctgtcctc

SEQ ID NO: 1895749 - DNA, 25 bp, Homo sapien
aagctgagacgacacctgtcctctg

SEQ ID NO: 1895750 - DNA, 25 bp, Homo sapien
cacccatatctgtgcagagaaatct

SEQ ID NO: 1895751 - DNA, 25 bp, Homo sapien
ctggcattcctttccagacccttcc

SEQ ID NO: 1895752 - DNA, 25 bp, Homo sapien
catggtcactgtccgcatggtcact

SEQ ID NO: 1895753 - DNA, 25 bp, Homo sapien
tcactgtccgcatggtcactgtcct

SEQ ID NO: 1895754 - DNA, 25 bp, Homo sapien
cccagaggaacggtggtcactgcct

SEQ ID NO: 1895755 - DNA, 25 bp, Homo sapien
gctcatacgtggctaggaagagccc

SEQ ID NO: 1895756 - DNA, 25 bp, Homo sapien
gatgggatctctacagagctaatca

SEQ ID NO: 1895757 - DNA, 25 bp, Homo sapien
taaacgtgataaagtaggcatttct

SEQ ID NO: 1895758 - DNA, 25 bp, Homo sapien
tcagtagagtggaccttgatccaat

SEQ ID NO: 1895759 - DNA, 25 bp, Homo sapien
ggaaattcgctaggcacggtggttc

SEQ ID NO: 1895760 - DNA, 25 bp, Homo sapien
tgctggcagcccacggattcaaggc

SEQ ID NO: 1895761 - DNA, 25 bp, Homo sapien
gattcaaggctccttagagaaggca

SEQ ID NO: 1895762 - DNA, 25 bp, Homo sapien
tcataacgagtttgccaaatgcatg

SEQ ID NO: 1895763 - DNA, 25 bp, Homo sapien
ctgtcagagggtgccacagctgctg

SEQ ID NO: 1895764 - DNA, 25 bp, Homo sapien
gtttgtggccacatgcttgccccaa

SEQ ID NO: 1895765 - DNA, 25 bp, Homo sapien
tggccacatgcttgccccaaggccc

SEQ ID NO: 1895766 - DNA, 25 bp, Homo sapien
ttgtggccacatgcttgccccaagg

SEQ ID NO: 1895767 - DNA, 25 bp, Homo sapien
tgtggccacatgcttgccccaaggc

SEQ ID NO: 1895768 - DNA, 25 bp, Homo sapien
aatccggctgcctgttgtcaggaac

SEQ ID NO: 1895769 - DNA, 25 bp, Homo sapien
ccggctgcctgttgtcaggaaccat

SEQ ID NO: 1895770 - DNA, 25 bp, Homo sapien
tccggctgcctgttgtcaggaacca

SEQ ID NO: 1895771 - DNA, 25 bp, Homo sapien
caaatccggctgcctgttgtcagga

SEQ ID NO: 1895772 - DNA, 25 bp, Homo sapien
tttggtccttccctgaaccggctgc

SEQ ID NO: 1895773 - DNA, 25 bp, Homo sapien
tgagtgcccctgaatcatgtctttg

SEQ ID NO: 1895774 - DNA, 25 bp, Homo sapien
gggcaggaaatcaaggcagagctct

SEQ ID NO: 1895775 - DNA, 25 bp, Homo sapien
caataattcagtttgagtgcccctg

SEQ ID NO: 1895776 - DNA, 25 bp, Homo sapien
ttgtagaggatcatttggtagttca

SEQ ID NO: 1895777 - DNA, 25 bp, Homo sapien
ttgagtaattccttgtttgtagagg

SEQ ID NO: 1895778 - DNA, 25 bp, Homo sapien
cttgtttgtagaggatcatttggta

SEQ ID NO: 1895779 - DNA, 25 bp, Homo sapien
tttgagtaattccttgtttgtagag

SEQ ID NO: 1895780 - DNA, 25 bp, Homo sapien
tatgccggtagtaccgtcgggacca

SEQ ID NO: 1895781 - DNA, 25 bp, Homo sapien
ccaggcccaggaagtctgtcttttc

SEQ ID NO: 1895782 - DNA, 25 bp, Homo sapien
tgggcagagatatgccggtagtacc

SEQ ID NO: 1895783 - DNA, 25 bp, Homo sapien
tgaagtcaacgtgtaaacacagaga

SEQ ID NO: 1895784 - DNA, 25 bp, Homo sapien
caggtgatccgggagaaagataaaa

SEQ ID NO: 1895785 - DNA, 25 bp, Homo sapien
cacctttattgtttaatagagcatc

SEQ ID NO: 1895786 - DNA, 25 bp, Homo sapien
tggaaaacttaggtctgcaaataag

SEQ ID NO: 1895787 - DNA, 25 bp, Homo sapien
gaagtttgtcataacatctaagcat

SEQ ID NO: 1895788 - DNA, 25 bp, Homo sapien
tccaacttgtcagggatgctttctc

SEQ ID NO: 1895789 - DNA, 25 bp, Homo sapien
ttccctccttatcaggtaggtttga

SEQ ID NO: 1895790 - DNA, 25 bp, Homo sapien
tctgttttgtataaattccaacttg

SEQ ID NO: 1895791 - DNA, 25 bp, Homo sapien
tctaccccaaacagaatgtcccctg

SEQ ID NO: 1895792 - DNA, 25 bp, Homo sapien
tctgtgtatcttcagagctttcgaa

SEQ ID NO: 1895793 - DNA, 25 bp, Homo sapien
ccattataactatgcagtttggtga

SEQ ID NO: 1895794 - DNA, 25 bp, Homo sapien
aatggtatatatgactagatgctgc

SEQ ID NO: 1895795 - DNA, 25 bp, Homo sapien
aagtcttgtcttcctaagtgtagta

SEQ ID NO: 1895796 - DNA, 25 bp, Homo sapien
ggggctgtcctcccgtatgcaccat

SEQ ID NO: 1895797 - DNA, 25 bp, Homo sapien
aggggctgtcctcccgtatgcacca

SEQ ID NO: 1895798 - DNA, 25 bp, Homo sapien
tttcagcacttgctacccatcctga

SEQ ID NO: 1895799 - DNA, 25 bp, Homo sapien
aatttcagcacttgctacccatcct

SEQ ID NO: 1895800 - DNA, 25 bp, Homo sapien
atttcagcacttgctacccatcctg

SEQ ID NO: 1895801 - DNA, 25 bp, Homo sapien
gcaatttcagcacttgctacccatc

SEQ ID NO: 1895802 - DNA, 25 bp, Homo sapien
aatgtagtgtttaaccttctgtcct

SEQ ID NO: 1895803 - DNA, 25 bp, Homo sapien
ctaattttgcacaggtgactttagt

SEQ ID NO: 1895804 - DNA, 25 bp, Homo sapien
tcccgatctctagctgcaaggtgtg

SEQ ID NO: 1895805 - DNA, 25 bp, Homo sapien
agttggttcgcatcccgatctctag

SEQ ID NO: 1895806 - DNA, 25 bp, Homo sapien
tcggcttgcccagaggggcgcatcc

SEQ ID NO: 1895807 - DNA, 25 bp, Homo sapien
tcttggtgctcccttgatttgaagg

SEQ ID NO: 1895808 - DNA, 25 bp, Homo sapien
ctttctgaaccaggtagggaatgtc

SEQ ID NO: 1895809 - DNA, 25 bp, Homo sapien
gcagcaagtgggctagggtcggctt

SEQ ID NO: 1895810 - DNA, 25 bp, Homo sapien
cagtattagtgaagcatggaattgg

SEQ ID NO: 1895811 - DNA, 25 bp, Homo sapien
ggtgggcacaaggagcagcatctgt

SEQ ID NO: 1895812 - DNA, 25 bp, Homo sapien
gggatcccatactgtcactggcagc

SEQ ID NO: 1895813 - DNA, 25 bp, Homo sapien
attttcagtgctttaccagtattag

SEQ ID NO: 1895814 - DNA, 25 bp, Homo sapien
ttgtgttccctaaacttcacagctg

SEQ ID NO: 1895815 - DNA, 25 bp, Homo sapien
gagtctggtatttgacctggtaccc

SEQ ID NO: 1895816 - DNA, 25 bp, Homo sapien
ggtaccctcttcactctgtagtctt

SEQ ID NO: 1895817 - DNA, 25 bp, Homo sapien
ctggtaccctcttcactctgtagtc

SEQ ID NO: 1895818 - DNA, 25 bp, Homo sapien
aggagtctggtatttgacctggtac

SEQ ID NO: 1895819 - DNA, 25 bp, Homo sapien
tgacctggcggtacctggtccaata

SEQ ID NO: 1895820 - DNA, 25 bp, Homo sapien
tacctggtccaataaaaagatgtga

SEQ ID NO: 1895821 - DNA, 25 bp, Homo sapien
gaaatccagtatatacctgtatgtt

SEQ ID NO: 1895822 - DNA, 25 bp, Homo sapien
ttggcatctttcagtgacctggcgg

SEQ ID NO: 1895823 - DNA, 25 bp, Homo sapien
tgcctttgtcatggcctgcagacct

SEQ ID NO: 1895824 - DNA, 25 bp, Homo sapien
gcagacctgatgttgatgctcttgc

SEQ ID NO: 1895825 - DNA, 25 bp, Homo sapien
gacctgatgttgatgctcttgccca

SEQ ID NO: 1895826 - DNA, 25 bp, Homo sapien
ctacctccaataagagccagcccag

SEQ ID NO: 1895827 - DNA, 25 bp, Homo sapien
tgccatcccctcagtattagttgct

SEQ ID NO: 1895828 - DNA, 25 bp, Homo sapien
gcggggctcgggaaacaactcttgc

SEQ ID NO: 1895829 - DNA, 25 bp, Homo sapien
gccctgctcagctaactcatgtagg

SEQ ID NO: 1895830 - DNA, 25 bp, Homo sapien
tgacagcagctgcttggcagcgcac

SEQ ID NO: 1895831 - DNA, 25 bp, Homo sapien
agtgctgaagccaaatactgtgtca

SEQ ID NO: 1895832 - DNA, 25 bp, Homo sapien
catgctgcgtgctgagtaaggccaa

SEQ ID NO: 1895833 - DNA, 25 bp, Homo sapien
cagagacacttgatcccagcaaagc

SEQ ID NO: 1895834 - DNA, 25 bp, Homo sapien
ggccaagagaccaaatgaggatttg

SEQ ID NO: 1895835 - DNA, 25 bp, Homo sapien
accaggttccgtgagcagtcagtgc

SEQ ID NO: 1895836 - DNA, 25 bp, Homo sapien
tcgcaaatagtcctggtgggcacca

SEQ ID NO: 1895837 - DNA, 25 bp, Homo sapien
tgctaaagcagagcgtgtccaccct

SEQ ID NO: 1895838 - DNA, 25 bp, Homo sapien
catttgccaagtgatgggagtgccc

SEQ ID NO: 1895839 - DNA, 25 bp, Homo sapien
taagagggtttgtactgacagagta

SEQ ID NO: 1895840 - DNA, 25 bp, Homo sapien
gggaaatagggcaatgctttaggac

SEQ ID NO: 1895841 - DNA, 25 bp, Homo sapien
ccatctctgggaccaaaaattctgt

SEQ ID NO: 1895842 - DNA, 25 bp, Homo sapien
caatgctttaggacggcaggtggta

SEQ ID NO: 1895843 - DNA, 25 bp, Homo sapien
tcagaggagtatttgtgagacaaac

SEQ ID NO: 1895844 - DNA, 25 bp, Homo sapien
tctgggctccgctgctcccacaaag

SEQ ID NO: 1895845 - DNA, 25 bp, Homo sapien
tctcctgtgctgccgcagtcactgt

SEQ ID NO: 1895846 - DNA, 25 bp, Homo sapien
tgctggaactctctgccgaggaggg

SEQ ID NO: 1895847 - DNA, 25 bp, Homo sapien
gtgctgccgcagtcactgtgctgga

SEQ ID NO: 1895848 - DNA, 25 bp, Homo sapien
tattacagatttcaaccctttctgc

SEQ ID NO: 1895849 - DNA, 25 bp, Homo sapien
ttttcttggaggcagtttattacag

SEQ ID NO: 1895850 - DNA, 25 bp, Homo sapien
tacagatttcaaccctttctgcatc

SEQ ID NO: 1895851 - DNA, 25 bp, Homo sapien
ttcttggaggcagtttattacagat

SEQ ID NO: 1895852 - DNA, 25 bp, Homo sapien
tctgtcatctgagcgtcattcagaa

SEQ ID NO: 1895853 - DNA, 25 bp, Homo sapien
ctgaaattatgcaaacttcgtttct

SEQ ID NO: 1895854 - DNA, 25 bp, Homo sapien
gaattgttccctgacttcaatcggg

SEQ ID NO: 1895855 - DNA, 25 bp, Homo sapien
aaatgttcctccgatctgtgaattg

SEQ ID NO: 1895856 - DNA, 25 bp, Homo sapien
tatcccagggatctcagaccgtgac

SEQ ID NO: 1895857 - DNA, 25 bp, Homo sapien
ctggcatatcccagggatctcagac

SEQ ID NO: 1895858 - DNA, 25 bp, Homo sapien
ccagggatctcagaccgtgactcac

SEQ ID NO: 1895859 - DNA, 25 bp, Homo sapien
gcatatcccagggatctcagaccgt

SEQ ID NO: 1895860 - DNA, 25 bp, Homo sapien
gagcaggatgggtttgcgagagttc

SEQ ID NO: 1895861 - DNA, 25 bp, Homo sapien
tttgtttctaatgacccagtgagca

SEQ ID NO: 1895862 - DNA, 25 bp, Homo sapien
tttctaatgacccagtgagcaggag

SEQ ID NO: 1895863 - DNA, 25 bp, Homo sapien
gatgggtttgcgagagttcctctct

SEQ ID NO: 1895864 - DNA, 25 bp, Homo sapien
gagaaagtttgataattcacaagag

SEQ ID NO: 1895865 - DNA, 25 bp, Homo sapien
gaaagtttgataattcacaagagtg

SEQ ID NO: 1895866 - DNA, 25 bp, Homo sapien
gatgagaaagtttgataattcacaa

SEQ ID NO: 1895867 - DNA, 25 bp, Homo sapien
aagtttgataattcacaagagtggg

SEQ ID NO: 1895868 - DNA, 25 bp, Homo sapien
ggccatactcctccggaggatgtcc

SEQ ID NO: 1895869 - DNA, 25 bp, Homo sapien
ctggccatactcctccggaggatgt

SEQ ID NO: 1895870 - DNA, 25 bp, Homo sapien
cagttctggccatactcctccggag

SEQ ID NO: 1895871 - DNA, 25 bp, Homo sapien
tgcagttctggccatactcctccgg

SEQ ID NO: 1895872 - DNA, 25 bp, Homo sapien
tcgctgcactttcagagcgccttct

SEQ ID NO: 1895873 - DNA, 25 bp, Homo sapien
caggccgggccagtgacttcgtgtt

SEQ ID NO: 1895874 - DNA, 25 bp, Homo sapien
catgagccagcaagatgcggtcgct

SEQ ID NO: 1895875 - DNA, 25 bp, Homo sapien
tgaaggaacttgtctaccgcttccc

SEQ ID NO: 1895876 - DNA, 25 bp, Homo sapien
ctcctgtggcagatcggtcagctcc

SEQ ID NO: 1895877 - DNA, 25 bp, Homo sapien
cctgtggcagatcggtcagctccta

SEQ ID NO: 1895878 - DNA, 25 bp, Homo sapien
tgtggcagatcggtcagctcctatt

SEQ ID NO: 1895879 - DNA, 25 bp, Homo sapien
gcagatcggtcagctcctattttca

SEQ ID NO: 1895880 - DNA, 25 bp, Homo sapien
ggtatacattcatggcctcaagaaa

SEQ ID NO: 1895881 - DNA, 25 bp, Homo sapien
tcagaaatgaagaggatgcctggct

SEQ ID NO: 1895882 - DNA, 25 bp, Homo sapien
cctggctggtaaatattttccggca

SEQ ID NO: 1895883 - DNA, 25 bp, Homo sapien
tcaagagaacgctggaagtcagtaa

SEQ ID NO: 1895884 - DNA, 25 bp, Homo sapien
aaacctcacttccacgagggatttg

SEQ ID NO: 1895885 - DNA, 25 bp, Homo sapien
acgagggatttgcgatgctggtgtt

SEQ ID NO: 1895886 - DNA, 25 bp, Homo sapien
tgaaacctgtttccagtttcgacaa

SEQ ID NO: 1895887 - DNA, 25 bp, Homo sapien
tgtttccagtttcgacaaaacctca

SEQ ID NO: 1895888 - DNA, 25 bp, Homo sapien
tgctccgggttagcacatccacaca

SEQ ID NO: 1895889 - DNA, 25 bp, Homo sapien
caagatgcctgggtcttttgttctg

SEQ ID NO: 1895890 - DNA, 25 bp, Homo sapien
tgcagtgcttcgttctgctccgggt

SEQ ID NO: 1895891 - DNA, 25 bp, Homo sapien
aatggaattccttcccaagatgcct

SEQ ID NO: 1895892 - DNA, 25 bp, Homo sapien
tggttagacatctggaagttgtact

SEQ ID NO: 1895893 - DNA, 25 bp, Homo sapien
ctgtccattgagcatcgggccaagc

SEQ ID NO: 1895894 - DNA, 25 bp, Homo sapien
tgcagggcaggacaacactgtccat

SEQ ID NO: 1895895 - DNA, 25 bp, Homo sapien
ttagacatctggaagttgtactgct

SEQ ID NO: 1895896 - DNA, 25 bp, Homo sapien
tttcctgaacaaaatgcgttggagg

SEQ ID NO: 1895897 - DNA, 25 bp, Homo sapien
aggccagtaatcagcatgttgtgag

SEQ ID NO: 1895898 - DNA, 25 bp, Homo sapien
tgaacaaaatgcgttggaggattgc

SEQ ID NO: 1895899 - DNA, 25 bp, Homo sapien
tttccaggccagtaatcagcatgtt

SEQ ID NO: 1895900 - DNA, 25 bp, Homo sapien
tgtgatagtcatagcccctggatgg

SEQ ID NO: 1895901 - DNA, 25 bp, Homo sapien
gagtcaagttccctttggcgcctaa

SEQ ID NO: 1895902 - DNA, 25 bp, Homo sapien
caagctggaaactcggcaggcagta

SEQ ID NO: 1895903 - DNA, 25 bp, Homo sapien
ctaaaggagaacaacggccggcaat

SEQ ID NO: 1895904 - DNA, 25 bp, Homo sapien
gagaaaggccgtctggtgttccgta

SEQ ID NO: 1895905 - DNA, 25 bp, Homo sapien
ccaattgagaaaggccgtctggtgt

SEQ ID NO: 1895906 - DNA, 25 bp, Homo sapien
cagatgagaaagtccaattgagaaa

SEQ ID NO: 1895907 - DNA, 25 bp, Homo sapien
gaaagtccaattgagaaaggccgtc

SEQ ID NO: 1895908 - DNA, 25 bp, Homo sapien
taagccatttccttaatgttggaca

SEQ ID NO: 1895909 - DNA, 25 bp, Homo sapien
gaagattttgaacacaaccctgctg

SEQ ID NO: 1895910 - DNA, 25 bp, Homo sapien
aaccctgctgcaaaataacccgaca

SEQ ID NO: 1895911 - DNA, 25 bp, Homo sapien
caagaagaagataaagtctcaggga

SEQ ID NO: 1895912 - DNA, 25 bp, Homo sapien
taatttaatggacagccagccccac

SEQ ID NO: 1895913 - DNA, 25 bp, Homo sapien
ccaaggatcttcacttaaagggcaa

SEQ ID NO: 1895914 - DNA, 25 bp, Homo sapien
tgaagtgctgtataaacgtcagaac

SEQ ID NO: 1895915 - DNA, 25 bp, Homo sapien
gcaaagagccttactgtggaccatt

SEQ ID NO: 1895916 - DNA, 25 bp, Homo sapien
tctgtgcatgtagttggcagtcccg

SEQ ID NO: 1895917 - DNA, 25 bp, Homo sapien
catctgctgggctagctcaagtcca

SEQ ID NO: 1895918 - DNA, 25 bp, Homo sapien
cctagtttatgtgaatggcactccc

SEQ ID NO: 1895919 - DNA, 25 bp, Homo sapien
tgtgacttggacacagtttggccaa

SEQ ID NO: 1895920 - DNA, 25 bp, Homo sapien
ttccattaggtcagagccccaggtc

SEQ ID NO: 1895921 - DNA, 25 bp, Homo sapien
tccttcaggtcttgcgcttcagtcg

SEQ ID NO: 1895922 - DNA, 25 bp, Homo sapien
ggttgtaacaatgccgtttgcctcc

SEQ ID NO: 1895923 - DNA, 25 bp, Homo sapien
tccagaggtgcttgcttgatgtgaa

SEQ ID NO: 1895924 - DNA, 25 bp, Homo sapien
agaggagagcccagtctgtgccaag

SEQ ID NO: 1895925 - DNA, 25 bp, Homo sapien
gaggagagcccagtctgtgccaaga

SEQ ID NO: 1895926 - DNA, 25 bp, Homo sapien
gatagtatcagagtggaccccaaag

SEQ ID NO: 1895927 - DNA, 25 bp, Homo sapien
tagggcctgcagagctaaatccaca

SEQ ID NO: 1895928 - DNA, 25 bp, Homo sapien
gaaaggcagtacgtatgctagggct

SEQ ID NO: 1895929 - DNA, 25 bp, Homo sapien
aaaggaacacgaccagcagctcttg

SEQ ID NO: 1895930 - DNA, 25 bp, Homo sapien
gataactcaacttaggccccactgt

SEQ ID NO: 1895931 - DNA, 25 bp, Homo sapien
tgttccccaacttcatggaggccag

SEQ ID NO: 1895932 - DNA, 25 bp, Homo sapien
gaataattggctaacagctctggaa

SEQ ID NO: 1895933 - DNA, 25 bp, Homo sapien
tttctactgctttgcggtgaaggca

SEQ ID NO: 1895934 - DNA, 25 bp, Homo sapien
aagaaatgatttattaacatgggga

SEQ ID NO: 1895935 - DNA, 25 bp, Homo sapien
agagaagaaatgatttattaacatg

SEQ ID NO: 1895936 - DNA, 25 bp, Homo sapien
gagaagaaatgatttattaacatgg

SEQ ID NO: 1895937 - DNA, 25 bp, Homo sapien
aaagagaagaaatgatttattaaca

SEQ ID NO: 1895938 - DNA, 25 bp, Homo sapien
cagaattgtagagctggagagtacc

SEQ ID NO: 1895939 - DNA, 25 bp, Homo sapien
tatcaagtctagaccatagagtgct

SEQ ID NO: 1895940 - DNA, 25 bp, Homo sapien
gattacctcctacccatcagaagca

SEQ ID NO: 1895941 - DNA, 25 bp, Homo sapien
tactacgcaggtagacagtcttccc

SEQ ID NO: 1895942 - DNA, 25 bp, Homo sapien
aataaagggagtgttgttttcatgg

SEQ ID NO: 1895943 - DNA, 25 bp, Homo sapien
catggttatgccttgtttgtggagt

SEQ ID NO: 1895944 - DNA, 25 bp, Homo sapien
tacttgaggcatgttatgtgtcttc

SEQ ID NO: 1895945 - DNA, 25 bp, Homo sapien
tctcttccaagcattaaagatacta

SEQ ID NO: 1895946 - DNA, 25 bp, Homo sapien
taaagtcgcgatcaggtgctctcca

SEQ ID NO: 1895947 - DNA, 25 bp, Homo sapien
caaggtttctcagtgcaagcttaaa

SEQ ID NO: 1895948 - DNA, 25 bp, Homo sapien
taaatacattggctgtaaagtcgcg

SEQ ID NO: 1895949 - DNA, 25 bp, Homo sapien
agttaaaggttatgcaaggcaaggc

SEQ ID NO: 1895950 - DNA, 25 bp, Homo sapien
tactcacagaggtttcatccagaag

SEQ ID NO: 1895951 - DNA, 25 bp, Homo sapien
caccaggttaggctagctagtggcc

SEQ ID NO: 1895952 - DNA, 25 bp, Homo sapien
tagtggcctagctagtctcgaaatc

SEQ ID NO: 1895953 - DNA, 25 bp, Homo sapien
gtttcttgcaggcacatctatggca

SEQ ID NO: 1895954 - DNA, 25 bp, Homo sapien
tagaagtgctaactcatacagcagc

SEQ ID NO: 1895955 - DNA, 25 bp, Homo sapien
tacacccgacctcatagtagttttg

SEQ ID NO: 1895956 - DNA, 25 bp, Homo sapien
tattcaagagttgtgcagcctacac

SEQ ID NO: 1895957 - DNA, 25 bp, Homo sapien
tcatgtgatcttttgtgaccggctt

SEQ ID NO: 1895958 - DNA, 25 bp, Homo sapien
cttgagctgcatattgccttgagta

SEQ ID NO: 1895959 - DNA, 25 bp, Homo sapien
gagctgcatattgccttgagtaatc

SEQ ID NO: 1895960 - DNA, 25 bp, Homo sapien
tccttgagctgcatattgccttgag

SEQ ID NO: 1895961 - DNA, 25 bp, Homo sapien
ctccttgagctgcatattgccttga

SEQ ID NO: 1895962 - DNA, 25 bp, Homo sapien
gtaacattacaagcaatgatcaaga

SEQ ID NO: 1895963 - DNA, 25 bp, Homo sapien
tgatgctgaagagtgtagatactct

SEQ ID NO: 1895964 - DNA, 25 bp, Homo sapien
cagtggcactatattccaagatgtc

SEQ ID NO: 1895965 - DNA, 25 bp, Homo sapien
tcaagatataccagctcagtggcac

SEQ ID NO: 1895966 - DNA, 25 bp, Homo sapien
tctcttgcccaatctttcaggtatt

SEQ ID NO: 1895967 - DNA, 25 bp, Homo sapien
cagaatcatttggaacttgccgaat

SEQ ID NO: 1895968 - DNA, 25 bp, Homo sapien
gaattcttctcttgcccaatctttc

SEQ ID NO: 1895969 - DNA, 25 bp, Homo sapien
atctttcaggtatttgcgatcagaa

SEQ ID NO: 1895970 - DNA, 25 bp, Homo sapien
aaagggctgccggtctcctagaagt

SEQ ID NO: 1895971 - DNA, 25 bp, Homo sapien
taacagttgttcaaatctttggtaa

SEQ ID NO: 1895972 - DNA, 25 bp, Homo sapien
tacaacgacagcactttttctaaat

SEQ ID NO: 1895973 - DNA, 25 bp, Homo sapien
gaagttgttattacaacgacagcac

SEQ ID NO: 1895974 - DNA, 25 bp, Homo sapien
gaaatcaagcgcctgacgctgtctc

SEQ ID NO: 1895975 - DNA, 25 bp, Homo sapien
cagggaaatcaagcgcctgacgctg

SEQ ID NO: 1895976 - DNA, 25 bp, Homo sapien
atcaagcgcctgacgctgtctcacg

SEQ ID NO: 1895977 - DNA, 25 bp, Homo sapien
tcagggaaatcaagcgcctgacgct

SEQ ID NO: 1895978 - DNA, 25 bp, Homo sapien
gcgtcgctgggggtaagcgggaagc

SEQ ID NO: 1895979 - DNA, 25 bp, Homo sapien
tcgctgggggtaagcgggaagcagc

SEQ ID NO: 1895980 - DNA, 25 bp, Homo sapien
cgctgggggtaagcgggaagcagcc

SEQ ID NO: 1895981 - DNA, 25 bp, Homo sapien
ctgggggtaagcgggaagcagccat

SEQ ID NO: 1895982 - DNA, 25 bp, Homo sapien
tccaccagaggtccgccggagcctc

SEQ ID NO: 1895983 - DNA, 25 bp, Homo sapien
gtccaccagaggtccgccggagcct

SEQ ID NO: 1895984 - DNA, 25 bp, Homo sapien
gagaagatcagtcccctagcatacc

SEQ ID NO: 1895985 - DNA, 25 bp, Homo sapien
tcaactagtaacagctgactgactg

SEQ ID NO: 1895986 - DNA, 25 bp, Homo sapien
tagctcagcctaccatggacataaa

SEQ ID NO: 1895987 - DNA, 25 bp, Homo sapien
gggatcatgttagcacagcatcaac

SEQ ID NO: 1895988 - DNA, 25 bp, Homo sapien
gaccacctcaaaagggtcgcagact

SEQ ID NO: 1895989 - DNA, 25 bp, Homo sapien
gacacttggttaaacaaggaatctg

SEQ ID NO: 1895990 - DNA, 25 bp, Homo sapien
gttaaacaaggaatctgtgtctttg

SEQ ID NO: 1895991 - DNA, 25 bp, Homo sapien
cctcaaaagggtcgcagacttcaca

SEQ ID NO: 1895992 - DNA, 25 bp, Homo sapien
tgacatactgcctacaaaagaacat

SEQ ID NO: 1895993 - DNA, 25 bp, Homo sapien
gcagtgtgaggaatcactcttcccc

SEQ ID NO: 1895994 - DNA, 25 bp, Homo sapien
cagaacattaagtagaacagagcac

SEQ ID NO: 1895995 - DNA, 25 bp, Homo sapien
cagagcacacagtttcaagtattca

SEQ ID NO: 1895996 - DNA, 25 bp, Homo sapien
tctagttacgagttcaggcacctgc

SEQ ID NO: 1895997 - DNA, 25 bp, Homo sapien
gactgtcagagtcccatgctcctgg

SEQ ID NO: 1895998 - DNA, 25 bp, Homo sapien
tagtctcccgaagcagcaagtgtga

SEQ ID NO: 1895999 - DNA, 25 bp, Homo sapien
ttttgggcacacactatgggcttgg

SEQ ID NO: 1896000 - DNA, 25 bp, Homo sapien
ggtaagcaatgtgaccttctgacca

SEQ ID NO: 1896001 - DNA, 25 bp, Homo sapien
ttctgaccacagttaagtctcactt

SEQ ID NO: 1896002 - DNA, 25 bp, Homo sapien
taagtctcactttggactcttcttt

SEQ ID NO: 1896003 - DNA, 25 bp, Homo sapien
ctgggtaagcaatgtgaccttctga

SEQ ID NO: 1896004 - DNA, 25 bp, Homo sapien
gatcggatttcaggcatctctccag

SEQ ID NO: 1896005 - DNA, 25 bp, Homo sapien
caggaagtgcgtttacatctcgaag

SEQ ID NO: 1896006 - DNA, 25 bp, Homo sapien
gggaactcttccatgtaggatcgga

SEQ ID NO: 1896007 - DNA, 25 bp, Homo sapien
aaaccactgtctgagggcatcgctg

SEQ ID NO: 1896008 - DNA, 25 bp, Homo sapien
accagcatccttagctagctcttct

SEQ ID NO: 1896009 - DNA, 25 bp, Homo sapien
aatggggaggcagcgattaaaccag

SEQ ID NO: 1896010 - DNA, 25 bp, Homo sapien
agcatccttagctagctcttctgtg

SEQ ID NO: 1896011 - DNA, 25 bp, Homo sapien
aaatggggaggcagcgattaaacca

SEQ ID NO: 1896012 - DNA, 25 bp, Homo sapien
tatcaaggccttaatgtgacccaca

SEQ ID NO: 1896013 - DNA, 25 bp, Homo sapien
cagtatgactgagtgatccaggcca

SEQ ID NO: 1896014 - DNA, 25 bp, Homo sapien
tccatttcaaagtggtcagtaccca

SEQ ID NO: 1896015 - DNA, 25 bp, Homo sapien
gaataatgatccctacctcactggc

SEQ ID NO: 1896016 - DNA, 25 bp, Homo sapien
tgcattccgggcagcctgaactgct

SEQ ID NO: 1896017 - DNA, 25 bp, Homo sapien
tcgcccatcagagactaccaggagg

SEQ ID NO: 1896018 - DNA, 25 bp, Homo sapien
ggactctttctttgccctcaaggaa

SEQ ID NO: 1896019 - DNA, 25 bp, Homo sapien
gaactgggattgtccaatacaacaa

SEQ ID NO: 1896020 - DNA, 25 bp, Homo sapien
tagaccatataagacgaagcaaggg

SEQ ID NO: 1896021 - DNA, 25 bp, Homo sapien
gaccatataagacgaagcaagggaa

SEQ ID NO: 1896022 - DNA, 25 bp, Homo sapien
ctgtagaccatataagacgaagcaa

SEQ ID NO: 1896023 - DNA, 25 bp, Homo sapien
catataagacgaagcaagggaataa

SEQ ID NO: 1896024 - DNA, 25 bp, Homo sapien
attttgttaatgaagaggaaggcat

SEQ ID NO: 1896025 - DNA, 25 bp, Homo sapien
ttgttaatgaagaggaaggcatgca

SEQ ID NO: 1896026 - DNA, 25 bp, Homo sapien
tttgttaatgaagaggaaggcatgc

SEQ ID NO: 1896027 - DNA, 25 bp, Homo sapien
agcattttgttaatgaagaggaagg

SEQ ID NO: 1896028 - DNA, 25 bp, Homo sapien
acatgttggcaacagactctagaaa

SEQ ID NO: 1896029 - DNA, 25 bp, Homo sapien
tgttctgcgagagctgctgagcagc

SEQ ID NO: 1896030 - DNA, 25 bp, Homo sapien
ctgaactgatgttctgcgagagctg

SEQ ID NO: 1896031 - DNA, 25 bp, Homo sapien
tgatgttctgcgagagctgctgagc

SEQ ID NO: 1896032 - DNA, 25 bp, Homo sapien
caaagagactgatagtatttctgac

SEQ ID NO: 1896033 - DNA, 25 bp, Homo sapien
gaaaactatgtgaatgctcttctca

SEQ ID NO: 1896034 - DNA, 25 bp, Homo sapien
gattatcagataaccacctcaggtt

SEQ ID NO: 1896035 - DNA, 25 bp, Homo sapien
tcaactaactgtcccttctggccgt

SEQ ID NO: 1896036 - DNA, 25 bp, Homo sapien
ctcatgaaatgggtgtaacagcttt

SEQ ID NO: 1896037 - DNA, 25 bp, Homo sapien
tctgggacccagagtaatcactgaa

SEQ ID NO: 1896038 - DNA, 25 bp, Homo sapien
taacagctttacagattctccaaaa

SEQ ID NO: 1896039 - DNA, 25 bp, Homo sapien
tgcagagacgtagaatctgggaccc

SEQ ID NO: 1896040 - DNA, 25 bp, Homo sapien
caaatacaacaggagttattttttg

SEQ ID NO: 1896041 - DNA, 25 bp, Homo sapien
gagcatttccaatcacagccaaaga

SEQ ID NO: 1896042 - DNA, 25 bp, Homo sapien
aatcacagccaaagattcaaatgca

SEQ ID NO: 1896043 - DNA, 25 bp, Homo sapien
tccaatcacagccaaagattcaaat

SEQ ID NO: 1896044 - DNA, 25 bp, Homo sapien
tttccaatcacagccaaagattcaa

SEQ ID NO: 1896045 - DNA, 25 bp, Homo sapien
tagaagagtcatcgatagccaaaca

SEQ ID NO: 1896046 - DNA, 25 bp, Homo sapien
caaatctgatactggcgtttactgg

SEQ ID NO: 1896047 - DNA, 25 bp, Homo sapien
tggtccttcgaagccaaatcttgtc

SEQ ID NO: 1896048 - DNA, 25 bp, Homo sapien
tgtctttccgaaattgactagcaat

SEQ ID NO: 1896049 - DNA, 25 bp, Homo sapien
tcagcttggctgcctgggtaggctc

SEQ ID NO: 1896050 - DNA, 25 bp, Homo sapien
cataaccgttgtgaaagaggcgctg

SEQ ID NO: 1896051 - DNA, 25 bp, Homo sapien
gacgaagctcttcacataaccgttg

SEQ ID NO: 1896052 - DNA, 25 bp, Homo sapien
ctgggtaggctctaatatgagacga

SEQ ID NO: 1896053 - DNA, 25 bp, Homo sapien
tccagattcacgtggctgccacatt

SEQ ID NO: 1896054 - DNA, 25 bp, Homo sapien
tgggtttccagattcacgtggctgc

SEQ ID NO: 1896055 - DNA, 25 bp, Homo sapien
cagctcctgtcttagctcattgaca

SEQ ID NO: 1896056 - DNA, 25 bp, Homo sapien
tccagctcctgtcttagctcattga

SEQ ID NO: 1896057 - DNA, 25 bp, Homo sapien
ccttatgggctttgtctgttctggg

SEQ ID NO: 1896058 - DNA, 25 bp, Homo sapien
tcttggtcttcctctgttttaacag

SEQ ID NO: 1896059 - DNA, 25 bp, Homo sapien
gaagatcgtgtccatgaggaattga

SEQ ID NO: 1896060 - DNA, 25 bp, Homo sapien
gctgtatgaatggtagactctcggc

SEQ ID NO: 1896061 - DNA, 25 bp, Homo sapien
gctgctccacgtctgctgctttgaa

SEQ ID NO: 1896062 - DNA, 25 bp, Homo sapien
ccataagggtgtcctctatctcctc

SEQ ID NO: 1896063 - DNA, 25 bp, Homo sapien
gatctttgccagagtcttttgcaga

SEQ ID NO: 1896064 - DNA, 25 bp, Homo sapien
gctgtggtgcccgacttgatttcct

SEQ ID NO: 1896065 - DNA, 25 bp, Homo sapien
gccttgtttaatgtgctcgaatgca

SEQ ID NO: 1896066 - DNA, 25 bp, Homo sapien
tcgtatgcgtcactgccttgtttaa

SEQ ID NO: 1896067 - DNA, 25 bp, Homo sapien
cataggtctgtgcatcgtatgcgtc

SEQ ID NO: 1896068 - DNA, 25 bp, Homo sapien
taatgtgctcgaatgcatctgcatc

SEQ ID NO: 1896069 - DNA, 25 bp, Homo sapien
ggctgtccgtatccacagtcctcag

SEQ ID NO: 1896070 - DNA, 25 bp, Homo sapien
gctggcccctgctcggcatggctgt

SEQ ID NO: 1896071 - DNA, 25 bp, Homo sapien
catggctgtccgtatccacagtcct

SEQ ID NO: 1896072 - DNA, 25 bp, Homo sapien
tgagctggcccctgctcggcatggc

SEQ ID NO: 1896073 - DNA, 25 bp, Homo sapien
ttgtgatcacccatggaacgttcat

SEQ ID NO: 1896074 - DNA, 25 bp, Homo sapien
tgtgatcacccatggaacgttcatt

SEQ ID NO: 1896075 - DNA, 25 bp, Homo sapien
gtgatcacccatggaacgttcattg

SEQ ID NO: 1896076 - DNA, 25 bp, Homo sapien
cctaagtttagctgaggagtgatag

SEQ ID NO: 1896077 - DNA, 25 bp, Homo sapien
ctttttctacatgctgccttcacct

SEQ ID NO: 1896078 - DNA, 25 bp, Homo sapien
agtttagctgaggagtgatagaaac

SEQ ID NO: 1896079 - DNA, 25 bp, Homo sapien
tttctacatgctgccttcacctaag

SEQ ID NO: 1896080 - DNA, 25 bp, Homo sapien
gcaatgaaattcgattcatggcctt

SEQ ID NO: 1896081 - DNA, 25 bp, Homo sapien
ccaactgggcaatgaaattcgattc

SEQ ID NO: 1896082 - DNA, 25 bp, Homo sapien
cgattcatggccttctgcctggttt

SEQ ID NO: 1896083 - DNA, 25 bp, Homo sapien
tcgattcatggccttctgcctggtt

SEQ ID NO: 1896084 - DNA, 25 bp, Homo sapien
taaggcctggcctacaggcagaaac

SEQ ID NO: 1896085 - DNA, 25 bp, Homo sapien
tggaactcaccgtaactaaggcctg

SEQ ID NO: 1896086 - DNA, 25 bp, Homo sapien
cagaccttatgttaacctctcaggg

SEQ ID NO: 1896087 - DNA, 25 bp, Homo sapien
aaacaggagtgtctaggtacagacc

SEQ ID NO: 1896088 - DNA, 25 bp, Homo sapien
ctggcggctgcagtgaaaccactga

SEQ ID NO: 1896089 - DNA, 25 bp, Homo sapien
tggcggctgcagtgaaaccactgat

SEQ ID NO: 1896090 - DNA, 25 bp, Homo sapien
acaccagtctgcccacaggaggcat

SEQ ID NO: 1896091 - DNA, 25 bp, Homo sapien
tgtatcagagtcctcccgttcttct

SEQ ID NO: 1896092 - DNA, 25 bp, Homo sapien
gttctgcatgttctccacaccagtc

SEQ ID NO: 1896093 - DNA, 25 bp, Homo sapien
tgctccttctcaggtgcggccccag

SEQ ID NO: 1896094 - DNA, 25 bp, Homo sapien
ttcggcagagaaatcaaacacagca

SEQ ID NO: 1896095 - DNA, 25 bp, Homo sapien
cttcggcagagaaatcaaacacagc

SEQ ID NO: 1896096 - DNA, 25 bp, Homo sapien
tcggcagagaaatcaaacacagcat

SEQ ID NO: 1896097 - DNA, 25 bp, Homo sapien
ggcagagaaatcaaacacagcatta

SEQ ID NO: 1896098 - DNA, 25 bp, Homo sapien
gctggaaaccttggtcagcagggcc

SEQ ID NO: 1896099 - DNA, 25 bp, Homo sapien
ctggggctggaaaccttggtcagca

SEQ ID NO: 1896100 - DNA, 25 bp, Homo sapien
tggggctggaaaccttggtcagcag

SEQ ID NO: 1896101 - DNA, 25 bp, Homo sapien
gggctggaaaccttggtcagcaggg

SEQ ID NO: 1896102 - DNA, 25 bp, Homo sapien
cctcagagtgttcttcaggatgctg

SEQ ID NO: 1896103 - DNA, 25 bp, Homo sapien
tcctcagagtgttcttcaggatgct

SEQ ID NO: 1896104 - DNA, 25 bp, Homo sapien
tgctcctcagagtgttcttcaggat

SEQ ID NO: 1896105 - DNA, 25 bp, Homo sapien
gctcctcagagtgttcttcaggatg

SEQ ID NO: 1896106 - DNA, 25 bp, Homo sapien
tctggtcggtctcggtctctcctct

SEQ ID NO: 1896107 - DNA, 25 bp, Homo sapien
tgactttcgttctggtcggtctcgg

SEQ ID NO: 1896108 - DNA, 25 bp, Homo sapien
agcttcatgacctgcttcttctggt

SEQ ID NO: 1896109 - DNA, 25 bp, Homo sapien
tggactctgactttcgttctggtcg

SEQ ID NO: 1896110 - DNA, 25 bp, Homo sapien
cttcttcattgtcggtgtcctcacc

SEQ ID NO: 1896111 - DNA, 25 bp, Homo sapien
caaagcctcgggttctggcaccttt

SEQ ID NO: 1896112 - DNA, 25 bp, Homo sapien
actgtcgaggttcaagtcatctgga

SEQ ID NO: 1896113 - DNA, 25 bp, Homo sapien
gattgccatggtaagggtccacctc

SEQ ID NO: 1896114 - DNA, 25 bp, Homo sapien
ataaacaagggatcacaggttttag

SEQ ID NO: 1896115 - DNA, 25 bp, Homo sapien
gaagaaataaacaagggatcacagg

SEQ ID NO: 1896116 - DNA, 25 bp, Homo sapien
tagcttctgatctatagcatgagcc

SEQ ID NO: 1896117 - DNA, 25 bp, Homo sapien
tagcatgagcccagacaacatgtgg

SEQ ID NO: 1896118 - DNA, 25 bp, Homo sapien
caagttgtcatctttagcaacaagt

SEQ ID NO: 1896119 - DNA, 25 bp, Homo sapien
gaattgccactatccaagttgtcat

SEQ ID NO: 1896120 - DNA, 25 bp, Homo sapien
aattttgtcttcaccttgtccacca

SEQ ID NO: 1896121 - DNA, 25 bp, Homo sapien
tgtttgaattgccactatccaagtt

SEQ ID NO: 1896122 - DNA, 25 bp, Homo sapien
caatcatcacactcaatccaagaaa

SEQ ID NO: 1896123 - DNA, 25 bp, Homo sapien
tgacttttagacatgcataatttct

SEQ ID NO: 1896124 - DNA, 25 bp, Homo sapien
cttttagacatgcataatttctgcc

SEQ ID NO: 1896125 - DNA, 25 bp, Homo sapien
tgggttgacttttagacatgcataa

SEQ ID NO: 1896126 - DNA, 25 bp, Homo sapien
tcatccattcctggtcctgtttctt

SEQ ID NO: 1896127 - DNA, 25 bp, Homo sapien
tcctggtcctgtttcttcagtttta

SEQ ID NO: 1896128 - DNA, 25 bp, Homo sapien
ctcatccattcctggtcctgtttct

SEQ ID NO: 1896129 - DNA, 25 bp, Homo sapien
tggtcctgtttcttcagttttattg

SEQ ID NO: 1896130 - DNA, 25 bp, Homo sapien
aaagcctctcatctagtttgtcagc

SEQ ID NO: 1896131 - DNA, 25 bp, Homo sapien
ctctcatctagtttgtcagcttcct

SEQ ID NO: 1896132 - DNA, 25 bp, Homo sapien
gcctctcatctagtttgtcagcttc

SEQ ID NO: 1896133 - DNA, 25 bp, Homo sapien
cccaaagcctctcatctagtttgtc

SEQ ID NO: 1896134 - DNA, 25 bp, Homo sapien
attgagatcgcccatgtgtttatcc

SEQ ID NO: 1896135 - DNA, 25 bp, Homo sapien
gtgtttatccaggtctccgccctca

SEQ ID NO: 1896136 - DNA, 25 bp, Homo sapien
cccatgtgtttatccaggtctccgc

SEQ ID NO: 1896137 - DNA, 25 bp, Homo sapien
cgccctcactatctgatttctcatc

SEQ ID NO: 1896138 - DNA, 25 bp, Homo sapien
ccagtcctgtgtatttaagagaggt

SEQ ID NO: 1896139 - DNA, 25 bp, Homo sapien
ttaagagaggtgtggacccgcttcc

SEQ ID NO: 1896140 - DNA, 25 bp, Homo sapien
gtgtggacccgcttccctagcaagg

SEQ ID NO: 1896141 - DNA, 25 bp, Homo sapien
gagaggtgtggacccgcttccctag

SEQ ID NO: 1896142 - DNA, 25 bp, Homo sapien
acagaacacaccctacgggcagatg

SEQ ID NO: 1896143 - DNA, 25 bp, Homo sapien
gggcagatgcctttagatctactga

SEQ ID NO: 1896144 - DNA, 25 bp, Homo sapien
caaggaagtctataatgtgtgaaca

SEQ ID NO: 1896145 - DNA, 25 bp, Homo sapien
gatctactgacatagtcttactgtg

SEQ ID NO: 1896146 - DNA, 25 bp, Homo sapien
tattaagtgctatggctggtaggcc

SEQ ID NO: 1896147 - DNA, 25 bp, Homo sapien
gaaaaaagcagactacagaacggta

SEQ ID NO: 1896148 - DNA, 25 bp, Homo sapien
tgcatctagcacacgaggcagctaa

SEQ ID NO: 1896149 - DNA, 25 bp, Homo sapien
gaatctatgagacaccagggacttc

SEQ ID NO: 1896150 - DNA, 25 bp, Homo sapien
aacaagaatgaagtgacagataatc

SEQ ID NO: 1896151 - DNA, 25 bp, Homo sapien
tcaaaaacaagaatgaagtgacaga

SEQ ID NO: 1896152 - DNA, 25 bp, Homo sapien
aaaaacaagaatgaagtgacagata

SEQ ID NO: 1896153 - DNA, 25 bp, Homo sapien
ctttcaaaaacaagaatgaagtgac

SEQ ID NO: 1896154 - DNA, 25 bp, Homo sapien
tatcctcgcccttaatatcagattt

SEQ ID NO: 1896155 - DNA, 25 bp, Homo sapien
acatctcaatggcattatcctcgcc

SEQ ID NO: 1896156 - DNA, 25 bp, Homo sapien
ccatcaaaatcttccgacatctcaa

SEQ ID NO: 1896157 - DNA, 25 bp, Homo sapien
gattttgaatcaggatcctctttgt

SEQ ID NO: 1896158 - DNA, 25 bp, Homo sapien
actgtatacctatgtgaaaacgtac

SEQ ID NO: 1896159 - DNA, 25 bp, Homo sapien
ttctgtcaactgtatacctatgtga

SEQ ID NO: 1896160 - DNA, 25 bp, Homo sapien
tgaaaagaaagagagtgatcttctg

SEQ ID NO: 1896161 - DNA, 25 bp, Homo sapien
agaaagagagtgatcttctgtcaac

SEQ ID NO: 1896162 - DNA, 25 bp, Homo sapien
tagtcatggaactcagttgctccct

SEQ ID NO: 1896163 - DNA, 25 bp, Homo sapien
cctccctcatagtcatggaactcag

SEQ ID NO: 1896164 - DNA, 25 bp, Homo sapien
actcacatccttcatgccctcgcct

SEQ ID NO: 1896165 - DNA, 25 bp, Homo sapien
tcatttccgatctggtcactcacat

SEQ ID NO: 1896166 - DNA, 25 bp, Homo sapien
cagctttgcagtactacggtgagtt

SEQ ID NO: 1896167 - DNA, 25 bp, Homo sapien
cttctgggcaagctctgtaaagacc

SEQ ID NO: 1896168 - DNA, 25 bp, Homo sapien
gggcaagctctgtaaagacctgggc

SEQ ID NO: 1896169 - DNA, 25 bp, Homo sapien
cacagagagcagctttgcagtacta

SEQ ID NO: 1896170 - DNA, 25 bp, Homo sapien
tcaggaagaagaggacgaggtctga

SEQ ID NO: 1896171 - DNA, 25 bp, Homo sapien
caggaagaagaggacgaggtctgag

SEQ ID NO: 1896172 - DNA, 25 bp, Homo sapien
gaagaagaggacgaggtctgagtag

SEQ ID NO: 1896173 - DNA, 25 bp, Homo sapien
ggtcaggaagaagaggacgaggtct

SEQ ID NO: 1896174 - DNA, 25 bp, Homo sapien
accaggcgcaccagcaaggaacagg

SEQ ID NO: 1896175 - DNA, 25 bp, Homo sapien
cggcaccaggcgcaccagcaaggaa

SEQ ID NO: 1896176 - DNA, 25 bp, Homo sapien
aggcgcaccagcaaggaacaggatt

SEQ ID NO: 1896177 - DNA, 25 bp, Homo sapien
gagaggaccggcaccaggcgcacca

SEQ ID NO: 1896178 - DNA, 25 bp, Homo sapien
caggtgctttgctgctgtgccatcc

SEQ ID NO: 1896179 - DNA, 25 bp, Homo sapien
ggtgctttgctgctgtgccatcctc

SEQ ID NO: 1896180 - DNA, 25 bp, Homo sapien
tgctttgctgctgtgccatcctcac

SEQ ID NO: 1896181 - DNA, 25 bp, Homo sapien
gtgctttgctgctgtgccatcctca

SEQ ID NO: 1896182 - DNA, 25 bp, Homo sapien
cctctccaacagctcggagatggca

SEQ ID NO: 1896183 - DNA, 25 bp, Homo sapien
gcctctccaacagctcggagatggc

SEQ ID NO: 1896184 - DNA, 25 bp, Homo sapien
gtgcaaagtgctcacatcggcccag

SEQ ID NO: 1896185 - DNA, 25 bp, Homo sapien
ctgcacgtgcaaagtgctcacatcg

SEQ ID NO: 1896186 - DNA, 25 bp, Homo sapien
tgcacgtgcaaagtgctcacatcgg

SEQ ID NO: 1896187 - DNA, 25 bp, Homo sapien
cacgtgcaaagtgctcacatcggcc

SEQ ID NO: 1896188 - DNA, 25 bp, Homo sapien
catccttaactatttagccacagaa

SEQ ID NO: 1896189 - DNA, 25 bp, Homo sapien
atcaggcatgaaactaatttctgcc

SEQ ID NO: 1896190 - DNA, 25 bp, Homo sapien
gtttctaacatccatccttaactat

SEQ ID NO: 1896191 - DNA, 25 bp, Homo sapien
taaatcaggcatgaaactaatttct

SEQ ID NO: 1896192 - DNA, 25 bp, Homo sapien
ggctcggatggcaatttccatttgc

SEQ ID NO: 1896193 - DNA, 25 bp, Homo sapien
ggatggctcggatggcaatttccat

SEQ ID NO: 1896194 - DNA, 25 bp, Homo sapien
tcttcttgtgggcttgcttggtcag

SEQ ID NO: 1896195 - DNA, 25 bp, Homo sapien
gcttgcttggtcagtgttctcctct

SEQ ID NO: 1896196 - DNA, 25 bp, Homo sapien
gaagaatgaacaaggactctaggcc

SEQ ID NO: 1896197 - DNA, 25 bp, Homo sapien
gcaactcagcgcagaagagcaaact

SEQ ID NO: 1896198 - DNA, 25 bp, Homo sapien
cttccaggtagtaaagtcagccatg

SEQ ID NO: 1896199 - DNA, 25 bp, Homo sapien
tctaggccctgcaaatgaactgaca

SEQ ID NO: 1896200 - DNA, 25 bp, Homo sapien
ccagagggcagctgacttccaggta

SEQ ID NO: 1896201 - DNA, 25 bp, Homo sapien
gcatctctgttaatctcgtagttga

SEQ ID NO: 1896202 - DNA, 25 bp, Homo sapien
aaggtgatcctgtttccgcatccgg

SEQ ID NO: 1896203 - DNA, 25 bp, Homo sapien
cgtagttgactgttgccaaaggtga

SEQ ID NO: 1896204 - DNA, 25 bp, Homo sapien
taggtccagcactactccacaaagt

SEQ ID NO: 1896205 - DNA, 25 bp, Homo sapien
caaagttgtcccttgctaagttctg

SEQ ID NO: 1896206 - DNA, 25 bp, Homo sapien
ttgtcccttgctaagttctggtcct

SEQ ID NO: 1896207 - DNA, 25 bp, Homo sapien
ctcagattggaaggaattaggtcca

SEQ ID NO: 1896208 - DNA, 25 bp, Homo sapien
ccaggagagctgctcaagcaggatc

SEQ ID NO: 1896209 - DNA, 25 bp, Homo sapien
gagctgctcaagcaggatctggcac

SEQ ID NO: 1896210 - DNA, 25 bp, Homo sapien
gagagctgctcaagcaggatctggc

SEQ ID NO: 1896211 - DNA, 25 bp, Homo sapien
aggagagctgctcaagcaggatctg

SEQ ID NO: 1896212 - DNA, 25 bp, Homo sapien
gtgaatctcttgcacacagctgagg

SEQ ID NO: 1896213 - DNA, 25 bp, Homo sapien
cagcctgctgtgaatctcttgcaca

SEQ ID NO: 1896214 - DNA, 25 bp, Homo sapien
ggccccatcagcctgctgtgaatct

SEQ ID NO: 1896215 - DNA, 25 bp, Homo sapien
cggggtaggcctggggccccatcag

SEQ ID NO: 1896216 - DNA, 25 bp, Homo sapien
agcgtggtcagggagcgccgctgtc

SEQ ID NO: 1896217 - DNA, 25 bp, Homo sapien
cgccgctgtcggacgagcatcttca

SEQ ID NO: 1896218 - DNA, 25 bp, Homo sapien
agggagcgccgctgtcggacgagca

SEQ ID NO: 1896219 - DNA, 25 bp, Homo sapien
catcttcatcaaatgtgctgagaac

SEQ ID NO: 1896220 - DNA, 25 bp, Homo sapien
ttaaggatgtactgcaaaaagctca

SEQ ID NO: 1896221 - DNA, 25 bp, Homo sapien
acaaggtctgagaatacagccctgg

SEQ ID NO: 1896222 - DNA, 25 bp, Homo sapien
cctgagcccctgcaagactcatgtt

SEQ ID NO: 1896223 - DNA, 25 bp, Homo sapien
ggctgttatcacttaacaaggtctg

SEQ ID NO: 1896224 - DNA, 25 bp, Homo sapien
ctggcatgccgtgcaagagagcgat

SEQ ID NO: 1896225 - DNA, 25 bp, Homo sapien
tagtgctgcgttaagcctggcatgc

SEQ ID NO: 1896226 - DNA, 25 bp, Homo sapien
tgaagacgagatttctgtaagcagc

SEQ ID NO: 1896227 - DNA, 25 bp, Homo sapien
aagagagcgataaaaatacttctgg

SEQ ID NO: 1896228 - DNA, 25 bp, Homo sapien
tgcgctctggagatctaatgggtga

SEQ ID NO: 1896229 - DNA, 25 bp, Homo sapien
gctgctgacgatggacaatgcgctc

SEQ ID NO: 1896230 - DNA, 25 bp, Homo sapien
aagcaagacctttgcgatacgacaa

SEQ ID NO: 1896231 - DNA, 25 bp, Homo sapien
tggacaatgcgctctggagatctaa

SEQ ID NO: 1896232 - DNA, 25 bp, Homo sapien
gcagctcactcacagaggaaatcac

SEQ ID NO: 1896233 - DNA, 25 bp, Homo sapien
gggttccacctttaagctctgcagc

SEQ ID NO: 1896234 - DNA, 25 bp, Homo sapien
ctctgcagagggttccacctttaag

SEQ ID NO: 1896235 - DNA, 25 bp, Homo sapien
aaagctcgctgtttttgcatgagaa

SEQ ID NO: 1896236 - DNA, 25 bp, Homo sapien
ctgtgaactgatcaaggccctccac

SEQ ID NO: 1896237 - DNA, 25 bp, Homo sapien
tttggcaagcgacgcagaagctccc

SEQ ID NO: 1896238 - DNA, 25 bp, Homo sapien
acatcttcctcatgcgtttcctgag

SEQ ID NO: 1896239 - DNA, 25 bp, Homo sapien
tcatgaacgtcaggcacatcttcct

SEQ ID NO: 1896240 - DNA, 25 bp, Homo sapien
acagggtctcatacgttgcataggc

SEQ ID NO: 1896241 - DNA, 25 bp, Homo sapien
taactgttggtgcttgaaattggcc

SEQ ID NO: 1896242 - DNA, 25 bp, Homo sapien
gagccccaggtaggaaatacagtaa

SEQ ID NO: 1896243 - DNA, 25 bp, Homo sapien
tgcccagaaattactctcctgaggg

SEQ ID NO: 1896244 - DNA, 25 bp, Homo sapien
agggatgaccggcagggttcactca

SEQ ID NO: 1896245 - DNA, 25 bp, Homo sapien
gttggcctgggcaaaaagtcaggct

SEQ ID NO: 1896246 - DNA, 25 bp, Homo sapien
gggttcactcaggactgcttcaaat

SEQ ID NO: 1896247 - DNA, 25 bp, Homo sapien
tgggcaaaaagtcaggctgttcttc

SEQ ID NO: 1896248 - DNA, 25 bp, Homo sapien
tacagattgcttaatggaccagaag

SEQ ID NO: 1896249 - DNA, 25 bp, Homo sapien
ttctacagattgcttaatggaccag

SEQ ID NO: 1896250 - DNA, 25 bp, Homo sapien
cagaagctgacatcattccacttgg

SEQ ID NO: 1896251 - DNA, 25 bp, Homo sapien
gaagctgacatcattccacttggaa

SEQ ID NO: 1896252 - DNA, 25 bp, Homo sapien
gacccggtcaaagaattgcttgtaa

SEQ ID NO: 1896253 - DNA, 25 bp, Homo sapien
aacgaagttccacaattttggcctg

SEQ ID NO: 1896254 - DNA, 25 bp, Homo sapien
tgcttgtaataatggtacaaattcc

SEQ ID NO: 1896255 - DNA, 25 bp, Homo sapien
taatggtacaaattccatagaacac

SEQ ID NO: 1896256 - DNA, 25 bp, Homo sapien
aacatcaaggtcatctgtttgtcat

SEQ ID NO: 1896257 - DNA, 25 bp, Homo sapien
taacatctgaagtcgcacatggaac

SEQ ID NO: 1896258 - DNA, 25 bp, Homo sapien
ccagcgaggatccttcaataaatgc

SEQ ID NO: 1896259 - DNA, 25 bp, Homo sapien
gcatcagcaagacatgacaatggaa

SEQ ID NO: 1896260 - DNA, 25 bp, Homo sapien
catgtgcttctcaagcatctgatag

SEQ ID NO: 1896261 - DNA, 25 bp, Homo sapien
caagcatctgatagatggagaacca

SEQ ID NO: 1896262 - DNA, 25 bp, Homo sapien
tcggtgtggcgcttcatagtattat

SEQ ID NO: 1896263 - DNA, 25 bp, Homo sapien
gtggatttctcggtgtggcgcttca

SEQ ID NO: 1896264 - DNA, 25 bp, Homo sapien
tgtttccgcaaagacaaagctcgac

SEQ ID NO: 1896265 - DNA, 25 bp, Homo sapien
tcagctccagtttacgccaccgaat

SEQ ID NO: 1896266 - DNA, 25 bp, Homo sapien
tcatctgactgatcaaatcaagatg

SEQ ID NO: 1896267 - DNA, 25 bp, Homo sapien
aagctcgacttgcattttcctccca

SEQ ID NO: 1896268 - DNA, 25 bp, Homo sapien
tacgaattctgtccattacaaccag

SEQ ID NO: 1896269 - DNA, 25 bp, Homo sapien
tctaagccattcaggaactttgaga

SEQ ID NO: 1896270 - DNA, 25 bp, Homo sapien
agtgggaaactacgaattctgtcca

SEQ ID NO: 1896271 - DNA, 25 bp, Homo sapien
ctctaagccattcaggaactttgag

SEQ ID NO: 1896272 - DNA, 25 bp, Homo sapien
tgttcaagcgctgggtgttctggcc

SEQ ID NO: 1896273 - DNA, 25 bp, Homo sapien
ggtagaagtcatagggcccatcagg

SEQ ID NO: 1896274 - DNA, 25 bp, Homo sapien
caaaagttggctgcccaagagtcgg

SEQ ID NO: 1896275 - DNA, 25 bp, Homo sapien
tgacactgccgtgcttctggaacat

SEQ ID NO: 1896276 - DNA, 25 bp, Homo sapien
taagttgatctatcaacatgtcaaa

SEQ ID NO: 1896277 - DNA, 25 bp, Homo sapien
tcagtaagttgatctatcaacatgt

SEQ ID NO: 1896278 - DNA, 25 bp, Homo sapien
cttcttgcgggcctgaggcacaaga

SEQ ID NO: 1896279 - DNA, 25 bp, Homo sapien
ttgatctatcaacatgtcaaaaaga

SEQ ID NO: 1896280 - DNA, 25 bp, Homo sapien
tctgttgataccagagggatcgagc

SEQ ID NO: 1896281 - DNA, 25 bp, Homo sapien
tactgcctgcattgaattctgggag

SEQ ID NO: 1896282 - DNA, 25 bp, Homo sapien
tagaagtgtgtcacaagcgatgccc

SEQ ID NO: 1896283 - DNA, 25 bp, Homo sapien
gcgatgccccagtctgatagcaaga

SEQ ID NO: 1896284 - DNA, 25 bp, Homo sapien
ccttctcttgggctatgcgttcctg

SEQ ID NO: 1896285 - DNA, 25 bp, Homo sapien
tgtatctatacaggccgctttcctg

SEQ ID NO: 1896286 - DNA, 25 bp, Homo sapien
gctgtcctagagttcctgctcctgt

SEQ ID NO: 1896287 - DNA, 25 bp, Homo sapien
gggctatgcgttcctgctcatccca

SEQ ID NO: 1896288 - DNA, 25 bp, Homo sapien
tgggctcacggcatctggatagaag

SEQ ID NO: 1896289 - DNA, 25 bp, Homo sapien
cccttgcataacacgtgggagcgca

SEQ ID NO: 1896290 - DNA, 25 bp, Homo sapien
gattagcttcccaaggcctcgtaga

SEQ ID NO: 1896291 - DNA, 25 bp, Homo sapien
caatatggatgcctgcagtgggctc

SEQ ID NO: 1896292 - DNA, 25 bp, Homo sapien
ctggtgacgtagtggtggatctcct

SEQ ID NO: 1896293 - DNA, 25 bp, Homo sapien
ccgtgtgagcagatcctgaacagca

SEQ ID NO: 1896294 - DNA, 25 bp, Homo sapien
cagaccgtggcccatctatgtggag

SEQ ID NO: 1896295 - DNA, 25 bp, Homo sapien
caggttaaattatccagccgatcca

SEQ ID NO: 1896296 - DNA, 25 bp, Homo sapien
gagtagctgacaacgacttcatctt

SEQ ID NO: 1896297 - DNA, 25 bp, Homo sapien
agctgacaacgacttcatcttccag

SEQ ID NO: 1896298 - DNA, 25 bp, Homo sapien
gatgagagtagctgacaacgacttc

SEQ ID NO: 1896299 - DNA, 25 bp, Homo sapien
tgaggatgagagtagctgacaacga

SEQ ID NO: 1896300 - DNA, 25 bp, Homo sapien
acaggttccgggtcttccattcaca

SEQ ID NO: 1896301 - DNA, 25 bp, Homo sapien
ctgggatgacaggttccgggtcttc

SEQ ID NO: 1896302 - DNA, 25 bp, Homo sapien
tccattcacactgcagttggtgtaa

SEQ ID NO: 1896303 - DNA, 25 bp, Homo sapien
ttccgggtcttccattcacactgca

SEQ ID NO: 1896304 - DNA, 25 bp, Homo sapien
tggggaagccatgtctgaatctgga

SEQ ID NO: 1896305 - DNA, 25 bp, Homo sapien
taattgagcttgtactccctcttca

SEQ ID NO: 1896306 - DNA, 25 bp, Homo sapien
tcttccttgacgtaattgagcttgt

SEQ ID NO: 1896307 - DNA, 25 bp, Homo sapien
ttcaccgcagggtcaaagcgtgcct

SEQ ID NO: 1896308 - DNA, 25 bp, Homo sapien
caccaacaaagtggtgcagggaggt

SEQ ID NO: 1896309 - DNA, 25 bp, Homo sapien
agttctgcatgtactcctgccgccg

SEQ ID NO: 1896310 - DNA, 25 bp, Homo sapien
ggcctgccaggtgccggaacagcac

SEQ ID NO: 1896311 - DNA, 25 bp, Homo sapien
atgtccccaagtgtctggcccacat

SEQ ID NO: 1896312 - DNA, 25 bp, Homo sapien
acagtctgcttccagggcgagggaa

SEQ ID NO: 1896313 - DNA, 25 bp, Homo sapien
aaaagacaggaactttacagtctgc

SEQ ID NO: 1896314 - DNA, 25 bp, Homo sapien
cagtctgcttccagggcgagggaat

SEQ ID NO: 1896315 - DNA, 25 bp, Homo sapien
aagacaggaactttacagtctgctt

SEQ ID NO: 1896316 - DNA, 25 bp, Homo sapien
aattctgctactgaagagatagcca

SEQ ID NO: 1896317 - DNA, 25 bp, Homo sapien
tctgctactgaagagatagccatgt

SEQ ID NO: 1896318 - DNA, 25 bp, Homo sapien
tagccatgttagtccaaagcatcga

SEQ ID NO: 1896319 - DNA, 25 bp, Homo sapien
aaagcatcgaactgatgtcctggag

SEQ ID NO: 1896320 - DNA, 25 bp, Homo sapien
tagagaatatgggtctattgagatt

SEQ ID NO: 1896321 - DNA, 25 bp, Homo sapien
gagaatatgggtctattgagattgc

SEQ ID NO: 1896322 - DNA, 25 bp, Homo sapien
atatgggtctattgagattgccggg

SEQ ID NO: 1896323 - DNA, 25 bp, Homo sapien
gaatatgggtctattgagattgccg

SEQ ID NO: 1896324 - DNA, 25 bp, Homo sapien
aacagacttgggtgcctccctctgc

SEQ ID NO: 1896325 - DNA, 25 bp, Homo sapien
aaacagacttgggtgcctccctctg

SEQ ID NO: 1896326 - DNA, 25 bp, Homo sapien
acagacttgggtgcctccctctgct

SEQ ID NO: 1896327 - DNA, 25 bp, Homo sapien
caaaacagacttgggtgcctccctc

SEQ ID NO: 1896328 - DNA, 25 bp, Homo sapien
actcggaccacaaagatgtaatttc

SEQ ID NO: 1896329 - DNA, 25 bp, Homo sapien
tttgtggtcacagtactgctccaga

SEQ ID NO: 1896330 - DNA, 25 bp, Homo sapien
catggaattaaataactcggaccac

SEQ ID NO: 1896331 - DNA, 25 bp, Homo sapien
ggttccacattagccagtactctgg

SEQ ID NO: 1896332 - DNA, 25 bp, Homo sapien
aataaaatgtttcccaaccagtctg

SEQ ID NO: 1896333 - DNA, 25 bp, Homo sapien
aaaggaggcttatgtcttattgtga

SEQ ID NO: 1896334 - DNA, 25 bp, Homo sapien
ccagtctgtcaaagaaaatctaacc

SEQ ID NO: 1896335 - DNA, 25 bp, Homo sapien
ccaactcataatgtaaaggaggctt

SEQ ID NO: 1896336 - DNA, 25 bp, Homo sapien
aaggaccacagatctcgaagctctt

SEQ ID NO: 1896337 - DNA, 25 bp, Homo sapien
tcttgaggtgtaacaggtgtgtgat

SEQ ID NO: 1896338 - DNA, 25 bp, Homo sapien
ctcgaagctcttgaggtgtaacagg

SEQ ID NO: 1896339 - DNA, 25 bp, Homo sapien
ggaccacagatctcgaagctcttga

SEQ ID NO: 1896340 - DNA, 25 bp, Homo sapien
caactgaacactcctggtgaggtgg

SEQ ID NO: 1896341 - DNA, 25 bp, Homo sapien
ggtggattacggaggtcaagtctgg

SEQ ID NO: 1896342 - DNA, 25 bp, Homo sapien
agctgtcactttgtaccgccaaagc

SEQ ID NO: 1896343 - DNA, 25 bp, Homo sapien
gcatagccaggtactccattgcagg

SEQ ID NO: 1896344 - DNA, 25 bp, Homo sapien
acactgagcatgcacaaaattcttc

SEQ ID NO: 1896345 - DNA, 25 bp, Homo sapien
actgagcatgcacaaaattcttcaa

SEQ ID NO: 1896346 - DNA, 25 bp, Homo sapien
aaacactgagcatgcacaaaattct

SEQ ID NO: 1896347 - DNA, 25 bp, Homo sapien
ctaaacactgagcatgcacaaaatt

SEQ ID NO: 1896348 - DNA, 25 bp, Homo sapien
cccaggcttgcaggagacttttctt

SEQ ID NO: 1896349 - DNA, 25 bp, Homo sapien
tatttgctctgaggatcagtcccca

SEQ ID NO: 1896350 - DNA, 25 bp, Homo sapien
gagaagcaaccacttggagacggtt

SEQ ID NO: 1896351 - DNA, 25 bp, Homo sapien
tgttaaggaccttcagttgtgaaaa

SEQ ID NO: 1896352 - DNA, 25 bp, Homo sapien
ttataccagcgaagccaccagtctg

SEQ ID NO: 1896353 - DNA, 25 bp, Homo sapien
tatgttctgagacagtctgaacttc

SEQ ID NO: 1896354 - DNA, 25 bp, Homo sapien
ctgcaacttctttataccagcgaag

SEQ ID NO: 1896355 - DNA, 25 bp, Homo sapien
ttctttataccagcgaagccaccag

SEQ ID NO: 1896356 - DNA, 25 bp, Homo sapien
tgtcggccacagtccagaaccggtc

SEQ ID NO: 1896357 - DNA, 25 bp, Homo sapien
tgttttaaaacccagtgccaatgga

SEQ ID NO: 1896358 - DNA, 25 bp, Homo sapien
tcataattcatcagaagtcggggga

SEQ ID NO: 1896359 - DNA, 25 bp, Homo sapien
gacctggggcatctacttttactgt

SEQ ID NO: 1896360 - DNA, 25 bp, Homo sapien
gactgtacccagagcaggactagtg

SEQ ID NO: 1896361 - DNA, 25 bp, Homo sapien
ggactagtgcatcacaaagttcaaa

SEQ ID NO: 1896362 - DNA, 25 bp, Homo sapien
ggcagagtgtgatagctttctggat

SEQ ID NO: 1896363 - DNA, 25 bp, Homo sapien
gaccacaatttcatggggcagagtg

SEQ ID NO: 1896364 - DNA, 25 bp, Homo sapien
tcaaaggacattctcaaaacactct

SEQ ID NO: 1896365 - DNA, 25 bp, Homo sapien
cttgatggaattcaaaggacattct

SEQ ID NO: 1896366 - DNA, 25 bp, Homo sapien
aaaacactctctcttagctttttgc

SEQ ID NO: 1896367 - DNA, 25 bp, Homo sapien
ttcccggtcaagatatatgattgtc

SEQ ID NO: 1896368 - DNA, 25 bp, Homo sapien
caggctggtccgtttgtgggtcaaa

SEQ ID NO: 1896369 - DNA, 25 bp, Homo sapien
tcaggctggtccgtttgtgggtcaa

SEQ ID NO: 1896370 - DNA, 25 bp, Homo sapien
tccagagcctgcatattccatcggg

SEQ ID NO: 1896371 - DNA, 25 bp, Homo sapien
aatttctaatcatgtccagagcctg

SEQ ID NO: 1896372 - DNA, 25 bp, Homo sapien
tactgactgcacctgagagggaatg

SEQ ID NO: 1896373 - DNA, 25 bp, Homo sapien
acattactgactgcacctgagaggg

SEQ ID NO: 1896374 - DNA, 25 bp, Homo sapien
aatgtgagtaaaaattcctgagaga

SEQ ID NO: 1896375 - DNA, 25 bp, Homo sapien
gggaatgtgagtaaaaattcctgag

SEQ ID NO: 1896376 - DNA, 25 bp, Homo sapien
ttgaatttcaggttctcagggctgg

SEQ ID NO: 1896377 - DNA, 25 bp, Homo sapien
taaagccatttaactctgagcatcc

SEQ ID NO: 1896378 - DNA, 25 bp, Homo sapien
gtcttgcaaggtaaaaggctgactc

SEQ ID NO: 1896379 - DNA, 25 bp, Homo sapien
ggttcatcgatccagtaagtattca

SEQ ID NO: 1896380 - DNA, 25 bp, Homo sapien
tgtgctcgcaaagaagaaacatgtt

SEQ ID NO: 1896381 - DNA, 25 bp, Homo sapien
tctccccaggtttcatgtgctcgca

SEQ ID NO: 1896382 - DNA, 25 bp, Homo sapien
gaatctggccacagtcccatgccaa

SEQ ID NO: 1896383 - DNA, 25 bp, Homo sapien
ccatctcttcggactgtagacaggt

SEQ ID NO: 1896384 - DNA, 25 bp, Homo sapien
gggaacagacatatacttcccagca

SEQ ID NO: 1896385 - DNA, 25 bp, Homo sapien
cttccggtttgctggtgaatgctgg

SEQ ID NO: 1896386 - DNA, 25 bp, Homo sapien
agccctcgctgcaggtactggacaa

SEQ ID NO: 1896387 - DNA, 25 bp, Homo sapien
ggctgtctggattagagttgataca

SEQ ID NO: 1896388 - DNA, 25 bp, Homo sapien
aggatgtcacatacactgttcccca

SEQ ID NO: 1896389 - DNA, 25 bp, Homo sapien
agaggatgtcacatacactgttccc

SEQ ID NO: 1896390 - DNA, 25 bp, Homo sapien
ggatgtcacatacactgttccccac

SEQ ID NO: 1896391 - DNA, 25 bp, Homo sapien
gaggatgtcacatacactgttcccc

SEQ ID NO: 1896392 - DNA, 25 bp, Homo sapien
aaatccaggttgtctggggtgcttg

SEQ ID NO: 1896393 - DNA, 25 bp, Homo sapien
caaatccaggttgtctggggtgctt

SEQ ID NO: 1896394 - DNA, 25 bp, Homo sapien
aatccaggttgtctggggtgcttgc

SEQ ID NO: 1896395 - DNA, 25 bp, Homo sapien
atccaggttgtctggggtgcttgca

SEQ ID NO: 1896396 - DNA, 25 bp, Homo sapien
cgggatatatctccatgaacaggat

SEQ ID NO: 1896397 - DNA, 25 bp, Homo sapien
tgtagatttcaagtccacgattcct

SEQ ID NO: 1896398 - DNA, 25 bp, Homo sapien
tgaacaggatccatcgagaggaaaa

SEQ ID NO: 1896399 - DNA, 25 bp, Homo sapien
aagtccacgattcctcatagctcgg

SEQ ID NO: 1896400 - DNA, 25 bp, Homo sapien
ccttcgtcaccaatgcaaggcaagg

SEQ ID NO: 1896401 - DNA, 25 bp, Homo sapien
catctaagccactgtgatgtgttgc

SEQ ID NO: 1896402 - DNA, 25 bp, Homo sapien
tgcaaaaggatcatgactggtatct

SEQ ID NO: 1896403 - DNA, 25 bp, Homo sapien
ccttgcccctcttgtttatgctgtg

SEQ ID NO: 1896404 - DNA, 25 bp, Homo sapien
taatagtgaggacacctccgggttc

SEQ ID NO: 1896405 - DNA, 25 bp, Homo sapien
tatcgtgggagtggatccatctatc

SEQ ID NO: 1896406 - DNA, 25 bp, Homo sapien
cattcctctctcactaatagtgagg

SEQ ID NO: 1896407 - DNA, 25 bp, Homo sapien
attcaaacgatccaacactgatggg

SEQ ID NO: 1896408 - DNA, 25 bp, Homo sapien
catggctatggccactggccaactg

SEQ ID NO: 1896409 - DNA, 25 bp, Homo sapien
taacattgtccatcagaagccagtc

SEQ ID NO: 1896410 - DNA, 25 bp, Homo sapien
gccaactgcgtaagcttcacaccaa

SEQ ID NO: 1896411 - DNA, 25 bp, Homo sapien
atgctgtcaacccattcaaatgtgc

SEQ ID NO: 1896412 - DNA, 25 bp, Homo sapien
taaggaggctatcccttaacagtgc

SEQ ID NO: 1896413 - DNA, 25 bp, Homo sapien
tgttgacaatctccatcgtgatagc

SEQ ID NO: 1896414 - DNA, 25 bp, Homo sapien
gaagaaaatgactccaggctcgcag

SEQ ID NO: 1896415 - DNA, 25 bp, Homo sapien
tcctccaaggtcgtataagatcaac

SEQ ID NO: 1896416 - DNA, 25 bp, Homo sapien
tccattgcactgttcatagccatga

SEQ ID NO: 1896417 - DNA, 25 bp, Homo sapien
cgaccaggatgaccatccagctcat

SEQ ID NO: 1896418 - DNA, 25 bp, Homo sapien
atccagctcatctgcacacacttca

SEQ ID NO: 1896419 - DNA, 25 bp, Homo sapien
gccatgatctttaatgtgtggccag

SEQ ID NO: 1896420 - DNA, 25 bp, Homo sapien
ggacgggtgaggaacacagctccca

SEQ ID NO: 1896421 - DNA, 25 bp, Homo sapien
gcaacaggggatggcgggacgggtg

SEQ ID NO: 1896422 - DNA, 25 bp, Homo sapien
aggaacacagctcccacgggaaagg

SEQ ID NO: 1896423 - DNA, 25 bp, Homo sapien
ggtgaggaacacagctcccacggga

SEQ ID NO: 1896424 - DNA, 25 bp, Homo sapien
gatacgaaatagtctggttcccatg

SEQ ID NO: 1896425 - DNA, 25 bp, Homo sapien
tggaatttgaaccaaacacatcctt

SEQ ID NO: 1896426 - DNA, 25 bp, Homo sapien
gaacatcatagggagtgatacgaaa

SEQ ID NO: 1896427 - DNA, 25 bp, Homo sapien
cccatgtatgggttggaatttgaac

SEQ ID NO: 1896428 - DNA, 25 bp, Homo sapien
gagttggcttgactaccctgtgtgg

SEQ ID NO: 1896429 - DNA, 25 bp, Homo sapien
ggatagcaccttatggacagttctg

SEQ ID NO: 1896430 - DNA, 25 bp, Homo sapien
taactcaagccattggcacacaggc

SEQ ID NO: 1896431 - DNA, 25 bp, Homo sapien
gcttgaagaaatgcaggcagacctg

SEQ ID NO: 1896432 - DNA, 25 bp, Homo sapien
ggtcaaccagcatcaactgacacca

SEQ ID NO: 1896433 - DNA, 25 bp, Homo sapien
gaccaaaaacacatgctgaccagga

SEQ ID NO: 1896434 - DNA, 25 bp, Homo sapien
ctgaccaggatcataacacccaggg

SEQ ID NO: 1896435 - DNA, 25 bp, Homo sapien
cattctttcaccatagaccaaaaac

SEQ ID NO: 1896436 - DNA, 25 bp, Homo sapien
gaactccatgtcaattactgtaagg

SEQ ID NO: 1896437 - DNA, 25 bp, Homo sapien
agtactggcaatgaactccatgtca

SEQ ID NO: 1896438 - DNA, 25 bp, Homo sapien
ttactgtaaggggatcaacgaagac

SEQ ID NO: 1896439 - DNA, 25 bp, Homo sapien
tggttattgaaagcaaccattttct

SEQ ID NO: 1896440 - DNA, 25 bp, Homo sapien
aaatcttcgtcttttcatgctgcac

SEQ ID NO: 1896441 - DNA, 25 bp, Homo sapien
tgaaagctcattcctaactcaggca

SEQ ID NO: 1896442 - DNA, 25 bp, Homo sapien
gtgaatctgttaaggaaagacctgg

SEQ ID NO: 1896443 - DNA, 25 bp, Homo sapien
tcctcggtggtcaaaacaagcattg

SEQ ID NO: 1896444 - DNA, 25 bp, Homo sapien
tcagaaagggaatttcaaacaatat

SEQ ID NO: 1896445 - DNA, 25 bp, Homo sapien
taaagaagaaagtacataatttgtc

SEQ ID NO: 1896446 - DNA, 25 bp, Homo sapien
gaagaaagtacataatttgtctcaa

SEQ ID NO: 1896447 - DNA, 25 bp, Homo sapien
aactgcaacaaaaagcaggggaata

SEQ ID NO: 1896448 - DNA, 25 bp, Homo sapien
tcttgggcatgacaaacaggcccct

SEQ ID NO: 1896449 - DNA, 25 bp, Homo sapien
gatcaccgtcttgggcatgacaaac

SEQ ID NO: 1896450 - DNA, 25 bp, Homo sapien
cacatgatcaccgtcttgggcatga

SEQ ID NO: 1896451 - DNA, 25 bp, Homo sapien
tgggcatgacaaacaggcccctcac

SEQ ID NO: 1896452 - DNA, 25 bp, Homo sapien
ccaccttcaacaggtagatctgctc

SEQ ID NO: 1896453 - DNA, 25 bp, Homo sapien
gccaccttcaacaggtagatctgct

SEQ ID NO: 1896454 - DNA, 25 bp, Homo sapien
ggtagctcttaagagcctctgtgca

SEQ ID NO: 1896455 - DNA, 25 bp, Homo sapien
gcagtggtccctgcactgagtgcat

SEQ ID NO: 1896456 - DNA, 25 bp, Homo sapien
taatgctcccaccaaacttgtcttg

SEQ ID NO: 1896457 - DNA, 25 bp, Homo sapien
gaatgggcttcttcagtttggtagc

SEQ ID NO: 1896458 - DNA, 25 bp, Homo sapien
taaatgtcagatgccagggaccgga

SEQ ID NO: 1896459 - DNA, 25 bp, Homo sapien
caatcattaacatagagagggcgga

SEQ ID NO: 1896460 - DNA, 25 bp, Homo sapien
gctaaataggtctttgcaagccact

SEQ ID NO: 1896461 - DNA, 25 bp, Homo sapien
tggttagattatacagcccatcagg

SEQ ID NO: 1896462 - DNA, 25 bp, Homo sapien
ttccagtgaattctttggccttcat

SEQ ID NO: 1896463 - DNA, 25 bp, Homo sapien
ccccaaaggttatctattccagtga

SEQ ID NO: 1896464 - DNA, 25 bp, Homo sapien
ttttcgtgccaaaagggctgtacca

SEQ ID NO: 1896465 - DNA, 25 bp, Homo sapien
ctgatattctgtaagtcgtactatc

SEQ ID NO: 1896466 - DNA, 25 bp, Homo sapien
gagatgatctctggccttttcaaag

SEQ ID NO: 1896467 - DNA, 25 bp, Homo sapien
gacaaaagatgtcacagtggagatg

SEQ ID NO: 1896468 - DNA, 25 bp, Homo sapien
ttgttcatgaagttaacccaggaca

SEQ ID NO: 1896469 - DNA, 25 bp, Homo sapien
aactcttggtgggtcagccagtcaa

SEQ ID NO: 1896470 - DNA, 25 bp, Homo sapien
ctttaggatctattctgcccagaca

SEQ ID NO: 1896471 - DNA, 25 bp, Homo sapien
tttaggatctattctgcccagacac

SEQ ID NO: 1896472 - DNA, 25 bp, Homo sapien
ctgaattaaatcttcacggcttgtg

SEQ ID NO: 1896473 - DNA, 25 bp, Homo sapien
accggtttcttaaggcaggagacag

SEQ ID NO: 1896474 - DNA, 25 bp, Homo sapien
cctggacgaagattatgactgatga

SEQ ID NO: 1896475 - DNA, 25 bp, Homo sapien
tcacggcttgtgctttgagggcacc

SEQ ID NO: 1896476 - DNA, 25 bp, Homo sapien
ttcccagcagtcaacagctctattt

SEQ ID NO: 1896477 - DNA, 25 bp, Homo sapien
tcatggttgctagaatacgaaattt

SEQ ID NO: 1896478 - DNA, 25 bp, Homo sapien
caaagtcacccccagggttcatggt

SEQ ID NO: 1896479 - DNA, 25 bp, Homo sapien
gcctttttcagctaataccagagac

SEQ ID NO: 1896480 - DNA, 25 bp, Homo sapien
gcttatagccatgggtctaggattc

SEQ ID NO: 1896481 - DNA, 25 bp, Homo sapien
agattcatattggtctgaggtctga

SEQ ID NO: 1896482 - DNA, 25 bp, Homo sapien
tgactttggctcatgttttagccct

SEQ ID NO: 1896483 - DNA, 25 bp, Homo sapien
tgaggtctgatgatggcttatagcc

SEQ ID NO: 1896484 - DNA, 25 bp, Homo sapien
gaggcccatcatgccactcaaagag

SEQ ID NO: 1896485 - DNA, 25 bp, Homo sapien
tcggccaatgagatctcatccaaga

SEQ ID NO: 1896486 - DNA, 25 bp, Homo sapien
tccaagacagagtcatcggccaatg

SEQ ID NO: 1896487 - DNA, 25 bp, Homo sapien
caaagagtcttgatgtgtcaatttc

SEQ ID NO: 1896488 - DNA, 25 bp, Homo sapien
tcgtttggcttttgtctcactggcc

SEQ ID NO: 1896489 - DNA, 25 bp, Homo sapien
tggcagctgacagagtataatttct

SEQ ID NO: 1896490 - DNA, 25 bp, Homo sapien
gaagtctgatgtctccatgtgtaag

SEQ ID NO: 1896491 - DNA, 25 bp, Homo sapien
aggctgcaaatacctgacagatagt

SEQ ID NO: 1896492 - DNA, 25 bp, Homo sapien
caagtaatcctatggaattgaaatg

SEQ ID NO: 1896493 - DNA, 25 bp, Homo sapien
gacccactcttagtctcttcttaaa

SEQ ID NO: 1896494 - DNA, 25 bp, Homo sapien
gggggattaatactttcatgagttc

SEQ ID NO: 1896495 - DNA, 25 bp, Homo sapien
ggaattgaaatgaaccctcatgagt

SEQ ID NO: 1896496 - DNA, 25 bp, Homo sapien
cactagcatcgcgagtctccgcatg

SEQ ID NO: 1896497 - DNA, 25 bp, Homo sapien
cacgatatggccaaagttacactcc

SEQ ID NO: 1896498 - DNA, 25 bp, Homo sapien
catgccctcagtccacacgatatgg

SEQ ID NO: 1896499 - DNA, 25 bp, Homo sapien
caaccagcagcacaggttcaccaaa

SEQ ID NO: 1896500 - DNA, 25 bp, Homo sapien
gtttctcaaggacttcttgaatcac

SEQ ID NO: 1896501 - DNA, 25 bp, Homo sapien
tgtagccagtcatactccttctcgg

SEQ ID NO: 1896502 - DNA, 25 bp, Homo sapien
tctcggtcggctcagccaatctgta

SEQ ID NO: 1896503 - DNA, 25 bp, Homo sapien
gatcacgaagggtgatgaagccctg

SEQ ID NO: 1896504 - DNA, 25 bp, Homo sapien
ttcagcccatcggaacagatcacga

SEQ ID NO: 1896505 - DNA, 25 bp, Homo sapien
aaactacaccgcttgtgcaagattg

SEQ ID NO: 1896506 - DNA, 25 bp, Homo sapien
ccaacttgctgcaataggagggtgg

SEQ ID NO: 1896507 - DNA, 25 bp, Homo sapien
caagattgtttccaactcggagcta

SEQ ID NO: 1896508 - DNA, 25 bp, Homo sapien
ctgaagatccagcatgactttaacc

SEQ ID NO: 1896509 - DNA, 25 bp, Homo sapien
aattccacaaaccgattcctgaagg

SEQ ID NO: 1896510 - DNA, 25 bp, Homo sapien
gcaattccacaaaccgattcctgaa

SEQ ID NO: 1896511 - DNA, 25 bp, Homo sapien
caattccacaaaccgattcctgaag

SEQ ID NO: 1896512 - DNA, 25 bp, Homo sapien
attccacaaaccgattcctgaaggc

SEQ ID NO: 1896513 - DNA, 25 bp, Homo sapien
tatcatccaacagcctattcagcgc

SEQ ID NO: 1896514 - DNA, 25 bp, Homo sapien
tactagcaattcacggttatcatcc

SEQ ID NO: 1896515 - DNA, 25 bp, Homo sapien
gcaaaaagcataaaccgagggtgtg

SEQ ID NO: 1896516 - DNA, 25 bp, Homo sapien
tcagcgcctctaacacatcagtagg

SEQ ID NO: 1896517 - DNA, 25 bp, Homo sapien
gatgtctctccctgaatcagcactg

SEQ ID NO: 1896518 - DNA, 25 bp, Homo sapien
gccactggatcaggcttgttttacc

SEQ ID NO: 1896519 - DNA, 25 bp, Homo sapien
gaggagtcagacgtgtaacaaccaa

SEQ ID NO: 1896520 - DNA, 25 bp, Homo sapien
tattaatacgcacacagtggttgcc

SEQ ID NO: 1896521 - DNA, 25 bp, Homo sapien
tgcctatgcctgtatcaagttcggg

SEQ ID NO: 1896522 - DNA, 25 bp, Homo sapien
aatcatctgcatccatagtgctccc

SEQ ID NO: 1896523 - DNA, 25 bp, Homo sapien
tagtgctccctccaaagttgcacaa

SEQ ID NO: 1896524 - DNA, 25 bp, Homo sapien
gaaagcaattccaactatgctggca

SEQ ID NO: 1896525 - DNA, 25 bp, Homo sapien
cgcaatccagtagccttcaacctgg

SEQ ID NO: 1896526 - DNA, 25 bp, Homo sapien
gacaactcggactatatctctcagg

SEQ ID NO: 1896527 - DNA, 25 bp, Homo sapien
gaagatgtcagaatgtacgtctcat

SEQ ID NO: 1896528 - DNA, 25 bp, Homo sapien
atctattgtaggctccttgtctccc

SEQ ID NO: 1896529 - DNA, 25 bp, Homo sapien
gatttcaagctacacgtctaggccc

SEQ ID NO: 1896530 - DNA, 25 bp, Homo sapien
taagtttctatcacaccctgaggca

SEQ ID NO: 1896531 - DNA, 25 bp, Homo sapien
gaaatgctatgtggcccttagaagg

SEQ ID NO: 1896532 - DNA, 25 bp, Homo sapien
gacttttcagagcaactagcccatt

SEQ ID NO: 1896533 - DNA, 25 bp, Homo sapien
gatgagcttctgaactattgggtgt

SEQ ID NO: 1896534 - DNA, 25 bp, Homo sapien
tattgggtgtgatgccctgtcaagc

SEQ ID NO: 1896535 - DNA, 25 bp, Homo sapien
cattgccagggacaatgtgttgaca

SEQ ID NO: 1896536 - DNA, 25 bp, Homo sapien
tcaagctgtgttaagaaacccaaac

SEQ ID NO: 1896537 - DNA, 25 bp, Homo sapien
aagggcaaggtaaatctggtaagag

SEQ ID NO: 1896538 - DNA, 25 bp, Homo sapien
taaataaccttctgcaatacaacca

SEQ ID NO: 1896539 - DNA, 25 bp, Homo sapien
tatgggctgatctgactaactggaa

SEQ ID NO: 1896540 - DNA, 25 bp, Homo sapien
ggcaacctggcatatgcatccctat

SEQ ID NO: 1896541 - DNA, 25 bp, Homo sapien
tgccatccaccagtttggtcccaga

SEQ ID NO: 1896542 - DNA, 25 bp, Homo sapien
tgttgccacatggattggaggctgc

SEQ ID NO: 1896543 - DNA, 25 bp, Homo sapien
gactctttccgcaaagctgtgtaga

SEQ ID NO: 1896544 - DNA, 25 bp, Homo sapien
tagagtgagcgctgaatgttgccac

SEQ ID NO: 1896545 - DNA, 25 bp, Homo sapien
taagaacctgtaagtcttctttgct

SEQ ID NO: 1896546 - DNA, 25 bp, Homo sapien
ccttgcactgtattcttgttcacac

SEQ ID NO: 1896547 - DNA, 25 bp, Homo sapien
gataatctacaataagaacctgtaa

SEQ ID NO: 1896548 - DNA, 25 bp, Homo sapien
tttatgattccttgcactgtattct

SEQ ID NO: 1896549 - DNA, 25 bp, Homo sapien
acatcagttgctggattcatacagg

SEQ ID NO: 1896550 - DNA, 25 bp, Homo sapien
gaagtcaggatgccgaaccagtggc

SEQ ID NO: 1896551 - DNA, 25 bp, Homo sapien
catacaggcaaataaacggaagtca

SEQ ID NO: 1896552 - DNA, 25 bp, Homo sapien
ttcttattcctggtgggagatttct

SEQ ID NO: 1896553 - DNA, 25 bp, Homo sapien
tctttacagcctgagctaatgtacc

SEQ ID NO: 1896554 - DNA, 25 bp, Homo sapien
cagaagatccttcaagcaaaccact

SEQ ID NO: 1896555 - DNA, 25 bp, Homo sapien
tcctcgatccagcaacaccagggat

SEQ ID NO: 1896556 - DNA, 25 bp, Homo sapien
acattctagtatttctggagcagcc

SEQ ID NO: 1896557 - DNA, 25 bp, Homo sapien
tgttgggcatggttgagtctaagac

SEQ ID NO: 1896558 - DNA, 25 bp, Homo sapien
gaacaataaggtattttcagtcatt

SEQ ID NO: 1896559 - DNA, 25 bp, Homo sapien
ctctacaaatgcgaacaataaggta

SEQ ID NO: 1896560 - DNA, 25 bp, Homo sapien
gttgagtctaagaccaaatgcttcc

SEQ ID NO: 1896561 - DNA, 25 bp, Homo sapien
ccttgttaacagcagacttgtgtac

SEQ ID NO: 1896562 - DNA, 25 bp, Homo sapien
caaatgcctcccgtaagggtagcca

SEQ ID NO: 1896563 - DNA, 25 bp, Homo sapien
catgccaccgtttctgtctgtaaca

SEQ ID NO: 1896564 - DNA, 25 bp, Homo sapien
tacatgctgcattagtctcaggaga

SEQ ID NO: 1896565 - DNA, 25 bp, Homo sapien
ttgttgattcatattgacaaccctc

SEQ ID NO: 1896566 - DNA, 25 bp, Homo sapien
atattgacaaccctcaaacggtggc

SEQ ID NO: 1896567 - DNA, 25 bp, Homo sapien
gattcatattgacaaccctcaaacg

SEQ ID NO: 1896568 - DNA, 25 bp, Homo sapien
tcatattgacaaccctcaaacggtg

SEQ ID NO: 1896569 - DNA, 25 bp, Homo sapien
ccgtgtagcagcgaaagtgaacttc

SEQ ID NO: 1896570 - DNA, 25 bp, Homo sapien
tttgctgacacacactgcaagctgc

SEQ ID NO: 1896571 - DNA, 25 bp, Homo sapien
tgctcgatgagaacagaggacggcc

SEQ ID NO: 1896572 - DNA, 25 bp, Homo sapien
agtattggatggtagaggttttgcc

SEQ ID NO: 1896573 - DNA, 25 bp, Homo sapien
agaggaagatttggtgacatagaaa

SEQ ID NO: 1896574 - DNA, 25 bp, Homo sapien
tctgtaggtgaacagcctcactttg

SEQ ID NO: 1896575 - DNA, 25 bp, Homo sapien
gcactcgacccacttgcaaatctag

SEQ ID NO: 1896576 - DNA, 25 bp, Homo sapien
tagctcattgatcacaatttctggt

SEQ ID NO: 1896577 - DNA, 25 bp, Homo sapien
gtttccgtagaagccgcactcgacc

SEQ ID NO: 1896578 - DNA, 25 bp, Homo sapien
tgtatgctcagaaagcattgctgtg

SEQ ID NO: 1896579 - DNA, 25 bp, Homo sapien
cttgtatgctcagaaagcattgctg

SEQ ID NO: 1896580 - DNA, 25 bp, Homo sapien
gcttgtatgctcagaaagcattgct

SEQ ID NO: 1896581 - DNA, 25 bp, Homo sapien
tatgctcagaaagcattgctgtgaa

SEQ ID NO: 1896582 - DNA, 25 bp, Homo sapien
ctgatatttcataaaggtatttggt

SEQ ID NO: 1896583 - DNA, 25 bp, Homo sapien
aagatgaactgtcaaagctatgggc

SEQ ID NO: 1896584 - DNA, 25 bp, Homo sapien
tgaactgtcaaagctatgggcaatc

SEQ ID NO: 1896585 - DNA, 25 bp, Homo sapien
gatgaactgtcaaagctatgggcaa

SEQ ID NO: 1896586 - DNA, 25 bp, Homo sapien
agatgaactgtcaaagctatgggca

SEQ ID NO: 1896587 - DNA, 25 bp, Homo sapien
gatctgacaccatgaagcaacctat

SEQ ID NO: 1896588 - DNA, 25 bp, Homo sapien
taagactccaagtgtcagaaaaggg

SEQ ID NO: 1896589 - DNA, 25 bp, Homo sapien
aaagaattatgttaggagccactcc

SEQ ID NO: 1896590 - DNA, 25 bp, Homo sapien
cagagtggcacagaagtcatagata

SEQ ID NO: 1896591 - DNA, 25 bp, Homo sapien
tcaaccactgccaataggctaggat

SEQ ID NO: 1896592 - DNA, 25 bp, Homo sapien
ggctaggatatctgctctgaagaac

SEQ ID NO: 1896593 - DNA, 25 bp, Homo sapien
atgtcaagcaggtgatcaaccactg

SEQ ID NO: 1896594 - DNA, 25 bp, Homo sapien
aacagaactatcactccaagagtga

SEQ ID NO: 1896595 - DNA, 25 bp, Homo sapien
tatccaggtgaattttggtccaata

SEQ ID NO: 1896596 - DNA, 25 bp, Homo sapien
tctcttatccaggttatccaggtga

SEQ ID NO: 1896597 - DNA, 25 bp, Homo sapien
catgactgtttagcggtcgatacca

SEQ ID NO: 1896598 - DNA, 25 bp, Homo sapien
tgtctagcaaagtagcatgactgtt

SEQ ID NO: 1896599 - DNA, 25 bp, Homo sapien
ccttaaggcataaataacttcagga

SEQ ID NO: 1896600 - DNA, 25 bp, Homo sapien
caaggctcatagcattaacattaag

SEQ ID NO: 1896601 - DNA, 25 bp, Homo sapien
aagagaaagcataatccaaggctca

SEQ ID NO: 1896602 - DNA, 25 bp, Homo sapien
ttgttaccagaagctacagtacttg

SEQ ID NO: 1896603 - DNA, 25 bp, Homo sapien
agacagtcacctcggccaggaatca

SEQ ID NO: 1896604 - DNA, 25 bp, Homo sapien
ccattctccaagagagggatcagca

SEQ ID NO: 1896605 - DNA, 25 bp, Homo sapien
tccaggtgccactttcagacagtca

SEQ ID NO: 1896606 - DNA, 25 bp, Homo sapien
acctcggccaggaatcaagagctct

SEQ ID NO: 1896607 - DNA, 25 bp, Homo sapien
gaacatctgtgcagcgatacatccc

SEQ ID NO: 1896608 - DNA, 25 bp, Homo sapien
taagggggcatagtcaatatcctcc

SEQ ID NO: 1896609 - DNA, 25 bp, Homo sapien
gaaggatccagtggcccattgtggc

SEQ ID NO: 1896610 - DNA, 25 bp, Homo sapien
tgcagcgatacatccccaaaagcat

SEQ ID NO: 1896611 - DNA, 25 bp, Homo sapien
ggctttgttctacctgtcactgcag

SEQ ID NO: 1896612 - DNA, 25 bp, Homo sapien
ccagcacataagacctaagggccag

SEQ ID NO: 1896613 - DNA, 25 bp, Homo sapien
cattctgagaagcaaccgccatagc

SEQ ID NO: 1896614 - DNA, 25 bp, Homo sapien
gccagctcctgttcacgtgaagaac

SEQ ID NO: 1896615 - DNA, 25 bp, Homo sapien
gatgcctggtatttgcttctaagta

SEQ ID NO: 1896616 - DNA, 25 bp, Homo sapien
gtaatataatgtgaggtagtcatgc

SEQ ID NO: 1896617 - DNA, 25 bp, Homo sapien
tcaggtccatgggtattcactatac

SEQ ID NO: 1896618 - DNA, 25 bp, Homo sapien
gaatacccaggtctatcaggtccat

SEQ ID NO: 1896619 - DNA, 25 bp, Homo sapien
gaataatcactgactacacttatga

SEQ ID NO: 1896620 - DNA, 25 bp, Homo sapien
taagttctcaaatatggctggttcc

SEQ ID NO: 1896621 - DNA, 25 bp, Homo sapien
ctcataaatttagcaggcaggctgc

SEQ ID NO: 1896622 - DNA, 25 bp, Homo sapien
tctaggttgggatactggttacagg

SEQ ID NO: 1896623 - DNA, 25 bp, Homo sapien
ggctggcagctgcccaggcagcacc

SEQ ID NO: 1896624 - DNA, 25 bp, Homo sapien
cagctctccaggggctggcagctgc

SEQ ID NO: 1896625 - DNA, 25 bp, Homo sapien
ctggcagctgcccaggcagcaccac

SEQ ID NO: 1896626 - DNA, 25 bp, Homo sapien
ggcagctgcccaggcagcaccacac

SEQ ID NO: 1896627 - DNA, 25 bp, Homo sapien
gaggtcagacgaaacaagatgtccc

SEQ ID NO: 1896628 - DNA, 25 bp, Homo sapien
tccaagtcctgcaactgggcctctt

SEQ ID NO: 1896629 - DNA, 25 bp, Homo sapien
agctccttctgcttacgccaaaggg

SEQ ID NO: 1896630 - DNA, 25 bp, Homo sapien
tggattggccaaaaccaaggccttc

SEQ ID NO: 1896631 - DNA, 25 bp, Homo sapien
aggtaaccaaagcaagacaattggc

SEQ ID NO: 1896632 - DNA, 25 bp, Homo sapien
ctcaacctgaaatggatcaattcat

SEQ ID NO: 1896633 - DNA, 25 bp, Homo sapien
caaagcaagacaattggctgtatac

SEQ ID NO: 1896634 - DNA, 25 bp, Homo sapien
aacctgaaatggatcaattcatcac

SEQ ID NO: 1896635 - DNA, 25 bp, Homo sapien
ggaacatgaaaaaggtgaaactcca

SEQ ID NO: 1896636 - DNA, 25 bp, Homo sapien
gatggaacatgaaaaaggtgaaact

SEQ ID NO: 1896637 - DNA, 25 bp, Homo sapien
tggaacatgaaaaaggtgaaactcc

SEQ ID NO: 1896638 - DNA, 25 bp, Homo sapien
ttgatggaacatgaaaaaggtgaaa

SEQ ID NO: 1896639 - DNA, 25 bp, Homo sapien
tcatggcttctgaggagagggacac

SEQ ID NO: 1896640 - DNA, 25 bp, Homo sapien
catagcgtactggattagcatctga

SEQ ID NO: 1896641 - DNA, 25 bp, Homo sapien
cagcgaaccaaggtgtcatggcttc

SEQ ID NO: 1896642 - DNA, 25 bp, Homo sapien
aaggctgcttccattaggtcccgga

SEQ ID NO: 1896643 - DNA, 25 bp, Homo sapien
ctttgaaagactggggatgtgtcct

SEQ ID NO: 1896644 - DNA, 25 bp, Homo sapien
gtccttgaaatatctcagggcaaac

SEQ ID NO: 1896645 - DNA, 25 bp, Homo sapien
aagactggggatgtgtccttgaaat

SEQ ID NO: 1896646 - DNA, 25 bp, Homo sapien
tgtgtccttgaaatatctcagggca

SEQ ID NO: 1896647 - DNA, 25 bp, Homo sapien
caaaaatttctggttgggtgaggtg

SEQ ID NO: 1896648 - DNA, 25 bp, Homo sapien
acaacaacacaaaaatttctggttg

SEQ ID NO: 1896649 - DNA, 25 bp, Homo sapien
caacacaaaaatttctggttgggtg

SEQ ID NO: 1896650 - DNA, 25 bp, Homo sapien
cacaaaaatttctggttgggtgagg

SEQ ID NO: 1896651 - DNA, 25 bp, Homo sapien
agactgggcgacaaagtcagaccct

SEQ ID NO: 1896652 - DNA, 25 bp, Homo sapien
gtggagtgtgatggcgggagaatca

SEQ ID NO: 1896653 - DNA, 25 bp, Homo sapien
aacacaaaaattagtggagtgtgat

SEQ ID NO: 1896654 - DNA, 25 bp, Homo sapien
caggtgtagtgatgtgcatctgtag

SEQ ID NO: 1896655 - DNA, 25 bp, Homo sapien
gtttgctcatcgacacacatagccg

SEQ ID NO: 1896656 - DNA, 25 bp, Homo sapien
aaatccaaaaggagagggcgaagct

SEQ ID NO: 1896657 - DNA, 25 bp, Homo sapien
aagcaactgtgctaaggtactcagg

SEQ ID NO: 1896658 - DNA, 25 bp, Homo sapien
cacatagccgttcatgcagatcatg

SEQ ID NO: 1896659 - DNA, 25 bp, Homo sapien
tcttctcagctcagtaggaccacca

SEQ ID NO: 1896660 - DNA, 25 bp, Homo sapien
gagtcagtcctataagtgattccag

SEQ ID NO: 1896661 - DNA, 25 bp, Homo sapien
ctgatttagccctagagtgtggccc

SEQ ID NO: 1896662 - DNA, 25 bp, Homo sapien
tggtcgttccactccaactagtagg

SEQ ID NO: 1896663 - DNA, 25 bp, Homo sapien
taacaaagacctgactagcaaggag

SEQ ID NO: 1896664 - DNA, 25 bp, Homo sapien
cacatctggacccatcagtgactgc

SEQ ID NO: 1896665 - DNA, 25 bp, Homo sapien
caagagctggatgaagccattatgg

SEQ ID NO: 1896666 - DNA, 25 bp, Homo sapien
caaggcttcgtaccccagaatgtct

SEQ ID NO: 1896667 - DNA, 25 bp, Homo sapien
aagaacctgcccaactcactgcggc

SEQ ID NO: 1896668 - DNA, 25 bp, Homo sapien
tggctgcgattaaccgcagcggcgc

SEQ ID NO: 1896669 - DNA, 25 bp, Homo sapien
tgccacctccagcaagaagtgctcc

SEQ ID NO: 1896670 - DNA, 25 bp, Homo sapien
tcttctcgttcttggctgcgattaa

SEQ ID NO: 1896671 - DNA, 25 bp, Homo sapien
ggcaccacacgtgggtgagcacacg

SEQ ID NO: 1896672 - DNA, 25 bp, Homo sapien
aggaaaggcgtcctcagctccagcg

SEQ ID NO: 1896673 - DNA, 25 bp, Homo sapien
ctccagcgcctacaccgggagaggg

SEQ ID NO: 1896674 - DNA, 25 bp, Homo sapien
agccagcaactacgcccgcaggaaa

SEQ ID NO: 1896675 - DNA, 25 bp, Homo sapien
tcctggcgttccgttttacaagaga

SEQ ID NO: 1896676 - DNA, 25 bp, Homo sapien
ccgctatgccctccaattatctttt

SEQ ID NO: 1896677 - DNA, 25 bp, Homo sapien
ttttacaagagatggccttctttcc

SEQ ID NO: 1896678 - DNA, 25 bp, Homo sapien
gacagaggctttcatggcagggatt

SEQ ID NO: 1896679 - DNA, 25 bp, Homo sapien
tgtagtatgcatctcctgcaggcaa

SEQ ID NO: 1896680 - DNA, 25 bp, Homo sapien
ccaatttaactacaggtcagtggtg

SEQ ID NO: 1896681 - DNA, 25 bp, Homo sapien
cagaatttcagtgtcgttaatccac

SEQ ID NO: 1896682 - DNA, 25 bp, Homo sapien
tatcacttcattgtttgaaggacag

SEQ ID NO: 1896683 - DNA, 25 bp, Homo sapien
cagaagaccctgttcattataagtc

SEQ ID NO: 1896684 - DNA, 25 bp, Homo sapien
tagtcagaaaaggagtgtggacaac

SEQ ID NO: 1896685 - DNA, 25 bp, Homo sapien
ggacaactccaacagagaattgctg

SEQ ID NO: 1896686 - DNA, 25 bp, Homo sapien
agtcagtgactaccttacagaagaa

SEQ ID NO: 1896687 - DNA, 25 bp, Homo sapien
tcttaagtgcgagtctataccagct

SEQ ID NO: 1896688 - DNA, 25 bp, Homo sapien
cttcctggacaagccgatctgttgc

SEQ ID NO: 1896689 - DNA, 25 bp, Homo sapien
gcatgccgtcataatggaaaagtcc

SEQ ID NO: 1896690 - DNA, 25 bp, Homo sapien
taacagtaccatcgcctctgaagtc

SEQ ID NO: 1896691 - DNA, 25 bp, Homo sapien
ggaggcgaaggttgtactccagcct

SEQ ID NO: 1896692 - DNA, 25 bp, Homo sapien
cagcctgggtgacagagcaaaactc

SEQ ID NO: 1896693 - DNA, 25 bp, Homo sapien
cctgggtgacagagcaaaactctgt

SEQ ID NO: 1896694 - DNA, 25 bp, Homo sapien
gggaggcgaaggttgtactccagcc

SEQ ID NO: 1896695 - DNA, 25 bp, Homo sapien
ggaactgctgtaagcacatcttaga

SEQ ID NO: 1896696 - DNA, 25 bp, Homo sapien
tacattctagagtacagacctgctg

SEQ ID NO: 1896697 - DNA, 25 bp, Homo sapien
tgttgtacaatctagaacagtggct

SEQ ID NO: 1896698 - DNA, 25 bp, Homo sapien
cagtggctcttaaccagaggtgtgc

SEQ ID NO: 1896699 - DNA, 25 bp, Homo sapien
ttgggataactcactgcattcagac

SEQ ID NO: 1896700 - DNA, 25 bp, Homo sapien
caatcagttgggataactcactgca

SEQ ID NO: 1896701 - DNA, 25 bp, Homo sapien
tcagttgggataactcactgcattc

SEQ ID NO: 1896702 - DNA, 25 bp, Homo sapien
agttgggataactcactgcattcag

SEQ ID NO: 1896703 - DNA, 25 bp, Homo sapien
ctgtgaacaccatagggtgtgtcac

SEQ ID NO: 1896704 - DNA, 25 bp, Homo sapien
tctgtgaacaccatagggtgtgtca

SEQ ID NO: 1896705 - DNA, 25 bp, Homo sapien
gatctagggacaagagcggctctgc

SEQ ID NO: 1896706 - DNA, 25 bp, Homo sapien
gcacactgcttgagggaggtctgat

SEQ ID NO: 1896707 - DNA, 25 bp, Homo sapien
tattttgcaagacagtaccccagct

SEQ ID NO: 1896708 - DNA, 25 bp, Homo sapien
tacaccgtcagaggagatctaggga

SEQ ID NO: 1896709 - DNA, 25 bp, Homo sapien
aaccagggacgggtgtggagacaga

SEQ ID NO: 1896710 - DNA, 25 bp, Homo sapien
ccagggacgggtgtggagacagaag

SEQ ID NO: 1896711 - DNA, 25 bp, Homo sapien
gaaggcgtcatgctcttgagtgaaa

SEQ ID NO: 1896712 - DNA, 25 bp, Homo sapien
gagacagaaggcgtcatgctcttga

SEQ ID NO: 1896713 - DNA, 25 bp, Homo sapien
cgtaatgggatgtgtggctttctcc

SEQ ID NO: 1896714 - DNA, 25 bp, Homo sapien
tgtgttcacttgtaccacgaaggca

SEQ ID NO: 1896715 - DNA, 25 bp, Homo sapien
tgctcagtgaggagaattggaaacc

SEQ ID NO: 1896716 - DNA, 25 bp, Homo sapien
gacaccaggaagtattgtgttcact

SEQ ID NO: 1896717 - DNA, 25 bp, Homo sapien
cgagctccagtccagtgttcgctca

SEQ ID NO: 1896718 - DNA, 25 bp, Homo sapien
ctccgagctccagtccagtgttcgc

SEQ ID NO: 1896719 - DNA, 25 bp, Homo sapien
tccgagctccagtccagtgttcgct

SEQ ID NO: 1896720 - DNA, 25 bp, Homo sapien
gagctccagtccagtgttcgctcat

SEQ ID NO: 1896721 - DNA, 25 bp, Homo sapien
tacagagaataagcatcaacagcct

SEQ ID NO: 1896722 - DNA, 25 bp, Homo sapien
catcaacagaaatggtgtctagaca

SEQ ID NO: 1896723 - DNA, 25 bp, Homo sapien
tacagtcgttgaccagttatgagag

SEQ ID NO: 1896724 - DNA, 25 bp, Homo sapien
tagaaaaacacctgatgtaacctgt

SEQ ID NO: 1896725 - DNA, 25 bp, Homo sapien
tcagaagataaatagcaggatggcc

SEQ ID NO: 1896726 - DNA, 25 bp, Homo sapien
tgaataccaactccacacagggcat

SEQ ID NO: 1896727 - DNA, 25 bp, Homo sapien
caggatggcctcgtaactttgtcgg

SEQ ID NO: 1896728 - DNA, 25 bp, Homo sapien
tgtcagagcgtgaaacgggcatccc

SEQ ID NO: 1896729 - DNA, 25 bp, Homo sapien
ctgtccaaagcctgaccaacttgaa

SEQ ID NO: 1896730 - DNA, 25 bp, Homo sapien
gaaatggctgccaaacaggtctggg

SEQ ID NO: 1896731 - DNA, 25 bp, Homo sapien
tcctagtaggccaagaaattccaac

SEQ ID NO: 1896732 - DNA, 25 bp, Homo sapien
gggttcccggtgatagcttgtccaa

SEQ ID NO: 1896733 - DNA, 25 bp, Homo sapien
ccactggagcgagggagctgattcc

SEQ ID NO: 1896734 - DNA, 25 bp, Homo sapien
ttcgggacagcagatgaacagtgcc

SEQ ID NO: 1896735 - DNA, 25 bp, Homo sapien
ctgactgaagaacgcctggatggga

SEQ ID NO: 1896736 - DNA, 25 bp, Homo sapien
tgctaagaccgctgtagtgtgcacc

SEQ ID NO: 1896737 - DNA, 25 bp, Homo sapien
tcggaacagtattgctgctaagacc

SEQ ID NO: 1896738 - DNA, 25 bp, Homo sapien
cctggcagaagtccacggtcactgt

SEQ ID NO: 1896739 - DNA, 25 bp, Homo sapien
gacagggcaataccgatgcagggcc

SEQ ID NO: 1896740 - DNA, 25 bp, Homo sapien
gaggccgcaatgttctgctcagcac

SEQ ID NO: 1896741 - DNA, 25 bp, Homo sapien
gatgtctcggcaaacttcctgggaa

SEQ ID NO: 1896742 - DNA, 25 bp, Homo sapien
tgtcttcaaagctacagtcaggagc

SEQ ID NO: 1896743 - DNA, 25 bp, Homo sapien
tgtgacaaaacactctcaggcacag

SEQ ID NO: 1896744 - DNA, 25 bp, Homo sapien
gctgaaggaggttgagttggttgtc

SEQ ID NO: 1896745 - DNA, 25 bp, Homo sapien
tgtagtttatggttgcttatcaagg

SEQ ID NO: 1896746 - DNA, 25 bp, Homo sapien
gcgatgcggttcttgctgcgccgtc

SEQ ID NO: 1896747 - DNA, 25 bp, Homo sapien
tgaataaactctaactgttctgagg

SEQ ID NO: 1896748 - DNA, 25 bp, Homo sapien
tgcgccgtcggacatcatgaataaa

SEQ ID NO: 1896749 - DNA, 25 bp, Homo sapien
ttccttttgcggcagcgctgggccg

SEQ ID NO: 1896750 - DNA, 25 bp, Homo sapien
aaagagccccaagtgcggaaggtga

SEQ ID NO: 1896751 - DNA, 25 bp, Homo sapien
gctgccaggctaagagacaacgtgt

SEQ ID NO: 1896752 - DNA, 25 bp, Homo sapien
tagtcaattcccgtgcacaaaggca

SEQ ID NO: 1896753 - DNA, 25 bp, Homo sapien
tgaagaaaccaacccctcgatagtg

SEQ ID NO: 1896754 - DNA, 25 bp, Homo sapien
gggcccatgacaccactgtcggctt

SEQ ID NO: 1896755 - DNA, 25 bp, Homo sapien
caagaaagcaaaatcgcagtagggc

SEQ ID NO: 1896756 - DNA, 25 bp, Homo sapien
tgtcggcttggccctgctccgactg

SEQ ID NO: 1896757 - DNA, 25 bp, Homo sapien
caaaatcgcagtagggcccatgaca

SEQ ID NO: 1896758 - DNA, 25 bp, Homo sapien
caaacagttccttgttatgggctcg

SEQ ID NO: 1896759 - DNA, 25 bp, Homo sapien
tgatttccctcttatacccgttgga

SEQ ID NO: 1896760 - DNA, 25 bp, Homo sapien
aaacacactcagatcctgcacggtg

SEQ ID NO: 1896761 - DNA, 25 bp, Homo sapien
ctgcacggtgtctccggaacacaga

SEQ ID NO: 1896762 - DNA, 25 bp, Homo sapien
tggttccccctctagcaagggagga

SEQ ID NO: 1896763 - DNA, 25 bp, Homo sapien
tccccctctagcaagggaggactta

SEQ ID NO: 1896764 - DNA, 25 bp, Homo sapien
tcttggttccccctctagcaaggga

SEQ ID NO: 1896765 - DNA, 25 bp, Homo sapien
cttggttccccctctagcaagggag

SEQ ID NO: 1896766 - DNA, 25 bp, Homo sapien
tagccactgactgtttggtcccgtg

SEQ ID NO: 1896767 - DNA, 25 bp, Homo sapien
tggtcccgtggaggacatgcctctc

SEQ ID NO: 1896768 - DNA, 25 bp, Homo sapien
tgtctggaaataaggagtagccact

SEQ ID NO: 1896769 - DNA, 25 bp, Homo sapien
gtgttctcagacaggcaccgggtcg

SEQ ID NO: 1896770 - DNA, 25 bp, Homo sapien
tggagaatcggagaatcagggcagc

SEQ ID NO: 1896771 - DNA, 25 bp, Homo sapien
ttctcagtggagaatcggagaatca

SEQ ID NO: 1896772 - DNA, 25 bp, Homo sapien
agtggagaatcggagaatcagggca

SEQ ID NO: 1896773 - DNA, 25 bp, Homo sapien
ctcagtggagaatcggagaatcagg

SEQ ID NO: 1896774 - DNA, 25 bp, Homo sapien
ctgaattgttcatcttagtagggtg

SEQ ID NO: 1896775 - DNA, 25 bp, Homo sapien
caagtacatctacagagatagaagg

SEQ ID NO: 1896776 - DNA, 25 bp, Homo sapien
gaattgttcatcttagtagggtgga

SEQ ID NO: 1896777 - DNA, 25 bp, Homo sapien
tttatacaaatgccccaaacaagta

SEQ ID NO: 1896778 - DNA, 25 bp, Homo sapien
cagactaagggaatatctaagcaac

SEQ ID NO: 1896779 - DNA, 25 bp, Homo sapien
gaaattggacactctaagttgctga

SEQ ID NO: 1896780 - DNA, 25 bp, Homo sapien
taataaatgggcacaacctttagcc

SEQ ID NO: 1896781 - DNA, 25 bp, Homo sapien
gactggtgacaactagtatgggcaa

SEQ ID NO: 1896782 - DNA, 25 bp, Homo sapien
aaatgtctggtgataagtgacagct

SEQ ID NO: 1896783 - DNA, 25 bp, Homo sapien
aagtgacagctgaatgaactacgat

SEQ ID NO: 1896784 - DNA, 25 bp, Homo sapien
gacagctgaatgaactacgatttac

SEQ ID NO: 1896785 - DNA, 25 bp, Homo sapien
tgtctggtgataagtgacagctgaa

SEQ ID NO: 1896786 - DNA, 25 bp, Homo sapien
gagatattggagaaacatgtcttgg

SEQ ID NO: 1896787 - DNA, 25 bp, Homo sapien
tggccctgtgtgatcgacctacagc

SEQ ID NO: 1896788 - DNA, 25 bp, Homo sapien
tattggagaaacatgtcttggccct

SEQ ID NO: 1896789 - DNA, 25 bp, Homo sapien
tgtcttggccctgtgtgatcgacct

SEQ ID NO: 1896790 - DNA, 25 bp, Homo sapien
tgttgtaggcaaagagaaagcctgt

SEQ ID NO: 1896791 - DNA, 25 bp, Homo sapien
tagacagctacgtgaaaaaaggaag

SEQ ID NO: 1896792 - DNA, 25 bp, Homo sapien
aaaaggaagctgctaactctacaac

SEQ ID NO: 1896793 - DNA, 25 bp, Homo sapien
taatttgatctttctcgaagccagg

SEQ ID NO: 1896794 - DNA, 25 bp, Homo sapien
gggaaggctagtcctgttcatgact

SEQ ID NO: 1896795 - DNA, 25 bp, Homo sapien
taaagtaaacaactgacatggtccc

SEQ ID NO: 1896796 - DNA, 25 bp, Homo sapien
ttttacaggttgaatgagtcctcct

SEQ ID NO: 1896797 - DNA, 25 bp, Homo sapien
aaaatgtgttcttgctgtggcccca

SEQ ID NO: 1896798 - DNA, 25 bp, Homo sapien
gaggctgaataaactgcacgtggct

SEQ ID NO: 1896799 - DNA, 25 bp, Homo sapien
gtttttgggatacacagctctgaga

SEQ ID NO: 1896800 - DNA, 25 bp, Homo sapien
ggtttgttcaatcccgctcctgagg

SEQ ID NO: 1896801 - DNA, 25 bp, Homo sapien
gacacaggtagcagtctcaagctgg

SEQ ID NO: 1896802 - DNA, 25 bp, Homo sapien
ggtggatgaaactgctactctaccc

SEQ ID NO: 1896803 - DNA, 25 bp, Homo sapien
ttccagcaatggtaagacacacatg

SEQ ID NO: 1896804 - DNA, 25 bp, Homo sapien
tgagtcttgctcacgatgtggctgc

SEQ ID NO: 1896805 - DNA, 25 bp, Homo sapien
tcttcctagcatttgagggagcttg

SEQ ID NO: 1896806 - DNA, 25 bp, Homo sapien
cgggataaacggtgaggcttccatc

SEQ ID NO: 1896807 - DNA, 25 bp, Homo sapien
ctagggtgcttctgtgatgacccca

SEQ ID NO: 1896808 - DNA, 25 bp, Homo sapien
tgatgaccccaggaccgggataaac

SEQ ID NO: 1896809 - DNA, 25 bp, Homo sapien
ccttcactgtgatggacatgggatg

SEQ ID NO: 1896810 - DNA, 25 bp, Homo sapien
gacaaggaaaatctaaaaggtgctg

SEQ ID NO: 1896811 - DNA, 25 bp, Homo sapien
ctttacgctgaacgggtgaagggca

SEQ ID NO: 1896812 - DNA, 25 bp, Homo sapien
tatatcttcctttacgctgaacggg

SEQ ID NO: 1896813 - DNA, 25 bp, Homo sapien
attctatatcttcctttacgctgaa

SEQ ID NO: 1896814 - DNA, 25 bp, Homo sapien
tcttcctttacgctgaacgggtgaa

SEQ ID NO: 1896815 - DNA, 25 bp, Homo sapien
ggcccctgtcctgcacaggacacga

SEQ ID NO: 1896816 - DNA, 25 bp, Homo sapien
cccctgtcctgcacaggacacgact

SEQ ID NO: 1896817 - DNA, 25 bp, Homo sapien
ctgtcctgcacaggacacgactcac

SEQ ID NO: 1896818 - DNA, 25 bp, Homo sapien
cctgtcctgcacaggacacgactca

SEQ ID NO: 1896819 - DNA, 25 bp, Homo sapien
tcgtcactggagttggttccataag

SEQ ID NO: 1896820 - DNA, 25 bp, Homo sapien
gaacgatccggattcgtcactggag

SEQ ID NO: 1896821 - DNA, 25 bp, Homo sapien
tgtctgcttccgagaacgatccgga

SEQ ID NO: 1896822 - DNA, 25 bp, Homo sapien
ggttccataagactgctcacattta

SEQ ID NO: 1896823 - DNA, 25 bp, Homo sapien
ctgggaacagggcgaggaggagaac

SEQ ID NO: 1896824 - DNA, 25 bp, Homo sapien
aacagggcgaggaggagaactcaca

SEQ ID NO: 1896825 - DNA, 25 bp, Homo sapien
gggaacagggcgaggaggagaactc

SEQ ID NO: 1896826 - DNA, 25 bp, Homo sapien
gaacagggcgaggaggagaactcac

SEQ ID NO: 1896827 - DNA, 25 bp, Homo sapien
ggtgagcgagggcagactttgattg

SEQ ID NO: 1896828 - DNA, 25 bp, Homo sapien
agcgagggcagactttgattggtac

SEQ ID NO: 1896829 - DNA, 25 bp, Homo sapien
gctcccgtcctccgcgtaggaatag

SEQ ID NO: 1896830 - DNA, 25 bp, Homo sapien
ctccgcgtaggaataggaagagcag

SEQ ID NO: 1896831 - DNA, 25 bp, Homo sapien
ctttggcaccggctcagagaggtct

SEQ ID NO: 1896832 - DNA, 25 bp, Homo sapien
cttcctggcaagtggtcggccatca

SEQ ID NO: 1896833 - DNA, 25 bp, Homo sapien
tcagcccaccgtgggagtaggcctg

SEQ ID NO: 1896834 - DNA, 25 bp, Homo sapien
cggctcagagaggtctttgtccaaa

SEQ ID NO: 1896835 - DNA, 25 bp, Homo sapien
accgaggtgctcacttggtcacaag

SEQ ID NO: 1896836 - DNA, 25 bp, Homo sapien
ccagaataagaatgcaccgaggtgc

SEQ ID NO: 1896837 - DNA, 25 bp, Homo sapien
acttggtcacaagcgctggaggaga

SEQ ID NO: 1896838 - DNA, 25 bp, Homo sapien
agaagatcacgctcctccggtccag

SEQ ID NO: 1896839 - DNA, 25 bp, Homo sapien
gcgaccccatggtgaagttggacac

SEQ ID NO: 1896840 - DNA, 25 bp, Homo sapien
tgtagtcagttttaaggtcaccctg

SEQ ID NO: 1896841 - DNA, 25 bp, Homo sapien
caccctgagtgatccccttgtcaaa

SEQ ID NO: 1896842 - DNA, 25 bp, Homo sapien
acagagaccttaagcaggagggcga

SEQ ID NO: 1896843 - DNA, 25 bp, Homo sapien
cactgggcggctcacttttaatctg

SEQ ID NO: 1896844 - DNA, 25 bp, Homo sapien
tccagacaggcagagcgtgatgctc

SEQ ID NO: 1896845 - DNA, 25 bp, Homo sapien
tgtgcttgcaaaacctgaggtactg

SEQ ID NO: 1896846 - DNA, 25 bp, Homo sapien
tgtaggcaaactgtaacagcggccc

SEQ ID NO: 1896847 - DNA, 25 bp, Homo sapien
ctgcaaaacaaacagggaaatcgcc

SEQ ID NO: 1896848 - DNA, 25 bp, Homo sapien
aaacaaacagggaaatcgccaacat

SEQ ID NO: 1896849 - DNA, 25 bp, Homo sapien
gcaaaacaaacagggaaatcgccaa

SEQ ID NO: 1896850 - DNA, 25 bp, Homo sapien
tgcaaaacaaacagggaaatcgcca

SEQ ID NO: 1896851 - DNA, 25 bp, Homo sapien
cagcactgctattgtcccgaatccc

SEQ ID NO: 1896852 - DNA, 25 bp, Homo sapien
gcactgctattgtcccgaatccctc

SEQ ID NO: 1896853 - DNA, 25 bp, Homo sapien
actgctattgtcccgaatccctcaa

SEQ ID NO: 1896854 - DNA, 25 bp, Homo sapien
agcactgctattgtcccgaatccct

SEQ ID NO: 1896855 - DNA, 25 bp, Homo sapien
agataaccagacagtgctaatgtcc

SEQ ID NO: 1896856 - DNA, 25 bp, Homo sapien
aagcaagataaccagacagtgctaa

SEQ ID NO: 1896857 - DNA, 25 bp, Homo sapien
gcaagataaccagacagtgctaatg

SEQ ID NO: 1896858 - DNA, 25 bp, Homo sapien
caagataaccagacagtgctaatgt

SEQ ID NO: 1896859 - DNA, 25 bp, Homo sapien
taattgatgttcaagattcaacctg

SEQ ID NO: 1896860 - DNA, 25 bp, Homo sapien
ttgatgttcaagattcaacctggac

SEQ ID NO: 1896861 - DNA, 25 bp, Homo sapien
ttcttgcaaggacctgtaattgatg

SEQ ID NO: 1896862 - DNA, 25 bp, Homo sapien
tacagagccaaaattcttgcaagga

SEQ ID NO: 1896863 - DNA, 25 bp, Homo sapien
aatggcactccttagatcactgagg

SEQ ID NO: 1896864 - DNA, 25 bp, Homo sapien
agtactgggagtcaccctctgccac

SEQ ID NO: 1896865 - DNA, 25 bp, Homo sapien
gagaaagcatctccgctcagggacg

SEQ ID NO: 1896866 - DNA, 25 bp, Homo sapien
ctgtagatcaggaagcagtactggg

SEQ ID NO: 1896867 - DNA, 25 bp, Homo sapien
ctgatgaagctgaatctcttacaca

SEQ ID NO: 1896868 - DNA, 25 bp, Homo sapien
attagttgaactaaaccgagctagc

SEQ ID NO: 1896869 - DNA, 25 bp, Homo sapien
aagcatgtgccttgtacaccctaga

SEQ ID NO: 1896870 - DNA, 25 bp, Homo sapien
gcttcaaccatgaatagacattgga

SEQ ID NO: 1896871 - DNA, 25 bp, Homo sapien
gacattggagactgtaacttcttga

SEQ ID NO: 1896872 - DNA, 25 bp, Homo sapien
acattgacagtgactgggtgcaagc

SEQ ID NO: 1896873 - DNA, 25 bp, Homo sapien
cattgacagtgactgggtgcaagcc

SEQ ID NO: 1896874 - DNA, 25 bp, Homo sapien
tgacattgacagtgactgggtgcaa

SEQ ID NO: 1896875 - DNA, 25 bp, Homo sapien
aatgacattgacagtgactgggtgc

SEQ ID NO: 1896876 - DNA, 25 bp, Homo sapien
tagatgcactgctgactctacttca

SEQ ID NO: 1896877 - DNA, 25 bp, Homo sapien
gccatgaccactgcctagatgcact

SEQ ID NO: 1896878 - DNA, 25 bp, Homo sapien
gctgactctacttcaccaattccaa

SEQ ID NO: 1896879 - DNA, 25 bp, Homo sapien
tagcatttgcccaagccatgaccac

SEQ ID NO: 1896880 - DNA, 25 bp, Homo sapien
tccacttggacctttagaagcttct

SEQ ID NO: 1896881 - DNA, 25 bp, Homo sapien
tgattggaaaatagatgagctagta

SEQ ID NO: 1896882 - DNA, 25 bp, Homo sapien
catgataattgtggagcaacctacc

SEQ ID NO: 1896883 - DNA, 25 bp, Homo sapien
gcatacagccatggtcagaaacggg

SEQ ID NO: 1896884 - DNA, 25 bp, Homo sapien
cagagaaacttgaactagagctgga

SEQ ID NO: 1896885 - DNA, 25 bp, Homo sapien
cctaccgctgactggtttgtgaccc

SEQ ID NO: 1896886 - DNA, 25 bp, Homo sapien
caaacctaccgctgactggtttgtg

SEQ ID NO: 1896887 - DNA, 25 bp, Homo sapien
tttgtgaccctggacctgtttccca

SEQ ID NO: 1896888 - DNA, 25 bp, Homo sapien
tgagtctccaaacctaccgctgact

SEQ ID NO: 1896889 - DNA, 25 bp, Homo sapien
agttaaacacgtaaagtgcacaggg

SEQ ID NO: 1896890 - DNA, 25 bp, Homo sapien
cagtgcctggcataccctggatgct

SEQ ID NO: 1896891 - DNA, 25 bp, Homo sapien
gcttaggagctaaccttttggcaag

SEQ ID NO: 1896892 - DNA, 25 bp, Homo sapien
taatggtagcaatcccatagcgtca

SEQ ID NO: 1896893 - DNA, 25 bp, Homo sapien
cctggccgctgtctggtaatgtact

SEQ ID NO: 1896894 - DNA, 25 bp, Homo sapien
gataactctcctaagatatcctgga

SEQ ID NO: 1896895 - DNA, 25 bp, Homo sapien
ttacatcatttcttgggaagctcag

SEQ ID NO: 1896896 - DNA, 25 bp, Homo sapien
tctcgttttggatctggtggcagaa

SEQ ID NO: 1896897 - DNA, 25 bp, Homo sapien
tattatctagatgctatctgctagg

SEQ ID NO: 1896898 - DNA, 25 bp, Homo sapien
tatcctactgaaagtacacctctca

SEQ ID NO: 1896899 - DNA, 25 bp, Homo sapien
cagatgtactgtgctgatagagaag

SEQ ID NO: 1896900 - DNA, 25 bp, Homo sapien
gaagtctgagctattggatttgcca

SEQ ID NO: 1896901 - DNA, 25 bp, Homo sapien
gctctgcagcttttgtcagaggctg

SEQ ID NO: 1896902 - DNA, 25 bp, Homo sapien
caggggctctgcagcttttgtcaga

SEQ ID NO: 1896903 - DNA, 25 bp, Homo sapien
ctgcagcttttgtcagaggctgttt

SEQ ID NO: 1896904 - DNA, 25 bp, Homo sapien
gggctctgcagcttttgtcagaggc

SEQ ID NO: 1896905 - DNA, 25 bp, Homo sapien
cagctgccaatggttgtggacgagc

SEQ ID NO: 1896906 - DNA, 25 bp, Homo sapien
aggcaactgaaagccccttccaaca

SEQ ID NO: 1896907 - DNA, 25 bp, Homo sapien
gaaactggtgttaaagcagttcagt

SEQ ID NO: 1896908 - DNA, 25 bp, Homo sapien
tgtagctgagctcttaggaaactgg

SEQ ID NO: 1896909 - DNA, 25 bp, Homo sapien
ggccctgttatagccggacttgtaa

SEQ ID NO: 1896910 - DNA, 25 bp, Homo sapien
tagccggacttgtaaggctttctta

SEQ ID NO: 1896911 - DNA, 25 bp, Homo sapien
gctccctggccctgttatagccgga

SEQ ID NO: 1896912 - DNA, 25 bp, Homo sapien
ctgttatagccggacttgtaaggct

SEQ ID NO: 1896913 - DNA, 25 bp, Homo sapien
tatagttgcaggagaaggtcctcct

SEQ ID NO: 1896914 - DNA, 25 bp, Homo sapien
ttatagttgcaggagaaggtcctcc

SEQ ID NO: 1896915 - DNA, 25 bp, Homo sapien
caagaagcatctactaagggcccaa

SEQ ID NO: 1896916 - DNA, 25 bp, Homo sapien
agcatctactaagggcccaagttgt

SEQ ID NO: 1896917 - DNA, 25 bp, Homo sapien
ctccatcaagaagcatctactaagg

SEQ ID NO: 1896918 - DNA, 25 bp, Homo sapien
ctcatgaaatgctctcagcatcttc

SEQ ID NO: 1896919 - DNA, 25 bp, Homo sapien
taatatacggtgagttcatttttgt

SEQ ID NO: 1896920 - DNA, 25 bp, Homo sapien
gttgtcttaaagaatgttccacaga

SEQ ID NO: 1896921 - DNA, 25 bp, Homo sapien
tctcttttaatctagggcaatcccc

SEQ ID NO: 1896922 - DNA, 25 bp, Homo sapien
ccacagaggatgtctagtcatagca

SEQ ID NO: 1896923 - DNA, 25 bp, Homo sapien
agtgacttaccaaagcacacgctta

SEQ ID NO: 1896924 - DNA, 25 bp, Homo sapien
ccagagcctaaagtgtacattatgc

SEQ ID NO: 1896925 - DNA, 25 bp, Homo sapien
gatatatccttgaagaagcagctac

SEQ ID NO: 1896926 - DNA, 25 bp, Homo sapien
gagatattccatactcaaccagagc

SEQ ID NO: 1896927 - DNA, 25 bp, Homo sapien
tcaagtctaaattcttttgtctaaa

SEQ ID NO: 1896928 - DNA, 25 bp, Homo sapien
tttattgatatcctcagatttgtgc

SEQ ID NO: 1896929 - DNA, 25 bp, Homo sapien
tattgatatcctcagatttgtgcca

SEQ ID NO: 1896930 - DNA, 25 bp, Homo sapien
ggtaactttattgatatcctcagat

SEQ ID NO: 1896931 - DNA, 25 bp, Homo sapien
ttaggtaactttattgatatcctca

SEQ ID NO: 1896932 - DNA, 25 bp, Homo sapien
aaaatgaatagatacgccggtaact

SEQ ID NO: 1896933 - DNA, 25 bp, Homo sapien
tagctaagagactccataatgggag

SEQ ID NO: 1896934 - DNA, 25 bp, Homo sapien
tatgatgactgatcaagtgaggaac

SEQ ID NO: 1896935 - DNA, 25 bp, Homo sapien
gcccgggttctatgattaactacga

SEQ ID NO: 1896936 - DNA, 25 bp, Homo sapien
gggaaacgacacccactgagccagc

SEQ ID NO: 1896937 - DNA, 25 bp, Homo sapien
ttggagcttctagcaggcagcacag

SEQ ID NO: 1896938 - DNA, 25 bp, Homo sapien
tcagcccaatcaacctggcgatgtt

SEQ ID NO: 1896939 - DNA, 25 bp, Homo sapien
ggcagcacagctatgtatatacttg

SEQ ID NO: 1896940 - DNA, 25 bp, Homo sapien
tctaatgtgctggtaatggcgtggc

SEQ ID NO: 1896941 - DNA, 25 bp, Homo sapien
aatgtgctggtaatggcgtggctca

SEQ ID NO: 1896942 - DNA, 25 bp, Homo sapien
gctctaatgtgctggtaatggcgtg

SEQ ID NO: 1896943 - DNA, 25 bp, Homo sapien
taatgtgctggtaatggcgtggctc

SEQ ID NO: 1896944 - DNA, 25 bp, Homo sapien
gaattgcacaactggacagtcgctg

SEQ ID NO: 1896945 - DNA, 25 bp, Homo sapien
gggtggaattgcacaactggacagt

SEQ ID NO: 1896946 - DNA, 25 bp, Homo sapien
acaactggacagtcgctggacggca

SEQ ID NO: 1896947 - DNA, 25 bp, Homo sapien
tggacagtcgctggacggcagatct

SEQ ID NO: 1896948 - DNA, 25 bp, Homo sapien
gggagtgtagatgggtcaaatgtga

SEQ ID NO: 1896949 - DNA, 25 bp, Homo sapien
gtggcagtttgtgttcggaagtttc

SEQ ID NO: 1896950 - DNA, 25 bp, Homo sapien
tcggaagtttcaggctcctaggagg

SEQ ID NO: 1896951 - DNA, 25 bp, Homo sapien
cccttgaggagcacagcggttggct

SEQ ID NO: 1896952 - DNA, 25 bp, Homo sapien
gaagagctgcttagtcaaacaccac

SEQ ID NO: 1896953 - DNA, 25 bp, Homo sapien
tggtggtggcccaagagatgcacac

SEQ ID NO: 1896954 - DNA, 25 bp, Homo sapien
tacacagggaatgattctgcccgaa

SEQ ID NO: 1896955 - DNA, 25 bp, Homo sapien
acaccgcgctggtggtacacaggga

SEQ ID NO: 1896956 - DNA, 25 bp, Homo sapien
tgctttcgatcttttactctcaagg

SEQ ID NO: 1896957 - DNA, 25 bp, Homo sapien
taatggtgaaaattactagttgctt

SEQ ID NO: 1896958 - DNA, 25 bp, Homo sapien
ttcaacaacggtgagaaaagcaagt

SEQ ID NO: 1896959 - DNA, 25 bp, Homo sapien
tagaatcttactgaattaatggtga

SEQ ID NO: 1896960 - DNA, 25 bp, Homo sapien
ctttttccgctggtcattgaggccc

SEQ ID NO: 1896961 - DNA, 25 bp, Homo sapien
aaaatattcactgcatgcggccagc

SEQ ID NO: 1896962 - DNA, 25 bp, Homo sapien
tgcagtggactgtggactcatacac

SEQ ID NO: 1896963 - DNA, 25 bp, Homo sapien
ttttttgtctgtccaaccagcgcct

SEQ ID NO: 1896964 - DNA, 25 bp, Homo sapien
tgtgcccggcctctttttctatctt

SEQ ID NO: 1896965 - DNA, 25 bp, Homo sapien
ttctttttcttcagtggcactcatg

SEQ ID NO: 1896966 - DNA, 25 bp, Homo sapien
tttttcttcagtggcactcatggct

SEQ ID NO: 1896967 - DNA, 25 bp, Homo sapien
atacctggctaattatttcttattt

SEQ ID NO: 1896968 - DNA, 25 bp, Homo sapien
gatgccacctctcatattactgata

SEQ ID NO: 1896969 - DNA, 25 bp, Homo sapien
gttgagcccactaatctgagatctt

SEQ ID NO: 1896970 - DNA, 25 bp, Homo sapien
tcagtctggctagaggcttaaccat

SEQ ID NO: 1896971 - DNA, 25 bp, Homo sapien
tttcctaaggtggtagttgagccca

SEQ ID NO: 1896972 - DNA, 25 bp, Homo sapien
tattttctattgctaacccttcgag

SEQ ID NO: 1896973 - DNA, 25 bp, Homo sapien
tattagaccatctgcatttgtcccg

SEQ ID NO: 1896974 - DNA, 25 bp, Homo sapien
tgagcttcttggatacgtggatagt

SEQ ID NO: 1896975 - DNA, 25 bp, Homo sapien
gcaaggtctaatctgccatcaatct

SEQ ID NO: 1896976 - DNA, 25 bp, Homo sapien
gagcacctaaaacgagacacacact

SEQ ID NO: 1896977 - DNA, 25 bp, Homo sapien
tatagactataaccatcaccccaga

SEQ ID NO: 1896978 - DNA, 25 bp, Homo sapien
aattgtctgccctaaaacagttgaa

SEQ ID NO: 1896979 - DNA, 25 bp, Homo sapien
aaagatcccttatactccatcccag

SEQ ID NO: 1896980 - DNA, 25 bp, Homo sapien
tctataaggtgccactgacttgccc

SEQ ID NO: 1896981 - DNA, 25 bp, Homo sapien
ccagaaggctatttaattgtcccag

SEQ ID NO: 1896982 - DNA, 25 bp, Homo sapien
gatttttgtcatactttgaaaggcc

SEQ ID NO: 1896983 - DNA, 25 bp, Homo sapien
gacttgcccattaatgccaattcaa

SEQ ID NO: 1896984 - DNA, 25 bp, Homo sapien
cagtaaggaaaccacacatgagcac

SEQ ID NO: 1896985 - DNA, 25 bp, Homo sapien
tgggactatgggtacgggacactgc

SEQ ID NO: 1896986 - DNA, 25 bp, Homo sapien
gaataaacatgaaggggtctctgtc

SEQ ID NO: 1896987 - DNA, 25 bp, Homo sapien
gggtacgggacactgcactcagcta

SEQ ID NO: 1896988 - DNA, 25 bp, Homo sapien
gaaacaggcaggtaagcttccacaa

SEQ ID NO: 1896989 - DNA, 25 bp, Homo sapien
caaggtgtgtcagcctacttcaggc

SEQ ID NO: 1896990 - DNA, 25 bp, Homo sapien
taatcatgaggcactaaaagttggc

SEQ ID NO: 1896991 - DNA, 25 bp, Homo sapien
tgatgcaagaggtatcccactgtga

SEQ ID NO: 1896992 - DNA, 25 bp, Homo sapien
ttcacgcttgtttcaaccaggaacc

SEQ ID NO: 1896993 - DNA, 25 bp, Homo sapien
tacaggtgtgcataaccatgtgcag

SEQ ID NO: 1896994 - DNA, 25 bp, Homo sapien
tatcccttgggcctaagccttcatg

SEQ ID NO: 1896995 - DNA, 25 bp, Homo sapien
catcagacatggtatttcacgcttg

SEQ ID NO: 1896996 - DNA, 25 bp, Homo sapien
aactaaggttactcagacttgggca

SEQ ID NO: 1896997 - DNA, 25 bp, Homo sapien
ttactcagacttgggcatttgggag

SEQ ID NO: 1896998 - DNA, 25 bp, Homo sapien
gtgtatttcctactgtaagcttggc

SEQ ID NO: 1896999 - DNA, 25 bp, Homo sapien
tatttcctactgtaagcttggcagc

SEQ ID NO: 1897000 - DNA, 25 bp, Homo sapien
ttaggtcttgcataagttctgttag

SEQ ID NO: 1897001 - DNA, 25 bp, Homo sapien
attttgagaacaattgacctgagca

SEQ ID NO: 1897002 - DNA, 25 bp, Homo sapien
gtttatttaggtcttgcataagttc

SEQ ID NO: 1897003 - DNA, 25 bp, Homo sapien
gagaacaattgacctgagcatatta

SEQ ID NO: 1897004 - DNA, 25 bp, Homo sapien
caggtatacaccacccatttggcta

SEQ ID NO: 1897005 - DNA, 25 bp, Homo sapien
aagtctcttccacttgcgtttttct

SEQ ID NO: 1897006 - DNA, 25 bp, Homo sapien
gaagtctcttccacttgcgtttttc

SEQ ID NO: 1897007 - DNA, 25 bp, Homo sapien
agaagtctcttccacttgcgttttt

SEQ ID NO: 1897008 - DNA, 25 bp, Homo sapien
attattcagccccagtcgagccagt

SEQ ID NO: 1897009 - DNA, 25 bp, Homo sapien
gagcaggcactcgtatgattcacaa

SEQ ID NO: 1897010 - DNA, 25 bp, Homo sapien
gctagtccccagagtataccacagg

SEQ ID NO: 1897011 - DNA, 25 bp, Homo sapien
cagtgacacgatcaaaccccaggtg

SEQ ID NO: 1897012 - DNA, 25 bp, Homo sapien
gctagttccgttttagatgttgtta

SEQ ID NO: 1897013 - DNA, 25 bp, Homo sapien
caactcaaaagatacagtttgacag

SEQ ID NO: 1897014 - DNA, 25 bp, Homo sapien
tggaagagaatctaagctagttccg

SEQ ID NO: 1897015 - DNA, 25 bp, Homo sapien
ccctttgaccaggattcaatttaga

SEQ ID NO: 1897016 - DNA, 25 bp, Homo sapien
ggttgcattcgactcagcagccaga

SEQ ID NO: 1897017 - DNA, 25 bp, Homo sapien
gacacgttatcacttactgtggttg

SEQ ID NO: 1897018 - DNA, 25 bp, Homo sapien
tacttggttaactgtccctccaaca

SEQ ID NO: 1897019 - DNA, 25 bp, Homo sapien
tagccacaaacggacacgttatcac

SEQ ID NO: 1897020 - DNA, 25 bp, Homo sapien
ctctaagttggtatgtcagtcagtg

SEQ ID NO: 1897021 - DNA, 25 bp, Homo sapien
tgcggtggcaccacgcttaccaagg

SEQ ID NO: 1897022 - DNA, 25 bp, Homo sapien
tgtacagacaacgtgatccgcaagg

SEQ ID NO: 1897023 - DNA, 25 bp, Homo sapien
gctgtgaggagtgattttgccaaac

SEQ ID NO: 1897024 - DNA, 25 bp, Homo sapien
tctggtagttagcacatgccctgca

SEQ ID NO: 1897025 - DNA, 25 bp, Homo sapien
tgtgtgcctgctcattatccagaaa

SEQ ID NO: 1897026 - DNA, 25 bp, Homo sapien
gaaatgttctttcatcgtctggtag

SEQ ID NO: 1897027 - DNA, 25 bp, Homo sapien
tgccctgcagagctaacaccgtctt

SEQ ID NO: 1897028 - DNA, 25 bp, Homo sapien
tcactaaacaagtgagcactgtgac

SEQ ID NO: 1897029 - DNA, 25 bp, Homo sapien
gtctcaggcttaaatgacatgccca

SEQ ID NO: 1897030 - DNA, 25 bp, Homo sapien
gctggctgttcatctaatgggaaat

SEQ ID NO: 1897031 - DNA, 25 bp, Homo sapien
aatgtcataaacagtctgagggaca

SEQ ID NO: 1897032 - DNA, 25 bp, Homo sapien
aaccagggcattcaacacaatcgca

SEQ ID NO: 1897033 - DNA, 25 bp, Homo sapien
cacaatcgcagatgctacccaaaca

SEQ ID NO: 1897034 - DNA, 25 bp, Homo sapien
caaaggaggatcaaagtactgtata

SEQ ID NO: 1897035 - DNA, 25 bp, Homo sapien
ggcggccaaatcgaaactaaagata

SEQ ID NO: 1897036 - DNA, 25 bp, Homo sapien
aatgtagttacctgaattgagcaca

SEQ ID NO: 1897037 - DNA, 25 bp, Homo sapien
tcaaatgtagttacctgaattgagc

SEQ ID NO: 1897038 - DNA, 25 bp, Homo sapien
aaaggtcaaatgtagttacctgaat

SEQ ID NO: 1897039 - DNA, 25 bp, Homo sapien
ggtcaaatgtagttacctgaattga

SEQ ID NO: 1897040 - DNA, 25 bp, Homo sapien
ggtagcaaaaccgtcagtaaacaca

SEQ ID NO: 1897041 - DNA, 25 bp, Homo sapien
tcttcatcgctgaaaaagggaagtg

SEQ ID NO: 1897042 - DNA, 25 bp, Homo sapien
aaggttagctaattcagggttctgg

SEQ ID NO: 1897043 - DNA, 25 bp, Homo sapien
tggctagttgggttccaggtagcaa

SEQ ID NO: 1897044 - DNA, 25 bp, Homo sapien
ggataaatcttgcttcacttggaga

SEQ ID NO: 1897045 - DNA, 25 bp, Homo sapien
taatcataggccctacagcgggaga

SEQ ID NO: 1897046 - DNA, 25 bp, Homo sapien
tctactgcgctggaatctacgggaa

SEQ ID NO: 1897047 - DNA, 25 bp, Homo sapien
gcgggagaactatctgctgtggatt

SEQ ID NO: 1897048 - DNA, 25 bp, Homo sapien
gattcagttttataggcaccctact

SEQ ID NO: 1897049 - DNA, 25 bp, Homo sapien
gaaagtacagaagtttcccacatgc

SEQ ID NO: 1897050 - DNA, 25 bp, Homo sapien
aatatatgcactttatcataaagag

SEQ ID NO: 1897051 - DNA, 25 bp, Homo sapien
gaggaactgtcgtactgtttagtat

SEQ ID NO: 1897052 - DNA, 25 bp, Homo sapien
tcggtgactgaacgctcgtccaaag

SEQ ID NO: 1897053 - DNA, 25 bp, Homo sapien
gactgaacgctcgtccaaagacatg

SEQ ID NO: 1897054 - DNA, 25 bp, Homo sapien
ctgaacgctcgtccaaagacatggg

SEQ ID NO: 1897055 - DNA, 25 bp, Homo sapien
gacatggggagtgatccaggcaggt

SEQ ID NO: 1897056 - DNA, 25 bp, Homo sapien
tgtagacaggaaactgactgacagc

SEQ ID NO: 1897057 - DNA, 25 bp, Homo sapien
ttcctgacctgtagacaggaaactg

SEQ ID NO: 1897058 - DNA, 25 bp, Homo sapien
ggagtcatgacaacttctttccttc

SEQ ID NO: 1897059 - DNA, 25 bp, Homo sapien
gacagcaaaggtcatcccacaggaa

SEQ ID NO: 1897060 - DNA, 25 bp, Homo sapien
tctaaaagcatgatgagcacacctg

SEQ ID NO: 1897061 - DNA, 25 bp, Homo sapien
tcctggcctatggtagctatccctc

SEQ ID NO: 1897062 - DNA, 25 bp, Homo sapien
gctatgatgactcactctgaaaggg

SEQ ID NO: 1897063 - DNA, 25 bp, Homo sapien
gaataatggcatcaactgggctgga

SEQ ID NO: 1897064 - DNA, 25 bp, Homo sapien
gaaggctctggcaatccattcagac

SEQ ID NO: 1897065 - DNA, 25 bp, Homo sapien
ttcagacatggaccccaaagttttg

SEQ ID NO: 1897066 - DNA, 25 bp, Homo sapien
cttcgagtcttaggatgcagggaac

SEQ ID NO: 1897067 - DNA, 25 bp, Homo sapien
ccttgtgacaggtcagtgagtgtcc

SEQ ID NO: 1897068 - DNA, 25 bp, Homo sapien
gagggagatgcagttatttcagaca

SEQ ID NO: 1897069 - DNA, 25 bp, Homo sapien
gacacttgtataaggcagaacccct

SEQ ID NO: 1897070 - DNA, 25 bp, Homo sapien
tattctactggcatggaaaggtgat

SEQ ID NO: 1897071 - DNA, 25 bp, Homo sapien
gacaggatggcgaacattaattgag

SEQ ID NO: 1897072 - DNA, 25 bp, Homo sapien
taagcctaaagtcagagagacccag

SEQ ID NO: 1897073 - DNA, 25 bp, Homo sapien
gagacccaggtctagtcccaacata

SEQ ID NO: 1897074 - DNA, 25 bp, Homo sapien
acctctctaagtggcaggtcgtgcc

SEQ ID NO: 1897075 - DNA, 25 bp, Homo sapien
tgactttggccaagcaatttgaaca

SEQ ID NO: 1897076 - DNA, 25 bp, Homo sapien
tgaaacctcaacagtgaggctgctc

SEQ ID NO: 1897077 - DNA, 25 bp, Homo sapien
tcctcttggagggtgtgccaactcg

SEQ ID NO: 1897078 - DNA, 25 bp, Homo sapien
tgctgtgcccagaagcgaggtgctc

SEQ ID NO: 1897079 - DNA, 25 bp, Homo sapien
tgtgccaactcgctctggcccttgg

SEQ ID NO: 1897080 - DNA, 25 bp, Homo sapien
gacacagacttagttatgtatcact

SEQ ID NO: 1897081 - DNA, 25 bp, Homo sapien
tatcactaacctgagatctcaaggg

SEQ ID NO: 1897082 - DNA, 25 bp, Homo sapien
ggaaggtggacagcatgtgcttggg

SEQ ID NO: 1897083 - DNA, 25 bp, Homo sapien
aagggaatgattggtattaattatc

SEQ ID NO: 1897084 - DNA, 25 bp, Homo sapien
tcaataacattctggcaaagttgca

SEQ ID NO: 1897085 - DNA, 25 bp, Homo sapien
caataacattctggcaaagttgcag

SEQ ID NO: 1897086 - DNA, 25 bp, Homo sapien
agtcaataacattctggcaaagttg

SEQ ID NO: 1897087 - DNA, 25 bp, Homo sapien
aaagtcaataacattctggcaaagt

SEQ ID NO: 1897088 - DNA, 25 bp, Homo sapien
gttaagtaatttgcgcctacagtga

SEQ ID NO: 1897089 - DNA, 25 bp, Homo sapien
aagtaatttgcgcctacagtgacag

SEQ ID NO: 1897090 - DNA, 25 bp, Homo sapien
ggttaagtaatttgcgcctacagtg

SEQ ID NO: 1897091 - DNA, 25 bp, Homo sapien
taatttgcgcctacagtgacagaat

SEQ ID NO: 1897092 - DNA, 25 bp, Homo sapien
cttctatgtagaggtgttctcacta

SEQ ID NO: 1897093 - DNA, 25 bp, Homo sapien
ggagcacgctttgatatttgataga

SEQ ID NO: 1897094 - DNA, 25 bp, Homo sapien
agaggtgttctcactaggctgggat

SEQ ID NO: 1897095 - DNA, 25 bp, Homo sapien
cgctttgatatttgatagatgcctc

SEQ ID NO: 1897096 - DNA, 25 bp, Homo sapien
tttcccacactaacttgaagtactg

SEQ ID NO: 1897097 - DNA, 25 bp, Homo sapien
gaagtactgtctatgaattcagcca

SEQ ID NO: 1897098 - DNA, 25 bp, Homo sapien
cactaacttgaagtactgtctatga

SEQ ID NO: 1897099 - DNA, 25 bp, Homo sapien
agggttgggtgtttctcgtctctct

SEQ ID NO: 1897100 - DNA, 25 bp, Homo sapien
aaaacaggtaattctagagagtgta

SEQ ID NO: 1897101 - DNA, 25 bp, Homo sapien
gatgaatgctcatttatagcctcct

SEQ ID NO: 1897102 - DNA, 25 bp, Homo sapien
tcactgagccctagcacctagactg

SEQ ID NO: 1897103 - DNA, 25 bp, Homo sapien
tgctacctaagacacaacaggtgct

SEQ ID NO: 1897104 - DNA, 25 bp, Homo sapien
tatacagaatagctgaacagctgca

SEQ ID NO: 1897105 - DNA, 25 bp, Homo sapien
aaatatatactgttacccagcacat

SEQ ID NO: 1897106 - DNA, 25 bp, Homo sapien
taaacataacgttcatccaccttga

SEQ ID NO: 1897107 - DNA, 25 bp, Homo sapien
gaagctcaaaaacgccaaatctatc

SEQ ID NO: 1897108 - DNA, 25 bp, Homo sapien
aaaagatatatatctaaatttcagc

SEQ ID NO: 1897109 - DNA, 25 bp, Homo sapien
atatatctaaatttcagctatcttg

SEQ ID NO: 1897110 - DNA, 25 bp, Homo sapien
gatatatatctaaatttcagctatc

SEQ ID NO: 1897111 - DNA, 25 bp, Homo sapien
aagatatatatctaaatttcagcta

SEQ ID NO: 1897112 - DNA, 25 bp, Homo sapien
tgacccttccaagtaagaaaggctg

SEQ ID NO: 1897113 - DNA, 25 bp, Homo sapien
ggaaatgacacacgtccaggcaaag

SEQ ID NO: 1897114 - DNA, 25 bp, Homo sapien
ggttgtgcatgaccagacatcggca

SEQ ID NO: 1897115 - DNA, 25 bp, Homo sapien
ggcaaagcacaccatgggccaaatg

SEQ ID NO: 1897116 - DNA, 25 bp, Homo sapien
tttatgttggaaaaggaccttcgca

SEQ ID NO: 1897117 - DNA, 25 bp, Homo sapien
ggtccccaacaatacaggtgtccta

SEQ ID NO: 1897118 - DNA, 25 bp, Homo sapien
ggtgtcctaacttctagaacctgga

SEQ ID NO: 1897119 - DNA, 25 bp, Homo sapien
cctggattacctgagtaggccctaa

SEQ ID NO: 1897120 - DNA, 25 bp, Homo sapien
taggacactaacactgaaggctagg

SEQ ID NO: 1897121 - DNA, 25 bp, Homo sapien
tggagtcatttagccatgagctgag

SEQ ID NO: 1897122 - DNA, 25 bp, Homo sapien
caagggatgattctgccctgaagcc

SEQ ID NO: 1897123 - DNA, 25 bp, Homo sapien
taatttgttaagcagacctaggaca

SEQ ID NO: 1897124 - DNA, 25 bp, Homo sapien
aaactgatatctccacttaagggtg

SEQ ID NO: 1897125 - DNA, 25 bp, Homo sapien
tccttaaaaatgatgggcccaggtg

SEQ ID NO: 1897126 - DNA, 25 bp, Homo sapien
ctgatgaagaaacccgatggctgca

SEQ ID NO: 1897127 - DNA, 25 bp, Homo sapien
agggtgcgactctcctccgaatgca

SEQ ID NO: 1897128 - DNA, 25 bp, Homo sapien
aactttccacgtgtatttccaagtg

SEQ ID NO: 1897129 - DNA, 25 bp, Homo sapien
aacctgctactcagagtgtggtcca

SEQ ID NO: 1897130 - DNA, 25 bp, Homo sapien
cagagatgtctgtgtacactttaac

SEQ ID NO: 1897131 - DNA, 25 bp, Homo sapien
cacagcaggatgtactaaaactgca

SEQ ID NO: 1897132 - DNA, 25 bp, Homo sapien
tgtgtatgatcacagctctgggatc

SEQ ID NO: 1897133 - DNA, 25 bp, Homo sapien
ggatcagcccctacatccttttcaa

SEQ ID NO: 1897134 - DNA, 25 bp, Homo sapien
tagacaccagttacagcaatccagt

SEQ ID NO: 1897135 - DNA, 25 bp, Homo sapien
gcaatccagtgattaggcaaattaa

SEQ ID NO: 1897136 - DNA, 25 bp, Homo sapien
cctgctttgtcacacaggcacccac

SEQ ID NO: 1897137 - DNA, 25 bp, Homo sapien
tcaggcctgctttgtcacacaggca

SEQ ID NO: 1897138 - DNA, 25 bp, Homo sapien
gcctgctttgtcacacaggcaccca

SEQ ID NO: 1897139 - DNA, 25 bp, Homo sapien
aggcctgctttgtcacacaggcacc

SEQ ID NO: 1897140 - DNA, 25 bp, Homo sapien
accattctctgcatacagtacagca

SEQ ID NO: 1897141 - DNA, 25 bp, Homo sapien
cttctctactgaacaagtggcaggg

SEQ ID NO: 1897142 - DNA, 25 bp, Homo sapien
cctggaactctttcaacccataaga

SEQ ID NO: 1897143 - DNA, 25 bp, Homo sapien
cccataagacaacgccaaatgggtg

SEQ ID NO: 1897144 - DNA, 25 bp, Homo sapien
ctatgccaggtggccaggagggccg

SEQ ID NO: 1897145 - DNA, 25 bp, Homo sapien
tatgccaggtggccaggagggccgg

SEQ ID NO: 1897146 - DNA, 25 bp, Homo sapien
tagggactcgggaacacatctcaaa

SEQ ID NO: 1897147 - DNA, 25 bp, Homo sapien
gaagcttgctgctacagtgtcaaca

SEQ ID NO: 1897148 - DNA, 25 bp, Homo sapien
aagagaaagctttgggtctgccaca

SEQ ID NO: 1897149 - DNA, 25 bp, Homo sapien
tcaacaatgctctcagtgctactgg

SEQ ID NO: 1897150 - DNA, 25 bp, Homo sapien
tccaggtaaggatttcccgctccgc

SEQ ID NO: 1897151 - DNA, 25 bp, Homo sapien
atgccaccctccaggtaaggatttc

SEQ ID NO: 1897152 - DNA, 25 bp, Homo sapien
gaaatgcgtctgagattgtaaatgc

SEQ ID NO: 1897153 - DNA, 25 bp, Homo sapien
caggtaaggatttcccgctccgctc

SEQ ID NO: 1897154 - DNA, 25 bp, Homo sapien
ccggcctctgttacaactggccttg

SEQ ID NO: 1897155 - DNA, 25 bp, Homo sapien
tgaagcaaggctgcgagcctctccc

SEQ ID NO: 1897156 - DNA, 25 bp, Homo sapien
gcatgagaagacgtggacccccttt

SEQ ID NO: 1897157 - DNA, 25 bp, Homo sapien
cccctttttgaggtgaagcaaggct

SEQ ID NO: 1897158 - DNA, 25 bp, Homo sapien
tcctgagagcggaagattgactttc

SEQ ID NO: 1897159 - DNA, 25 bp, Homo sapien
tgagagcggaagattgactttcaca

SEQ ID NO: 1897160 - DNA, 25 bp, Homo sapien
cggaagattgactttcacatcagta

SEQ ID NO: 1897161 - DNA, 25 bp, Homo sapien
gtcactcctgagagcggaagattga

SEQ ID NO: 1897162 - DNA, 25 bp, Homo sapien
ctgacaaatccaggagtgggctctc

SEQ ID NO: 1897163 - DNA, 25 bp, Homo sapien
tgacaaatccaggagtgggctctct

SEQ ID NO: 1897164 - DNA, 25 bp, Homo sapien
acaaatccaggagtgggctctctgg

SEQ ID NO: 1897165 - DNA, 25 bp, Homo sapien
aaatccaggagtgggctctctggag

SEQ ID NO: 1897166 - DNA, 25 bp, Homo sapien
catgtaccagttatcagaggcattt

SEQ ID NO: 1897167 - DNA, 25 bp, Homo sapien
ttactagtaatagtgaagtttgacc

SEQ ID NO: 1897168 - DNA, 25 bp, Homo sapien
ggagtagaagcatgtaccagttatc

SEQ ID NO: 1897169 - DNA, 25 bp, Homo sapien
gaaaagggagtagaagcatgtacca

SEQ ID NO: 1897170 - DNA, 25 bp, Homo sapien
tgattacacttatgcctttgtacac

SEQ ID NO: 1897171 - DNA, 25 bp, Homo sapien
tcttgttggtgattacacttatgcc

SEQ ID NO: 1897172 - DNA, 25 bp, Homo sapien
aatcagagtaggaggcatcattttc

SEQ ID NO: 1897173 - DNA, 25 bp, Homo sapien
gctgaatcagagtaggaggcatcat

SEQ ID NO: 1897174 - DNA, 25 bp, Homo sapien
actcaggtctcatggctggcggaat

SEQ ID NO: 1897175 - DNA, 25 bp, Homo sapien
cacacatcatatgctgactcaggtc

SEQ ID NO: 1897176 - DNA, 25 bp, Homo sapien
cagacattcactgggcacacatcat

SEQ ID NO: 1897177 - DNA, 25 bp, Homo sapien
gaatgtggatgatacactgagcctc

SEQ ID NO: 1897178 - DNA, 25 bp, Homo sapien
ttctccttataaatgtgatgcagaa

SEQ ID NO: 1897179 - DNA, 25 bp, Homo sapien
cttctccttataaatgtgatgcaga

SEQ ID NO: 1897180 - DNA, 25 bp, Homo sapien
cttctaataagattcggctgctgtc

SEQ ID NO: 1897181 - DNA, 25 bp, Homo sapien
gactcgatgcccagacttctaataa

SEQ ID NO: 1897182 - DNA, 25 bp, Homo sapien
tgtagagtcactggacccatcctga

SEQ ID NO: 1897183 - DNA, 25 bp, Homo sapien
taaaccaagaaggaggactcgatgc

SEQ ID NO: 1897184 - DNA, 25 bp, Homo sapien
tcctttatcaaattcgtttccagcc

SEQ ID NO: 1897185 - DNA, 25 bp, Homo sapien
ttcgtttccagcctcagacagggtc

SEQ ID NO: 1897186 - DNA, 25 bp, Homo sapien
tctggagggaacgagacagtgacag

SEQ ID NO: 1897187 - DNA, 25 bp, Homo sapien
gaacgagacagtgacagggataggt

SEQ ID NO: 1897188 - DNA, 25 bp, Homo sapien
ccataaagtcttggcagctagagag

SEQ ID NO: 1897189 - DNA, 25 bp, Homo sapien
ttctactccccataaagtcttggca

SEQ ID NO: 1897190 - DNA, 25 bp, Homo sapien
taaagtcttggcagctagagagctg

SEQ ID NO: 1897191 - DNA, 25 bp, Homo sapien
tccccataaagtcttggcagctaga

SEQ ID NO: 1897192 - DNA, 25 bp, Homo sapien
catcactataccataagccttccca

SEQ ID NO: 1897193 - DNA, 25 bp, Homo sapien
atctgctgttcgcagcttgtcacat

SEQ ID NO: 1897194 - DNA, 25 bp, Homo sapien
tctgctgttcgcagcttgtcacatc

SEQ ID NO: 1897195 - DNA, 25 bp, Homo sapien
cagcttgtcacatcactataccata

SEQ ID NO: 1897196 - DNA, 25 bp, Homo sapien
ggcagccactcgctggtatcctgga

SEQ ID NO: 1897197 - DNA, 25 bp, Homo sapien
gtacacttggagagccgttccgcgg

SEQ ID NO: 1897198 - DNA, 25 bp, Homo sapien
ttccgcggcagccactcgctggtat

SEQ ID NO: 1897199 - DNA, 25 bp, Homo sapien
ggtatcctggatcccgggtgcacga

SEQ ID NO: 1897200 - DNA, 25 bp, Homo sapien
cagaaagacacaggtaactcttcag

SEQ ID NO: 1897201 - DNA, 25 bp, Homo sapien
caactgcatattttagtaatagggc

SEQ ID NO: 1897202 - DNA, 25 bp, Homo sapien
tgctgaaataaagaggcttccaggt

SEQ ID NO: 1897203 - DNA, 25 bp, Homo sapien
tgctacactggctgcatgctcacac

SEQ ID NO: 1897204 - DNA, 25 bp, Homo sapien
gtactggacaggaagcacaagtgtt

SEQ ID NO: 1897205 - DNA, 25 bp, Homo sapien
actggacaggaagcacaagtgttac

SEQ ID NO: 1897206 - DNA, 25 bp, Homo sapien
tcagtactggacaggaagcacaagt

SEQ ID NO: 1897207 - DNA, 25 bp, Homo sapien
cagtactggacaggaagcacaagtg

SEQ ID NO: 1897208 - DNA, 25 bp, Homo sapien
gcagggtcctgtccgtagaaagaga

SEQ ID NO: 1897209 - DNA, 25 bp, Homo sapien
cctgtccgtagaaagagacccactg

SEQ ID NO: 1897210 - DNA, 25 bp, Homo sapien
ggtcctgtccgtagaaagagaccca

SEQ ID NO: 1897211 - DNA, 25 bp, Homo sapien
tttggcagggtcctgtccgtagaaa

SEQ ID NO: 1897212 - DNA, 25 bp, Homo sapien
ggcccctcccagtcagctaccaagg

SEQ ID NO: 1897213 - DNA, 25 bp, Homo sapien
tggcccctcccagtcagctaccaag

SEQ ID NO: 1897214 - DNA, 25 bp, Homo sapien
cccctcccagtcagctaccaaggca

SEQ ID NO: 1897215 - DNA, 25 bp, Homo sapien
gctggcccctcccagtcagctacca

SEQ ID NO: 1897216 - DNA, 25 bp, Homo sapien
cataagtcaggttgcacagcagaca

SEQ ID NO: 1897217 - DNA, 25 bp, Homo sapien
gaagcaggctcaaccataagtcagg

SEQ ID NO: 1897218 - DNA, 25 bp, Homo sapien
ccataagtcaggttgcacagcagac

SEQ ID NO: 1897219 - DNA, 25 bp, Homo sapien
acttgaagcaggctcaaccataagt

SEQ ID NO: 1897220 - DNA, 25 bp, Homo sapien
acagacaacggccagtggcccacaa

SEQ ID NO: 1897221 - DNA, 25 bp, Homo sapien
gacaacggccagtggcccacaatgc

SEQ ID NO: 1897222 - DNA, 25 bp, Homo sapien
ctttccactgcaacctgtaacagac

SEQ ID NO: 1897223 - DNA, 25 bp, Homo sapien
ccactgcaacctgtaacagacaacg

SEQ ID NO: 1897224 - DNA, 25 bp, Homo sapien
agcttcttcacgatttttggacact

SEQ ID NO: 1897225 - DNA, 25 bp, Homo sapien
ttcttcacgatttttggacactggc

SEQ ID NO: 1897226 - DNA, 25 bp, Homo sapien
cttgaaagcttcccaataggatcaa

SEQ ID NO: 1897227 - DNA, 25 bp, Homo sapien
cttcacgatttttggacactggctt

SEQ ID NO: 1897228 - DNA, 25 bp, Homo sapien
atctgtaagggctcccaggcgctcc

SEQ ID NO: 1897229 - DNA, 25 bp, Homo sapien
catctgtaagggctcccaggcgctc

SEQ ID NO: 1897230 - DNA, 25 bp, Homo sapien
attaaaggtacttctaaaggacatg

SEQ ID NO: 1897231 - DNA, 25 bp, Homo sapien
aaggtacttctaaaggacatgcttc

SEQ ID NO: 1897232 - DNA, 25 bp, Homo sapien
gtacttctaaaggacatgcttcaga

SEQ ID NO: 1897233 - DNA, 25 bp, Homo sapien
taaaggtacttctaaaggacatgct

SEQ ID NO: 1897234 - DNA, 25 bp, Homo sapien
tgtatgatttcatttgtatgacttt

SEQ ID NO: 1897235 - DNA, 25 bp, Homo sapien
atgcttcacgtagccacagagtaat

SEQ ID NO: 1897236 - DNA, 25 bp, Homo sapien
ttagtctaccaaggaactaaattca

SEQ ID NO: 1897237 - DNA, 25 bp, Homo sapien
taccaaggaactaaattcagtgtgg

SEQ ID NO: 1897238 - DNA, 25 bp, Homo sapien
tctaccaaggaactaaattcagtgt

SEQ ID NO: 1897239 - DNA, 25 bp, Homo sapien
gtctaccaaggaactaaattcagtg

SEQ ID NO: 1897240 - DNA, 25 bp, Homo sapien
gctttccaagtgcttcaggaaacat

SEQ ID NO: 1897241 - DNA, 25 bp, Homo sapien
tttccaagtgcttcaggaaacatca

SEQ ID NO: 1897242 - DNA, 25 bp, Homo sapien
ctgctttccaagtgcttcaggaaac

SEQ ID NO: 1897243 - DNA, 25 bp, Homo sapien
ttccaagtgcttcaggaaacatcac

SEQ ID NO: 1897244 - DNA, 25 bp, Homo sapien
ggttgctgtcatcaagcctaaagac

SEQ ID NO: 1897245 - DNA, 25 bp, Homo sapien
gcactggtgacatatggctgccagt

SEQ ID NO: 1897246 - DNA, 25 bp, Homo sapien
gcccagtggtcataggttgctgtca

SEQ ID NO: 1897247 - DNA, 25 bp, Homo sapien
gctgtcataatcaggaacatcccta

SEQ ID NO: 1897248 - DNA, 25 bp, Homo sapien
agctctctggacaggtgtgctcaga

SEQ ID NO: 1897249 - DNA, 25 bp, Homo sapien
gagctctctggacaggtgtgctcag

SEQ ID NO: 1897250 - DNA, 25 bp, Homo sapien
cattctgagaaagatggggtggctc

SEQ ID NO: 1897251 - DNA, 25 bp, Homo sapien
gagagtttgatacacattctgagaa

SEQ ID NO: 1897252 - DNA, 25 bp, Homo sapien
gatacaggagagtttgatacacatt

SEQ ID NO: 1897253 - DNA, 25 bp, Homo sapien
caggagagtttgatacacattctga

SEQ ID NO: 1897254 - DNA, 25 bp, Homo sapien
agcattattccaaatggagaaagtg

SEQ ID NO: 1897255 - DNA, 25 bp, Homo sapien
cagcattattccaaatggagaaagt

SEQ ID NO: 1897256 - DNA, 25 bp, Homo sapien
gcattattccaaatggagaaagtgc

SEQ ID NO: 1897257 - DNA, 25 bp, Homo sapien
ttatcagatgttaagtcaggccaca

SEQ ID NO: 1897258 - DNA, 25 bp, Homo sapien
gacattatcagatgttaagtcaggc

SEQ ID NO: 1897259 - DNA, 25 bp, Homo sapien
cattatcagatgttaagtcaggcca

SEQ ID NO: 1897260 - DNA, 25 bp, Homo sapien
tctgacattatcagatgttaagtca

SEQ ID NO: 1897261 - DNA, 25 bp, Homo sapien
aatactgccccagcttgtcttttat

SEQ ID NO: 1897262 - DNA, 25 bp, Homo sapien
tctgaggtgttacatagctaagtac

SEQ ID NO: 1897263 - DNA, 25 bp, Homo sapien
gctaagtacattctcttccttgata

SEQ ID NO: 1897264 - DNA, 25 bp, Homo sapien
tctcatacatgggtaaatactgccc

SEQ ID NO: 1897265 - DNA, 25 bp, Homo sapien
tagctcttcaaagtctgccacaagg

SEQ ID NO: 1897266 - DNA, 25 bp, Homo sapien
atagctcttcaaagtctgccacaag

SEQ ID NO: 1897267 - DNA, 25 bp, Homo sapien
caatagctcttcaaagtctgccaca

SEQ ID NO: 1897268 - DNA, 25 bp, Homo sapien
ctgccacaaggaggacctggccaat

SEQ ID NO: 1897269 - DNA, 25 bp, Homo sapien
ctaactgaagtgccccgtcagtgag

SEQ ID NO: 1897270 - DNA, 25 bp, Homo sapien
ataacaaggaccctagaacgccagg

SEQ ID NO: 1897271 - DNA, 25 bp, Homo sapien
tgcaatcagcatcgccctggcactt

SEQ ID NO: 1897272 - DNA, 25 bp, Homo sapien
atccgaacacctccctaactgaagt

SEQ ID NO: 1897273 - DNA, 25 bp, Homo sapien
cgaatgtctccaactttctaggaac

SEQ ID NO: 1897274 - DNA, 25 bp, Homo sapien
tccaactaacaccataattgaggag

SEQ ID NO: 1897275 - DNA, 25 bp, Homo sapien
caaatccacttagaacgtcagtcac

SEQ ID NO: 1897276 - DNA, 25 bp, Homo sapien
ggaagaggagagtgcacaattcgaa

SEQ ID NO: 1897277 - DNA, 25 bp, Homo sapien
tcttcagataggataaagcggccag

SEQ ID NO: 1897278 - DNA, 25 bp, Homo sapien
tggtctcttcagataggataaagcg

SEQ ID NO: 1897279 - DNA, 25 bp, Homo sapien
cagataggataaagcggccagagtc

SEQ ID NO: 1897280 - DNA, 25 bp, Homo sapien
tgctggtctcttcagataggataaa

SEQ ID NO: 1897281 - DNA, 25 bp, Homo sapien
tgcttgtgggggatcacacgactct

SEQ ID NO: 1897282 - DNA, 25 bp, Homo sapien
cacctgtgaccctgcttgtggggga

SEQ ID NO: 1897283 - DNA, 25 bp, Homo sapien
gaccctgcttgtgggggatcacacg

SEQ ID NO: 1897284 - DNA, 25 bp, Homo sapien
gggatcacacgactctccaactctg

SEQ ID NO: 1897285 - DNA, 25 bp, Homo sapien
tcagacatgtcacagtgcgaggaag

SEQ ID NO: 1897286 - DNA, 25 bp, Homo sapien
gggagcaagggatcagacatgtcac

SEQ ID NO: 1897287 - DNA, 25 bp, Homo sapien
aagggatcagacatgtcacagtgcg

SEQ ID NO: 1897288 - DNA, 25 bp, Homo sapien
atgggagcaagggatcagacatgtc

SEQ ID NO: 1897289 - DNA, 25 bp, Homo sapien
tcctcgctatggaagagacccagag

SEQ ID NO: 1897290 - DNA, 25 bp, Homo sapien
agacccagagatttgggctcctggt

SEQ ID NO: 1897291 - DNA, 25 bp, Homo sapien
aattccacatcctatggcttctctg

SEQ ID NO: 1897292 - DNA, 25 bp, Homo sapien
cagccaggtcctcgctatggaagag

SEQ ID NO: 1897293 - DNA, 25 bp, Homo sapien
tgtggtatagaggtatgctgagaat

SEQ ID NO: 1897294 - DNA, 25 bp, Homo sapien
cataagccacctttaatcctatgct

SEQ ID NO: 1897295 - DNA, 25 bp, Homo sapien
gaggtatgctgagaataacataagc

SEQ ID NO: 1897296 - DNA, 25 bp, Homo sapien
tatagaggtatgctgagaataacat

SEQ ID NO: 1897297 - DNA, 25 bp, Homo sapien
cttctttccaagtggctggctcatt

SEQ ID NO: 1897298 - DNA, 25 bp, Homo sapien
ttccaagtggctggctcattccctg

SEQ ID NO: 1897299 - DNA, 25 bp, Homo sapien
caagtggctggctcattccctgctt

SEQ ID NO: 1897300 - DNA, 25 bp, Homo sapien
ctttccaagtggctggctcattccc

SEQ ID NO: 1897301 - DNA, 25 bp, Homo sapien
ggcagcaaacacactataacatggt

SEQ ID NO: 1897302 - DNA, 25 bp, Homo sapien
cacactataacatggttctgcccca

SEQ ID NO: 1897303 - DNA, 25 bp, Homo sapien
gttctgccccaagagaccagacgtt

SEQ ID NO: 1897304 - DNA, 25 bp, Homo sapien
ccccaagagaccagacgtttgccat

SEQ ID NO: 1897305 - DNA, 25 bp, Homo sapien
tcatgttggcgtcaggacaaagcaa

SEQ ID NO: 1897306 - DNA, 25 bp, Homo sapien
cattttctgtaaaccagccccttgg

SEQ ID NO: 1897307 - DNA, 25 bp, Homo sapien
gcaattatggtacacctcgcagcaa

SEQ ID NO: 1897308 - DNA, 25 bp, Homo sapien
tggaacccaacgctgtcaacagtgt

SEQ ID NO: 1897309 - DNA, 25 bp, Homo sapien
tccttagataacacaggcctgctgt

SEQ ID NO: 1897310 - DNA, 25 bp, Homo sapien
gatgaatgggctcagcagttcctta

SEQ ID NO: 1897311 - DNA, 25 bp, Homo sapien
gaaacgggccgtgaaaagcagatga

SEQ ID NO: 1897312 - DNA, 25 bp, Homo sapien
tggctcgaattacccgcctgtcagg

SEQ ID NO: 1897313 - DNA, 25 bp, Homo sapien
gcggcagagccattaagaatgcaca

SEQ ID NO: 1897314 - DNA, 25 bp, Homo sapien
gtattgtaaacacgccagagggcca

SEQ ID NO: 1897315 - DNA, 25 bp, Homo sapien
agagggccatttaccatccgcggaa

SEQ ID NO: 1897316 - DNA, 25 bp, Homo sapien
gaatctgtacaagtcgggctctacc

SEQ ID NO: 1897317 - DNA, 25 bp, Homo sapien
taatcctgccagctgaaacgcaaga

SEQ ID NO: 1897318 - DNA, 25 bp, Homo sapien
gccaatatcactgcatgagcctaag

SEQ ID NO: 1897319 - DNA, 25 bp, Homo sapien
cagtgaggtacaattccaagtcagg

SEQ ID NO: 1897320 - DNA, 25 bp, Homo sapien
ggagaaaccatcatttgacagtgag

SEQ ID NO: 1897321 - DNA, 25 bp, Homo sapien
tccattgatcatccctggtgagaag

SEQ ID NO: 1897322 - DNA, 25 bp, Homo sapien
tgcctgagaggtgcattatcatgtg

SEQ ID NO: 1897323 - DNA, 25 bp, Homo sapien
gaggaatgtggtaccctgtttccca

SEQ ID NO: 1897324 - DNA, 25 bp, Homo sapien
tgcattatcatgtggaagatgctgt

SEQ ID NO: 1897325 - DNA, 25 bp, Homo sapien
gcttacccaagtgatcaagaaccag

SEQ ID NO: 1897326 - DNA, 25 bp, Homo sapien
ttgcttacccaagtgatcaagaacc

SEQ ID NO: 1897327 - DNA, 25 bp, Homo sapien
tacccaagtgatcaagaaccagaat

SEQ ID NO: 1897328 - DNA, 25 bp, Homo sapien
acccaagtgatcaagaaccagaatt

SEQ ID NO: 1897329 - DNA, 25 bp, Homo sapien
aaacatctagatgcgtagttgctga

SEQ ID NO: 1897330 - DNA, 25 bp, Homo sapien
taatatctacacaatgtgaccagtg

SEQ ID NO: 1897331 - DNA, 25 bp, Homo sapien
gctatcaagattcgcatgcaggttg

SEQ ID NO: 1897332 - DNA, 25 bp, Homo sapien
gctgaattgtacgttaagcctatct

SEQ ID NO: 1897333 - DNA, 25 bp, Homo sapien
ggttatgcaattcttaagaaggtga

SEQ ID NO: 1897334 - DNA, 25 bp, Homo sapien
tctttgtgatgccaataactccatt

SEQ ID NO: 1897335 - DNA, 25 bp, Homo sapien
tattaataactagtcgcaaggatcg

SEQ ID NO: 1897336 - DNA, 25 bp, Homo sapien
gaaacctcaacaaactgtagttcag

SEQ ID NO: 1897337 - DNA, 25 bp, Homo sapien
gatgatggatccaaaaaagctagca

SEQ ID NO: 1897338 - DNA, 25 bp, Homo sapien
gcaataaacctcagtcataggacat

SEQ ID NO: 1897339 - DNA, 25 bp, Homo sapien
gattggaatagctcaattgaggagc

SEQ ID NO: 1897340 - DNA, 25 bp, Homo sapien
ggtctactacctgaacagttcccca

SEQ ID NO: 1897341 - DNA, 25 bp, Homo sapien
cacagatactccataaagcagggta

SEQ ID NO: 1897342 - DNA, 25 bp, Homo sapien
catgttctcttagtacaaactggca

SEQ ID NO: 1897343 - DNA, 25 bp, Homo sapien
gcagggtaccttggctaaaacacca

SEQ ID NO: 1897344 - DNA, 25 bp, Homo sapien
aactaatcagaaaacctcaggctca

SEQ ID NO: 1897345 - DNA, 25 bp, Homo sapien
taatgcactctcagtggaaaggtag

SEQ ID NO: 1897346 - DNA, 25 bp, Homo sapien
cagtggaaaggtagtgttccaccag

SEQ ID NO: 1897347 - DNA, 25 bp, Homo sapien
aaaaggtaatgcactctcagtggaa

SEQ ID NO: 1897348 - DNA, 25 bp, Homo sapien
tgcactctcagtggaaaggtagtgt

SEQ ID NO: 1897349 - DNA, 25 bp, Homo sapien
tgccccaatggtgcttgcattcctg

SEQ ID NO: 1897350 - DNA, 25 bp, Homo sapien
cagtgaacagaagagtctaaactcc

SEQ ID NO: 1897351 - DNA, 25 bp, Homo sapien
cattcgacagatattgattgagccc

SEQ ID NO: 1897352 - DNA, 25 bp, Homo sapien
cagatgctgattgtggcacttgtga

SEQ ID NO: 1897353 - DNA, 25 bp, Homo sapien
agatgatcaacagcaacactcttat

SEQ ID NO: 1897354 - DNA, 25 bp, Homo sapien
tcttctggctttatcattcaacttc

SEQ ID NO: 1897355 - DNA, 25 bp, Homo sapien
tcccaggcaaagatgatcaacagca

SEQ ID NO: 1897356 - DNA, 25 bp, Homo sapien
gctttatcattcaacttcccaggca

SEQ ID NO: 1897357 - DNA, 25 bp, Homo sapien
tgagcattgcataccaccagaagag

SEQ ID NO: 1897358 - DNA, 25 bp, Homo sapien
tacagaagtatcaaggcagccatgg

SEQ ID NO: 1897359 - DNA, 25 bp, Homo sapien
aataagggtactagctagaagcagc

SEQ ID NO: 1897360 - DNA, 25 bp, Homo sapien
gatgcaaaaaatcggtacaggcctt

SEQ ID NO: 1897361 - DNA, 25 bp, Homo sapien
cttcaccagtgaactcaatgttgaa

SEQ ID NO: 1897362 - DNA, 25 bp, Homo sapien
tcaagtgaagactaagagacctgga

SEQ ID NO: 1897363 - DNA, 25 bp, Homo sapien
ccctctcgtccttctgaatgaagat

SEQ ID NO: 1897364 - DNA, 25 bp, Homo sapien
caagtgaagactaagagacctggag

SEQ ID NO: 1897365 - DNA, 25 bp, Homo sapien
aatgttaaaactgggagctatgtga

SEQ ID NO: 1897366 - DNA, 25 bp, Homo sapien
gtcttcagtaggtggcgaaatgtta

SEQ ID NO: 1897367 - DNA, 25 bp, Homo sapien
gcttggtcccaaatgatgtcttcag

SEQ ID NO: 1897368 - DNA, 25 bp, Homo sapien
gcttcaagggctcatcagcttggtc

SEQ ID NO: 1897369 - DNA, 25 bp, Homo sapien
tagaaaaggtccagggacttgccca

SEQ ID NO: 1897370 - DNA, 25 bp, Homo sapien
gacttgcccatgaggaagaactcag

SEQ ID NO: 1897371 - DNA, 25 bp, Homo sapien
aacgtagtatcatgcaaccaagtgc

SEQ ID NO: 1897372 - DNA, 25 bp, Homo sapien
tactgtgcagggtacaaatggcctt

SEQ ID NO: 1897373 - DNA, 25 bp, Homo sapien
cagatcctgcttagctgagaaaaac

SEQ ID NO: 1897374 - DNA, 25 bp, Homo sapien
gtttcctcttgtaaaattggccagc

SEQ ID NO: 1897375 - DNA, 25 bp, Homo sapien
gcttagctgagaaaaactccctctt

SEQ ID NO: 1897376 - DNA, 25 bp, Homo sapien
aaattggccagcgtgctgctgccat

SEQ ID NO: 1897377 - DNA, 25 bp, Homo sapien
tgtaacatgcctagggccatcctga

SEQ ID NO: 1897378 - DNA, 25 bp, Homo sapien
tacacccagtatttggaggtcagag

SEQ ID NO: 1897379 - DNA, 25 bp, Homo sapien
aaacgtttcatctatgacagccatg

SEQ ID NO: 1897380 - DNA, 25 bp, Homo sapien
tcttttcattgaggcccaagaaagt

SEQ ID NO: 1897381 - DNA, 25 bp, Homo sapien
caaaaggcgggaaatgctcactgac

SEQ ID NO: 1897382 - DNA, 25 bp, Homo sapien
tcagaaatggtctcctatcaccagg

SEQ ID NO: 1897383 - DNA, 25 bp, Homo sapien
caactccaatgtacggcaaaaggcg

SEQ ID NO: 1897384 - DNA, 25 bp, Homo sapien
tatcaccaggttaccagtgtgcgaa

SEQ ID NO: 1897385 - DNA, 25 bp, Homo sapien
cagggtcatatgtcgctgaaacttc

SEQ ID NO: 1897386 - DNA, 25 bp, Homo sapien
tcatagcaggtttcagtttggacat

SEQ ID NO: 1897387 - DNA, 25 bp, Homo sapien
tttaaagataggaggacagcagagg

SEQ ID NO: 1897388 - DNA, 25 bp, Homo sapien
tgcgttcccatatgtggccccagct

SEQ ID NO: 1897389 - DNA, 25 bp, Homo sapien
gagactgcagcactagacagcgaag

SEQ ID NO: 1897390 - DNA, 25 bp, Homo sapien
ggtgcaaggtttccctctcagaagc

SEQ ID NO: 1897391 - DNA, 25 bp, Homo sapien
gccaaggttcccactaggcaggaaa

SEQ ID NO: 1897392 - DNA, 25 bp, Homo sapien
tcacggtccgagttcctgcaaatgc

SEQ ID NO: 1897393 - DNA, 25 bp, Homo sapien
tctgcgccgcgaggcccccagctcg

SEQ ID NO: 1897394 - DNA, 25 bp, Homo sapien
cgccgcgaggcccccagctcgcctc

SEQ ID NO: 1897395 - DNA, 25 bp, Homo sapien
cgcgaggcccccagctcgcctcttc

SEQ ID NO: 1897396 - DNA, 25 bp, Homo sapien
gtctgcgccgcgaggcccccagctc

SEQ ID NO: 1897397 - DNA, 25 bp, Homo sapien
cgcggccaaggtcctcgcggagcag

SEQ ID NO: 1897398 - DNA, 25 bp, Homo sapien
gcaaaggcgccgcggccaaggtcct

SEQ ID NO: 1897399 - DNA, 25 bp, Homo sapien
ccacccggcggcggctgacagctga

SEQ ID NO: 1897400 - DNA, 25 bp, Homo sapien
tgcgcacgccgagggttaaggagga

SEQ ID NO: 1897401 - DNA, 25 bp, Homo sapien
gcagggccgcgggtctgacagctgc

SEQ ID NO: 1897402 - DNA, 25 bp, Homo sapien
gggcagggccgcgggtctgacagct

SEQ ID NO: 1897403 - DNA, 25 bp, Homo sapien
ggcagggccgcgggtctgacagctg

SEQ ID NO: 1897404 - DNA, 25 bp, Homo sapien
ggcagttcgtgggtcaccgaaagct

SEQ ID NO: 1897405 - DNA, 25 bp, Homo sapien
ttccccgcgtcttcccggctcgcag

SEQ ID NO: 1897406 - DNA, 25 bp, Homo sapien
ctcgccggagaactttgcgtccttt

SEQ ID NO: 1897407 - DNA, 25 bp, Homo sapien
gcagccggcgaggtgggcagttcgt

SEQ ID NO: 1897408 - DNA, 25 bp, Homo sapien
gcgtaagccgctccgcgaatggcgc

SEQ ID NO: 1897409 - DNA, 25 bp, Homo sapien
ggcgactagcgtaagccgctccgcg

SEQ ID NO: 1897410 - DNA, 25 bp, Homo sapien
ggtacgcccggcgactagcgtaagc

SEQ ID NO: 1897411 - DNA, 25 bp, Homo sapien
tacgcccggcgactagcgtaagccg

SEQ ID NO: 1897412 - DNA, 25 bp, Homo sapien
tcactgccggagagttcttgatctt

SEQ ID NO: 1897413 - DNA, 25 bp, Homo sapien
ccacagaaagagagctagtcctgtc

SEQ ID NO: 1897414 - DNA, 25 bp, Homo sapien
tgcctcctcatcactgccggagagt

SEQ ID NO: 1897415 - DNA, 25 bp, Homo sapien
tagtcctgtctgatacttgggtgtg

SEQ ID NO: 1897416 - DNA, 25 bp, Homo sapien
ggcaatttgccttagcaggctggag

SEQ ID NO: 1897417 - DNA, 25 bp, Homo sapien
tagtattctccgtggcagatggctg

SEQ ID NO: 1897418 - DNA, 25 bp, Homo sapien
gctagggcagcatagttgaaatgaa

SEQ ID NO: 1897419 - DNA, 25 bp, Homo sapien
gaacagtcattcttcagcttatgga

SEQ ID NO: 1897420 - DNA, 25 bp, Homo sapien
ctcttgcagttcaataatcatcttt

SEQ ID NO: 1897421 - DNA, 25 bp, Homo sapien
tgtatctggaaagatgactgggcct

SEQ ID NO: 1897422 - DNA, 25 bp, Homo sapien
gtttttggatactctcaagctggca

SEQ ID NO: 1897423 - DNA, 25 bp, Homo sapien
gaagtaatgatgaaatgacccactc

SEQ ID NO: 1897424 - DNA, 25 bp, Homo sapien
ctcccttgccatagagtgggtccct

SEQ ID NO: 1897425 - DNA, 25 bp, Homo sapien
gcagcaggcacagggttgccaggca

SEQ ID NO: 1897426 - DNA, 25 bp, Homo sapien
tttgcaggggattccccaaggctct

SEQ ID NO: 1897427 - DNA, 25 bp, Homo sapien
cctcatctgataacggcccttggca

SEQ ID NO: 1897428 - DNA, 25 bp, Homo sapien
gcagatctgcccttttgcaggggat

SEQ ID NO: 1897429 - DNA, 25 bp, Homo sapien
gcgtgacaagcggtgctcatcacag

SEQ ID NO: 1897430 - DNA, 25 bp, Homo sapien
taagcttcaacataacaggattgtc

SEQ ID NO: 1897431 - DNA, 25 bp, Homo sapien
aaggacaccacaagggcgtgacaag

SEQ ID NO: 1897432 - DNA, 25 bp, Homo sapien
catttagatagagctttgtccctca

SEQ ID NO: 1897433 - DNA, 25 bp, Homo sapien
ggcgatgacagcgtgcagcttgcct

SEQ ID NO: 1897434 - DNA, 25 bp, Homo sapien
ttaggcgatgacagcgtgcagcttg

SEQ ID NO: 1897435 - DNA, 25 bp, Homo sapien
aggcgatgacagcgtgcagcttgcc

SEQ ID NO: 1897436 - DNA, 25 bp, Homo sapien
taggcgatgacagcgtgcagcttgc

SEQ ID NO: 1897437 - DNA, 25 bp, Homo sapien
gcctgccttggtgttttgacagcca

SEQ ID NO: 1897438 - DNA, 25 bp, Homo sapien
tccatgtccccgctgctcagagagg

SEQ ID NO: 1897439 - DNA, 25 bp, Homo sapien
tagggaggccctcgatggaaatatt

SEQ ID NO: 1897440 - DNA, 25 bp, Homo sapien
aggataccgctgcacaacacgcttg

SEQ ID NO: 1897441 - DNA, 25 bp, Homo sapien
gctgcgactgaaggacaagtggaaa

SEQ ID NO: 1897442 - DNA, 25 bp, Homo sapien
actagtaagtaaccccgcttctctg

SEQ ID NO: 1897443 - DNA, 25 bp, Homo sapien
aaatcctctgatcagaaagtataaa

SEQ ID NO: 1897444 - DNA, 25 bp, Homo sapien
tttcagcatcagatttgactagtaa

SEQ ID NO: 1897445 - DNA, 25 bp, Homo sapien
tcacgccctgggttgtttggccctg

SEQ ID NO: 1897446 - DNA, 25 bp, Homo sapien
gggtgtgggctaccagagctttctg

SEQ ID NO: 1897447 - DNA, 25 bp, Homo sapien
ggtgtgggctaccagagctttctga

SEQ ID NO: 1897448 - DNA, 25 bp, Homo sapien
ttctgagagctttgccattcacgcc

SEQ ID NO: 1897449 - DNA, 25 bp, Homo sapien
ctgcttgtgttactagtctgcatta

SEQ ID NO: 1897450 - DNA, 25 bp, Homo sapien
tccacatgtgttcagcagcggagct

SEQ ID NO: 1897451 - DNA, 25 bp, Homo sapien
tagcatcgtggatagctctgctcca

SEQ ID NO: 1897452 - DNA, 25 bp, Homo sapien
ttaagaagacctctttgacagtcag

SEQ ID NO: 1897453 - DNA, 25 bp, Homo sapien
gcagacaccatgctcatttggcttc

SEQ ID NO: 1897454 - DNA, 25 bp, Homo sapien
ccactgccacgccactaccgctaac

SEQ ID NO: 1897455 - DNA, 25 bp, Homo sapien
gacaccatgctcatttggcttcctc

SEQ ID NO: 1897456 - DNA, 25 bp, Homo sapien
actgccacgccactaccgctaacag

SEQ ID NO: 1897457 - DNA, 25 bp, Homo sapien
ctgttattgtgccaaccccagcagg

SEQ ID NO: 1897458 - DNA, 25 bp, Homo sapien
gattcgtggtgtatgcccagggcct

SEQ ID NO: 1897459 - DNA, 25 bp, Homo sapien
tgacatcatcagagtgaccgggcgt

SEQ ID NO: 1897460 - DNA, 25 bp, Homo sapien
ggttgtgccgactcctctttgccat

SEQ ID NO: 1897461 - DNA, 25 bp, Homo sapien
agccacagctctcaacccacactga

SEQ ID NO: 1897462 - DNA, 25 bp, Homo sapien
ccacagctctcaacccacactgagc

SEQ ID NO: 1897463 - DNA, 25 bp, Homo sapien
cacagctctcaacccacactgagct

SEQ ID NO: 1897464 - DNA, 25 bp, Homo sapien
ccgagtggccctgcttattcataag

SEQ ID NO: 1897465 - DNA, 25 bp, Homo sapien
tgtcgccttctggatccgagtggcc

SEQ ID NO: 1897466 - DNA, 25 bp, Homo sapien
tactctacaggtggtcacaacgcgg

SEQ ID NO: 1897467 - DNA, 25 bp, Homo sapien
gagtctctggtttcgttttaacagc

SEQ ID NO: 1897468 - DNA, 25 bp, Homo sapien
gagctggcctgattcaagatgcacc

SEQ ID NO: 1897469 - DNA, 25 bp, Homo sapien
ctgtgcagcctaggcgccatggagc

SEQ ID NO: 1897470 - DNA, 25 bp, Homo sapien
tgtggcctcctaggtgactgtgacc

SEQ ID NO: 1897471 - DNA, 25 bp, Homo sapien
cattcttgttaggtcctgtggtggg

SEQ ID NO: 1897472 - DNA, 25 bp, Homo sapien
ggtacagctttgtaggccatgcaac

SEQ ID NO: 1897473 - DNA, 25 bp, Homo sapien
caacaatctgagtgtactaaatgcc

SEQ ID NO: 1897474 - DNA, 25 bp, Homo sapien
gactgagcaagagctagctaggaga

SEQ ID NO: 1897475 - DNA, 25 bp, Homo sapien
gccatgcaacatgtccccagtctta

SEQ ID NO: 1897476 - DNA, 25 bp, Homo sapien
ggtccggttatcatagccatgatgt

SEQ ID NO: 1897477 - DNA, 25 bp, Homo sapien
gccatgatgttggtcgaacagataa

SEQ ID NO: 1897478 - DNA, 25 bp, Homo sapien
caatagccttgggaaccttggtccg

SEQ ID NO: 1897479 - DNA, 25 bp, Homo sapien
aaacacatccttctggagccacaat

SEQ ID NO: 1897480 - DNA, 25 bp, Homo sapien
ggtgacagagtctcatgagctgctg

SEQ ID NO: 1897481 - DNA, 25 bp, Homo sapien
cagagtctcatgagctgctggatgg

SEQ ID NO: 1897482 - DNA, 25 bp, Homo sapien
tctcatgagctgctggatgggacat

SEQ ID NO: 1897483 - DNA, 25 bp, Homo sapien
tgacagagtctcatgagctgctgga

SEQ ID NO: 1897484 - DNA, 25 bp, Homo sapien
caatagaatggggtgtataaaattc

SEQ ID NO: 1897485 - DNA, 25 bp, Homo sapien
ttccagattccatgaggggcattgg

SEQ ID NO: 1897486 - DNA, 25 bp, Homo sapien
ccagattccatgaggggcattggtg

SEQ ID NO: 1897487 - DNA, 25 bp, Homo sapien
gggcaagatcaaggcaggactccaa

SEQ ID NO: 1897488 - DNA, 25 bp, Homo sapien
tttgttcccaggatatttactgatt

SEQ ID NO: 1897489 - DNA, 25 bp, Homo sapien
ctttgttcccaggatatttactgat

SEQ ID NO: 1897490 - DNA, 25 bp, Homo sapien
gaattatccctagtggagaatggag

SEQ ID NO: 1897491 - DNA, 25 bp, Homo sapien
cacctgaagtatgtgtaacagagga

SEQ ID NO: 1897492 - DNA, 25 bp, Homo sapien
taaagggagcatatccacatgttct

SEQ ID NO: 1897493 - DNA, 25 bp, Homo sapien
tgggctgttcctctgcgtatacata

SEQ ID NO: 1897494 - DNA, 25 bp, Homo sapien
ggctggcaagtgtcatctattggca

SEQ ID NO: 1897495 - DNA, 25 bp, Homo sapien
tggctggcaagtgtcatctattggc

SEQ ID NO: 1897496 - DNA, 25 bp, Homo sapien
agtggctggcaagtgtcatctattg

SEQ ID NO: 1897497 - DNA, 25 bp, Homo sapien
caagtggctggcaagtgtcatctat

SEQ ID NO: 1897498 - DNA, 25 bp, Homo sapien
aaggctctaattgtgtccatggcaa

SEQ ID NO: 1897499 - DNA, 25 bp, Homo sapien
ggccaatagtgggaagagaaattcc

SEQ ID NO: 1897500 - DNA, 25 bp, Homo sapien
gctctaattgtgtccatggcaaagg

SEQ ID NO: 1897501 - DNA, 25 bp, Homo sapien
gaaggcaaaggctctaattgtgtcc

SEQ ID NO: 1897502 - DNA, 25 bp, Homo sapien
gcttccttcagttacaaatatgcac

SEQ ID NO: 1897503 - DNA, 25 bp, Homo sapien
gaacttactaccatttgaagacagg

SEQ ID NO: 1897504 - DNA, 25 bp, Homo sapien
tgacagaagtagaagtagaacttac

SEQ ID NO: 1897505 - DNA, 25 bp, Homo sapien
ggagttgagcgctgaaaaccacaca

SEQ ID NO: 1897506 - DNA, 25 bp, Homo sapien
gctgaactgtactcaatgtccaggg

SEQ ID NO: 1897507 - DNA, 25 bp, Homo sapien
tctcgtgctgagataaaaggcctct

SEQ ID NO: 1897508 - DNA, 25 bp, Homo sapien
caacagcctcttgcatttggtacca

SEQ ID NO: 1897509 - DNA, 25 bp, Homo sapien
tgtccagggcaactacagtactgaa

SEQ ID NO: 1897510 - DNA, 25 bp, Homo sapien
cagtttagtattcacctgtattgct

SEQ ID NO: 1897511 - DNA, 25 bp, Homo sapien
cctgtattgcttgtatacacaagga

SEQ ID NO: 1897512 - DNA, 25 bp, Homo sapien
cacctgtattgcttgtatacacaag

SEQ ID NO: 1897513 - DNA, 25 bp, Homo sapien
aataacagtttagtattcacctgta

SEQ ID NO: 1897514 - DNA, 25 bp, Homo sapien
tgataacttcttagatcttgcttat

SEQ ID NO: 1897515 - DNA, 25 bp, Homo sapien
aatagttttgataacttcttagatc

SEQ ID NO: 1897516 - DNA, 25 bp, Homo sapien
agaatagttttgataacttcttaga

SEQ ID NO: 1897517 - DNA, 25 bp, Homo sapien
gttttgataacttcttagatcttgc

SEQ ID NO: 1897518 - DNA, 25 bp, Homo sapien
ccaggataattaggacacttgttga

SEQ ID NO: 1897519 - DNA, 25 bp, Homo sapien
tagagcaaaaactacaatacagtca

SEQ ID NO: 1897520 - DNA, 25 bp, Homo sapien
aaagtgttgaaaggcggcaggcatt

SEQ ID NO: 1897521 - DNA, 25 bp, Homo sapien
gcaggcattctagaacgggattgta

SEQ ID NO: 1897522 - DNA, 25 bp, Homo sapien
attaaatagagcagctgccacttac

SEQ ID NO: 1897523 - DNA, 25 bp, Homo sapien
cattaaatagagcagctgccactta

SEQ ID NO: 1897524 - DNA, 25 bp, Homo sapien
ggcatcaaagcccttacacggaact

SEQ ID NO: 1897525 - DNA, 25 bp, Homo sapien
aatggacgctgtttgcacatagcag

SEQ ID NO: 1897526 - DNA, 25 bp, Homo sapien
tatttcaaaatgtaacggtcccaga

SEQ ID NO: 1897527 - DNA, 25 bp, Homo sapien
gagcatgcatatacagccacagttc

SEQ ID NO: 1897528 - DNA, 25 bp, Homo sapien
cattgctggtagtaagtagaaaggc

SEQ ID NO: 1897529 - DNA, 25 bp, Homo sapien
tgacctctagttgttttttgcattg

SEQ ID NO: 1897530 - DNA, 25 bp, Homo sapien
gctgctgacttctgatgacctctag

SEQ ID NO: 1897531 - DNA, 25 bp, Homo sapien
gctttttatgttcctgtaccaggcg

SEQ ID NO: 1897532 - DNA, 25 bp, Homo sapien
ggtccagttctgcaactagttcttg

SEQ ID NO: 1897533 - DNA, 25 bp, Homo sapien
catcctggtccagttctgcaactag

SEQ ID NO: 1897534 - DNA, 25 bp, Homo sapien
tcatcctggtccagttctgcaacta

SEQ ID NO: 1897535 - DNA, 25 bp, Homo sapien
cctggtccagttctgcaactagttc

SEQ ID NO: 1897536 - DNA, 25 bp, Homo sapien
attatgggctgggatggaactctca

SEQ ID NO: 1897537 - DNA, 25 bp, Homo sapien
cagagagtggtaagctaatagcaaa

SEQ ID NO: 1897538 - DNA, 25 bp, Homo sapien
taagtattcccgaaaaagatgcatc

SEQ ID NO: 1897539 - DNA, 25 bp, Homo sapien
catttcctaaagtgaggttactgga

SEQ ID NO: 1897540 - DNA, 25 bp, Homo sapien
ttctctgtaataacaatgcaatttc

SEQ ID NO: 1897541 - DNA, 25 bp, Homo sapien
ctgtaataacaatgcaatttctgtt

SEQ ID NO: 1897542 - DNA, 25 bp, Homo sapien
tgaactttcatatattcttgtgcca

SEQ ID NO: 1897543 - DNA, 25 bp, Homo sapien
gcaatttctgtttgaactttcatat

SEQ ID NO: 1897544 - DNA, 25 bp, Homo sapien
gttcaaacactgccatagattcttt

SEQ ID NO: 1897545 - DNA, 25 bp, Homo sapien
ttggagtttgggcacggtgctagag

SEQ ID NO: 1897546 - DNA, 25 bp, Homo sapien
tggagtttgggcacggtgctagagg

SEQ ID NO: 1897547 - DNA, 25 bp, Homo sapien
gccattgggatggagttatctgatc

SEQ ID NO: 1897548 - DNA, 25 bp, Homo sapien
ctgtagttggtgatccagtgtaaga

SEQ ID NO: 1897549 - DNA, 25 bp, Homo sapien
gatggagttatctgatccattggta

SEQ ID NO: 1897550 - DNA, 25 bp, Homo sapien
cagtgtaagataagccattgggatg

SEQ ID NO: 1897551 - DNA, 25 bp, Homo sapien
gaggaacaccatgcaaatcctggcg

SEQ ID NO: 1897552 - DNA, 25 bp, Homo sapien
ggtttcaaactacgctcccacataa

SEQ ID NO: 1897553 - DNA, 25 bp, Homo sapien
aatcctggcgtatattaagcactca

SEQ ID NO: 1897554 - DNA, 25 bp, Homo sapien
ttttaaagccactgagaacgtgctc

SEQ ID NO: 1897555 - DNA, 25 bp, Homo sapien
tttctgaggttggtcctgaggtagt

SEQ ID NO: 1897556 - DNA, 25 bp, Homo sapien
cctgaggtagtaatcattctgacac

SEQ ID NO: 1897557 - DNA, 25 bp, Homo sapien
tccatggatgacttcgagttggctt

SEQ ID NO: 1897558 - DNA, 25 bp, Homo sapien
tgacactgggactggatgacctact

SEQ ID NO: 1897559 - DNA, 25 bp, Homo sapien
tatgactttcattttgggtacccac

SEQ ID NO: 1897560 - DNA, 25 bp, Homo sapien
atatgactttcattttgggtaccca

SEQ ID NO: 1897561 - DNA, 25 bp, Homo sapien
ttaactttgaagaaaaactgatgaa

SEQ ID NO: 1897562 - DNA, 25 bp, Homo sapien
aaaactgatgaaatatgactttcat

SEQ ID NO: 1897563 - DNA, 25 bp, Homo sapien
catggagtgcctaacagtgtactgc

SEQ ID NO: 1897564 - DNA, 25 bp, Homo sapien
gccagaccttgtgtttgaggacatg

SEQ ID NO: 1897565 - DNA, 25 bp, Homo sapien
ggttgtttgtgtacaaggccagacc

SEQ ID NO: 1897566 - DNA, 25 bp, Homo sapien
tctacattatgtggtgattcttgcc

SEQ ID NO: 1897567 - DNA, 25 bp, Homo sapien
gggcagagaccatgcgtacttttta

SEQ ID NO: 1897568 - DNA, 25 bp, Homo sapien
tatattgtacttcccaggatctggg

SEQ ID NO: 1897569 - DNA, 25 bp, Homo sapien
tattagcactcagatacaagattgg

SEQ ID NO: 1897570 - DNA, 25 bp, Homo sapien
tgtgcccgaaattatagtagtctca

SEQ ID NO: 1897571 - DNA, 25 bp, Homo sapien
cttggatggatctacgtcttggctg

SEQ ID NO: 1897572 - DNA, 25 bp, Homo sapien
ggatggatctacgtcttggctgtcc

SEQ ID NO: 1897573 - DNA, 25 bp, Homo sapien
gtcttggatggatctacgtcttggc

SEQ ID NO: 1897574 - DNA, 25 bp, Homo sapien
aagtcttggatggatctacgtcttg

SEQ ID NO: 1897575 - DNA, 25 bp, Homo sapien
gatgacggcatctatttcaagggcc

SEQ ID NO: 1897576 - DNA, 25 bp, Homo sapien
tcttctaacgtgagagatcagctgt

SEQ ID NO: 1897577 - DNA, 25 bp, Homo sapien
tgctggcctacaacagagtatgtcc

SEQ ID NO: 1897578 - DNA, 25 bp, Homo sapien
gacagctagcaggttgtaagacaca

SEQ ID NO: 1897579 - DNA, 25 bp, Homo sapien
gcccaccgcaaatagaaagcaactt

SEQ ID NO: 1897580 - DNA, 25 bp, Homo sapien
cattgccagtgcatactaaatctgc

SEQ ID NO: 1897581 - DNA, 25 bp, Homo sapien
tgaaacctgcatatgctatcctgag

SEQ ID NO: 1897582 - DNA, 25 bp, Homo sapien
cagagcccctcttcaaaaaagctgc

SEQ ID NO: 1897583 - DNA, 25 bp, Homo sapien
gagaacttgccagatctagaaaaac

SEQ ID NO: 1897584 - DNA, 25 bp, Homo sapien
tatctgtgctaggtgagaacttgcc

SEQ ID NO: 1897585 - DNA, 25 bp, Homo sapien
gctaggtgagaacttgccagatcta

SEQ ID NO: 1897586 - DNA, 25 bp, Homo sapien
gacactatctgtgctaggtgagaac

SEQ ID NO: 1897587 - DNA, 25 bp, Homo sapien
caagccggtatgaaccatgtacaac

SEQ ID NO: 1897588 - DNA, 25 bp, Homo sapien
gctccagagcagaacaacccatctt

SEQ ID NO: 1897589 - DNA, 25 bp, Homo sapien
cactttataaaagcaatcaagccgg

SEQ ID NO: 1897590 - DNA, 25 bp, Homo sapien
taactactcacacaaaggctccaga

SEQ ID NO: 1897591 - DNA, 25 bp, Homo sapien
cacagttcagcggtatgtaagttta

SEQ ID NO: 1897592 - DNA, 25 bp, Homo sapien
cattatcttgtatagcgtgggctac

SEQ ID NO: 1897593 - DNA, 25 bp, Homo sapien
ggagaagactgcctggtacacatca

SEQ ID NO: 1897594 - DNA, 25 bp, Homo sapien
cgtgggctacgctgccatatataaa

SEQ ID NO: 1897595 - DNA, 25 bp, Homo sapien
gggtttagctcatgtgctcacttaa

SEQ ID NO: 1897596 - DNA, 25 bp, Homo sapien
tagatcagaggtatcttttcaagac

SEQ ID NO: 1897597 - DNA, 25 bp, Homo sapien
tctgttgggtgcaaaaaaggtctgg

SEQ ID NO: 1897598 - DNA, 25 bp, Homo sapien
tatcctcacttattgtagatcagag

SEQ ID NO: 1897599 - DNA, 25 bp, Homo sapien
ttttcatgtcttgtaaaaattggag

SEQ ID NO: 1897600 - DNA, 25 bp, Homo sapien
tttcatgtcttgtaaaaattggagc

SEQ ID NO: 1897601 - DNA, 25 bp, Homo sapien
tattccggttccacagctattagac

SEQ ID NO: 1897602 - DNA, 25 bp, Homo sapien
cagggatcattattccggttccaca

SEQ ID NO: 1897603 - DNA, 25 bp, Homo sapien
cagctattagaccaactcaggtggt

SEQ ID NO: 1897604 - DNA, 25 bp, Homo sapien
tccacagctattagaccaactcagg

SEQ ID NO: 1897605 - DNA, 25 bp, Homo sapien
ccagaatgttgccaaatgaagcagt

SEQ ID NO: 1897606 - DNA, 25 bp, Homo sapien
gatatgacgatctcagggacatcca

SEQ ID NO: 1897607 - DNA, 25 bp, Homo sapien
ctgatatgacgatctcagggacatc

SEQ ID NO: 1897608 - DNA, 25 bp, Homo sapien
atgaagcagttttacggtggccccg

SEQ ID NO: 1897609 - DNA, 25 bp, Homo sapien
tagaaacagtctacctaagtgaaat

SEQ ID NO: 1897610 - DNA, 25 bp, Homo sapien
gacaaagctgcagggtaatgaggaa

SEQ ID NO: 1897611 - DNA, 25 bp, Homo sapien
cacaaacagtaacacggaaaatgat

SEQ ID NO: 1897612 - DNA, 25 bp, Homo sapien
tcagaaaaggcgagattaaagagca

SEQ ID NO: 1897613 - DNA, 25 bp, Homo sapien
ccggtgagtagggttcatctgacac

SEQ ID NO: 1897614 - DNA, 25 bp, Homo sapien
gatctatcctgaacaacatccctga

SEQ ID NO: 1897615 - DNA, 25 bp, Homo sapien
gaaatacttgtgactcatggagact

SEQ ID NO: 1897616 - DNA, 25 bp, Homo sapien
tgaaaagggttcctcaaagcatgag

SEQ ID NO: 1897617 - DNA, 25 bp, Homo sapien
tgtggttgcggcgatcctagcttct

SEQ ID NO: 1897618 - DNA, 25 bp, Homo sapien
agacatgtcagcactcatcctcttg

SEQ ID NO: 1897619 - DNA, 25 bp, Homo sapien
cctagcttctatttcagacatgtca

SEQ ID NO: 1897620 - DNA, 25 bp, Homo sapien
tcccacgggaggctcccaagcttaa

SEQ ID NO: 1897621 - DNA, 25 bp, Homo sapien
cagttttacttgtaataacataaca

SEQ ID NO: 1897622 - DNA, 25 bp, Homo sapien
gttactcgtatttgtagaagcaatg

SEQ ID NO: 1897623 - DNA, 25 bp, Homo sapien
gtgtcacttttgttactcgtatttg

SEQ ID NO: 1897624 - DNA, 25 bp, Homo sapien
caggaacttgctccatattagtgtc

SEQ ID NO: 1897625 - DNA, 25 bp, Homo sapien
caattttgattctaagcgcttaata

SEQ ID NO: 1897626 - DNA, 25 bp, Homo sapien
tgtccttcatctgaatactgacaag

SEQ ID NO: 1897627 - DNA, 25 bp, Homo sapien
ctgtactggtggcagagttgctctg

SEQ ID NO: 1897628 - DNA, 25 bp, Homo sapien
tgtactggtggcagagttgctctgt

SEQ ID NO: 1897629 - DNA, 25 bp, Homo sapien
atactgacaaggatactgtaatggc

SEQ ID NO: 1897630 - DNA, 25 bp, Homo sapien
gtgtctgagaatgcaacctattgcc

SEQ ID NO: 1897631 - DNA, 25 bp, Homo sapien
taaaggcgcttgattcacagactag

SEQ ID NO: 1897632 - DNA, 25 bp, Homo sapien
acattacaaatgaggcaacaggccc

SEQ ID NO: 1897633 - DNA, 25 bp, Homo sapien
gaatgtctttctacaaactggaggc

SEQ ID NO: 1897634 - DNA, 25 bp, Homo sapien
ctctcaatgggcttaggtaaatttt

SEQ ID NO: 1897635 - DNA, 25 bp, Homo sapien
tttagaccaacaacgagtcatcagg

SEQ ID NO: 1897636 - DNA, 25 bp, Homo sapien
tcctccattgaagggcgctgggaag

SEQ ID NO: 1897637 - DNA, 25 bp, Homo sapien
ccgcatcaagtgagtcattattttc

SEQ ID NO: 1897638 - DNA, 25 bp, Homo sapien
caatctcatcaaagggtttccgacg

SEQ ID NO: 1897639 - DNA, 25 bp, Homo sapien
ttcccaaagaataataccccagctg

SEQ ID NO: 1897640 - DNA, 25 bp, Homo sapien
acatgattcggaaagctgggccacc

SEQ ID NO: 1897641 - DNA, 25 bp, Homo sapien
gtttccgacgcgttatcacttccca

SEQ ID NO: 1897642 - DNA, 25 bp, Homo sapien
tccaagcagcactccccttgttatt

SEQ ID NO: 1897643 - DNA, 25 bp, Homo sapien
gttattggtcatgtgtgtctgaatg

SEQ ID NO: 1897644 - DNA, 25 bp, Homo sapien
gtcacaggctgtaccaaaatcacaa

SEQ ID NO: 1897645 - DNA, 25 bp, Homo sapien
gaatgtcacaggctgtaccaaaatc

SEQ ID NO: 1897646 - DNA, 25 bp, Homo sapien
taaaagcctaatagttcagagaaat

SEQ ID NO: 1897647 - DNA, 25 bp, Homo sapien
acaaggccaacattttattctacaa

SEQ ID NO: 1897648 - DNA, 25 bp, Homo sapien
tatcattcaacttctgtgaaatgac

SEQ ID NO: 1897649 - DNA, 25 bp, Homo sapien
gaaatgactaatttacttggtcact

SEQ ID NO: 1897650 - DNA, 25 bp, Homo sapien
ggtccctgtgaattagcgctttggg

SEQ ID NO: 1897651 - DNA, 25 bp, Homo sapien
cgctttgggttgcatgctgtgaaga

SEQ ID NO: 1897652 - DNA, 25 bp, Homo sapien
ccaactcattgcgtgggcagcagta

SEQ ID NO: 1897653 - DNA, 25 bp, Homo sapien
tgaagataagccactccttgggaac

SEQ ID NO: 1897654 - DNA, 25 bp, Homo sapien
attatataaagagcccccttcagca

SEQ ID NO: 1897655 - DNA, 25 bp, Homo sapien
cattatataaagagcccccttcagc

SEQ ID NO: 1897656 - DNA, 25 bp, Homo sapien
ataaagagcccccttcagcatattc

SEQ ID NO: 1897657 - DNA, 25 bp, Homo sapien
aagagcccccttcagcatattccat

SEQ ID NO: 1897658 - DNA, 25 bp, Homo sapien
ggatggttcacacgggataactgcc

SEQ ID NO: 1897659 - DNA, 25 bp, Homo sapien
tggattcaagcaggctccataaagc

SEQ ID NO: 1897660 - DNA, 25 bp, Homo sapien
taggatggttcacacgggataactg

SEQ ID NO: 1897661 - DNA, 25 bp, Homo sapien
ggttcacacgggataactgccgaag

SEQ ID NO: 1897662 - DNA, 25 bp, Homo sapien
cacttagctttgcaaacaactccaa

SEQ ID NO: 1897663 - DNA, 25 bp, Homo sapien
acaataaacgctttcctctcagatt

SEQ ID NO: 1897664 - DNA, 25 bp, Homo sapien
caataaacgctttcctctcagattc

SEQ ID NO: 1897665 - DNA, 25 bp, Homo sapien
tttgctctccacttagctttgcaaa

SEQ ID NO: 1897666 - DNA, 25 bp, Homo sapien
tataaagccccatgtcgggaagtag

SEQ ID NO: 1897667 - DNA, 25 bp, Homo sapien
tctgatgccaggtagtctaacacgg

SEQ ID NO: 1897668 - DNA, 25 bp, Homo sapien
tatgcagcaggcacttaactaatgc

SEQ ID NO: 1897669 - DNA, 25 bp, Homo sapien
taaactgcgatgtgtatgaccactc

SEQ ID NO: 1897670 - DNA, 25 bp, Homo sapien
tttgaggaacgtccatgcagggatt

SEQ ID NO: 1897671 - DNA, 25 bp, Homo sapien
tgtaattcacaagtgccacctagtg

SEQ ID NO: 1897672 - DNA, 25 bp, Homo sapien
ccacctagtgatgagagtagagctg

SEQ ID NO: 1897673 - DNA, 25 bp, Homo sapien
ctaagatgaatagcaagcaggtcct

SEQ ID NO: 1897674 - DNA, 25 bp, Homo sapien
tgaggtcagcattatgggtctccct

SEQ ID NO: 1897675 - DNA, 25 bp, Homo sapien
tagtaaagacctaccatacgtggct

SEQ ID NO: 1897676 - DNA, 25 bp, Homo sapien
taaactgtggcagagtggaactgcc

SEQ ID NO: 1897677 - DNA, 25 bp, Homo sapien
tatgtactcagtttgtttagaccac

SEQ ID NO: 1897678 - DNA, 25 bp, Homo sapien
taaagtagacataactcgttgacaa

SEQ ID NO: 1897679 - DNA, 25 bp, Homo sapien
tcatggactatataacgcaaagtgc

SEQ ID NO: 1897680 - DNA, 25 bp, Homo sapien
gaaatcattcgttatctcttcagaa

SEQ ID NO: 1897681 - DNA, 25 bp, Homo sapien
ggttttctgatagcgatttctagtc

SEQ ID NO: 1897682 - DNA, 25 bp, Homo sapien
ttcgatcatctcaccggccgaagac

SEQ ID NO: 1897683 - DNA, 25 bp, Homo sapien
cttcaaagttgaggacctgggaagg

SEQ ID NO: 1897684 - DNA, 25 bp, Homo sapien
acctcgatctccttgtagtcgatct

SEQ ID NO: 1897685 - DNA, 25 bp, Homo sapien
gggcttcgatcatctcaccggccga

SEQ ID NO: 1897686 - DNA, 25 bp, Homo sapien
cggacaatccgggtgagacccgcgc

SEQ ID NO: 1897687 - DNA, 25 bp, Homo sapien
ggacaatccgggtgagacccgcgcc

SEQ ID NO: 1897688 - DNA, 25 bp, Homo sapien
tgccacccggacaatccgggtgaga

SEQ ID NO: 1897689 - DNA, 25 bp, Homo sapien
cggtgccacccggacaatccgggtg

SEQ ID NO: 1897690 - DNA, 25 bp, Homo sapien
cctccggaccgaccctcagcctgga

SEQ ID NO: 1897691 - DNA, 25 bp, Homo sapien
ccgggctgaaatcggaaacaggagg

SEQ ID NO: 1897692 - DNA, 25 bp, Homo sapien
ctactacccggcgatccgtggcggg

SEQ ID NO: 1897693 - DNA, 25 bp, Homo sapien
ggccacagccgtgtccggctctggc

SEQ ID NO: 1897694 - DNA, 25 bp, Homo sapien
gagacctttattacagggcctcagc

SEQ ID NO: 1897695 - DNA, 25 bp, Homo sapien
ggagtaagctaagaagcaaacttgg

SEQ ID NO: 1897696 - DNA, 25 bp, Homo sapien
aaatttcgcgagacctttattacag

SEQ ID NO: 1897697 - DNA, 25 bp, Homo sapien
gacctctagaacaaatttcgcgaga

SEQ ID NO: 1897698 - DNA, 25 bp, Homo sapien
gtctatatccgatttccttttaaca

SEQ ID NO: 1897699 - DNA, 25 bp, Homo sapien
caggtctatatccgatttcctttta

SEQ ID NO: 1897700 - DNA, 25 bp, Homo sapien
tctatatccgatttccttttaacac

SEQ ID NO: 1897701 - DNA, 25 bp, Homo sapien
tgcaggtctatatccgatttccttt

SEQ ID NO: 1897702 - DNA, 25 bp, Homo sapien
gggttcacagctcagcttagtcttg

SEQ ID NO: 1897703 - DNA, 25 bp, Homo sapien
cgcccagcctggtagccaaatctaa

SEQ ID NO: 1897704 - DNA, 25 bp, Homo sapien
cagacttgtcgaaattttctgtggg

SEQ ID NO: 1897705 - DNA, 25 bp, Homo sapien
tgtcctctaaatatgctcagacttg

SEQ ID NO: 1897706 - DNA, 25 bp, Homo sapien
tcatatacgatttcgtttttctctg

SEQ ID NO: 1897707 - DNA, 25 bp, Homo sapien
catatacgatttcgtttttctctgt

SEQ ID NO: 1897708 - DNA, 25 bp, Homo sapien
atatacgatttcgtttttctctgta

SEQ ID NO: 1897709 - DNA, 25 bp, Homo sapien
tatacgatttcgtttttctctgtac

SEQ ID NO: 1897710 - DNA, 25 bp, Homo sapien
tcagaggtcccacgtagcagaaatt

SEQ ID NO: 1897711 - DNA, 25 bp, Homo sapien
tggtgacaaagaagccacggtggct

SEQ ID NO: 1897712 - DNA, 25 bp, Homo sapien
gaagccgtggtctcagaggtcccac

SEQ ID NO: 1897713 - DNA, 25 bp, Homo sapien
ccctcgcatggatttctgggcctgg

SEQ ID NO: 1897714 - DNA, 25 bp, Homo sapien
ctcagggttgactttaataggtcgc

SEQ ID NO: 1897715 - DNA, 25 bp, Homo sapien
cattgttgctgcctagctcagggtt

SEQ ID NO: 1897716 - DNA, 25 bp, Homo sapien
taagggagctgtcaatgctaatccc

SEQ ID NO: 1897717 - DNA, 25 bp, Homo sapien
gaaacatcggtgacttcatccagac

SEQ ID NO: 1897718 - DNA, 25 bp, Homo sapien
tgcctttgctgtatcaccaatctga

SEQ ID NO: 1897719 - DNA, 25 bp, Homo sapien
tcaagggatggtcgtcctgctttcc

SEQ ID NO: 1897720 - DNA, 25 bp, Homo sapien
tctccatcttgtggaatagagtcca

SEQ ID NO: 1897721 - DNA, 25 bp, Homo sapien
tagagtccagattcactgcctttgc

SEQ ID NO: 1897722 - DNA, 25 bp, Homo sapien
tcattaaactggcatagtcaatcat

SEQ ID NO: 1897723 - DNA, 25 bp, Homo sapien
ttcattaaactggcatagtcaatca

SEQ ID NO: 1897724 - DNA, 25 bp, Homo sapien
aattgtagggtcagcgataacaggc

SEQ ID NO: 1897725 - DNA, 25 bp, Homo sapien
tatcccgtgttgctgtctggtgctc

SEQ ID NO: 1897726 - DNA, 25 bp, Homo sapien
gataacaggcaacaacatgctcatg

SEQ ID NO: 1897727 - DNA, 25 bp, Homo sapien
tgtggctatctcctctagcgcagag

SEQ ID NO: 1897728 - DNA, 25 bp, Homo sapien
tggcacccttgtggtcccctgttgg

SEQ ID NO: 1897729 - DNA, 25 bp, Homo sapien
tagagcttgttgtggagttccctga

SEQ ID NO: 1897730 - DNA, 25 bp, Homo sapien
tagaactccacttctgctgcccatg

SEQ ID NO: 1897731 - DNA, 25 bp, Homo sapien
ggctctccttgagctctagagcttg

SEQ ID NO: 1897732 - DNA, 25 bp, Homo sapien
gctctggagactgtgagtggctgct

SEQ ID NO: 1897733 - DNA, 25 bp, Homo sapien
cagtggccaccctgcaccaggtgcc

SEQ ID NO: 1897734 - DNA, 25 bp, Homo sapien
gtggccaccctgcaccaggtgccag

SEQ ID NO: 1897735 - DNA, 25 bp, Homo sapien
cagctctggagactgtgagtggctg

SEQ ID NO: 1897736 - DNA, 25 bp, Homo sapien
tatacaccggttgctttacttatgt

SEQ ID NO: 1897737 - DNA, 25 bp, Homo sapien
tacttatgtttgtgtgggtcacttc

SEQ ID NO: 1897738 - DNA, 25 bp, Homo sapien
tgtttgtgtgggtcacttcagtttt

SEQ ID NO: 1897739 - DNA, 25 bp, Homo sapien
caccggttgctttacttatgtttgt

SEQ ID NO: 1897740 - DNA, 25 bp, Homo sapien
tccattgccatcacatatatttcat

SEQ ID NO: 1897741 - DNA, 25 bp, Homo sapien
ttccattgccatcacatatatttca

SEQ ID NO: 1897742 - DNA, 25 bp, Homo sapien
ttaagctccaaaatcttccattgcc

SEQ ID NO: 1897743 - DNA, 25 bp, Homo sapien
agctccaaaatcttccattgccatc

SEQ ID NO: 1897744 - DNA, 25 bp, Homo sapien
tcctaacagccttcatggacatttg

SEQ ID NO: 1897745 - DNA, 25 bp, Homo sapien
tgaacatacaaattgtgccgcttga

SEQ ID NO: 1897746 - DNA, 25 bp, Homo sapien
ttcatggacatttgaaggctctgca

SEQ ID NO: 1897747 - DNA, 25 bp, Homo sapien
cagtgtgcacacgaatgaacataca

SEQ ID NO: 1897748 - DNA, 25 bp, Homo sapien
caggccttttcctagacgtatttgt

SEQ ID NO: 1897749 - DNA, 25 bp, Homo sapien
ggaaatccggacataaagatctcag

SEQ ID NO: 1897750 - DNA, 25 bp, Homo sapien
gatctcagaaacaaagaccttcgcc

SEQ ID NO: 1897751 - DNA, 25 bp, Homo sapien
gaccttcgcctgactgtctgatttc

SEQ ID NO: 1897752 - DNA, 25 bp, Homo sapien
gggaaggaggaggagaacacaccac

SEQ ID NO: 1897753 - DNA, 25 bp, Homo sapien
agagggaaggaggaggagaacacac

SEQ ID NO: 1897754 - DNA, 25 bp, Homo sapien
ctccagaaaacagtagagggaagga

SEQ ID NO: 1897755 - DNA, 25 bp, Homo sapien
tccagaaaacagtagagggaaggag

SEQ ID NO: 1897756 - DNA, 25 bp, Homo sapien
ctattcctgctgtcattagcttgat

SEQ ID NO: 1897757 - DNA, 25 bp, Homo sapien
attcctgctgtcattagcttgatgc

SEQ ID NO: 1897758 - DNA, 25 bp, Homo sapien
cattagcttgatgcaggcttccatt

SEQ ID NO: 1897759 - DNA, 25 bp, Homo sapien
gatgcaggcttccattgctttctga

SEQ ID NO: 1897760 - DNA, 25 bp, Homo sapien
gtcttgccttctccgggctacaata

SEQ ID NO: 1897761 - DNA, 25 bp, Homo sapien
cttgccttctccgggctacaatatg

SEQ ID NO: 1897762 - DNA, 25 bp, Homo sapien
tcttgccttctccgggctacaatat

SEQ ID NO: 1897763 - DNA, 25 bp, Homo sapien
agtcttgccttctccgggctacaat

SEQ ID NO: 1897764 - DNA, 25 bp, Homo sapien
aggatgtctgcaatgagcatcctca

SEQ ID NO: 1897765 - DNA, 25 bp, Homo sapien
tcatagctgctacttccatccatag

SEQ ID NO: 1897766 - DNA, 25 bp, Homo sapien
tctgcaatgagcatcctcatagctg

SEQ ID NO: 1897767 - DNA, 25 bp, Homo sapien
catagctgctacttccatccatagg

SEQ ID NO: 1897768 - DNA, 25 bp, Homo sapien
aaaacgatttgctcctcgaaaagat

SEQ ID NO: 1897769 - DNA, 25 bp, Homo sapien
aggtattcagtcatagcctttgaaa

SEQ ID NO: 1897770 - DNA, 25 bp, Homo sapien
tgttgggcggttcttctctactcct

SEQ ID NO: 1897771 - DNA, 25 bp, Homo sapien
ctcttgaaaaacgatttgctcctcg

SEQ ID NO: 1897772 - DNA, 25 bp, Homo sapien
tgtttcttgctgctcttctatattg

SEQ ID NO: 1897773 - DNA, 25 bp, Homo sapien
gtttcttgctgctcttctatattgg

SEQ ID NO: 1897774 - DNA, 25 bp, Homo sapien
ctgtttcttgctgctcttctatatt

SEQ ID NO: 1897775 - DNA, 25 bp, Homo sapien
actgtttcttgctgctcttctatat

SEQ ID NO: 1897776 - DNA, 25 bp, Homo sapien
gctttgccagtaacaagacttccaa

SEQ ID NO: 1897777 - DNA, 25 bp, Homo sapien
tccgaagttaatagagtagcatggc

SEQ ID NO: 1897778 - DNA, 25 bp, Homo sapien
gaacagagtatattcagctttccga

SEQ ID NO: 1897779 - DNA, 25 bp, Homo sapien
cctcaggtgaagtgcttagcttcgc

SEQ ID NO: 1897780 - DNA, 25 bp, Homo sapien
gaaggattgagccacacatgacagt

SEQ ID NO: 1897781 - DNA, 25 bp, Homo sapien
tatatatggctaagaggactcacct

SEQ ID NO: 1897782 - DNA, 25 bp, Homo sapien
tcatgggcttgatataggcatagcc

SEQ ID NO: 1897783 - DNA, 25 bp, Homo sapien
taatcttttcgagtggtctctgtcc

SEQ ID NO: 1897784 - DNA, 25 bp, Homo sapien
aaaagtgcctctcagccaacaaatg

SEQ ID NO: 1897785 - DNA, 25 bp, Homo sapien
ttttttaggcacctgaggaatcgtc

SEQ ID NO: 1897786 - DNA, 25 bp, Homo sapien
tcctatatgcatggagagactgcta

SEQ ID NO: 1897787 - DNA, 25 bp, Homo sapien
tttcttctggaagcgtcggaactgt

SEQ ID NO: 1897788 - DNA, 25 bp, Homo sapien
tccaggaggcgtgtgtgcaccccac

SEQ ID NO: 1897789 - DNA, 25 bp, Homo sapien
tgcaccccacttccgaccaggagag

SEQ ID NO: 1897790 - DNA, 25 bp, Homo sapien
ctccaggaggcgtgtgtgcacccca

SEQ ID NO: 1897791 - DNA, 25 bp, Homo sapien
ccccacttccgaccaggagagactg

SEQ ID NO: 1897792 - DNA, 25 bp, Homo sapien
tagtgcttacccgaccaagttccat

SEQ ID NO: 1897793 - DNA, 25 bp, Homo sapien
ggaccttctgaaggagacacactta

SEQ ID NO: 1897794 - DNA, 25 bp, Homo sapien
gacacacttaacagggacgaggtct

SEQ ID NO: 1897795 - DNA, 25 bp, Homo sapien
cttcagagggagcaatttcagacat

SEQ ID NO: 1897796 - DNA, 25 bp, Homo sapien
aagcagctgaatagaatctctaagc

SEQ ID NO: 1897797 - DNA, 25 bp, Homo sapien
tccaaagctggttcactgaatggcg

SEQ ID NO: 1897798 - DNA, 25 bp, Homo sapien
ccctccttggttctttggatgaagg

SEQ ID NO: 1897799 - DNA, 25 bp, Homo sapien
tgggagcgacatctgttccaaagct

SEQ ID NO: 1897800 - DNA, 25 bp, Homo sapien
gagctcttaagtggctggaataatc

SEQ ID NO: 1897801 - DNA, 25 bp, Homo sapien
cacagttttttggagacactcacag

SEQ ID NO: 1897802 - DNA, 25 bp, Homo sapien
gcaatagggaagctaagagactctt

SEQ ID NO: 1897803 - DNA, 25 bp, Homo sapien
ttggtggatgccgtgccccagctga

SEQ ID NO: 1897804 - DNA, 25 bp, Homo sapien
tggagcagtgccaagatcagtggtc

SEQ ID NO: 1897805 - DNA, 25 bp, Homo sapien
gatctgggagtgaggtggagcagtg

SEQ ID NO: 1897806 - DNA, 25 bp, Homo sapien
aatgtgtacacagcgtagtgggatc

SEQ ID NO: 1897807 - DNA, 25 bp, Homo sapien
agcagtgccaagatcagtggtcccc

SEQ ID NO: 1897808 - DNA, 25 bp, Homo sapien
accactggtgatgtgatttaattct

SEQ ID NO: 1897809 - DNA, 25 bp, Homo sapien
gagaataaatagtggtgtcctagaa

SEQ ID NO: 1897810 - DNA, 25 bp, Homo sapien
ggtaacctaagacccatggcttcat

SEQ ID NO: 1897811 - DNA, 25 bp, Homo sapien
gaagcaagacggttgaaagccactg

SEQ ID NO: 1897812 - DNA, 25 bp, Homo sapien
cagacaagggatagaggattgaaga

SEQ ID NO: 1897813 - DNA, 25 bp, Homo sapien
aagcatggaaaatgaacccttaatt

SEQ ID NO: 1897814 - DNA, 25 bp, Homo sapien
gatgaggttataccaataacaacag

SEQ ID NO: 1897815 - DNA, 25 bp, Homo sapien
taaatgcgacaggatcttagatctc

SEQ ID NO: 1897816 - DNA, 25 bp, Homo sapien
taaatcaaaatccaccggagactgt

SEQ ID NO: 1897817 - DNA, 25 bp, Homo sapien
cagtgaacatcataacgagagaaac

SEQ ID NO: 1897818 - DNA, 25 bp, Homo sapien
aagttagctctaccttcacggaagg

SEQ ID NO: 1897819 - DNA, 25 bp, Homo sapien
cggagactgttctgtatagccatga

SEQ ID NO: 1897820 - DNA, 25 bp, Homo sapien
ttggaaccagaagattccagaagct

SEQ ID NO: 1897821 - DNA, 25 bp, Homo sapien
tgaagagatatttccaggtcatcct

SEQ ID NO: 1897822 - DNA, 25 bp, Homo sapien
ctgaagagatatttccaggtcatcc

SEQ ID NO: 1897823 - DNA, 25 bp, Homo sapien
tttgaatgttgagtcctgtctttat

SEQ ID NO: 1897824 - DNA, 25 bp, Homo sapien
tgtctttatctttagggttcttata

SEQ ID NO: 1897825 - DNA, 25 bp, Homo sapien
ctttatctttagggttcttataatg

SEQ ID NO: 1897826 - DNA, 25 bp, Homo sapien
aggagttgagagcacccctggcaga

SEQ ID NO: 1897827 - DNA, 25 bp, Homo sapien
tcaggagttgagagcacccctggca

SEQ ID NO: 1897828 - DNA, 25 bp, Homo sapien
caggagttgagagcacccctggcag

SEQ ID NO: 1897829 - DNA, 25 bp, Homo sapien
tctctgcatcgaattgcgctggctt

SEQ ID NO: 1897830 - DNA, 25 bp, Homo sapien
ctgcatcgaattgcgctggcttgat

SEQ ID NO: 1897831 - DNA, 25 bp, Homo sapien
tgctctctgcatcgaattgcgctgg

SEQ ID NO: 1897832 - DNA, 25 bp, Homo sapien
gtcctgctctctgcatcgaattgcg

SEQ ID NO: 1897833 - DNA, 25 bp, Homo sapien
ctcctccggctctgacatgcctgtg

SEQ ID NO: 1897834 - DNA, 25 bp, Homo sapien
catcccacaggctggctaaaacggt

SEQ ID NO: 1897835 - DNA, 25 bp, Homo sapien
ctggtgaggaaaaagggccacatcc

SEQ ID NO: 1897836 - DNA, 25 bp, Homo sapien
gtcactaatcagactgaagacagca

SEQ ID NO: 1897837 - DNA, 25 bp, Homo sapien
ggtgaccagatagtgaagacttcca

SEQ ID NO: 1897838 - DNA, 25 bp, Homo sapien
ggtgccatccgctttgcctttattt

SEQ ID NO: 1897839 - DNA, 25 bp, Homo sapien
tcctgttcataactccagggtaagc

SEQ ID NO: 1897840 - DNA, 25 bp, Homo sapien
gggatttatgcagtttagaccagaa

SEQ ID NO: 1897841 - DNA, 25 bp, Homo sapien
ctgctagcttaggtgccatccgctt

SEQ ID NO: 1897842 - DNA, 25 bp, Homo sapien
caaaccataaaacgtgctttctcac

SEQ ID NO: 1897843 - DNA, 25 bp, Homo sapien
gcaaaccataaaacgtgctttctca

SEQ ID NO: 1897844 - DNA, 25 bp, Homo sapien
cgtggaaggaacagcgccacagaca

SEQ ID NO: 1897845 - DNA, 25 bp, Homo sapien
cagcgccacagacagtgcatctggg

SEQ ID NO: 1897846 - DNA, 25 bp, Homo sapien
ccaatttctctaatggcgagatcta

SEQ ID NO: 1897847 - DNA, 25 bp, Homo sapien
attgtgtgctcactcaattcagagg

SEQ ID NO: 1897848 - DNA, 25 bp, Homo sapien
tgttctgagaagtcatcttgactag

SEQ ID NO: 1897849 - DNA, 25 bp, Homo sapien
gagaagtcatcttgactagttccat

SEQ ID NO: 1897850 - DNA, 25 bp, Homo sapien
gttccattaagccatgctgccgtca

SEQ ID NO: 1897851 - DNA, 25 bp, Homo sapien
catcttgactagttccattaagcca

SEQ ID NO: 1897852 - DNA, 25 bp, Homo sapien
catgttatttcagttggagaaagtg

SEQ ID NO: 1897853 - DNA, 25 bp, Homo sapien
agttggagaaagtgctaataattca

SEQ ID NO: 1897854 - DNA, 25 bp, Homo sapien
gagaaagtgctaataattcagggat

SEQ ID NO: 1897855 - DNA, 25 bp, Homo sapien
tcatgttatttcagttggagaaagt

SEQ ID NO: 1897856 - DNA, 25 bp, Homo sapien
tatttgggtccatcttcatctccag

SEQ ID NO: 1897857 - DNA, 25 bp, Homo sapien
tcatctccagtcttaacagctgcag

SEQ ID NO: 1897858 - DNA, 25 bp, Homo sapien
gttcagattatcaaaatctcctatc

SEQ ID NO: 1897859 - DNA, 25 bp, Homo sapien
ctgcagaacccagaatgttcagatt

SEQ ID NO: 1897860 - DNA, 25 bp, Homo sapien
tgctttctttgatcccagggccaca

SEQ ID NO: 1897861 - DNA, 25 bp, Homo sapien
cagcagctgcaatgtagagggtctg

SEQ ID NO: 1897862 - DNA, 25 bp, Homo sapien
gctgcaatgtagagggtctgctttt

SEQ ID NO: 1897863 - DNA, 25 bp, Homo sapien
caatgtagagggtctgcttttgcaa

SEQ ID NO: 1897864 - DNA, 25 bp, Homo sapien
gaaattgattttcgatttgcaccag

SEQ ID NO: 1897865 - DNA, 25 bp, Homo sapien
caattctgtcagtattagtagcttc

SEQ ID NO: 1897866 - DNA, 25 bp, Homo sapien
tactgcaatttaccctgacattcag

SEQ ID NO: 1897867 - DNA, 25 bp, Homo sapien
tagtagcttcgatgaatactgcaat

SEQ ID NO: 1897868 - DNA, 25 bp, Homo sapien
taggctcagcagttcacagtgtctg

SEQ ID NO: 1897869 - DNA, 25 bp, Homo sapien
tgtgtccctgctcggtaggctcagc

SEQ ID NO: 1897870 - DNA, 25 bp, Homo sapien
actacacatttgtctggagtgggtg

SEQ ID NO: 1897871 - DNA, 25 bp, Homo sapien
tgctgctcgacttttggctgttggg

SEQ ID NO: 1897872 - DNA, 25 bp, Homo sapien
gattgaaaatgcaagctcattctcc

SEQ ID NO: 1897873 - DNA, 25 bp, Homo sapien
taataatttgctggcaccccatcct

SEQ ID NO: 1897874 - DNA, 25 bp, Homo sapien
aactgtgttagatgattagaccgcc

SEQ ID NO: 1897875 - DNA, 25 bp, Homo sapien
tgaaaatgcatacctactcctggct

SEQ ID NO: 1897876 - DNA, 25 bp, Homo sapien
aaactgcttgtctcattctgcctca

SEQ ID NO: 1897877 - DNA, 25 bp, Homo sapien
caaactgcttgtctcattctgcctc

SEQ ID NO: 1897878 - DNA, 25 bp, Homo sapien
atcctctccagtatcactatcagca

SEQ ID NO: 1897879 - DNA, 25 bp, Homo sapien
tccactgctctaaccacatttggaa

SEQ ID NO: 1897880 - DNA, 25 bp, Homo sapien
agccactgagagaaatgtgggcttg

SEQ ID NO: 1897881 - DNA, 25 bp, Homo sapien
tcagcgcttgcagcagtccactgct

SEQ ID NO: 1897882 - DNA, 25 bp, Homo sapien
ccactgagagaaatgtgggcttgac

SEQ ID NO: 1897883 - DNA, 25 bp, Homo sapien
tcttcctgcactggatggcaactgg

SEQ ID NO: 1897884 - DNA, 25 bp, Homo sapien
ggcaactggcttattggtatgcaga

SEQ ID NO: 1897885 - DNA, 25 bp, Homo sapien
gtagttctaatgagtccgatcttcc

SEQ ID NO: 1897886 - DNA, 25 bp, Homo sapien
ttggtatgcagatgtttcttgggca

SEQ ID NO: 1897887 - DNA, 25 bp, Homo sapien
aactcctagtagatcttcagactga

SEQ ID NO: 1897888 - DNA, 25 bp, Homo sapien
ccagagagccaactcctagtagatc

SEQ ID NO: 1897889 - DNA, 25 bp, Homo sapien
gagaggcctactggaaagccctaaa

SEQ ID NO: 1897890 - DNA, 25 bp, Homo sapien
gccagagtatgagaggcctactgga

SEQ ID NO: 1897891 - DNA, 25 bp, Homo sapien
tctctgggcccatggcatttccatt

SEQ ID NO: 1897892 - DNA, 25 bp, Homo sapien
ctaactgttgaatgccatggtactt

SEQ ID NO: 1897893 - DNA, 25 bp, Homo sapien
tatgtatcttaagctcttgcctctc

SEQ ID NO: 1897894 - DNA, 25 bp, Homo sapien
cagcttgttaaatttagggtcttga

SEQ ID NO: 1897895 - DNA, 25 bp, Homo sapien
gagatcttgtcacctcaagttccaa

SEQ ID NO: 1897896 - DNA, 25 bp, Homo sapien
caaattttggttggctagaaactga

SEQ ID NO: 1897897 - DNA, 25 bp, Homo sapien
gttttctgccctgacgttttatcca

SEQ ID NO: 1897898 - DNA, 25 bp, Homo sapien
tacttccaagtctaaagtgatggtt

SEQ ID NO: 1897899 - DNA, 25 bp, Homo sapien
cagattcagtttgcggctgataagg

SEQ ID NO: 1897900 - DNA, 25 bp, Homo sapien
tgacagtgcttcgacaaaggcagat

SEQ ID NO: 1897901 - DNA, 25 bp, Homo sapien
tcagttgggtatatcactgagtgta

SEQ ID NO: 1897902 - DNA, 25 bp, Homo sapien
ctgagtgtatgcacagagaggctgc

SEQ ID NO: 1897903 - DNA, 25 bp, Homo sapien
tctgatctgtgggtgacttacattc

SEQ ID NO: 1897904 - DNA, 25 bp, Homo sapien
ttctgcatgccgctttttctccaca

SEQ ID NO: 1897905 - DNA, 25 bp, Homo sapien
tgtgggtgacttacattcaaactcc

SEQ ID NO: 1897906 - DNA, 25 bp, Homo sapien
gcttctgcatgccgctttttctcca

SEQ ID NO: 1897907 - DNA, 25 bp, Homo sapien
gggtcgaaaagctgccaaagtgcta

SEQ ID NO: 1897908 - DNA, 25 bp, Homo sapien
caaagtgctaagctgtatgggttca

SEQ ID NO: 1897909 - DNA, 25 bp, Homo sapien
gggttcaattgatttctggcgtgca

SEQ ID NO: 1897910 - DNA, 25 bp, Homo sapien
taatggattggatcagaagggaacg

SEQ ID NO: 1897911 - DNA, 25 bp, Homo sapien
taaacacatgaatagagggctggct

SEQ ID NO: 1897912 - DNA, 25 bp, Homo sapien
ttccagggtcgcagagagcacagat

SEQ ID NO: 1897913 - DNA, 25 bp, Homo sapien
tgtcttgcaaaaaccgaactgagtg

SEQ ID NO: 1897914 - DNA, 25 bp, Homo sapien
tcatttgaagggagtatcagggaca

SEQ ID NO: 1897915 - DNA, 25 bp, Homo sapien
tctctgaccttagaacctgatggca

SEQ ID NO: 1897916 - DNA, 25 bp, Homo sapien
gacctgtggccttgagtcatgttaa

SEQ ID NO: 1897917 - DNA, 25 bp, Homo sapien
tgttgagagctcatcagcgactcct

SEQ ID NO: 1897918 - DNA, 25 bp, Homo sapien
tcttggagttcatggtgccaaccct

SEQ ID NO: 1897919 - DNA, 25 bp, Homo sapien
aatattctaccctatggtggcagag

SEQ ID NO: 1897920 - DNA, 25 bp, Homo sapien
gggaggcaaggatccagccattcga

SEQ ID NO: 1897921 - DNA, 25 bp, Homo sapien
cataaacctttggatgtagggtggt

SEQ ID NO: 1897922 - DNA, 25 bp, Homo sapien
cattcgagcttccttcttgtgcaca

SEQ ID NO: 1897923 - DNA, 25 bp, Homo sapien
tgattcagagtttcaggcatgtcag

SEQ ID NO: 1897924 - DNA, 25 bp, Homo sapien
ctgccactctcagatttgtccttgg

SEQ ID NO: 1897925 - DNA, 25 bp, Homo sapien
tcagtatctgccactctcagatttg

SEQ ID NO: 1897926 - DNA, 25 bp, Homo sapien
catgtcagattcactggggatggtg

SEQ ID NO: 1897927 - DNA, 25 bp, Homo sapien
tagattctcgataaaatcctccata

SEQ ID NO: 1897928 - DNA, 25 bp, Homo sapien
caacgcacagcccaaggtggtgtgg

SEQ ID NO: 1897929 - DNA, 25 bp, Homo sapien
taccacacctaaattgttccctctg

SEQ ID NO: 1897930 - DNA, 25 bp, Homo sapien
gccttgttcccctggcataataaat

SEQ ID NO: 1897931 - DNA, 25 bp, Homo sapien
tagaagtcattgatggagcccacag

SEQ ID NO: 1897932 - DNA, 25 bp, Homo sapien
tacatggatggatcttttccgaaca

SEQ ID NO: 1897933 - DNA, 25 bp, Homo sapien
tagggttcgccagagatctcaggga

SEQ ID NO: 1897934 - DNA, 25 bp, Homo sapien
catgtatcttgcttcaagtcgggca

SEQ ID NO: 1897935 - DNA, 25 bp, Homo sapien
tcctgcggctgtacatcgccttcaa

SEQ ID NO: 1897936 - DNA, 25 bp, Homo sapien
tcttttgccttctcgtgtgcctctc

SEQ ID NO: 1897937 - DNA, 25 bp, Homo sapien
ttcaaagtcctggattctgtattcc

SEQ ID NO: 1897938 - DNA, 25 bp, Homo sapien
gccctcaaacatgctcaggtattca

SEQ ID NO: 1897939 - DNA, 25 bp, Homo sapien
gttgaccatcaggtacaaaatatat

SEQ ID NO: 1897940 - DNA, 25 bp, Homo sapien
caaggccatgtttgaatgtcaggga

SEQ ID NO: 1897941 - DNA, 25 bp, Homo sapien
tgtcagggaaacagacgcagaaggt

SEQ ID NO: 1897942 - DNA, 25 bp, Homo sapien
aagccttgaggctcctagagaacga

SEQ ID NO: 1897943 - DNA, 25 bp, Homo sapien
gaagcgctacagttaggctggcact

SEQ ID NO: 1897944 - DNA, 25 bp, Homo sapien
gaaccgatagcatgcagtgaccggg

SEQ ID NO: 1897945 - DNA, 25 bp, Homo sapien
cagagtccccttgtgaaacatggag

SEQ ID NO: 1897946 - DNA, 25 bp, Homo sapien
catatgtactcccaggaagcgctac

SEQ ID NO: 1897947 - DNA, 25 bp, Homo sapien
ttttgataaacggattcatcactgg

SEQ ID NO: 1897948 - DNA, 25 bp, Homo sapien
cagaatgagatggctcttggaccaa

SEQ ID NO: 1897949 - DNA, 25 bp, Homo sapien
gctcttggaccaatttactgtggcc

SEQ ID NO: 1897950 - DNA, 25 bp, Homo sapien
ctgacagtgattttgataaacggat

SEQ ID NO: 1897951 - DNA, 25 bp, Homo sapien
caatgaaggggatatctgtgtaaag

SEQ ID NO: 1897952 - DNA, 25 bp, Homo sapien
ctctcgtaggatgtatttatgctta

SEQ ID NO: 1897953 - DNA, 25 bp, Homo sapien
caaatagtgcatagatctctcgtag

SEQ ID NO: 1897954 - DNA, 25 bp, Homo sapien
tctttcagtattggataaattcaaa

SEQ ID NO: 1897955 - DNA, 25 bp, Homo sapien
ctagctctgccattgtactaggggc

SEQ ID NO: 1897956 - DNA, 25 bp, Homo sapien
agttctacccccagacatgctagct

SEQ ID NO: 1897957 - DNA, 25 bp, Homo sapien
tttcctggggaacagccatttggtg

SEQ ID NO: 1897958 - DNA, 25 bp, Homo sapien
caagtttaaggccactgttccccag

SEQ ID NO: 1897959 - DNA, 25 bp, Homo sapien
tccttgttactgatgtgcagcctcc

SEQ ID NO: 1897960 - DNA, 25 bp, Homo sapien
aaggtgatcatatgtcctgtttctc

SEQ ID NO: 1897961 - DNA, 25 bp, Homo sapien
ttggcagccgactaaggtgatcata

SEQ ID NO: 1897962 - DNA, 25 bp, Homo sapien
tggaccgctgccctgtttgcctcca

SEQ ID NO: 1897963 - DNA, 25 bp, Homo sapien
gcactccagccttcctgaagggcat

SEQ ID NO: 1897964 - DNA, 25 bp, Homo sapien
ctgcactccagccttcctgaagggc

SEQ ID NO: 1897965 - DNA, 25 bp, Homo sapien
caggatcagaaactgcactccagcc

SEQ ID NO: 1897966 - DNA, 25 bp, Homo sapien
aactgcactccagccttcctgaagg

SEQ ID NO: 1897967 - DNA, 25 bp, Homo sapien
tatgcagctttgctccagctatcat

SEQ ID NO: 1897968 - DNA, 25 bp, Homo sapien
tcagtgagtatagacatgagacgta

SEQ ID NO: 1897969 - DNA, 25 bp, Homo sapien
tgtccaattatagtgccataagctg

SEQ ID NO: 1897970 - DNA, 25 bp, Homo sapien
gagacgtatagagaagtaatcagca

SEQ ID NO: 1897971 - DNA, 25 bp, Homo sapien
aatggtgtctcatcaacccaatggg

SEQ ID NO: 1897972 - DNA, 25 bp, Homo sapien
tgtcttgtctttaaccaagttaaca

SEQ ID NO: 1897973 - DNA, 25 bp, Homo sapien
atctttccccaggatgcttatgtca

SEQ ID NO: 1897974 - DNA, 25 bp, Homo sapien
cactacttgatagcagttctgcaga

SEQ ID NO: 1897975 - DNA, 25 bp, Homo sapien
tcatcacttcggtaatcattcttca

SEQ ID NO: 1897976 - DNA, 25 bp, Homo sapien
tgccagatctccttcagcaaattca

SEQ ID NO: 1897977 - DNA, 25 bp, Homo sapien
ctgtgaaacctgccagatctccttc

SEQ ID NO: 1897978 - DNA, 25 bp, Homo sapien
gtgaaacctgccagatctccttcag

SEQ ID NO: 1897979 - DNA, 25 bp, Homo sapien
aaacctgccagatctccttcagcaa

SEQ ID NO: 1897980 - DNA, 25 bp, Homo sapien
cattagctctgggttgaagcgcatc

SEQ ID NO: 1897981 - DNA, 25 bp, Homo sapien
cccttgcttactcttttggcctgaa

SEQ ID NO: 1897982 - DNA, 25 bp, Homo sapien
ctctgggttgaagcgcatccaggaa

SEQ ID NO: 1897983 - DNA, 25 bp, Homo sapien
caggaaacaggccccttgcttactc

SEQ ID NO: 1897984 - DNA, 25 bp, Homo sapien
gaattctttcaagcatttataggta

SEQ ID NO: 1897985 - DNA, 25 bp, Homo sapien
tcaggaagcagcgtgcataacaagg

SEQ ID NO: 1897986 - DNA, 25 bp, Homo sapien
gtgaattctttcaagcatttatagg

SEQ ID NO: 1897987 - DNA, 25 bp, Homo sapien
cagcgtgcataacaaggtatctgca

SEQ ID NO: 1897988 - DNA, 25 bp, Homo sapien
tcctggaagtatgtgtgcagaggct

SEQ ID NO: 1897989 - DNA, 25 bp, Homo sapien
aagaactgaggtttttgactcccag

SEQ ID NO: 1897990 - DNA, 25 bp, Homo sapien
taggcaatgccattactgtagccag

SEQ ID NO: 1897991 - DNA, 25 bp, Homo sapien
aaatgacctactgatatatgagaag

SEQ ID NO: 1897992 - DNA, 25 bp, Homo sapien
gggagaagatgatgcagagctcttt

SEQ ID NO: 1897993 - DNA, 25 bp, Homo sapien
ggcttctgcttgaagctcatcttcc

SEQ ID NO: 1897994 - DNA, 25 bp, Homo sapien
cagggcttctgcttgaagctcatct

SEQ ID NO: 1897995 - DNA, 25 bp, Homo sapien
tgccagggcttctgcttgaagctca

SEQ ID NO: 1897996 - DNA, 25 bp, Homo sapien
ccagggcttctgcttgaagctcatc

SEQ ID NO: 1897997 - DNA, 25 bp, Homo sapien
ccgaaaaaacaaacgtgagctcttg

SEQ ID NO: 1897998 - DNA, 25 bp, Homo sapien
gaaaaaacaaacgtgagctcttgga

SEQ ID NO: 1897999 - DNA, 25 bp, Homo sapien
aaaacaaacgtgagctcttggaagg

SEQ ID NO: 1898000 - DNA, 25 bp, Homo sapien
aaaaacaaacgtgagctcttggaag

SEQ ID NO: 1898001 - DNA, 25 bp, Homo sapien
taatttcataggagcgagcacctgc

SEQ ID NO: 1898002 - DNA, 25 bp, Homo sapien
ataggagcgagcacctgctgaaaag

SEQ ID NO: 1898003 - DNA, 25 bp, Homo sapien
aatttcataggagcgagcacctgct

SEQ ID NO: 1898004 - DNA, 25 bp, Homo sapien
aataatttcataggagcgagcacct

SEQ ID NO: 1898005 - DNA, 25 bp, Homo sapien
tgtgctgcagatgtacaggattcgc

SEQ ID NO: 1898006 - DNA, 25 bp, Homo sapien
tacaggattcgctgatccccagaag

SEQ ID NO: 1898007 - DNA, 25 bp, Homo sapien
cgtaagtgccactacagagaggagg

SEQ ID NO: 1898008 - DNA, 25 bp, Homo sapien
taagtgccactacagagaggaggag

SEQ ID NO: 1898009 - DNA, 25 bp, Homo sapien
ttcgtttataacctactgcagtgga

SEQ ID NO: 1898010 - DNA, 25 bp, Homo sapien
tactgatgggaattcgtttataacc

SEQ ID NO: 1898011 - DNA, 25 bp, Homo sapien
tctgtgtcgttaaagacttcttcaa

SEQ ID NO: 1898012 - DNA, 25 bp, Homo sapien
tttttgactgtcctttttgatgaac

SEQ ID NO: 1898013 - DNA, 25 bp, Homo sapien
tccctgcttcccgatgggcatcagg

SEQ ID NO: 1898014 - DNA, 25 bp, Homo sapien
ccagcttttgcataggacctcaaca

SEQ ID NO: 1898015 - DNA, 25 bp, Homo sapien
gaaattagaacacttccctgcttcc

SEQ ID NO: 1898016 - DNA, 25 bp, Homo sapien
gagagctgcttggaaagaaattaga

SEQ ID NO: 1898017 - DNA, 25 bp, Homo sapien
ttcacctctaaaccaacaagtttga

SEQ ID NO: 1898018 - DNA, 25 bp, Homo sapien
gaacatctggttgtgttattagttc

SEQ ID NO: 1898019 - DNA, 25 bp, Homo sapien
tcagttactgcatatacctgtgtct

SEQ ID NO: 1898020 - DNA, 25 bp, Homo sapien
cagctgctgaactaatagcaggaac

SEQ ID NO: 1898021 - DNA, 25 bp, Homo sapien
gctttgcataacagcagtgtctctt

SEQ ID NO: 1898022 - DNA, 25 bp, Homo sapien
cactgttgaccattcccttttactt

SEQ ID NO: 1898023 - DNA, 25 bp, Homo sapien
catgtaatagtcacactgttgacca

SEQ ID NO: 1898024 - DNA, 25 bp, Homo sapien
tttctccaagccctcatgtaatagt

SEQ ID NO: 1898025 - DNA, 25 bp, Homo sapien
cccatctccccaggattattttcca

SEQ ID NO: 1898026 - DNA, 25 bp, Homo sapien
atcccccatctccccaggattattt

SEQ ID NO: 1898027 - DNA, 25 bp, Homo sapien
tccatcccccatctccccaggatta

SEQ ID NO: 1898028 - DNA, 25 bp, Homo sapien
catctccccaggattattttccagg

SEQ ID NO: 1898029 - DNA, 25 bp, Homo sapien
cataatcgagctttcactgaacagg

SEQ ID NO: 1898030 - DNA, 25 bp, Homo sapien
tagcagccatagcagaggttcaagt

SEQ ID NO: 1898031 - DNA, 25 bp, Homo sapien
tccgctgacaagtgcctttgtggag

SEQ ID NO: 1898032 - DNA, 25 bp, Homo sapien
gagacatcagtgtcacaggacagca

SEQ ID NO: 1898033 - DNA, 25 bp, Homo sapien
cagtatccagataatgccagagaca

SEQ ID NO: 1898034 - DNA, 25 bp, Homo sapien
tggcagtcgttgtgctggtccctca

SEQ ID NO: 1898035 - DNA, 25 bp, Homo sapien
tacaaggcgttgtcctggcagtcgt

SEQ ID NO: 1898036 - DNA, 25 bp, Homo sapien
ggtgtggaaacctgggcatctattc

SEQ ID NO: 1898037 - DNA, 25 bp, Homo sapien
caactgtgttgactggggccttgcc

SEQ ID NO: 1898038 - DNA, 25 bp, Homo sapien
gactggactgagtgctaacacttaa

SEQ ID NO: 1898039 - DNA, 25 bp, Homo sapien
tatctgactggactgagtgctaaca

SEQ ID NO: 1898040 - DNA, 25 bp, Homo sapien
cagtatcttttatctgactggactg

SEQ ID NO: 1898041 - DNA, 25 bp, Homo sapien
ggcttgtggattaagtaataagtgg

SEQ ID NO: 1898042 - DNA, 25 bp, Homo sapien
aataagtggtaagcctccagctgag

SEQ ID NO: 1898043 - DNA, 25 bp, Homo sapien
acaacccttgggtgggcatttgaag

SEQ ID NO: 1898044 - DNA, 25 bp, Homo sapien
gaagacgccaaaatatacctgcagg

SEQ ID NO: 1898045 - DNA, 25 bp, Homo sapien
acttattcagcttctctagttgagc

SEQ ID NO: 1898046 - DNA, 25 bp, Homo sapien
tttggtcctgctactgaatgtggct

SEQ ID NO: 1898047 - DNA, 25 bp, Homo sapien
gctgtgactgatgcaagctgctgca

SEQ ID NO: 1898048 - DNA, 25 bp, Homo sapien
ggctcccaagaaggaaatgctttcc

SEQ ID NO: 1898049 - DNA, 25 bp, Homo sapien
ggtggtaaacattgtttgaatacat

SEQ ID NO: 1898050 - DNA, 25 bp, Homo sapien
tggtggtaaacattgtttgaataca

SEQ ID NO: 1898051 - DNA, 25 bp, Homo sapien
ctggtggtaaacattgtttgaatac

SEQ ID NO: 1898052 - DNA, 25 bp, Homo sapien
cagtaaggaatattattttggttgg

SEQ ID NO: 1898053 - DNA, 25 bp, Homo sapien
tcgatccagcataaatagagatatg

SEQ ID NO: 1898054 - DNA, 25 bp, Homo sapien
gggagagatgttgtccaacaccacc

SEQ ID NO: 1898055 - DNA, 25 bp, Homo sapien
tcaaaacgcacctcgatccagcata

SEQ ID NO: 1898056 - DNA, 25 bp, Homo sapien
ctgtccctctaaacgtaatttcagg

SEQ ID NO: 1898057 - DNA, 25 bp, Homo sapien
aacgtaatttcagggctgctctttc

SEQ ID NO: 1898058 - DNA, 25 bp, Homo sapien
ctgctctttcccgaggaaaagcatt

SEQ ID NO: 1898059 - DNA, 25 bp, Homo sapien
gggctgctctttcccgaggaaaagc

SEQ ID NO: 1898060 - DNA, 25 bp, Homo sapien
ctcctctcatttgatacccatgcat

SEQ ID NO: 1898061 - DNA, 25 bp, Homo sapien
gctcctctcatttgatacccatgca

SEQ ID NO: 1898062 - DNA, 25 bp, Homo sapien
ctgttggaataatcataagattgca

SEQ ID NO: 1898063 - DNA, 25 bp, Homo sapien
ctgtgagagcaccaaagcaatccat

SEQ ID NO: 1898064 - DNA, 25 bp, Homo sapien
gttctgtgagagcaccaaagcaatc

SEQ ID NO: 1898065 - DNA, 25 bp, Homo sapien
cagttctgtgagagcaccaaagcaa

SEQ ID NO: 1898066 - DNA, 25 bp, Homo sapien
tctgtgagagcaccaaagcaatcca

SEQ ID NO: 1898067 - DNA, 25 bp, Homo sapien
cagcaggtttaacaggagatactgt

SEQ ID NO: 1898068 - DNA, 25 bp, Homo sapien
aatttcaacagtgctaatctttcca

SEQ ID NO: 1898069 - DNA, 25 bp, Homo sapien
gattgtgttagctggaatccggcag

SEQ ID NO: 1898070 - DNA, 25 bp, Homo sapien
ctctcaccaagggagttcaatttca

SEQ ID NO: 1898071 - DNA, 25 bp, Homo sapien
ttaagaggtactgaataacataacg

SEQ ID NO: 1898072 - DNA, 25 bp, Homo sapien
atttcagacaaaatttatcacgtgg

SEQ ID NO: 1898073 - DNA, 25 bp, Homo sapien
gaggtactgaataacataacgatgt

SEQ ID NO: 1898074 - DNA, 25 bp, Homo sapien
tttatcacgtggttccttgattaag

SEQ ID NO: 1898075 - DNA, 25 bp, Homo sapien
gcagtgggtgggttgtacctttgcc

SEQ ID NO: 1898076 - DNA, 25 bp, Homo sapien
tggcatgcagaaagcaatcccactg

SEQ ID NO: 1898077 - DNA, 25 bp, Homo sapien
aatcccactgtttttgcatagcaag

SEQ ID NO: 1898078 - DNA, 25 bp, Homo sapien
gacaaaagatgctaatgggccccgg

SEQ ID NO: 1898079 - DNA, 25 bp, Homo sapien
tatattgggcatgtaattatgggcc

SEQ ID NO: 1898080 - DNA, 25 bp, Homo sapien
catatagtacattgtccctaaaaac

SEQ ID NO: 1898081 - DNA, 25 bp, Homo sapien
tatgggcccaaacgaagttcaagag

SEQ ID NO: 1898082 - DNA, 25 bp, Homo sapien
cctctgaagcttgaaattgaaatct

SEQ ID NO: 1898083 - DNA, 25 bp, Homo sapien
gccttggtttgatgtcatattttgg

SEQ ID NO: 1898084 - DNA, 25 bp, Homo sapien
ggtttgatgtcatattttggcatgc

SEQ ID NO: 1898085 - DNA, 25 bp, Homo sapien
ttttctgctactgtatattagcaga

SEQ ID NO: 1898086 - DNA, 25 bp, Homo sapien
tgaaaacacatggccttggtttgat

SEQ ID NO: 1898087 - DNA, 25 bp, Homo sapien
atgttcatggcccagtttgtaagct

SEQ ID NO: 1898088 - DNA, 25 bp, Homo sapien
gtttaacttccacagcatattgtcg

SEQ ID NO: 1898089 - DNA, 25 bp, Homo sapien
tcatggcccagtttgtaagcttggg

SEQ ID NO: 1898090 - DNA, 25 bp, Homo sapien
cttccacagcatattgtcgtgtaga

SEQ ID NO: 1898091 - DNA, 25 bp, Homo sapien
taattatgaaagtgtgcttcttgga

SEQ ID NO: 1898092 - DNA, 25 bp, Homo sapien
cagttgtaatccgaatggattccag

SEQ ID NO: 1898093 - DNA, 25 bp, Homo sapien
tgtgtcagttgtaatccgaatggat

SEQ ID NO: 1898094 - DNA, 25 bp, Homo sapien
gtaatccgaatggattccaggctgc

SEQ ID NO: 1898095 - DNA, 25 bp, Homo sapien
ctgtgtgtcagttgtaatccgaatg

SEQ ID NO: 1898096 - DNA, 25 bp, Homo sapien
tactcacagggcttctaatttgcac

SEQ ID NO: 1898097 - DNA, 25 bp, Homo sapien
gccaaggacatatcaacaatttcga

SEQ ID NO: 1898098 - DNA, 25 bp, Homo sapien
tgtccaggtgaacccatagccaaag

SEQ ID NO: 1898099 - DNA, 25 bp, Homo sapien
taatttgcactccatagcaatccct

SEQ ID NO: 1898100 - DNA, 25 bp, Homo sapien
acatagaggtgtccacattcagctt

SEQ ID NO: 1898101 - DNA, 25 bp, Homo sapien
tggaacatagaggtgtccacattca

SEQ ID NO: 1898102 - DNA, 25 bp, Homo sapien
cttgatttggaacatagaggtgtcc

SEQ ID NO: 1898103 - DNA, 25 bp, Homo sapien
aggaaatcactttccttggacttct

SEQ ID NO: 1898104 - DNA, 25 bp, Homo sapien
gtccacatagatgtagctaagaggg

SEQ ID NO: 1898105 - DNA, 25 bp, Homo sapien
ggtggctgagaacctgaaactttgc

SEQ ID NO: 1898106 - DNA, 25 bp, Homo sapien
cattggtttaggattgctgcaagtc

SEQ ID NO: 1898107 - DNA, 25 bp, Homo sapien
gagtacaaataagtgcctaaagtcc

SEQ ID NO: 1898108 - DNA, 25 bp, Homo sapien
catcaagatcctaagagcagagaac

SEQ ID NO: 1898109 - DNA, 25 bp, Homo sapien
ggtgacctgcctgttatctcagaac

SEQ ID NO: 1898110 - DNA, 25 bp, Homo sapien
taccgcctgtaaatgccttaagcag

SEQ ID NO: 1898111 - DNA, 25 bp, Homo sapien
tctcagaacactccatacagcagag

SEQ ID NO: 1898112 - DNA, 25 bp, Homo sapien
agtgccgttactatggagagctgag

SEQ ID NO: 1898113 - DNA, 25 bp, Homo sapien
gaatacacaatgagaagaaccagtg

SEQ ID NO: 1898114 - DNA, 25 bp, Homo sapien
agggagaaagtatgcatctgaaaag

SEQ ID NO: 1898115 - DNA, 25 bp, Homo sapien
caatgagaagaaccagtgccgttac

SEQ ID NO: 1898116 - DNA, 25 bp, Homo sapien
tgatatgccaagaacgggtgcagca

SEQ ID NO: 1898117 - DNA, 25 bp, Homo sapien
cgagaaggatgatatgccaagaacg

SEQ ID NO: 1898118 - DNA, 25 bp, Homo sapien
caagaacgggtgcagcattcgctgg

SEQ ID NO: 1898119 - DNA, 25 bp, Homo sapien
ccatgattgccttttacgagaagga

SEQ ID NO: 1898120 - DNA, 25 bp, Homo sapien
gcaactttagaggactacaggtgaa

SEQ ID NO: 1898121 - DNA, 25 bp, Homo sapien
tgcatgggggcagcacttcagttac

SEQ ID NO: 1898122 - DNA, 25 bp, Homo sapien
ctacaggtgaaattgtgtgcatggg

SEQ ID NO: 1898123 - DNA, 25 bp, Homo sapien
cctggaatctgtaagaatattcaag

SEQ ID NO: 1898124 - DNA, 25 bp, Homo sapien
ggccaatggccatatcattagctca

SEQ ID NO: 1898125 - DNA, 25 bp, Homo sapien
tgaggataatgtctgggaatattgg

SEQ ID NO: 1898126 - DNA, 25 bp, Homo sapien
tctgggaatattggattccatggaa

SEQ ID NO: 1898127 - DNA, 25 bp, Homo sapien
atctgtatttctatgtgaaaaggcc

SEQ ID NO: 1898128 - DNA, 25 bp, Homo sapien
tgataaccataccacaggcacacat

SEQ ID NO: 1898129 - DNA, 25 bp, Homo sapien
gtagcttgataaccataccacaggc

SEQ ID NO: 1898130 - DNA, 25 bp, Homo sapien
tttgctccacaaaactactcgtagc

SEQ ID NO: 1898131 - DNA, 25 bp, Homo sapien
aaactactcgtagcttgataaccat

SEQ ID NO: 1898132 - DNA, 25 bp, Homo sapien
tgtgcatcaagccaagccacgtaac

SEQ ID NO: 1898133 - DNA, 25 bp, Homo sapien
ccaaatgaaggtgtgatggacttga

SEQ ID NO: 1898134 - DNA, 25 bp, Homo sapien
tctgatccttcagagtctgcgtgct

SEQ ID NO: 1898135 - DNA, 25 bp, Homo sapien
taacgattgcagcttcttgaatgac

SEQ ID NO: 1898136 - DNA, 25 bp, Homo sapien
cagggtgtgcagctacttctaacat

SEQ ID NO: 1898137 - DNA, 25 bp, Homo sapien
gggtgtgcagctacttctaacatct

SEQ ID NO: 1898138 - DNA, 25 bp, Homo sapien
gcagctacttctaacatctcacctt

SEQ ID NO: 1898139 - DNA, 25 bp, Homo sapien
tgtgcagctacttctaacatctcac

SEQ ID NO: 1898140 - DNA, 25 bp, Homo sapien
attgttttgatgaaaggtgctatat

SEQ ID NO: 1898141 - DNA, 25 bp, Homo sapien
gccctgactgatctgctctgcattg

SEQ ID NO: 1898142 - DNA, 25 bp, Homo sapien
tctctttcattttggtcgccctgac

SEQ ID NO: 1898143 - DNA, 25 bp, Homo sapien
tctgcattgcaagcgcaatggcctt

SEQ ID NO: 1898144 - DNA, 25 bp, Homo sapien
cttaattttattcacagctgtggtt

SEQ ID NO: 1898145 - DNA, 25 bp, Homo sapien
aattttattcacagctgtggttact

SEQ ID NO: 1898146 - DNA, 25 bp, Homo sapien
taattttattcacagctgtggttac

SEQ ID NO: 1898147 - DNA, 25 bp, Homo sapien
ttttattcacagctgtggttacttt

SEQ ID NO: 1898148 - DNA, 25 bp, Homo sapien
gagcaacgttgacaggaaaaacaac

SEQ ID NO: 1898149 - DNA, 25 bp, Homo sapien
aagagcaacgttgacaggaaaaaca

SEQ ID NO: 1898150 - DNA, 25 bp, Homo sapien
acagcctccctttctgcatttggtc

SEQ ID NO: 1898151 - DNA, 25 bp, Homo sapien
tttctgcatttggtcccagggtcat

SEQ ID NO: 1898152 - DNA, 25 bp, Homo sapien
ccagtgagtcatttctcaagttctt

SEQ ID NO: 1898153 - DNA, 25 bp, Homo sapien
gaagcatattacttgagagtgtgaa

SEQ ID NO: 1898154 - DNA, 25 bp, Homo sapien
ggtgggtaaccatgcaatcccctaa

SEQ ID NO: 1898155 - DNA, 25 bp, Homo sapien
gacagatttctggactctaggccca

SEQ ID NO: 1898156 - DNA, 25 bp, Homo sapien
tgagaactactgcagtagtagacat

SEQ ID NO: 1898157 - DNA, 25 bp, Homo sapien
aaaacactctttactcctgcaatgg

SEQ ID NO: 1898158 - DNA, 25 bp, Homo sapien
ccaatactgccggtagtacatccag

SEQ ID NO: 1898159 - DNA, 25 bp, Homo sapien
ccggtagtacatccaggcaatgaga

SEQ ID NO: 1898160 - DNA, 25 bp, Homo sapien
gtgttcccatcagttagtcttccct

SEQ ID NO: 1898161 - DNA, 25 bp, Homo sapien
gccaagctcatcagggctgcaaaac

SEQ ID NO: 1898162 - DNA, 25 bp, Homo sapien
catcagttagtcttccctcctctgg

SEQ ID NO: 1898163 - DNA, 25 bp, Homo sapien
ctctggggaggcactcaaagccaag

SEQ ID NO: 1898164 - DNA, 25 bp, Homo sapien
tgcatcctcgcagtattgggacctc

SEQ ID NO: 1898165 - DNA, 25 bp, Homo sapien
actgcatcctcgcagtattgggacc

SEQ ID NO: 1898166 - DNA, 25 bp, Homo sapien
catcctcgcagtattgggacctcag

SEQ ID NO: 1898167 - DNA, 25 bp, Homo sapien
cctcgcagtattgggacctcagatt

SEQ ID NO: 1898168 - DNA, 25 bp, Homo sapien
tgtctcatatctgcttcactacctt

SEQ ID NO: 1898169 - DNA, 25 bp, Homo sapien
tatctgcttcactacctttgccctg

SEQ ID NO: 1898170 - DNA, 25 bp, Homo sapien
tgtggcctagtatcactttctgaag

SEQ ID NO: 1898171 - DNA, 25 bp, Homo sapien
actacctttgccctgtggcctagta

SEQ ID NO: 1898172 - DNA, 25 bp, Homo sapien
tgtgggctgcgttttcattaagtgc

SEQ ID NO: 1898173 - DNA, 25 bp, Homo sapien
gatcctgatgtgtgaaactctgagc

SEQ ID NO: 1898174 - DNA, 25 bp, Homo sapien
cgggggatcctgatgtgtgaaactc

SEQ ID NO: 1898175 - DNA, 25 bp, Homo sapien
ctctggaaagcaggcgcggcagagc

SEQ ID NO: 1898176 - DNA, 25 bp, Homo sapien
gtcccctgggtatcagcacacatag

SEQ ID NO: 1898177 - DNA, 25 bp, Homo sapien
ctgctggtcccctgggtatcagcac

SEQ ID NO: 1898178 - DNA, 25 bp, Homo sapien
cccctgggtatcagcacacatagca

SEQ ID NO: 1898179 - DNA, 25 bp, Homo sapien
gggtatcagcacacatagcatccat

SEQ ID NO: 1898180 - DNA, 25 bp, Homo sapien
ggaagtatcagtctaacagaaatca

SEQ ID NO: 1898181 - DNA, 25 bp, Homo sapien
caaaaggaatgcctgatgaattttc

SEQ ID NO: 1898182 - DNA, 25 bp, Homo sapien
taaaagtccttggtaatacatattg

SEQ ID NO: 1898183 - DNA, 25 bp, Homo sapien
gtatcagtctaacagaaatcaagac

SEQ ID NO: 1898184 - DNA, 25 bp, Homo sapien
tccattgtgcaaagcggaatcacca

SEQ ID NO: 1898185 - DNA, 25 bp, Homo sapien
tctcaaggatccctcatggaaagtt

SEQ ID NO: 1898186 - DNA, 25 bp, Homo sapien
cagtgctgtaatggccacacttcca

SEQ ID NO: 1898187 - DNA, 25 bp, Homo sapien
ccctgccttggaattctctggcaaa

SEQ ID NO: 1898188 - DNA, 25 bp, Homo sapien
ttttaaccaggctagcgatgacacc

SEQ ID NO: 1898189 - DNA, 25 bp, Homo sapien
gagttgagctatcctaccagctgag

SEQ ID NO: 1898190 - DNA, 25 bp, Homo sapien
tataaagaccctagattgcacccct

SEQ ID NO: 1898191 - DNA, 25 bp, Homo sapien
gacacctatgggattgcagatcacc

SEQ ID NO: 1898192 - DNA, 25 bp, Homo sapien
caacatgtccatctgccttaggata

SEQ ID NO: 1898193 - DNA, 25 bp, Homo sapien
tgaaccttcgtgcaacatttatagg

SEQ ID NO: 1898194 - DNA, 25 bp, Homo sapien
ctgtatgtatctgaaccttcgtgca

SEQ ID NO: 1898195 - DNA, 25 bp, Homo sapien
gcaacatttataggctctgtcagtt

SEQ ID NO: 1898196 - DNA, 25 bp, Homo sapien
ctcagtgtagtcatattcagggacc

SEQ ID NO: 1898197 - DNA, 25 bp, Homo sapien
ttactcagtgtagtcatattcaggg

SEQ ID NO: 1898198 - DNA, 25 bp, Homo sapien
tagtcatattcagggacctggctct

SEQ ID NO: 1898199 - DNA, 25 bp, Homo sapien
tgtagtcatattcagggacctggct

SEQ ID NO: 1898200 - DNA, 25 bp, Homo sapien
tagggagcacttggagcgtctctgc

SEQ ID NO: 1898201 - DNA, 25 bp, Homo sapien
gagcggcaccgattccccgagttat

SEQ ID NO: 1898202 - DNA, 25 bp, Homo sapien
cgattccccgagttattagggagca

SEQ ID NO: 1898203 - DNA, 25 bp, Homo sapien
agctgtcagcctccgcaatgagcgg

SEQ ID NO: 1898204 - DNA, 25 bp, Homo sapien
gagtttcacgcagttcccattctat

SEQ ID NO: 1898205 - DNA, 25 bp, Homo sapien
ttgagtttcacgcagttcccattct

SEQ ID NO: 1898206 - DNA, 25 bp, Homo sapien
cattgagtttcacgcagttcccatt

SEQ ID NO: 1898207 - DNA, 25 bp, Homo sapien
agcattgagtttcacgcagttccca

SEQ ID NO: 1898208 - DNA, 25 bp, Homo sapien
acttccacttagaatgcagttgatc

SEQ ID NO: 1898209 - DNA, 25 bp, Homo sapien
acttagaatgcagttgatcacagtg

SEQ ID NO: 1898210 - DNA, 25 bp, Homo sapien
aaagttgagccagtgtcaacttcca

SEQ ID NO: 1898211 - DNA, 25 bp, Homo sapien
gttgagccagtgtcaacttccactt

SEQ ID NO: 1898212 - DNA, 25 bp, Homo sapien
gaggacttcgtgtgttctccggaga

SEQ ID NO: 1898213 - DNA, 25 bp, Homo sapien
gcctggtctctgcttgcaaggtgag

SEQ ID NO: 1898214 - DNA, 25 bp, Homo sapien
aagatgaacgctttcatctcgccca

SEQ ID NO: 1898215 - DNA, 25 bp, Homo sapien
tctccggagaagatgaacgctttca

SEQ ID NO: 1898216 - DNA, 25 bp, Homo sapien
tttggactggattaaccgagaacac

SEQ ID NO: 1898217 - DNA, 25 bp, Homo sapien
tggaggattatgaaggcttaataat

SEQ ID NO: 1898218 - DNA, 25 bp, Homo sapien
gtcttatctgattacgtgtcttgga

SEQ ID NO: 1898219 - DNA, 25 bp, Homo sapien
ggatttcttcaaatcagttgcagtc

SEQ ID NO: 1898220 - DNA, 25 bp, Homo sapien
taaatctgaaagcatcccaagatct

SEQ ID NO: 1898221 - DNA, 25 bp, Homo sapien
tattaaatctgaaagcatcccaaga

SEQ ID NO: 1898222 - DNA, 25 bp, Homo sapien
ttgggggatggcatttttgccaata

SEQ ID NO: 1898223 - DNA, 25 bp, Homo sapien
atctgaaagcatcccaagatctttg

SEQ ID NO: 1898224 - DNA, 25 bp, Homo sapien
ttctgctctccttgaacgtatagcc

SEQ ID NO: 1898225 - DNA, 25 bp, Homo sapien
gctgcaatgtccattgagcaatttg

SEQ ID NO: 1898226 - DNA, 25 bp, Homo sapien
tagccaagctgcaatgtccattgag

SEQ ID NO: 1898227 - DNA, 25 bp, Homo sapien
ccttgaacgtatagccaagctgcaa

SEQ ID NO: 1898228 - DNA, 25 bp, Homo sapien
tctcggtctatgtttaaccctcatt

SEQ ID NO: 1898229 - DNA, 25 bp, Homo sapien
gttctcggtctatgtttaaccctca

SEQ ID NO: 1898230 - DNA, 25 bp, Homo sapien
ttctcggtctatgtttaaccctcat

SEQ ID NO: 1898231 - DNA, 25 bp, Homo sapien
ctcggtctatgtttaaccctcattt

SEQ ID NO: 1898232 - DNA, 25 bp, Homo sapien
accaattgacatcatggctcagact

SEQ ID NO: 1898233 - DNA, 25 bp, Homo sapien
tcataactaccctcacaactcttaa

SEQ ID NO: 1898234 - DNA, 25 bp, Homo sapien
gactatgcccatgtatccgaacggt

SEQ ID NO: 1898235 - DNA, 25 bp, Homo sapien
ggtaggattaggatatagacttcgg

SEQ ID NO: 1898236 - DNA, 25 bp, Homo sapien
tgcatgaaggttgaacataacgctg

SEQ ID NO: 1898237 - DNA, 25 bp, Homo sapien
tgttacccattcagtgcccttgtag

SEQ ID NO: 1898238 - DNA, 25 bp, Homo sapien
agtcaatctggcacactttattgca

SEQ ID NO: 1898239 - DNA, 25 bp, Homo sapien
cctgggacaatatcatccataagtc

SEQ ID NO: 1898240 - DNA, 25 bp, Homo sapien
taagggtagtctttgattgggtaga

SEQ ID NO: 1898241 - DNA, 25 bp, Homo sapien
tttgattgggtagactgggtgttcc

SEQ ID NO: 1898242 - DNA, 25 bp, Homo sapien
agcatggagatgttaagggtagtct

SEQ ID NO: 1898243 - DNA, 25 bp, Homo sapien
tgggtagactgggtgttcccaagaa

SEQ ID NO: 1898244 - DNA, 25 bp, Homo sapien
tcactgtctgttactctcacctgaa

SEQ ID NO: 1898245 - DNA, 25 bp, Homo sapien
tctgaaagattatggctatatcaag

SEQ ID NO: 1898246 - DNA, 25 bp, Homo sapien
tgcaggaaccgtacttctaaagtgt

SEQ ID NO: 1898247 - DNA, 25 bp, Homo sapien
tagattttgatgattcactgtctgt

SEQ ID NO: 1898248 - DNA, 25 bp, Homo sapien
aaacttgactatccagcatgtcatt

SEQ ID NO: 1898249 - DNA, 25 bp, Homo sapien
tggtcatatagaacacactcaaaag

SEQ ID NO: 1898250 - DNA, 25 bp, Homo sapien
ttttggtcatatagaacacactcaa

SEQ ID NO: 1898251 - DNA, 25 bp, Homo sapien
catatagaacacactcaaaagtcac

SEQ ID NO: 1898252 - DNA, 25 bp, Homo sapien
taattatttgccatccttcacttgg

SEQ ID NO: 1898253 - DNA, 25 bp, Homo sapien
gtgttcccttaattatttgccatcc

SEQ ID NO: 1898254 - DNA, 25 bp, Homo sapien
tcccttaattatttgccatccttca

SEQ ID NO: 1898255 - DNA, 25 bp, Homo sapien
tacgtgttcccttaattatttgcca

SEQ ID NO: 1898256 - DNA, 25 bp, Homo sapien
ttattctggtgctcagtgttggcat

SEQ ID NO: 1898257 - DNA, 25 bp, Homo sapien
tctttattctggtgctcagtgttgg

SEQ ID NO: 1898258 - DNA, 25 bp, Homo sapien
tttattctggtgctcagtgttggca

SEQ ID NO: 1898259 - DNA, 25 bp, Homo sapien
ggtctttattctggtgctcagtgtt

SEQ ID NO: 1898260 - DNA, 25 bp, Homo sapien
tgtgtgttttaaatccacttttcat

SEQ ID NO: 1898261 - DNA, 25 bp, Homo sapien
taactggccacatcaaatgcacatc

SEQ ID NO: 1898262 - DNA, 25 bp, Homo sapien
ctgttaactggccacatcaaatgca

SEQ ID NO: 1898263 - DNA, 25 bp, Homo sapien
caattgcctcatcattgccactgtt

SEQ ID NO: 1898264 - DNA, 25 bp, Homo sapien
catcattgccactgttaactggcca

SEQ ID NO: 1898265 - DNA, 25 bp, Homo sapien
cattttctaccatgacaggcttgaa

SEQ ID NO: 1898266 - DNA, 25 bp, Homo sapien
tctaccatgacaggcttgaaggtct

SEQ ID NO: 1898267 - DNA, 25 bp, Homo sapien
catgacaggcttgaaggtctctgtg

SEQ ID NO: 1898268 - DNA, 25 bp, Homo sapien
ggcttgaaggtctctgtgccatcat

SEQ ID NO: 1898269 - DNA, 25 bp, Homo sapien
taagttgtgcaaacccagcatcctg

SEQ ID NO: 1898270 - DNA, 25 bp, Homo sapien
gttcatccgggagagcaatcagaca

SEQ ID NO: 1898271 - DNA, 25 bp, Homo sapien
agcatcctgagtatccccgggtagg

SEQ ID NO: 1898272 - DNA, 25 bp, Homo sapien
taactttggctctaggaggactggt

SEQ ID NO: 1898273 - DNA, 25 bp, Homo sapien
acccacaaatggagtcgtagcatct

SEQ ID NO: 1898274 - DNA, 25 bp, Homo sapien
acaaatggagtcgtagcatcttcac

SEQ ID NO: 1898275 - DNA, 25 bp, Homo sapien
gctgtctgaagtaatgttctcacct

SEQ ID NO: 1898276 - DNA, 25 bp, Homo sapien
gccagcatgctgtctgaagtaatgt

SEQ ID NO: 1898277 - DNA, 25 bp, Homo sapien
aaattagcaaggatggctttgatat

SEQ ID NO: 1898278 - DNA, 25 bp, Homo sapien
ctagaggagggagtgggctttttga

SEQ ID NO: 1898279 - DNA, 25 bp, Homo sapien
tagaggagggagtgggctttttgaa

SEQ ID NO: 1898280 - DNA, 25 bp, Homo sapien
ggatggctttgatatattctcctgc

SEQ ID NO: 1898281 - DNA, 25 bp, Homo sapien
aggtatttggtcctgtctggatgga

SEQ ID NO: 1898282 - DNA, 25 bp, Homo sapien
aatgaaggtatttggtcctgtctgg

SEQ ID NO: 1898283 - DNA, 25 bp, Homo sapien
cctcttaatgaaggtatttggtcct

SEQ ID NO: 1898284 - DNA, 25 bp, Homo sapien
aatcccctcttaatgaaggtatttg

SEQ ID NO: 1898285 - DNA, 25 bp, Homo sapien
ctgaacacttcatgtaccccaaaga

SEQ ID NO: 1898286 - DNA, 25 bp, Homo sapien
tgcagagtagctttcgcagccactt

SEQ ID NO: 1898287 - DNA, 25 bp, Homo sapien
caaagagccaattcccttgaccata

SEQ ID NO: 1898288 - DNA, 25 bp, Homo sapien
gtttttcttcccacatctggcttgc

SEQ ID NO: 1898289 - DNA, 25 bp, Homo sapien
gggcacgttgggacagaaatgcttg

SEQ ID NO: 1898290 - DNA, 25 bp, Homo sapien
ggcacgttgggacagaaatgcttga

SEQ ID NO: 1898291 - DNA, 25 bp, Homo sapien
gcacgttgggacagaaatgcttgac

SEQ ID NO: 1898292 - DNA, 25 bp, Homo sapien
cacgttgggacagaaatgcttgact

SEQ ID NO: 1898293 - DNA, 25 bp, Homo sapien
catagttctgaaaccctgagggtgc

SEQ ID NO: 1898294 - DNA, 25 bp, Homo sapien
ggttgtcaacggagaacacataaca

SEQ ID NO: 1898295 - DNA, 25 bp, Homo sapien
caaagtcagctctacactttcccat

SEQ ID NO: 1898296 - DNA, 25 bp, Homo sapien
acatcagtgtccgagtaaaagaggg

SEQ ID NO: 1898297 - DNA, 25 bp, Homo sapien
gccacagactctgtcaccgacaatt

SEQ ID NO: 1898298 - DNA, 25 bp, Homo sapien
cacagactctgtcaccgacaattac

SEQ ID NO: 1898299 - DNA, 25 bp, Homo sapien
ccacagactctgtcaccgacaatta

SEQ ID NO: 1898300 - DNA, 25 bp, Homo sapien
gcctgggtggctgaaattgtacgaa

SEQ ID NO: 1898301 - DNA, 25 bp, Homo sapien
gggtggctgaaattgtacgaagtac

SEQ ID NO: 1898302 - DNA, 25 bp, Homo sapien
cagcttcttctggacgggaaccatt

SEQ ID NO: 1898303 - DNA, 25 bp, Homo sapien
tcttctggacgggaaccattgctgg

SEQ ID NO: 1898304 - DNA, 25 bp, Homo sapien
ccgcaagtcgcaagctgggaaagca

SEQ ID NO: 1898305 - DNA, 25 bp, Homo sapien
ttctcagaggacagattcgggcgac

SEQ ID NO: 1898306 - DNA, 25 bp, Homo sapien
gagtccagtctcttcgtgcccagga

SEQ ID NO: 1898307 - DNA, 25 bp, Homo sapien
catggactcacgagagaactgacgg

SEQ ID NO: 1898308 - DNA, 25 bp, Homo sapien
caaccgcttgactttgatacaggaa

SEQ ID NO: 1898309 - DNA, 25 bp, Homo sapien
tcattaccacttactgttcctggtc

SEQ ID NO: 1898310 - DNA, 25 bp, Homo sapien
gccagcgctgtcagagtatgtgatg

SEQ ID NO: 1898311 - DNA, 25 bp, Homo sapien
cacattgtcgtgcattccaaggctc

SEQ ID NO: 1898312 - DNA, 25 bp, Homo sapien
ggagggacaagtccaagcctgccag

SEQ ID NO: 1898313 - DNA, 25 bp, Homo sapien
ggctggaggagggacaagtccaagc

SEQ ID NO: 1898314 - DNA, 25 bp, Homo sapien
ggacaagtccaagcctgccagtctg

SEQ ID NO: 1898315 - DNA, 25 bp, Homo sapien
ggaggagggacaagtccaagcctgc

SEQ ID NO: 1898316 - DNA, 25 bp, Homo sapien
tccaaatatgctacttcgttagtct

SEQ ID NO: 1898317 - DNA, 25 bp, Homo sapien
ttccaaatatgctacttcgttagtc

SEQ ID NO: 1898318 - DNA, 25 bp, Homo sapien
caaatatgctacttcgttagtcttc

SEQ ID NO: 1898319 - DNA, 25 bp, Homo sapien
tcttccaaatatgctacttcgttag

SEQ ID NO: 1898320 - DNA, 25 bp, Homo sapien
cttatttgacacattagcacagtag

SEQ ID NO: 1898321 - DNA, 25 bp, Homo sapien
cattagcacagtagaagcacagatt

SEQ ID NO: 1898322 - DNA, 25 bp, Homo sapien
tttgacacattagcacagtagaagc

SEQ ID NO: 1898323 - DNA, 25 bp, Homo sapien
cacattagcacagtagaagcacaga

SEQ ID NO: 1898324 - DNA, 25 bp, Homo sapien
actgctgatctttttgccctctttg

SEQ ID NO: 1898325 - DNA, 25 bp, Homo sapien
gacagcaagcaaagaagttcgtttg

SEQ ID NO: 1898326 - DNA, 25 bp, Homo sapien
gggcatatcttatgaaggtgcaaga

SEQ ID NO: 1898327 - DNA, 25 bp, Homo sapien
gaagttcgtttgtaatgcctctgtg

SEQ ID NO: 1898328 - DNA, 25 bp, Homo sapien
tcagaggcccgatgtccctttgtcg

SEQ ID NO: 1898329 - DNA, 25 bp, Homo sapien
gcatctgcactacgaagtccctgct

SEQ ID NO: 1898330 - DNA, 25 bp, Homo sapien
cctttgtcgttgatcagctggtgag

SEQ ID NO: 1898331 - DNA, 25 bp, Homo sapien
gcttggtccatgtctctgaactgaa

SEQ ID NO: 1898332 - DNA, 25 bp, Homo sapien
cagcatcggatgctgatttctgagc

SEQ ID NO: 1898333 - DNA, 25 bp, Homo sapien
ctgagatacgcgctgttttgtggca

SEQ ID NO: 1898334 - DNA, 25 bp, Homo sapien
tgttggtctctgctgagatacgcgc

SEQ ID NO: 1898335 - DNA, 25 bp, Homo sapien
gatgggtgtttgaactgagaagggc

SEQ ID NO: 1898336 - DNA, 25 bp, Homo sapien
cctctgaagagtccgcatgtcagct

SEQ ID NO: 1898337 - DNA, 25 bp, Homo sapien
tcctctgaagagtccgcatgtcagc

SEQ ID NO: 1898338 - DNA, 25 bp, Homo sapien
gaagagtccgcatgtcagctcttcc

SEQ ID NO: 1898339 - DNA, 25 bp, Homo sapien
ctgaagagtccgcatgtcagctctt

SEQ ID NO: 1898340 - DNA, 25 bp, Homo sapien
tgttttagcacaccttagagagggc

SEQ ID NO: 1898341 - DNA, 25 bp, Homo sapien
tgatagcaaatctacggcagagtga

SEQ ID NO: 1898342 - DNA, 25 bp, Homo sapien
taagctaaagctactcagagagact

SEQ ID NO: 1898343 - DNA, 25 bp, Homo sapien
tcaggaagccggtaagataagcaag

SEQ ID NO: 1898344 - DNA, 25 bp, Homo sapien
tgcaaattggctagcaattcttttc

SEQ ID NO: 1898345 - DNA, 25 bp, Homo sapien
tcaaagcatgtgatctcccttgcat

SEQ ID NO: 1898346 - DNA, 25 bp, Homo sapien
gttttcaaaggccactccttgcaaa

SEQ ID NO: 1898347 - DNA, 25 bp, Homo sapien
ttcaaagcatgtgatctcccttgca

SEQ ID NO: 1898348 - DNA, 25 bp, Homo sapien
tgagtcttcactcgcaaaaggaaaa

SEQ ID NO: 1898349 - DNA, 25 bp, Homo sapien
tcctgagtcttcactcgcaaaagga

SEQ ID NO: 1898350 - DNA, 25 bp, Homo sapien
cagttaaggaggaagtcttgcagca

SEQ ID NO: 1898351 - DNA, 25 bp, Homo sapien
aaagcagtgacagttaaggaggaag

SEQ ID NO: 1898352 - DNA, 25 bp, Homo sapien
catcagttacggttgtgtcagcatt

SEQ ID NO: 1898353 - DNA, 25 bp, Homo sapien
gattcccacggcatcagttacggtt

SEQ ID NO: 1898354 - DNA, 25 bp, Homo sapien
taatgcgattcccacggcatcagtt

SEQ ID NO: 1898355 - DNA, 25 bp, Homo sapien
tagtccagtaatgcgattcccacgg

SEQ ID NO: 1898356 - DNA, 25 bp, Homo sapien
aacatattttacaacatctacaatc

SEQ ID NO: 1898357 - DNA, 25 bp, Homo sapien
ttcaacatattttacaacatctaca

SEQ ID NO: 1898358 - DNA, 25 bp, Homo sapien
aattcaacatattttacaacatcta

SEQ ID NO: 1898359 - DNA, 25 bp, Homo sapien
tcaacatattttacaacatctacaa

SEQ ID NO: 1898360 - DNA, 25 bp, Homo sapien
ttttcggaacaatcttcggagttca

SEQ ID NO: 1898361 - DNA, 25 bp, Homo sapien
tatgattcgattttcggaacaatct

SEQ ID NO: 1898362 - DNA, 25 bp, Homo sapien
attcgattttcggaacaatcttcgg

SEQ ID NO: 1898363 - DNA, 25 bp, Homo sapien
aacaatcttcggagttcataaggaa

SEQ ID NO: 1898364 - DNA, 25 bp, Homo sapien
tttggcttgaagcagattagggtaa

SEQ ID NO: 1898365 - DNA, 25 bp, Homo sapien
aaattttgcacttcgttgcatggag

SEQ ID NO: 1898366 - DNA, 25 bp, Homo sapien
taattggaggtacaattttggtctg

SEQ ID NO: 1898367 - DNA, 25 bp, Homo sapien
gctgctgttgcccttattgtaggca

SEQ ID NO: 1898368 - DNA, 25 bp, Homo sapien
gaggaggaatcagccctagagcata

SEQ ID NO: 1898369 - DNA, 25 bp, Homo sapien
tacttgtcaggagtttaagaggagg

SEQ ID NO: 1898370 - DNA, 25 bp, Homo sapien
tccctgggttaacggctatcttgtg

SEQ ID NO: 1898371 - DNA, 25 bp, Homo sapien
tatacaagcccatttgctggcacca

SEQ ID NO: 1898372 - DNA, 25 bp, Homo sapien
atgacctgactccatccacctccac

SEQ ID NO: 1898373 - DNA, 25 bp, Homo sapien
ccactcactgtcttaatagagtgca

SEQ ID NO: 1898374 - DNA, 25 bp, Homo sapien
acatgacctgactccatccacctcc

SEQ ID NO: 1898375 - DNA, 25 bp, Homo sapien
ctccactcactgtcttaatagagtg

SEQ ID NO: 1898376 - DNA, 25 bp, Homo sapien
gctccacatcctttgtagatccatt

SEQ ID NO: 1898377 - DNA, 25 bp, Homo sapien
catcctttgtagatccatttggcgt

SEQ ID NO: 1898378 - DNA, 25 bp, Homo sapien
atttggcgttacatcaaagagcacc

SEQ ID NO: 1898379 - DNA, 25 bp, Homo sapien
tgtagatccatttggcgttacatca

SEQ ID NO: 1898380 - DNA, 25 bp, Homo sapien
gctttgagtggagcaatttcaacag

SEQ ID NO: 1898381 - DNA, 25 bp, Homo sapien
taactggaatgttctttcgactgtg

SEQ ID NO: 1898382 - DNA, 25 bp, Homo sapien
tatttggctttgagtggagcaattt

SEQ ID NO: 1898383 - DNA, 25 bp, Homo sapien
aactggaatgttctttcgactgtga

SEQ ID NO: 1898384 - DNA, 25 bp, Homo sapien
actgtacacactgcaaaagtcttgc

SEQ ID NO: 1898385 - DNA, 25 bp, Homo sapien
gagatcaaccctccataactgttct

SEQ ID NO: 1898386 - DNA, 25 bp, Homo sapien
aaaggtcagttgatggaacaaagtc

SEQ ID NO: 1898387 - DNA, 25 bp, Homo sapien
gcagcagctgccattacccattaag

SEQ ID NO: 1898388 - DNA, 25 bp, Homo sapien
catgcaagggtcattactttcctat

SEQ ID NO: 1898389 - DNA, 25 bp, Homo sapien
gaaggatatggtatccatgttctcc

SEQ ID NO: 1898390 - DNA, 25 bp, Homo sapien
attgctgctgtatggtgaggaagaa

SEQ ID NO: 1898391 - DNA, 25 bp, Homo sapien
tccatgttctccatgcaagggtcat

SEQ ID NO: 1898392 - DNA, 25 bp, Homo sapien
agtgatgctgttagcaggaagtcca

SEQ ID NO: 1898393 - DNA, 25 bp, Homo sapien
tatcagtgatgctgttagcaggaag

SEQ ID NO: 1898394 - DNA, 25 bp, Homo sapien
actgagtatcagtgatgctgttagc

SEQ ID NO: 1898395 - DNA, 25 bp, Homo sapien
ccatactgagtatcagtgatgctgt

SEQ ID NO: 1898396 - DNA, 25 bp, Homo sapien
gttccttgtacaattctatccttgg

SEQ ID NO: 1898397 - DNA, 25 bp, Homo sapien
tctgttccttgtacaattctatcct

SEQ ID NO: 1898398 - DNA, 25 bp, Homo sapien
tttcctctgttccttgtacaattct

SEQ ID NO: 1898399 - DNA, 25 bp, Homo sapien
tccttgtacaattctatccttggtg

SEQ ID NO: 1898400 - DNA, 25 bp, Homo sapien
catttgagtactgacacatttagag

SEQ ID NO: 1898401 - DNA, 25 bp, Homo sapien
ttagagcaattctctcattaatgcc

SEQ ID NO: 1898402 - DNA, 25 bp, Homo sapien
tcctccttcccatttgagtactgac

SEQ ID NO: 1898403 - DNA, 25 bp, Homo sapien
gagcaattctctcattaatgccctt

SEQ ID NO: 1898404 - DNA, 25 bp, Homo sapien
aggcaaggtccttgagtcccacgtc

SEQ ID NO: 1898405 - DNA, 25 bp, Homo sapien
gcaaggtccttgagtcccacgtctt

SEQ ID NO: 1898406 - DNA, 25 bp, Homo sapien
atccataataaacaggcaaggtcct

SEQ ID NO: 1898407 - DNA, 25 bp, Homo sapien
ggcaaggtccttgagtcccacgtct

SEQ ID NO: 1898408 - DNA, 25 bp, Homo sapien
gccgaagtcctgtattctgaataat

SEQ ID NO: 1898409 - DNA, 25 bp, Homo sapien
gtcacaatcgccgaagtcctgtatt

SEQ ID NO: 1898410 - DNA, 25 bp, Homo sapien
aatcgccgaagtcctgtattctgaa

SEQ ID NO: 1898411 - DNA, 25 bp, Homo sapien
tgagatgtcacaatcgccgaagtcc

SEQ ID NO: 1898412 - DNA, 25 bp, Homo sapien
ggtgttcctaatagccttgaataat

SEQ ID NO: 1898413 - DNA, 25 bp, Homo sapien
aaggtgttcctaatagccttgaata

SEQ ID NO: 1898414 - DNA, 25 bp, Homo sapien
gctactcttgccaatggtctatcaa

SEQ ID NO: 1898415 - DNA, 25 bp, Homo sapien
cttggctactcttgccaatggtcta

SEQ ID NO: 1898416 - DNA, 25 bp, Homo sapien
cagatgcagctctgaatgggcttaa

SEQ ID NO: 1898417 - DNA, 25 bp, Homo sapien
aggaagccaagaagatgggccagcc

SEQ ID NO: 1898418 - DNA, 25 bp, Homo sapien
tgtcccctaattccttcagatgcag

SEQ ID NO: 1898419 - DNA, 25 bp, Homo sapien
cagaagagccagttcctgacaggaa

SEQ ID NO: 1898420 - DNA, 25 bp, Homo sapien
ctgtgttcctattgttttcagatca

SEQ ID NO: 1898421 - DNA, 25 bp, Homo sapien
agatacagcattatatctctgtgtt

SEQ ID NO: 1898422 - DNA, 25 bp, Homo sapien
acttgtgtacccttgcttaattgtg

SEQ ID NO: 1898423 - DNA, 25 bp, Homo sapien
gtgtacccttgcttaattgtgttca

SEQ ID NO: 1898424 - DNA, 25 bp, Homo sapien
ggtgatattgttaaatttcctagta

SEQ ID NO: 1898425 - DNA, 25 bp, Homo sapien
tcctagtagtgacctgtgcagctgt

SEQ ID NO: 1898426 - DNA, 25 bp, Homo sapien
tctggaaatctttaacaacaagaac

SEQ ID NO: 1898427 - DNA, 25 bp, Homo sapien
caacaagaaccaataatgaggtgat

SEQ ID NO: 1898428 - DNA, 25 bp, Homo sapien
ttattggaacggcattccgatcatc

SEQ ID NO: 1898429 - DNA, 25 bp, Homo sapien
ggcattccgatcatctgttcgttta

SEQ ID NO: 1898430 - DNA, 25 bp, Homo sapien
tactctatggttagacattctgtag

SEQ ID NO: 1898431 - DNA, 25 bp, Homo sapien
gatcatctgttcgtttactctatgg

SEQ ID NO: 1898432 - DNA, 25 bp, Homo sapien
caacaccagtttaattccgattgtg

SEQ ID NO: 1898433 - DNA, 25 bp, Homo sapien
gcaccacagaatggtattacagcac

SEQ ID NO: 1898434 - DNA, 25 bp, Homo sapien
tggattgcgtttaaatcaacaccag

SEQ ID NO: 1898435 - DNA, 25 bp, Homo sapien
gagtactttgcctattcatgcacca

SEQ ID NO: 1898436 - DNA, 25 bp, Homo sapien
ctgatgccctggtggattcccagga

SEQ ID NO: 1898437 - DNA, 25 bp, Homo sapien
tgctaaagattcccataagaaaact

SEQ ID NO: 1898438 - DNA, 25 bp, Homo sapien
tgttatggctggcagctgattgtag

SEQ ID NO: 1898439 - DNA, 25 bp, Homo sapien
gctgattgtagctgctgattgctaa

SEQ ID NO: 1898440 - DNA, 25 bp, Homo sapien
acttttaatgttcttgtgcacttaa

SEQ ID NO: 1898441 - DNA, 25 bp, Homo sapien
catttctttacgtttggttgcatat

SEQ ID NO: 1898442 - DNA, 25 bp, Homo sapien
tttacgtttggttgcatatattccc

SEQ ID NO: 1898443 - DNA, 25 bp, Homo sapien
ttattcatgattttcgtgtttactt

SEQ ID NO: 1898444 - DNA, 25 bp, Homo sapien
gaaagacttactgcaattgttggct

SEQ ID NO: 1898445 - DNA, 25 bp, Homo sapien
cagaagaaattgtgtctcagacagg

SEQ ID NO: 1898446 - DNA, 25 bp, Homo sapien
tatgcttacaacaggaaggccactg

SEQ ID NO: 1898447 - DNA, 25 bp, Homo sapien
gaagacccacggaagagatggcttt

SEQ ID NO: 1898448 - DNA, 25 bp, Homo sapien
tagtttcttttcagttacatccaca

SEQ ID NO: 1898449 - DNA, 25 bp, Homo sapien
tttagtttcttttcagttacatcca

SEQ ID NO: 1898450 - DNA, 25 bp, Homo sapien
gtttcttttcagttacatccacata

SEQ ID NO: 1898451 - DNA, 25 bp, Homo sapien
ttagtttcttttcagttacatccac

SEQ ID NO: 1898452 - DNA, 25 bp, Homo sapien
tctgtctccttcagcattttgcttc

SEQ ID NO: 1898453 - DNA, 25 bp, Homo sapien
gcttcatggctgatacccctatttt

SEQ ID NO: 1898454 - DNA, 25 bp, Homo sapien
cattttgcttcatggctgatacccc

SEQ ID NO: 1898455 - DNA, 25 bp, Homo sapien
ctgatacccctattttttcatcttc

SEQ ID NO: 1898456 - DNA, 25 bp, Homo sapien
aataaaagccattaaccctctgagt

SEQ ID NO: 1898457 - DNA, 25 bp, Homo sapien
gagtaccataatttctggtatatct

SEQ ID NO: 1898458 - DNA, 25 bp, Homo sapien
taaagtaaggcaaaacacaactgtc

SEQ ID NO: 1898459 - DNA, 25 bp, Homo sapien
caactgcaaaacgcaaagaaaattg

SEQ ID NO: 1898460 - DNA, 25 bp, Homo sapien
cttgtaggatggaaccaaaaatgcc

SEQ ID NO: 1898461 - DNA, 25 bp, Homo sapien
ttgtaggatggaaccaaaaatgccc

SEQ ID NO: 1898462 - DNA, 25 bp, Homo sapien
acttgtaggatggaaccaaaaatgc

SEQ ID NO: 1898463 - DNA, 25 bp, Homo sapien
ttctcgggctttgctgtcatcataa

SEQ ID NO: 1898464 - DNA, 25 bp, Homo sapien
tcgggctttgctgtcatcataatat

SEQ ID NO: 1898465 - DNA, 25 bp, Homo sapien
tctcgggctttgctgtcatcataat

SEQ ID NO: 1898466 - DNA, 25 bp, Homo sapien
cattctcgggctttgctgtcatcat

SEQ ID NO: 1898467 - DNA, 25 bp, Homo sapien
aagcatataaaattgcatactgcat

SEQ ID NO: 1898468 - DNA, 25 bp, Homo sapien
aatgcgcagaagacataagaaagca

SEQ ID NO: 1898469 - DNA, 25 bp, Homo sapien
agaatgcgcagaagacataagaaag

SEQ ID NO: 1898470 - DNA, 25 bp, Homo sapien
gaaagcatataaaattgcatactgc

SEQ ID NO: 1898471 - DNA, 25 bp, Homo sapien
ccagtggtgcttgcatccagtctaa

SEQ ID NO: 1898472 - DNA, 25 bp, Homo sapien
catccagtctaaggtgtcgtttcca

SEQ ID NO: 1898473 - DNA, 25 bp, Homo sapien
cagaaatgaagttagccagtggtgc

SEQ ID NO: 1898474 - DNA, 25 bp, Homo sapien
tctaaggtgtcgtttccaccagtaa

SEQ ID NO: 1898475 - DNA, 25 bp, Homo sapien
tcattttgacaaacgaactgtgggt

SEQ ID NO: 1898476 - DNA, 25 bp, Homo sapien
tatgacgactatgttcttgaaggag

SEQ ID NO: 1898477 - DNA, 25 bp, Homo sapien
tctatgtattagttaggcctctcca

SEQ ID NO: 1898478 - DNA, 25 bp, Homo sapien
aatagcaaatagtctactgtggccc

SEQ ID NO: 1898479 - DNA, 25 bp, Homo sapien
gcagcagccctacttttagacaata

SEQ ID NO: 1898480 - DNA, 25 bp, Homo sapien
ccagagtaactggtatagcagcagc

SEQ ID NO: 1898481 - DNA, 25 bp, Homo sapien
taactggtatagcagcagccctact

SEQ ID NO: 1898482 - DNA, 25 bp, Homo sapien
ccctccaaccagagtaactggtata

SEQ ID NO: 1898483 - DNA, 25 bp, Homo sapien
tccctggttcaggtgattcttccac

SEQ ID NO: 1898484 - DNA, 25 bp, Homo sapien
ttacatgcacatgccaccatgccta

SEQ ID NO: 1898485 - DNA, 25 bp, Homo sapien
catgccaccatgcctagctactttt

SEQ ID NO: 1898486 - DNA, 25 bp, Homo sapien
acctcagcctaccgagtagttggga

SEQ ID NO: 1898487 - DNA, 25 bp, Homo sapien
tccattagcctgcttgccatcagaa

SEQ ID NO: 1898488 - DNA, 25 bp, Homo sapien
taaaatgtctgtctccattagcctg

SEQ ID NO: 1898489 - DNA, 25 bp, Homo sapien
gacaggaatgctgaggtcagctgct

SEQ ID NO: 1898490 - DNA, 25 bp, Homo sapien
gccatcagaaacagatgcagaaatt

SEQ ID NO: 1898491 - DNA, 25 bp, Homo sapien
cctttcctttgagcatggatctgct

SEQ ID NO: 1898492 - DNA, 25 bp, Homo sapien
ttcctttgagcatggatctgctgct

SEQ ID NO: 1898493 - DNA, 25 bp, Homo sapien
ttgagcatggatctgctgctttgaa

SEQ ID NO: 1898494 - DNA, 25 bp, Homo sapien
gctgctttgaattctgtgtagtcat

SEQ ID NO: 1898495 - DNA, 25 bp, Homo sapien
gaagtgttaacatgttccacaaacg

SEQ ID NO: 1898496 - DNA, 25 bp, Homo sapien
tgcattcttagctggctctctgctg

SEQ ID NO: 1898497 - DNA, 25 bp, Homo sapien
tccacaaacgtgtcctggctcacag

SEQ ID NO: 1898498 - DNA, 25 bp, Homo sapien
caaggttatcatctcatcgccacaa

SEQ ID NO: 1898499 - DNA, 25 bp, Homo sapien
tggtcatttctaagtaacagtacaa

SEQ ID NO: 1898500 - DNA, 25 bp, Homo sapien
tcaatcagtccagcctttctaagga

SEQ ID NO: 1898501 - DNA, 25 bp, Homo sapien
taggcacatagggaaataattgaca

SEQ ID NO: 1898502 - DNA, 25 bp, Homo sapien
ctagctctcagtccttacatttgaa

SEQ ID NO: 1898503 - DNA, 25 bp, Homo sapien
gatacattgcaatggtccacactgc

SEQ ID NO: 1898504 - DNA, 25 bp, Homo sapien
gcaattactgtccaattccaatcta

SEQ ID NO: 1898505 - DNA, 25 bp, Homo sapien
cactgctcagacctggcaattactg

SEQ ID NO: 1898506 - DNA, 25 bp, Homo sapien
tgcaatggtccacactgctcagacc

SEQ ID NO: 1898507 - DNA, 25 bp, Homo sapien
ttcagtgcttggacacaatcgcctt

SEQ ID NO: 1898508 - DNA, 25 bp, Homo sapien
acaatcgcctttggcagatggcttt

SEQ ID NO: 1898509 - DNA, 25 bp, Homo sapien
cagtgcttggacacaatcgcctttg

SEQ ID NO: 1898510 - DNA, 25 bp, Homo sapien
cacaatcgcctttggcagatggctt

SEQ ID NO: 1898511 - DNA, 25 bp, Homo sapien
tacccggtaaagaatacatattgct

SEQ ID NO: 1898512 - DNA, 25 bp, Homo sapien
cacaataatcagtagttgtttatga

SEQ ID NO: 1898513 - DNA, 25 bp, Homo sapien
ttatatgaagaaaaagcgatgtttt

SEQ ID NO: 1898514 - DNA, 25 bp, Homo sapien
tgataagtgaaacatattgaataac

SEQ ID NO: 1898515 - DNA, 25 bp, Homo sapien
tagaaaaccaatagtcaagattatg

SEQ ID NO: 1898516 - DNA, 25 bp, Homo sapien
tgattgctgcatagaaaaccaatag

SEQ ID NO: 1898517 - DNA, 25 bp, Homo sapien
aaccaatagtcaagattatgttgaa

SEQ ID NO: 1898518 - DNA, 25 bp, Homo sapien
aatgattgctgcatagaaaaccaat

SEQ ID NO: 1898519 - DNA, 25 bp, Homo sapien
ggtcacaggttccactattagcaag

SEQ ID NO: 1898520 - DNA, 25 bp, Homo sapien
cacttaggctagtgaaggcagcgcc

SEQ ID NO: 1898521 - DNA, 25 bp, Homo sapien
tttgcagagcacagaaccattaggc

SEQ ID NO: 1898522 - DNA, 25 bp, Homo sapien
aacagtaagcttgaacggaatccag

SEQ ID NO: 1898523 - DNA, 25 bp, Homo sapien
ttatcctgtggaatagtgccaatag

SEQ ID NO: 1898524 - DNA, 25 bp, Homo sapien
tttatcctgtggaatagtgccaata

SEQ ID NO: 1898525 - DNA, 25 bp, Homo sapien
aggagaattgtttcatctcaggagt

SEQ ID NO: 1898526 - DNA, 25 bp, Homo sapien
tcaagaacagcttgggcaacatagg

SEQ ID NO: 1898527 - DNA, 25 bp, Homo sapien
gcaggagaattgtttcatctcagga

SEQ ID NO: 1898528 - DNA, 25 bp, Homo sapien
gcaacatagggagatctcagctcta

SEQ ID NO: 1898529 - DNA, 25 bp, Homo sapien
tgcaccactgtattcttctacgagt

SEQ ID NO: 1898530 - DNA, 25 bp, Homo sapien
cactgtattcttctacgagttccaa

SEQ ID NO: 1898531 - DNA, 25 bp, Homo sapien
tcttctacgagttccaatctatcgt

SEQ ID NO: 1898532 - DNA, 25 bp, Homo sapien
gagttccaatctatcgtcccctttc

SEQ ID NO: 1898533 - DNA, 25 bp, Homo sapien
atccccggcagagctacaggcttcc

SEQ ID NO: 1898534 - DNA, 25 bp, Homo sapien
tccagcagaaactgcggacaggctt

SEQ ID NO: 1898535 - DNA, 25 bp, Homo sapien
agaggctgaccactccagcagaaac

SEQ ID NO: 1898536 - DNA, 25 bp, Homo sapien
ggacaggctttcatccccggcagag

SEQ ID NO: 1898537 - DNA, 25 bp, Homo sapien
ctcgaatggaagaagaaggcagtcc

SEQ ID NO: 1898538 - DNA, 25 bp, Homo sapien
cgaatggaagaagaaggcagtccgt

SEQ ID NO: 1898539 - DNA, 25 bp, Homo sapien
tcgaatggaagaagaaggcagtccg

SEQ ID NO: 1898540 - DNA, 25 bp, Homo sapien
aatggtcacacaaccaatacttgtt

SEQ ID NO: 1898541 - DNA, 25 bp, Homo sapien
cctggcaaatggtcacacaaccaat

SEQ ID NO: 1898542 - DNA, 25 bp, Homo sapien
tggtcacacaaccaatacttgttga

SEQ ID NO: 1898543 - DNA, 25 bp, Homo sapien
ggcaaatggtcacacaaccaatact

SEQ ID NO: 1898544 - DNA, 25 bp, Homo sapien
gccagtgaaagcacactgtagccat

SEQ ID NO: 1898545 - DNA, 25 bp, Homo sapien
tgaaagcacactgtagccatatctt

SEQ ID NO: 1898546 - DNA, 25 bp, Homo sapien
cagtgaaagcacactgtagccatat

SEQ ID NO: 1898547 - DNA, 25 bp, Homo sapien
aagcacactgtagccatatcttcag

SEQ ID NO: 1898548 - DNA, 25 bp, Homo sapien
tgtcaaggctgtagtcgttctgaac

SEQ ID NO: 1898549 - DNA, 25 bp, Homo sapien
gatttccagggttaatgtcaaggct

SEQ ID NO: 1898550 - DNA, 25 bp, Homo sapien
cattttagcacagaatctgatttcc

SEQ ID NO: 1898551 - DNA, 25 bp, Homo sapien
atctgttccttggtcacccccattt

SEQ ID NO: 1898552 - DNA, 25 bp, Homo sapien
tggccccctctgcttacgtggaggt

SEQ ID NO: 1898553 - DNA, 25 bp, Homo sapien
cggcgtccgctctggtcaggcttga

SEQ ID NO: 1898554 - DNA, 25 bp, Homo sapien
ctgcgcgcctccctgaagggcaccg

SEQ ID NO: 1898555 - DNA, 25 bp, Homo sapien
cgcagtgctcgaattctcgctgggc

SEQ ID NO: 1898556 - DNA, 25 bp, Homo sapien
aatattggctcttgcaataattttt

SEQ ID NO: 1898557 - DNA, 25 bp, Homo sapien
gtgagaaatactggccacttaactg

SEQ ID NO: 1898558 - DNA, 25 bp, Homo sapien
ctggtgagaaatactggccacttaa

SEQ ID NO: 1898559 - DNA, 25 bp, Homo sapien
tggtgagaaatactggccacttaac

SEQ ID NO: 1898560 - DNA, 25 bp, Homo sapien
ggtgagaaatactggccacttaact

SEQ ID NO: 1898561 - DNA, 25 bp, Homo sapien
ctctggtttgtgctggaggcaagtt

SEQ ID NO: 1898562 - DNA, 25 bp, Homo sapien
ataggattttaaggttcagcatgag

SEQ ID NO: 1898563 - DNA, 25 bp, Homo sapien
ggcagctgagctgcgaataggattt

SEQ ID NO: 1898564 - DNA, 25 bp, Homo sapien
tgagatccaggagccctgaaacaac

SEQ ID NO: 1898565 - DNA, 25 bp, Homo sapien
tttgttgtattctgtgaactggcca

SEQ ID NO: 1898566 - DNA, 25 bp, Homo sapien
gcaacccaggggaagacaacaatct

SEQ ID NO: 1898567 - DNA, 25 bp, Homo sapien
ggcaacccaggggaagacaacaatc

SEQ ID NO: 1898568 - DNA, 25 bp, Homo sapien
caacccaggggaagacaacaatctt

SEQ ID NO: 1898569 - DNA, 25 bp, Homo sapien
aattcatgtcgtttccaggctgcct

SEQ ID NO: 1898570 - DNA, 25 bp, Homo sapien
tgaagcattgcattcgtggagatga

SEQ ID NO: 1898571 - DNA, 25 bp, Homo sapien
aagcattgcattcgtggagatgaaa

SEQ ID NO: 1898572 - DNA, 25 bp, Homo sapien
cattgcattcgtggagatgaaatat

SEQ ID NO: 1898573 - DNA, 25 bp, Homo sapien
ccccaaaagcccagttcttattctg

SEQ ID NO: 1898574 - DNA, 25 bp, Homo sapien
ttcctagttctgctaatttcctcat

SEQ ID NO: 1898575 - DNA, 25 bp, Homo sapien
gatccttgatgtttcctagttctgc

SEQ ID NO: 1898576 - DNA, 25 bp, Homo sapien
cttattctgtttcagatccttgatg

SEQ ID NO: 1898577 - DNA, 25 bp, Homo sapien
tcacggcatatcccataaatattgc

SEQ ID NO: 1898578 - DNA, 25 bp, Homo sapien
cacggcatatcccataaatattgca

SEQ ID NO: 1898579 - DNA, 25 bp, Homo sapien
acggcatatcccataaatattgcat

SEQ ID NO: 1898580 - DNA, 25 bp, Homo sapien
caggccctggtgacacaaagacaaa

SEQ ID NO: 1898581 - DNA, 25 bp, Homo sapien
ctcttttgaacactgaaagccccac

SEQ ID NO: 1898582 - DNA, 25 bp, Homo sapien
ctcctcttcaatcgcagcccctctg

SEQ ID NO: 1898583 - DNA, 25 bp, Homo sapien
ctgacctatactttattacagatgg

SEQ ID NO: 1898584 - DNA, 25 bp, Homo sapien
tcttttgaacactgaaagccccacc

SEQ ID NO: 1898585 - DNA, 25 bp, Homo sapien
tctcctttcaactgggggtcttctg

SEQ ID NO: 1898586 - DNA, 25 bp, Homo sapien
gatatatctgcctatcacctgatgc

SEQ ID NO: 1898587 - DNA, 25 bp, Homo sapien
catcagggacctgcatatgctggag

SEQ ID NO: 1898588 - DNA, 25 bp, Homo sapien
tacaaccaactgattgctggatgca

SEQ ID NO: 1898589 - DNA, 25 bp, Homo sapien
cacctgatgcagtctgtacaaccaa

SEQ ID NO: 1898590 - DNA, 25 bp, Homo sapien
tgtctggatgacaccctgaacctgt

SEQ ID NO: 1898591 - DNA, 25 bp, Homo sapien
cagctgtgcctgaactggccaatgg

SEQ ID NO: 1898592 - DNA, 25 bp, Homo sapien
taaagagcctaagctgtcagatggg

SEQ ID NO: 1898593 - DNA, 25 bp, Homo sapien
gatgaatgccgtgctaggatcctgt

SEQ ID NO: 1898594 - DNA, 25 bp, Homo sapien
ccaaggtcagctgtataatatcagc

SEQ ID NO: 1898595 - DNA, 25 bp, Homo sapien
tttgaagtacatgctgatggattcc

SEQ ID NO: 1898596 - DNA, 25 bp, Homo sapien
gctgatggattcctggtaggcctca

SEQ ID NO: 1898597 - DNA, 25 bp, Homo sapien
gcaattccaacttggctctttgggc

SEQ ID NO: 1898598 - DNA, 25 bp, Homo sapien
ctgggtacataaggaaatgttggca

SEQ ID NO: 1898599 - DNA, 25 bp, Homo sapien
tgtttttctctataacgatggtctg

SEQ ID NO: 1898600 - DNA, 25 bp, Homo sapien
accaggaattctattgatccatcgg

SEQ ID NO: 1898601 - DNA, 25 bp, Homo sapien
gatccatcggtaggcatgtttttct

SEQ ID NO: 1898602 - DNA, 25 bp, Homo sapien
cgatggtctgtagcaccttcccaaa

SEQ ID NO: 1898603 - DNA, 25 bp, Homo sapien
ttccttcaagtccaattgccatatt

SEQ ID NO: 1898604 - DNA, 25 bp, Homo sapien
ccttcaagtccaattgccatattct

SEQ ID NO: 1898605 - DNA, 25 bp, Homo sapien
gatgattaattgtagagacaccatt

SEQ ID NO: 1898606 - DNA, 25 bp, Homo sapien
ttccaaatcccatgatgattaattg

SEQ ID NO: 1898607 - DNA, 25 bp, Homo sapien
tctcactataccgtcggcctctggt

SEQ ID NO: 1898608 - DNA, 25 bp, Homo sapien
gggactgaaagctgagttgaaatta

SEQ ID NO: 1898609 - DNA, 25 bp, Homo sapien
tggcagcacagaaacaatcctctct

SEQ ID NO: 1898610 - DNA, 25 bp, Homo sapien
ctggagaagagccttctcactatac

SEQ ID NO: 1898611 - DNA, 25 bp, Homo sapien
acactgctgtcctggccctgccatc

SEQ ID NO: 1898612 - DNA, 25 bp, Homo sapien
tgtcctggccctgccatcacttcac

SEQ ID NO: 1898613 - DNA, 25 bp, Homo sapien
tcaccggtttctgccacactgctgt

SEQ ID NO: 1898614 - DNA, 25 bp, Homo sapien
tggccctgccatcacttcacacaaa

SEQ ID NO: 1898615 - DNA, 25 bp, Homo sapien
tgacagtggcgaagttctgcaaact

SEQ ID NO: 1898616 - DNA, 25 bp, Homo sapien
aaactgcagcacatatttcggtaat

SEQ ID NO: 1898617 - DNA, 25 bp, Homo sapien
cccctttaatctcgtgacagcttta

SEQ ID NO: 1898618 - DNA, 25 bp, Homo sapien
gcaatgacttgcagccccctttaat

SEQ ID NO: 1898619 - DNA, 25 bp, Homo sapien
tattgtagttttactcctgtctctg

SEQ ID NO: 1898620 - DNA, 25 bp, Homo sapien
agcttctattgtagttttactcctg

SEQ ID NO: 1898621 - DNA, 25 bp, Homo sapien
atagcttctattgtagttttactcc

SEQ ID NO: 1898622 - DNA, 25 bp, Homo sapien
gttttactcctgtctctgttggctt

SEQ ID NO: 1898623 - DNA, 25 bp, Homo sapien
taaacccaacaatgaaactcagtgt

SEQ ID NO: 1898624 - DNA, 25 bp, Homo sapien
aaacccaacaatgaaactcagtgta

SEQ ID NO: 1898625 - DNA, 25 bp, Homo sapien
aacccaacaatgaaactcagtgtac

SEQ ID NO: 1898626 - DNA, 25 bp, Homo sapien
ctaaacccaacaatgaaactcagtg

SEQ ID NO: 1898627 - DNA, 25 bp, Homo sapien
tattaagcaggatagtctggtactc

SEQ ID NO: 1898628 - DNA, 25 bp, Homo sapien
cactgctgtaaatggttcccggaac

SEQ ID NO: 1898629 - DNA, 25 bp, Homo sapien
gtttgcattgtacaaaaacatcttc

SEQ ID NO: 1898630 - DNA, 25 bp, Homo sapien
gttctaaaggcatcaagattcacct

SEQ ID NO: 1898631 - DNA, 25 bp, Homo sapien
cagggtgcctataataccatccgat

SEQ ID NO: 1898632 - DNA, 25 bp, Homo sapien
gcctataataccatccgattgcatt

SEQ ID NO: 1898633 - DNA, 25 bp, Homo sapien
tggccagggtgcctataataccatc

SEQ ID NO: 1898634 - DNA, 25 bp, Homo sapien
aataccatccgattgcatttttaag

SEQ ID NO: 1898635 - DNA, 25 bp, Homo sapien
tggccatgtactcatatgcaacagc

SEQ ID NO: 1898636 - DNA, 25 bp, Homo sapien
tgcaacagcctcagcattttctcgg

SEQ ID NO: 1898637 - DNA, 25 bp, Homo sapien
gcccataataatcgtggtttcacca

SEQ ID NO: 1898638 - DNA, 25 bp, Homo sapien
aaaactgcccataataatcgtggtt

SEQ ID NO: 1898639 - DNA, 25 bp, Homo sapien
cccctgacctggcatgcatcatcat

SEQ ID NO: 1898640 - DNA, 25 bp, Homo sapien
agttgccccctgacctggcatgcat

SEQ ID NO: 1898641 - DNA, 25 bp, Homo sapien
ccaagttgccccctgacctggcatg

SEQ ID NO: 1898642 - DNA, 25 bp, Homo sapien
cacttccaagttgccccctgacctg

SEQ ID NO: 1898643 - DNA, 25 bp, Homo sapien
tggtgattgttaacccagggctttg

SEQ ID NO: 1898644 - DNA, 25 bp, Homo sapien
cagtagagctaatgctgagattttg

SEQ ID NO: 1898645 - DNA, 25 bp, Homo sapien
cttcagtagagctaatgctgagatt

SEQ ID NO: 1898646 - DNA, 25 bp, Homo sapien
tactttaaagtaatggtgattgtta

SEQ ID NO: 1898647 - DNA, 25 bp, Homo sapien
atgtcaacaatcttcaacacttctt

SEQ ID NO: 1898648 - DNA, 25 bp, Homo sapien
catggtgtctctgaagatgcttaac

SEQ ID NO: 1898649 - DNA, 25 bp, Homo sapien
gatgcttaacataagtatagatagc

SEQ ID NO: 1898650 - DNA, 25 bp, Homo sapien
caagaggtaggtgattgctttccag

SEQ ID NO: 1898651 - DNA, 25 bp, Homo sapien
tatctgacggagaaaatatcaagag

SEQ ID NO: 1898652 - DNA, 25 bp, Homo sapien
tcagcaggtgaacttcaataagacc

SEQ ID NO: 1898653 - DNA, 25 bp, Homo sapien
ctgtcagcaggtgaacttcaataag

SEQ ID NO: 1898654 - DNA, 25 bp, Homo sapien
gaacttcaataagacccaccctcaa

SEQ ID NO: 1898655 - DNA, 25 bp, Homo sapien
gcaggtgaacttcaataagacccac

SEQ ID NO: 1898656 - DNA, 25 bp, Homo sapien
ctgatctgggccagatttccatatt

SEQ ID NO: 1898657 - DNA, 25 bp, Homo sapien
atttttataggtggtcccttggcat

SEQ ID NO: 1898658 - DNA, 25 bp, Homo sapien
tgatctgggccagatttccatattt

SEQ ID NO: 1898659 - DNA, 25 bp, Homo sapien
gaagagtggtcaaatgctgggaaaa

SEQ ID NO: 1898660 - DNA, 25 bp, Homo sapien
caagagtactttgcaatggaaacac

SEQ ID NO: 1898661 - DNA, 25 bp, Homo sapien
caaagttaaatgagaccaatgtgtt

SEQ ID NO: 1898662 - DNA, 25 bp, Homo sapien
ggaaaatcactgacggtcaaagtta

SEQ ID NO: 1898663 - DNA, 25 bp, Homo sapien
taatatctctggcatagaatttgtc

SEQ ID NO: 1898664 - DNA, 25 bp, Homo sapien
cgttgtaagaaggagtaagggccag

SEQ ID NO: 1898665 - DNA, 25 bp, Homo sapien
tctccagtgttacgttgtaagaagg

SEQ ID NO: 1898666 - DNA, 25 bp, Homo sapien
tttataatgtgattagtctccagtg

SEQ ID NO: 1898667 - DNA, 25 bp, Homo sapien
ctcagacacaaagctttctcccttt

SEQ ID NO: 1898668 - DNA, 25 bp, Homo sapien
cagacacaaagctttctcccttttc

SEQ ID NO: 1898669 - DNA, 25 bp, Homo sapien
gacacaaagctttctcccttttcca

SEQ ID NO: 1898670 - DNA, 25 bp, Homo sapien
acacaaagctttctcccttttccat

SEQ ID NO: 1898671 - DNA, 25 bp, Homo sapien
cagatttgaatctactcgtgtctag

SEQ ID NO: 1898672 - DNA, 25 bp, Homo sapien
ttacccagaaaaattgcaccttgag

SEQ ID NO: 1898673 - DNA, 25 bp, Homo sapien
cgtgtctagagcataaagcgatacc

SEQ ID NO: 1898674 - DNA, 25 bp, Homo sapien
gactgttggtatcattgtgttcaca

SEQ ID NO: 1898675 - DNA, 25 bp, Homo sapien
ttcactgttggaaggacccaggaca

SEQ ID NO: 1898676 - DNA, 25 bp, Homo sapien
gattctttcaaaggtacccagtgta

SEQ ID NO: 1898677 - DNA, 25 bp, Homo sapien
gaccaattatgaccgatccctggga

SEQ ID NO: 1898678 - DNA, 25 bp, Homo sapien
ggcaaggagggacaaattcaaccaa

SEQ ID NO: 1898679 - DNA, 25 bp, Homo sapien
catagtctgaatgctgctcatgatt

SEQ ID NO: 1898680 - DNA, 25 bp, Homo sapien
aaccagtgtgatccctaaactcatc

SEQ ID NO: 1898681 - DNA, 25 bp, Homo sapien
tcttttgatgaccaaccagtgtgat

SEQ ID NO: 1898682 - DNA, 25 bp, Homo sapien
aatgtagcatttgtgctctcatagt

SEQ ID NO: 1898683 - DNA, 25 bp, Homo sapien
ccatcttaatagcttgtagccattc

SEQ ID NO: 1898684 - DNA, 25 bp, Homo sapien
gaaatcaggagtgttttgatccaga

SEQ ID NO: 1898685 - DNA, 25 bp, Homo sapien
tagtcatcctggctactgattcaag

SEQ ID NO: 1898686 - DNA, 25 bp, Homo sapien
tcaagggaattgtagccagctgccg

SEQ ID NO: 1898687 - DNA, 25 bp, Homo sapien
cagactatttgggtttcgaatcatt

SEQ ID NO: 1898688 - DNA, 25 bp, Homo sapien
gccaacaatccaacattagctggtg

SEQ ID NO: 1898689 - DNA, 25 bp, Homo sapien
tttggcctttcagcacgctcctttt

SEQ ID NO: 1898690 - DNA, 25 bp, Homo sapien
tccatgggtgctggtaaacgataac

SEQ ID NO: 1898691 - DNA, 25 bp, Homo sapien
ttattaaggagtgcgtgaagtgcag

SEQ ID NO: 1898692 - DNA, 25 bp, Homo sapien
tgcgtgaagtgcaggatatgatgac

SEQ ID NO: 1898693 - DNA, 25 bp, Homo sapien
cgtgaagtgcaggatatgatgacat

SEQ ID NO: 1898694 - DNA, 25 bp, Homo sapien
attaagcatgttattaaggagtgcg

SEQ ID NO: 1898695 - DNA, 25 bp, Homo sapien
tgacatgtcccaataaggtctttct

SEQ ID NO: 1898696 - DNA, 25 bp, Homo sapien
gctgatgtgaatttccggtactgga

SEQ ID NO: 1898697 - DNA, 25 bp, Homo sapien
ggatggcttcgggtgctgtccacct

SEQ ID NO: 1898698 - DNA, 25 bp, Homo sapien
ggtgctgtccaccttactggaattt

SEQ ID NO: 1898699 - DNA, 25 bp, Homo sapien
tctggatcatcctctataactcggg

SEQ ID NO: 1898700 - DNA, 25 bp, Homo sapien
ggtccctgtgaacatatcccatatc

SEQ ID NO: 1898701 - DNA, 25 bp, Homo sapien
agtagttgtatagacagcttctgga

SEQ ID NO: 1898702 - DNA, 25 bp, Homo sapien
gacactttacaaacgagattgctgt

SEQ ID NO: 1898703 - DNA, 25 bp, Homo sapien
aaaataaaagcccagttaactgcat

SEQ ID NO: 1898704 - DNA, 25 bp, Homo sapien
aaataaaagcccagttaactgcata

SEQ ID NO: 1898705 - DNA, 25 bp, Homo sapien
gaaatgcatctagggctccattttc

SEQ ID NO: 1898706 - DNA, 25 bp, Homo sapien
ccatgaactctattactatcatgac

SEQ ID NO: 1898707 - DNA, 25 bp, Homo sapien
gagaaatgcatctagggctccattt

SEQ ID NO: 1898708 - DNA, 25 bp, Homo sapien
cctgagaaatgcatctagggctcca

SEQ ID NO: 1898709 - DNA, 25 bp, Homo sapien
tgataaaataaagatataaccaata

SEQ ID NO: 1898710 - DNA, 25 bp, Homo sapien
tttgataaaataaagatataaccaa

SEQ ID NO: 1898711 - DNA, 25 bp, Homo sapien
aaataaagatataaccaatatctac

SEQ ID NO: 1898712 - DNA, 25 bp, Homo sapien
actcagtctttttgataaaataaag

SEQ ID NO: 1898713 - DNA, 25 bp, Homo sapien
ggaagtttcaaacggccactgcaga

SEQ ID NO: 1898714 - DNA, 25 bp, Homo sapien
gggtttttatggctactgcaacatc

SEQ ID NO: 1898715 - DNA, 25 bp, Homo sapien
ccaaatggacaacattcgggtggtc

SEQ ID NO: 1898716 - DNA, 25 bp, Homo sapien
gccccatgatgcttgcttcacacaa

SEQ ID NO: 1898717 - DNA, 25 bp, Homo sapien
ttgatggacagctctatttgggtcc

SEQ ID NO: 1898718 - DNA, 25 bp, Homo sapien
gaggcatctagctccttggcgaatt

SEQ ID NO: 1898719 - DNA, 25 bp, Homo sapien
gcaccaatcacacgctcaattttaa

SEQ ID NO: 1898720 - DNA, 25 bp, Homo sapien
ccttggcgaattgatggacagctct

SEQ ID NO: 1898721 - DNA, 25 bp, Homo sapien
tatattacactgcagcctaactgtg

SEQ ID NO: 1898722 - DNA, 25 bp, Homo sapien
tagaggccagatatacaaaatgcag

SEQ ID NO: 1898723 - DNA, 25 bp, Homo sapien
ggctctggaagatcttaactgctga

SEQ ID NO: 1898724 - DNA, 25 bp, Homo sapien
tgctgaggaggtagccaatatgcct

SEQ ID NO: 1898725 - DNA, 25 bp, Homo sapien
tggtcagctttgctataaccacagt

SEQ ID NO: 1898726 - DNA, 25 bp, Homo sapien
gaaagtaaagctcttcatcgccttc

SEQ ID NO: 1898727 - DNA, 25 bp, Homo sapien
aaagtaaagctcttcatcgccttct

SEQ ID NO: 1898728 - DNA, 25 bp, Homo sapien
aaagaccatgaacaccaaaatgatg

SEQ ID NO: 1898729 - DNA, 25 bp, Homo sapien
aaatgatggtcccagctacagcaac

SEQ ID NO: 1898730 - DNA, 25 bp, Homo sapien
accacagcaatgataataacaggat

SEQ ID NO: 1898731 - DNA, 25 bp, Homo sapien
catgaacaccaaaatgatggtccca

SEQ ID NO: 1898732 - DNA, 25 bp, Homo sapien
gcagcagtaaaagcccgaatctgga

SEQ ID NO: 1898733 - DNA, 25 bp, Homo sapien
tgttgagtaggtccgttccctttga

SEQ ID NO: 1898734 - DNA, 25 bp, Homo sapien
tctagtgtagcaacatcaagtctgg

SEQ ID NO: 1898735 - DNA, 25 bp, Homo sapien
gtaatttccataaccagcagcagta

SEQ ID NO: 1898736 - DNA, 25 bp, Homo sapien
caggaaagctcgacactccgctgca

SEQ ID NO: 1898737 - DNA, 25 bp, Homo sapien
tgccaggaaagctcgacactccgct

SEQ ID NO: 1898738 - DNA, 25 bp, Homo sapien
aagctcgacactccgctgcagtact

SEQ ID NO: 1898739 - DNA, 25 bp, Homo sapien
tccattgggatgctctggttcctgc

SEQ ID NO: 1898740 - DNA, 25 bp, Homo sapien
catttaatataatgctgtcatggaa

SEQ ID NO: 1898741 - DNA, 25 bp, Homo sapien
tcatttaatataatgctgtcatgga

SEQ ID NO: 1898742 - DNA, 25 bp, Homo sapien
caaggtaaactaacggagttgtgca

SEQ ID NO: 1898743 - DNA, 25 bp, Homo sapien
tctcatgtccttgactaaaaggagc

SEQ ID NO: 1898744 - DNA, 25 bp, Homo sapien
aggaaggcagcttctattggactgt

SEQ ID NO: 1898745 - DNA, 25 bp, Homo sapien
tctcagttctagattgaagacagga

SEQ ID NO: 1898746 - DNA, 25 bp, Homo sapien
tactagagccacctttgcaaactta

SEQ ID NO: 1898747 - DNA, 25 bp, Homo sapien
ttgctactgtcaatacctctactag

SEQ ID NO: 1898748 - DNA, 25 bp, Homo sapien
tctactagagccacctttgcaaact

SEQ ID NO: 1898749 - DNA, 25 bp, Homo sapien
tactgtcaatacctctactagagcc

SEQ ID NO: 1898750 - DNA, 25 bp, Homo sapien
tactgtagtccattaagtggcaaca

SEQ ID NO: 1898751 - DNA, 25 bp, Homo sapien
ttacgtttacattaacattatactg

SEQ ID NO: 1898752 - DNA, 25 bp, Homo sapien
agatggtgaaattgcgtctctatta

SEQ ID NO: 1898753 - DNA, 25 bp, Homo sapien
aagtggcaacagcattatatctaaa

SEQ ID NO: 1898754 - DNA, 25 bp, Homo sapien
tctcttagccctcattaacttgaag

SEQ ID NO: 1898755 - DNA, 25 bp, Homo sapien
gtttcactctcttatcattcgtgta

SEQ ID NO: 1898756 - DNA, 25 bp, Homo sapien
gagacctatgcctttgctcttgatt

SEQ ID NO: 1898757 - DNA, 25 bp, Homo sapien
tgagattcctcatctctcttagccc

SEQ ID NO: 1898758 - DNA, 25 bp, Homo sapien
cattttctaatcttaccaaaatata

SEQ ID NO: 1898759 - DNA, 25 bp, Homo sapien
ttctaatcttaccaaaatatatcta

SEQ ID NO: 1898760 - DNA, 25 bp, Homo sapien
cttctacattttctaatcttaccaa

SEQ ID NO: 1898761 - DNA, 25 bp, Homo sapien
ctacattttctaatcttaccaaaat

SEQ ID NO: 1898762 - DNA, 25 bp, Homo sapien
gtgaaaaaggcccaagacccactca

SEQ ID NO: 1898763 - DNA, 25 bp, Homo sapien
tctgaaggtctgtctgccagcaata

SEQ ID NO: 1898764 - DNA, 25 bp, Homo sapien
cattgctgatggatcaggtgacaga

SEQ ID NO: 1898765 - DNA, 25 bp, Homo sapien
acctagatagggcttgataatgcaa

SEQ ID NO: 1898766 - DNA, 25 bp, Homo sapien
gaaaacacatattgtctgcaagaac

SEQ ID NO: 1898767 - DNA, 25 bp, Homo sapien
tcatgctgaacaagaaaatcgtgtc

SEQ ID NO: 1898768 - DNA, 25 bp, Homo sapien
aaatcgtgtcatccagcagatggca

SEQ ID NO: 1898769 - DNA, 25 bp, Homo sapien
tataaggatggcagggtaatttcag

SEQ ID NO: 1898770 - DNA, 25 bp, Homo sapien
gaaagtctccaattcgtattttcca

SEQ ID NO: 1898771 - DNA, 25 bp, Homo sapien
cagtgaagataaacacaaaacatac

SEQ ID NO: 1898772 - DNA, 25 bp, Homo sapien
tcagtgaagataaacacaaaacata

SEQ ID NO: 1898773 - DNA, 25 bp, Homo sapien
tataattagcgtgggctagcaggtc

SEQ ID NO: 1898774 - DNA, 25 bp, Homo sapien
tgtatccaatgttactcccacaggg

SEQ ID NO: 1898775 - DNA, 25 bp, Homo sapien
caaagagcctctgggatcggcttaa

SEQ ID NO: 1898776 - DNA, 25 bp, Homo sapien
tagcaggtccatgacagtgacatag

SEQ ID NO: 1898777 - DNA, 25 bp, Homo sapien
tggtttggttgatgttgaaaatgag

SEQ ID NO: 1898778 - DNA, 25 bp, Homo sapien
gacaacgagagcactgaagatcttg

SEQ ID NO: 1898779 - DNA, 25 bp, Homo sapien
tggagccctgtaatacccatcttca

SEQ ID NO: 1898780 - DNA, 25 bp, Homo sapien
gaggaagacttgtagaacccacggc

SEQ ID NO: 1898781 - DNA, 25 bp, Homo sapien
cacgcaacgtatggtgggtcagatg

SEQ ID NO: 1898782 - DNA, 25 bp, Homo sapien
gagcaataggactgatgtggcacat

SEQ ID NO: 1898783 - DNA, 25 bp, Homo sapien
tagtcatcagagcaataggactgat

SEQ ID NO: 1898784 - DNA, 25 bp, Homo sapien
tcagagcaataggactgatgtggca

SEQ ID NO: 1898785 - DNA, 25 bp, Homo sapien
tcatagtcatcagagcaataggact

SEQ ID NO: 1898786 - DNA, 25 bp, Homo sapien
tttgtttagcatgttattttggtag

SEQ ID NO: 1898787 - DNA, 25 bp, Homo sapien
tggtagaagtacaactctaccctcc

SEQ ID NO: 1898788 - DNA, 25 bp, Homo sapien
tagcatgttattttggtagaagtac

SEQ ID NO: 1898789 - DNA, 25 bp, Homo sapien
catgttattttggtagaagtacaac

SEQ ID NO: 1898790 - DNA, 25 bp, Homo sapien
tgccaaatacaagtggaagagaggc

SEQ ID NO: 1898791 - DNA, 25 bp, Homo sapien
tggctgaagtgccaaatacaagtgg

SEQ ID NO: 1898792 - DNA, 25 bp, Homo sapien
aggcaatgatcatggtgccttgagg

SEQ ID NO: 1898793 - DNA, 25 bp, Homo sapien
gcaatgatcatggtgccttgaggca

SEQ ID NO: 1898794 - DNA, 25 bp, Homo sapien
ctgtgatcctctcatcccaattcct

SEQ ID NO: 1898795 - DNA, 25 bp, Homo sapien
gagagagaaattgatggcatttcca

SEQ ID NO: 1898796 - DNA, 25 bp, Homo sapien
ctgctcagtcttttggagagagaaa

SEQ ID NO: 1898797 - DNA, 25 bp, Homo sapien
ctcatcccaattcctctgctcagtc

SEQ ID NO: 1898798 - DNA, 25 bp, Homo sapien
ggactgctcccaacacatagggatt

SEQ ID NO: 1898799 - DNA, 25 bp, Homo sapien
aaatgaagaagctacaagccccatg

SEQ ID NO: 1898800 - DNA, 25 bp, Homo sapien
gctcccaacacatagggattacaat

SEQ ID NO: 1898801 - DNA, 25 bp, Homo sapien
caaaatgaagaagctacaagcccca

SEQ ID NO: 1898802 - DNA, 25 bp, Homo sapien
ctattgcttccgaatttaccttcca

SEQ ID NO: 1898803 - DNA, 25 bp, Homo sapien
attgcttccgaatttaccttccaat

SEQ ID NO: 1898804 - DNA, 25 bp, Homo sapien
tattgcttccgaatttaccttccaa

SEQ ID NO: 1898805 - DNA, 25 bp, Homo sapien
tgcttccgaatttaccttccaatta

SEQ ID NO: 1898806 - DNA, 25 bp, Homo sapien
gaaggtccatatgacatagttttaa

SEQ ID NO: 1898807 - DNA, 25 bp, Homo sapien
aacctagaaacagaatatctatcaa

SEQ ID NO: 1898808 - DNA, 25 bp, Homo sapien
tcttgaaggtccatatgacatagtt

SEQ ID NO: 1898809 - DNA, 25 bp, Homo sapien
cagaatatctatcaatcttgaaggt

SEQ ID NO: 1898810 - DNA, 25 bp, Homo sapien
tttactgctactcaagggcccagac

SEQ ID NO: 1898811 - DNA, 25 bp, Homo sapien
aatatattcgtttatgccctgcctg

SEQ ID NO: 1898812 - DNA, 25 bp, Homo sapien
gaattgcgcttctggtacagagcag

SEQ ID NO: 1898813 - DNA, 25 bp, Homo sapien
gatgctactgtagggcaatcactaa

SEQ ID NO: 1898814 - DNA, 25 bp, Homo sapien
aatccagttagtccgcagccagttg

SEQ ID NO: 1898815 - DNA, 25 bp, Homo sapien
gcacacctggtatgttcgtatcggg

SEQ ID NO: 1898816 - DNA, 25 bp, Homo sapien
ggaagactgttacaatccctcaggg

SEQ ID NO: 1898817 - DNA, 25 bp, Homo sapien
tcctgaaaggcaagatagaatccct

SEQ ID NO: 1898818 - DNA, 25 bp, Homo sapien
tgtgctttagaatccagcagtagta

SEQ ID NO: 1898819 - DNA, 25 bp, Homo sapien
tgttgtgctttagaatccagcagta

SEQ ID NO: 1898820 - DNA, 25 bp, Homo sapien
tccaactctgtttgttgtgctttag

SEQ ID NO: 1898821 - DNA, 25 bp, Homo sapien
ggagaggaaatccactccaactctg

SEQ ID NO: 1898822 - DNA, 25 bp, Homo sapien
ccaggcctaggactccagggctccg

SEQ ID NO: 1898823 - DNA, 25 bp, Homo sapien
aggcctaggactccagggctccgcg

SEQ ID NO: 1898824 - DNA, 25 bp, Homo sapien
tgggggccaggcctaggactccagg

SEQ ID NO: 1898825 - DNA, 25 bp, Homo sapien
gggccaggcctaggactccagggct

SEQ ID NO: 1898826 - DNA, 25 bp, Homo sapien
aagaggagagtggctttcgggaagc

SEQ ID NO: 1898827 - DNA, 25 bp, Homo sapien
ccggtggcgccctcgctcgagaagg

SEQ ID NO: 1898828 - DNA, 25 bp, Homo sapien
ccctcgctcgagaaggagtcgggaa

SEQ ID NO: 1898829 - DNA, 25 bp, Homo sapien
gagagtggctttcgggaagaggaga

SEQ ID NO: 1898830 - DNA, 25 bp, Homo sapien
tctgacacgcgctccctgtagcgat

SEQ ID NO: 1898831 - DNA, 25 bp, Homo sapien
tgccttcaagcgtcagactctgaca

SEQ ID NO: 1898832 - DNA, 25 bp, Homo sapien
gcggcggcatttacggagagaaaaa

SEQ ID NO: 1898833 - DNA, 25 bp, Homo sapien
gctgcactttgccttcaagcgtcag

SEQ ID NO: 1898834 - DNA, 25 bp, Homo sapien
gggcttgtgaactcctagaacgcca

SEQ ID NO: 1898835 - DNA, 25 bp, Homo sapien
agcccttgggtactgcgggccgcct

SEQ ID NO: 1898836 - DNA, 25 bp, Homo sapien
cggttcccagcgctagcccttgggt

SEQ ID NO: 1898837 - DNA, 25 bp, Homo sapien
ttggtcgccgctgcgccctagaggc

SEQ ID NO: 1898838 - DNA, 25 bp, Homo sapien
ctctccccctagtgatgcagttatt

SEQ ID NO: 1898839 - DNA, 25 bp, Homo sapien
cagttatttatagcccaaactccag

SEQ ID NO: 1898840 - DNA, 25 bp, Homo sapien
ttatagcccaaactccagcccgagt

SEQ ID NO: 1898841 - DNA, 25 bp, Homo sapien
tgatgcagttatttatagcccaaac

SEQ ID NO: 1898842 - DNA, 25 bp, Homo sapien
tattccagaggaatcacagtatgcc

SEQ ID NO: 1898843 - DNA, 25 bp, Homo sapien
gaaggtttctgatcgctaacgtcag

SEQ ID NO: 1898844 - DNA, 25 bp, Homo sapien
gagcgtgcgtttctagcagatgtcc

SEQ ID NO: 1898845 - DNA, 25 bp, Homo sapien
agatgtccgtccttctgcaaacgcg

SEQ ID NO: 1898846 - DNA, 25 bp, Homo sapien
tgtggaaagtggggtcagaaggtca

SEQ ID NO: 1898847 - DNA, 25 bp, Homo sapien
ctatacaggttgcagatgtggaaag

SEQ ID NO: 1898848 - DNA, 25 bp, Homo sapien
gatgtggaaagtggggtcagaaggt

SEQ ID NO: 1898849 - DNA, 25 bp, Homo sapien
tggaaagtggggtcagaaggtcagg

SEQ ID NO: 1898850 - DNA, 25 bp, Homo sapien
gcagcgcgcgctgaatggagacatc

SEQ ID NO: 1898851 - DNA, 25 bp, Homo sapien
gcaaggattgggcactcggattcct

SEQ ID NO: 1898852 - DNA, 25 bp, Homo sapien
ggcatccttacaaattgcacagctc

SEQ ID NO: 1898853 - DNA, 25 bp, Homo sapien
gattcctcaattgctgcactatggg

SEQ ID NO: 1898854 - DNA, 25 bp, Homo sapien
tccgacgcagtgagcacttcattag

SEQ ID NO: 1898855 - DNA, 25 bp, Homo sapien
cacagaaggcgaataaggagacaag

SEQ ID NO: 1898856 - DNA, 25 bp, Homo sapien
cattagtaacccgagctttccgagc

SEQ ID NO: 1898857 - DNA, 25 bp, Homo sapien
ttattgttccgtgctggcggccgag

SEQ ID NO: 1898858 - DNA, 25 bp, Homo sapien
acagggctgtaggcggctcggaaca

SEQ ID NO: 1898859 - DNA, 25 bp, Homo sapien
ccgtcggatggacggctccgggcac

SEQ ID NO: 1898860 - DNA, 25 bp, Homo sapien
ctgtaggcggctcggaacagccctg

SEQ ID NO: 1898861 - DNA, 25 bp, Homo sapien
tcggatggacggctccgggcacagg

SEQ ID NO: 1898862 - DNA, 25 bp, Homo sapien
tgtgcaaagcggagcagccagatgt

SEQ ID NO: 1898863 - DNA, 25 bp, Homo sapien
tcccctgtgtgtgcaaagcggagca

SEQ ID NO: 1898864 - DNA, 25 bp, Homo sapien
aaaataatccatgaagggtaccgag

SEQ ID NO: 1898865 - DNA, 25 bp, Homo sapien
tccatgaagggtaccgagtttgaaa

SEQ ID NO: 1898866 - DNA, 25 bp, Homo sapien
tcttgagtcgtggatttttaaatgc

SEQ ID NO: 1898867 - DNA, 25 bp, Homo sapien
tgtgctccttgcatcgattcccctt

SEQ ID NO: 1898868 - DNA, 25 bp, Homo sapien
gatcggctgctccacgtttagcttt

SEQ ID NO: 1898869 - DNA, 25 bp, Homo sapien
gctgtttgttccgaagtagcttttg

SEQ ID NO: 1898870 - DNA, 25 bp, Homo sapien
tccgactgcagaccggccgcttgct

SEQ ID NO: 1898871 - DNA, 25 bp, Homo sapien
tgcaagtctccgactgcagaccggc

SEQ ID NO: 1898872 - DNA, 25 bp, Homo sapien
gcagaccggccgcttgctccacact

SEQ ID NO: 1898873 - DNA, 25 bp, Homo sapien
tgcctgcaagtctccgactgcagac

SEQ ID NO: 1898874 - DNA, 25 bp, Homo sapien
ttggattgcctccactttgatagtt

SEQ ID NO: 1898875 - DNA, 25 bp, Homo sapien
atagtttgttgagcgaagtgagaca

SEQ ID NO: 1898876 - DNA, 25 bp, Homo sapien
gcgaagtgagacattaggagagaac

SEQ ID NO: 1898877 - DNA, 25 bp, Homo sapien
ccttctgatggttgcgtatcgtttt

SEQ ID NO: 1898878 - DNA, 25 bp, Homo sapien
taggtcctagctaagcccttcttga

SEQ ID NO: 1898879 - DNA, 25 bp, Homo sapien
actgctgacaaacttcctttgtatc

SEQ ID NO: 1898880 - DNA, 25 bp, Homo sapien
tgaaggatggccaaatactgctgac

SEQ ID NO: 1898881 - DNA, 25 bp, Homo sapien
tcttccatgacaaggttgaagttcc

SEQ ID NO: 1898882 - DNA, 25 bp, Homo sapien
ctcttgcttggaaccagttacagat

SEQ ID NO: 1898883 - DNA, 25 bp, Homo sapien
atggacactgggttgatctgtgcca

SEQ ID NO: 1898884 - DNA, 25 bp, Homo sapien
gatatttgccattctgtaactctca

SEQ ID NO: 1898885 - DNA, 25 bp, Homo sapien
tggacactgggttgatctgtgccat

SEQ ID NO: 1898886 - DNA, 25 bp, Homo sapien
ctgtccactcataaactctctcaat

SEQ ID NO: 1898887 - DNA, 25 bp, Homo sapien
tgaaagggtaggcaacagatagatc

SEQ ID NO: 1898888 - DNA, 25 bp, Homo sapien
gcagctttgacaaagggccagagga

SEQ ID NO: 1898889 - DNA, 25 bp, Homo sapien
tatgcagtcgccctagccataaagg

SEQ ID NO: 1898890 - DNA, 25 bp, Homo sapien
gacatcctactaaaagaagcagctt

SEQ ID NO: 1898891 - DNA, 25 bp, Homo sapien
aataatttgatcccttaggccccat

SEQ ID NO: 1898892 - DNA, 25 bp, Homo sapien
ttcataataatttgatcccttaggc

SEQ ID NO: 1898893 - DNA, 25 bp, Homo sapien
cataataatttgatcccttaggccc

SEQ ID NO: 1898894 - DNA, 25 bp, Homo sapien
taataatttgatcccttaggcccca

SEQ ID NO: 1898895 - DNA, 25 bp, Homo sapien
tcatatccgggctggaaaagtgggt

SEQ ID NO: 1898896 - DNA, 25 bp, Homo sapien
cacaaggatgaatggcgtagcctca

SEQ ID NO: 1898897 - DNA, 25 bp, Homo sapien
aagtagtagattgaggctgacacca

SEQ ID NO: 1898898 - DNA, 25 bp, Homo sapien
gcacaaaaccagtccaaaagtagta

SEQ ID NO: 1898899 - DNA, 25 bp, Homo sapien
ttatcacaggcattatttagcaggg

SEQ ID NO: 1898900 - DNA, 25 bp, Homo sapien
gagcaagtgctatgggatctaggca

SEQ ID NO: 1898901 - DNA, 25 bp, Homo sapien
gggtagttccaaggatacactgtga

SEQ ID NO: 1898902 - DNA, 25 bp, Homo sapien
tccttctgcatcaaagatcaccatt

SEQ ID NO: 1898903 - DNA, 25 bp, Homo sapien
ggcaaacaataatagggtcctcaca

SEQ ID NO: 1898904 - DNA, 25 bp, Homo sapien
caaacaataatagggtcctcacagg

SEQ ID NO: 1898905 - DNA, 25 bp, Homo sapien
gcaaacaataatagggtcctcacag

SEQ ID NO: 1898906 - DNA, 25 bp, Homo sapien
aacaataatagggtcctcacaggac

SEQ ID NO: 1898907 - DNA, 25 bp, Homo sapien
ttgacataattagaggtttcaggga

SEQ ID NO: 1898908 - DNA, 25 bp, Homo sapien
tgtgttccctgaactccgaagctgt

SEQ ID NO: 1898909 - DNA, 25 bp, Homo sapien
tggtctcgtcctcagtgtgttccct

SEQ ID NO: 1898910 - DNA, 25 bp, Homo sapien
tcacatgggactggattgacataat

SEQ ID NO: 1898911 - DNA, 25 bp, Homo sapien
gcttcatcagttggtggcacaggaa

SEQ ID NO: 1898912 - DNA, 25 bp, Homo sapien
ctaattggcttcatcagttggtggc

SEQ ID NO: 1898913 - DNA, 25 bp, Homo sapien
ggtggcacaggaaggatctcagaaa

SEQ ID NO: 1898914 - DNA, 25 bp, Homo sapien
ttggcttcatcagttggtggcacag

SEQ ID NO: 1898915 - DNA, 25 bp, Homo sapien
gaagtaggagttcatgggtatctga

SEQ ID NO: 1898916 - DNA, 25 bp, Homo sapien
taaaccaccagataggctctgattt

SEQ ID NO: 1898917 - DNA, 25 bp, Homo sapien
taagagtgtcatcaaccaaccaaaa

SEQ ID NO: 1898918 - DNA, 25 bp, Homo sapien
ggtatctgaattaggataaaccacc

SEQ ID NO: 1898919 - DNA, 25 bp, Homo sapien
ttgcttggaaaattactgtgaccca

SEQ ID NO: 1898920 - DNA, 25 bp, Homo sapien
cttgtctccttttgcttggaaaatt

SEQ ID NO: 1898921 - DNA, 25 bp, Homo sapien
ttccttgtctccttttgcttggaaa

SEQ ID NO: 1898922 - DNA, 25 bp, Homo sapien
tgcttggaaaattactgtgacccat

SEQ ID NO: 1898923 - DNA, 25 bp, Homo sapien
cattctcctaattcattaggtggtc

SEQ ID NO: 1898924 - DNA, 25 bp, Homo sapien
cagaattgtcaataggctaagatgt

SEQ ID NO: 1898925 - DNA, 25 bp, Homo sapien
taggtggtcgaaaagctctgtcagg

SEQ ID NO: 1898926 - DNA, 25 bp, Homo sapien
gatgtatttcaaacacgacgtccaa

SEQ ID NO: 1898927 - DNA, 25 bp, Homo sapien
ttaccaattggcatgttttgtcccc

SEQ ID NO: 1898928 - DNA, 25 bp, Homo sapien
gcttgtgttcgcatgtaaaaaattc

SEQ ID NO: 1898929 - DNA, 25 bp, Homo sapien
tgaaattcggagatttaagcttaag

SEQ ID NO: 1898930 - DNA, 25 bp, Homo sapien
ttttgggtgtcctcgaccttgtgca

SEQ ID NO: 1898931 - DNA, 25 bp, Homo sapien
gctttatagagtattagtccaactg

SEQ ID NO: 1898932 - DNA, 25 bp, Homo sapien
tctagcccagctttcacaaagcttg

SEQ ID NO: 1898933 - DNA, 25 bp, Homo sapien
gataactttttccatcgattctgct

SEQ ID NO: 1898934 - DNA, 25 bp, Homo sapien
taggccggactatgcattctagccc

SEQ ID NO: 1898935 - DNA, 25 bp, Homo sapien
agctgctctgtaccttgagaataaa

SEQ ID NO: 1898936 - DNA, 25 bp, Homo sapien
attaaagattggcacccaagtgtgg

SEQ ID NO: 1898937 - DNA, 25 bp, Homo sapien
tggcacccaagtgtggtaatgccct

SEQ ID NO: 1898938 - DNA, 25 bp, Homo sapien
tacataggcagtgctgcatcattaa

SEQ ID NO: 1898939 - DNA, 25 bp, Homo sapien
tgaaggtaaagttctatcatggagc

SEQ ID NO: 1898940 - DNA, 25 bp, Homo sapien
gggacaaccaccaggtttgctatat

SEQ ID NO: 1898941 - DNA, 25 bp, Homo sapien
tctatcatggagcttgatacaactg

SEQ ID NO: 1898942 - DNA, 25 bp, Homo sapien
ggagcttgatacaactgtagatgct

SEQ ID NO: 1898943 - DNA, 25 bp, Homo sapien
ctgttggtaaactaaagtgatagcc

SEQ ID NO: 1898944 - DNA, 25 bp, Homo sapien
tgttggtaaactaaagtgatagcct

SEQ ID NO: 1898945 - DNA, 25 bp, Homo sapien
taaagtgatagccttcaatctgttt

SEQ ID NO: 1898946 - DNA, 25 bp, Homo sapien
agtgtgtggtgtccaaaccgacagc

SEQ ID NO: 1898947 - DNA, 25 bp, Homo sapien
ttagtgtgtggtgtccaaaccgaca

SEQ ID NO: 1898948 - DNA, 25 bp, Homo sapien
tgtgtggtgtccaaaccgacagctg

SEQ ID NO: 1898949 - DNA, 25 bp, Homo sapien
tgtggtgtccaaaccgacagctggg

SEQ ID NO: 1898950 - DNA, 25 bp, Homo sapien
ccatgtatttgtcacctgtgatttc

SEQ ID NO: 1898951 - DNA, 25 bp, Homo sapien
tgccatgtatttgtcacctgtgatt

SEQ ID NO: 1898952 - DNA, 25 bp, Homo sapien
gccatgtatttgtcacctgtgattt

SEQ ID NO: 1898953 - DNA, 25 bp, Homo sapien
tccaatgctgtgatcatcgttctgt

SEQ ID NO: 1898954 - DNA, 25 bp, Homo sapien
taaccacacaccagtcaagtgttgg

SEQ ID NO: 1898955 - DNA, 25 bp, Homo sapien
gatcatcgttctgtgtctaaccaca

SEQ ID NO: 1898956 - DNA, 25 bp, Homo sapien
gttggatctagtgctggcaaaggac

SEQ ID NO: 1898957 - DNA, 25 bp, Homo sapien
ctggaggctgttgggctccgataag

SEQ ID NO: 1898958 - DNA, 25 bp, Homo sapien
tacaagttttcttgttctccaatta

SEQ ID NO: 1898959 - DNA, 25 bp, Homo sapien
tgggctccgataagtacaagttttc

SEQ ID NO: 1898960 - DNA, 25 bp, Homo sapien
ggctgttgggctccgataagtacaa

SEQ ID NO: 1898961 - DNA, 25 bp, Homo sapien
aactataaacatcgatgagcttatt

SEQ ID NO: 1898962 - DNA, 25 bp, Homo sapien
taaacatcgatgagcttattatctt

SEQ ID NO: 1898963 - DNA, 25 bp, Homo sapien
tataaacatcgatgagcttattatc

SEQ ID NO: 1898964 - DNA, 25 bp, Homo sapien
gaaactataaacatcgatgagctta

SEQ ID NO: 1898965 - DNA, 25 bp, Homo sapien
acactgttggatgccgttgaaagaa

SEQ ID NO: 1898966 - DNA, 25 bp, Homo sapien
taatctgagcagatttaggactgag

SEQ ID NO: 1898967 - DNA, 25 bp, Homo sapien
gagggctttacgtccatatggattg

SEQ ID NO: 1898968 - DNA, 25 bp, Homo sapien
catatggattggcagttggtgagac

SEQ ID NO: 1898969 - DNA, 25 bp, Homo sapien
gacaaaaacaccacatatgggcaag

SEQ ID NO: 1898970 - DNA, 25 bp, Homo sapien
ggtagctcttgaagcaataaaaagc

SEQ ID NO: 1898971 - DNA, 25 bp, Homo sapien
ggtcttgatccatgctggatgtctt

SEQ ID NO: 1898972 - DNA, 25 bp, Homo sapien
tgtctctgtttgcttcggtagctct

SEQ ID NO: 1898973 - DNA, 25 bp, Homo sapien
ttgctttttgtaatgggctcaattt

SEQ ID NO: 1898974 - DNA, 25 bp, Homo sapien
gctttttgtaatgggctcaatttcc

SEQ ID NO: 1898975 - DNA, 25 bp, Homo sapien
tttgtaatgggctcaatttccttac

SEQ ID NO: 1898976 - DNA, 25 bp, Homo sapien
ctgttgctttttgtaatgggctcaa

SEQ ID NO: 1898977 - DNA, 25 bp, Homo sapien
ctatgtgagacatctgtgggatgtc

SEQ ID NO: 1898978 - DNA, 25 bp, Homo sapien
cagctatgtgagacatctgtgggat

SEQ ID NO: 1898979 - DNA, 25 bp, Homo sapien
agctatgtgagacatctgtgggatg

SEQ ID NO: 1898980 - DNA, 25 bp, Homo sapien
ccagctccatttctgttcggaccat

SEQ ID NO: 1898981 - DNA, 25 bp, Homo sapien
ttgacattagaaactgtctgattgc

SEQ ID NO: 1898982 - DNA, 25 bp, Homo sapien
gaaactgtctgattgctaacaaaca

SEQ ID NO: 1898983 - DNA, 25 bp, Homo sapien
ctgattgctaacaaacacggagact

SEQ ID NO: 1898984 - DNA, 25 bp, Homo sapien
cattagaaactgtctgattgctaac

SEQ ID NO: 1898985 - DNA, 25 bp, Homo sapien
caagatcccgattttgatttcatgt

SEQ ID NO: 1898986 - DNA, 25 bp, Homo sapien
gcagaagtcttaacccagaagccaa

SEQ ID NO: 1898987 - DNA, 25 bp, Homo sapien
gcagtttctagataccgcatggttt

SEQ ID NO: 1898988 - DNA, 25 bp, Homo sapien
cattgtacagattgtgtgctctcag

SEQ ID NO: 1898989 - DNA, 25 bp, Homo sapien
gaatctagagcatagtttactctgg

SEQ ID NO: 1898990 - DNA, 25 bp, Homo sapien
aaagcaagccatgctattgcaggct

SEQ ID NO: 1898991 - DNA, 25 bp, Homo sapien
caaaattaaaggagtcagacagagg

SEQ ID NO: 1898992 - DNA, 25 bp, Homo sapien
cagacagagggaaaaccagtactca

SEQ ID NO: 1898993 - DNA, 25 bp, Homo sapien
cagctctagctgttcttccctaatg

SEQ ID NO: 1898994 - DNA, 25 bp, Homo sapien
acgtacaaaggggtccagctctagc

SEQ ID NO: 1898995 - DNA, 25 bp, Homo sapien
cactctacgtacaaaggggtccagc

SEQ ID NO: 1898996 - DNA, 25 bp, Homo sapien
cctaatgatattattggcagtcagc

SEQ ID NO: 1898997 - DNA, 25 bp, Homo sapien
agaatgtcacagtcacggcaggatt

SEQ ID NO: 1898998 - DNA, 25 bp, Homo sapien
agagaatgtcacagtcacggcagga

SEQ ID NO: 1898999 - DNA, 25 bp, Homo sapien
gagaatgtcacagtcacggcaggat

SEQ ID NO: 1899000 - DNA, 25 bp, Homo sapien
cagagaatgtcacagtcacggcagg

SEQ ID NO: 1899001 - DNA, 25 bp, Homo sapien
caggcaagggagggattgttacagc

SEQ ID NO: 1899002 - DNA, 25 bp, Homo sapien
ctacaggcaagggagggattgttac

SEQ ID NO: 1899003 - DNA, 25 bp, Homo sapien
tacaggcaagggagggattgttaca

SEQ ID NO: 1899004 - DNA, 25 bp, Homo sapien
gcaagggagggattgttacagccat

SEQ ID NO: 1899005 - DNA, 25 bp, Homo sapien
ggtagtatccagcaacagatcttgt

SEQ ID NO: 1899006 - DNA, 25 bp, Homo sapien
gatttgtgtcttttggatccaccat

SEQ ID NO: 1899007 - DNA, 25 bp, Homo sapien
cagatcttgttgatggcactggtag

SEQ ID NO: 1899008 - DNA, 25 bp, Homo sapien
tttctgctgtatgtagcagtggtag

SEQ ID NO: 1899009 - DNA, 25 bp, Homo sapien
cttcatcatactcttggccgtggtt

SEQ ID NO: 1899010 - DNA, 25 bp, Homo sapien
actcttggccgtggttccctctaca

SEQ ID NO: 1899011 - DNA, 25 bp, Homo sapien
ttggccgtggttccctctacaaagc

SEQ ID NO: 1899012 - DNA, 25 bp, Homo sapien
tctggggcatccaaacaagagtatt

SEQ ID NO: 1899013 - DNA, 25 bp, Homo sapien
tatgctgattaagccataagcattt

SEQ ID NO: 1899014 - DNA, 25 bp, Homo sapien
gggctatgctgattaagccataagc

SEQ ID NO: 1899015 - DNA, 25 bp, Homo sapien
gctgattaagccataagcatttgca

SEQ ID NO: 1899016 - DNA, 25 bp, Homo sapien
ttctctaagagcagggctatgctga

SEQ ID NO: 1899017 - DNA, 25 bp, Homo sapien
cgcttcaggaacctcaggtggaagg

SEQ ID NO: 1899018 - DNA, 25 bp, Homo sapien
aagtcacaagcgcttcaggaacctc

SEQ ID NO: 1899019 - DNA, 25 bp, Homo sapien
gtcacaagcgcttcaggaacctcag

SEQ ID NO: 1899020 - DNA, 25 bp, Homo sapien
caagcgcttcaggaacctcaggtgg

SEQ ID NO: 1899021 - DNA, 25 bp, Homo sapien
ggttgtttgtcattatcttgtacaa

SEQ ID NO: 1899022 - DNA, 25 bp, Homo sapien
tgtcattatcttgtacaattccctt

SEQ ID NO: 1899023 - DNA, 25 bp, Homo sapien
tgtacaattcccttagaacatattt

SEQ ID NO: 1899024 - DNA, 25 bp, Homo sapien
cttatattcaatgttgtaatagagt

SEQ ID NO: 1899025 - DNA, 25 bp, Homo sapien
tctgatatagcaaacccagggaact

SEQ ID NO: 1899026 - DNA, 25 bp, Homo sapien
tttgccaaagaatttacaggatgcc

SEQ ID NO: 1899027 - DNA, 25 bp, Homo sapien
tccaaatttggagtctggcaccaca

SEQ ID NO: 1899028 - DNA, 25 bp, Homo sapien
gacattattgattaccttaggccaa

SEQ ID NO: 1899029 - DNA, 25 bp, Homo sapien
tgtacaattttatgccaccactgta

SEQ ID NO: 1899030 - DNA, 25 bp, Homo sapien
ctcgtggtatgtgtacaattttatg

SEQ ID NO: 1899031 - DNA, 25 bp, Homo sapien
caattttatgccaccactgtaaatc

SEQ ID NO: 1899032 - DNA, 25 bp, Homo sapien
ctctgcttctcgtggtatgtgtaca

SEQ ID NO: 1899033 - DNA, 25 bp, Homo sapien
caatttagaagctgcctgaaacagg

SEQ ID NO: 1899034 - DNA, 25 bp, Homo sapien
cagaatggactgttatcaggagcac

SEQ ID NO: 1899035 - DNA, 25 bp, Homo sapien
ctctcttccagccaccgataccaga

SEQ ID NO: 1899036 - DNA, 25 bp, Homo sapien
taaaaacactgggtggcagtccctc

SEQ ID NO: 1899037 - DNA, 25 bp, Homo sapien
caaatctagaacttgaatgcaataa

SEQ ID NO: 1899038 - DNA, 25 bp, Homo sapien
gaaaagttgctgtcggctggattgc

SEQ ID NO: 1899039 - DNA, 25 bp, Homo sapien
tcggctggattgcatgcagaaacaa

SEQ ID NO: 1899040 - DNA, 25 bp, Homo sapien
tgctgtcggctggattgcatgcaga

SEQ ID NO: 1899041 - DNA, 25 bp, Homo sapien
gcattctgagaataggcttcaccat

SEQ ID NO: 1899042 - DNA, 25 bp, Homo sapien
agtgcattgcaacaacagtgtgaac

SEQ ID NO: 1899043 - DNA, 25 bp, Homo sapien
ggctgcattctgagaataggcttca

SEQ ID NO: 1899044 - DNA, 25 bp, Homo sapien
aacagtgtgaaccttcttcctactc

SEQ ID NO: 1899045 - DNA, 25 bp, Homo sapien
cttcctcctcatagccatcattcat

SEQ ID NO: 1899046 - DNA, 25 bp, Homo sapien
tctcttcctcctcatagccatcatt

SEQ ID NO: 1899047 - DNA, 25 bp, Homo sapien
tctctcttcctcctcatagccatca

SEQ ID NO: 1899048 - DNA, 25 bp, Homo sapien
tcttcctcctcatagccatcattca

SEQ ID NO: 1899049 - DNA, 25 bp, Homo sapien
taaagggatttccttgaatctcagg

SEQ ID NO: 1899050 - DNA, 25 bp, Homo sapien
ggtaaagggatttccttgaatctca

SEQ ID NO: 1899051 - DNA, 25 bp, Homo sapien
gtaaagggatttccttgaatctcag

SEQ ID NO: 1899052 - DNA, 25 bp, Homo sapien
aatgcatccgttctttgtgtagccg

SEQ ID NO: 1899053 - DNA, 25 bp, Homo sapien
tgtgtttgttagtccaatgcatccg

SEQ ID NO: 1899054 - DNA, 25 bp, Homo sapien
gcagcaatgtgtttgttagtccaat

SEQ ID NO: 1899055 - DNA, 25 bp, Homo sapien
gctcttagtggagctatgagcagca

SEQ ID NO: 1899056 - DNA, 25 bp, Homo sapien
tgtgaggagacagtaggtcactgct

SEQ ID NO: 1899057 - DNA, 25 bp, Homo sapien
gaggagacagtaggtcactgctgca

SEQ ID NO: 1899058 - DNA, 25 bp, Homo sapien
ctgtgtgaggagacagtaggtcact

SEQ ID NO: 1899059 - DNA, 25 bp, Homo sapien
ggagacagtaggtcactgctgcagt

SEQ ID NO: 1899060 - DNA, 25 bp, Homo sapien
caatgttgtcatgagttttcagctt

SEQ ID NO: 1899061 - DNA, 25 bp, Homo sapien
atgttgtcatgagttttcagcttct

SEQ ID NO: 1899062 - DNA, 25 bp, Homo sapien
ctctgatataacatggttttcaatg

SEQ ID NO: 1899063 - DNA, 25 bp, Homo sapien
agactctgatataacatggttttca

SEQ ID NO: 1899064 - DNA, 25 bp, Homo sapien
gtgcgccgtttcttaagccggtctg

SEQ ID NO: 1899065 - DNA, 25 bp, Homo sapien
tttcttaagccggtctgaaaagcgc

SEQ ID NO: 1899066 - DNA, 25 bp, Homo sapien
cttaagccggtctgaaaagcgcaat

SEQ ID NO: 1899067 - DNA, 25 bp, Homo sapien
gcgccgtttcttaagccggtctgaa

SEQ ID NO: 1899068 - DNA, 25 bp, Homo sapien
accaagcctaactatctccattggg

SEQ ID NO: 1899069 - DNA, 25 bp, Homo sapien
gcttgaccaagcctaactatctcca

SEQ ID NO: 1899070 - DNA, 25 bp, Homo sapien
tgtatgcacttgcttgaccaagcct

SEQ ID NO: 1899071 - DNA, 25 bp, Homo sapien
gttccacagtgtatgcacttgcttg

SEQ ID NO: 1899072 - DNA, 25 bp, Homo sapien
tgatgctttgtcagacagttcagtt

SEQ ID NO: 1899073 - DNA, 25 bp, Homo sapien
ccaaatagctgtaactttaacacca

SEQ ID NO: 1899074 - DNA, 25 bp, Homo sapien
atagctgtaactttaacaccaagtg

SEQ ID NO: 1899075 - DNA, 25 bp, Homo sapien
ctgatgctttgtcagacagttcagt

SEQ ID NO: 1899076 - DNA, 25 bp, Homo sapien
gattcaaagtagatgacagtttgcc

SEQ ID NO: 1899077 - DNA, 25 bp, Homo sapien
tttctgttgctatggtttagaattt

SEQ ID NO: 1899078 - DNA, 25 bp, Homo sapien
ttggaggtagtatttatagtctaaa

SEQ ID NO: 1899079 - DNA, 25 bp, Homo sapien
tattctctagtttcctacctgcatt

SEQ ID NO: 1899080 - DNA, 25 bp, Homo sapien
gaattcccgcagaggacctttgaca

SEQ ID NO: 1899081 - DNA, 25 bp, Homo sapien
gttccttatgtgcaggtcagtctgc

SEQ ID NO: 1899082 - DNA, 25 bp, Homo sapien
atatttcccacagaattcccgcaga

SEQ ID NO: 1899083 - DNA, 25 bp, Homo sapien
gtgcaggtcagtctgcatatttccc

SEQ ID NO: 1899084 - DNA, 25 bp, Homo sapien
taagtgtgtcatagccttctagatc

SEQ ID NO: 1899085 - DNA, 25 bp, Homo sapien
gatggagacctatttgactcagcca

SEQ ID NO: 1899086 - DNA, 25 bp, Homo sapien
cataaagacccctaagacagttgga

SEQ ID NO: 1899087 - DNA, 25 bp, Homo sapien
tggaagtgtttccactaagtgtgtc

SEQ ID NO: 1899088 - DNA, 25 bp, Homo sapien
accaaatcgtaatacttcatccatg

SEQ ID NO: 1899089 - DNA, 25 bp, Homo sapien
tcttgaaatcccaagcaggactacc

SEQ ID NO: 1899090 - DNA, 25 bp, Homo sapien
tcccaagcaggactaccaaatcgta

SEQ ID NO: 1899091 - DNA, 25 bp, Homo sapien
tggaattgacggtactcttgaaatc

SEQ ID NO: 1899092 - DNA, 25 bp, Homo sapien
agagtagtggtttattgtatttcca

SEQ ID NO: 1899093 - DNA, 25 bp, Homo sapien
tattccaagtttttaatcacaagca

SEQ ID NO: 1899094 - DNA, 25 bp, Homo sapien
ctcatcatagagtagtggtttattg

SEQ ID NO: 1899095 - DNA, 25 bp, Homo sapien
atattccaagtttttaatcacaagc

SEQ ID NO: 1899096 - DNA, 25 bp, Homo sapien
actgaaagtcccctctctatcagga

SEQ ID NO: 1899097 - DNA, 25 bp, Homo sapien
ggctctgctactgtgtcaaagtccg

SEQ ID NO: 1899098 - DNA, 25 bp, Homo sapien
aaaagccttgtaagcttaaagtgca

SEQ ID NO: 1899099 - DNA, 25 bp, Homo sapien
cgcagaaatggatggaaaaagcctt

SEQ ID NO: 1899100 - DNA, 25 bp, Homo sapien
tgcctgctccaatgtctgggttttc

SEQ ID NO: 1899101 - DNA, 25 bp, Homo sapien
tataaacacgacctccatttcctga

SEQ ID NO: 1899102 - DNA, 25 bp, Homo sapien
atagctccagttcgcccatgtgcct

SEQ ID NO: 1899103 - DNA, 25 bp, Homo sapien
tctgtggctgtttataaacacgacc

SEQ ID NO: 1899104 - DNA, 25 bp, Homo sapien
aagacgaatccgttcatattggaaa

SEQ ID NO: 1899105 - DNA, 25 bp, Homo sapien
taaggaagacgaatccgttcatatt

SEQ ID NO: 1899106 - DNA, 25 bp, Homo sapien
gaagacgaatccgttcatattggaa

SEQ ID NO: 1899107 - DNA, 25 bp, Homo sapien
aggaagacgaatccgttcatattgg

SEQ ID NO: 1899108 - DNA, 25 bp, Homo sapien
ttcaatttctttacacaacgatgcg

SEQ ID NO: 1899109 - DNA, 25 bp, Homo sapien
cgtttcatcttgtctgcgtacaatg

SEQ ID NO: 1899110 - DNA, 25 bp, Homo sapien
gtctgcgtacaatgacagtgctcag

SEQ ID NO: 1899111 - DNA, 25 bp, Homo sapien
ttacacaacgatgcgtttcatcttg

SEQ ID NO: 1899112 - DNA, 25 bp, Homo sapien
tctgtttacagaacatcaggctagc

SEQ ID NO: 1899113 - DNA, 25 bp, Homo sapien
gccgtaaagccaaagagcatttttc

SEQ ID NO: 1899114 - DNA, 25 bp, Homo sapien
gaacatcaggctagcttcagcatag

SEQ ID NO: 1899115 - DNA, 25 bp, Homo sapien
ttcagcatagccgtaaagccaaaga

SEQ ID NO: 1899116 - DNA, 25 bp, Homo sapien
aatattggcactgtacaacatgcag

SEQ ID NO: 1899117 - DNA, 25 bp, Homo sapien
ccaggtcttgtcgtgctctggactg

SEQ ID NO: 1899118 - DNA, 25 bp, Homo sapien
ccccattttggaagtcccatagatg

SEQ ID NO: 1899119 - DNA, 25 bp, Homo sapien
agcccaggtcttgtcgtgctctgga

SEQ ID NO: 1899120 - DNA, 25 bp, Homo sapien
tattaattcctacactgtgcagtgc

SEQ ID NO: 1899121 - DNA, 25 bp, Homo sapien
tacactgtgcagtgcttcggtcaat

SEQ ID NO: 1899122 - DNA, 25 bp, Homo sapien
cagtgagtgtgagtgttattaattc

SEQ ID NO: 1899123 - DNA, 25 bp, Homo sapien
tgcagtgcttcggtcaatttataac

SEQ ID NO: 1899124 - DNA, 25 bp, Homo sapien
tcctgtgctgaacagttctgtggtt

SEQ ID NO: 1899125 - DNA, 25 bp, Homo sapien
tgtggttggtgggtcgatgaactcc

SEQ ID NO: 1899126 - DNA, 25 bp, Homo sapien
acattgttcaggcacacatctagga

SEQ ID NO: 1899127 - DNA, 25 bp, Homo sapien
tcatttcacattgttcaggcacaca

SEQ ID NO: 1899128 - DNA, 25 bp, Homo sapien
gttgtctcattttctcttaacatga

SEQ ID NO: 1899129 - DNA, 25 bp, Homo sapien
tctcattttctcttaacatgaaaac

SEQ ID NO: 1899130 - DNA, 25 bp, Homo sapien
caaaatgttgtctcattttctctta

SEQ ID NO: 1899131 - DNA, 25 bp, Homo sapien
tcaaaatgttgtctcattttctctt

SEQ ID NO: 1899132 - DNA, 25 bp, Homo sapien
gagctgtgtctataaccagatagcc

SEQ ID NO: 1899133 - DNA, 25 bp, Homo sapien
gatagcctttgtcaaccaaagactt

SEQ ID NO: 1899134 - DNA, 25 bp, Homo sapien
aaccaaagacttggggtagaatgag

SEQ ID NO: 1899135 - DNA, 25 bp, Homo sapien
ctgcttatatagagctgtgtctata

SEQ ID NO: 1899136 - DNA, 25 bp, Homo sapien
aggaaacttgggctacatgtaccac

SEQ ID NO: 1899137 - DNA, 25 bp, Homo sapien
aagtgtagccatagagttttcctgc

SEQ ID NO: 1899138 - DNA, 25 bp, Homo sapien
gtagccatagagttttcctgcgttg

SEQ ID NO: 1899139 - DNA, 25 bp, Homo sapien
tagagttttcctgcgttgttgctca

SEQ ID NO: 1899140 - DNA, 25 bp, Homo sapien
ataaagtgtagccatagagttttcc

SEQ ID NO: 1899141 - DNA, 25 bp, Homo sapien
gatgtgtctagacttggaggtagag

SEQ ID NO: 1899142 - DNA, 25 bp, Homo sapien
gcatttaaagtgacgggttgcctgg

SEQ ID NO: 1899143 - DNA, 25 bp, Homo sapien
ttgcatttaaagtgacgggttgcct

SEQ ID NO: 1899144 - DNA, 25 bp, Homo sapien
catttaaagtgacgggttgcctgga

SEQ ID NO: 1899145 - DNA, 25 bp, Homo sapien
actcctgggcacatcgcaggccatg

SEQ ID NO: 1899146 - DNA, 25 bp, Homo sapien
gggcctgaagagcggatgctgccca

SEQ ID NO: 1899147 - DNA, 25 bp, Homo sapien
tcctgggcacatcgcaggccatggg

SEQ ID NO: 1899148 - DNA, 25 bp, Homo sapien
tcaccactcctgggcacatcgcagg

SEQ ID NO: 1899149 - DNA, 25 bp, Homo sapien
ggcaggggaccttgcccgctatcca

SEQ ID NO: 1899150 - DNA, 25 bp, Homo sapien
aatgaagttacactgcctgaatgaa

SEQ ID NO: 1899151 - DNA, 25 bp, Homo sapien
atttgtggcagtgcttatcagtagc

SEQ ID NO: 1899152 - DNA, 25 bp, Homo sapien
cccgctatccatgatttgtggcagt

SEQ ID NO: 1899153 - DNA, 25 bp, Homo sapien
tctgaggctggatggtatgttcatg

SEQ ID NO: 1899154 - DNA, 25 bp, Homo sapien
aaaaatagtagttctgaaggacagg

SEQ ID NO: 1899155 - DNA, 25 bp, Homo sapien
taaactagatttgagtctgaggctg

SEQ ID NO: 1899156 - DNA, 25 bp, Homo sapien
ggatagaccaatgatggcaatgtgc

SEQ ID NO: 1899157 - DNA, 25 bp, Homo sapien
ggggataacatccactgttgcctgt

SEQ ID NO: 1899158 - DNA, 25 bp, Homo sapien
atggagtcattcatgtcaagcagct

SEQ ID NO: 1899159 - DNA, 25 bp, Homo sapien
ttcatgtcaagcagctttgagacca

SEQ ID NO: 1899160 - DNA, 25 bp, Homo sapien
taaatatgtaatgacctgaggggat

SEQ ID NO: 1899161 - DNA, 25 bp, Homo sapien
ttggccttctttaagacatcttctc

SEQ ID NO: 1899162 - DNA, 25 bp, Homo sapien
tggccttctttaagacatcttctca

SEQ ID NO: 1899163 - DNA, 25 bp, Homo sapien
agaacttggagatattctctggaat

SEQ ID NO: 1899164 - DNA, 25 bp, Homo sapien
acttggagatattctctggaatttg

SEQ ID NO: 1899165 - DNA, 25 bp, Homo sapien
gaaaaacaggatacaatggatgcca

SEQ ID NO: 1899166 - DNA, 25 bp, Homo sapien
gagtgatctctaagagcggtccagg

SEQ ID NO: 1899167 - DNA, 25 bp, Homo sapien
gaaagccacattcatgcccaggaca

SEQ ID NO: 1899168 - DNA, 25 bp, Homo sapien
tacttggcaaccataaagacctgtg

SEQ ID NO: 1899169 - DNA, 25 bp, Homo sapien
tcacacaaaacgtgagaaaatccct

SEQ ID NO: 1899170 - DNA, 25 bp, Homo sapien
tgtgtcaaacagttgaaacatggag

SEQ ID NO: 1899171 - DNA, 25 bp, Homo sapien
gttcagtggctgaggtttcatggat

SEQ ID NO: 1899172 - DNA, 25 bp, Homo sapien
ccagtgctgttcagtaaataaataa

SEQ ID NO: 1899173 - DNA, 25 bp, Homo sapien
caggctactggtaacccaagttggt

SEQ ID NO: 1899174 - DNA, 25 bp, Homo sapien
tcttgtgggagatagctttttcgaa

SEQ ID NO: 1899175 - DNA, 25 bp, Homo sapien
tagcatggcaaggattagagtaaat

SEQ ID NO: 1899176 - DNA, 25 bp, Homo sapien
cagtcttaactgctagcatggcaag

SEQ ID NO: 1899177 - DNA, 25 bp, Homo sapien
tcccttctgcaatggtagtcacaga

SEQ ID NO: 1899178 - DNA, 25 bp, Homo sapien
gctcttgaagatgtgtgttccactg

SEQ ID NO: 1899179 - DNA, 25 bp, Homo sapien
tcctctggctgaatcccttctgcaa

SEQ ID NO: 1899180 - DNA, 25 bp, Homo sapien
ggctgaatcccttctgcaatggtag

SEQ ID NO: 1899181 - DNA, 25 bp, Homo sapien
tgtgtggccgctctcattctctcat

SEQ ID NO: 1899182 - DNA, 25 bp, Homo sapien
tgtgggtgacaatagccaaagcata

SEQ ID NO: 1899183 - DNA, 25 bp, Homo sapien
gagatagccactctatgtgtggccg

SEQ ID NO: 1899184 - DNA, 25 bp, Homo sapien
ttgctcctccaatccgatgtaaatg

SEQ ID NO: 1899185 - DNA, 25 bp, Homo sapien
tatgatgagatctgccggcactggg

SEQ ID NO: 1899186 - DNA, 25 bp, Homo sapien
aaacaggaacgacagatatgatgag

SEQ ID NO: 1899187 - DNA, 25 bp, Homo sapien
gatgtcctgggttacaagtctgtgg

SEQ ID NO: 1899188 - DNA, 25 bp, Homo sapien
tggcactaaactcggttaaatgtat

SEQ ID NO: 1899189 - DNA, 25 bp, Homo sapien
cattggattgtcaaccgtagatata

SEQ ID NO: 1899190 - DNA, 25 bp, Homo sapien
ttcaaagcagtcattggattgtcaa

SEQ ID NO: 1899191 - DNA, 25 bp, Homo sapien
cagtcattggattgtcaaccgtaga

SEQ ID NO: 1899192 - DNA, 25 bp, Homo sapien
tgtcaaccgtagatatatcacccat

SEQ ID NO: 1899193 - DNA, 25 bp, Homo sapien
ttttaatgcctcctatacaagagca

SEQ ID NO: 1899194 - DNA, 25 bp, Homo sapien
ggtagacttaaggtgtatgcccagc

SEQ ID NO: 1899195 - DNA, 25 bp, Homo sapien
catgtccacatatctaactggtaga

SEQ ID NO: 1899196 - DNA, 25 bp, Homo sapien
tacaagagcattgtgtcagggaatt

SEQ ID NO: 1899197 - DNA, 25 bp, Homo sapien
cacaccagagtcagctcttgggcca

SEQ ID NO: 1899198 - DNA, 25 bp, Homo sapien
agagtcagctcttgggccactaggc

SEQ ID NO: 1899199 - DNA, 25 bp, Homo sapien
accagagtcagctcttgggccacta

SEQ ID NO: 1899200 - DNA, 25 bp, Homo sapien
tcacaccagagtcagctcttgggcc

SEQ ID NO: 1899201 - DNA, 25 bp, Homo sapien
gactactagaaggtggtgctggcat

SEQ ID NO: 1899202 - DNA, 25 bp, Homo sapien
gcagtactgtaattctccccatgtg

SEQ ID NO: 1899203 - DNA, 25 bp, Homo sapien
ggtgatagaatgcacagcctggctt

SEQ ID NO: 1899204 - DNA, 25 bp, Homo sapien
tccaaggtatgtagtggcagtacag

SEQ ID NO: 1899205 - DNA, 25 bp, Homo sapien
caatcacatcttccgaagatgctgg

SEQ ID NO: 1899206 - DNA, 25 bp, Homo sapien
atcacatcttccgaagatgctggct

SEQ ID NO: 1899207 - DNA, 25 bp, Homo sapien
tcaatcacatcttccgaagatgctg

SEQ ID NO: 1899208 - DNA, 25 bp, Homo sapien
tcacatcttccgaagatgctggctt

SEQ ID NO: 1899209 - DNA, 25 bp, Homo sapien
tgcctgcactgctacacatgcagct

SEQ ID NO: 1899210 - DNA, 25 bp, Homo sapien
ggcagatgacgggcttggtgctgct

SEQ ID NO: 1899211 - DNA, 25 bp, Homo sapien
cagatgacgggcttggtgctgctct

SEQ ID NO: 1899212 - DNA, 25 bp, Homo sapien
atgacgggcttggtgctgctctgca

SEQ ID NO: 1899213 - DNA, 25 bp, Homo sapien
ggatgcaagagcttatacactccct

SEQ ID NO: 1899214 - DNA, 25 bp, Homo sapien
tgtctcgatcacctagaagttcggg

SEQ ID NO: 1899215 - DNA, 25 bp, Homo sapien
taagaggatgttcaactggttgccc

SEQ ID NO: 1899216 - DNA, 25 bp, Homo sapien
ggcaaataagaaataccactctggt

SEQ ID NO: 1899217 - DNA, 25 bp, Homo sapien
tttggggtatggacccaatagctta

SEQ ID NO: 1899218 - DNA, 25 bp, Homo sapien
tggggtatggacccaatagcttatt

SEQ ID NO: 1899219 - DNA, 25 bp, Homo sapien
aatagcttatttagctgaccttact

SEQ ID NO: 1899220 - DNA, 25 bp, Homo sapien
ccaatagcttatttagctgacctta

SEQ ID NO: 1899221 - DNA, 25 bp, Homo sapien
ataagagggtttgaacctctataat

SEQ ID NO: 1899222 - DNA, 25 bp, Homo sapien
atttattatatcaaagtaactcttt

SEQ ID NO: 1899223 - DNA, 25 bp, Homo sapien
attatatcaaagtaactcttttgtc

SEQ ID NO: 1899224 - DNA, 25 bp, Homo sapien
gtttgaacctctataatttattata

SEQ ID NO: 1899225 - DNA, 25 bp, Homo sapien
ttcagaatcaattagagttggtggc

SEQ ID NO: 1899226 - DNA, 25 bp, Homo sapien
tctaattttctatacagattcattt

SEQ ID NO: 1899227 - DNA, 25 bp, Homo sapien
tcaattagagttggtggcagccttc

SEQ ID NO: 1899228 - DNA, 25 bp, Homo sapien
agaatcaattagagttggtggcagc

SEQ ID NO: 1899229 - DNA, 25 bp, Homo sapien
tagaacggttgtcatttctacaagc

SEQ ID NO: 1899230 - DNA, 25 bp, Homo sapien
tttctacaagcaccttttcattctt

SEQ ID NO: 1899231 - DNA, 25 bp, Homo sapien
aatatagaacggttgtcatttctac

SEQ ID NO: 1899232 - DNA, 25 bp, Homo sapien
tcatttctacaagcaccttttcatt

SEQ ID NO: 1899233 - DNA, 25 bp, Homo sapien
ccagccaccatatgctccaatatgt

SEQ ID NO: 1899234 - DNA, 25 bp, Homo sapien
ctccagccaccatatgctccaatat

SEQ ID NO: 1899235 - DNA, 25 bp, Homo sapien
gccaccatatgctccaatatgttga

SEQ ID NO: 1899236 - DNA, 25 bp, Homo sapien
agccaccatatgctccaatatgttg

SEQ ID NO: 1899237 - DNA, 25 bp, Homo sapien
aaattggaccatttttcactctcac

SEQ ID NO: 1899238 - DNA, 25 bp, Homo sapien
aaaattggaccatttttcactctca

SEQ ID NO: 1899239 - DNA, 25 bp, Homo sapien
taatattacagtacactatttgttc

SEQ ID NO: 1899240 - DNA, 25 bp, Homo sapien
tattacagtacactatttgttcata

SEQ ID NO: 1899241 - DNA, 25 bp, Homo sapien
ttacagtacactatttgttcatagc

SEQ ID NO: 1899242 - DNA, 25 bp, Homo sapien
aatattacagtacactatttgttca

SEQ ID NO: 1899243 - DNA, 25 bp, Homo sapien
tgggcagtccgcctgccccgtctcc

SEQ ID NO: 1899244 - DNA, 25 bp, Homo sapien
gctccgcaccagtggcagtcgaggt

SEQ ID NO: 1899245 - DNA, 25 bp, Homo sapien
ggtactagggccagaatccccgcca

SEQ ID NO: 1899246 - DNA, 25 bp, Homo sapien
cagtcgaggtactagggccagaatc

SEQ ID NO: 1899247 - DNA, 25 bp, Homo sapien
cactcccaggtggaggctccgagct

SEQ ID NO: 1899248 - DNA, 25 bp, Homo sapien
cccactcccaggtggaggctccgag

SEQ ID NO: 1899249 - DNA, 25 bp, Homo sapien
ccactcccaggtggaggctccgagc

SEQ ID NO: 1899250 - DNA, 25 bp, Homo sapien
cagacacagatgcaaacacgatatt

SEQ ID NO: 1899251 - DNA, 25 bp, Homo sapien
tcagacacagatgcaaacacgatat

SEQ ID NO: 1899252 - DNA, 25 bp, Homo sapien
cattaactgcttcgtagacttccgc

SEQ ID NO: 1899253 - DNA, 25 bp, Homo sapien
aactgcttcgtagacttccgcagtg

SEQ ID NO: 1899254 - DNA, 25 bp, Homo sapien
tagtcaatggtatttcttaacatta

SEQ ID NO: 1899255 - DNA, 25 bp, Homo sapien
aacattaactgcttcgtagacttcc

SEQ ID NO: 1899256 - DNA, 25 bp, Homo sapien
tttgctgtactagatgctcttcgat

SEQ ID NO: 1899257 - DNA, 25 bp, Homo sapien
tctctttgctgtactagatgctctt

SEQ ID NO: 1899258 - DNA, 25 bp, Homo sapien
gctgtactagatgctcttcgattta

SEQ ID NO: 1899259 - DNA, 25 bp, Homo sapien
ctagatgctcttcgatttaaaggca

SEQ ID NO: 1899260 - DNA, 25 bp, Homo sapien
ttctcctgggtgcaggtggggtgag

SEQ ID NO: 1899261 - DNA, 25 bp, Homo sapien
ctcagtgggggtgctttctgagcca

SEQ ID NO: 1899262 - DNA, 25 bp, Homo sapien
ttatttctcctgggtgcaggtgggg

SEQ ID NO: 1899263 - DNA, 25 bp, Homo sapien
tataagatttgggaaggtaatggaa

SEQ ID NO: 1899264 - DNA, 25 bp, Homo sapien
gcttttccaacattgcaaggccatg

SEQ ID NO: 1899265 - DNA, 25 bp, Homo sapien
cgtttggagtatgaaattagttgat

SEQ ID NO: 1899266 - DNA, 25 bp, Homo sapien
gcaatcttgcttgccaatgcaaact

SEQ ID NO: 1899267 - DNA, 25 bp, Homo sapien
gccatgaatttctcgtaaccttgca

SEQ ID NO: 1899268 - DNA, 25 bp, Homo sapien
tccctttaccttccaagaatgcaag

SEQ ID NO: 1899269 - DNA, 25 bp, Homo sapien
tgtgaaagggaaacaataactgaag

SEQ ID NO: 1899270 - DNA, 25 bp, Homo sapien
ggacacctccatttgtaatacagat

SEQ ID NO: 1899271 - DNA, 25 bp, Homo sapien
atatcataaagtggtcactattaat

SEQ ID NO: 1899272 - DNA, 25 bp, Homo sapien
ataaagtggtcactattaatactgt

SEQ ID NO: 1899273 - DNA, 25 bp, Homo sapien
atcataaagtggtcactattaatac

SEQ ID NO: 1899274 - DNA, 25 bp, Homo sapien
cataaagtggtcactattaatactg

SEQ ID NO: 1899275 - DNA, 25 bp, Homo sapien
taattggctctcgtacttaaacaca

SEQ ID NO: 1899276 - DNA, 25 bp, Homo sapien
tttatgcccatcctgaaatttcaag

SEQ ID NO: 1899277 - DNA, 25 bp, Homo sapien
ttctttacccaatcaaatatgcgca

SEQ ID NO: 1899278 - DNA, 25 bp, Homo sapien
tgttaattcgtccttcatgatgaag

SEQ ID NO: 1899279 - DNA, 25 bp, Homo sapien
ttcatagaaggactagtgtagtagt

SEQ ID NO: 1899280 - DNA, 25 bp, Homo sapien
tactcagatgtacaaacagcagctg

SEQ ID NO: 1899281 - DNA, 25 bp, Homo sapien
gctgtagttcccaaatcactactca

SEQ ID NO: 1899282 - DNA, 25 bp, Homo sapien
gtgtagtagtaaaaaccatagtctc

SEQ ID NO: 1899283 - DNA, 25 bp, Homo sapien
ggaaaactgcagtcgtagatgtggt

SEQ ID NO: 1899284 - DNA, 25 bp, Homo sapien
actgcagtcgtagatgtggtggctt

SEQ ID NO: 1899285 - DNA, 25 bp, Homo sapien
gtcgtagatgtggtggctttttaac

SEQ ID NO: 1899286 - DNA, 25 bp, Homo sapien
cagtcgtagatgtggtggcttttta

SEQ ID NO: 1899287 - DNA, 25 bp, Homo sapien
cgatgacaaagtagcatgctgaaaa

SEQ ID NO: 1899288 - DNA, 25 bp, Homo sapien
ctgaaaaacgatgacaaagtagcat

SEQ ID NO: 1899289 - DNA, 25 bp, Homo sapien
aaaacgatgacaaagtagcatgctg

SEQ ID NO: 1899290 - DNA, 25 bp, Homo sapien
gaaaaacgatgacaaagtagcatgc

SEQ ID NO: 1899291 - DNA, 25 bp, Homo sapien
aaattgaatacaagcagtgggatgc

SEQ ID NO: 1899292 - DNA, 25 bp, Homo sapien
aattgaatacaagcagtgggatgct

SEQ ID NO: 1899293 - DNA, 25 bp, Homo sapien
caaattgaatacaagcagtgggatg

SEQ ID NO: 1899294 - DNA, 25 bp, Homo sapien
tcaaattgaatacaagcagtgggat

SEQ ID NO: 1899295 - DNA, 25 bp, Homo sapien
tttcttgaatcccaactgtgtaggg

SEQ ID NO: 1899296 - DNA, 25 bp, Homo sapien
gatatatttagttggccagccagtg

SEQ ID NO: 1899297 - DNA, 25 bp, Homo sapien
tatagaactacccttgatgctcctc

SEQ ID NO: 1899298 - DNA, 25 bp, Homo sapien
ccatctgctctgactgactgccagg

SEQ ID NO: 1899299 - DNA, 25 bp, Homo sapien
attttctctagactccataataata

SEQ ID NO: 1899300 - DNA, 25 bp, Homo sapien
tttaagaaatcattaattgaatact

SEQ ID NO: 1899301 - DNA, 25 bp, Homo sapien
ttttaagaaatcattaattgaatac

SEQ ID NO: 1899302 - DNA, 25 bp, Homo sapien
cataattaagacataacagctgtgc

SEQ ID NO: 1899303 - DNA, 25 bp, Homo sapien
taattaagacataacagctgtgcat

SEQ ID NO: 1899304 - DNA, 25 bp, Homo sapien
attaagacataacagctgtgcatcc

SEQ ID NO: 1899305 - DNA, 25 bp, Homo sapien
atattcctcatttcttggcttcaca

SEQ ID NO: 1899306 - DNA, 25 bp, Homo sapien
cagcttggaagatcatgagtggcat

SEQ ID NO: 1899307 - DNA, 25 bp, Homo sapien
cttgggtttatcatgagactttcct

SEQ ID NO: 1899308 - DNA, 25 bp, Homo sapien
gggtgtgtacagctacctcagcttg

SEQ ID NO: 1899309 - DNA, 25 bp, Homo sapien
gcatgaccgttgtatcaatcttggg

SEQ ID NO: 1899310 - DNA, 25 bp, Homo sapien
ctgcccagcaattttagcctgtttc

SEQ ID NO: 1899311 - DNA, 25 bp, Homo sapien
ttctctgttaataacacttgggcca

SEQ ID NO: 1899312 - DNA, 25 bp, Homo sapien
tttctctgttaataacacttgggcc

SEQ ID NO: 1899313 - DNA, 25 bp, Homo sapien
tctctgttaataacacttgggccat

SEQ ID NO: 1899314 - DNA, 25 bp, Homo sapien
taccataaacacctagagacaccat

SEQ ID NO: 1899315 - DNA, 25 bp, Homo sapien
tgtggaagtaccataaacacctaga

SEQ ID NO: 1899316 - DNA, 25 bp, Homo sapien
gaagtaccataaacacctagagaca

SEQ ID NO: 1899317 - DNA, 25 bp, Homo sapien
cgctgtggaagtaccataaacacct

SEQ ID NO: 1899318 - DNA, 25 bp, Homo sapien
gcctgaacgtagagagctaaaagac

SEQ ID NO: 1899319 - DNA, 25 bp, Homo sapien
cataggtggttgagcctgaacgtag

SEQ ID NO: 1899320 - DNA, 25 bp, Homo sapien
ctacataggtggttgagcctgaacg

SEQ ID NO: 1899321 - DNA, 25 bp, Homo sapien
tggttgagcctgaacgtagagagct

SEQ ID NO: 1899322 - DNA, 25 bp, Homo sapien
aaaggccaactcttcgcagtagtca

SEQ ID NO: 1899323 - DNA, 25 bp, Homo sapien
aactcttcgcagtagtcacactcca

SEQ ID NO: 1899324 - DNA, 25 bp, Homo sapien
tgctgtttgaaaccaaaggccaact

SEQ ID NO: 1899325 - DNA, 25 bp, Homo sapien
ctgtttgaaaccaaaggccaactct

SEQ ID NO: 1899326 - DNA, 25 bp, Homo sapien
tactgcattttgtacatcgatgaat

SEQ ID NO: 1899327 - DNA, 25 bp, Homo sapien
ttactgcattttgtacatcgatgaa

SEQ ID NO: 1899328 - DNA, 25 bp, Homo sapien
tgcctcactcaggaaacacaaggtg

SEQ ID NO: 1899329 - DNA, 25 bp, Homo sapien
actaagacgcaaagagaaattctgg

SEQ ID NO: 1899330 - DNA, 25 bp, Homo sapien
tgttatcatcgagatactaagacgc

SEQ ID NO: 1899331 - DNA, 25 bp, Homo sapien
gacagtgggtgccacgcaccttgcg

SEQ ID NO: 1899332 - DNA, 25 bp, Homo sapien
aagataaaaggataagggcaggcat

SEQ ID NO: 1899333 - DNA, 25 bp, Homo sapien
ctgtctctctgaagatgtaaagata

SEQ ID NO: 1899334 - DNA, 25 bp, Homo sapien
gatgtaaagataaaaggataagggc

SEQ ID NO: 1899335 - DNA, 25 bp, Homo sapien
taaagataaaaggataagggcaggc

SEQ ID NO: 1899336 - DNA, 25 bp, Homo sapien
ggcaagggcaatatctgagcttgct

SEQ ID NO: 1899337 - DNA, 25 bp, Homo sapien
tacagaagtctcattaggtcctttg

SEQ ID NO: 1899338 - DNA, 25 bp, Homo sapien
tcctggctccaggatacagaagtct

SEQ ID NO: 1899339 - DNA, 25 bp, Homo sapien
ggcaatatctgagcttgctctcact

SEQ ID NO: 1899340 - DNA, 25 bp, Homo sapien
cttcacagtttccatgataattccc

SEQ ID NO: 1899341 - DNA, 25 bp, Homo sapien
tcacagtttccatgataattcccat

SEQ ID NO: 1899342 - DNA, 25 bp, Homo sapien
ttcacagtttccatgataattccca

SEQ ID NO: 1899343 - DNA, 25 bp, Homo sapien
aaacagctttttatcacactcattt

SEQ ID NO: 1899344 - DNA, 25 bp, Homo sapien
aacagctttttatcacactcatttt

SEQ ID NO: 1899345 - DNA, 25 bp, Homo sapien
tccagtgtaaacgagaaccctggaa

SEQ ID NO: 1899346 - DNA, 25 bp, Homo sapien
gctccagtgtaaacgagaaccctgg

SEQ ID NO: 1899347 - DNA, 25 bp, Homo sapien
agctccagtgtaaacgagaaccctg

SEQ ID NO: 1899348 - DNA, 25 bp, Homo sapien
ctccagtgtaaacgagaaccctgga

SEQ ID NO: 1899349 - DNA, 25 bp, Homo sapien
caagataaccatgttgtctcatgtg

SEQ ID NO: 1899350 - DNA, 25 bp, Homo sapien
gtgagaataagataataagtcaggc

SEQ ID NO: 1899351 - DNA, 25 bp, Homo sapien
tcatgtgagaataagataataagtc

SEQ ID NO: 1899352 - DNA, 25 bp, Homo sapien
ccatgttgtctcatgtgagaataag

SEQ ID NO: 1899353 - DNA, 25 bp, Homo sapien
cagtctggactgttgcggaagttgt

SEQ ID NO: 1899354 - DNA, 25 bp, Homo sapien
gaaggatgtaactcacagtctggac

SEQ ID NO: 1899355 - DNA, 25 bp, Homo sapien
ccatgtcttcagtgctatgggaaca

SEQ ID NO: 1899356 - DNA, 25 bp, Homo sapien
tctttataggtgctgactgccatgt

SEQ ID NO: 1899357 - DNA, 25 bp, Homo sapien
ggacaagggagttggttgaatagaa

SEQ ID NO: 1899358 - DNA, 25 bp, Homo sapien
tttcatagacaatggcacccatatg

SEQ ID NO: 1899359 - DNA, 25 bp, Homo sapien
aatatcaccgttattacaatctttc

SEQ ID NO: 1899360 - DNA, 25 bp, Homo sapien
tgtgtattgacactgggtaatatca

SEQ ID NO: 1899361 - DNA, 25 bp, Homo sapien
catcccagtctgagtgcgtgtatgt

SEQ ID NO: 1899362 - DNA, 25 bp, Homo sapien
atccatcccagtctgagtgcgtgta

SEQ ID NO: 1899363 - DNA, 25 bp, Homo sapien
ggaattggtgtgctctcctccatat

SEQ ID NO: 1899364 - DNA, 25 bp, Homo sapien
cacaggactgcaatgtgtagtaaca

SEQ ID NO: 1899365 - DNA, 25 bp, Homo sapien
attggtgctagtacctattgcacag

SEQ ID NO: 1899366 - DNA, 25 bp, Homo sapien
attggaattggtgtgctctcctcca

SEQ ID NO: 1899367 - DNA, 25 bp, Homo sapien
gatttagacctaagtggtcaggctc

SEQ ID NO: 1899368 - DNA, 25 bp, Homo sapien
ggaatatctttgaccactttaaagc

SEQ ID NO: 1899369 - DNA, 25 bp, Homo sapien
tatccatgaagcaattacaggtact

SEQ ID NO: 1899370 - DNA, 25 bp, Homo sapien
ttgaatggatcatcttatacacccc

SEQ ID NO: 1899371 - DNA, 25 bp, Homo sapien
acttgagtggtctgcaacattgaaa

SEQ ID NO: 1899372 - DNA, 25 bp, Homo sapien
tgcagttctattgctagaaatgcga

SEQ ID NO: 1899373 - DNA, 25 bp, Homo sapien
gctagaaatgcgaacttgagtggtc

SEQ ID NO: 1899374 - DNA, 25 bp, Homo sapien
tcagatgtctgcatccatttgcagt

SEQ ID NO: 1899375 - DNA, 25 bp, Homo sapien
tcatgccatcatgtcatttcttcca

SEQ ID NO: 1899376 - DNA, 25 bp, Homo sapien
tgaaactgggcacctgtgtcttttc

SEQ ID NO: 1899377 - DNA, 25 bp, Homo sapien
tcagtgaaactgggcacctgtgtct

SEQ ID NO: 1899378 - DNA, 25 bp, Homo sapien
agtgaaactgggcacctgtgtcttt

SEQ ID NO: 1899379 - DNA, 25 bp, Homo sapien
aaactgggcacctgtgtcttttcct

SEQ ID NO: 1899380 - DNA, 25 bp, Homo sapien
tctgtctggcataaggtgggcagct

SEQ ID NO: 1899381 - DNA, 25 bp, Homo sapien
catggtccccagttgtctgtctggc

SEQ ID NO: 1899382 - DNA, 25 bp, Homo sapien
tcagctgcatagtgggtgccatcat

SEQ ID NO: 1899383 - DNA, 25 bp, Homo sapien
ttcactactgaggtagccaacagcc

SEQ ID NO: 1899384 - DNA, 25 bp, Homo sapien
cgtatgtagttttcctgcggtcctt

SEQ ID NO: 1899385 - DNA, 25 bp, Homo sapien
ggcagcactgtctgttgtgacaaaa

SEQ ID NO: 1899386 - DNA, 25 bp, Homo sapien
tacagttgggctagttgaagataca

SEQ ID NO: 1899387 - DNA, 25 bp, Homo sapien
tgtcaggcagaggatacccacaatc

SEQ ID NO: 1899388 - DNA, 25 bp, Homo sapien
agcttccagagactatggaatgaat

SEQ ID NO: 1899389 - DNA, 25 bp, Homo sapien
tagcttccagagactatggaatgaa

SEQ ID NO: 1899390 - DNA, 25 bp, Homo sapien
ctagcttccagagactatggaatga

SEQ ID NO: 1899391 - DNA, 25 bp, Homo sapien
caagtagggaaatatatgctgctct

SEQ ID NO: 1899392 - DNA, 25 bp, Homo sapien
taagagaacactttgaggtttggga

SEQ ID NO: 1899393 - DNA, 25 bp, Homo sapien
gacattttcacgattagctctaagt

SEQ ID NO: 1899394 - DNA, 25 bp, Homo sapien
cagactactacaacacatgtacatg

SEQ ID NO: 1899395 - DNA, 25 bp, Homo sapien
aagatgcttcacactgacattgagc

SEQ ID NO: 1899396 - DNA, 25 bp, Homo sapien
tctggtctatagaacaagatgcttc

SEQ ID NO: 1899397 - DNA, 25 bp, Homo sapien
tgcttcacactgacattgagcaaag

SEQ ID NO: 1899398 - DNA, 25 bp, Homo sapien
tatagaacaagatgcttcacactga

SEQ ID NO: 1899399 - DNA, 25 bp, Homo sapien
tattcacttttgtccagctccttac

SEQ ID NO: 1899400 - DNA, 25 bp, Homo sapien
ctattcacttttgtccagctcctta

SEQ ID NO: 1899401 - DNA, 25 bp, Homo sapien
cagtttccagctcatgtgcattctg

SEQ ID NO: 1899402 - DNA, 25 bp, Homo sapien
agcacctgaggatctgaacactgac

SEQ ID NO: 1899403 - DNA, 25 bp, Homo sapien
tgctggcccattccacacttgagca

SEQ ID NO: 1899404 - DNA, 25 bp, Homo sapien
ccattccacacttgagcacctgagg

SEQ ID NO: 1899405 - DNA, 25 bp, Homo sapien
acattccctccgtcctccggcttat

SEQ ID NO: 1899406 - DNA, 25 bp, Homo sapien
ctaacattccctccgtcctccggct

SEQ ID NO: 1899407 - DNA, 25 bp, Homo sapien
cattccctccgtcctccggcttatt

SEQ ID NO: 1899408 - DNA, 25 bp, Homo sapien
agggcaccggggatcaggagccctg

SEQ ID NO: 1899409 - DNA, 25 bp, Homo sapien
cagggcaccggggatcaggagccct

SEQ ID NO: 1899410 - DNA, 25 bp, Homo sapien
ggcaccggggatcaggagccctgac

SEQ ID NO: 1899411 - DNA, 25 bp, Homo sapien
attcagaagtgtgtccagtggcaca

SEQ ID NO: 1899412 - DNA, 25 bp, Homo sapien
ttaaatatgagtgatgttgagaaag

SEQ ID NO: 1899413 - DNA, 25 bp, Homo sapien
ttattcagaagtgtgtccagtggca

SEQ ID NO: 1899414 - DNA, 25 bp, Homo sapien
ttttattcagaagtgtgtccagtgg

SEQ ID NO: 1899415 - DNA, 25 bp, Homo sapien
agaagacaggtcaggtcattggatt

SEQ ID NO: 1899416 - DNA, 25 bp, Homo sapien
ttctcttacacagattccaataaga

SEQ ID NO: 1899417 - DNA, 25 bp, Homo sapien
ccatggtctctgggcagaagacagg

SEQ ID NO: 1899418 - DNA, 25 bp, Homo sapien
caagcagagactgggctaaatctcc

SEQ ID NO: 1899419 - DNA, 25 bp, Homo sapien
cagggcctgttcgtatatactgcaa

SEQ ID NO: 1899420 - DNA, 25 bp, Homo sapien
cagtctaaacaagtcaaagaggatt

SEQ ID NO: 1899421 - DNA, 25 bp, Homo sapien
tatgtgtgcttcgataagctgagac

SEQ ID NO: 1899422 - DNA, 25 bp, Homo sapien
gaagcactgttatagtaccagggcc

SEQ ID NO: 1899423 - DNA, 25 bp, Homo sapien
ccatgacttagtgcaccagtggctt

SEQ ID NO: 1899424 - DNA, 25 bp, Homo sapien
gaacctctgggccagtgctcattca

SEQ ID NO: 1899425 - DNA, 25 bp, Homo sapien
tctgtgaccttaatagaacctctgg

SEQ ID NO: 1899426 - DNA, 25 bp, Homo sapien
agaacaaggttcttgaagttgccag

SEQ ID NO: 1899427 - DNA, 25 bp, Homo sapien
gggaggtatcatcgtatcatcagct

SEQ ID NO: 1899428 - DNA, 25 bp, Homo sapien
tgaagagactcaaatcttgtcttat

SEQ ID NO: 1899429 - DNA, 25 bp, Homo sapien
ttatagggcagtagctaaatcctgg

SEQ ID NO: 1899430 - DNA, 25 bp, Homo sapien
ggtatcatcgtatcatcagcttcat

SEQ ID NO: 1899431 - DNA, 25 bp, Homo sapien
catagttcgatgattggaaatattc

SEQ ID NO: 1899432 - DNA, 25 bp, Homo sapien
agttcgatgattggaaatattctct

SEQ ID NO: 1899433 - DNA, 25 bp, Homo sapien
tagttcgatgattggaaatattctc

SEQ ID NO: 1899434 - DNA, 25 bp, Homo sapien
tcatagttcgatgattggaaatatt

SEQ ID NO: 1899435 - DNA, 25 bp, Homo sapien
ctcagcagagagcaccagttgcctt

SEQ ID NO: 1899436 - DNA, 25 bp, Homo sapien
tgctgccacatgcctcagcagagag

SEQ ID NO: 1899437 - DNA, 25 bp, Homo sapien
gctgccacatgcctcagcagagagc

SEQ ID NO: 1899438 - DNA, 25 bp, Homo sapien
agcagagagcaccagttgccttcca

SEQ ID NO: 1899439 - DNA, 25 bp, Homo sapien
tctggattcagctacattctgtgtg

SEQ ID NO: 1899440 - DNA, 25 bp, Homo sapien
cagtcctagattacctccaagaagc

SEQ ID NO: 1899441 - DNA, 25 bp, Homo sapien
tgctacctatggtcactatgctgta

SEQ ID NO: 1899442 - DNA, 25 bp, Homo sapien
tctgagactcaacctgcaggtggtc

SEQ ID NO: 1899443 - DNA, 25 bp, Homo sapien
tgaaatggagctcttgggactttga

SEQ ID NO: 1899444 - DNA, 25 bp, Homo sapien
taagttcccctgtgattagaaatgc

SEQ ID NO: 1899445 - DNA, 25 bp, Homo sapien
aattaccgtatagacccacatctga

SEQ ID NO: 1899446 - DNA, 25 bp, Homo sapien
cacagttttcacgtgcccatagaaa

SEQ ID NO: 1899447 - DNA, 25 bp, Homo sapien
ctggaaaggcaattagtgtaagttt

SEQ ID NO: 1899448 - DNA, 25 bp, Homo sapien
actggaaaggcaattagtgtaagtt

SEQ ID NO: 1899449 - DNA, 25 bp, Homo sapien
ccatgttctgagagtactagtttct

SEQ ID NO: 1899450 - DNA, 25 bp, Homo sapien
cctcagtctgttgctaccatgatca

SEQ ID NO: 1899451 - DNA, 25 bp, Homo sapien
ctgagagtactagtttctaagcgac

SEQ ID NO: 1899452 - DNA, 25 bp, Homo sapien
gttgctaccatgatcacctcttcca

SEQ ID NO: 1899453 - DNA, 25 bp, Homo sapien
aacaatgttccagcagacgtaagac

SEQ ID NO: 1899454 - DNA, 25 bp, Homo sapien
tatagggaataccactgagctgccc

SEQ ID NO: 1899455 - DNA, 25 bp, Homo sapien
caataaagagagctaggaaacctgt

SEQ ID NO: 1899456 - DNA, 25 bp, Homo sapien
taataagtagcctaagccaggtacc

SEQ ID NO: 1899457 - DNA, 25 bp, Homo sapien
tacttcttagaatacgcaggcacag

SEQ ID NO: 1899458 - DNA, 25 bp, Homo sapien
gacgtacacaacacaggcctgctat

SEQ ID NO: 1899459 - DNA, 25 bp, Homo sapien
aagaatccatagcatcccacgaagg

SEQ ID NO: 1899460 - DNA, 25 bp, Homo sapien
gagaggccctatatcaactggtgga

SEQ ID NO: 1899461 - DNA, 25 bp, Homo sapien
taagctctgtagtgggtacctgggc

SEQ ID NO: 1899462 - DNA, 25 bp, Homo sapien
tctacttgcagaaatagggcgggag

SEQ ID NO: 1899463 - DNA, 25 bp, Homo sapien
tagcataagggtaacgatgtgccag

SEQ ID NO: 1899464 - DNA, 25 bp, Homo sapien
tgtaatacagttagagcctcccaac

SEQ ID NO: 1899465 - DNA, 25 bp, Homo sapien
aaaggtagctgtcgcctctgggcat

SEQ ID NO: 1899466 - DNA, 25 bp, Homo sapien
ctctgggtgcaacggaaaggtagct

SEQ ID NO: 1899467 - DNA, 25 bp, Homo sapien
cttgtctccccgacaaggtggaaat

SEQ ID NO: 1899468 - DNA, 25 bp, Homo sapien
tcgggtcggatggaagcctttttca

SEQ ID NO: 1899469 - DNA, 25 bp, Homo sapien
cacaactaagtgtgactgatttgaa

SEQ ID NO: 1899470 - DNA, 25 bp, Homo sapien
catgaatctcgccattcagctgaag

SEQ ID NO: 1899471 - DNA, 25 bp, Homo sapien
catagtagttgatatattacatcca

SEQ ID NO: 1899472 - DNA, 25 bp, Homo sapien
tgttgtctcatccagacataactat

SEQ ID NO: 1899473 - DNA, 25 bp, Homo sapien
ccttgtaatctactggaggtcagac

SEQ ID NO: 1899474 - DNA, 25 bp, Homo sapien
cctaaatccagtataagtgacagac

SEQ ID NO: 1899475 - DNA, 25 bp, Homo sapien
tagcacctgctacgtgtcagataca

SEQ ID NO: 1899476 - DNA, 25 bp, Homo sapien
cagatacagtcccagatgctgacaa

SEQ ID NO: 1899477 - DNA, 25 bp, Homo sapien
gccatggatgtagaacctacagata

SEQ ID NO: 1899478 - DNA, 25 bp, Homo sapien
actggcatagtagttgcatataatc

SEQ ID NO: 1899479 - DNA, 25 bp, Homo sapien
ctatgtagttgttataccatactgg

SEQ ID NO: 1899480 - DNA, 25 bp, Homo sapien
tcagtcggcaatttcttggccatgg

SEQ ID NO: 1899481 - DNA, 25 bp, Homo sapien
tcacttgcagttgatgtaggatcct

SEQ ID NO: 1899482 - DNA, 25 bp, Homo sapien
cacttgcagttgatgtaggatcctt

SEQ ID NO: 1899483 - DNA, 25 bp, Homo sapien
tggacctcacactctgagcaggacc

SEQ ID NO: 1899484 - DNA, 25 bp, Homo sapien
ggatttattttcatgagcacagcta

SEQ ID NO: 1899485 - DNA, 25 bp, Homo sapien
cactcttcctggacaataccattgg

SEQ ID NO: 1899486 - DNA, 25 bp, Homo sapien
taaaatgggcattgacagagtagac

SEQ ID NO: 1899487 - DNA, 25 bp, Homo sapien
gatggatctgctacagtccttgctg

SEQ ID NO: 1899488 - DNA, 25 bp, Homo sapien
caatgttatgtgaatgacaaggagt

SEQ ID NO: 1899489 - DNA, 25 bp, Homo sapien
tcttcttgccatcgagttactgtac

SEQ ID NO: 1899490 - DNA, 25 bp, Homo sapien
ggctccaccaatacaggtgtatgct

SEQ ID NO: 1899491 - DNA, 25 bp, Homo sapien
cacaggtggcagcttatatgactta

SEQ ID NO: 1899492 - DNA, 25 bp, Homo sapien
atgacgggtcaaccagcagcagaga

SEQ ID NO: 1899493 - DNA, 25 bp, Homo sapien
tcagggagatgacgggtcaaccagc

SEQ ID NO: 1899494 - DNA, 25 bp, Homo sapien
ggcagcttatatgacttatgtttta

SEQ ID NO: 1899495 - DNA, 25 bp, Homo sapien
cctcaagtttaccagagacccagag

SEQ ID NO: 1899496 - DNA, 25 bp, Homo sapien
ttcaggggtcctcaagtttaccaga

SEQ ID NO: 1899497 - DNA, 25 bp, Homo sapien
ggtcctcaagtttaccagagaccca

SEQ ID NO: 1899498 - DNA, 25 bp, Homo sapien
cttcctcaccatgatagtctcaaaa

SEQ ID NO: 1899499 - DNA, 25 bp, Homo sapien
caagctgtaccttctaataggcagg

SEQ ID NO: 1899500 - DNA, 25 bp, Homo sapien
cactgctgatggcaagttgactgga

SEQ ID NO: 1899501 - DNA, 25 bp, Homo sapien
gctttccattgagatcatcagggag

SEQ ID NO: 1899502 - DNA, 25 bp, Homo sapien
tcataccagtcagagggaaacaggg

SEQ ID NO: 1899503 - DNA, 25 bp, Homo sapien
cagattcacggtctatggaacctca

SEQ ID NO: 1899504 - DNA, 25 bp, Homo sapien
agcagtggcaactcactgggatccc

SEQ ID NO: 1899505 - DNA, 25 bp, Homo sapien
ccgtgatagtagtaatagcaatagc

SEQ ID NO: 1899506 - DNA, 25 bp, Homo sapien
tattaactgtagtagccgtgatagt

SEQ ID NO: 1899507 - DNA, 25 bp, Homo sapien
cgtgatgcagaagcaactggaatcc

SEQ ID NO: 1899508 - DNA, 25 bp, Homo sapien
agaaagagcaaggacacgtgatgca

SEQ ID NO: 1899509 - DNA, 25 bp, Homo sapien
agagcaaggacacgtgatgcagaag

SEQ ID NO: 1899510 - DNA, 25 bp, Homo sapien
acacgtgatgcagaagcaactggaa

SEQ ID NO: 1899511 - DNA, 25 bp, Homo sapien
aatagcatgcctgagagaaggggga

SEQ ID NO: 1899512 - DNA, 25 bp, Homo sapien
gagtaatagcatgcctgagagaagg

SEQ ID NO: 1899513 - DNA, 25 bp, Homo sapien
aacgagtaatagcatgcctgagaga

SEQ ID NO: 1899514 - DNA, 25 bp, Homo sapien
tcaacgagtaatagcatgcctgaga

SEQ ID NO: 1899515 - DNA, 25 bp, Homo sapien
ctcttctttttaggcctctgaactt

SEQ ID NO: 1899516 - DNA, 25 bp, Homo sapien
atcctcttctttttaggcctctgaa

SEQ ID NO: 1899517 - DNA, 25 bp, Homo sapien
ctagaatcctcttctttttaggcct

SEQ ID NO: 1899518 - DNA, 25 bp, Homo sapien
ctgctttcctagaatcctcttcttt

SEQ ID NO: 1899519 - DNA, 25 bp, Homo sapien
tctcttctgacactgcgtcttctcc

SEQ ID NO: 1899520 - DNA, 25 bp, Homo sapien
cctctcttctgacactgcgtcttct

SEQ ID NO: 1899521 - DNA, 25 bp, Homo sapien
tcttctgacactgcgtcttctccat

SEQ ID NO: 1899522 - DNA, 25 bp, Homo sapien
ttcctctcttctgacactgcgtctt

SEQ ID NO: 1899523 - DNA, 25 bp, Homo sapien
gccgtttcttttgtgcctggtacca

SEQ ID NO: 1899524 - DNA, 25 bp, Homo sapien
ttaatgcaatatggtggcttgcttt

SEQ ID NO: 1899525 - DNA, 25 bp, Homo sapien
gagaccatcatgagggtgtctggtt

SEQ ID NO: 1899526 - DNA, 25 bp, Homo sapien
ctgtggcagcattagcagagatctc

SEQ ID NO: 1899527 - DNA, 25 bp, Homo sapien
gctccacgagtattagtaagaattg

SEQ ID NO: 1899528 - DNA, 25 bp, Homo sapien
taagaattgtgtagggcatccattt

SEQ ID NO: 1899529 - DNA, 25 bp, Homo sapien
tgctccacgagtattagtaagaatt

SEQ ID NO: 1899530 - DNA, 25 bp, Homo sapien
gtattagtaagaattgtgtagggca

SEQ ID NO: 1899531 - DNA, 25 bp, Homo sapien
ctgagtcgtatagtttgagtgagat

SEQ ID NO: 1899532 - DNA, 25 bp, Homo sapien
ctcagttcatcctctagttctagta

SEQ ID NO: 1899533 - DNA, 25 bp, Homo sapien
tgagtgagattgcccctattctcag

SEQ ID NO: 1899534 - DNA, 25 bp, Homo sapien
taaacacgatggtgcttagttctgg

SEQ ID NO: 1899535 - DNA, 25 bp, Homo sapien
ctcccttcacaatcccttgctccat

SEQ ID NO: 1899536 - DNA, 25 bp, Homo sapien
caatccgcagagaatcacagtattt

SEQ ID NO: 1899537 - DNA, 25 bp, Homo sapien
gaggaatgctattttaggataaatg

SEQ ID NO: 1899538 - DNA, 25 bp, Homo sapien
ggcagtagcagagtttgagtttcaa

SEQ ID NO: 1899539 - DNA, 25 bp, Homo sapien
ggttttccatgtttaggcagtagca

SEQ ID NO: 1899540 - DNA, 25 bp, Homo sapien
gctggaccctgagtgacatgtcagt

SEQ ID NO: 1899541 - DNA, 25 bp, Homo sapien
cttgtatggtgaggcagctggaccc

SEQ ID NO: 1899542 - DNA, 25 bp, Homo sapien
ggcagctggaccctgagtgacatgt

SEQ ID NO: 1899543 - DNA, 25 bp, Homo sapien
ggaccctgagtgacatgtcagtcat

SEQ ID NO: 1899544 - DNA, 25 bp, Homo sapien
cctgttgggataaagctctgggctt

SEQ ID NO: 1899545 - DNA, 25 bp, Homo sapien
cattgtgacataggataacacccct

SEQ ID NO: 1899546 - DNA, 25 bp, Homo sapien
tagatagagtggacatgtagattcc

SEQ ID NO: 1899547 - DNA, 25 bp, Homo sapien
gtccttaggttagagagagtgagct

SEQ ID NO: 1899548 - DNA, 25 bp, Homo sapien
tctgaagaacaactccaaattgggt

SEQ ID NO: 1899549 - DNA, 25 bp, Homo sapien
tagtttcactgatagagtcacaagc

SEQ ID NO: 1899550 - DNA, 25 bp, Homo sapien
cagtgtttgtcttgcctgtggtcaa

SEQ ID NO: 1899551 - DNA, 25 bp, Homo sapien
taaacattgccttaatcaactatgg

SEQ ID NO: 1899552 - DNA, 25 bp, Homo sapien
taaatccttaacattgccatgtgag

SEQ ID NO: 1899553 - DNA, 25 bp, Homo sapien
aaacatgccctgtacttattgtgtg

SEQ ID NO: 1899554 - DNA, 25 bp, Homo sapien
tggacagtgacctattaaaaacatg
